United States Patent Application Publication US 2007/0048756 A1 - sequence listing, part 5

SEQ ID NO: 144451 - DNA, 33 bp, Homo sapien
agcttgcactttcccaaattctcaagtaccctt

SEQ ID NO: 144452 - DNA, 33 bp, Homo sapien
agcttgcactttcccacattctcaagtaccctt

SEQ ID NO: 144453 - DNA, 33 bp, Homo sapien
tgattctcagctatgacggaaaaggatttgact

SEQ ID NO: 144454 - DNA, 33 bp, Homo sapien
tgattctcagctatgatggaaaaggatttgact

SEQ ID NO: 144455 - DNA, 33 bp, Homo sapien
gagttctgccatatagccacctgtgtttcatag

SEQ ID NO: 144456 - DNA, 33 bp, Homo sapien
gagttctgccatatagtcacctgtgtttcatag

SEQ ID NO: 144457 - DNA, 33 bp, Homo sapien
atattcaatgaaattcagaagatgtaagacaag

SEQ ID NO: 144458 - DNA, 33 bp, Homo sapien
atattcaatgaaattcggaagatgtaagacaag

SEQ ID NO: 144459 - DNA, 33 bp, Homo sapien
aattcagctcagacaaaggtggacaaatcagaa

SEQ ID NO: 144460 - DNA, 33 bp, Homo sapien
aattcagctcagacaagggtggacaaatcagaa

SEQ ID NO: 144461 - DNA, 33 bp, Homo sapien
caacaattgaacaaatgattgaacaacactgat

SEQ ID NO: 144462 - DNA, 33 bp, Homo sapien
caacaattgaacaaattattgaacaacactgat

SEQ ID NO: 144463 - DNA, 33 bp, Homo sapien
agagagaaaattattgaacaaactattgaattc

SEQ ID NO: 144464 - DNA, 33 bp, Homo sapien
agagagaaaattattggacaaactattgaattc

SEQ ID NO: 144465 - DNA, 33 bp, Homo sapien
tttcacttctagacaccatgtggtcctttttca

SEQ ID NO: 144466 - DNA, 33 bp, Homo sapien
tttcacttctagacactatgtggtcctttttca

SEQ ID NO: 144467 - DNA, 33 bp, Homo sapien
gggaccttccctccccaactcggatcaccaagg

SEQ ID NO: 144468 - DNA, 33 bp, Homo sapien
gggaccttccctcccccactcggatcaccaagg

SEQ ID NO: 144469 - DNA, 33 bp, Homo sapien
gagttagacacagtccaagatttaaaaccatcc

SEQ ID NO: 144470 - DNA, 33 bp, Homo sapien
gagttagacacagtccgagatttaaaaccatcc

SEQ ID NO: 144471 - DNA, 33 bp, Homo sapien
tgtaaggagccgttcaacagaatcctatggcct

SEQ ID NO: 144472 - DNA, 33 bp, Homo sapien
tgtaaggagccgttcagcagaatcctatggcct

SEQ ID NO: 144473 - DNA, 33 bp, Homo sapien
atttgcacaaccaaccagcacaaaggtatttag

SEQ ID NO: 144474 - DNA, 33 bp, Homo sapien
atttgcacaaccaacccgcacaaaggtatttag

SEQ ID NO: 144475 - DNA, 33 bp, Homo sapien
gcatgaagcctgccaacaagggcgtgttccttc

SEQ ID NO: 144476 - DNA, 33 bp, Homo sapien
gcatgaagcctgccaagaagggcgtgttccttc

SEQ ID NO: 144477 - DNA, 33 bp, Homo sapien
tgatttgtctccttcaaggtacttatcaaaact

SEQ ID NO: 144478 - DNA, 33 bp, Homo sapien
tgatttgtctccttcagggtacttatcaaaact

SEQ ID NO: 144479 - DNA, 33 bp, Homo sapien
ctgatccaaacttagaagtagggcaattcattc

SEQ ID NO: 144480 - DNA, 33 bp, Homo sapien
ctgatccaaacttagaggtagggcaattcattc

SEQ ID NO: 144481 - DNA, 33 bp, Homo sapien
aggagacatcaacttaaaagagtcatttgactt

SEQ ID NO: 144482 - DNA, 33 bp, Homo sapien
aggagacatcaacttagaagagtcatttgactt

SEQ ID NO: 144483 - DNA, 33 bp, Homo sapien
ggtcatcagaataatcaatacttgtctccaaca

SEQ ID NO: 144484 - DNA, 33 bp, Homo sapien
ggtcatcagaataatcgatacttgtctccaaca

SEQ ID NO: 144485 - DNA, 33 bp, Homo sapien
gccgagcactattccacgtgttgagattcagtg

SEQ ID NO: 144486 - DNA, 33 bp, Homo sapien
gccgagcactattccatgtgttgagattcagtg

SEQ ID NO: 144487 - DNA, 33 bp, Homo sapien
ggcacctggatagagaggcctgaggcttggcag

SEQ ID NO: 144488 - DNA, 33 bp, Homo sapien
ggcacctggatagagatgcctgaggcttggcag

SEQ ID NO: 144489 - DNA, 33 bp, Homo sapien
tgcaggaagacacatgacaccaggttcataaat

SEQ ID NO: 144490 - DNA, 33 bp, Homo sapien
tgcaggaagacacatggcaccaggttcataaat

SEQ ID NO: 144491 - DNA, 33 bp, Homo sapien
ggcagctgcgggcgtccgaccatgtaccacgga

SEQ ID NO: 144492 - DNA, 33 bp, Homo sapien
ggcagctgcgggcgtcggaccatgtaccacgga

SEQ ID NO: 144493 - DNA, 33 bp, Homo sapien
tcgtcctctccataagaaagaagtgctcagctc

SEQ ID NO: 144494 - DNA, 33 bp, Homo sapien
tcgtcctctccataaggaagaagtgctcagctc

SEQ ID NO: 144495 - DNA, 33 bp, Homo sapien
ccagaatcacaccactaaacaaacaaaaggcaa

SEQ ID NO: 144496 - DNA, 33 bp, Homo sapien
ccagaatcacaccacttaacaaacaaaaggcaa

SEQ ID NO: 144497 - DNA, 33 bp, Homo sapien
agcccaaagaccaagacgtcgggtttgtccttg

SEQ ID NO: 144498 - DNA, 33 bp, Homo sapien
agcccaaagaccaagatgtcgggtttgtccttg

SEQ ID NO: 144499 - DNA, 33 bp, Homo sapien
agcagcaggctctgcactcagggctttgctgtt

SEQ ID NO: 144500 - DNA, 33 bp, Homo sapien
agcagcaggctctgcattcagggctttgctgtt

SEQ ID NO: 144501 - DNA, 33 bp, Homo sapien
ttttccaaatgttcaccaggaaaggatgttaca

SEQ ID NO: 144502 - DNA, 33 bp, Homo sapien
ttttccaaatgttcactaggaaaggatgttaca

SEQ ID NO: 144503 - DNA, 33 bp, Homo sapien
cagcagccgcaagaccactctctattgcttttt

SEQ ID NO: 144504 - DNA, 33 bp, Homo sapien
cagcagccgcaagaccgctctctattgcttttt

SEQ ID NO: 144505 - DNA, 33 bp, Homo sapien
cctgcagtctgcctctcactaaatgtctgggtt

SEQ ID NO: 144506 - DNA, 33 bp, Homo sapien
cctgcagtctgcctcttactaaatgtctgggtt

SEQ ID NO: 144507 - DNA, 33 bp, Homo sapien
tacctcactggccttgcacacccttcctggagt

SEQ ID NO: 144508 - DNA, 33 bp, Homo sapien
tacctcactggccttgtacacccttcctggagt

SEQ ID NO: 144509 - DNA, 33 bp, Homo sapien
catggaataaaccaaacgatggggacaaactag

SEQ ID NO: 144510 - DNA, 33 bp, Homo sapien
catggaataaaccaaaggatggggacaaactag

SEQ ID NO: 144511 - DNA, 33 bp, Homo sapien
tttatttaccaaaataccgtatttccatgtttg

SEQ ID NO: 144512 - DNA, 33 bp, Homo sapien
tttatttaccaaaatagcgtatttccatgtttg

SEQ ID NO: 144513 - DNA, 33 bp, Homo sapien
acctggcccatcatagacaaaataacctctgaa

SEQ ID NO: 144514 - DNA, 33 bp, Homo sapien
acctggcccatcatagccaaaataacctctgaa

SEQ ID NO: 144515 - DNA, 33 bp, Homo sapien
gaagggcaacctagcgcccaggagaggtggcct

SEQ ID NO: 144516 - DNA, 33 bp, Homo sapien
gaagggcaacctagcgtccaggagaggtggcct

SEQ ID NO: 144517 - DNA, 33 bp, Homo sapien
ctgagaaatgtggagaatagaagcatcaaaatg

SEQ ID NO: 144518 - DNA, 33 bp, Homo sapien
ctgagaaatgtggagagtagaagcatcaaaatg

SEQ ID NO: 144519 - DNA, 33 bp, Homo sapien
agctggctgacctatgacagagttgcctccttt

SEQ ID NO: 144520 - DNA, 33 bp, Homo sapien
agctggctgacctatggcagagttgcctccttt

SEQ ID NO: 144521 - DNA, 33 bp, Homo sapien
ttttcttacagaaaacgacgttggaggacttag

SEQ ID NO: 144522 - DNA, 33 bp, Homo sapien
ttttcttacagaaaactacgttggaggacttag

SEQ ID NO: 144523 - DNA, 33 bp, Homo sapien
atggtagttgaacatacctggcaacttctcctt

SEQ ID NO: 144524 - DNA, 33 bp, Homo sapien
atggtagttgaacatatctggcaacttctcctt

SEQ ID NO: 144525 - DNA, 33 bp, Homo sapien
ccctcatatacttggacgaatgaaaaagagaag

SEQ ID NO: 144526 - DNA, 33 bp, Homo sapien
ccctcatatacttggatgaatgaaaaagagaag

SEQ ID NO: 144527 - DNA, 33 bp, Homo sapien
gtgagtgagatgactacgataaaaaaagtatcc

SEQ ID NO: 144528 - DNA, 33 bp, Homo sapien
gtgagtgagatgactatgataaaaaaagtatcc

SEQ ID NO: 144529 - DNA, 33 bp, Homo sapien
tgactaatcaatacacgacttattgtctgctca

SEQ ID NO: 144530 - DNA, 33 bp, Homo sapien
tgactaatcaatacactacttattgtctgctca

SEQ ID NO: 144531 - DNA, 33 bp, Homo sapien
cgagccaatctcagaaatgcaaatgacgcagaa

SEQ ID NO: 144532 - DNA, 33 bp, Homo sapien
cgagccaatctcagaactgcaaatgacgcagaa

SEQ ID NO: 144533 - DNA, 33 bp, Homo sapien
caactaaaccctgtaactgaaatgcttcacaag

SEQ ID NO: 144534 - DNA, 33 bp, Homo sapien
caactaaaccctgtaagtgaaatgcttcacaag

SEQ ID NO: 144535 - DNA, 33 bp, Homo sapien
tgggctgaaataaaacccaaccaatcagctctt

SEQ ID NO: 144536 - DNA, 33 bp, Homo sapien
tgggctgaaataaaactcaaccaatcagctctt

SEQ ID NO: 144537 - DNA, 33 bp, Homo sapien
gtctgtgtgggtgtaaaccaaaatattgaccat

SEQ ID NO: 144538 - DNA, 33 bp, Homo sapien
gtctgtgtgggtgtaatccaaaatattgaccat

SEQ ID NO: 144539 - DNA, 33 bp, Homo sapien
gccccatgcactgtgacggaggttatttctctg

SEQ ID NO: 144540 - DNA, 33 bp, Homo sapien
gccccatgcactgtgatggaggttatttctctg

SEQ ID NO: 144541 - DNA, 33 bp, Homo sapien
ggctgttggcaccatccaacaaaaggcaatgtg

SEQ ID NO: 144542 - DNA, 33 bp, Homo sapien
ggctgttggcaccatctaacaaaaggcaatgtg

SEQ ID NO: 144543 - DNA, 33 bp, Homo sapien
tgcccagccggcactgaaagctaaggcaaatca

SEQ ID NO: 144544 - DNA, 33 bp, Homo sapien
tgcccagccggcactgcaagctaaggcaaatca

SEQ ID NO: 144545 - DNA, 33 bp, Homo sapien
agataaaaagagaaaacgtattggttgtgctga

SEQ ID NO: 144546 - DNA, 33 bp, Homo sapien
agataaaaagagaaaatgtattggttgtgctga

SEQ ID NO: 144547 - DNA, 33 bp, Homo sapien
gtccaactggtcaaccaggattgtcatcaacaa

SEQ ID NO: 144548 - DNA, 33 bp, Homo sapien
gtccaactggtcaaccgggattgtcatcaacaa

SEQ ID NO: 144549 - DNA, 33 bp, Homo sapien
cggttcctgctctcacaggcatactctggtgga

SEQ ID NO: 144550 - DNA, 33 bp, Homo sapien
cggttcctgctctcacgggcatactctggtgga

SEQ ID NO: 144551 - DNA, 33 bp, Homo sapien
ctgggctggtaaaaacactgaatccaattgaaa

SEQ ID NO: 144552 - DNA, 33 bp, Homo sapien
ctgggctggtaaaaacgctgaatccaattgaaa

SEQ ID NO: 144553 - DNA, 33 bp, Homo sapien
gacaggagctgaactccacacagaggtggacaa

SEQ ID NO: 144554 - DNA, 33 bp, Homo sapien
gacaggagctgaactctacacagaggtggacaa

SEQ ID NO: 144555 - DNA, 33 bp, Homo sapien
gcctcctgctggcttccaggagttctcccaaaa

SEQ ID NO: 144556 - DNA, 33 bp, Homo sapien
gcctcctgctggcttcgaggagttctcccaaaa

SEQ ID NO: 144557 - DNA, 33 bp, Homo sapien
tggaccaaaagcgtgcacagggctgaagttgca

SEQ ID NO: 144558 - DNA, 33 bp, Homo sapien
tggaccaaaagcgtgctcagggctgaagttgca

SEQ ID NO: 144559 - DNA, 33 bp, Homo sapien
tactgtatcacgaacaatatcatgaatagtgac

SEQ ID NO: 144560 - DNA, 33 bp, Homo sapien
tactgtatcacgaacagtatcatgaatagtgac

SEQ ID NO: 144561 - DNA, 33 bp, Homo sapien
cagtggagctctgtacaagggactgaccatgac

SEQ ID NO: 144562 - DNA, 33 bp, Homo sapien
cagtggagctctgtactagggactgaccatgac

SEQ ID NO: 144563 - DNA, 33 bp, Homo sapien
cccattctcagagtgacggtcagattaatcacc

SEQ ID NO: 144564 - DNA, 33 bp, Homo sapien
cccattctcagagtgagggtcagattaatcacc

SEQ ID NO: 144565 - DNA, 33 bp, Homo sapien
ttattgtgaatatgaaattagttactacagatg

SEQ ID NO: 144566 - DNA, 33 bp, Homo sapien
ttattgtgaatatgaagttagttactacagatg

SEQ ID NO: 144567 - DNA, 33 bp, Homo sapien
cctggctgcaagggaaaagcaactaatgtttga

SEQ ID NO: 144568 - DNA, 33 bp, Homo sapien
cctggctgcaagggaagagcaactaatgtttga

SEQ ID NO: 144569 - DNA, 33 bp, Homo sapien
tgacaccatggtgtagccaaagaatttagcaac

SEQ ID NO: 144570 - DNA, 33 bp, Homo sapien
tgacaccatggtgtagtcaaagaatttagcaac

SEQ ID NO: 144571 - DNA, 33 bp, Homo sapien
ctggtagtctcacaacggttcttgctccccatt

SEQ ID NO: 144572 - DNA, 33 bp, Homo sapien
ctggtagtctcacaactgttcttgctccccatt

SEQ ID NO: 144573 - DNA, 33 bp, Homo sapien
taacggcacacgcttcaaatgggttttgtaatg

SEQ ID NO: 144574 - DNA, 33 bp, Homo sapien
taacggcacacgcttcgaatgggttttgtaatg

SEQ ID NO: 144575 - DNA, 33 bp, Homo sapien
tcgtgtgtcctcccaaaggcaccggcttcgaga

SEQ ID NO: 144576 - DNA, 33 bp, Homo sapien
tcgtgtgtcctcccaatggcaccggcttcgaga

SEQ ID NO: 144577 - DNA, 33 bp, Homo sapien
tcaaccaacagtttcaagtcaggtgcagagtaa

SEQ ID NO: 144578 - DNA, 33 bp, Homo sapien
tcaaccaacagtttcatgtcaggtgcagagtaa

SEQ ID NO: 144579 - DNA, 33 bp, Homo sapien
ctttctttctctctaaagttgcctgactttggt

SEQ ID NO: 144580 - DNA, 33 bp, Homo sapien
ctttctttctctctaaggttgcctgactttggt

SEQ ID NO: 144581 - DNA, 33 bp, Homo sapien
tacctaaatattttgaagtctttactcagccat

SEQ ID NO: 144582 - DNA, 33 bp, Homo sapien
tacctaaatattttgatgtctttactcagccat

SEQ ID NO: 144583 - DNA, 33 bp, Homo sapien
catctacttctggtaaagatactgggaacattg

SEQ ID NO: 144584 - DNA, 33 bp, Homo sapien
catctacttctggtaatgatactgggaacattg

SEQ ID NO: 144585 - DNA, 33 bp, Homo sapien
caaacaatgtccagtaaaaatacgttaaatatg

SEQ ID NO: 144586 - DNA, 33 bp, Homo sapien
caaacaatgtccagtacaaatacgttaaatatg

SEQ ID NO: 144587 - DNA, 33 bp, Homo sapien
actgagtctcagagaacgtgaaggactcaccag

SEQ ID NO: 144588 - DNA, 33 bp, Homo sapien
actgagtctcagagaatgtgaaggactcaccag

SEQ ID NO: 144589 - DNA, 33 bp, Homo sapien
agttcctgggaaatcacaaccgcaggagatctt

SEQ ID NO: 144590 - DNA, 33 bp, Homo sapien
agttcctgggaaatcataaccgcaggagatctt

SEQ ID NO: 144591 - DNA, 33 bp, Homo sapien
gacagcactggatcaacggaaaaggaaggagag

SEQ ID NO: 144592 - DNA, 33 bp, Homo sapien
gacagcactggatcaatggaaaaggaaggagag

SEQ ID NO: 144593 - DNA, 33 bp, Homo sapien
gggctgtgatgggaccaaatgttcagtccattt

SEQ ID NO: 144594 - DNA, 33 bp, Homo sapien
gggctgtgatgggaccgaatgttcagtccattt

SEQ ID NO: 144595 - DNA, 33 bp, Homo sapien
atatccaggataatcaagttgttttagaagatt

SEQ ID NO: 144596 - DNA, 33 bp, Homo sapien
atatccaggataatcaggttgttttagaagatt

SEQ ID NO: 144597 - DNA, 33 bp, Homo sapien
gttcccaaagccctaggagataatgccttagag

SEQ ID NO: 144598 - DNA, 33 bp, Homo sapien
gttcccaaagccctagtagataatgccttagag

SEQ ID NO: 144599 - DNA, 33 bp, Homo sapien
aacatagctaactgcaaattagttacgaaaggg

SEQ ID NO: 144600 - DNA, 33 bp, Homo sapien
aacatagctaactgcagattagttacgaaaggg

SEQ ID NO: 144601 - DNA, 33 bp, Homo sapien
tttcttgtcattcgccacaatcgtagatgcacc

SEQ ID NO: 144602 - DNA, 33 bp, Homo sapien
tttcttgtcattcgccgcaatcgtagatgcacc

SEQ ID NO: 144603 - DNA, 33 bp, Homo sapien
gaagggaacaaattgaagccatgaatgtaattg

SEQ ID NO: 144604 - DNA, 33 bp, Homo sapien
gaagggaacaaattgaggccatgaatgtaattg

SEQ ID NO: 144605 - DNA, 33 bp, Homo sapien
taccagaaatagaaagcaacattgcagaatgat

SEQ ID NO: 144606 - DNA, 33 bp, Homo sapien
taccagaaatagaaaggaacattgcagaatgat

SEQ ID NO: 144607 - DNA, 33 bp, Homo sapien
aagtaatcaatggaacaatagataatcaatcag

SEQ ID NO: 144608 - DNA, 33 bp, Homo sapien
aagtaatcaatggaacgatagataatcaatcag

SEQ ID NO: 144609 - DNA, 33 bp, Homo sapien
tccaagggcatatggaacattgaccaagagaga

SEQ ID NO: 144610 - DNA, 33 bp, Homo sapien
tccaagggcatatggagcattgaccaagagaga

SEQ ID NO: 144611 - DNA, 33 bp, Homo sapien
tttctctttgaaccaaggaattttggaaatatg

SEQ ID NO: 144612 - DNA, 33 bp, Homo sapien
tttctctttgaaccaatgaattttggaaatatg

SEQ ID NO: 144613 - DNA, 33 bp, Homo sapien
aatagaaggaaaaggcacaattttaggaatgaa

SEQ ID NO: 144614 - DNA, 33 bp, Homo sapien
aatagaaggaaaaggctcaattttaggaatgaa

SEQ ID NO: 144615 - DNA, 33 bp, Homo sapien
ttatatgtggtatgaacgtcttttcttagtaca

SEQ ID NO: 144616 - DNA, 33 bp, Homo sapien
ttatatgtggtatgaatgtcttttcttagtaca

SEQ ID NO: 144617 - DNA, 33 bp, Homo sapien
actgtagcactaatcacgtgagatgtccaaacc

SEQ ID NO: 144618 - DNA, 33 bp, Homo sapien
actgtagcactaatcatgtgagatgtccaaacc

SEQ ID NO: 144619 - DNA, 33 bp, Homo sapien
tttggctgcttagtcacctacctgcaagaatgt

SEQ ID NO: 144620 - DNA, 33 bp, Homo sapien
tttggctgcttagtcatctacctgcaagaatgt

SEQ ID NO: 144621 - DNA, 33 bp, Homo sapien
tcctaggcatatacccaactaaaatgagttgct

SEQ ID NO: 144622 - DNA, 33 bp, Homo sapien
tcctaggcatataccccactaaaatgagttgct

SEQ ID NO: 144623 - DNA, 33 bp, Homo sapien
ttgaaaaattttgccaaatccactttctgttta

SEQ ID NO: 144624 - DNA, 33 bp, Homo sapien
ttgaaaaattttgccatatccactttctgttta

SEQ ID NO: 144625 - DNA, 33 bp, Homo sapien
tttcatctaaaaatgaccctcggattaattgat

SEQ ID NO: 144626 - DNA, 33 bp, Homo sapien
tttcatctaaaaatgatcctcggattaattgat

SEQ ID NO: 144627 - DNA, 33 bp, Homo sapien
tggctggggctacctccagaagagcatcacctt

SEQ ID NO: 144628 - DNA, 33 bp, Homo sapien
tggctggggctacctctagaagagcatcacctt

SEQ ID NO: 144629 - DNA, 33 bp, Homo sapien
gaagtcattccgctcacgctggggaccaggggg

SEQ ID NO: 144630 - DNA, 33 bp, Homo sapien
gaagtcattccgctcatgctggggaccaggggg

SEQ ID NO: 144631 - DNA, 33 bp, Homo sapien
gcaaggtgccaaaagaaaagacacactccagtt

SEQ ID NO: 144632 - DNA, 33 bp, Homo sapien
gcaaggtgccaaaagagaagacacactccagtt

SEQ ID NO: 144633 - DNA, 33 bp, Homo sapien
gtggcagcacttccgtcaccagctcctccaggt

SEQ ID NO: 144634 - DNA, 33 bp, Homo sapien
gtggcagcacttccgttaccagctcctccaggt

SEQ ID NO: 144635 - DNA, 33 bp, Homo sapien
ttgtggaatgttaggaagtgagcttaagggcaa

SEQ ID NO: 144636 - DNA, 33 bp, Homo sapien
ttgtggaatgttaggatgtgagcttaagggcaa

SEQ ID NO: 144637 - DNA, 33 bp, Homo sapien
gggacttttcaggtaccagcacttaaaggcaga

SEQ ID NO: 144638 - DNA, 33 bp, Homo sapien
gggacttttcaggtactagcacttaaaggcaga

SEQ ID NO: 144639 - DNA, 33 bp, Homo sapien
tgacatgttgcagtcaagtggccatcaggtcac

SEQ ID NO: 144640 - DNA, 33 bp, Homo sapien
tgacatgttgcagtcacgtggccatcaggtcac

SEQ ID NO: 144641 - DNA, 33 bp, Homo sapien
ccagcatccctcaccacgaagtcctgaactccg

SEQ ID NO: 144642 - DNA, 33 bp, Homo sapien
ccagcatccctcaccatgaagtcctgaactccg

SEQ ID NO: 144643 - DNA, 33 bp, Homo sapien
tcaggaccctacccagcctgcattatccaagtc

SEQ ID NO: 144644 - DNA, 33 bp, Homo sapien
tcaggaccctacccaggctgcattatccaagtc

SEQ ID NO: 144645 - DNA, 33 bp, Homo sapien
agcaaattaacctgaaatgactacatagctttc

SEQ ID NO: 144646 - DNA, 33 bp, Homo sapien
agcaaattaacctgaattgactacatagctttc

SEQ ID NO: 144647 - DNA, 33 bp, Homo sapien
actttgaatgtgaaatcagaattgtcaaatatc

SEQ ID NO: 144648 - DNA, 33 bp, Homo sapien
actttgaatgtgaaattagaattgtcaaatatc

SEQ ID NO: 144649 - DNA, 33 bp, Homo sapien
ggcaccacgtacctagaataatgtctctcactg

SEQ ID NO: 144650 - DNA, 33 bp, Homo sapien
ggcaccacgtacctaggataatgtctctcactg

SEQ ID NO: 144651 - DNA, 33 bp, Homo sapien
tgtatgcaagtacacaatagtgcaagacggggc

SEQ ID NO: 144652 - DNA, 33 bp, Homo sapien
tgtatgcaagtacacagtagtgcaagacggggc

SEQ ID NO: 144653 - DNA, 33 bp, Homo sapien
gtaaatagttctgcaacgactgcaaagaaaaaa

SEQ ID NO: 144654 - DNA, 33 bp, Homo sapien
gtaaatagttctgcaatgactgcaaagaaaaaa

SEQ ID NO: 144655 - DNA, 33 bp, Homo sapien
aggactacacctttcacgaatgttctgctaacc

SEQ ID NO: 144656 - DNA, 33 bp, Homo sapien
aggactacacctttcatgaatgttctgctaacc

SEQ ID NO: 144657 - DNA, 33 bp, Homo sapien
tttcttactagattctaacagcttactggcatt

SEQ ID NO: 144658 - DNA, 33 bp, Homo sapien
tttcttactagattctcacagcttactggcatt

SEQ ID NO: 144659 - DNA, 33 bp, Homo sapien
gtcagatgcagattgacaacttggtttgtaaag

SEQ ID NO: 144660 - DNA, 33 bp, Homo sapien
gtcagatgcagattgataacttggtttgtaaag

SEQ ID NO: 144661 - DNA, 33 bp, Homo sapien
gctgattcttctggccacaagcccacattgctt

SEQ ID NO: 144662 - DNA, 33 bp, Homo sapien
gctgattcttctggccgcaagcccacattgctt

SEQ ID NO: 144663 - DNA, 33 bp, Homo sapien
gagcaggtgtcttcccactggactaagcaggga

SEQ ID NO: 144664 - DNA, 33 bp, Homo sapien
gagcaggtgtcttcccgctggactaagcaggga

SEQ ID NO: 144665 - DNA, 33 bp, Homo sapien
acaacaaatctgtttaagatcagtacagacatt

SEQ ID NO: 144666 - DNA, 33 bp, Homo sapien
acaacaaatctgtttatgatcagtacagacatt

SEQ ID NO: 144667 - DNA, 33 bp, Homo sapien
cttatttggtgcatcccgaaacctaggtacaaa

SEQ ID NO: 144668 - DNA, 33 bp, Homo sapien
cttatttggtgcatcctgaaacctaggtacaaa

SEQ ID NO: 144669 - DNA, 33 bp, Homo sapien
tatccacatgatctgacggaaaaattgattatt

SEQ ID NO: 144670 - DNA, 33 bp, Homo sapien
tatccacatgatctgatggaaaaattgattatt

SEQ ID NO: 144671 - DNA, 33 bp, Homo sapien
gggcttcttggtgagacacaatcagacttggtg

SEQ ID NO: 144672 - DNA, 33 bp, Homo sapien
gggcttcttggtgagagacaatcagacttggtg

SEQ ID NO: 144673 - DNA, 33 bp, Homo sapien
cagggatgatgctgaaatcaaagctgccctgag

SEQ ID NO: 144674 - DNA, 33 bp, Homo sapien
cagggatgatgctgaagtcaaagctgccctgag

SEQ ID NO: 144675 - DNA, 33 bp, Homo sapien
ttccctcttgccagtaaaacatttagtgatggc

SEQ ID NO: 144676 - DNA, 33 bp, Homo sapien
ttccctcttgccagtagaacatttagtgatggc

SEQ ID NO: 144677 - DNA, 33 bp, Homo sapien
tctcttgcagtcgcacggtgagttctcactctg

SEQ ID NO: 144678 - DNA, 33 bp, Homo sapien
tctcttgcagtcgcactgtgagttctcactctg

SEQ ID NO: 144679 - DNA, 33 bp, Homo sapien
ctggactgtgtttggcaagcgatccccacacca

SEQ ID NO: 144680 - DNA, 33 bp, Homo sapien
ctggactgtgtttggcgagcgatccccacacca

SEQ ID NO: 144681 - DNA, 33 bp, Homo sapien
aaatagatcaaaatcaacttgtgctcttcaagg

SEQ ID NO: 144682 - DNA, 33 bp, Homo sapien
aaatagatcaaaatcaccttgtgctcttcaagg

SEQ ID NO: 144683 - DNA, 33 bp, Homo sapien
tctcttaaaatcaggcaaatatcacaatcgata

SEQ ID NO: 144684 - DNA, 33 bp, Homo sapien
tctcttaaaatcaggcgaatatcacaatcgata

SEQ ID NO: 144685 - DNA, 33 bp, Homo sapien
ctgtgaccagttaacaactccttcatgaactgt

SEQ ID NO: 144686 - DNA, 33 bp, Homo sapien
ctgtgaccagttaacagctccttcatgaactgt

SEQ ID NO: 144687 - DNA, 33 bp, Homo sapien
cttttgttgttgagcaacttcctggcattggcc

SEQ ID NO: 144688 - DNA, 33 bp, Homo sapien
cttttgttgttgagcatcttcctggcattggcc

SEQ ID NO: 144689 - DNA, 33 bp, Homo sapien
aacagaaaccagagaaagtaagagacttggaca

SEQ ID NO: 144690 - DNA, 33 bp, Homo sapien
aacagaaaccagagaaggtaagagacttggaca

SEQ ID NO: 144691 - DNA, 33 bp, Homo sapien
tcaggaattatccttcaccttagcagcaaatgg

SEQ ID NO: 144692 - DNA, 33 bp, Homo sapien
tcaggaattatccttcgccttagcagcaaatgg

SEQ ID NO: 144693 - DNA, 33 bp, Homo sapien
gaaaagagcccgtttcacaggtgcaggtgtttg

SEQ ID NO: 144694 - DNA, 33 bp, Homo sapien
gaaaagagcccgtttcgcaggtgcaggtgtttg

SEQ ID NO: 144695 - DNA, 33 bp, Homo sapien
cttttgagtgggaatacagcagatctaaagagg

SEQ ID NO: 144696 - DNA, 33 bp, Homo sapien
cttttgagtgggaatatagcagatctaaagagg

SEQ ID NO: 144697 - DNA, 33 bp, Homo sapien
catatcatgtaggacaacaacaaacactagatg

SEQ ID NO: 144698 - DNA, 33 bp, Homo sapien
catatcatgtaggacatcaacaaacactagatg

SEQ ID NO: 144699 - DNA, 33 bp, Homo sapien
ggccctccatgtgcaaagagctttaagagatct

SEQ ID NO: 144700 - DNA, 33 bp, Homo sapien
ggccctccatgtgcaaggagctttaagagatct

SEQ ID NO: 144701 - DNA, 33 bp, Homo sapien
tgctggactcttggcacctgggcagccctttat

SEQ ID NO: 144702 - DNA, 33 bp, Homo sapien
tgctggactcttggcatctgggcagccctttat

SEQ ID NO: 144703 - DNA, 33 bp, Homo sapien
aattatgacattacaaaagttaggccatatctg

SEQ ID NO: 144704 - DNA, 33 bp, Homo sapien
aattatgacattacaacagttaggccatatctg

SEQ ID NO: 144705 - DNA, 33 bp, Homo sapien
cagtgacctgaagctgaagaacaacgggtggct

SEQ ID NO: 144706 - DNA, 33 bp, Homo sapien
cagtgacctgaagctgtagaacaacgggtggct

SEQ ID NO: 144707 - DNA, 33 bp, Homo sapien
tagatatagatggatacggtcccgaatagagac

SEQ ID NO: 144708 - DNA, 33 bp, Homo sapien
tagatatagatggatagggtcccgaatagagac

SEQ ID NO: 144709 - DNA, 33 bp, Homo sapien
tattttccttcatgcccattgccagaggatcaa

SEQ ID NO: 144710 - DNA, 33 bp, Homo sapien
tattttccttcatgccgattgccagaggatcaa

SEQ ID NO: 144711 - DNA, 33 bp, Homo sapien
ctcttgggacaaaaaccctagtcccacggtact

SEQ ID NO: 144712 - DNA, 33 bp, Homo sapien
ctcttgggacaaaaacgctagtcccacggtact

SEQ ID NO: 144713 - DNA, 33 bp, Homo sapien
taccaccatgtgagaaagtccaaacttgcttcc

SEQ ID NO: 144714 - DNA, 33 bp, Homo sapien
taccaccatgtgagaaggtccaaacttgcttcc

SEQ ID NO: 144715 - DNA, 33 bp, Homo sapien
cctcttccctgatatcacgtgcacacctgacac

SEQ ID NO: 144716 - DNA, 33 bp, Homo sapien
cctcttccctgatatcgcgtgcacacctgacac

SEQ ID NO: 144717 - DNA, 33 bp, Homo sapien
ctcatttcccttaggtcacaggatatcagcggg

SEQ ID NO: 144718 - DNA, 33 bp, Homo sapien
ctcatttcccttaggttacaggatatcagcggg

SEQ ID NO: 144719 - DNA, 33 bp, Homo sapien
gaagagtttcccatccccaacccgtggagcagg

SEQ ID NO: 144720 - DNA, 33 bp, Homo sapien
gaagagtttcccatccgcaacccgtggagcagg

SEQ ID NO: 144721 - DNA, 33 bp, Homo sapien
aaatgtcaaaaagagacactgtaagaatatggg

SEQ ID NO: 144722 - DNA, 33 bp, Homo sapien
aaatgtcaaaaagagatactgtaagaatatggg

SEQ ID NO: 144723 - DNA, 33 bp, Homo sapien
ctaactgcatcagatcagataatggacggatac

SEQ ID NO: 144724 - DNA, 33 bp, Homo sapien
ctaactgcatcagatcggataatggacggatac

SEQ ID NO: 144725 - DNA, 33 bp, Homo sapien
ttcctccatctcaaaacgtgcagtccatgcaca

SEQ ID NO: 144726 - DNA, 33 bp, Homo sapien
ttcctccatctcaaaatgtgcagtccatgcaca

SEQ ID NO: 144727 - DNA, 33 bp, Homo sapien
acacaaatgaccacagaaaggagtaggtagtcg

SEQ ID NO: 144728 - DNA, 33 bp, Homo sapien
acacaaatgaccacaggaaggagtaggtagtcg

SEQ ID NO: 144729 - DNA, 33 bp, Homo sapien
ccctcctgcattgtaaaggaaggcttttgggtc

SEQ ID NO: 144730 - DNA, 33 bp, Homo sapien
ccctcctgcattgtaacggaaggcttttgggtc

SEQ ID NO: 144731 - DNA, 33 bp, Homo sapien
ttcagctggagcaataacttgagataagcaaat

SEQ ID NO: 144732 - DNA, 33 bp, Homo sapien
ttcagctggagcaatagcttgagataagcaaat

SEQ ID NO: 144733 - DNA, 33 bp, Homo sapien
gataccaatgtaaatgacagatgtatcaaagac

SEQ ID NO: 144734 - DNA, 33 bp, Homo sapien
gataccaatgtaaatgccagatgtatcaaagac

SEQ ID NO: 144735 - DNA, 33 bp, Homo sapien
actggaacaaacaggtaaatgctcttcatctac

SEQ ID NO: 144736 - DNA, 33 bp, Homo sapien
actggaacaaacaggttaatgctcttcatctac

SEQ ID NO: 144737 - DNA, 33 bp, Homo sapien
ctttgtccacccatcccgaaggtcattgaaagg

SEQ ID NO: 144738 - DNA, 33 bp, Homo sapien
ctttgtccacccatcctgaaggtcattgaaagg

SEQ ID NO: 144739 - DNA, 33 bp, Homo sapien
ggaaaggtgcttctgacggggaaaaagatgcta

SEQ ID NO: 144740 - DNA, 33 bp, Homo sapien
ggaaaggtgcttctgatggggaaaaagatgcta

SEQ ID NO: 144741 - DNA, 33 bp, Homo sapien
ttctttttgttcctgaaacaagtcgagttgtcc

SEQ ID NO: 144742 - DNA, 33 bp, Homo sapien
ttctttttgttcctgagacaagtcgagttgtcc

SEQ ID NO: 144743 - DNA, 33 bp, Homo sapien
gtagcgtgcttgaacccaatcaccatttttaca

SEQ ID NO: 144744 - DNA, 33 bp, Homo sapien
gtagcgtgcttgaacctaatcaccatttttaca

SEQ ID NO: 144745 - DNA, 33 bp, Homo sapien
tggacctatctattaagtctcccatactccact

SEQ ID NO: 144746 - DNA, 33 bp, Homo sapien
tggacctatctattaattctcccatactccact

SEQ ID NO: 144747 - DNA, 33 bp, Homo sapien
ccatccatagctgacacgtattaagtgtttact

SEQ ID NO: 144748 - DNA, 33 bp, Homo sapien
ccatccatagctgacatgtattaagtgtttact

SEQ ID NO: 144749 - DNA, 33 bp, Homo sapien
tgagtccctgcactcaaatgaacaaggagtcac

SEQ ID NO: 144750 - DNA, 33 bp, Homo sapien
tgagtccctgcactcagatgaacaaggagtcac

SEQ ID NO: 144751 - DNA, 33 bp, Homo sapien
gaagaaaccaggttaaaaaacacagcaggtatg

SEQ ID NO: 144752 - DNA, 33 bp, Homo sapien
gaagaaaccaggttaagaaacacagcaggtatg

SEQ ID NO: 144753 - DNA, 33 bp, Homo sapien
cctacctagaaggtaccgctcaagtggatattt

SEQ ID NO: 144754 - DNA, 33 bp, Homo sapien
cctacctagaaggtactgctcaagtggatattt

SEQ ID NO: 144755 - DNA, 33 bp, Homo sapien
tgattttgcaccagaacgctgctacttcaccat

SEQ ID NO: 144756 - DNA, 33 bp, Homo sapien
tgattttgcaccagaatgctgctacttcaccat

SEQ ID NO: 144757 - DNA, 33 bp, Homo sapien
aatgattggcagaagggacagcgcagccctatg

SEQ ID NO: 144758 - DNA, 33 bp, Homo sapien
aatgattggcagaaggtacagcgcagccctatg

SEQ ID NO: 144759 - DNA, 33 bp, Homo sapien
ccattaattagtctaacgttcatgggtgtgaca

SEQ ID NO: 144760 - DNA, 33 bp, Homo sapien
ccattaattagtctaatgttcatgggtgtgaca

SEQ ID NO: 144761 - DNA, 33 bp, Homo sapien
atgaggcagaacttgaatagtggtgtttatttg

SEQ ID NO: 144762 - DNA, 33 bp, Homo sapien
atgaggcagaacttgagtagtggtgtttatttg

SEQ ID NO: 144763 - DNA, 33 bp, Homo sapien
caccaatggcccataaaaattgattgcatttat

SEQ ID NO: 144764 - DNA, 33 bp, Homo sapien
caccaatggcccataacaattgattgcatttat

SEQ ID NO: 144765 - DNA, 33 bp, Homo sapien
ttggaagaaactgctcacgttagaaataattac

SEQ ID NO: 144766 - DNA, 33 bp, Homo sapien
ttggaagaaactgctcgcgttagaaataattac

SEQ ID NO: 144767 - DNA, 33 bp, Homo sapien
gcctgctttcagtgaacgctcagctaccgggcc

SEQ ID NO: 144768 - DNA, 33 bp, Homo sapien
gcctgctttcagtgaatgctcagctaccgggcc

SEQ ID NO: 144769 - DNA, 33 bp, Homo sapien
atctgttgaatgaatgaaagtggcataaaaggc

SEQ ID NO: 144770 - DNA, 33 bp, Homo sapien
atctgttgaatgaatggaagtggcataaaaggc

SEQ ID NO: 144771 - DNA, 33 bp, Homo sapien
gataatccatgccttcaattattctcatgtctc

SEQ ID NO: 144772 - DNA, 33 bp, Homo sapien
gataatccatgccttcgattattctcatgtctc

SEQ ID NO: 144773 - DNA, 33 bp, Homo sapien
aataagctgtaatggcaacatagcctgtaagaa

SEQ ID NO: 144774 - DNA, 33 bp, Homo sapien
aataagctgtaatggcgacatagcctgtaagaa

SEQ ID NO: 144775 - DNA, 33 bp, Homo sapien
acacgtaaatcaaatcacggtctgtcttcacac

SEQ ID NO: 144776 - DNA, 33 bp, Homo sapien
acacgtaaatcaaatctcggtctgtcttcacac

SEQ ID NO: 144777 - DNA, 33 bp, Homo sapien
tctttcttctgcccaccacagcaaattcaggtc

SEQ ID NO: 144778 - DNA, 33 bp, Homo sapien
tctttcttctgcccactacagcaaattcaggtc

SEQ ID NO: 144779 - DNA, 33 bp, Homo sapien
taaactaacaatgatacagatagaaggtgatta

SEQ ID NO: 144780 - DNA, 33 bp, Homo sapien
taaactaacaatgatagagatagaaggtgatta

SEQ ID NO: 144781 - DNA, 33 bp, Homo sapien
cagctggaaagagagacgcccgagggatagtgt

SEQ ID NO: 144782 - DNA, 33 bp, Homo sapien
cagctggaaagagagaggcccgagggatagtgt

SEQ ID NO: 144783 - DNA, 33 bp, Homo sapien
tcctgggctgcttccaaaaaattttgttcctca

SEQ ID NO: 144784 - DNA, 33 bp, Homo sapien
tcctgggctgcttccagaaaattttgttcctca

SEQ ID NO: 144785 - DNA, 33 bp, Homo sapien
aagcttgtgactctcacctttaagttttcataa

SEQ ID NO: 144786 - DNA, 33 bp, Homo sapien
aagcttgtgactctcatctttaagttttcataa

SEQ ID NO: 144787 - DNA, 33 bp, Homo sapien
tagaatttgctgggaacctccacttttttttaa

SEQ ID NO: 144788 - DNA, 33 bp, Homo sapien
tagaatttgctgggaatctccacttttttttaa

SEQ ID NO: 144789 - DNA, 33 bp, Homo sapien
ctgaactgcctgcgtcaagataagaaatgactc

SEQ ID NO: 144790 - DNA, 33 bp, Homo sapien
ctgaactgcctgcgtcgagataagaaatgactc

SEQ ID NO: 144791 - DNA, 33 bp, Homo sapien
tgaatccagtgtggtaagaatcctctgaatccc

SEQ ID NO: 144792 - DNA, 33 bp, Homo sapien
tgaatccagtgtggtaggaatcctctgaatccc

SEQ ID NO: 144793 - DNA, 33 bp, Homo sapien
ccaaatgatctatgtagcttctccaccttcaag

SEQ ID NO: 144794 - DNA, 33 bp, Homo sapien
ccaaatgatctatgtatcttctccaccttcaag

SEQ ID NO: 144795 - DNA, 33 bp, Homo sapien
aattatgatcggataccactttatttcttttgt

SEQ ID NO: 144796 - DNA, 33 bp, Homo sapien
aattatgatcggatactactttatttcttttgt

SEQ ID NO: 144797 - DNA, 33 bp, Homo sapien
ttcataccattcacacactgcacagaggatcca

SEQ ID NO: 144798 - DNA, 33 bp, Homo sapien
ttcataccattcacacgctgcacagaggatcca

SEQ ID NO: 144799 - DNA, 33 bp, Homo sapien
gcttcaagatgatagcaccatgtgacaagccct

SEQ ID NO: 144800 - DNA, 33 bp, Homo sapien
gcttcaagatgatagcgccatgtgacaagccct

SEQ ID NO: 144801 - DNA, 33 bp, Homo sapien
caaattccttttcgagacctgcttactcatgca

SEQ ID NO: 144802 - DNA, 33 bp, Homo sapien
caaattccttttcgaggcctgcttactcatgca

SEQ ID NO: 144803 - DNA, 33 bp, Homo sapien
tcagagaactagggcaagcaagagcagctcaca

SEQ ID NO: 144804 - DNA, 33 bp, Homo sapien
tcagagaactagggcaggcaagagcagctcaca

SEQ ID NO: 144805 - DNA, 33 bp, Homo sapien
atggcagcgtggccaactgggtagaggtgtgca

SEQ ID NO: 144806 - DNA, 33 bp, Homo sapien
atggcagcgtggccaagtgggtagaggtgtgca

SEQ ID NO: 144807 - DNA, 33 bp, Homo sapien
aagaaattcataaaacggaccaaacattgttac

SEQ ID NO: 144808 - DNA, 33 bp, Homo sapien
aagaaattcataaaactgaccaaacattgttac

SEQ ID NO: 144809 - DNA, 33 bp, Homo sapien
tagcaattgataccagcagaaaaaaacgaggaa

SEQ ID NO: 144810 - DNA, 33 bp, Homo sapien
tagcaattgataccaggagaaaaaaacgaggaa

SEQ ID NO: 144811 - DNA, 33 bp, Homo sapien
ttgtgtgttgggaactcaattgccaatgcaaca

SEQ ID NO: 144812 - DNA, 33 bp, Homo sapien
ttgtgtgttgggaacttaattgccaatgcaaca

SEQ ID NO: 144813 - DNA, 33 bp, Homo sapien
catagcaccatgtgaacaggcttgcagaagaga

SEQ ID NO: 144814 - DNA, 33 bp, Homo sapien
catagcaccatgtgaataggcttgcagaagaga

SEQ ID NO: 144815 - DNA, 33 bp, Homo sapien
gtcacagtccctaccaaagagctcacggtcaaa

SEQ ID NO: 144816 - DNA, 33 bp, Homo sapien
gtcacagtccctaccacagagctcacggtcaaa

SEQ ID NO: 144817 - DNA, 33 bp, Homo sapien
cttttgaagaacaaagccttcatctcttaggta

SEQ ID NO: 144818 - DNA, 33 bp, Homo sapien
cttttgaagaacaaaggcttcatctcttaggta

SEQ ID NO: 144819 - DNA, 33 bp, Homo sapien
gactgtttagtcagcactatcactattggcttt

SEQ ID NO: 144820 - DNA, 33 bp, Homo sapien
gactgtttagtcagcattatcactattggcttt

SEQ ID NO: 144821 - DNA, 33 bp, Homo sapien
cctccattcccaggacaatcactcttgaccaag

SEQ ID NO: 144822 - DNA, 33 bp, Homo sapien
cctccattcccaggacgatcactcttgaccaag

SEQ ID NO: 144823 - DNA, 33 bp, Homo sapien
ctggctgctttgaaaccgctcccagagggatga

SEQ ID NO: 144824 - DNA, 33 bp, Homo sapien
ctggctgctttgaaactgctcccagagggatga

SEQ ID NO: 144825 - DNA, 33 bp, Homo sapien
cagtgtcctgatgatacatttttgacttgtttc

SEQ ID NO: 144826 - DNA, 33 bp, Homo sapien
cagtgtcctgatgatatatttttgacttgtttc

SEQ ID NO: 144827 - DNA, 33 bp, Homo sapien
gctcagctttcccagtcaccgtgtcttgtttca

SEQ ID NO: 144828 - DNA, 33 bp, Homo sapien
gctcagctttcccagtgaccgtgtcttgtttca

SEQ ID NO: 144829 - DNA, 33 bp, Homo sapien
aatctgcttatggttcaccagctaccccagcac

SEQ ID NO: 144830 - DNA, 33 bp, Homo sapien
aatctgcttatggttcgccagctaccccagcac

SEQ ID NO: 144831 - DNA, 33 bp, Homo sapien
ctaaagccctgaatcaacagaaggaccccagtg

SEQ ID NO: 144832 - DNA, 33 bp, Homo sapien
ctaaagccctgaatcaccagaaggaccccagtg

SEQ ID NO: 144833 - DNA, 33 bp, Homo sapien
aattgagaatggactacgaacatccagcatgat

SEQ ID NO: 144834 - DNA, 33 bp, Homo sapien
aattgagaatggactatgaacatccagcatgat

SEQ ID NO: 144835 - DNA, 33 bp, Homo sapien
cttggggagacttgcacagaatatttacaagta

SEQ ID NO: 144836 - DNA, 33 bp, Homo sapien
cttggggagacttgcatagaatatttacaagta

SEQ ID NO: 144837 - DNA, 33 bp, Homo sapien
gtggtggagacaggacagaagacttgagtttcc

SEQ ID NO: 144838 - DNA, 33 bp, Homo sapien
gtggtggagacaggacggaagacttgagtttcc

SEQ ID NO: 144839 - DNA, 33 bp, Homo sapien
cgttagtgacatcctaaattgccagcctttctc

SEQ ID NO: 144840 - DNA, 33 bp, Homo sapien
cgttagtgacatcctacattgccagcctttctc

SEQ ID NO: 144841 - DNA, 33 bp, Homo sapien
aaacagactactggtaacggacgacttcagagg

SEQ ID NO: 144842 - DNA, 33 bp, Homo sapien
aaacagactactggtagcggacgacttcagagg

SEQ ID NO: 144843 - DNA, 33 bp, Homo sapien
ctcaatctacaacgtacccacggagagtgacct

SEQ ID NO: 144844 - DNA, 33 bp, Homo sapien
ctcaatctacaacgtatccacggagagtgacct

SEQ ID NO: 144845 - DNA, 33 bp, Homo sapien
agcttccaaaaagaaacatgttgctatcccatt

SEQ ID NO: 144846 - DNA, 33 bp, Homo sapien
agcttccaaaaagaaatatgttgctatcccatt

SEQ ID NO: 144847 - DNA, 33 bp, Homo sapien
tcacacgtctcccaagaaaaccacaagcttatg

SEQ ID NO: 144848 - DNA, 33 bp, Homo sapien
tcacacgtctcccaagcaaaccacaagcttatg

SEQ ID NO: 144849 - DNA, 33 bp, Homo sapien
actcaggtgatcaaacaggtctggcagagtagt

SEQ ID NO: 144850 - DNA, 33 bp, Homo sapien
actcaggtgatcaaaccggtctggcagagtagt

SEQ ID NO: 144851 - DNA, 33 bp, Homo sapien
ttgcattttagagagactccccctggcagcagt

SEQ ID NO: 144852 - DNA, 33 bp, Homo sapien
ttgcattttagagagattccccctggcagcagt

SEQ ID NO: 144853 - DNA, 33 bp, Homo sapien
aactcaggctttgtctcaccagtggagtggggg

SEQ ID NO: 144854 - DNA, 33 bp, Homo sapien
aactcaggctttgtcttaccagtggagtggggg

SEQ ID NO: 144855 - DNA, 33 bp, Homo sapien
gagaagactttatatccaagaaaccagtttcat

SEQ ID NO: 144856 - DNA, 33 bp, Homo sapien
gagaagactttatatctaagaaaccagtttcat

SEQ ID NO: 144857 - DNA, 33 bp, Homo sapien
aactaaaaatgtaccaacttgttcagaaaaagt

SEQ ID NO: 144858 - DNA, 33 bp, Homo sapien
aactaaaaatgtaccatcttgttcagaaaaagt

SEQ ID NO: 144859 - DNA, 33 bp, Homo sapien
agaaaatacggaaataacggcatggtaaaaatg

SEQ ID NO: 144860 - DNA, 33 bp, Homo sapien
agaaaatacggaaatagcggcatggtaaaaatg

SEQ ID NO: 144861 - DNA, 33 bp, Homo sapien
ccagatacagaaaatccctactgcttcaaaagt

SEQ ID NO: 144862 - DNA, 33 bp, Homo sapien
ccagatacagaaaatctctactgcttcaaaagt

SEQ ID NO: 144863 - DNA, 33 bp, Homo sapien
aatgtcactccacgccacaccagggtactggtt

SEQ ID NO: 144864 - DNA, 33 bp, Homo sapien
aatgtcactccacgccgcaccagggtactggtt

SEQ ID NO: 144865 - DNA, 33 bp, Homo sapien
gtaggcagagactggaaggatgcagatgtgagc

SEQ ID NO: 144866 - DNA, 33 bp, Homo sapien
gtaggcagagactggagggatgcagatgtgagc

SEQ ID NO: 144867 - DNA, 33 bp, Homo sapien
acctgggaaagtcaccgcatttggaagaagggt

SEQ ID NO: 144868 - DNA, 33 bp, Homo sapien
acctgggaaagtcacctcatttggaagaagggt

SEQ ID NO: 144869 - DNA, 33 bp, Homo sapien
actcagccttcctgaaaatccagggaagcgtct

SEQ ID NO: 144870 - DNA, 33 bp, Homo sapien
actcagccttcctgaacatccagggaagcgtct

SEQ ID NO: 144871 - DNA, 33 bp, Homo sapien
gtttacaatggctgtacatagtgccaccagtga

SEQ ID NO: 144872 - DNA, 33 bp, Homo sapien
gtttacaatggctgtatatagtgccaccagtga

SEQ ID NO: 144873 - DNA, 33 bp, Homo sapien
catgtcctcattaaaactagagaaggctggctc

SEQ ID NO: 144874 - DNA, 33 bp, Homo sapien
catgtcctcattaaaagtagagaaggctggctc

SEQ ID NO: 144875 - DNA, 33 bp, Homo sapien
attaggtatcacaggaaaatacctgacttcctt

SEQ ID NO: 144876 - DNA, 33 bp, Homo sapien
attaggtatcacaggagaatacctgacttcctt

SEQ ID NO: 144877 - DNA, 33 bp, Homo sapien
caaatgtagccacttaaaacaacacacattcat

SEQ ID NO: 144878 - DNA, 33 bp, Homo sapien
caaatgtagccacttacaacaacacacattcat

SEQ ID NO: 144879 - DNA, 33 bp, Homo sapien
ctagaccaactgtgtacaaccacgtcatggaac

SEQ ID NO: 144880 - DNA, 33 bp, Homo sapien
ctagaccaactgtgtataaccacgtcatggaac

SEQ ID NO: 144881 - DNA, 33 bp, Homo sapien
ccttcaatacaggatacgcgttaatggacccaa

SEQ ID NO: 144882 - DNA, 33 bp, Homo sapien
ccttcaatacaggatatgcgttaatggacccaa

SEQ ID NO: 144883 - DNA, 33 bp, Homo sapien
ttcccccatgttgaaacgtagacaactaacagc

SEQ ID NO: 144884 - DNA, 33 bp, Homo sapien
ttcccccatgttgaaaggtagacaactaacagc

SEQ ID NO: 144885 - DNA, 33 bp, Homo sapien
ccaattaatagttaaagggctttgtactgttga

SEQ ID NO: 144886 - DNA, 33 bp, Homo sapien
ccaattaatagttaaatggctttgtactgttga

SEQ ID NO: 144887 - DNA, 33 bp, Homo sapien
gccctttattagtagcaatgattaaatccagtt

SEQ ID NO: 144888 - DNA, 33 bp, Homo sapien
gccctttattagtagcgatgattaaatccagtt

SEQ ID NO: 144889 - DNA, 33 bp, Homo sapien
aatgtgtttcatgcgtcttcctcctcctatgtt

SEQ ID NO: 144890 - DNA, 33 bp, Homo sapien
aatgtgtttcatgcgttttcctcctcctatgtt

SEQ ID NO: 144891 - DNA, 33 bp, Homo sapien
aaggatttgatagacacgttggctgagccatga

SEQ ID NO: 144892 - DNA, 33 bp, Homo sapien
aaggatttgatagacatgttggctgagccatga

SEQ ID NO: 144893 - DNA, 33 bp, Homo sapien
aaacatcaaacttggacatgaacattcactgtt

SEQ ID NO: 144894 - DNA, 33 bp, Homo sapien
aaacatcaaacttggatatgaacattcactgtt

SEQ ID NO: 144895 - DNA, 33 bp, Homo sapien
tttgaggtgacaaaataaaagctgtcttaatct

SEQ ID NO: 144896 - DNA, 33 bp, Homo sapien
tttgaggtgacaaaatgaaagctgtcttaatct

SEQ ID NO: 144897 - DNA, 33 bp, Homo sapien
tcaggctgggacaagacgcaggtgtccagaggg

SEQ ID NO: 144898 - DNA, 33 bp, Homo sapien
tcaggctgggacaagatgcaggtgtccagaggg

SEQ ID NO: 144899 - DNA, 33 bp, Homo sapien
caggcagtcaatagaaatgctggccggtctgtg

SEQ ID NO: 144900 - DNA, 33 bp, Homo sapien
caggcagtcaatagaagtgctggccggtctgtg

SEQ ID NO: 144901 - DNA, 33 bp, Homo sapien
aagccgcacagattcaaccattgacttgagctt

SEQ ID NO: 144902 - DNA, 33 bp, Homo sapien
aagccgcacagattcacccattgacttgagctt

SEQ ID NO: 144903 - DNA, 33 bp, Homo sapien
ggggtaggagttctaaaatgtggaaattcccat

SEQ ID NO: 144904 - DNA, 33 bp, Homo sapien
ggggtaggagttctaatatgtggaaattcccat

SEQ ID NO: 144905 - DNA, 33 bp, Homo sapien
aaaatcatggacctcccaatacctagcacttgt

SEQ ID NO: 144906 - DNA, 33 bp, Homo sapien
aaaatcatggacctccgaatacctagcacttgt

SEQ ID NO: 144907 - DNA, 33 bp, Homo sapien
actccagcacataatacggcgtctcttacacag

SEQ ID NO: 144908 - DNA, 33 bp, Homo sapien
actccagcacataatatggcgtctcttacacag

SEQ ID NO: 144909 - DNA, 33 bp, Homo sapien
gactaagctttggttcactgacaggatggagga

SEQ ID NO: 144910 - DNA, 33 bp, Homo sapien
gactaagctttggttcgctgacaggatggagga

SEQ ID NO: 144911 - DNA, 33 bp, Homo sapien
tgcatacaaggaaacaagtcaccatatgggaaa

SEQ ID NO: 144912 - DNA, 33 bp, Homo sapien
tgcatacaaggaaacaggtcaccatatgggaaa

SEQ ID NO: 144913 - DNA, 33 bp, Homo sapien
actgaccaaattgaccaaatcacttaaacttaa

SEQ ID NO: 144914 - DNA, 33 bp, Homo sapien
actgaccaaattgaccgaatcacttaaacttaa

SEQ ID NO: 144915 - DNA, 33 bp, Homo sapien
ggtgaactgatcaagacgtatgccagaatttgt

SEQ ID NO: 144916 - DNA, 33 bp, Homo sapien
ggtgaactgatcaagatgtatgccagaatttgt

SEQ ID NO: 144917 - DNA, 33 bp, Homo sapien
cagttgtccgtaattacaccagagctacagtgg

SEQ ID NO: 144918 - DNA, 33 bp, Homo sapien
cagttgtccgtaattagaccagagctacagtgg

SEQ ID NO: 144919 - DNA, 33 bp, Homo sapien
gcctcttgtgagcttcaatactttccctgacac

SEQ ID NO: 144920 - DNA, 33 bp, Homo sapien
gcctcttgtgagcttcgatactttccctgacac

SEQ ID NO: 144921 - DNA, 33 bp, Homo sapien
gatgctggaaatagagaagaattgcccatgtgc

SEQ ID NO: 144922 - DNA, 33 bp, Homo sapien
gatgctggaaatagaggagaattgcccatgtgc

SEQ ID NO: 144923 - DNA, 33 bp, Homo sapien
ggctactgggtttacaatattacgatttggaca

SEQ ID NO: 144924 - DNA, 33 bp, Homo sapien
ggctactgggtttacagtattacgatttggaca

SEQ ID NO: 144925 - DNA, 33 bp, Homo sapien
gagattttggaggctacagaattagttttatta

SEQ ID NO: 144926 - DNA, 33 bp, Homo sapien
gagattttggaggctagagaattagttttatta

SEQ ID NO: 144927 - DNA, 33 bp, Homo sapien
agtcacttactcctcaaggttttcaatagtagt

SEQ ID NO: 144928 - DNA, 33 bp, Homo sapien
agtcacttactcctcagggttttcaatagtagt

SEQ ID NO: 144929 - DNA, 33 bp, Homo sapien
tcaggacaatagggaaactttggagtctgagca

SEQ ID NO: 144930 - DNA, 33 bp, Homo sapien
tcaggacaatagggaacctttggagtctgagca

SEQ ID NO: 144931 - DNA, 33 bp, Homo sapien
attttgttattactgactacttaatctagatac

SEQ ID NO: 144932 - DNA, 33 bp, Homo sapien
attttgttattactgagtacttaatctagatac

SEQ ID NO: 144933 - DNA, 33 bp, Homo sapien
acatcaacagggatctaactaagagaaagaggc

SEQ ID NO: 144934 - DNA, 33 bp, Homo sapien
acatcaacagggatctgactaagagaaagaggc

SEQ ID NO: 144935 - DNA, 33 bp, Homo sapien
cctagacacaggaagaatcctcgctgctttgct

SEQ ID NO: 144936 - DNA, 33 bp, Homo sapien
cctagacacaggaagagtcctcgctgctttgct

SEQ ID NO: 144937 - DNA, 33 bp, Homo sapien
aggctgccaagattggaagtggcagagtaagag

SEQ ID NO: 144938 - DNA, 33 bp, Homo sapien
aggctgccaagattgggagtggcagagtaagag

SEQ ID NO: 144939 - DNA, 33 bp, Homo sapien
gtgttgctggaagtgaaaaatgtccaggtcatg

SEQ ID NO: 144940 - DNA, 33 bp, Homo sapien
gtgttgctggaagtgagaaatgtccaggtcatg

SEQ ID NO: 144941 - DNA, 33 bp, Homo sapien
tgttgtggttaccagccagaaggatgctttttc

SEQ ID NO: 144942 - DNA, 33 bp, Homo sapien
tgttgtggttaccagcgagaaggatgctttttc

SEQ ID NO: 144943 - DNA, 33 bp, Homo sapien
agttccgcagcctaccaactacacactcctggg

SEQ ID NO: 144944 - DNA, 33 bp, Homo sapien
agttccgcagcctaccgactacacactcctggg

SEQ ID NO: 144945 - DNA, 33 bp, Homo sapien
ttgaccagccaatctgcatatcactggtatcca

SEQ ID NO: 144946 - DNA, 33 bp, Homo sapien
ttgaccagccaatctgtatatcactggtatcca

SEQ ID NO: 144947 - DNA, 33 bp, Homo sapien
ggcactttgaaagttacggcggcaggattgctt

SEQ ID NO: 144948 - DNA, 33 bp, Homo sapien
ggcactttgaaagttatggcggcaggattgctt

SEQ ID NO: 144949 - DNA, 33 bp, Homo sapien
ggttaacataacagaaaatttcgctctctgtaa

SEQ ID NO: 144950 - DNA, 33 bp, Homo sapien
ggttaacataacagaagatttcgctctctgtaa

SEQ ID NO: 144951 - DNA, 33 bp, Homo sapien
ttttggatggcatagaagtgctgcttggacctg

SEQ ID NO: 144952 - DNA, 33 bp, Homo sapien
ttttggatggcatagaggtgctgcttggacctg

SEQ ID NO: 144953 - DNA, 33 bp, Homo sapien
gtgctaaagttgctacaaggcactcaaagtgtg

SEQ ID NO: 144954 - DNA, 33 bp, Homo sapien
gtgctaaagttgctacgaggcactcaaagtgtg

SEQ ID NO: 144955 - DNA, 33 bp, Homo sapien
agtctccgataaaatcgcagagaactgtttggg

SEQ ID NO: 144956 - DNA, 33 bp, Homo sapien
agtctccgataaaatctcagagaactgtttggg

SEQ ID NO: 144957 - DNA, 33 bp, Homo sapien
ggaatggatgtgaaaccgggtgatggttctgtg

SEQ ID NO: 144958 - DNA, 33 bp, Homo sapien
ggaatggatgtgaaactgggtgatggttctgtg

SEQ ID NO: 144959 - DNA, 33 bp, Homo sapien
gtatgggaagatagccaagcaacgcttttagga

SEQ ID NO: 144960 - DNA, 33 bp, Homo sapien
gtatgggaagatagccgagcaacgcttttagga

SEQ ID NO: 144961 - DNA, 33 bp, Homo sapien
ctttacccctctataactggtactgctatttca

SEQ ID NO: 144962 - DNA, 33 bp, Homo sapien
ctttacccctctataattggtactgctatttca

SEQ ID NO: 144963 - DNA, 33 bp, Homo sapien
tcaaagtagctagagaccctacgtgtaggtaga

SEQ ID NO: 144964 - DNA, 33 bp, Homo sapien
tcaaagtagctagagagcctacgtgtaggtaga

SEQ ID NO: 144965 - DNA, 33 bp, Homo sapien
gaaagaagaaataaacaaagacacgccagcata

SEQ ID NO: 144966 - DNA, 33 bp, Homo sapien
gaaagaagaaataaaccaagacacgccagcata

SEQ ID NO: 144967 - DNA, 33 bp, Homo sapien
tataatgctaaaggccacaattcacaatgaaaa

SEQ ID NO: 144968 - DNA, 33 bp, Homo sapien
tataatgctaaaggccccaattcacaatgaaaa

SEQ ID NO: 144969 - DNA, 33 bp, Homo sapien
taaagaaaaggtgtctgactggctaacaaagga

SEQ ID NO: 144970 - DNA, 33 bp, Homo sapien
taaagaaaaggtgtcttactggctaacaaagga

SEQ ID NO: 144971 - DNA, 33 bp, Homo sapien
actatttaaacctcagccccttcggagtctttt

SEQ ID NO: 144972 - DNA, 33 bp, Homo sapien
actatttaaacctcaggcccttcggagtctttt

SEQ ID NO: 144973 - DNA, 33 bp, Homo sapien
aatgtgtttatttccaagaagagatgagtaaag

SEQ ID NO: 144974 - DNA, 33 bp, Homo sapien
aatgtgtttatttccaggaagagatgagtaaag

SEQ ID NO: 144975 - DNA, 33 bp, Homo sapien
ggaagaaaattaaaaccggcaatactgttgact

SEQ ID NO: 144976 - DNA, 33 bp, Homo sapien
ggaagaaaattaaaactggcaatactgttgact

SEQ ID NO: 144977 - DNA, 33 bp, Homo sapien
cagactcttgggcaccagaataaggacctggac

SEQ ID NO: 144978 - DNA, 33 bp, Homo sapien
cagactcttgggcaccggaataaggacctggac

SEQ ID NO: 144979 - DNA, 33 bp, Homo sapien
gcagaaagacaattgcacacggtatgattaggg

SEQ ID NO: 144980 - DNA, 33 bp, Homo sapien
gcagaaagacaattgcgcacggtatgattaggg

SEQ ID NO: 144981 - DNA, 33 bp, Homo sapien
gtttataattttcagcgcagaaatcttgtatgt

SEQ ID NO: 144982 - DNA, 33 bp, Homo sapien
gtttataattttcagctcagaaatcttgtatgt

SEQ ID NO: 144983 - DNA, 33 bp, Homo sapien
atctttcttcgatcaccgggatcagtttggcac

SEQ ID NO: 144984 - DNA, 33 bp, Homo sapien
atctttcttcgatcactgggatcagtttggcac

SEQ ID NO: 144985 - DNA, 33 bp, Homo sapien
ggacaagcctgaatagaagtgccaatagcagat

SEQ ID NO: 144986 - DNA, 33 bp, Homo sapien
ggacaagcctgaatagtagtgccaatagcagat

SEQ ID NO: 144987 - DNA, 33 bp, Homo sapien
actgcataaaattgtcaaaagtcatccaactaa

SEQ ID NO: 144988 - DNA, 33 bp, Homo sapien
actgcataaaattgtcgaaagtcatccaactaa

SEQ ID NO: 144989 - DNA, 33 bp, Homo sapien
cggggaagaaaagcccaccatacctgaaatgat

SEQ ID NO: 144990 - DNA, 33 bp, Homo sapien
cggggaagaaaagcccgccatacctgaaatgat

SEQ ID NO: 144991 - DNA, 33 bp, Homo sapien
accatcaaccagatacaagaaattcatcttacg

SEQ ID NO: 144992 - DNA, 33 bp, Homo sapien
accatcaaccagatacgagaaattcatcttacg

SEQ ID NO: 144993 - DNA, 33 bp, Homo sapien
gacagaagggaggcccagacaaagtgaggtagg

SEQ ID NO: 144994 - DNA, 33 bp, Homo sapien
gacagaagggaggcccggacaaagtgaggtagg

SEQ ID NO: 144995 - DNA, 33 bp, Homo sapien
ttaaaaactagaagaaacatctacaagggcttt

SEQ ID NO: 144996 - DNA, 33 bp, Homo sapien
ttaaaaactagaagaagcatctacaagggcttt

SEQ ID NO: 144997 - DNA, 33 bp, Homo sapien
aggaaagaaatgcagacggtgttctgtgacatg

SEQ ID NO: 144998 - DNA, 33 bp, Homo sapien
aggaaagaaatgcagatggtgttctgtgacatg

SEQ ID NO: 144999 - DNA, 33 bp, Homo sapien
cgtttatcatcttacacaagttatgaccccaac

SEQ ID NO: 145000 - DNA, 33 bp, Homo sapien
cgtttatcatcttacataagttatgaccccaac

SEQ ID NO: 145001 - DNA, 33 bp, Homo sapien
ggaaagtgagctcacaaggtttgaggatgagcc

SEQ ID NO: 145002 - DNA, 33 bp, Homo sapien
ggaaagtgagctcacagggtttgaggatgagcc

SEQ ID NO: 145003 - DNA, 33 bp, Homo sapien
tatgatgactgaaaaaaagatggagatgcatcg

SEQ ID NO: 145004 - DNA, 33 bp, Homo sapien
tatgatgactgaaaaagagatggagatgcatcg

SEQ ID NO: 145005 - DNA, 33 bp, Homo sapien
gcacccaaaacgcccccaagaacgtgtccattg

SEQ ID NO: 145006 - DNA, 33 bp, Homo sapien
gcacccaaaacgcccctaagaacgtgtccattg

SEQ ID NO: 145007 - DNA, 33 bp, Homo sapien
gggattgctcttctgacgggactggctcagctg

SEQ ID NO: 145008 - DNA, 33 bp, Homo sapien
gggattgctcttctgatgggactggctcagctg

SEQ ID NO: 145009 - DNA, 33 bp, Homo sapien
tttaacttacatgttacaggaattttgcagttt

SEQ ID NO: 145010 - DNA, 33 bp, Homo sapien
tttaacttacatgttataggaattttgcagttt

SEQ ID NO: 145011 - DNA, 33 bp, Homo sapien
gtattcctgagagccacatttaccatcctgagt

SEQ ID NO: 145012 - DNA, 33 bp, Homo sapien
gtattcctgagagccatatttaccatcctgagt

SEQ ID NO: 145013 - DNA, 33 bp, Homo sapien
cccccgagtgggcaccaacgaaccgctcttccc

SEQ ID NO: 145014 - DNA, 33 bp, Homo sapien
cccccgagtgggcaccgacgaaccgctcttccc

SEQ ID NO: 145015 - DNA, 33 bp, Homo sapien
tccaaatttccttcaacgtgccttcaattttaa

SEQ ID NO: 145016 - DNA, 33 bp, Homo sapien
tccaaatttccttcaatgtgccttcaattttaa

SEQ ID NO: 145017 - DNA, 33 bp, Homo sapien
ccatgtggagatatgcacgtgtttttacgttgc

SEQ ID NO: 145018 - DNA, 33 bp, Homo sapien
ccatgtggagatatgcgcgtgtttttacgttgc

SEQ ID NO: 145019 - DNA, 33 bp, Homo sapien
gcaactgggctaaaatgagaacaaaggggtgct

SEQ ID NO: 145020 - DNA, 33 bp, Homo sapien
gcaactgggctaaaattagaacaaaggggtgct

SEQ ID NO: 145021 - DNA, 33 bp, Homo sapien
tttgctatgtttgctacgaactggcctttttcc

SEQ ID NO: 145022 - DNA, 33 bp, Homo sapien
tttgctatgtttgctatgaactggcctttttcc

SEQ ID NO: 145023 - DNA, 33 bp, Homo sapien
catttccccgatggaaagatccccggatggtac

SEQ ID NO: 145024 - DNA, 33 bp, Homo sapien
catttccccgatggaaggatccccggatggtac

SEQ ID NO: 145025 - DNA, 33 bp, Homo sapien
cctcccagcttatgccaatactcctcaacctca

SEQ ID NO: 145026 - DNA, 33 bp, Homo sapien
cctcccagcttatgccgatactcctcaacctca

SEQ ID NO: 145027 - DNA, 33 bp, Homo sapien
gcacatttgacaaggcaagtggcccggtgacta

SEQ ID NO: 145028 - DNA, 33 bp, Homo sapien
gcacatttgacaaggcgagtggcccggtgacta

SEQ ID NO: 145029 - DNA, 33 bp, Homo sapien
ggaaaatgaaacaacaaatatgaatgcccaaga

SEQ ID NO: 145030 - DNA, 33 bp, Homo sapien
ggaaaatgaaacaacacatatgaatgcccaaga

SEQ ID NO: 145031 - DNA, 33 bp, Homo sapien
ttgccacaaaatcacaagatctgcctgtttgga

SEQ ID NO: 145032 - DNA, 33 bp, Homo sapien
ttgccacaaaatcacaggatctgcctgtttgga

SEQ ID NO: 145033 - DNA, 33 bp, Homo sapien
ttctccttgtatgaaaggaaggtgctgagaaga

SEQ ID NO: 145034 - DNA, 33 bp, Homo sapien
ttctccttgtatgaaatgaaggtgctgagaaga

SEQ ID NO: 145035 - DNA, 33 bp, Homo sapien
cacttcccatgataacaaaatagaaaatgcgtc

SEQ ID NO: 145036 - DNA, 33 bp, Homo sapien
cacttcccatgataacgaaatagaaaatgcgtc

SEQ ID NO: 145037 - DNA, 33 bp, Homo sapien
acccctaccctcagcacgtagaatgtcttcaat

SEQ ID NO: 145038 - DNA, 33 bp, Homo sapien
acccctaccctcagcatgtagaatgtcttcaat

SEQ ID NO: 145039 - DNA, 33 bp, Homo sapien
acaggataaggaagaaagattttaatggactcc

SEQ ID NO: 145040 - DNA, 33 bp, Homo sapien
acaggataaggaagaaggattttaatggactcc

SEQ ID NO: 145041 - DNA, 33 bp, Homo sapien
aagctccatgcccaaaatccgccatgacttagg

SEQ ID NO: 145042 - DNA, 33 bp, Homo sapien
aagctccatgcccaaagtccgccatgacttagg

SEQ ID NO: 145043 - DNA, 33 bp, Homo sapien
acagagaaggacaggaagaggtaaagacagata

SEQ ID NO: 145044 - DNA, 33 bp, Homo sapien
acagagaaggacaggaggaggtaaagacagata

SEQ ID NO: 145045 - DNA, 33 bp, Homo sapien
accacttagaaacccaaatgttcttgcctaaat

SEQ ID NO: 145046 - DNA, 33 bp, Homo sapien
accacttagaaacccacatgttcttgcctaaat

SEQ ID NO: 145047 - DNA, 33 bp, Homo sapien
aaggaataacagtgaccaggaataacatccagt

SEQ ID NO: 145048 - DNA, 33 bp, Homo sapien
aaggaataacagtgacgaggaataacatccagt

SEQ ID NO: 145049 - DNA, 33 bp, Homo sapien
ctaattccaaagtacaatgggttcttagatgaa

SEQ ID NO: 145050 - DNA, 33 bp, Homo sapien
ctaattccaaagtacagtgggttcttagatgaa

SEQ ID NO: 145051 - DNA, 33 bp, Homo sapien
tggaacacagtgttgaaaaggattccgaggctg

SEQ ID NO: 145052 - DNA, 33 bp, Homo sapien
tggaacacagtgttgagaaggattccgaggctg

SEQ ID NO: 145053 - DNA, 33 bp, Homo sapien
gtcagaatgaagtgcaaaaacaagaataatgct

SEQ ID NO: 145054 - DNA, 33 bp, Homo sapien
gtcagaatgaagtgcagaaacaagaataatgct

SEQ ID NO: 145055 - DNA, 33 bp, Homo sapien
gatcccactttacggaaagcaacaggttcaagg

SEQ ID NO: 145056 - DNA, 33 bp, Homo sapien
gatcccactttacggagagcaacaggttcaagg

SEQ ID NO: 145057 - DNA, 33 bp, Homo sapien
aggctggctttgcaacaatgagcctgagaagct

SEQ ID NO: 145058 - DNA, 33 bp, Homo sapien
aggctggctttgcaacgatgagcctgagaagct

SEQ ID NO: 145059 - DNA, 33 bp, Homo sapien
ggcaaatggttggtcacctgtgaatatggtcat

SEQ ID NO: 145060 - DNA, 33 bp, Homo sapien
ggcaaatggttggtcagctgtgaatatggtcat

SEQ ID NO: 145061 - DNA, 33 bp, Homo sapien
cagcccaggcaaaccaatatataggtgaattac

SEQ ID NO: 145062 - DNA, 33 bp, Homo sapien
cagcccaggcaaaccagtatataggtgaattac

SEQ ID NO: 145063 - DNA, 33 bp, Homo sapien
acttgttttttactgcaatacactcatatcttt

SEQ ID NO: 145064 - DNA, 33 bp, Homo sapien
acttgttttttactgcgatacactcatatcttt

SEQ ID NO: 145065 - DNA, 33 bp, Homo sapien
agatccttcaggaaaacgctgacaatttgagtt

SEQ ID NO: 145066 - DNA, 33 bp, Homo sapien
agatccttcaggaaaaggctgacaatttgagtt

SEQ ID NO: 145067 - DNA, 33 bp, Homo sapien
ggtggatgtttgaaaaatgtatactctgtggtt

SEQ ID NO: 145068 - DNA, 33 bp, Homo sapien
ggtggatgtttgaaaagtgtatactctgtggtt

SEQ ID NO: 145069 - DNA, 33 bp, Homo sapien
taaagacctcttaagaacattaaacaagcatca

SEQ ID NO: 145070 - DNA, 33 bp, Homo sapien
taaagacctcttaagaccattaaacaagcatca

SEQ ID NO: 145071 - DNA, 33 bp, Homo sapien
aggaactcctttttggaatgtcacagatcacca

SEQ ID NO: 145072 - DNA, 33 bp, Homo sapien
aggaactcctttttgggatgtcacagatcacca

SEQ ID NO: 145073 - DNA, 33 bp, Homo sapien
cgtagttcacatgacaccagaacttcatcagga

SEQ ID NO: 145074 - DNA, 33 bp, Homo sapien
cgtagttcacatgacatcagaacttcatcagga

SEQ ID NO: 145075 - DNA, 33 bp, Homo sapien
agcctccagaatgtgcaagatgaatttctgttg

SEQ ID NO: 145076 - DNA, 33 bp, Homo sapien
agcctccagaatgtgcgagatgaatttctgttg

SEQ ID NO: 145077 - DNA, 33 bp, Homo sapien
gaatgaagtattgggaaagaattgctcaggaaa

SEQ ID NO: 145078 - DNA, 33 bp, Homo sapien
gaatgaagtattgggagagaattgctcaggaaa

SEQ ID NO: 145079 - DNA, 33 bp, Homo sapien
tttgcctttttttcaaccaagtaagcaatctga

SEQ ID NO: 145080 - DNA, 33 bp, Homo sapien
tttgcctttttttcaatcaagtaagcaatctga

SEQ ID NO: 145081 - DNA, 33 bp, Homo sapien
tattttctgtcatgaacaaggtttgtggatatt

SEQ ID NO: 145082 - DNA, 33 bp, Homo sapien
tattttctgtcatgaagaaggtttgtggatatt

SEQ ID NO: 145083 - DNA, 33 bp, Homo sapien
tgggccttgacggcaccgaactccgtaaaggtc

SEQ ID NO: 145084 - DNA, 33 bp, Homo sapien
tgggccttgacggcactgaactccgtaaaggtc

SEQ ID NO: 145085 - DNA, 33 bp, Homo sapien
atctgaaggatcctgaaagcatctgttttgtct

SEQ ID NO: 145086 - DNA, 33 bp, Homo sapien
atctgaaggatcctgagagcatctgttttgtct

SEQ ID NO: 145087 - DNA, 33 bp, Homo sapien
ccggaaatagctcctcccaagttttactcagat

SEQ ID NO: 145088 - DNA, 33 bp, Homo sapien
ccggaaatagctcctcgcaagttttactcagat

SEQ ID NO: 145089 - DNA, 33 bp, Homo sapien
ggctccatgtcctgacaaagaagtgcccagagg

SEQ ID NO: 145090 - DNA, 33 bp, Homo sapien
ggctccatgtcctgacgaagaagtgcccagagg

SEQ ID NO: 145091 - DNA, 33 bp, Homo sapien
caacactcgtcaaagaagctgaggggtccacac

SEQ ID NO: 145092 - DNA, 33 bp, Homo sapien
caacactcgtcaaagaggctgaggggtccacac

SEQ ID NO: 145093 - DNA, 33 bp, Homo sapien
aggcacccatttgtaaaagttacgtgtcacccg

SEQ ID NO: 145094 - DNA, 33 bp, Homo sapien
aggcacccatttgtaacagttacgtgtcacccg

SEQ ID NO: 145095 - DNA, 33 bp, Homo sapien
tctgggcgtgtaaggacgcatttctcaacagca

SEQ ID NO: 145096 - DNA, 33 bp, Homo sapien
tctgggcgtgtaaggatgcatttctcaacagca

SEQ ID NO: 145097 - DNA, 33 bp, Homo sapien
tgtgtccatcatcacaatgtaattttagaagat

SEQ ID NO: 145098 - DNA, 33 bp, Homo sapien
tgtgtccatcatcacagtgtaattttagaagat

SEQ ID NO: 145099 - DNA, 33 bp, Homo sapien
gactcatggctagacaaaaaacaggacctcagt

SEQ ID NO: 145100 - DNA, 33 bp, Homo sapien
gactcatggctagacataaaacaggacctcagt

SEQ ID NO: 145101 - DNA, 33 bp, Homo sapien
actaggagaaactcgcccagattcccctcaggg

SEQ ID NO: 145102 - DNA, 33 bp, Homo sapien
actaggagaaactcgcgcagattcccctcaggg

SEQ ID NO: 145103 - DNA, 33 bp, Homo sapien
aactgaatgtttacacagggtgtgcatatcttt

SEQ ID NO: 145104 - DNA, 33 bp, Homo sapien
aactgaatgtttacacggggtgtgcatatcttt

SEQ ID NO: 145105 - DNA, 33 bp, Homo sapien
atactagtaaattcaacagcctctttaacatct

SEQ ID NO: 145106 - DNA, 33 bp, Homo sapien
atactagtaaattcaatagcctctttaacatct

SEQ ID NO: 145107 - DNA, 33 bp, Homo sapien
aaatgaaagcaaagacaggaagcgtccttgatc

SEQ ID NO: 145108 - DNA, 33 bp, Homo sapien
aaatgaaagcaaagacgggaagcgtccttgatc

SEQ ID NO: 145109 - DNA, 33 bp, Homo sapien
gatgaacctttgatgaaacagcatattttgagg

SEQ ID NO: 145110 - DNA, 33 bp, Homo sapien
gatgaacctttgatgacacagcatattttgagg

SEQ ID NO: 145111 - DNA, 33 bp, Homo sapien
attagccaagccatggcactgaccggccctttc

SEQ ID NO: 145112 - DNA, 33 bp, Homo sapien
attagccaagccatggtactgaccggccctttc

SEQ ID NO: 145113 - DNA, 33 bp, Homo sapien
acacctgatcgtcacaagccgtctaagacacgt

SEQ ID NO: 145114 - DNA, 33 bp, Homo sapien
acacctgatcgtcacatgccgtctaagacacgt

SEQ ID NO: 145115 - DNA, 33 bp, Homo sapien
tgtgtttcttggaaccaggatatagtgatccag

SEQ ID NO: 145116 - DNA, 33 bp, Homo sapien
tgtgtttcttggaaccgggatatagtgatccag

SEQ ID NO: 145117 - DNA, 33 bp, Homo sapien
gaaagtactcttttcacgtacgcattttgatgt

SEQ ID NO: 145118 - DNA, 33 bp, Homo sapien
gaaagtactcttttcatgtacgcattttgatgt

SEQ ID NO: 145119 - DNA, 33 bp, Homo sapien
ccctagtatacaaatgcagatacctgtttgaaa

SEQ ID NO: 145120 - DNA, 33 bp, Homo sapien
ccctagtatacaaatggagatacctgtttgaaa

SEQ ID NO: 145121 - DNA, 33 bp, Homo sapien
aggaaggaacagtaaaaataagatcagatatca

SEQ ID NO: 145122 - DNA, 33 bp, Homo sapien
aggaaggaacagtaaagataagatcagatatca

SEQ ID NO: 145123 - DNA, 33 bp, Homo sapien
cttcaccacggtgttaacagaggcagaaaatgg

SEQ ID NO: 145124 - DNA, 33 bp, Homo sapien
cttcaccacggtgttatcagaggcagaaaatgg

SEQ ID NO: 145125 - DNA, 33 bp, Homo sapien
ggctcaaacgcatctggaactgtgggtgccaag

SEQ ID NO: 145126 - DNA, 33 bp, Homo sapien
ggctcaaacgcatctgtaactgtgggtgccaag

SEQ ID NO: 145127 - DNA, 33 bp, Homo sapien
gtacagagatatcgcaaccaatactcatgcaga

SEQ ID NO: 145128 - DNA, 33 bp, Homo sapien
gtacagagatatcgcagccaatactcatgcaga

SEQ ID NO: 145129 - DNA, 33 bp, Homo sapien
gtatgagtgtatcatagaatatttcattgtccg

SEQ ID NO: 145130 - DNA, 33 bp, Homo sapien
gtatgagtgtatcatataatatttcattgtccg

SEQ ID NO: 145131 - DNA, 33 bp, Homo sapien
ttaaatgagaatcttccgaacttgacttttaaa

SEQ ID NO: 145132 - DNA, 33 bp, Homo sapien
ttaaatgagaatcttctgaacttgacttttaaa

SEQ ID NO: 145133 - DNA, 33 bp, Homo sapien
aactcattccgtcgtacctaagtattcctctgc

SEQ ID NO: 145134 - DNA, 33 bp, Homo sapien
aactcattccgtcgtatctaagtattcctctgc

SEQ ID NO: 145135 - DNA, 33 bp, Homo sapien
cacattagagttacaactgtgccatgtgagaaa

SEQ ID NO: 145136 - DNA, 33 bp, Homo sapien
cacattagagttacaattgtgccatgtgagaaa

SEQ ID NO: 145137 - DNA, 33 bp, Homo sapien
gccacttcttgtggacacgttctttctccttag

SEQ ID NO: 145138 - DNA, 33 bp, Homo sapien
gccacttcttgtggacgcgttctttctccttag

SEQ ID NO: 145139 - DNA, 33 bp, Homo sapien
atgataattgcttcaacagtgtcggcaaaattc

SEQ ID NO: 145140 - DNA, 33 bp, Homo sapien
atgataattgcttcaatagtgtcggcaaaattc

SEQ ID NO: 145141 - DNA, 33 bp, Homo sapien
attcctattccaatcacgtaccggcaccttcgg

SEQ ID NO: 145142 - DNA, 33 bp, Homo sapien
attcctattccaatcatgtaccggcaccttcgg

SEQ ID NO: 145143 - DNA, 33 bp, Homo sapien
aggctgaggccaagaccggacctgagctacggg

SEQ ID NO: 145144 - DNA, 33 bp, Homo sapien
aggctgaggccaagacgggacctgagctacggg

SEQ ID NO: 145145 - DNA, 33 bp, Homo sapien
aacttccacgcagaagacagcgaaaatagtgca

SEQ ID NO: 145146 - DNA, 33 bp, Homo sapien
aacttccacgcagaaggcagcgaaaatagtgca

SEQ ID NO: 145147 - DNA, 33 bp, Homo sapien
acttgctaagtggttgcaaatccctagcctaat

SEQ ID NO: 145148 - DNA, 33 bp, Homo sapien
acttgctaagtggttgtaaatccctagcctaat

SEQ ID NO: 145149 - DNA, 33 bp, Homo sapien
ttcaggttgtaccgaagtagtactttctcattt

SEQ ID NO: 145150 - DNA, 33 bp, Homo sapien
ttcaggttgtaccgaattagtactttctcattt

SEQ ID NO: 145151 - DNA, 33 bp, Homo sapien
gacaaaatggacagaaacattgaaagacacaaa

SEQ ID NO: 145152 - DNA, 33 bp, Homo sapien
gacaaaatggacagaatcattgaaagacacaaa

SEQ ID NO: 145153 - DNA, 33 bp, Homo sapien
caccttaaccaagacacagagactaaaataaag

SEQ ID NO: 145154 - DNA, 33 bp, Homo sapien
caccttaaccaagacatagagactaaaataaag

SEQ ID NO: 145155 - DNA, 33 bp, Homo sapien
cggaagagttaggagtgaaaacgaggactttgt

SEQ ID NO: 145156 - DNA, 33 bp, Homo sapien
cggaagagttaggagttaaaacgaggactttgt

SEQ ID NO: 145157 - DNA, 33 bp, Homo sapien
ggctcgtggtcagtcacgtttttgttcttagga

SEQ ID NO: 145158 - DNA, 33 bp, Homo sapien
ggctcgtggtcagtcatgtttttgttcttagga

SEQ ID NO: 145159 - DNA, 33 bp, Homo sapien
gctgcaaccctgtgtcacaaatagtaggttctc

SEQ ID NO: 145160 - DNA, 33 bp, Homo sapien
gctgcaaccctgtgtcgcaaatagtaggttctc

SEQ ID NO: 145161 - DNA, 33 bp, Homo sapien
gaggtggttgtaaatacaattagcagaggagat

SEQ ID NO: 145162 - DNA, 33 bp, Homo sapien
gaggtggttgtaaatagaattagcagaggagat

SEQ ID NO: 145163 - DNA, 33 bp, Homo sapien
tagtgcagtattaacacatggtagaaaatggaa

SEQ ID NO: 145164 - DNA, 33 bp, Homo sapien
tagtgcagtattaacagatggtagaaaatggaa

SEQ ID NO: 145165 - DNA, 33 bp, Homo sapien
gcatttgtctgaaatacagagtcaaaaggtttt

SEQ ID NO: 145166 - DNA, 33 bp, Homo sapien
gcatttgtctgaaatatagagtcaaaaggtttt

SEQ ID NO: 145167 - DNA, 33 bp, Homo sapien
ctctgctctttgctaaccgaataaacagtgtac

SEQ ID NO: 145168 - DNA, 33 bp, Homo sapien
ctctgctctttgctaagcgaataaacagtgtac

SEQ ID NO: 145169 - DNA, 33 bp, Homo sapien
ttctgcttggcttaaacattattcaatttcaga

SEQ ID NO: 145170 - DNA, 33 bp, Homo sapien
ttctgcttggcttaaatattattcaatttcaga

SEQ ID NO: 145171 - DNA, 33 bp, Homo sapien
catacactgtttttcacggtggagcaggagggt

SEQ ID NO: 145172 - DNA, 33 bp, Homo sapien
catacactgtttttcatggtggagcaggagggt

SEQ ID NO: 145173 - DNA, 33 bp, Homo sapien
acagcaggggcggcgacggaagacctcgggcca

SEQ ID NO: 145174 - DNA, 33 bp, Homo sapien
acagcaggggcggcgatggaagacctcgggcca

SEQ ID NO: 145175 - DNA, 33 bp, Homo sapien
attaaaatgtgcagaaaaaggaattggtcaagg

SEQ ID NO: 145176 - DNA, 33 bp, Homo sapien
attaaaatgtgcagaagaaggaattggtcaagg

SEQ ID NO: 145177 - DNA, 33 bp, Homo sapien
tgcttttggcaaactaaggtagaaaggatttct

SEQ ID NO: 145178 - DNA, 33 bp, Homo sapien
tgcttttggcaaactagggtagaaaggatttct

SEQ ID NO: 145179 - DNA, 33 bp, Homo sapien
tctatgtggaagctacaagaaaaacatcccctc

SEQ ID NO: 145180 - DNA, 33 bp, Homo sapien
tctatgtggaagctacgagaaaaacatcccctc

SEQ ID NO: 145181 - DNA, 33 bp, Homo sapien
agcaaaagcattcataagagctacatccatttt

SEQ ID NO: 145182 - DNA, 33 bp, Homo sapien
agcaaaagcattcataggagctacatccatttt

SEQ ID NO: 145183 - DNA, 33 bp, Homo sapien
gctctgcacagggacaccatgaatttcctggga

SEQ ID NO: 145184 - DNA, 33 bp, Homo sapien
gctctgcacagggacatcatgaatttcctggga

SEQ ID NO: 145185 - DNA, 33 bp, Homo sapien
ctcttgaaaccgctacccttctcatccgataac

SEQ ID NO: 145186 - DNA, 33 bp, Homo sapien
ctcttgaaaccgctactcttctcatccgataac

SEQ ID NO: 145187 - DNA, 33 bp, Homo sapien
gtagccgtggatcaaacgatgaaggcagagtta

SEQ ID NO: 145188 - DNA, 33 bp, Homo sapien
gtagccgtggatcaaatgatgaaggcagagtta

SEQ ID NO: 145189 - DNA, 33 bp, Homo sapien
ctaattaaaagcatcaaaattaagttgctaagt

SEQ ID NO: 145190 - DNA, 33 bp, Homo sapien
ctaattaaaagcatcagaattaagttgctaagt

SEQ ID NO: 145191 - DNA, 33 bp, Homo sapien
atgctagaaactttcacagagctttcgggagaa

SEQ ID NO: 145192 - DNA, 33 bp, Homo sapien
atgctagaaactttcatagagctttcgggagaa

SEQ ID NO: 145193 - DNA, 33 bp, Homo sapien
gggatctgatttttacagcgcgttgggggatat

SEQ ID NO: 145194 - DNA, 33 bp, Homo sapien
gggatctgatttttacggcgcgttgggggatat

SEQ ID NO: 145195 - DNA, 33 bp, Homo sapien
gctcatcctaatttgacgatgagtttggtaacg

SEQ ID NO: 145196 - DNA, 33 bp, Homo sapien
gctcatcctaatttgatgatgagtttggtaacg

SEQ ID NO: 145197 - DNA, 33 bp, Homo sapien
tgggtcccatgaacgacggaagcctcccagtga

SEQ ID NO: 145198 - DNA, 33 bp, Homo sapien
tgggtcccatgaacgatggaagcctcccagtga

SEQ ID NO: 145199 - DNA, 33 bp, Homo sapien
tctgcaattcctcatgaaagagctcctccaagc

SEQ ID NO: 145200 - DNA, 33 bp, Homo sapien
tctgcaattcctcatgcaagagctcctccaagc

SEQ ID NO: 145201 - DNA, 33 bp, Homo sapien
acccgaggggtgttcaataagctgtttctgctg

SEQ ID NO: 145202 - DNA, 33 bp, Homo sapien
acccgaggggtgttcagtaagctgtttctgctg

SEQ ID NO: 145203 - DNA, 33 bp, Homo sapien
ctgtttccagaacttaagtattctcactcaggg

SEQ ID NO: 145204 - DNA, 33 bp, Homo sapien
ctgtttccagaacttaggtattctcactcaggg

SEQ ID NO: 145205 - DNA, 33 bp, Homo sapien
tgaactcgctaccaaacgcaccctctgtacttt

SEQ ID NO: 145206 - DNA, 33 bp, Homo sapien
tgaactcgctaccaaaggcaccctctgtacttt

SEQ ID NO: 145207 - DNA, 33 bp, Homo sapien
gctgctttcaggaagaagagtaaatgaggctgg

SEQ ID NO: 145208 - DNA, 33 bp, Homo sapien
gctgctttcaggaagacgagtaaatgaggctgg

SEQ ID NO: 145209 - DNA, 33 bp, Homo sapien
tcatgagaaaatcaaactacacataatacaaag

SEQ ID NO: 145210 - DNA, 33 bp, Homo sapien
tcatgagaaaatcaaattacacataatacaaag

SEQ ID NO: 145211 - DNA, 33 bp, Homo sapien
cgatagcactgagaagacctgagcactgcatcc

SEQ ID NO: 145212 - DNA, 33 bp, Homo sapien
cgatagcactgagaaggcctgagcactgcatcc

SEQ ID NO: 145213 - DNA, 33 bp, Homo sapien
caaaacactctccttacgcgcctgacttcagaa

SEQ ID NO: 145214 - DNA, 33 bp, Homo sapien
caaaacactctccttatgcgcctgacttcagaa

SEQ ID NO: 145215 - DNA, 33 bp, Homo sapien
gatgtcttcctgcaaagaatctgatgatctctc

SEQ ID NO: 145216 - DNA, 33 bp, Homo sapien
gatgtcttcctgcaaataatctgatgatctctc

SEQ ID NO: 145217 - DNA, 33 bp, Homo sapien
ggtgccacggtccctacaagatgagacttgggg

SEQ ID NO: 145218 - DNA, 33 bp, Homo sapien
ggtgccacggtccctataagatgagacttgggg

SEQ ID NO: 145219 - DNA, 33 bp, Homo sapien
agtgttgccacacctacgtcctcgggcctgccc

SEQ ID NO: 145220 - DNA, 33 bp, Homo sapien
agtgttgccacacctatgtcctcgggcctgccc

SEQ ID NO: 145221 - DNA, 33 bp, Homo sapien
tttctgcaccatttgggcacaaattctgttttc

SEQ ID NO: 145222 - DNA, 33 bp, Homo sapien
tttctgcaccatttggtcacaaattctgttttc

SEQ ID NO: 145223 - DNA, 33 bp, Homo sapien
tgaagaaaaatgaggccgattctcccgcacaga

SEQ ID NO: 145224 - DNA, 33 bp, Homo sapien
tgaagaaaaatgaggctgattctcccgcacaga

SEQ ID NO: 145225 - DNA, 33 bp, Homo sapien
aggaagagggcagagacggtgaggatctcccag

SEQ ID NO: 145226 - DNA, 33 bp, Homo sapien
aggaagagggcagagatggtgaggatctcccag

SEQ ID NO: 145227 - DNA, 33 bp, Homo sapien
atgtgaaatgttattacggactttcttcttcat

SEQ ID NO: 145228 - DNA, 33 bp, Homo sapien
atgtgaaatgttattatggactttcttcttcat

SEQ ID NO: 145229 - DNA, 33 bp, Homo sapien
gttttaagatgggatcaaatttagaaacagaag

SEQ ID NO: 145230 - DNA, 33 bp, Homo sapien
gttttaagatgggatcgaatttagaaacagaag

SEQ ID NO: 145231 - DNA, 33 bp, Homo sapien
gagaaaattcagttcacactcacgtgggtgaga

SEQ ID NO: 145232 - DNA, 33 bp, Homo sapien
gagaaaattcagttcatactcacgtgggtgaga

SEQ ID NO: 145233 - DNA, 33 bp, Homo sapien
ggaaagttcagtatcgcattaataaagagaaac

SEQ ID NO: 145234 - DNA, 33 bp, Homo sapien
ggaaagttcagtatcggattaataaagagaaac

SEQ ID NO: 145235 - DNA, 33 bp, Homo sapien
ggacttttgaaacagaaaacaaggctgaatctc

SEQ ID NO: 145236 - DNA, 33 bp, Homo sapien
ggacttttgaaacagacaacaaggctgaatctc

SEQ ID NO: 145237 - DNA, 33 bp, Homo sapien
cctttgaaaaaggcatgaccctttgcaatgaaa

SEQ ID NO: 145238 - DNA, 33 bp, Homo sapien
cctttgaaaaaggcattaccctttgcaatgaaa

SEQ ID NO: 145239 - DNA, 33 bp, Homo sapien
cgagctgaaggaaccacgtgagtaaggaactac

SEQ ID NO: 145240 - DNA, 33 bp, Homo sapien
cgagctgaaggaaccatgtgagtaaggaactac

SEQ ID NO: 145241 - DNA, 33 bp, Homo sapien
atgggatgctattgacaaggcatttataaatat

SEQ ID NO: 145242 - DNA, 33 bp, Homo sapien
atgggatgctattgacgaggcatttataaatat

SEQ ID NO: 145243 - DNA, 33 bp, Homo sapien
gcacctggccaggaagaactcattgtgatggcc

SEQ ID NO: 145244 - DNA, 33 bp, Homo sapien
gcacctggccaggaaggactcattgtgatggcc

SEQ ID NO: 145245 - DNA, 33 bp, Homo sapien
ctatgtgttttagagagagtttcctgtgggttt

SEQ ID NO: 145246 - DNA, 33 bp, Homo sapien
ctatgtgttttagagatagtttcctgtgggttt

SEQ ID NO: 145247 - DNA, 33 bp, Homo sapien
gcctgtcaccaggttacaaagatattctcccat

SEQ ID NO: 145248 - DNA, 33 bp, Homo sapien
gcctgtcaccaggttataaagatattctcccat

SEQ ID NO: 145249 - DNA, 33 bp, Homo sapien
acagttactgaccaagaaaattaggggaaaaaa

SEQ ID NO: 145250 - DNA, 33 bp, Homo sapien
acagttactgaccaagcaaattaggggaaaaaa

SEQ ID NO: 145251 - DNA, 33 bp, Homo sapien
ttctggaaatcagtctaacatatcaagagacta

SEQ ID NO: 145252 - DNA, 33 bp, Homo sapien
ttctggaaatcagtctgacatatcaagagacta

SEQ ID NO: 145253 - DNA, 33 bp, Homo sapien
accgacaactgtaagaatacccttcctccatca

SEQ ID NO: 145254 - DNA, 33 bp, Homo sapien
accgacaactgtaagagtacccttcctccatca

SEQ ID NO: 145255 - DNA, 33 bp, Homo sapien
caaacccagcctttcacggaggagaaaatgaaa

SEQ ID NO: 145256 - DNA, 33 bp, Homo sapien
caaacccagcctttcatggaggagaaaatgaaa

SEQ ID NO: 145257 - DNA, 33 bp, Homo sapien
gatgttcagctcctccgagtttcccatgctccc

SEQ ID NO: 145258 - DNA, 33 bp, Homo sapien
gatgttcagctcctcctagtttcccatgctccc

SEQ ID NO: 145259 - DNA, 33 bp, Homo sapien
gagcgggtcatacaaacagagcctgacacgacc

SEQ ID NO: 145260 - DNA, 33 bp, Homo sapien
gagcgggtcatacaaatagagcctgacacgacc

SEQ ID NO: 145261 - DNA, 33 bp, Homo sapien
catctttattctaaacagcactccggccctgga

SEQ ID NO: 145262 - DNA, 33 bp, Homo sapien
catctttattctaaacggcactccggccctgga

SEQ ID NO: 145263 - DNA, 33 bp, Homo sapien
attactggttgagtaacgatttcataagcctga

SEQ ID NO: 145264 - DNA, 33 bp, Homo sapien
attactggttgagtaatgatttcataagcctga

SEQ ID NO: 145265 - DNA, 33 bp, Homo sapien
acagggagctcttgacagcggaatacctggacc

SEQ ID NO: 145266 - DNA, 33 bp, Homo sapien
acagggagctcttgacggcggaatacctggacc

SEQ ID NO: 145267 - DNA, 33 bp, Homo sapien
gagagggctgctcctccaggttttggaatccca

SEQ ID NO: 145268 - DNA, 33 bp, Homo sapien
gagagggctgctcctctaggttttggaatccca

SEQ ID NO: 145269 - DNA, 33 bp, Homo sapien
ggccttagtgaatcgcaacacatcagtgttggg

SEQ ID NO: 145270 - DNA, 33 bp, Homo sapien
ggccttagtgaatcgcgacacatcagtgttggg

SEQ ID NO: 145271 - DNA, 33 bp, Homo sapien
agatacattagttctcccaagcacagcggctat

SEQ ID NO: 145272 - DNA, 33 bp, Homo sapien
agatacattagttctctcaagcacagcggctat

SEQ ID NO: 145273 - DNA, 33 bp, Homo sapien
cacatattagttaaaaaaatccagctgacttta

SEQ ID NO: 145274 - DNA, 33 bp, Homo sapien
cacatattagttaaaacaatccagctgacttta

SEQ ID NO: 145275 - DNA, 33 bp, Homo sapien
tcgatgaaagtcatacacacgtttcaccttttt

SEQ ID NO: 145276 - DNA, 33 bp, Homo sapien
tcgatgaaagtcatacgcacgtttcaccttttt

SEQ ID NO: 145277 - DNA, 33 bp, Homo sapien
tttaattgctgcaaagccatcataggaatcaca

SEQ ID NO: 145278 - DNA, 33 bp, Homo sapien
tttaattgctgcaaagtcatcataggaatcaca

SEQ ID NO: 145279 - DNA, 33 bp, Homo sapien
gcacatattttataccacctggctttattaatt

SEQ ID NO: 145280 - DNA, 33 bp, Homo sapien
gcacatattttataccgcctggctttattaatt

SEQ ID NO: 145281 - DNA, 33 bp, Homo sapien
cgagaggaagtcaggcacatcttttttggcttg

SEQ ID NO: 145282 - DNA, 33 bp, Homo sapien
cgagaggaagtcaggcgcatcttttttggcttg

SEQ ID NO: 145283 - DNA, 33 bp, Homo sapien
gttcttaccacgtaaaattaggcaaaaatgata

SEQ ID NO: 145284 - DNA, 33 bp, Homo sapien
gttcttaccacgtaaagttaggcaaaaatgata

SEQ ID NO: 145285 - DNA, 33 bp, Homo sapien
cacttgttcaacaccacgaagttacagaaggtg

SEQ ID NO: 145286 - DNA, 33 bp, Homo sapien
cacttgttcaacaccatgaagttacagaaggtg

SEQ ID NO: 145287 - DNA, 33 bp, Homo sapien
ctggactggctgtctgaaagtgggacagcaatc

SEQ ID NO: 145288 - DNA, 33 bp, Homo sapien
ctggactggctgtctgcaagtgggacagcaatc

SEQ ID NO: 145289 - DNA, 33 bp, Homo sapien
tagaatggaggacaggaatcggttgtatctgct

SEQ ID NO: 145290 - DNA, 33 bp, Homo sapien
tagaatggaggacagggatcggttgtatctgct

SEQ ID NO: 145291 - DNA, 33 bp, Homo sapien
ggatttgccctatcacaaaaaaaattaattcca

SEQ ID NO: 145292 - DNA, 33 bp, Homo sapien
ggatttgccctatcacgaaaaaaattaattcca

SEQ ID NO: 145293 - DNA, 33 bp, Homo sapien
gcccctccctaaaccactgagcagcatcccagg

SEQ ID NO: 145294 - DNA, 33 bp, Homo sapien
gcccctccctaaaccagtgagcagcatcccagg

SEQ ID NO: 145295 - DNA, 33 bp, Homo sapien
tgtcccttttatttgaggtaacacccaggaaag

SEQ ID NO: 145296 - DNA, 33 bp, Homo sapien
tgtcccttttatttgatgtaacacccaggaaag

SEQ ID NO: 145297 - DNA, 33 bp, Homo sapien
gggggctccgtaaagacgtgtgcaactgataaa

SEQ ID NO: 145298 - DNA, 33 bp, Homo sapien
gggggctccgtaaagatgtgtgcaactgataaa

SEQ ID NO: 145299 - DNA, 33 bp, Homo sapien
ggaacgttctgcatcccgactttatcaacatgg

SEQ ID NO: 145300 - DNA, 33 bp, Homo sapien
ggaacgttctgcatcctgactttatcaacatgg

SEQ ID NO: 145301 - DNA, 33 bp, Homo sapien
ggcttatggtttctgacgcaacaaacaataacc

SEQ ID NO: 145302 - DNA, 33 bp, Homo sapien
ggcttatggtttctgatgcaacaaacaataacc

SEQ ID NO: 145303 - DNA, 33 bp, Homo sapien
agacggaccttgaacacaagactcaagggtaga

SEQ ID NO: 145304 - DNA, 33 bp, Homo sapien
agacggaccttgaacataagactcaagggtaga

SEQ ID NO: 145305 - DNA, 33 bp, Homo sapien
ttggcaaatcttccagactcagatggacacatc

SEQ ID NO: 145306 - DNA, 33 bp, Homo sapien
ttggcaaatcttccagtctcagatggacacatc

SEQ ID NO: 145307 - DNA, 33 bp, Homo sapien
ccttgcagttctagacgagcatggtgagctcac

SEQ ID NO: 145308 - DNA, 33 bp, Homo sapien
ccttgcagttctagactagcatggtgagctcac

SEQ ID NO: 145309 - DNA, 33 bp, Homo sapien
attaaaccatggtgcaaggcattgatgatagat

SEQ ID NO: 145310 - DNA, 33 bp, Homo sapien
attaaaccatggtgcagggcattgatgatagat

SEQ ID NO: 145311 - DNA, 33 bp, Homo sapien
attgtctgttcctttacagaagagattgaccga

SEQ ID NO: 145312 - DNA, 33 bp, Homo sapien
attgtctgttcctttagagaagagattgaccga

SEQ ID NO: 145313 - DNA, 33 bp, Homo sapien
atttaaaacgagcaaacgccaattaataaaata

SEQ ID NO: 145314 - DNA, 33 bp, Homo sapien
atttaaaacgagcaaatgccaattaataaaata

SEQ ID NO: 145315 - DNA, 33 bp, Homo sapien
aggtctggaagctccaatctcttggtatcttag

SEQ ID NO: 145316 - DNA, 33 bp, Homo sapien
aggtctggaagctccattctcttggtatcttag

SEQ ID NO: 145317 - DNA, 33 bp, Homo sapien
tgatacctgtccacacacctaaaagttcaggtt

SEQ ID NO: 145318 - DNA, 33 bp, Homo sapien
tgatacctgtccacacgcctaaaagttcaggtt

SEQ ID NO: 145319 - DNA, 33 bp, Homo sapien
agccaaaatttgagagcaacttatgtgtctgtc

SEQ ID NO: 145320 - DNA, 33 bp, Homo sapien
agccaaaatttgagaggaacttatgtgtctgtc

SEQ ID NO: 145321 - DNA, 33 bp, Homo sapien
taaatgtgtgtatcagccgtggcaaaataccct

SEQ ID NO: 145322 - DNA, 33 bp, Homo sapien
taaatgtgtgtatcagtcgtggcaaaataccct

SEQ ID NO: 145323 - DNA, 33 bp, Homo sapien
actttccagtgggttacggctgatatttaggag

SEQ ID NO: 145324 - DNA, 33 bp, Homo sapien
actttccagtgggttatggctgatatttaggag

SEQ ID NO: 145325 - DNA, 33 bp, Homo sapien
agcaaagttgctgagccgcccagagagagaagc

SEQ ID NO: 145326 - DNA, 33 bp, Homo sapien
agcaaagttgctgagctgcccagagagagaagc

SEQ ID NO: 145327 - DNA, 33 bp, Homo sapien
actctgctaagggctcagaaaggcatcacgctg

SEQ ID NO: 145328 - DNA, 33 bp, Homo sapien
actctgctaagggctcggaaaggcatcacgctg

SEQ ID NO: 145329 - DNA, 33 bp, Homo sapien
gtgacaagccagctgaacactgtggatgcgaga

SEQ ID NO: 145330 - DNA, 33 bp, Homo sapien
gtgacaagccagctgaccactgtggatgcgaga

SEQ ID NO: 145331 - DNA, 33 bp, Homo sapien
attagataggtacagtaaaagtctatgatgaca

SEQ ID NO: 145332 - DNA, 33 bp, Homo sapien
attagataggtacagtgaaagtctatgatgaca

SEQ ID NO: 145333 - DNA, 33 bp, Homo sapien
gaggaccatgaaagagcaacgctgattagttga

SEQ ID NO: 145334 - DNA, 33 bp, Homo sapien
gaggaccatgaaagagtaacgctgattagttga

SEQ ID NO: 145335 - DNA, 33 bp, Homo sapien
gtgtctgtgtaagtctcaatactgtaaagctac

SEQ ID NO: 145336 - DNA, 33 bp, Homo sapien
gtgtctgtgtaagtcttaatactgtaaagctac

SEQ ID NO: 145337 - DNA, 33 bp, Homo sapien
gactgcattgtctgataaaagggaaaatagaga

SEQ ID NO: 145338 - DNA, 33 bp, Homo sapien
gactgcattgtctgatcaaagggaaaatagaga

SEQ ID NO: 145339 - DNA, 33 bp, Homo sapien
tgggaactggaatgctcacgtccagagatagat

SEQ ID NO: 145340 - DNA, 33 bp, Homo sapien
tgggaactggaatgctgacgtccagagatagat

SEQ ID NO: 145341 - DNA, 33 bp, Homo sapien
aacacacagctgatcacgtaataggcgaagaga

SEQ ID NO: 145342 - DNA, 33 bp, Homo sapien
aacacacagctgatcatgtaataggcgaagaga

SEQ ID NO: 145343 - DNA, 33 bp, Homo sapien
aagctcttggctaagacacagggctgatttact

SEQ ID NO: 145344 - DNA, 33 bp, Homo sapien
aagctcttggctaagatacagggctgatttact

SEQ ID NO: 145345 - DNA, 33 bp, Homo sapien
gggtgttcgagcctgacgctgggccgccagtct

SEQ ID NO: 145346 - DNA, 33 bp, Homo sapien
gggtgttcgagcctgatgctgggccgccagtct

SEQ ID NO: 145347 - DNA, 33 bp, Homo sapien
aacaatggttacaatacgccagaatgagtcaac

SEQ ID NO: 145348 - DNA, 33 bp, Homo sapien
aacaatggttacaatatgccagaatgagtcaac

SEQ ID NO: 145349 - DNA, 33 bp, Homo sapien
ctgtctggatatgtatcaaaaattctaatgcaa

SEQ ID NO: 145350 - DNA, 33 bp, Homo sapien
ctgtctggatatgtattaaaaattctaatgcaa

SEQ ID NO: 145351 - DNA, 33 bp, Homo sapien
gacgcaaaaaaaatcacgctaacactgaccaga

SEQ ID NO: 145352 - DNA, 33 bp, Homo sapien
gacgcaaaaaaaatcatgctaacactgaccaga

SEQ ID NO: 145353 - DNA, 33 bp, Homo sapien
aactcgaatcaccttccacctgagagatacttc

SEQ ID NO: 145354 - DNA, 33 bp, Homo sapien
aactcgaatcaccttctacctgagagatacttc

SEQ ID NO: 145355 - DNA, 33 bp, Homo sapien
tgattaggtatacccactcagtgaccaacaaat

SEQ ID NO: 145356 - DNA, 33 bp, Homo sapien
tgattaggtatacccattcagtgaccaacaaat

SEQ ID NO: 145357 - DNA, 33 bp, Homo sapien
aagcatcgttactaaccgaaggcccagttcctg

SEQ ID NO: 145358 - DNA, 33 bp, Homo sapien
aagcatcgttactaactgaaggcccagttcctg

SEQ ID NO: 145359 - DNA, 33 bp, Homo sapien
tagttcataaatcccaacccagctattgcaatc

SEQ ID NO: 145360 - DNA, 33 bp, Homo sapien
tagttcataaatcccatcccagctattgcaatc

SEQ ID NO: 145361 - DNA, 33 bp, Homo sapien
cagtagaatattagcgaccaggaggaacccgtg

SEQ ID NO: 145362 - DNA, 33 bp, Homo sapien
cagtagaatattagcggccaggaggaacccgtg

SEQ ID NO: 145363 - DNA, 33 bp, Homo sapien
tccaaaaggcttttaaacaccacagtagtgctg

SEQ ID NO: 145364 - DNA, 33 bp, Homo sapien
tccaaaaggcttttaatcaccacagtagtgctg

SEQ ID NO: 145365 - DNA, 33 bp, Homo sapien
atatccatttgcagagcaagcaggtttagtata

SEQ ID NO: 145366 - DNA, 33 bp, Homo sapien
atatccatttgcagagtaagcaggtttagtata

SEQ ID NO: 145367 - DNA, 33 bp, Homo sapien
aacttatgtagtaaagaagagaaggggtcctag

SEQ ID NO: 145368 - DNA, 33 bp, Homo sapien
aacttatgtagtaaagcagagaaggggtcctag

SEQ ID NO: 145369 - DNA, 33 bp, Homo sapien
ccaaatctgtatatcaagtgcagacttcttccc

SEQ ID NO: 145370 - DNA, 33 bp, Homo sapien
ccaaatctgtatatcaggtgcagacttcttccc

SEQ ID NO: 145371 - DNA, 33 bp, Homo sapien
gagcacaggcagacaaattagttccctgtgggt

SEQ ID NO: 145372 - DNA, 33 bp, Homo sapien
gagcacaggcagacaagttagttccctgtgggt

SEQ ID NO: 145373 - DNA, 33 bp, Homo sapien
attaaaaataacatcaactgtattggtctgtat

SEQ ID NO: 145374 - DNA, 33 bp, Homo sapien
attaaaaataacatcagctgtattggtctgtat

SEQ ID NO: 145375 - DNA, 33 bp, Homo sapien
gtttgctttgaataggcattatactcagttggc

SEQ ID NO: 145376 - DNA, 33 bp, Homo sapien
gtttgctttgaataggtattatactcagttggc

SEQ ID NO: 145377 - DNA, 33 bp, Homo sapien
gctaatcactatattcacatctgccctatttgc

SEQ ID NO: 145378 - DNA, 33 bp, Homo sapien
gctaatcactatattctcatctgccctatttgc

SEQ ID NO: 145379 - DNA, 33 bp, Homo sapien
gacattttagggttacactctacagttacatta

SEQ ID NO: 145380 - DNA, 33 bp, Homo sapien
gacattttagggttactctctacagttacatta

SEQ ID NO: 145381 - DNA, 33 bp, Homo sapien
gttgttcaagtgcttaagtatctctgtgagcca

SEQ ID NO: 145382 - DNA, 33 bp, Homo sapien
gttgttcaagtgcttaggtatctctgtgagcca

SEQ ID NO: 145383 - DNA, 33 bp, Homo sapien
tgagagtttttggaaacttctagagtatgaact

SEQ ID NO: 145384 - DNA, 33 bp, Homo sapien
tgagagtttttggaaagttctagagtatgaact

SEQ ID NO: 145385 - DNA, 33 bp, Homo sapien
taactactctgaccaaaaatgggtgactaactc

SEQ ID NO: 145386 - DNA, 33 bp, Homo sapien
taactactctgaccaacaatgggtgactaactc

SEQ ID NO: 145387 - DNA, 33 bp, Homo sapien
tgactttcctttgttcaaatggctcttgctttc

SEQ ID NO: 145388 - DNA, 33 bp, Homo sapien
tgactttcctttgttcgaatggctcttgctttc

SEQ ID NO: 145389 - DNA, 33 bp, Homo sapien
ctagttggtacccttcagaagattgcccaacac

SEQ ID NO: 145390 - DNA, 33 bp, Homo sapien
ctagttggtacccttcggaagattgcccaacac

SEQ ID NO: 145391 - DNA, 33 bp, Homo sapien
gctcttcctagctctcccaatggctggctcctt

SEQ ID NO: 145392 - DNA, 33 bp, Homo sapien
gctcttcctagctctctcaatggctggctcctt

SEQ ID NO: 145393 - DNA, 33 bp, Homo sapien
gcttttaaccaaagtgcagagtgtcaaagcaaa

SEQ ID NO: 145394 - DNA, 33 bp, Homo sapien
gcttttaaccaaagtgtagagtgtcaaagcaaa

SEQ ID NO: 145395 - DNA, 33 bp, Homo sapien
tccattcctgtcataaatcagttactctggctg

SEQ ID NO: 145396 - DNA, 33 bp, Homo sapien
tccattcctgtcataagtcagttactctggctg

SEQ ID NO: 145397 - DNA, 33 bp, Homo sapien
taaatgacgctgctatcacaactcccaacttct

SEQ ID NO: 145398 - DNA, 33 bp, Homo sapien
taaatgacgctgctattacaactcccaacttct

SEQ ID NO: 145399 - DNA, 33 bp, Homo sapien
aagccactgtaaaacacaatatggcttttaagg

SEQ ID NO: 145400 - DNA, 33 bp, Homo sapien
aagccactgtaaaacataatatggcttttaagg

SEQ ID NO: 145401 - DNA, 33 bp, Homo sapien
ccaggacctcagcttcgcttaacacgagcagac

SEQ ID NO: 145402 - DNA, 33 bp, Homo sapien
ccaggacctcagcttctcttaacacgagcagac

SEQ ID NO: 145403 - DNA, 33 bp, Homo sapien
gttgaactaaaggtggcagatctcttaatactg

SEQ ID NO: 145404 - DNA, 33 bp, Homo sapien
gttgaactaaaggtgggagatctcttaatactg

SEQ ID NO: 145405 - DNA, 33 bp, Homo sapien
taagttattaaaatgacgctttctaattataaa

SEQ ID NO: 145406 - DNA, 33 bp, Homo sapien
taagttattaaaatgaggctttctaattataaa

SEQ ID NO: 145407 - DNA, 33 bp, Homo sapien
cacaaaggccagggaaagttagagtcatatttc

SEQ ID NO: 145408 - DNA, 33 bp, Homo sapien
cacaaaggccagggaacgttagagtcatatttc

SEQ ID NO: 145409 - DNA, 33 bp, Homo sapien
catttgttctaatgaacgaacaaatagtgacac

SEQ ID NO: 145410 - DNA, 33 bp, Homo sapien
catttgttctaatgaatgaacaaatagtgacac

SEQ ID NO: 145411 - DNA, 33 bp, Homo sapien
ggagaaaagagatgaacatgcagaagtctccac

SEQ ID NO: 145412 - DNA, 33 bp, Homo sapien
ggagaaaagagatgaatatgcagaagtctccac

SEQ ID NO: 145413 - DNA, 33 bp, Homo sapien
tgagtgtgggaacaaggctagtttgccaaaatg

SEQ ID NO: 145414 - DNA, 33 bp, Homo sapien
tgagtgtgggaacaagtctagtttgccaaaatg

SEQ ID NO: 145415 - DNA, 33 bp, Homo sapien
ttgtgtggaaattaaccgaacttataactttga

SEQ ID NO: 145416 - DNA, 33 bp, Homo sapien
ttgtgtggaaattaactgaacttataactttga

SEQ ID NO: 145417 - DNA, 33 bp, Homo sapien
cacagaccagtgcacaaaaaactgaagccagaa

SEQ ID NO: 145418 - DNA, 33 bp, Homo sapien
cacagaccagtgcacacaaaactgaagccagaa

SEQ ID NO: 145419 - DNA, 33 bp, Homo sapien
gtagggagcagggatccgagtcatcgagcaccg

SEQ ID NO: 145420 - DNA, 33 bp, Homo sapien
gtagggagcagggatctgagtcatcgagcaccg

SEQ ID NO: 145421 - DNA, 33 bp, Homo sapien
actgcttgtggctgagacccttgacgtaaaaat

SEQ ID NO: 145422 - DNA, 33 bp, Homo sapien
actgcttgtggctgagtcccttgacgtaaaaat

SEQ ID NO: 145423 - DNA, 33 bp, Homo sapien
ccggtttgcagacaggaaatgaagattcagaga

SEQ ID NO: 145424 - DNA, 33 bp, Homo sapien
ccggtttgcagacagggaatgaagattcagaga

SEQ ID NO: 145425 - DNA, 33 bp, Homo sapien
attatcagaatgagaacaatggagcagacaaaa

SEQ ID NO: 145426 - DNA, 33 bp, Homo sapien
attatcagaatgagaataatggagcagacaaaa

SEQ ID NO: 145427 - DNA, 33 bp, Homo sapien
tcctcagcaataaggcaccaactgaacgacagc

SEQ ID NO: 145428 - DNA, 33 bp, Homo sapien
tcctcagcaataaggcgccaactgaacgacagc

SEQ ID NO: 145429 - DNA, 33 bp, Homo sapien
acactctcacccccacaatctcacacacacaca

SEQ ID NO: 145430 - DNA, 33 bp, Homo sapien
acactctcacccccaccatctcacacacacaca

SEQ ID NO: 145431 - DNA, 33 bp, Homo sapien
ggtgaagcttttaacacgaagatctgtctattg

SEQ ID NO: 145432 - DNA, 33 bp, Homo sapien
ggtgaagcttttaacatgaagatctgtctattg

SEQ ID NO: 145433 - DNA, 33 bp, Homo sapien
aaggcccagcggagtcacgcaagctcaggaggc

SEQ ID NO: 145434 - DNA, 33 bp, Homo sapien
aaggcccagcggagtcgcgcaagctcaggaggc

SEQ ID NO: 145435 - DNA, 33 bp, Homo sapien
tcaggtgattctgacactcacacaggttgggaa

SEQ ID NO: 145436 - DNA, 33 bp, Homo sapien
tcaggtgattctgacattcacacaggttgggaa

SEQ ID NO: 145437 - DNA, 33 bp, Homo sapien
tgcattattaatgagcaccgcatctccaacagc

SEQ ID NO: 145438 - DNA, 33 bp, Homo sapien
tgcattattaatgagcgccgcatctccaacagc

SEQ ID NO: 145439 - DNA, 33 bp, Homo sapien
tcgctggcagctctatcaaaaccagctccagct

SEQ ID NO: 145440 - DNA, 33 bp, Homo sapien
tcgctggcagctctatgaaaaccagctccagct

SEQ ID NO: 145441 - DNA, 33 bp, Homo sapien
ccggcactgggccaagactcacaacagcctggg

SEQ ID NO: 145442 - DNA, 33 bp, Homo sapien
ccggcactgggccaagcctcacaacagcctggg

SEQ ID NO: 145443 - DNA, 33 bp, Homo sapien
tgggactcagcaactactacagaagcctactcc

SEQ ID NO: 145444 - DNA, 33 bp, Homo sapien
tgggactcagcaactattacagaagcctactcc

SEQ ID NO: 145445 - DNA, 33 bp, Homo sapien
ttgcctggaagctctaaggctaaagacaaaaac

SEQ ID NO: 145446 - DNA, 33 bp, Homo sapien
ttgcctggaagctctacggctaaagacaaaaac

SEQ ID NO: 145447 - DNA, 33 bp, Homo sapien
aaagcacacgtttttacggtgcttccttcacat

SEQ ID NO: 145448 - DNA, 33 bp, Homo sapien
aaagcacacgtttttatggtgcttccttcacat

SEQ ID NO: 145449 - DNA, 33 bp, Homo sapien
gcccaacagctggatacagtaattctgtacatt

SEQ ID NO: 145450 - DNA, 33 bp, Homo sapien
gcccaacagctggatatagtaattctgtacatt

SEQ ID NO: 145451 - DNA, 33 bp, Homo sapien
gcagcttagcagcaataagcattcttactaccc

SEQ ID NO: 145452 - DNA, 33 bp, Homo sapien
gcagcttagcagcaattagcattcttactaccc

SEQ ID NO: 145453 - DNA, 33 bp, Homo sapien
gaactggattcctcaaaaaaggacaatggtgga

SEQ ID NO: 145454 - DNA, 33 bp, Homo sapien
gaactggattcctcaataaaggacaatggtgga

SEQ ID NO: 145455 - DNA, 33 bp, Homo sapien
acagtttattaaaaaacataggctatgccggag

SEQ ID NO: 145456 - DNA, 33 bp, Homo sapien
acagtttattaaaaaatataggctatgccggag

SEQ ID NO: 145457 - DNA, 33 bp, Homo sapien
gagatacctaaagcaagaataggtttctttttt

SEQ ID NO: 145458 - DNA, 33 bp, Homo sapien
gagatacctaaagcaataataggtttctttttt

SEQ ID NO: 145459 - DNA, 33 bp, Homo sapien
aaattctaaagagaaaccatttctaaccctcat

SEQ ID NO: 145460 - DNA, 33 bp, Homo sapien
aaattctaaagagaaatcatttctaaccctcat

SEQ ID NO: 145461 - DNA, 33 bp, Homo sapien
tggatctttattcggcaagtaaaccatgaatgg

SEQ ID NO: 145462 - DNA, 33 bp, Homo sapien
tggatctttattcggcgagtaaaccatgaatgg

SEQ ID NO: 145463 - DNA, 33 bp, Homo sapien
gttcctgtggctgttagggcaagttatcgcaaa

SEQ ID NO: 145464 - DNA, 33 bp, Homo sapien
gttcctgtggctgttatggcaagttatcgcaaa

SEQ ID NO: 145465 - DNA, 33 bp, Homo sapien
ccccatagcaagaaaacgggttcctgtatggag

SEQ ID NO: 145466 - DNA, 33 bp, Homo sapien
ccccatagcaagaaaatgggttcctgtatggag

SEQ ID NO: 145467 - DNA, 33 bp, Homo sapien
tctgacaacaaagcttcaactcagaggccgtct

SEQ ID NO: 145468 - DNA, 33 bp, Homo sapien
tctgacaacaaagctttaactcagaggccgtct

SEQ ID NO: 145469 - DNA, 33 bp, Homo sapien
ccagattcaagccttaaggaacttcgtgaggct

SEQ ID NO: 145470 - DNA, 33 bp, Homo sapien
ccagattcaagccttagggaacttcgtgaggct

SEQ ID NO: 145471 - DNA, 33 bp, Homo sapien
gaagccaactaagacaacctctgagcaggaggt

SEQ ID NO: 145472 - DNA, 33 bp, Homo sapien
gaagccaactaagacaccctctgagcaggaggt

SEQ ID NO: 145473 - DNA, 33 bp, Homo sapien
attatttaatagttgacgaggcaaggaattaag

SEQ ID NO: 145474 - DNA, 33 bp, Homo sapien
attatttaatagttgatgaggcaaggaattaag

SEQ ID NO: 145475 - DNA, 33 bp, Homo sapien
gttaccatttgagaaaaacttgattacaattcc

SEQ ID NO: 145476 - DNA, 33 bp, Homo sapien
gttaccatttgagaaacacttgattacaattcc

SEQ ID NO: 145477 - DNA, 33 bp, Homo sapien
agacagaggtcatccaacataaaacattcccac

SEQ ID NO: 145478 - DNA, 33 bp, Homo sapien
agacagaggtcatccagcataaaacattcccac

SEQ ID NO: 145479 - DNA, 33 bp, Homo sapien
attatgctgttttggcagcacgcactcaaccat

SEQ ID NO: 145480 - DNA, 33 bp, Homo sapien
attatgctgttttggcggcacgcactcaaccat

SEQ ID NO: 145481 - DNA, 33 bp, Homo sapien
tgttttaatgggagacaagttttagctaacagt

SEQ ID NO: 145482 - DNA, 33 bp, Homo sapien
tgttttaatgggagaccagttttagctaacagt

SEQ ID NO: 145483 - DNA, 33 bp, Homo sapien
taagattcttgaccaaattactcctaacccatt

SEQ ID NO: 145484 - DNA, 33 bp, Homo sapien
taagattcttgaccaatttactcctaacccatt

SEQ ID NO: 145485 - DNA, 33 bp, Homo sapien
gcatcctcgtatcatcaagtgagtgaaacctgc

SEQ ID NO: 145486 - DNA, 33 bp, Homo sapien
gcatcctcgtatcatcgagtgagtgaaacctgc

SEQ ID NO: 145487 - DNA, 33 bp, Homo sapien
aattctgttcctgttacctaatctgctttaaaa

SEQ ID NO: 145488 - DNA, 33 bp, Homo sapien
aattctgttcctgttatctaatctgctttaaaa

SEQ ID NO: 145489 - DNA, 33 bp, Homo sapien
gtgtaacaaagtagtaaaaaacactggcttaac

SEQ ID NO: 145490 - DNA, 33 bp, Homo sapien
gtgtaacaaagtagtacaaaacactggcttaac

SEQ ID NO: 145491 - DNA, 33 bp, Homo sapien
ggaatcctctctcttacgtcttacctcatctag

SEQ ID NO: 145492 - DNA, 33 bp, Homo sapien
ggaatcctctctcttaggtcttacctcatctag

SEQ ID NO: 145493 - DNA, 33 bp, Homo sapien
acattctcgtgagtcaagaagacttgctggcac

SEQ ID NO: 145494 - DNA, 33 bp, Homo sapien
acattctcgtgagtcaggaagacttgctggcac

SEQ ID NO: 145495 - DNA, 33 bp, Homo sapien
ctcttcaccctttgcacctgctcacatctttct

SEQ ID NO: 145496 - DNA, 33 bp, Homo sapien
ctcttcaccctttgcatctgctcacatctttct

SEQ ID NO: 145497 - DNA, 33 bp, Homo sapien
ccggcaaggatggaggaagcactgtttgttgga

SEQ ID NO: 145498 - DNA, 33 bp, Homo sapien
ccggcaaggatggaggcagcactgtttgttgga

SEQ ID NO: 145499 - DNA, 33 bp, Homo sapien
agattgacctcagaacaaaattagcaaaaggat

SEQ ID NO: 145500 - DNA, 33 bp, Homo sapien
agattgacctcagaacgaaattagcaaaaggat

SEQ ID NO: 145501 - DNA, 33 bp, Homo sapien
acacgaaaccaccacccaggtcaagagacagaa

SEQ ID NO: 145502 - DNA, 33 bp, Homo sapien
acacgaaaccaccaccgaggtcaagagacagaa

SEQ ID NO: 145503 - DNA, 33 bp, Homo sapien
ggtcagtgaatggtcacaaagggaacacacacg

SEQ ID NO: 145504 - DNA, 33 bp, Homo sapien
ggtcagtgaatggtcataaagggaacacacacg

SEQ ID NO: 145505 - DNA, 33 bp, Homo sapien
ggggagcgtgggttgaaaaactacctgtcaggt

SEQ ID NO: 145506 - DNA, 33 bp, Homo sapien
ggggagcgtgggttgacaaactacctgtcaggt

SEQ ID NO: 145507 - DNA, 33 bp, Homo sapien
taagaaaagacagagaccccgacagaaatgtgg

SEQ ID NO: 145508 - DNA, 33 bp, Homo sapien
taagaaaagacagagatcccgacagaaatgtgg

SEQ ID NO: 145509 - DNA, 33 bp, Homo sapien
gtgtctttatttctacactctctcatcgccgca

SEQ ID NO: 145510 - DNA, 33 bp, Homo sapien
gtgtctttatttctacgctctctcatcgccgca

SEQ ID NO: 145511 - DNA, 33 bp, Homo sapien
agtataacatccaaacagataacacctccttga

SEQ ID NO: 145512 - DNA, 33 bp, Homo sapien
agtataacatccaaacggataacacctccttga

SEQ ID NO: 145513 - DNA, 33 bp, Homo sapien
acaccatcatgcttaaagcaaccctgattagtg

SEQ ID NO: 145514 - DNA, 33 bp, Homo sapien
acaccatcatgcttaacgcaaccctgattagtg

SEQ ID NO: 145515 - DNA, 33 bp, Homo sapien
gctggggctgctataaaaaatgctgcagacctg

SEQ ID NO: 145516 - DNA, 33 bp, Homo sapien
gctggggctgctataacaaatgctgcagacctg

SEQ ID NO: 145517 - DNA, 33 bp, Homo sapien
ctggctcgtgttcctacacaaagaaactggaca

SEQ ID NO: 145518 - DNA, 33 bp, Homo sapien
ctggctcgtgttcctatacaaagaaactggaca

SEQ ID NO: 145519 - DNA, 33 bp, Homo sapien
gcttccggaggtagacaggccactaggaacaca

SEQ ID NO: 145520 - DNA, 33 bp, Homo sapien
gcttccggaggtagacgggccactaggaacaca

SEQ ID NO: 145521 - DNA, 33 bp, Homo sapien
cattgtaattctatcccggaatccttaaaatat

SEQ ID NO: 145522 - DNA, 33 bp, Homo sapien
cattgtaattctatcctggaatccttaaaatat

SEQ ID NO: 145523 - DNA, 33 bp, Homo sapien
tgttattgtgggttgaagtgtgtcctccccaaa

SEQ ID NO: 145524 - DNA, 33 bp, Homo sapien
tgttattgtgggttgatgtgtgtcctccccaaa

SEQ ID NO: 145525 - DNA, 33 bp, Homo sapien
atgaacttggtggcccaggaaatgtagctattg

SEQ ID NO: 145526 - DNA, 33 bp, Homo sapien
atgaacttggtggcccgggaaatgtagctattg

SEQ ID NO: 145527 - DNA, 33 bp, Homo sapien
ttcacagcaggttagactattacagaagaaaat

SEQ ID NO: 145528 - DNA, 33 bp, Homo sapien
ttcacagcaggttagagtattacagaagaaaat

SEQ ID NO: 145529 - DNA, 33 bp, Homo sapien
gacgtagcttagttgcacgagggcttcagctcg

SEQ ID NO: 145530 - DNA, 33 bp, Homo sapien
gacgtagcttagttgcgcgagggcttcagctcg

SEQ ID NO: 145531 - DNA, 33 bp, Homo sapien
acagttaagggaatgcaagtaaatgtggattat

SEQ ID NO: 145532 - DNA, 33 bp, Homo sapien
acagttaagggaatgcgagtaaatgtggattat

SEQ ID NO: 145533 - DNA, 33 bp, Homo sapien
tggatctcgctaagcaaatgtttgaggtctgcc

SEQ ID NO: 145534 - DNA, 33 bp, Homo sapien
tggatctcgctaagcagatgtttgaggtctgcc

SEQ ID NO: 145535 - DNA, 33 bp, Homo sapien
gcaaggatcatatctaggtaggaagctcttatt

SEQ ID NO: 145536 - DNA, 33 bp, Homo sapien
gcaaggatcatatctatgtaggaagctcttatt

SEQ ID NO: 145537 - DNA, 33 bp, Homo sapien
gtaatggtacccacagaaagctcatccacagtt

SEQ ID NO: 145538 - DNA, 33 bp, Homo sapien
gtaatggtacccacaggaagctcatccacagtt

SEQ ID NO: 145539 - DNA, 33 bp, Homo sapien
acgtgaggaaatgaaacgccttctgctcacaca

SEQ ID NO: 145540 - DNA, 33 bp, Homo sapien
acgtgaggaaatgaaatgccttctgctcacaca

SEQ ID NO: 145541 - DNA, 33 bp, Homo sapien
agagggagattcgatgacacacgatggaggaaa

SEQ ID NO: 145542 - DNA, 33 bp, Homo sapien
agagggagattcgatggcacacgatggaggaaa

SEQ ID NO: 145543 - DNA, 33 bp, Homo sapien
gattttgtgggtgaaccctaaatgcaatgacag

SEQ ID NO: 145544 - DNA, 33 bp, Homo sapien
gattttgtgggtgaactctaaatgcaatgacag

SEQ ID NO: 145545 - DNA, 33 bp, Homo sapien
ctctcatgattgctgacgggacagtggtgtgca

SEQ ID NO: 145546 - DNA, 33 bp, Homo sapien
ctctcatgattgctgatgggacagtggtgtgca

SEQ ID NO: 145547 - DNA, 33 bp, Homo sapien
ccctgaggttggcttcgcatcaaaaagtggaga

SEQ ID NO: 145548 - DNA, 33 bp, Homo sapien
ccctgaggttggcttctcatcaaaaagtggaga

SEQ ID NO: 145549 - DNA, 33 bp, Homo sapien
aataaagcgtgagcagcagaaatcagcttggct

SEQ ID NO: 145550 - DNA, 33 bp, Homo sapien
aataaagcgtgagcagtagaaatcagcttggct

SEQ ID NO: 145551 - DNA, 33 bp, Homo sapien
gactctcgtcagcactcagaggaaggcagattg

SEQ ID NO: 145552 - DNA, 33 bp, Homo sapien
gactctcgtcagcacttagaggaaggcagattg

SEQ ID NO: 145553 - DNA, 33 bp, Homo sapien
ggatggaatgaaggcacaagttacgtcctgccc

SEQ ID NO: 145554 - DNA, 33 bp, Homo sapien
ggatggaatgaaggcagaagttacgtcctgccc

SEQ ID NO: 145555 - DNA, 33 bp, Homo sapien
ttctagtctcttctaagtattctgatactgatt

SEQ ID NO: 145556 - DNA, 33 bp, Homo sapien
ttctagtctcttctaattattctgatactgatt

SEQ ID NO: 145557 - DNA, 33 bp, Homo sapien
tcttctttggtgtgtacctatgaataatgcaga

SEQ ID NO: 145558 - DNA, 33 bp, Homo sapien
tcttctttggtgtgtatctatgaataatgcaga

SEQ ID NO: 145559 - DNA, 33 bp, Homo sapien
tgccagatctcactaacgaacccctgcaggcct

SEQ ID NO: 145560 - DNA, 33 bp, Homo sapien
tgccagatctcactaatgaacccctgcaggcct

SEQ ID NO: 145561 - DNA, 33 bp, Homo sapien
tcaaattactgactcacaggatcatagcaaatt

SEQ ID NO: 145562 - DNA, 33 bp, Homo sapien
tcaaattactgactcataggatcatagcaaatt

SEQ ID NO: 145563 - DNA, 33 bp, Homo sapien
cactgcacctctggccactgttttactgtcacc

SEQ ID NO: 145564 - DNA, 33 bp, Homo sapien
cactgcacctctggccgctgttttactgtcacc

SEQ ID NO: 145565 - DNA, 33 bp, Homo sapien
gttgtagtctcaacacaagagttcaggttttgc

SEQ ID NO: 145566 - DNA, 33 bp, Homo sapien
gttgtagtctcaacacgagagttcaggttttgc

SEQ ID NO: 145567 - DNA, 33 bp, Homo sapien
tggagcctgaaagcaacggttaggtaacaaggg

SEQ ID NO: 145568 - DNA, 33 bp, Homo sapien
tggagcctgaaagcaatggttaggtaacaaggg

SEQ ID NO: 145569 - DNA, 33 bp, Homo sapien; identical to SEQ ID NO: 145567

SEQ ID NO: 145570 - DNA, 33 bp, Homo sapien; identical to SEQ ID NO: 145568

SEQ ID NO: 145571 - DNA, 33 bp, Homo sapien
ggccccaggccaagcgcaggggaagatcttcag

SEQ ID NO: 145572 - DNA, 33 bp, Homo sapien
ggccccaggccaagcgtaggggaagatcttcag

SEQ ID NO: 145573 - DNA, 33 bp, Homo sapien
ggtgagcaggtctctcaagcccggaagatattt

SEQ ID NO: 145574 - DNA, 33 bp, Homo sapien
ggtgagcaggtctctcgagcccggaagatattt

SEQ ID NO: 145575 - DNA, 33 bp, Homo sapien
agtgtggaacaaaagccctctaacatcccttcc

SEQ ID NO: 145576 - DNA, 33 bp, Homo sapien
agtgtggaacaaaagctctctaacatcccttcc

SEQ ID NO: 145577 - DNA, 33 bp, Homo sapien
caatccaggtcccacacaatgagacagagcagg

SEQ ID NO: 145578 - DNA, 33 bp, Homo sapien
caatccaggtcccacataatgagacagagcagg

SEQ ID NO: 145579 - DNA, 33 bp, Homo sapien
tttgcaaattacctgaagaaaactgggtgatta

SEQ ID NO: 145580 - DNA, 33 bp, Homo sapien
tttgcaaattacctgatgaaaactgggtgatta

SEQ ID NO: 145581 - DNA, 33 bp, Homo sapien
ataattgcattagggacagttttgctgccattg

SEQ ID NO: 145582 - DNA, 33 bp, Homo sapien
ataattgcattagggagagttttgctgccattg

SEQ ID NO: 145583 - DNA, 33 bp, Homo sapien
tcctccttcactttcccgccacagacaaagacc

SEQ ID NO: 145584 - DNA, 33 bp, Homo sapien
tcctccttcactttcctgccacagacaaagacc

SEQ ID NO: 145585 - DNA, 33 bp, Homo sapien
attctattcacaggtaacatattctattcccag

SEQ ID NO: 145586 - DNA, 33 bp, Homo sapien
attctattcacaggtagcatattctattcccag

SEQ ID NO: 145587 - DNA, 33 bp, Homo sapien
ctttgaagagccctgaaaaatatactatctacc

SEQ ID NO: 145588 - DNA, 33 bp, Homo sapien
ctttgaagagccctgacaaatatactatctacc

SEQ ID NO: 145589 - DNA, 33 bp, Homo sapien
atgaaaacaactgctacagctacacaaggaggt

SEQ ID NO: 145590 - DNA, 33 bp, Homo sapien
atgaaaacaactgctagagctacacaaggaggt

SEQ ID NO: 145591 - DNA, 33 bp, Homo sapien
tggatgaatgtataagacctctactcaagatag

SEQ ID NO: 145592 - DNA, 33 bp, Homo sapien
tggatgaatgtataaggcctctactcaagatag

SEQ ID NO: 145593 - DNA, 33 bp, Homo sapien
ttcttggtgactgagaaaactagaatggccatc

SEQ ID NO: 145594 - DNA, 33 bp, Homo sapien
ttcttggtgactgagagaactagaatggccatc

SEQ ID NO: 145595 - DNA, 33 bp, Homo sapien
ttggccattagagaaacagatgtttgcatactc

SEQ ID NO: 145596 - DNA, 33 bp, Homo sapien
ttggccattagagaaatagatgtttgcatactc

SEQ ID NO: 145597 - DNA, 33 bp, Homo sapien
ctggtgctgctgcacactatggcattcctccca

SEQ ID NO: 145598 - DNA, 33 bp, Homo sapien
ctggtgctgctgcacattatggcattcctccca

SEQ ID NO: 145599 - DNA, 33 bp, Homo sapien
tctttcttccagcaacagtctttagttcagttt

SEQ ID NO: 145600 - DNA, 33 bp, Homo sapien
tctttcttccagcaacggtctttagttcagttt

SEQ ID NO: 145601 - DNA, 33 bp, Homo sapien
gaatgagcaaacactagcatttccaaatatcca

SEQ ID NO: 145602 - DNA, 33 bp, Homo sapien
gaatgagcaaacactatcatttccaaatatcca

SEQ ID NO: 145603 - DNA, 33 bp, Homo sapien
tttctggcctcttccaacatccggtggctccca

SEQ ID NO: 145604 - DNA, 33 bp, Homo sapien
tttctggcctcttccagcatccggtggctccca

SEQ ID NO: 145605 - DNA, 33 bp, Homo sapien
acacacttcctgaaaccgtaatgacaggtgttt

SEQ ID NO: 145606 - DNA, 33 bp, Homo sapien
acacacttcctgaaactgtaatgacaggtgttt

SEQ ID NO: 145607 - DNA, 33 bp, Homo sapien
caaggttgtcttagtcacttttctgctgctaca

SEQ ID NO: 145608 - DNA, 33 bp, Homo sapien
caaggttgtcttagtcccttttctgctgctaca

SEQ ID NO: 145609 - DNA, 33 bp, Homo sapien
aaatttctttctcatacatctggaagctgggaa

SEQ ID NO: 145610 - DNA, 33 bp, Homo sapien
aaatttctttctcatagatctggaagctgggaa

SEQ ID NO: 145611 - DNA, 33 bp, Homo sapien
cactgaggtgagtcccactgaatccgttctcaa

SEQ ID NO: 145612 - DNA, 33 bp, Homo sapien
cactgaggtgagtcccgctgaatccgttctcaa

SEQ ID NO: 145613 - DNA, 33 bp, Homo sapien
tatgcatatgtatctcaaaacaccacgttgcat

SEQ ID NO: 145614 - DNA, 33 bp, Homo sapien
tatgcatatgtatctcgaaacaccacgttgcat

SEQ ID NO: 145615 - DNA, 33 bp, Homo sapien
aaaagagtgaaaaggccgagaaatatttaatct

SEQ ID NO: 145616 - DNA, 33 bp, Homo sapien
aaaagagtgaaaaggctgagaaatatttaatct

SEQ ID NO: 145617 - DNA, 33 bp, Homo sapien
attacttacactaccaacaatcccataaaacat

SEQ ID NO: 145618 - DNA, 33 bp, Homo sapien
attacttacactaccaccaatcccataaaacat

SEQ ID NO: 145619 - DNA, 33 bp, Homo sapien
ccagggagcagagtcacggctggggcgtcttta

SEQ ID NO: 145620 - DNA, 33 bp, Homo sapien
ccagggagcagagtcagggctggggcgtcttta

SEQ ID NO: 145621 - DNA, 33 bp, Homo sapien
catatagccaagaaatcaactccttgatgtaat

SEQ ID NO: 145622 - DNA, 33 bp, Homo sapien
catatagccaagaaattaactccttgatgtaat

SEQ ID NO: 145623 - DNA, 33 bp, Homo sapien
tttaatacttaatttcaagtggactgacttatg

SEQ ID NO: 145624 - DNA, 33 bp, Homo sapien
tttaatacttaatttccagtggactgacttatg

SEQ ID NO: 145625 - DNA, 33 bp, Homo sapien
catgtttcccagagatgaataaacagtcttttt

SEQ ID NO: 145626 - DNA, 33 bp, Homo sapien
catgtttcccagagattaataaacagtcttttt

SEQ ID NO: 145627 - DNA, 33 bp, Homo sapien
agaattaggctggattaaacgactcattaaatg

SEQ ID NO: 145628 - DNA, 33 bp, Homo sapien
agaattaggctggattgaacgactcattaaatg

SEQ ID NO: 145629 - DNA, 33 bp, Homo sapien
tgtgatgatgggaagacgagaaagctgaaggtt

SEQ ID NO: 145630 - DNA, 33 bp, Homo sapien
tgtgatgatgggaagatgagaaagctgaaggtt

SEQ ID NO: 145631 - DNA, 33 bp, Homo sapien
ctctcccactttcctacgaagcttctttcctgc

SEQ ID NO: 145632 - DNA, 33 bp, Homo sapien
ctctcccactttcctatgaagcttctttcctgc

SEQ ID NO: 145633 - DNA, 33 bp, Homo sapien
ctacacacagaaaccacatggaagagagtttat

SEQ ID NO: 145634 - DNA, 33 bp, Homo sapien
ctacacacagaaaccatatggaagagagtttat

SEQ ID NO: 145635 - DNA, 33 bp, Homo sapien
cggctccctgcctccccgagaacaataaccaag

SEQ ID NO: 145636 - DNA, 33 bp, Homo sapien
cggctccctgcctcccggagaacaataaccaag

SEQ ID NO: 145637 - DNA, 33 bp, Homo sapien
gtggaataatggataacgatgttgatacattcc

SEQ ID NO: 145638 - DNA, 33 bp, Homo sapien
gtggaataatggataatgatgttgatacattcc

SEQ ID NO: 145639 - DNA, 33 bp, Homo sapien
gaaacctcccccacagactgctgcattgttgtt

SEQ ID NO: 145640 - DNA, 33 bp, Homo sapien
gaaacctcccccacaggctgctgcattgttgtt

SEQ ID NO: 145641 - DNA, 33 bp, Homo sapien
ctgctctctggagaaaggtccatttgcaaggtc

SEQ ID NO: 145642 - DNA, 33 bp, Homo sapien
ctgctctctggagaaatgtccatttgcaaggtc

SEQ ID NO: 145643 - DNA, 33 bp, Homo sapien
agcctgcaaagctgccagctgaggtttcccttt

SEQ ID NO: 145644 - DNA, 33 bp, Homo sapien
agcctgcaaagctgccggctgaggtttcccttt

SEQ ID NO: 145645 - DNA, 33 bp, Homo sapien
gctgagatgagcgagacatggcgtgttggagag

SEQ ID NO: 145646 - DNA, 33 bp, Homo sapien
gctgagatgagcgagatatggcgtgttggagag

SEQ ID NO: 145647 - DNA, 33 bp, Homo sapien
tgggggctcggaacaacaggagtttattgtctc

SEQ ID NO: 145648 - DNA, 33 bp, Homo sapien
tgggggctcggaacaagaggagtttattgtctc

SEQ ID NO: 145649 - DNA, 33 bp, Homo sapien
caagtgatagttggtgcagcctaattgtgatca

SEQ ID NO: 145650 - DNA, 33 bp, Homo sapien
caagtgatagttggtgtagcctaattgtgatca

SEQ ID NO: 145651 - DNA, 33 bp, Homo sapien
aacaacagaaagcaaaactgaaacgactgctgg

SEQ ID NO: 145652 - DNA, 33 bp, Homo sapien
aacaacagaaagcaaagctgaaacgactgctgg

SEQ ID NO: 145653 - DNA, 33 bp, Homo sapien
gcaatcacgccacaagcagccgcttttccccag

SEQ ID NO: 145654 - DNA, 33 bp, Homo sapien
gcaatcacgccacaagtagccgcttttccccag

SEQ ID NO: 145655 - DNA, 33 bp, Homo sapien
ccagaaactccctgtcaatcctatgtctaattt

SEQ ID NO: 145656 - DNA, 33 bp, Homo sapien
ccagaaactccctgtccatcctatgtctaattt

SEQ ID NO: 145657 - DNA, 33 bp, Homo sapien
ccaggtttggtcagcccatgcacagatattagg

SEQ ID NO: 145658 - DNA, 33 bp, Homo sapien
ccaggtttggtcagcctatgcacagatattagg

SEQ ID NO: 145659 - DNA, 33 bp, Homo sapien
tggccagcatgtgaggccccgggctccgggttt

SEQ ID NO: 145660 - DNA, 33 bp, Homo sapien
tggccagcatgtgaggtcccgggctccgggttt

SEQ ID NO: 145661 - DNA, 33 bp, Homo sapien
ggaaaacttgacggccacagcgtgaagatgaca

SEQ ID NO: 145662 - DNA, 33 bp, Homo sapien
ggaaaacttgacggccgcagcgtgaagatgaca

SEQ ID NO: 145663 - DNA, 33 bp, Homo sapien
ggggcatggccagtgagaagagcacagactctt

SEQ ID NO: 145664 - DNA, 33 bp, Homo sapien
ggggcatggccagtgataagagcacagactctt

SEQ ID NO: 145665 - DNA, 33 bp, Homo sapien
agggaggccaagcctacaacctgtgactagcag

SEQ ID NO: 145666 - DNA, 33 bp, Homo sapien
agggaggccaagcctataacctgtgactagcag

SEQ ID NO: 145667 - DNA, 33 bp, Homo sapien
cagaacccagcctgagcacttccagtgggtgcc

SEQ ID NO: 145668 - DNA, 33 bp, Homo sapien
cagaacccagcctgaggacttccagtgggtgcc

SEQ ID NO: 145669 - DNA, 33 bp, Homo sapien
cccttctctaactggcactgaagaaagtgcgag

SEQ ID NO: 145670 - DNA, 33 bp, Homo sapien
cccttctctaactggcgctgaagaaagtgcgag

SEQ ID NO: 145671 - DNA, 33 bp, Homo sapien
tctctgggctgaggaacatgaaggtgaaatcct

SEQ ID NO: 145672 - DNA, 33 bp, Homo sapien
tctctgggctgaggaagatgaaggtgaaatcct

SEQ ID NO: 145673 - DNA, 33 bp, Homo sapien
gaaggctttggtccagaaagtcctgcttctctt

SEQ ID NO: 145674 - DNA, 33 bp, Homo sapien
gaaggctttggtccagtaagtcctgcttctctt

SEQ ID NO: 145675 - DNA, 33 bp, Homo sapien
ctttgggaaaattataccccagtcctgatgttt

SEQ ID NO: 145676 - DNA, 33 bp, Homo sapien
ctttgggaaaattatatcccagtcctgatgttt

SEQ ID NO: 145677 - DNA, 33 bp, Homo sapien
cattttcctttctaacactcctgaggctgggca

SEQ ID NO: 145678 - DNA, 33 bp, Homo sapien
cattttcctttctaacgctcctgaggctgggca

SEQ ID NO: 145679 - DNA, 33 bp, Homo sapien
gacatatgaggaaacaaagcataaccaaaaatc

SEQ ID NO: 145680 - DNA, 33 bp, Homo sapien
gacatatgaggaaacagagcataaccaaaaatc

SEQ ID NO: 145681 - DNA, 33 bp, Homo sapien
aacaacccacttcttacgttcagagaaacaaga

SEQ ID NO: 145682 - DNA, 33 bp, Homo sapien
aacaacccacttcttatgttcagagaaacaaga

SEQ ID NO: 145683 - DNA, 33 bp, Homo sapien
aaacacaggcagcaacaaaaaagataggtttaa

SEQ ID NO: 145684 - DNA, 33 bp, Homo sapien
aaacacaggcagcaactaaaaagataggtttaa

SEQ ID NO: 145685 - DNA, 33 bp, Homo sapien
tactgataaatgctcaagatgacaagtataagt

SEQ ID NO: 145686 - DNA, 33 bp, Homo sapien
tactgataaatgctcaggatgacaagtataagt

SEQ ID NO: 145687 - DNA, 33 bp, Homo sapien
agagctaatggataaagaacttcaccctgggcc

SEQ ID NO: 145688 - DNA, 33 bp, Homo sapien
agagctaatggataaataacttcaccctgggcc

SEQ ID NO: 145689 - DNA, 33 bp, Homo sapien
agagattgacgcctccaagaaaaatagggtttt

SEQ ID NO: 145690 - DNA, 33 bp, Homo sapien
agagattgacgcctccgagaaaaatagggtttt

SEQ ID NO: 145691 - DNA, 33 bp, Homo sapien
ttcaggtgtcctttgaccttctccttttaaaca

SEQ ID NO: 145692 - DNA, 33 bp, Homo sapien
ttcaggtgtcctttgatcttctccttttaaaca

SEQ ID NO: 145693 - DNA, 33 bp, Homo sapien
cagtcaatttggtagcacatttgtcttttccag

SEQ ID NO: 145694 - DNA, 33 bp, Homo sapien
cagtcaatttggtagcgcatttgtcttttccag

SEQ ID NO: 145695 - DNA, 33 bp, Homo sapien
ccgcctctttttaagacgcctctgcagcaaggg

SEQ ID NO: 145696 - DNA, 33 bp, Homo sapien
ccgcctctttttaagatgcctctgcagcaaggg

SEQ ID NO: 145697 - DNA, 33 bp, Homo sapien
agtgcaggcacatcaacgcgacagaccaggctg

SEQ ID NO: 145698 - DNA, 33 bp, Homo sapien
agtgcaggcacatcaatgcgacagaccaggctg

SEQ ID NO: 145699 - DNA, 33 bp, Homo sapien
gagcccaggctgtctacgtggtgttttccttgg

SEQ ID NO: 145700 - DNA, 33 bp, Homo sapien
gagcccaggctgtctatgtggtgttttccttgg

SEQ ID NO: 145701 - DNA, 33 bp, Homo sapien
tgggcttgttgaaggcacttagcaacacagaaa

SEQ ID NO: 145702 - DNA, 33 bp, Homo sapien
tgggcttgttgaaggcgcttagcaacacagaaa

SEQ ID NO: 145703 - DNA, 33 bp, Homo sapien
gtttgatggatgaataagtaagtgagggaatga

SEQ ID NO: 145704 - DNA, 33 bp, Homo sapien
gtttgatggatgaataggtaagtgagggaatga

SEQ ID NO: 145705 - DNA, 33 bp, Homo sapien
ttaaacacacctataaagagattagtaagggaa

SEQ ID NO: 145706 - DNA, 33 bp, Homo sapien
ttaaacacacctataacgagattagtaagggaa

SEQ ID NO: 145707 - DNA, 33 bp, Homo sapien
agctttgcagagaaaaagttactctgtgatctc

SEQ ID NO: 145708 - DNA, 33 bp, Homo sapien
agctttgcagagaaaaggttactctgtgatctc

SEQ ID NO: 145709 - DNA, 33 bp, Homo sapien
gatctctctgcccagaacgtccctttcgtttga

SEQ ID NO: 145710 - DNA, 33 bp, Homo sapien
gatctctctgcccagatcgtccctttcgtttga

SEQ ID NO: 145711 - DNA, 33 bp, Homo sapien
aggactgtcaactagcacgtaataaggaaaggt

SEQ ID NO: 145712 - DNA, 33 bp, Homo sapien
aggactgtcaactagcgcgtaataaggaaaggt

SEQ ID NO: 145713 - DNA, 33 bp, Homo sapien
aggatgctgtcagggacgtgggaactcacgcct

SEQ ID NO: 145714 - DNA, 33 bp, Homo sapien
aggatgctgtcagggatgtgggaactcacgcct

SEQ ID NO: 145715 - DNA, 33 bp, Homo sapien
tttctattgtgaataaatgtgaaagtcagaacc

SEQ ID NO: 145716 - DNA, 33 bp, Homo sapien
tttctattgtgaataagtgtgaaagtcagaacc

SEQ ID NO: 145717 - DNA, 33 bp, Homo sapien
aatctgcctggcctcaaattacaaactttgctt

SEQ ID NO: 145718 - DNA, 33 bp, Homo sapien
aatctgcctggcctcagattacaaactttgctt

SEQ ID NO: 145719 - DNA, 33 bp, Homo sapien
aatatgtcaccagcaaatgtgcactgaaagaaa

SEQ ID NO: 145720 - DNA, 33 bp, Homo sapien
aatatgtcaccagcaattgtgcactgaaagaaa

SEQ ID NO: 145721 - DNA, 33 bp, Homo sapien
ctactgtggactgtgcaaatggatggtctaaat

SEQ ID NO: 145722 - DNA, 33 bp, Homo sapien
ctactgtggactgtgcgaatggatggtctaaat

SEQ ID NO: 145723 - DNA, 33 bp, Homo sapien
cagagtgagaaagtgacgtccagggaaatagaa

SEQ ID NO: 145724 - DNA, 33 bp, Homo sapien
cagagtgagaaagtgatgtccagggaaatagaa

SEQ ID NO: 145725 - DNA, 33 bp, Homo sapien
aggtctctaagcaaacaaaataagaaacgtgca

SEQ ID NO: 145726 - DNA, 33 bp, Homo sapien
aggtctctaagcaaacgaaataagaaacgtgca

SEQ ID NO: 145727 - DNA, 33 bp, Homo sapien
tcagagaatccaagacacaacacgagggctgtg

SEQ ID NO: 145728 - DNA, 33 bp, Homo sapien
tcagagaatccaagacgcaacacgagggctgtg

SEQ ID NO: 145729 - DNA, 33 bp, Homo sapien
agctgcaaagccatcagtgacttacaaatagcc

SEQ ID NO: 145730 - DNA, 33 bp, Homo sapien
agctgcaaagccatcattgacttacaaatagcc

SEQ ID NO: 145731 - DNA, 33 bp, Homo sapien
cccattaaatgtctgcagaatggagtgggtgtg

SEQ ID NO: 145732 - DNA, 33 bp, Homo sapien
cccattaaatgtctgctgaatggagtgggtgtg

SEQ ID NO: 145733 - DNA, 33 bp, Homo sapien
tgtaaccaaaacttacaccatcctgatttctct

SEQ ID NO: 145734 - DNA, 33 bp, Homo sapien
tgtaaccaaaacttacgccatcctgatttctct

SEQ ID NO: 145735 - DNA, 33 bp, Homo sapien
gccagagacctggaaacgaccatagcaacacat

SEQ ID NO: 145736 - DNA, 33 bp, Homo sapien
gccagagacctggaaatgaccatagcaacacat

SEQ ID NO: 145737 - DNA, 33 bp, Homo sapien
tcaagctaagagtttcaaatatgtaatacataa

SEQ ID NO: 145738 - DNA, 33 bp, Homo sapien
tcaagctaagagtttcgaatatgtaatacataa

SEQ ID NO: 145739 - DNA, 33 bp, Homo sapien
atgatgcccggctatgccaattcataaatcctt

SEQ ID NO: 145740 - DNA, 33 bp, Homo sapien
atgatgcccggctatgtcaattcataaatcctt

SEQ ID NO: 145741 - DNA, 33 bp, Homo sapien
ttgctttcacaggaacagtgactcaaacaaaca

SEQ ID NO: 145742 - DNA, 33 bp, Homo sapien
ttgctttcacaggaacggtgactcaaacaaaca

SEQ ID NO: 145743 - DNA, 33 bp, Homo sapien
gtctttattctaacaacgggaagtcatcttaag

SEQ ID NO: 145744 - DNA, 33 bp, Homo sapien
gtctttattctaacaatgggaagtcatcttaag

SEQ ID NO: 145745 - DNA, 33 bp, Homo sapien
ttaaggtctgtaaaaacgggaaggattttaggc

SEQ ID NO: 145746 - DNA, 33 bp, Homo sapien
ttaaggtctgtaaaaatgggaaggattttaggc

SEQ ID NO: 145747 - DNA, 33 bp, Homo sapien
gctctctgttagaagacgcagaattttcctagt

SEQ ID NO: 145748 - DNA, 33 bp, Homo sapien
gctctctgttagaagatgcagaattttcctagt

SEQ ID NO: 145749 - DNA, 33 bp, Homo sapien
tcttgtactcactagcgctattcaagacccaca

SEQ ID NO: 145750 - DNA, 33 bp, Homo sapien
tcttgtactcactagctctattcaagacccaca

SEQ ID NO: 145751 - DNA, 33 bp, Homo sapien
gaattcaattgcataacgagaggagaagtccgt

SEQ ID NO: 145752 - DNA, 33 bp, Homo sapien
gaattcaattgcataatgagaggagaagtccgt

SEQ ID NO: 145753 - DNA, 33 bp, Homo sapien
gtggttttctactaagcatcctcaaggagttca

SEQ ID NO: 145754 - DNA, 33 bp, Homo sapien
gtggttttctactaagtatcctcaaggagttca

SEQ ID NO: 145755 - DNA, 33 bp, Homo sapien
ccttggctcaggctcactcgttgtggctaaaga

SEQ ID NO: 145756 - DNA, 33 bp, Homo sapien
ccttggctcaggctcattcgttgtggctaaaga

SEQ ID NO: 145757 - DNA, 33 bp, Homo sapien
tattactatcaacttgaaacaagcatgaggagc

SEQ ID NO: 145758 - DNA, 33 bp, Homo sapien
tattactatcaacttggaacaagcatgaggagc

SEQ ID NO: 145759 - DNA, 33 bp, Homo sapien
gtgacagagatgctcccgaactgcaatgtggtg

SEQ ID NO: 145760 - DNA, 33 bp, Homo sapien
gtgacagagatgctcctgaactgcaatgtggtg

SEQ ID NO: 145761 - DNA, 33 bp, Homo sapien
cagcgacttctgtggaactcagttttggccagc

SEQ ID NO: 145762 - DNA, 33 bp, Homo sapien
cagcgacttctgtggagctcagttttggccagc

SEQ ID NO: 145763 - DNA, 33 bp, Homo sapien
agaaaatatccttaaactcttgcaatcatatat

SEQ ID NO: 145764 - DNA, 33 bp, Homo sapien
agaaaatatccttaaagtcttgcaatcatatat

SEQ ID NO: 145765 - DNA, 33 bp, Homo sapien
ctgtcctggaacctcgaccgttctccacctcgg

SEQ ID NO: 145766 - DNA, 33 bp, Homo sapien
ctgtcctggaacctcgtccgttctccacctcgg

SEQ ID NO: 145767 - DNA, 33 bp, Homo sapien
gcagaagacacccggccgcatctacaccacaga

SEQ ID NO: 145768 - DNA, 33 bp, Homo sapien
gcagaagacacccggctgcatctacaccacaga

SEQ ID NO: 145769 - DNA, 33 bp, Homo sapien
aaaactttcctaaatccctagacatactcacag

SEQ ID NO: 145770 - DNA, 33 bp, Homo sapien
aaaactttcctaaatcgctagacatactcacag

SEQ ID NO: 145771 - DNA, 33 bp, Homo sapien
gaaggagatgatgaaaaggccggattcagaacc

SEQ ID NO: 145772 - DNA, 33 bp, Homo sapien
gaaggagatgatgaaagggccggattcagaacc

SEQ ID NO: 145773 - DNA, 33 bp, Homo sapien
cctctcttttctgaccacttcttaccctcctga

SEQ ID NO: 145774 - DNA, 33 bp, Homo sapien
cctctcttttctgaccgcttcttaccctcctga

SEQ ID NO: 145775 - DNA, 33 bp, Homo sapien
catcccaaagatatcaccagcagtacggcttgg

SEQ ID NO: 145776 - DNA, 33 bp, Homo sapien
catcccaaagatatcagcagcagtacggcttgg

SEQ ID NO: 145777 - DNA, 33 bp, Homo sapien
atatttgagattcaacagatgcaggaaggagcc

SEQ ID NO: 145778 - DNA, 33 bp, Homo sapien
atatttgagattcaacggatgcaggaaggagcc

SEQ ID NO: 145779 - DNA, 33 bp, Homo sapien
aacagacccaattaaccagagtgatagaatctg

SEQ ID NO: 145780 - DNA, 33 bp, Homo sapien
aacagacccaattaactagagtgatagaatctg

SEQ ID NO: 145781 - DNA, 33 bp, Homo sapien
gcatttaatgtttagacgaagaggaaaaatttc

SEQ ID NO: 145782 - DNA, 33 bp, Homo sapien
gcatttaatgtttagatgaagaggaaaaatttc

SEQ ID NO: 145783 - DNA, 33 bp, Homo sapien
taaacccaagaaaaaaatagcagaagaggaaga

SEQ ID NO: 145784 - DNA, 33 bp, Homo sapien
taaacccaagaaaaaattagcagaagaggaaga

SEQ ID NO: 145785 - DNA, 33 bp, Homo sapien
cagagaggatgcttaaactgttcacaccgctca

SEQ ID NO: 145786 - DNA, 33 bp, Homo sapien
cagagaggatgcttaacctgttcacaccgctca

SEQ ID NO: 145787 - DNA, 33 bp, Homo sapien
ggagttactgcagcccaggaagctcagacattg

SEQ ID NO: 145788 - DNA, 33 bp, Homo sapien
ggagttactgcagcccgggaagctcagacattg

SEQ ID NO: 145789 - DNA, 33 bp, Homo sapien
cacaaggtctacagcactgattcttgagagttg

SEQ ID NO: 145790 - DNA, 33 bp, Homo sapien
cacaaggtctacagcattgattcttgagagttg

SEQ ID NO: 145791 - DNA, 33 bp, Homo sapien
tacacatgatttaggaacctcttggataatcca

SEQ ID NO: 145792 - DNA, 33 bp, Homo sapien
tacacatgatttaggaccctcttggataatcca

SEQ ID NO: 145793 - DNA, 33 bp, Homo sapien
ccacgactctgggaccccaatacttagtgtgtc

SEQ ID NO: 145794 - DNA, 33 bp, Homo sapien
ccacgactctgggacctcaatacttagtgtgtc

SEQ ID NO: 145795 - DNA, 33 bp, Homo sapien
aggctgctaggatgcaagtcagcagggcaagca

SEQ ID NO: 145796 - DNA, 33 bp, Homo sapien
aggctgctaggatgcaggtcagcagggcaagca

SEQ ID NO: 145797 - DNA, 33 bp, Homo sapien
tatctctttgcctccccggataagctggcagcc

SEQ ID NO: 145798 - DNA, 33 bp, Homo sapien
tatctctttgcctccctggataagctggcagcc

SEQ ID NO: 145799 - DNA, 33 bp, Homo sapien
cgtatttaataattgcggagcatggggcttctc

SEQ ID NO: 145800 - DNA, 33 bp, Homo sapien
cgtatttaataattgctgagcatggggcttctc

SEQ ID NO: 145801 - DNA, 33 bp, Homo sapien
tccaaacccattttcaaagatgcattgtccttg

SEQ ID NO: 145802 - DNA, 33 bp, Homo sapien
tccaaacccattttcagagatgcattgtccttg

SEQ ID NO: 145803 - DNA, 33 bp, Homo sapien
tccaatggaaagcaagcaccaaatcagagcttt

SEQ ID NO: 145804 - DNA, 33 bp, Homo sapien
tccaatggaaagcaagtaccaaatcagagcttt

SEQ ID NO: 145805 - DNA, 33 bp, Homo sapien
agggtttaccaaatgccacctgtgccaggctct

SEQ ID NO: 145806 - DNA, 33 bp, Homo sapien
agggtttaccaaatgctacctgtgccaggctct

SEQ ID NO: 145807 - DNA, 33 bp, Homo sapien
gttctacgtgaggcccaccttctgaaaatattt

SEQ ID NO: 145808 - DNA, 33 bp, Homo sapien
gttctacgtgaggcccgccttctgaaaatattt

SEQ ID NO: 145809 - DNA, 33 bp, Homo sapien
aatgcagacactctcaagggctggggagtgacc

SEQ ID NO: 145810 - DNA, 33 bp, Homo sapien
aatgcagacactctcaggggctggggagtgacc

SEQ ID NO: 145811 - DNA, 33 bp, Homo sapien
catccaggaagcaggcaacagagctgtgtggcc

SEQ ID NO: 145812 - DNA, 33 bp, Homo sapien
catccaggaagcaggcgacagagctgtgtggcc

SEQ ID NO: 145813 - DNA, 33 bp, Homo sapien
tgcgcatgcctggcaacgttctgggtgctggat

SEQ ID NO: 145814 - DNA, 33 bp, Homo sapien
tgcgcatgcctggcaatgttctgggtgctggat

SEQ ID NO: 145815 - DNA, 33 bp, Homo sapien
tttcttgagaaatgaaatggtcttttgaagcct

SEQ ID NO: 145816 - DNA, 33 bp, Homo sapien
tttcttgagaaatgaagtggtcttttgaagcct

SEQ ID NO: 145817 - DNA, 33 bp, Homo sapien
atacacacccacctcaaaaatatacacattcac

SEQ ID NO: 145818 - DNA, 33 bp, Homo sapien
atacacacccacctcacaaatatacacattcac

SEQ ID NO: 145819 - DNA, 33 bp, Homo sapien
cgcaaatccactccgcaaagtgagcagggctgc

SEQ ID NO: 145820 - DNA, 33 bp, Homo sapien
cgcaaatccactccgcgaagtgagcagggctgc

SEQ ID NO: 145821 - DNA, 33 bp, Homo sapien
catggggagtccacaaagggtgctccggccagg

SEQ ID NO: 145822 - DNA, 33 bp, Homo sapien
catggggagtccacaaggggtgctccggccagg

SEQ ID NO: 145823 - DNA, 33 bp, Homo sapien
ccattcacaggccagcagaagattggaaagtgt

SEQ ID NO: 145824 - DNA, 33 bp, Homo sapien
ccattcacaggccagcggaagattggaaagtgt

SEQ ID NO: 145825 - DNA, 33 bp, Homo sapien
agctcatgtgtgcagacatccgtgtgacaagca

SEQ ID NO: 145826 - DNA, 33 bp, Homo sapien
agctcatgtgtgcagatatccgtgtgacaagca

SEQ ID NO: 145827 - DNA, 33 bp, Homo sapien
ctcctgttgcttctcaagttgcctttttctatc

SEQ ID NO: 145828 - DNA, 33 bp, Homo sapien
ctcctgttgcttctcaggttgcctttttctatc

SEQ ID NO: 145829 - DNA, 33 bp, Homo sapien
aactctgtaagtgaacaaaatgaaaacctgatt

SEQ ID NO: 145830 - DNA, 33 bp, Homo sapien
aactctgtaagtgaaccaaatgaaaacctgatt

SEQ ID NO: 145831 - DNA, 33 bp, Homo sapien
cctgattatctcaggacgcacgcggagtgaacg

SEQ ID NO: 145832 - DNA, 33 bp, Homo sapien
cctgattatctcaggatgcacgcggagtgaacg

SEQ ID NO: 145833 - DNA, 33 bp, Homo sapien
ttatggtattttcttacgatttctgagtcaatc

SEQ ID NO: 145834 - DNA, 33 bp, Homo sapien
ttatggtattttcttatgatttctgagtcaatc

SEQ ID NO: 145835 - DNA, 33 bp, Homo sapien
ggctcagtctgtaataccagtactttggaaagc

SEQ ID NO: 145836 - DNA, 33 bp, Homo sapien
ggctcagtctgtaatatcagtactttggaaagc

SEQ ID NO: 145837 - DNA, 33 bp, Homo sapien
tctcctctatacggtcacaaaggactcaggaca

SEQ ID NO: 145838 - DNA, 33 bp, Homo sapien
tctcctctatacggtcgcaaaggactcaggaca

SEQ ID NO: 145839 - DNA, 33 bp, Homo sapien
cagtgtcctatggtagccataacaaattcctgc

SEQ ID NO: 145840 - DNA, 33 bp, Homo sapien
cagtgtcctatggtagtcataacaaattcctgc

SEQ ID NO: 145841 - DNA, 33 bp, Homo sapien
agggggtgaagtcctgaaaatcccatcacagga

SEQ ID NO: 145842 - DNA, 33 bp, Homo sapien
agggggtgaagtcctggaaatcccatcacagga

SEQ ID NO: 145843 - DNA, 33 bp, Homo sapien
ctctgcccaagactcacgctgatggaggggtac

SEQ ID NO: 145844 - DNA, 33 bp, Homo sapien
ctctgcccaagactcatgctgatggaggggtac

SEQ ID NO: 145845 - DNA, 33 bp, Homo sapien
gcgtttctgaaaatacactatggaaatgaggag

SEQ ID NO: 145846 - DNA, 33 bp, Homo sapien
gcgtttctgaaaatacgctatggaaatgaggag

SEQ ID NO: 145847 - DNA, 33 bp, Homo sapien
ttccttcccacgtccgaagattccacatcaggg

SEQ ID NO: 145848 - DNA, 33 bp, Homo sapien
ttccttcccacgtccggagattccacatcaggg

SEQ ID NO: 145849 - DNA, 33 bp, Homo sapien
tgcttcattctagttacgcaaatagaacattct

SEQ ID NO: 145850 - DNA, 33 bp, Homo sapien
tgcttcattctagttatgcaaatagaacattct

SEQ ID NO: 145851 - DNA, 33 bp, Homo sapien
atatcactaaggaaaaaacgggcagacccacta

SEQ ID NO: 145852 - DNA, 33 bp, Homo sapien
atatcactaaggaaaagacgggcagacccacta

SEQ ID NO: 145853 - DNA, 33 bp, Homo sapien
gataatcatttttataaagcacatggtcaagtt

SEQ ID NO: 145854 - DNA, 33 bp, Homo sapien
gataatcatttttatagagcacatggtcaagtt

SEQ ID NO: 145855 - DNA, 33 bp, Homo sapien
gaaaaatgcaaattaaatcataatgggatcaaa

SEQ ID NO: 145856 - DNA, 33 bp, Homo sapien
gaaaaatgcaaattaagtcataatgggatcaaa

SEQ ID NO: 145857 - DNA, 33 bp, Homo sapien
taccttccaaccagtacgacgagggccctgcct

SEQ ID NO: 145858 - DNA, 33 bp, Homo sapien
taccttccaaccagtatgacgagggccctgcct

SEQ ID NO: 145859 - DNA, 33 bp, Homo sapien
cctacaaatgctgatcaagtgtgctccataaca

SEQ ID NO: 145860 - DNA, 33 bp, Homo sapien
cctacaaatgctgatcgagtgtgctccataaca

SEQ ID NO: 145861 - DNA, 33 bp, Homo sapien
tatttagaagtacgtcacttaatcttcaggtat

SEQ ID NO: 145862 - DNA, 33 bp, Homo sapien
tatttagaagtacgtcgcttaatcttcaggtat

SEQ ID NO: 145863 - DNA, 33 bp, Homo sapien
gtaactttgcagggaacaacctgacaagcctag

SEQ ID NO: 145864 - DNA, 33 bp, Homo sapien
gtaactttgcagggaagaacctgacaagcctag

SEQ ID NO: 145865 - DNA, 33 bp, Homo sapien
agcaccgagaactgaccagaaggaactataagg

SEQ ID NO: 145866 - DNA, 33 bp, Homo sapien
agcaccgagaactgactagaaggaactataagg

SEQ ID NO: 145867 - DNA, 33 bp, Homo sapien
aaggaaggctgtcaaaatagcggccagtgtggc

SEQ ID NO: 145868 - DNA, 33 bp, Homo sapien
aaggaaggctgtcaaagtagcggccagtgtggc

SEQ ID NO: 145869 - DNA, 33 bp, Homo sapien
ggcatgcaggagctgacggagaggcgcaggcac

SEQ ID NO: 145870 - DNA, 33 bp, Homo sapien
ggcatgcaggagctgatggagaggcgcaggcac

SEQ ID NO: 145871 - DNA, 33 bp, Homo sapien
aagaaagtccagtggcaatgaactcagccaaga

SEQ ID NO: 145872 - DNA, 33 bp, Homo sapien
aagaaagtccagtggcgatgaactcagccaaga

SEQ ID NO: 145873 - DNA, 33 bp, Homo sapien
tctgctcatagtgacaatgaggaagcctcccct

SEQ ID NO: 145874 - DNA, 33 bp, Homo sapien
tctgctcatagtgacagtgaggaagcctcccct

SEQ ID NO: 145875 - DNA, 33 bp, Homo sapien
actcaatgcccaatcaaaaagaaggcattacca

SEQ ID NO: 145876 - DNA, 33 bp, Homo sapien
actcaatgcccaatcagaaagaaggcattacca

SEQ ID NO: 145877 - DNA, 33 bp, Homo sapien
agcctctagaaactagaaaaggcagagaagcga

SEQ ID NO: 145878 - DNA, 33 bp, Homo sapien
agcctctagaaactagcaaaggcagagaagcga

SEQ ID NO: 145879 - DNA, 33 bp, Homo sapien
ttataaccttcatgacaaacttgatgttcatta

SEQ ID NO: 145880 - DNA, 33 bp, Homo sapien
ttataaccttcatgacgaacttgatgttcatta

SEQ ID NO: 145881 - DNA, 33 bp, Homo sapien
tacacatggttaaataaatggataagctggaga

SEQ ID NO: 145882 - DNA, 33 bp, Homo sapien
tacacatggttaaatacatggataagctggaga

SEQ ID NO: 145883 - DNA, 33 bp, Homo sapien
ggcaacatgaaaaccaatgcatgcagccataac

SEQ ID NO: 145884 - DNA, 33 bp, Homo sapien
ggcaacatgaaaaccagtgcatgcagccataac

SEQ ID NO: 145885 - DNA, 33 bp, Homo sapien
gaaacttcaaattaccaatgggcagaaactaat

SEQ ID NO: 145886 - DNA, 33 bp, Homo sapien
gaaacttcaaattaccgatgggcagaaactaat

SEQ ID NO: 145887 - DNA, 33 bp, Homo sapien
tgttaagcagaaaataggtttcaatgttacttg

SEQ ID NO: 145888 - DNA, 33 bp, Homo sapien
tgttaagcagaaaatatgtttcaatgttacttg

SEQ ID NO: 145889 - DNA, 33 bp, Homo sapien
agaaattgaagtagaagttatagaactcagaag

SEQ ID NO: 145890 - DNA, 33 bp, Homo sapien
agaaattgaagtagaatttatagaactcagaag

SEQ ID NO: 145891 - DNA, 33 bp, Homo sapien
tttctgtttattctcacgttagctttgcataaa

SEQ ID NO: 145892 - DNA, 33 bp, Homo sapien
tttctgtttattctcatgttagctttgcataaa

SEQ ID NO: 145893 - DNA, 33 bp, Homo sapien
gaagttgctctgaggacataaagcgtgcaatat

SEQ ID NO: 145894 - DNA, 33 bp, Homo sapien
gaagttgctctgaggatataaagcgtgcaatat

SEQ ID NO: 145895 - DNA, 33 bp, Homo sapien
taggtcccaaaacatcaaagtctacacccctac

SEQ ID NO: 145896 - DNA, 33 bp, Homo sapien
taggtcccaaaacatcgaagtctacacccctac

SEQ ID NO: 145897 - DNA, 33 bp, Homo sapien
tgttgagattcctttacggatgtcatttcagca

SEQ ID NO: 145898 - DNA, 33 bp, Homo sapien
tgttgagattcctttatggatgtcatttcagca

SEQ ID NO: 145899 - DNA, 33 bp, Homo sapien
ctacctggctggggaacgggaggcttatcttct

SEQ ID NO: 145900 - DNA, 33 bp, Homo sapien
ctacctggctggggaatgggaggcttatcttct

SEQ ID NO: 145901 - DNA, 33 bp, Homo sapien
cccaggtgatacagcccgaatttctggcaatgc

SEQ ID NO: 145902 - DNA, 33 bp, Homo sapien
cccaggtgatacagcctgaatttctggcaatgc

SEQ ID NO: 145903 - DNA, 33 bp, Homo sapien
acccagggtggttgacaatgtgaatccccggct

SEQ ID NO: 145904 - DNA, 33 bp, Homo sapien
acccagggtggttgacgatgtgaatccccggct

SEQ ID NO: 145905 - DNA, 33 bp, Homo sapien
cactcacaatgtatcaaatttagcatgaattac

SEQ ID NO: 145906 - DNA, 33 bp, Homo sapien
cactcacaatgtatcagatttagcatgaattac

SEQ ID NO: 145907 - DNA, 33 bp, Homo sapien
ctgcacaggaaacagaaacagaatgaagtaggg

SEQ ID NO: 145908 - DNA, 33 bp, Homo sapien
ctgcacaggaaacagagacagaatgaagtaggg

SEQ ID NO: 145909 - DNA, 33 bp, Homo sapien
aggccggttcagggcagaaaatacggcagaaga

SEQ ID NO: 145910 - DNA, 33 bp, Homo sapien
aggccggttcagggcataaaatacggcagaaga

SEQ ID NO: 145911 - DNA, 33 bp, Homo sapien
tttatgtgatggccccaacggtctccccacctc

SEQ ID NO: 145912 - DNA, 33 bp, Homo sapien
tttatgtgatggccccgacggtctccccacctc

SEQ ID NO: 145913 - DNA, 33 bp, Homo sapien
ccagagccttcagaaaatattaccctgtgccca

SEQ ID NO: 145914 - DNA, 33 bp, Homo sapien
ccagagccttcagaaactattaccctgtgccca

SEQ ID NO: 145915 - DNA, 33 bp, Homo sapien
ttgccaccatccttaacacttctggtctaaaaa

SEQ ID NO: 145916 - DNA, 33 bp, Homo sapien
ttgccaccatccttaatacttctggtctaaaaa

SEQ ID NO: 145917 - DNA, 33 bp, Homo sapien
tcacatagtctggataaaaatgggccacttcag

SEQ ID NO: 145918 - DNA, 33 bp, Homo sapien
tcacatagtctggatagaaatgggccacttcag

SEQ ID NO: 145919 - DNA, 33 bp, Homo sapien
gtaaatcaaaacccctcaagaggtcacacaagc

SEQ ID NO: 145920 - DNA, 33 bp, Homo sapien
gtaaatcaaaaccccttaagaggtcacacaagc

SEQ ID NO: 145921 - DNA, 33 bp, Homo sapien
gcatgagcaaagataacggacatgagacagcat

SEQ ID NO: 145922 - DNA, 33 bp, Homo sapien
gcatgagcaaagataagggacatgagacagcat

SEQ ID NO: 145923 - DNA, 33 bp, Homo sapien
tctgggttctaaaactctaatctctttcccttg

SEQ ID NO: 145924 - DNA, 33 bp, Homo sapien
tctgggttctaaaactttaatctctttcccttg

SEQ ID NO: 145925 - DNA, 33 bp, Homo sapien
aatttctatgcctgagattgagaagggaacaag

SEQ ID NO: 145926 - DNA, 33 bp, Homo sapien
aatttctatgcctgagtttgagaagggaacaag

SEQ ID NO: 145927 - DNA, 33 bp, Homo sapien
ttactacagtgataaaattatgctaattggacc

SEQ ID NO: 145928 - DNA, 33 bp, Homo sapien
ttactacagtgataaagttatgctaattggacc

SEQ ID NO: 145929 - DNA, 33 bp, Homo sapien
ggtcacacatggattacagcacgtggtgtgtat

SEQ ID NO: 145930 - DNA, 33 bp, Homo sapien
ggtcacacatggattagagcacgtggtgtgtat

SEQ ID NO: 145931 - DNA, 33 bp, Homo sapien
catgtcaccctgaccaagatgttggcctttttc

SEQ ID NO: 145932 - DNA, 33 bp, Homo sapien
catgtcaccctgaccaggatgttggcctttttc

SEQ ID NO: 145933 - DNA, 33 bp, Homo sapien
cataagaaactctccacgagccatttgtgtgaa

SEQ ID NO: 145934 - DNA, 33 bp, Homo sapien
cataagaaactctccatgagccatttgtgtgaa

SEQ ID NO: 145935 - DNA, 33 bp, Homo sapien
agaactccttgtcaccaacattccaattctatc

SEQ ID NO: 145936 - DNA, 33 bp, Homo sapien
agaactccttgtcacctacattccaattctatc

SEQ ID NO: 145937 - DNA, 33 bp, Homo sapien
tagattatgtggctacagctacaagtcaatgct

SEQ ID NO: 145938 - DNA, 33 bp, Homo sapien
tagattatgtggctactgctacaagtcaatgct

SEQ ID NO: 145939 - DNA, 33 bp, Homo sapien
gtcaatgctaacctgccgacagtcctgtatggt

SEQ ID NO: 145940 - DNA, 33 bp, Homo sapien
gtcaatgctaacctgctgacagtcctgtatggt

SEQ ID NO: 145941 - DNA, 33 bp, Homo sapien
ccatataaactatatgaaatcaggtgactggcc

SEQ ID NO: 145942 - DNA, 33 bp, Homo sapien
ccatataaactatatgtaatcaggtgactggcc

SEQ ID NO: 145943 - DNA, 33 bp, Homo sapien
cagagtgcagccaaccaaattttccctctgcac

SEQ ID NO: 145944 - DNA, 33 bp, Homo sapien
cagagtgcagccaaccgaattttccctctgcac

SEQ ID NO: 145945 - DNA, 33 bp, Homo sapien
aacttttactattggacgcggaagaactaagag

SEQ ID NO: 145946 - DNA, 33 bp, Homo sapien
aacttttactattggatgcggaagaactaagag

SEQ ID NO: 145947 - DNA, 33 bp, Homo sapien
gacctgctttcctaatgaggtgatataaacctt

SEQ ID NO: 145948 - DNA, 33 bp, Homo sapien
gacctgctttcctaattaggtgatataaacctt

SEQ ID NO: 145949 - DNA, 33 bp, Homo sapien
taaagtggtccatccaataaaaatctaagatct

SEQ ID NO: 145950 - DNA, 33 bp, Homo sapien
taaagtggtccatccagtaaaaatctaagatct

SEQ ID NO: 145951 - DNA, 33 bp, Homo sapien
aaggagaagcagaagtcaaaggacggaagagat

SEQ ID NO: 145952 - DNA, 33 bp, Homo sapien
aaggagaagcagaagtgaaaggacggaagagat

SEQ ID NO: 145953 - DNA, 33 bp, Homo sapien
ctcagagtactttgctcaccacctctgacagtc

SEQ ID NO: 145954 - DNA, 33 bp, Homo sapien
ctcagagtactttgcttaccacctctgacagtc

SEQ ID NO: 145955 - DNA, 33 bp, Homo sapien
tctatatgccccaaacggatcaagtccccctgg

SEQ ID NO: 145956 - DNA, 33 bp, Homo sapien
tctatatgccccaaactgatcaagtccccctgg

SEQ ID NO: 145957 - DNA, 33 bp, Homo sapien
ttaaaaaagcagtaaactcaacattaaaaccga

SEQ ID NO: 145958 - DNA, 33 bp, Homo sapien
ttaaaaaagcagtaaagtcaacattaaaaccga

SEQ ID NO: 145959 - DNA, 33 bp, Homo sapien
ccctgccgcttgcacaaggaagttctgcgcctt

SEQ ID NO: 145960 - DNA, 33 bp, Homo sapien
ccctgccgcttgcacagggaagttctgcgcctt

SEQ ID NO: 145961 - DNA, 33 bp, Homo sapien
cctcaagtctcaggggaatgcgtaggagctgcg

SEQ ID NO: 145962 - DNA, 33 bp, Homo sapien
cctcaagtctcagggggatgcgtaggagctgcg

SEQ ID NO: 145963 - DNA, 33 bp, Homo sapien
cagcctttcagagaacggaattctccttccctt

SEQ ID NO: 145964 - DNA, 33 bp, Homo sapien
cagcctttcagagaactgaattctccttccctt

SEQ ID NO: 145965 - DNA, 33 bp, Homo sapien
cctggagatacccaaacacaaggagggggcgtg

SEQ ID NO: 145966 - DNA, 33 bp, Homo sapien
cctggagatacccaaatacaaggagggggcgtg

SEQ ID NO: 145967 - DNA, 33 bp, Homo sapien
ggtgctttcctgtgcccagcatttccttaggtc

SEQ ID NO: 145968 - DNA, 33 bp, Homo sapien
ggtgctttcctgtgccgagcatttccttaggtc

SEQ ID NO: 145969 - DNA, 33 bp, Homo sapien
cccgtggaggacaagacaggatgctggtggacc

SEQ ID NO: 145970 - DNA, 33 bp, Homo sapien
cccgtggaggacaagagaggatgctggtggacc

SEQ ID NO: 145971 - DNA, 33 bp, Homo sapien
acactggaagcacagaagtttctttgattgtta

SEQ ID NO: 145972 - DNA, 33 bp, Homo sapien
acactggaagcacagaggtttctttgattgtta

SEQ ID NO: 145973 - DNA, 33 bp, Homo sapien
ttttgcatgaactttaacacaaagagtagctgg

SEQ ID NO: 145974 - DNA, 33 bp, Homo sapien
ttttgcatgaactttagcacaaagagtagctgg

SEQ ID NO: 145975 - DNA, 33 bp, Homo sapien
tttactgagctccttaaatatgtagatgagagg

SEQ ID NO: 145976 - DNA, 33 bp, Homo sapien
tttactgagctccttagatatgtagatgagagg

SEQ ID NO: 145977 - DNA, 33 bp, Homo sapien
aatctttatcaatccaccttgaagttttctggt

SEQ ID NO: 145978 - DNA, 33 bp, Homo sapien
aatctttatcaatccatcttgaagttttctggt

SEQ ID NO: 145979 - DNA, 33 bp, Homo sapien
ccacagtctgatccaactaaaatcagtctcttc

SEQ ID NO: 145980 - DNA, 33 bp, Homo sapien
ccacagtctgatccaattaaaatcagtctcttc

SEQ ID NO: 145981 - DNA, 33 bp, Homo sapien
agctagaaacccaacacagagccacagaaagag

SEQ ID NO: 145982 - DNA, 33 bp, Homo sapien
agctagaaacccaacagagagccacagaaagag

SEQ ID NO: 145983 - DNA, 33 bp, Homo sapien
ctctttataaaagcccccatcctgttcatttga

SEQ ID NO: 145984 - DNA, 33 bp, Homo sapien
ctctttataaaagcccgcatcctgttcatttga

SEQ ID NO: 145985 - DNA, 33 bp, Homo sapien
taaagaatagtgagaaaacacagagtttccaca

SEQ ID NO: 145986 - DNA, 33 bp, Homo sapien
taaagaatagtgagaagacacagagtttccaca

SEQ ID NO: 145987 - DNA, 33 bp, Homo sapien
ctatccaaactcttagaccattgcatttgcagt

SEQ ID NO: 145988 - DNA, 33 bp, Homo sapien
ctatccaaactcttaggccattgcatttgcagt

SEQ ID NO: 145989 - DNA, 33 bp, Homo sapien
gtttctattgatcagactatatgagcctcttta

SEQ ID NO: 145990 - DNA, 33 bp, Homo sapien
gtttctattgatcagagtatatgagcctcttta

SEQ ID NO: 145991 - DNA, 33 bp, Homo sapien
cttgtttctttcagacagaagctaggtagggtt

SEQ ID NO: 145992 - DNA, 33 bp, Homo sapien
cttgtttctttcagaccgaagctaggtagggtt

SEQ ID NO: 145993 - DNA, 33 bp, Homo sapien
gagaacagaacctggaccacaaactgcagagag

SEQ ID NO: 145994 - DNA, 33 bp, Homo sapien
gagaacagaacctggatcacaaactgcagagag

SEQ ID NO: 145995 - DNA, 33 bp, Homo sapien
atgactagagaggcaggcgagctggcagaggat

SEQ ID NO: 145996 - DNA, 33 bp, Homo sapien
atgactagagaggcagtcgagctggcagaggat

SEQ ID NO: 145997 - DNA, 33 bp, Homo sapien
ttgctcttggaaatccaatgaaagctatgaatc

SEQ ID NO: 145998 - DNA, 33 bp, Homo sapien
ttgctcttggaaatccgatgaaagctatgaatc

SEQ ID NO: 145999 - DNA, 33 bp, Homo sapien
gctgtgcacattcagcaagtgccttacgctttc

SEQ ID NO: 146000 - DNA, 33 bp, Homo sapien
gctgtgcacattcagcgagtgccttacgctttc

SEQ ID NO: 146001 - DNA, 33 bp, Homo sapien
tctagagacagtgtgaaaaaaaatgcaagttcc

SEQ ID NO: 146002 - DNA, 33 bp, Homo sapien
tctagagacagtgtgacaaaaaatgcaagttcc

SEQ ID NO: 146003 - DNA, 33 bp, Homo sapien
tgagaatcggacaccgcagtgcggcagcgctgt

SEQ ID NO: 146004 - DNA, 33 bp, Homo sapien
tgagaatcggacaccgtagtgcggcagcgctgt

SEQ ID NO: 146005 - DNA, 33 bp, Homo sapien
tcttaaaatatttataacactttgccaattgat

SEQ ID NO: 146006 - DNA, 33 bp, Homo sapien
tcttaaaatatttataccactttgccaattgat

SEQ ID NO: 146007 - DNA, 33 bp, Homo sapien
ctctactactgaacaccgatagaactattattt

SEQ ID NO: 146008 - DNA, 33 bp, Homo sapien
ctctactactgaacactgatagaactattattt

SEQ ID NO: 146009 - DNA, 33 bp, Homo sapien
gggttcaattttggtacgctgtattttcctgga

SEQ ID NO: 146010 - DNA, 33 bp, Homo sapien
gggttcaattttggtatgctgtattttcctgga

SEQ ID NO: 146011 - DNA, 33 bp, Homo sapien
taactggttatagctgcagcacctctttctatt

SEQ ID NO: 146012 - DNA, 33 bp, Homo sapien
taactggttatagctgtagcacctctttctatt

SEQ ID NO: 146013 - DNA, 33 bp, Homo sapien
cagatttcacatataaaaaagctcatgcagtat

SEQ ID NO: 146014 - DNA, 33 bp, Homo sapien
cagatttcacatataagaaagctcatgcagtat

SEQ ID NO: 146015 - DNA, 33 bp, Homo sapien
gatatattttggtgaaacgaatatcaattttca

SEQ ID NO: 146016 - DNA, 33 bp, Homo sapien
gatatattttggtgaatcgaatatcaattttca

SEQ ID NO: 146017 - DNA, 33 bp, Homo sapien
ccacagagcctttatccgagaccatctcactct

SEQ ID NO: 146018 - DNA, 33 bp, Homo sapien
ccacagagcctttatctgagaccatctcactct

SEQ ID NO: 146019 - DNA, 33 bp, Homo sapien
ttgaactggcgtcaccactactatttacttggg

SEQ ID NO: 146020 - DNA, 33 bp, Homo sapien
ttgaactggcgtcaccgctactatttacttggg

SEQ ID NO: 146021 - DNA, 33 bp, Homo sapien
gaatctccatgaagaaacctttgcagtaacaac

SEQ ID NO: 146022 - DNA, 33 bp, Homo sapien
gaatctccatgaagaatcctttgcagtaacaac

SEQ ID NO: 146023 - DNA, 33 bp, Homo sapien
tgcagctcaaattcccaaagtccaggaccacag

SEQ ID NO: 146024 - DNA, 33 bp, Homo sapien
tgcagctcaaattcccgaagtccaggaccacag

SEQ ID NO: 146025 - DNA, 33 bp, Homo sapien
ggtcccatgatcatcaatatgctccaaagcgaa

SEQ ID NO: 146026 - DNA, 33 bp, Homo sapien
ggtcccatgatcatcagtatgctccaaagcgaa

SEQ ID NO: 146027 - DNA, 33 bp, Homo sapien
gggcaaagagatcaaggctaaggctccaaaggc

SEQ ID NO: 146028 - DNA, 33 bp, Homo sapien
gggcaaagagatcaagtctaaggctccaaaggc

SEQ ID NO: 146029 - DNA, 33 bp, Homo sapien
agaaatccaggttaccaaaggcaatggatggaa

SEQ ID NO: 146030 - DNA, 33 bp, Homo sapien
agaaatccaggttaccgaaggcaatggatggaa

SEQ ID NO: 146031 - DNA, 33 bp, Homo sapien
tctattagtaactccaaatctgcaaggcaaata

SEQ ID NO: 146032 - DNA, 33 bp, Homo sapien
tctattagtaactccagatctgcaaggcaaata

SEQ ID NO: 146033 - DNA, 33 bp, Homo sapien
ccgaccccgaaagtcacaaaccctgatgcaaat

SEQ ID NO: 146034 - DNA, 33 bp, Homo sapien
ccgaccccgaaagtcataaaccctgatgcaaat

SEQ ID NO: 146035 - DNA, 33 bp, Homo sapien
ggaggccgccagggaaagtgaacatctacggtt

SEQ ID NO: 146036 - DNA, 33 bp, Homo sapien
ggaggccgccagggaacgtgaacatctacggtt

SEQ ID NO: 146037 - DNA, 33 bp, Homo sapien
tgagaacaagagccagaaaggatggtggcattg

SEQ ID NO: 146038 - DNA, 33 bp, Homo sapien
tgagaacaagagccaggaaggatggtggcattg

SEQ ID NO: 146039 - DNA, 33 bp, Homo sapien
cctctgcagtgtaaaaactctctgtaccaccac

SEQ ID NO: 146040 - DNA, 33 bp, Homo sapien
cctctgcagtgtaaaagctctctgtaccaccac

SEQ ID NO: 146041 - DNA, 33 bp, Homo sapien
ctatttcttattcacaagtgtgctcaccactgt

SEQ ID NO: 146042 - DNA, 33 bp, Homo sapien
ctatttcttattcacacgtgtgctcaccactgt

SEQ ID NO: 146043 - DNA, 33 bp, Homo sapien
cttggtatttgcctgaagattttatctacttct

SEQ ID NO: 146044 - DNA, 33 bp, Homo sapien
cttggtatttgcctgaggattttatctacttct

SEQ ID NO: 146045 - DNA, 33 bp, Homo sapien
ggtaagcagttattcacgtaaaacaaaaacaac

SEQ ID NO: 146046 - DNA, 33 bp, Homo sapien
ggtaagcagttattcatgtaaaacaaaaacaac

SEQ ID NO: 146047 - DNA, 33 bp, Homo sapien
aaaatcaatgtctaaaacgctctgcaccaggaa

SEQ ID NO: 146048 - DNA, 33 bp, Homo sapien
aaaatcaatgtctaaaccgctctgcaccaggaa

SEQ ID NO: 146049 - DNA, 33 bp, Homo sapien
ggcatcattttatgtgcagagctgcttggtggc

SEQ ID NO: 146050 - DNA, 33 bp, Homo sapien
ggcatcattttatgtgtagagctgcttggtggc

SEQ ID NO: 146051 - DNA, 33 bp, Homo sapien
aacctgctgacttcaactgaaaactcttcagat

SEQ ID NO: 146052 - DNA, 33 bp, Homo sapien
aacctgctgacttcaattgaaaactcttcagat

SEQ ID NO: 146053 - DNA, 33 bp, Homo sapien
gggaaggatctgacacagagctcgtgtatttgt

SEQ ID NO: 146054 - DNA, 33 bp, Homo sapien
gggaaggatctgacacggagctcgtgtatttgt

SEQ ID NO: 146055 - DNA, 33 bp, Homo sapien
agatttgatcttgacccggggctgatgaagagg

SEQ ID NO: 146056 - DNA, 33 bp, Homo sapien
agatttgatcttgacctggggctgatgaagagg

SEQ ID NO: 146057 - DNA, 33 bp, Homo sapien
cctggctcttacacaccgtctgcttctacaggg

SEQ ID NO: 146058 - DNA, 33 bp, Homo sapien
cctggctcttacacactgtctgcttctacaggg

SEQ ID NO: 146059 - DNA, 33 bp, Homo sapien
ctaaacaaagaagcagaagattgtgtcatcaat

SEQ ID NO: 146060 - DNA, 33 bp, Homo sapien
ctaaacaaagaagcagcagattgtgtcatcaat

SEQ ID NO: 146061 - DNA, 33 bp, Homo sapien
cactatcgacaccaccactcggacagtcctgtc

SEQ ID NO: 146062 - DNA, 33 bp, Homo sapien
cactatcgacaccaccgctcggacagtcctgtc

SEQ ID NO: 146063 - DNA, 33 bp, Homo sapien
acctgtaagatcagataataaaatgtgtgtaaa

SEQ ID NO: 146064 - DNA, 33 bp, Homo sapien
acctgtaagatcagatgataaaatgtgtgtaaa

SEQ ID NO: 146065 - DNA, 33 bp, Homo sapien
cagtaaaaggtatggcaaagcattgttagagca

SEQ ID NO: 146066 - DNA, 33 bp, Homo sapien
cagtaaaaggtatggcgaagcattgttagagca

SEQ ID NO: 146067 - DNA, 33 bp, Homo sapien
gactccaggttatagaatatttttgatccaact

SEQ ID NO: 146068 - DNA, 33 bp, Homo sapien
gactccaggttatagagtatttttgatccaact

SEQ ID NO: 146069 - DNA, 33 bp, Homo sapien
acgccttaaactccgacgctcaggaaatggtgc

SEQ ID NO: 146070 - DNA, 33 bp, Homo sapien
acgccttaaactccgatgctcaggaaatggtgc

SEQ ID NO: 146071 - DNA, 33 bp, Homo sapien
gatggacaggcagagacatatggaggtcgccac

SEQ ID NO: 146072 - DNA, 33 bp, Homo sapien
gatggacaggcagagagatatggaggtcgccac

SEQ ID NO: 146073 - DNA, 33 bp, Homo sapien
atgatgcagggcctgcagagaagctttttgttt

SEQ ID NO: 146074 - DNA, 33 bp, Homo sapien
atgatgcagggcctgcggagaagctttttgttt

SEQ ID NO: 146075 - DNA, 33 bp, Homo sapien
gcaaggcctttaggaaatactccctcacctgac

SEQ ID NO: 146076 - DNA, 33 bp, Homo sapien
gcaaggcctttaggaagtactccctcacctgac

SEQ ID NO: 146077 - DNA, 33 bp, Homo sapien
tggaactaggatccagacctatctcctctgccc

SEQ ID NO: 146078 - DNA, 33 bp, Homo sapien
tggaactaggatccagccctatctcctctgccc

SEQ ID NO: 146079 - DNA, 33 bp, Homo sapien
aggctcagcctgcccacgtaggaacactcgtct

SEQ ID NO: 146080 - DNA, 33 bp, Homo sapien
aggctcagcctgcccatgtaggaacactcgtct

SEQ ID NO: 146081 - DNA, 33 bp, Homo sapien
ccataaatgagcagctcaatagcaacttcctct

SEQ ID NO: 146082 - DNA, 33 bp, Homo sapien
ccataaatgagcagctgaatagcaacttcctct

SEQ ID NO: 146083 - DNA, 33 bp, Homo sapien
caggctttgaagggaacgagttggcaaagtcat

SEQ ID NO: 146084 - DNA, 33 bp, Homo sapien
caggctttgaagggaatgagttggcaaagtcat

SEQ ID NO: 146085 - DNA, 33 bp, Homo sapien
agtgagcaatttgtccaaagtctgggtaatagg

SEQ ID NO: 146086 - DNA, 33 bp, Homo sapien
agtgagcaatttgtccgaagtctgggtaatagg

SEQ ID NO: 146087 - DNA, 33 bp, Homo sapien
atttggggatcttaaaatcatgcgtatttattg

SEQ ID NO: 146088 - DNA, 33 bp, Homo sapien
atttggggatcttaaagtcatgcgtatttattg

SEQ ID NO: 146089 - DNA, 33 bp, Homo sapien
atctttagttgaaacaaaatgttgctgcttaag

SEQ ID NO: 146090 - DNA, 33 bp, Homo sapien
atctttagttgaaacacaatgttgctgcttaag

SEQ ID NO: 146091 - DNA, 33 bp, Homo sapien
gccccaaacaggaaaaacctgctcctcaatggg

SEQ ID NO: 146092 - DNA, 33 bp, Homo sapien
gccccaaacaggaaaaccctgctcctcaatggg

SEQ ID NO: 146093 - DNA, 33 bp, Homo sapien
ggtcatttatagactacggagtcaaagagggac

SEQ ID NO: 146094 - DNA, 33 bp, Homo sapien
ggtcatttatagactatggagtcaaagagggac

SEQ ID NO: 146095 - DNA, 33 bp, Homo sapien
gctacagactcatggaaatttagcccatgctca

SEQ ID NO: 146096 - DNA, 33 bp, Homo sapien
gctacagactcatggatatttagcccatgctca

SEQ ID NO: 146097 - DNA, 33 bp, Homo sapien; identical to SEQ ID NO: 146095

SEQ ID NO: 146098 - DNA, 33 bp, Homo sapien; identical to SEQ ID NO: 146096

SEQ ID NO: 146099 - DNA, 33 bp, Homo sapien
caaggccaacctcaaaaaagctgagcaggaaaa

SEQ ID NO: 146100 - DNA, 33 bp, Homo sapien
caaggccaacctcaaagaagctgagcaggaaaa

SEQ ID NO: 146101 - DNA, 33 bp, Homo sapien
ggatttataatctctacagaaggtcagataagc

SEQ ID NO: 146102 - DNA, 33 bp, Homo sapien
ggatttataatctctatagaaggtcagataagc

SEQ ID NO: 146103 - DNA, 33 bp, Homo sapien
acccaaaagtgttttccagatcaagtggcaaga

SEQ ID NO: 146104 - DNA, 33 bp, Homo sapien
acccaaaagtgttttctagatcaagtggcaaga

SEQ ID NO: 146105 - DNA, 33 bp, Homo sapien
ctgcgtcttgtgttcccgaaggaccgaaggctg

SEQ ID NO: 146106 - DNA, 33 bp, Homo sapien
ctgcgtcttgtgttcctgaaggaccgaaggctg

SEQ ID NO: 146107 - DNA, 33 bp, Homo sapien
ctgtcatttctcataagacagaacaaatacgtt

SEQ ID NO: 146108 - DNA, 33 bp, Homo sapien
ctgtcatttctcataatacagaacaaatacgtt

SEQ ID NO: 146109 - DNA, 33 bp, Homo sapien
cttgtgaaccctggcacaatcgatacacatttt

SEQ ID NO: 146110 - DNA, 33 bp, Homo sapien
cttgtgaaccctggcataatcgatacacatttt

SEQ ID NO: 146111 - DNA, 33 bp, Homo sapien
tagacctgagtggttcaataataggcagacacc

SEQ ID NO: 146112 - DNA, 33 bp, Homo sapien
tagacctgagtggttcgataataggcagacacc

SEQ ID NO: 146113 - DNA, 33 bp, Homo sapien
aaaaatctggatgcaccgcaaggtaattagaaa

SEQ ID NO: 146114 - DNA, 33 bp, Homo sapien
aaaaatctggatgcactgcaaggtaattagaaa

SEQ ID NO: 146115 - DNA, 33 bp, Homo sapien
gctgaaggattccagcaaagtcttgaattattt

SEQ ID NO: 146116 - DNA, 33 bp, Homo sapien
gctgaaggattccagcgaagtcttgaattattt

SEQ ID NO: 146117 - DNA, 33 bp, Homo sapien
gcttccaattcccagtaaagagtggagctaatt

SEQ ID NO: 146118 - DNA, 33 bp, Homo sapien
gcttccaattcccagtgaagagtggagctaatt

SEQ ID NO: 146119 - DNA, 33 bp, Homo sapien
tgaaccagagcgggtacggagttgaaccagagt

SEQ ID NO: 146120 - DNA, 33 bp, Homo sapien
tgaaccagagcgggtatggagttgaaccagagt

SEQ ID NO: 146121 - DNA, 33 bp, Homo sapien
ttcaatgaaacccagaccttcctatattgcggc

SEQ ID NO: 146122 - DNA, 33 bp, Homo sapien
ttcaatgaaacccagatcttcctatattgcggc

SEQ ID NO: 146123 - DNA, 33 bp, Homo sapien
gtgcagatatgcaagacaaggacacgagcgtgc

SEQ ID NO: 146124 - DNA, 33 bp, Homo sapien
gtgcagatatgcaagataaggacacgagcgtgc

SEQ ID NO: 146125 - DNA, 33 bp, Homo sapien
cgtcactagccctatcaatttatgagaaaggac

SEQ ID NO: 146126 - DNA, 33 bp, Homo sapien
cgtcactagccctatcgatttatgagaaaggac

SEQ ID NO: 146127 - DNA, 33 bp, Homo sapien
aaacagccctttgaaaaatgcttacactaaggg

SEQ ID NO: 146128 - DNA, 33 bp, Homo sapien
aaacagccctttgaaagatgcttacactaaggg

SEQ ID NO: 146129 - DNA, 33 bp, Homo sapien
tgggaaaatgtcaacaataattgctcgacaaag

SEQ ID NO: 146130 - DNA, 33 bp, Homo sapien
tgggaaaatgtcaacagtaattgctcgacaaag

SEQ ID NO: 146131 - DNA, 33 bp, Homo sapien
cttcttagaaagttcaaggcggccacagtctct

SEQ ID NO: 146132 - DNA, 33 bp, Homo sapien
cttcttagaaagttcacggcggccacagtctct

SEQ ID NO: 146133 - DNA, 33 bp, Homo sapien
gacacactgggagctccagggacaggagtgggg

SEQ ID NO: 146134 - DNA, 33 bp, Homo sapien
gacacactgggagctctagggacaggagtgggg

SEQ ID NO: 146135 - DNA, 33 bp, Homo sapien
catctgcttccgtctcacttatagagatttgct

SEQ ID NO: 146136 - DNA, 33 bp, Homo sapien
catctgcttccgtctcgcttatagagatttgct

SEQ ID NO: 146137 - DNA, 33 bp, Homo sapien
atcttctcgaacatcacgcaagggactaccagg

SEQ ID NO: 146138 - DNA, 33 bp, Homo sapien
atcttctcgaacatcatgcaagggactaccagg

SEQ ID NO: 146139 - DNA, 33 bp, Homo sapien
aaattgatcacaaatagagcaaattaaactttt

SEQ ID NO: 146140 - DNA, 33 bp, Homo sapien
aaattgatcacaaatatagcaaattaaactttt

SEQ ID NO: 146141 - DNA, 33 bp, Homo sapien
agagtgccggttattaagaaaactatttagggc

SEQ ID NO: 146142 - DNA, 33 bp, Homo sapien
agagtgccggttattaggaaaactatttagggc

SEQ ID NO: 146143 - DNA, 33 bp, Homo sapien
ttgctctcggctttcagaatagaaaggtgaaat

SEQ ID NO: 146144 - DNA, 33 bp, Homo sapien
ttgctctcggctttcataatagaaaggtgaaat

SEQ ID NO: 146145 - DNA, 33 bp, Homo sapien
gggcgttgcttaaataactcagcctggtactgt

SEQ ID NO: 146146 - DNA, 33 bp, Homo sapien
gggcgttgcttaaatagctcagcctggtactgt

SEQ ID NO: 146147 - DNA, 33 bp, Homo sapien
catctactgctgatacgattgtgtagaagaaag

SEQ ID NO: 146148 - DNA, 33 bp, Homo sapien
catctactgctgatactattgtgtagaagaaag

SEQ ID NO: 146149 - DNA, 33 bp, Homo sapien
gatctacgtggttgaagcacagcctccagttct

SEQ ID NO: 146150 - DNA, 33 bp, Homo sapien
gatctacgtggttgaatcacagcctccagttct

SEQ ID NO: 146151 - DNA, 33 bp, Homo sapien
ctacctatcaaatgggccagcctttgtcaacta

SEQ ID NO: 146152 - DNA, 33 bp, Homo sapien
ctacctatcaaatgggtcagcctttgtcaacta

SEQ ID NO: 146153 - DNA, 33 bp, Homo sapien
ctagagagagcgggtgcataaaactgtattctg

SEQ ID NO: 146154 - DNA, 33 bp, Homo sapien
ctagagagagcgggtgtataaaactgtattctg

SEQ ID NO: 146155 - DNA, 33 bp, Homo sapien
gacacagtgacagagaatatggtgggttctagg

SEQ ID NO: 146156 - DNA, 33 bp, Homo sapien
gacacagtgacagagagtatggtgggttctagg

SEQ ID NO: 146157 - DNA, 33 bp, Homo sapien
cagccatcattttcaccgtactctcaatacttg

SEQ ID NO: 146158 - DNA, 33 bp, Homo sapien
cagccatcattttcactgtactctcaatacttg

SEQ ID NO: 146159 - DNA, 33 bp, Homo sapien
caccaaaatgtggacgcaatgtacatgagcatc

SEQ ID NO: 146160 - DNA, 33 bp, Homo sapien
caccaaaatgtggacgtaatgtacatgagcatc

SEQ ID NO: 146161 - DNA, 33 bp, Homo sapien
acattatcttaagttaaaaaagccagacacaaa

SEQ ID NO: 146162 - DNA, 33 bp, Homo sapien
acattatcttaagttagaaaagccagacacaaa

SEQ ID NO: 146163 - DNA, 33 bp, Homo sapien
ggtttcattttttgcacggtggtcttgtttgca

SEQ ID NO: 146164 - DNA, 33 bp, Homo sapien
ggtttcattttttgcatggtggtcttgtttgca

SEQ ID NO: 146165 - DNA, 33 bp, Homo sapien
gaaataaaaatattcacctgcttcccatttcac

SEQ ID NO: 146166 - DNA, 33 bp, Homo sapien
gaaataaaaatattcatctgcttcccatttcac

SEQ ID NO: 146167 - DNA, 33 bp, Homo sapien
attttgtctcctgcaacgggagtaccatgaata

SEQ ID NO: 146168 - DNA, 33 bp, Homo sapien
attttgtctcctgcaatgggagtaccatgaata

SEQ ID NO: 146169 - DNA, 33 bp, Homo sapien
tgtccctgcttgaaccagagacacaggcacata

SEQ ID NO: 146170 - DNA, 33 bp, Homo sapien
tgtccctgcttgaaccggagacacaggcacata

SEQ ID NO: 146171 - DNA, 33 bp, Homo sapien
tgcacagggtcactgaacgacgcggctgtgtat

SEQ ID NO: 146172 - DNA, 33 bp, Homo sapien
tgcacagggtcactgagcgacgcggctgtgtat

SEQ ID NO: 146173 - DNA, 33 bp, Homo sapien
tctcttggaaggaaccaacacgcccaccacctt

SEQ ID NO: 146174 - DNA, 33 bp, Homo sapien
tctcttggaaggaaccgacacgcccaccacctt

SEQ ID NO: 146175 - DNA, 33 bp, Homo sapien
aataagaagtacaggcagatttgaaggatgtca

SEQ ID NO: 146176 - DNA, 33 bp, Homo sapien
aataagaagtacaggcggatttgaaggatgtca

SEQ ID NO: 146177 - DNA, 33 bp, Homo sapien
gaccttggcgtacaccagattggcagttcattc

SEQ ID NO: 146178 - DNA, 33 bp, Homo sapien
gaccttggcgtacacccgattggcagttcattc

SEQ ID NO: 146179 - DNA, 33 bp, Homo sapien
tacgccaaggtccgcaaaggcaaatcctcatgg

SEQ ID NO: 146180 - DNA, 33 bp, Homo sapien
tacgccaaggtccgcagaggcaaatcctcatgg

SEQ ID NO: 146181 - DNA, 33 bp, Homo sapien
tttcatcgttttcctccaatgaagatttacacc

SEQ ID NO: 146182 - DNA, 33 bp, Homo sapien
tttcatcgttttcctctaatgaagatttacacc

SEQ ID NO: 146183 - DNA, 33 bp, Homo sapien
caatgatattttactaagaatttgaagagcaga

SEQ ID NO: 146184 - DNA, 33 bp, Homo sapien
caatgatattttactacgaatttgaagagcaga

SEQ ID NO: 146185 - DNA, 33 bp, Homo sapien
gctgcttccatcagccgcaggttccaggcaggc

SEQ ID NO: 146186 - DNA, 33 bp, Homo sapien
gctgcttccatcagcctcaggttccaggcaggc

SEQ ID NO: 146187 - DNA, 33 bp, Homo sapien
aatcaagagttaaagacgtattagagacggctg

SEQ ID NO: 146188 - DNA, 33 bp, Homo sapien
aatcaagagttaaagatgtattagagacggctg

SEQ ID NO: 146189 - DNA, 33 bp, Homo sapien
ctggaggctttcaaataaagggaaatcattggc

SEQ ID NO: 146190 - DNA, 33 bp, Homo sapien
ctggaggctttcaaatgaagggaaatcattggc

SEQ ID NO: 146191 - DNA, 33 bp, Homo sapien
tgaacagaagccatgcactattaaaacagtggc

SEQ ID NO: 146192 - DNA, 33 bp, Homo sapien
tgaacagaagccatgcgctattaaaacagtggc

SEQ ID NO: 146193 - DNA, 33 bp, Homo sapien
caccaatacatctaaccgatacgtgcatgacat

SEQ ID NO: 146194 - DNA, 33 bp, Homo sapien
caccaatacatctaactgatacgtgcatgacat

SEQ ID NO: 146195 - DNA, 33 bp, Homo sapien
ccttccttgcttcaggaaatttcaacgctcaga

SEQ ID NO: 146196 - DNA, 33 bp, Homo sapien
ccttccttgcttcaggcaatttcaacgctcaga

SEQ ID NO: 146197 - DNA, 33 bp, Homo sapien
ttctgttaatgcaccagagtattccatagtttt

SEQ ID NO: 146198 - DNA, 33 bp, Homo sapien
ttctgttaatgcaccatagtattccatagtttt

SEQ ID NO: 146199 - DNA, 33 bp, Homo sapien
ttctttctacttgtgcaaactttcaaaatatat

SEQ ID NO: 146200 - DNA, 33 bp, Homo sapien
ttctttctacttgtgcgaactttcaaaatatat

SEQ ID NO: 146201 - DNA, 33 bp, Homo sapien
ctggctgggcgctccacgggtacgacggccaca

SEQ ID NO: 146202 - DNA, 33 bp, Homo sapien
ctggctgggcgctccatgggtacgacggccaca

SEQ ID NO: 146203 - DNA, 33 bp, Homo sapien
ctggaggaataaagccacacgatttgagtcacg

SEQ ID NO: 146204 - DNA, 33 bp, Homo sapien
ctggaggaataaagccgcacgatttgagtcacg

SEQ ID NO: 146205 - DNA, 33 bp, Homo sapien
ccggtcccaacactcaaatagacgcgtttggtg

SEQ ID NO: 146206 - DNA, 33 bp, Homo sapien
ccggtcccaacactcagatagacgcgtttggtg

SEQ ID NO: 146207 - DNA, 33 bp, Homo sapien
ttatatcaaagtccagaatgtaagtaaaacagt

SEQ ID NO: 146208 - DNA, 33 bp, Homo sapien
ttatatcaaagtccaggatgtaagtaaaacagt

SEQ ID NO: 146209 - DNA, 33 bp, Homo sapien
tacaatatccgacttaccaactaattcatcaaa

SEQ ID NO: 146210 - DNA, 33 bp, Homo sapien
tacaatatccgacttatcaactaattcatcaaa

SEQ ID NO: 146211 - DNA, 33 bp, Homo sapien
agttgcaagttttgaacgtgccaaataaataat

SEQ ID NO: 146212 - DNA, 33 bp, Homo sapien
agttgcaagttttgaatgtgccaaataaataat

SEQ ID NO: 146213 - DNA, 33 bp, Homo sapien
gattaaatgcctcatcaagataccaaatatgct

SEQ ID NO: 146214 - DNA, 33 bp, Homo sapien
gattaaatgcctcatcgagataccaaatatgct

SEQ ID NO: 146215 - DNA, 33 bp, Homo sapien
gacaggagcttgtctcaccagatgtcactgttt

SEQ ID NO: 146216 - DNA, 33 bp, Homo sapien
gacaggagcttgtctcgccagatgtcactgttt

SEQ ID NO: 146217 - DNA, 33 bp, Homo sapien
caggtcaaaggtagataagagaggaatggttgc

SEQ ID NO: 146218 - DNA, 33 bp, Homo sapien
caggtcaaaggtagatgagagaggaatggttgc

SEQ ID NO: 146219 - DNA, 33 bp, Homo sapien
tctacattaaaaaatggatggccttcagtcatg

SEQ ID NO: 146220 - DNA, 33 bp, Homo sapien
tctacattaaaaaatgtatggccttcagtcatg

SEQ ID NO: 146221 - DNA, 33 bp, Homo sapien
ttacctttcaggaaaaaatcatggggaaggttt

SEQ ID NO: 146222 - DNA, 33 bp, Homo sapien
ttacctttcaggaaaatatcatggggaaggttt

SEQ ID NO: 146223 - DNA, 33 bp, Homo sapien
gggcccagtgtacctcactctgtctttcgctgg

SEQ ID NO: 146224 - DNA, 33 bp, Homo sapien
gggcccagtgtacctcgctctgtctttcgctgg

SEQ ID NO: 146225 - DNA, 33 bp, Homo sapien
tcagcacagtggatgcaaattcacacgacaggg

SEQ ID NO: 146226 - DNA, 33 bp, Homo sapien
tcagcacagtggatgcgaattcacacgacaggg

SEQ ID NO: 146227 - DNA, 33 bp, Homo sapien
gtgcctctttcaggtacgtttgtcaggggaggt

SEQ ID NO: 146228 - DNA, 33 bp, Homo sapien
gtgcctctttcaggtatgtttgtcaggggaggt

SEQ ID NO: 146229 - DNA, 33 bp, Homo sapien
acttggggttactgtcaatgatcgagtgtgttt

SEQ ID NO: 146230 - DNA, 33 bp, Homo sapien
acttggggttactgtccatgatcgagtgtgttt

SEQ ID NO: 146231 - DNA, 33 bp, Homo sapien
gaaggccatcttggccactctagcctctaccaa

SEQ ID NO: 146232 - DNA, 33 bp, Homo sapien
gaaggccatcttggccgctctagcctctaccaa

SEQ ID NO: 146233 - DNA, 33 bp, Homo sapien
gccatgcaaagcctcaacattaaaggacagttg

SEQ ID NO: 146234 - DNA, 33 bp, Homo sapien
gccatgcaaagcctcagcattaaaggacagttg

SEQ ID NO: 146235 - DNA, 33 bp, Homo sapien
cattttacatttccaccgacagtgcagaggggt

SEQ ID NO: 146236 - DNA, 33 bp, Homo sapien
cattttacatttccactgacagtgcagaggggt

SEQ ID NO: 146237 - DNA, 33 bp, Homo sapien
ttgcctcaaatttatcacacaggaaggttgatc

SEQ ID NO: 146238 - DNA, 33 bp, Homo sapien
ttgcctcaaatttatcgcacaggaaggttgatc

SEQ ID NO: 146239 - DNA, 33 bp, Homo sapien
ttcacgtctgtgtgccaatcgtcttccctctga

SEQ ID NO: 146240 - DNA, 33 bp, Homo sapien
ttcacgtctgtgtgccgatcgtcttccctctga

SEQ ID NO: 146241 - DNA, 33 bp, Homo sapien
cctggcttccccctccaagatgcccttcctcca

SEQ ID NO: 146242 - DNA, 33 bp, Homo sapien
cctggcttccccctccgagatgcccttcctcca

SEQ ID NO: 146243 - DNA, 33 bp, Homo sapien
ttatgctgagtagacacatttctccactgaaaa

SEQ ID NO: 146244 - DNA, 33 bp, Homo sapien
ttatgctgagtagacatatttctccactgaaaa

SEQ ID NO: 146245 - DNA, 33 bp, Homo sapien
gcatgggcgctgtgaccgctactcaacaacgcc

SEQ ID NO: 146246 - DNA, 33 bp, Homo sapien
gcatgggcgctgtgacggctactcaacaacgcc

SEQ ID NO: 146247 - DNA, 33 bp, Homo sapien
acaactgagggtttaactgatgcggatctgtac

SEQ ID NO: 146248 - DNA, 33 bp, Homo sapien
acaactgagggtttaattgatgcggatctgtac

SEQ ID NO: 146249 - DNA, 33 bp, Homo sapien
ttggaaggaaagagaagtatgcatgttcattaa

SEQ ID NO: 146250 - DNA, 33 bp, Homo sapien
ttggaaggaaagagaattatgcatgttcattaa

SEQ ID NO: 146251 - DNA, 33 bp, Homo sapien
ggggtgagcacaacctgaacacatcattagggt

SEQ ID NO: 146252 - DNA, 33 bp, Homo sapien
ggggtgagcacaaccttaacacatcattagggt

SEQ ID NO: 146253 - DNA, 33 bp, Homo sapien
ttactgtaaatggataagtaaatgactggtaaa

SEQ ID NO: 146254 - DNA, 33 bp, Homo sapien
ttactgtaaatggataggtaaatgactggtaaa

SEQ ID NO: 146255 - DNA, 33 bp, Homo sapien
cctctcattaggccccacatcctaacactgggg

SEQ ID NO: 146256 - DNA, 33 bp, Homo sapien
cctctcattaggccccgcatcctaacactgggg

SEQ ID NO: 146257 - DNA, 33 bp, Homo sapien
gggattggtgacagacacatcattacagaaggt

SEQ ID NO: 146258 - DNA, 33 bp, Homo sapien
gggattggtgacagacgcatcattacagaaggt

SEQ ID NO: 146259 - DNA, 33 bp, Homo sapien
tgagcctgtcctgatcacgcccgtgtctcattg

SEQ ID NO: 146260 - DNA, 33 bp, Homo sapien
tgagcctgtcctgatcgcgcccgtgtctcattg

SEQ ID NO: 146261 - DNA, 33 bp, Homo sapien
tcccacaatggccgatcacctccaattgactgc

SEQ ID NO: 146262 - DNA, 33 bp, Homo sapien
tcccacaatggccgattacctccaattgactgc

SEQ ID NO: 146263 - DNA, 33 bp, Homo sapien
tccattcttggtggccccagtttctggctgtta

SEQ ID NO: 146264 - DNA, 33 bp, Homo sapien
tccattcttggtggcctcagtttctggctgtta

SEQ ID NO: 146265 - DNA, 33 bp, Homo sapien
cagctcatttgacaccacatggctcttatgaga

SEQ ID NO: 146266 - DNA, 33 bp, Homo sapien
cagctcatttgacaccgcatggctcttatgaga

SEQ ID NO: 146267 - DNA, 33 bp, Homo sapien
gggcattagaagcagcagagagttttcatgacc

SEQ ID NO: 146268 - DNA, 33 bp, Homo sapien
gggcattagaagcagcggagagttttcatgacc

SEQ ID NO: 146269 - DNA, 33 bp, Homo sapien
agaaactatgtcagaaccatgtattattatttg

SEQ ID NO: 146270 - DNA, 33 bp, Homo sapien
agaaactatgtcagaatcatgtattattatttg

SEQ ID NO: 146271 - DNA, 33 bp, Homo sapien
tttaaacaatcgtccccgagtgccgagctcaca

SEQ ID NO: 146272 - DNA, 33 bp, Homo sapien
tttaaacaatcgtccctgagtgccgagctcaca

SEQ ID NO: 146273 - DNA, 33 bp, Homo sapien
ggtgacacacacagggacatagaaggtgggggc

SEQ ID NO: 146274 - DNA, 33 bp, Homo sapien
ggtgacacacacagggtcatagaaggtgggggc

SEQ ID NO: 146275 - DNA, 33 bp, Homo sapien
tcagccagagagcagcaaatgttaaggctggag

SEQ ID NO: 146276 - DNA, 33 bp, Homo sapien
tcagccagagagcagcgaatgttaaggctggag

SEQ ID NO: 146277 - DNA, 33 bp, Homo sapien
ctgagaacccttatgacggtaaatgacacaaag

SEQ ID NO: 146278 - DNA, 33 bp, Homo sapien
ctgagaacccttatgatggtaaatgacacaaag

SEQ ID NO: 146279 - DNA, 33 bp, Homo sapien
tgacgtccattgtgacaaattgaccctcgctcc

SEQ ID NO: 146280 - DNA, 33 bp, Homo sapien
tgacgtccattgtgacgaattgaccctcgctcc

SEQ ID NO: 146281 - DNA, 33 bp, Homo sapien
aaaattgtgaaaatgacgggaaaaaggagaatc

SEQ ID NO: 146282 - DNA, 33 bp, Homo sapien
aaaattgtgaaaatgatgggaaaaaggagaatc

SEQ ID NO: 146283 - DNA, 33 bp, Homo sapien
tttagggaagaacaagaaaaacaagcctctgca

SEQ ID NO: 146284 - DNA, 33 bp, Homo sapien
tttagggaagaacaagcaaaacaagcctctgca

SEQ ID NO: 146285 - DNA, 33 bp, Homo sapien
acctgtaaatcggacacggctgctctgcataaa

SEQ ID NO: 146286 - DNA, 33 bp, Homo sapien
acctgtaaatcggacatggctgctctgcataaa

SEQ ID NO: 146287 - DNA, 33 bp, Homo sapien
aagtgtaattgaaaaacgaactcaaacaactta

SEQ ID NO: 146288 - DNA, 33 bp, Homo sapien
aagtgtaattgaaaaatgaactcaaacaactta

SEQ ID NO: 146289 - DNA, 33 bp, Homo sapien
tccttcctccccgccccgatatttgactgcatg

SEQ ID NO: 146290 - DNA, 33 bp, Homo sapien
tccttcctccccgccctgatatttgactgcatg

SEQ ID NO: 146291 - DNA, 33 bp, Homo sapien
ctaggtattgagaagacctatggacctgcattt

SEQ ID NO: 146292 - DNA, 33 bp, Homo sapien
ctaggtattgagaagatctatggacctgcattt

SEQ ID NO: 146293 - DNA, 33 bp, Homo sapien
cctttgcaaaagtccccgcttacgagatgggat

SEQ ID NO: 146294 - DNA, 33 bp, Homo sapien
cctttgcaaaagtcccggcttacgagatgggat

SEQ ID NO: 146295 - DNA, 33 bp, Homo sapien
atgtctagaagtgacaaatagaacttccttcgt

SEQ ID NO: 146296 - DNA, 33 bp, Homo sapien
atgtctagaagtgacatatagaacttccttcgt

SEQ ID NO: 146297 - DNA, 33 bp, Homo sapien
ttgataatgtcatccaataacagaaatgttttc

SEQ ID NO: 146298 - DNA, 33 bp, Homo sapien
ttgataatgtcatccagtaacagaaatgttttc

SEQ ID NO: 146299 - DNA, 33 bp, Homo sapien
ttgcccagctgaggccaatcacctcctccctgg

SEQ ID NO: 146300 - DNA, 33 bp, Homo sapien
ttgcccagctgaggccgatcacctcctccctgg

SEQ ID NO: 146301 - DNA, 33 bp, Homo sapien
ccttcggggctgctgaataattgtgtcttcatc

SEQ ID NO: 146302 - DNA, 33 bp, Homo sapien
ccttcggggctgctgagtaattgtgtcttcatc

SEQ ID NO: 146303 - DNA, 33 bp, Homo sapien
aaataagggcccttcaacaatataatacctcta

SEQ ID NO: 146304 - DNA, 33 bp, Homo sapien
aaataagggcccttcagcaatataatacctcta

SEQ ID NO: 146305 - DNA, 33 bp, Homo sapien
aagtggaagtgaaaacacagacataatacagct

SEQ ID NO: 146306 - DNA, 33 bp, Homo sapien
aagtggaagtgaaaacgcagacataatacagct

SEQ ID NO: 146307 - DNA, 33 bp, Homo sapien
tgtttctgcaacgccgcattgtgggtttggagg

SEQ ID NO: 146308 - DNA, 33 bp, Homo sapien
tgtttctgcaacgccgtattgtgggtttggagg

SEQ ID NO: 146309 - DNA, 33 bp, Homo sapien
caagcaacagcgcaaacgtaaactgtggctaaa

SEQ ID NO: 146310 - DNA, 33 bp, Homo sapien
caagcaacagcgcaaatgtaaactgtggctaaa

SEQ ID NO: 146311 - DNA, 33 bp, Homo sapien
cagagagagagagaaaactgatctgaagttaca

SEQ ID NO: 146312 - DNA, 33 bp, Homo sapien
cagagagagagagaaagctgatctgaagttaca

SEQ ID NO: 146313 - DNA, 33 bp, Homo sapien
taaccttgatgctgtccgaatactaatagcttt

SEQ ID NO: 146314 - DNA, 33 bp, Homo sapien
taaccttgatgctgtctgaatactaatagcttt

SEQ ID NO: 146315 - DNA, 33 bp, Homo sapien
tcccattgtaggactaccccgcattttatttat

SEQ ID NO: 146316 - DNA, 33 bp, Homo sapien
tcccattgtaggactatcccgcattttatttat

SEQ ID NO: 146317 - DNA, 33 bp, Homo sapien
gtttgttatctcagtacgtttttttctgaattc

SEQ ID NO: 146318 - DNA, 33 bp, Homo sapien
gtttgttatctcagtaggtttttttctgaattc

SEQ ID NO: 146319 - DNA, 33 bp, Homo sapien
caccattagaatggccagaatctggaacacgga

SEQ ID NO: 146320 - DNA, 33 bp, Homo sapien
caccattagaatggccggaatctggaacacgga

SEQ ID NO: 146321 - DNA, 33 bp, Homo sapien
aagcaacagacttggacaaaatatttgcaaaag

SEQ ID NO: 146322 - DNA, 33 bp, Homo sapien
aagcaacagacttggataaaatatttgcaaaag

SEQ ID NO: 146323 - DNA, 33 bp, Homo sapien
cccgtgaatatgagtacgattaaaatgctaagg

SEQ ID NO: 146324 - DNA, 33 bp, Homo sapien
cccgtgaatatgagtatgattaaaatgctaagg

SEQ ID NO: 146325 - DNA, 33 bp, Homo sapien
cacacactgagggacactgaagctgcaggaaag

SEQ ID NO: 146326 - DNA, 33 bp, Homo sapien
cacacactgagggacattgaagctgcaggaaag

SEQ ID NO: 146327 - DNA, 33 bp, Homo sapien
cctcacaccatatgcaaaaactaacttggagta

SEQ ID NO: 146328 - DNA, 33 bp, Homo sapien
cctcacaccatatgcagaaactaacttggagta

SEQ ID NO: 146329 - DNA, 33 bp, Homo sapien
ggaaacaatcagcaaaatgaagaagcaacctac

SEQ ID NO: 146330 - DNA, 33 bp, Homo sapien
ggaaacaatcagcaaagtgaagaagcaacctac

SEQ ID NO: 146331 - DNA, 33 bp, Homo sapien
cactagcagtgtaaaacgaatctaatgtgtcta

SEQ ID NO: 146332 - DNA, 33 bp, Homo sapien
cactagcagtgtaaaatgaatctaatgtgtcta

SEQ ID NO: 146333 - DNA, 33 bp, Homo sapien
gagataaggcgatgtacgggtgttggtcttcat

SEQ ID NO: 146334 - DNA, 33 bp, Homo sapien
gagataaggcgatgtatgggtgttggtcttcat

SEQ ID NO: 146335 - DNA, 33 bp, Homo sapien
tgagcccatgggagaactctggaaaatggtgta

SEQ ID NO: 146336 - DNA, 33 bp, Homo sapien
tgagcccatgggagaattctggaaaatggtgta

SEQ ID NO: 146337 - DNA, 33 bp, Homo sapien
tcctcacgctgtgctacgcagtttcccatggtc

SEQ ID NO: 146338 - DNA, 33 bp, Homo sapien
tcctcacgctgtgctatgcagtttcccatggtc

SEQ ID NO: 146339 - DNA, 33 bp, Homo sapien
aggagaagttagccacaggagttagcatgagga

SEQ ID NO: 146340 - DNA, 33 bp, Homo sapien
aggagaagttagccacgggagttagcatgagga

SEQ ID NO: 146341 - DNA, 33 bp, Homo sapien
aagagtcttgatgaccaaagatccagctaagtc

SEQ ID NO: 146342 - DNA, 33 bp, Homo sapien
aagagtcttgatgaccgaagatccagctaagtc

SEQ ID NO: 146343 - DNA, 33 bp, Homo sapien
tctcttgatttgatatcagattctctttttgca

SEQ ID NO: 146344 - DNA, 33 bp, Homo sapien
tctcttgatttgatattagattctctttttgca

SEQ ID NO: 146345 - DNA, 33 bp, Homo sapien
caacaatggcacaaaacgaatcggattctagcc

SEQ ID NO: 146346 - DNA, 33 bp, Homo sapien
caacaatggcacaaaatgaatcggattctagcc

SEQ ID NO: 146347 - DNA, 33 bp, Homo sapien
ctgaggtatctgttcccaatacctggacttcaa

SEQ ID NO: 146348 - DNA, 33 bp, Homo sapien
ctgaggtatctgttcctaatacctggacttcaa

SEQ ID NO: 146349 - DNA, 33 bp, Homo sapien
tttgactcctgttcacagaatgctgctaaacac

SEQ ID NO: 146350 - DNA, 33 bp, Homo sapien
tttgactcctgttcacggaatgctgctaaacac

SEQ ID NO: 146351 - DNA, 33 bp, Homo sapien
ttactctgtgatgtggcaaataatgaagttgga

SEQ ID NO: 146352 - DNA, 33 bp, Homo sapien
ttactctgtgatgtggtaaataatgaagttgga

SEQ ID NO: 146353 - DNA, 33 bp, Homo sapien
tgacagcagtcccagacattagcacaacgcttt

SEQ ID NO: 146354 - DNA, 33 bp, Homo sapien
tgacagcagtcccagatattagcacaacgcttt

SEQ ID NO: 146355 - DNA, 33 bp, Homo sapien
gactctgatactaagaaaaggaagcttctatgc

SEQ ID NO: 146356 - DNA, 33 bp, Homo sapien
gactctgatactaagagaaggaagcttctatgc

SEQ ID NO: 146357 - DNA, 33 bp, Homo sapien
gttatacttggcacacagcatttataaacattc

SEQ ID NO: 146358 - DNA, 33 bp, Homo sapien
gttatacttggcacacggcatttataaacattc

SEQ ID NO: 146359 - DNA, 33 bp, Homo sapien
gacgctatgatactgtcaaatctctcagagctg

SEQ ID NO: 146360 - DNA, 33 bp, Homo sapien
gacgctatgatactgttaaatctctcagagctg

SEQ ID NO: 146361 - DNA, 33 bp, Homo sapien
tgtctttcccaatcgacggcctgcttttcattt

SEQ ID NO: 146362 - DNA, 33 bp, Homo sapien
tgtctttcccaatcgatggcctgcttttcattt

SEQ ID NO: 146363 - DNA, 33 bp, Homo sapien
tccacaggatttctggcatctcaactttatttg

SEQ ID NO: 146364 - DNA, 33 bp, Homo sapien
tccacaggatttctggtatctcaactttatttg

SEQ ID NO: 146365 - DNA, 33 bp, Homo sapien
aggactgatcagcttacggcacctccagaaagc

SEQ ID NO: 146366 - DNA, 33 bp, Homo sapien
aggactgatcagcttatggcacctccagaaagc

SEQ ID NO: 146367 - DNA, 33 bp, Homo sapien
gacttggtgaactggacggtttttgctggtgtg

SEQ ID NO: 146368 - DNA, 33 bp, Homo sapien
gacttggtgaactggatggtttttgctggtgtg

SEQ ID NO: 146369 - DNA, 33 bp, Homo sapien
taaaataaagtaggtacatcaaattctctctca

SEQ ID NO: 146370 - DNA, 33 bp, Homo sapien
taaaataaagtaggtatatcaaattctctctca

SEQ ID NO: 146371 - DNA, 33 bp, Homo sapien
ttaaccatctggccaacctctcagttttgaaca

SEQ ID NO: 146372 - DNA, 33 bp, Homo sapien
ttaaccatctggccaatctctcagttttgaaca

SEQ ID NO: 146373 - DNA, 33 bp, Homo sapien
ccactcaggcaatgccaaagtcagagactggac

SEQ ID NO: 146374 - DNA, 33 bp, Homo sapien
ccactcaggcaatgccgaagtcagagactggac

SEQ ID NO: 146375 - DNA, 33 bp, Homo sapien
cgcttagtaggcaggaccaaggtttgtataagt

SEQ ID NO: 146376 - DNA, 33 bp, Homo sapien
cgcttagtaggcaggatcaaggtttgtataagt

SEQ ID NO: 146377 - DNA, 33 bp, Homo sapien
ctgtgcattcctcataaggttgatgtaaagtct

SEQ ID NO: 146378 - DNA, 33 bp, Homo sapien
ctgtgcattcctcatacggttgatgtaaagtct

SEQ ID NO: 146379 - DNA, 33 bp, Homo sapien
gcttccatttgaaggcaaaaacctgcgggggtg

SEQ ID NO: 146380 - DNA, 33 bp, Homo sapien
gcttccatttgaaggcgaaaacctgcgggggtg

SEQ ID NO: 146381 - DNA, 33 bp, Homo sapien
cccacatagcacaatcacagggcgaaaacatta

SEQ ID NO: 146382 - DNA, 33 bp, Homo sapien
cccacatagcacaatcgcagggcgaaaacatta

SEQ ID NO: 146383 - DNA, 33 bp, Homo sapien
taaaaccacatggccaccaagtaatgaatcgtc

SEQ ID NO: 146384 - DNA, 33 bp, Homo sapien
taaaaccacatggccatcaagtaatgaatcgtc

SEQ ID NO: 146385 - DNA, 33 bp, Homo sapien
ctgtgttcaaagaccacgccctgacagcgcccg

SEQ ID NO: 146386 - DNA, 33 bp, Homo sapien
ctgtgttcaaagaccatgccctgacagcgcccg

SEQ ID NO: 146387 - DNA, 33 bp, Homo sapien
cttgtagcatatatcaaattcccattgcaatgc

SEQ ID NO: 146388 - DNA, 33 bp, Homo sapien
cttgtagcatatatcacattcccattgcaatgc

SEQ ID NO: 146389 - DNA, 33 bp, Homo sapien
ttaaactttaaatggcacgtgacttaggtcaga

SEQ ID NO: 146390 - DNA, 33 bp, Homo sapien
ttaaactttaaatggcgcgtgacttaggtcaga

SEQ ID NO: 146391 - DNA, 33 bp, Homo sapien
agtagtagttcaaaataagattacagattctat

SEQ ID NO: 146392 - DNA, 33 bp, Homo sapien
agtagtagttcaaaatgagattacagattctat

SEQ ID NO: 146393 - DNA, 33 bp, Homo sapien
aggaaacacaagagacaataccttaagaaaaat

SEQ ID NO: 146394 - DNA, 33 bp, Homo sapien
aggaaacacaagagacgataccttaagaaaaat

SEQ ID NO: 146395 - DNA, 33 bp, Homo sapien
agtgattggtggttacaaggctggaaagagaag

SEQ ID NO: 146396 - DNA, 33 bp, Homo sapien
agtgattggtggttacgaggctggaaagagaag

SEQ ID NO: 146397 - DNA, 33 bp, Homo sapien
tccacgcaaagaccacccgtgcctctgaggtgt

SEQ ID NO: 146398 - DNA, 33 bp, Homo sapien
tccacgcaaagaccactcgtgcctctgaggtgt

SEQ ID NO: 146399 - DNA, 33 bp, Homo sapien
gaagcatgtctcagataagtcagttagatgggg

SEQ ID NO: 146400 - DNA, 33 bp, Homo sapien
gaagcatgtctcagatgagtcagttagatgggg

SEQ ID NO: 146401 - DNA, 33 bp, Homo sapien
ccatcattgcagctggaatttcccccctggaag

SEQ ID NO: 146402 - DNA, 33 bp, Homo sapien
ccatcattgcagctgggatttcccccctggaag

SEQ ID NO: 146403 - DNA, 33 bp, Homo sapien
gaagttcagggtgcacaggatcaactgtattgt

SEQ ID NO: 146404 - DNA, 33 bp, Homo sapien
gaagttcagggtgcacgggatcaactgtattgt

SEQ ID NO: 146405 - DNA, 33 bp, Homo sapien
tatgttgcgtgaaaaaaatactaaacagcatta

SEQ ID NO: 146406 - DNA, 33 bp, Homo sapien
tatgttgcgtgaaaaacatactaaacagcatta

SEQ ID NO: 146407 - DNA, 33 bp, Homo sapien
accaaaccctgggagccaagtatatgccgtctg

SEQ ID NO: 146408 - DNA, 33 bp, Homo sapien
accaaaccctgggagctaagtatatgccgtctg

SEQ ID NO: 146409 - DNA, 33 bp, Homo sapien
ccatcagacgcttacccaatagttgtggcatct

SEQ ID NO: 146410 - DNA, 33 bp, Homo sapien
ccatcagacgcttacctaatagttgtggcatct

SEQ ID NO: 146411 - DNA, 33 bp, Homo sapien
gacatcaaaaatacgacccataaaagaagaaga

SEQ ID NO: 146412 - DNA, 33 bp, Homo sapien
gacatcaaaaatacgatccataaaagaagaaga

SEQ ID NO: 146413 - DNA, 33 bp, Homo sapien
aaaatacatagagcaaaaatggatacaactaca

SEQ ID NO: 146414 - DNA, 33 bp, Homo sapien
aaaatacatagagcaacaatggatacaactaca

SEQ ID NO: 146415 - DNA, 33 bp, Homo sapien
ctggaatacctctgaaatggataagtgcaacca

SEQ ID NO: 146416 - DNA, 33 bp, Homo sapien
ctggaatacctctgaagtggataagtgcaacca

SEQ ID NO: 146417 - DNA, 33 bp, Homo sapien
tttgcagcaacatgaacggagctggaggccatt

SEQ ID NO: 146418 - DNA, 33 bp, Homo sapien
tttgcagcaacatgaatggagctggaggccatt

SEQ ID NO: 146419 - DNA, 33 bp, Homo sapien
ccatgattaccagtgtcaatgctcagcctcagt

SEQ ID NO: 146420 - DNA, 33 bp, Homo sapien
ccatgattaccagtgtgaatgctcagcctcagt

SEQ ID NO: 146421 - DNA, 33 bp, Homo sapien
ccaaaggtcaagaaggccatgccgtggagcagt

SEQ ID NO: 146422 - DNA, 33 bp, Homo sapien
ccaaaggtcaagaaggtcatgccgtggagcagt

SEQ ID NO: 146423 - DNA, 33 bp, Homo sapien
cacccaacatcaaagcagccagttttataaaac

SEQ ID NO: 146424 - DNA, 33 bp, Homo sapien
cacccaacatcaaagcggccagttttataaaac

SEQ ID NO: 146425 - DNA, 33 bp, Homo sapien
ctttctgtgagtgtcccagcatttcctgttcac

SEQ ID NO: 146426 - DNA, 33 bp, Homo sapien
ctttctgtgagtgtcctagcatttcctgttcac

SEQ ID NO: 146427 - DNA, 33 bp, Homo sapien
ttttataaatttcttcaaaaggcctatatctgt

SEQ ID NO: 146428 - DNA, 33 bp, Homo sapien
ttttataaatttcttcgaaaggcctatatctgt

SEQ ID NO: 146429 - DNA, 33 bp, Homo sapien
aaaatattcagtaatgaaccaagtgtagtgccc

SEQ ID NO: 146430 - DNA, 33 bp, Homo sapien
aaaatattcagtaatgcaccaagtgtagtgccc

SEQ ID NO: 146431 - DNA, 33 bp, Homo sapien
aaaccataaatcaacaaaataacatactactat

SEQ ID NO: 146432 - DNA, 33 bp, Homo sapien
aaaccataaatcaacagaataacatactactat

SEQ ID NO: 146433 - DNA, 33 bp, Homo sapien
cctgcagatgacctcccggaacgttcccagccc

SEQ ID NO: 146434 - DNA, 33 bp, Homo sapien
cctgcagatgacctcctggaacgttcccagccc

SEQ ID NO: 146435 - DNA, 33 bp, Homo sapien
ccttttagaagagcgccgagcccatccatgcgg

SEQ ID NO: 146436 - DNA, 33 bp, Homo sapien
ccttttagaagagcgctgagcccatccatgcgg

SEQ ID NO: 146437 - DNA, 33 bp, Homo sapien
ctctggctgccacagacagttgcttacaggctg

SEQ ID NO: 146438 - DNA, 33 bp, Homo sapien
ctctggctgccacagatagttgcttacaggctg

SEQ ID NO: 146439 - DNA, 33 bp, Homo sapien
ccggaaaatattggagaatggaacacttcccaa

SEQ ID NO: 146440 - DNA, 33 bp, Homo sapien
ccggaaaatattggaggatggaacacttcccaa

SEQ ID NO: 146441 - DNA, 33 bp, Homo sapien
atgatctgagccaaacacagtggacttcccact

SEQ ID NO: 146442 - DNA, 33 bp, Homo sapien
atgatctgagccaaacgcagtggacttcccact

SEQ ID NO: 146443 - DNA, 33 bp, Homo sapien
tgatgctctttgaaaccgaatttgaaactgaga

SEQ ID NO: 146444 - DNA, 33 bp, Homo sapien
tgatgctctttgaaactgaatttgaaactgaga

SEQ ID NO: 146445 - DNA, 33 bp, Homo sapien
tacaaatatgtctgagaatataaatgaaagtgt

SEQ ID NO: 146446 - DNA, 33 bp, Homo sapien
tacaaatatgtctgaggatataaatgaaagtgt

SEQ ID NO: 146447 - DNA, 33 bp, Homo sapien
ccctgactgatacaacacctaaccttacaccat

SEQ ID NO: 146448 - DNA, 33 bp, Homo sapien
ccctgactgatacaacccctaaccttacaccat

SEQ ID NO: 146449 - DNA, 33 bp, Homo sapien
ccaatgaaattggtgacaagtgacctggtggaa

SEQ ID NO: 146450 - DNA, 33 bp, Homo sapien
ccaatgaaattggtgagaagtgacctggtggaa

SEQ ID NO: 146451 - DNA, 33 bp, Homo sapien
ctggacagtacggggacgttttggtcatgggag

SEQ ID NO: 146452 - DNA, 33 bp, Homo sapien
ctggacagtacggggatgttttggtcatgggag

SEQ ID NO: 146453 - DNA, 33 bp, Homo sapien
aagcacgatttcactaaggtttgagtagaaaac

SEQ ID NO: 146454 - DNA, 33 bp, Homo sapien
aagcacgatttcactacggtttgagtagaaaac

SEQ ID NO: 146455 - DNA, 33 bp, Homo sapien
tcttcttgtatgagggacattgctcatctttta

SEQ ID NO: 146456 - DNA, 33 bp, Homo sapien
tcttcttgtatgaggggcattgctcatctttta

SEQ ID NO: 146457 - DNA, 33 bp, Homo sapien
cagacaggtggagggagactggccagagctggc

SEQ ID NO: 146458 - DNA, 33 bp, Homo sapien
cagacaggtggagggatactggccagagctggc

SEQ ID NO: 146459 - DNA, 33 bp, Homo sapien
atgagatgattcactacggccatccttgtgttt

SEQ ID NO: 146460 - DNA, 33 bp, Homo sapien
atgagatgattcactatggccatccttgtgttt

SEQ ID NO: 146461 - DNA, 33 bp, Homo sapien
tcatctcagtacccataatccatggtgtgtaac

SEQ ID NO: 146462 - DNA, 33 bp, Homo sapien
tcatctcagtacccatcatccatggtgtgtaac

SEQ ID NO: 146463 - DNA, 33 bp, Homo sapien
tttcccaaagcactggaagaagaagtctcctgt

SEQ ID NO: 146464 - DNA, 33 bp, Homo sapien
tttcccaaagcactggtagaagaagtctcctgt

SEQ ID NO: 146465 - DNA, 33 bp, Homo sapien
agtactcccggtagaaagtacacagagaaccca

SEQ ID NO: 146466 - DNA, 33 bp, Homo sapien
agtactcccggtagaatgtacacagagaaccca

SEQ ID NO: 146467 - DNA, 33 bp, Homo sapien
gagccatttgtgtccagctgcggagagtacaag

SEQ ID NO: 146468 - DNA, 33 bp, Homo sapien
gagccatttgtgtccatctgcggagagtacaag

SEQ ID NO: 146469 - DNA, 33 bp, Homo sapien
cagtacccaaaaggcaactttgcagccagccct

SEQ ID NO: 146470 - DNA, 33 bp, Homo sapien
cagtacccaaaaggcagctttgcagccagccct

SEQ ID NO: 146471 - DNA, 33 bp, Homo sapien
ctctcctacttggacaagatgctcatcagaccc

SEQ ID NO: 146472 - DNA, 33 bp, Homo sapien
ctctcctacttggacaggatgctcatcagaccc

SEQ ID NO: 146473 - DNA, 33 bp, Homo sapien
ggagtcaccatccagacgaatgtgtttgctccc

SEQ ID NO: 146474 - DNA, 33 bp, Homo sapien
ggagtcaccatccagatgaatgtgtttgctccc

SEQ ID NO: 146475 - DNA, 33 bp, Homo sapien
cagcatggatagcacactctgttccccaaaaat

SEQ ID NO: 146476 - DNA, 33 bp, Homo sapien
cagcatggatagcacattctgttccccaaaaat

SEQ ID NO: 146477 - DNA, 33 bp, Homo sapien
cggctgttccagacaccgagttctaatcctaaa

SEQ ID NO: 146478 - DNA, 33 bp, Homo sapien
cggctgttccagacactgagttctaatcctaaa

SEQ ID NO: 146479 - DNA, 33 bp, Homo sapien
acacaccatggatgacaggtactaagatgacca

SEQ ID NO: 146480 - DNA, 33 bp, Homo sapien
acacaccatggatgacgggtactaagatgacca

SEQ ID NO: 146481 - DNA, 33 bp, Homo sapien
aaatacataagcatcaactggatttttcataag

SEQ ID NO: 146482 - DNA, 33 bp, Homo sapien
aaatacataagcatcagctggatttttcataag

SEQ ID NO: 146483 - DNA, 33 bp, Homo sapien
ctttaaaataacaatcactcggaaactttcatg

SEQ ID NO: 146484 - DNA, 33 bp, Homo sapien
ctttaaaataacaatcgctcggaaactttcatg

SEQ ID NO: 146485 - DNA, 33 bp, Homo sapien
gagagacttggagaacaactcccaggacaggtc

SEQ ID NO: 146486 - DNA, 33 bp, Homo sapien
gagagacttggagaacgactcccaggacaggtc

SEQ ID NO: 146487 - DNA, 33 bp, Homo sapien
tgataggcaagccttaaagcctcaggtaagaat

SEQ ID NO: 146488 - DNA, 33 bp, Homo sapien
tgataggcaagccttacagcctcaggtaagaat

SEQ ID NO: 146489 - DNA, 33 bp, Homo sapien
gggaagggttgtctacaaacaagttcaaggcat

SEQ ID NO: 146490 - DNA, 33 bp, Homo sapien
gggaagggttgtctacgaacaagttcaaggcat

SEQ ID NO: 146491 - DNA, 33 bp, Homo sapien
gctgaccacatcacctcagggacacctaagcta

SEQ ID NO: 146492 - DNA, 33 bp, Homo sapien
gctgaccacatcacctgagggacacctaagcta

SEQ ID NO: 146493 - DNA, 33 bp, Homo sapien
gaactgacaaactgaagctaatgaaaaattcta

SEQ ID NO: 146494 - DNA, 33 bp, Homo sapien
gaactgacaaactgaatctaatgaaaaattcta

SEQ ID NO: 146495 - DNA, 33 bp, Homo sapien
aggttgaggagattgcacccagagatgaagttg

SEQ ID NO: 146496 - DNA, 33 bp, Homo sapien
aggttgaggagattgcgcccagagatgaagttg

SEQ ID NO: 146497 - DNA, 33 bp, Homo sapien
gtaatcccagaatatacgcagtaaatgttctat

SEQ ID NO: 146498 - DNA, 33 bp, Homo sapien
gtaatcccagaatatatgcagtaaatgttctat

SEQ ID NO: 146499 - DNA, 33 bp, Homo sapien
ttggagagaggtcgcacctacccacttcacatt

SEQ ID NO: 146500 - DNA, 33 bp, Homo sapien
ttggagagaggtcgcagctacccacttcacatt

SEQ ID NO: 146501 - DNA, 33 bp, Homo sapien
cacccctgtgttttgacgagaagtgaaagttca

SEQ ID NO: 146502 - DNA, 33 bp, Homo sapien
cacccctgtgttttgatgagaagtgaaagttca

SEQ ID NO: 146503 - DNA, 33 bp, Homo sapien
catttcttccaatttacgtctgagcttttccct

SEQ ID NO: 146504 - DNA, 33 bp, Homo sapien
catttcttccaatttatgtctgagcttttccct

SEQ ID NO: 146505 - DNA, 33 bp, Homo sapien
acccaggactatgggaaatcccacacctggtag

SEQ ID NO: 146506 - DNA, 33 bp, Homo sapien
acccaggactatgggagatcccacacctggtag

SEQ ID NO: 146507 - DNA, 33 bp, Homo sapien
aaaaccaccggacaccagagcagttagccacag

SEQ ID NO: 146508 - DNA, 33 bp, Homo sapien
aaaaccaccggacaccggagcagttagccacag

SEQ ID NO: 146509 - DNA, 33 bp, Homo sapien
tcaggtttccccagaagcggcctgagtgaaagg

SEQ ID NO: 146510 - DNA, 33 bp, Homo sapien
tcaggtttccccagaatcggcctgagtgaaagg

SEQ ID NO: 146511 - DNA, 33 bp, Homo sapien
atcacttttgggacagaccatgtaaatcctttt

SEQ ID NO: 146512 - DNA, 33 bp, Homo sapien
atcacttttgggacaggccatgtaaatcctttt

SEQ ID NO: 146513 - DNA, 33 bp, Homo sapien
caaccctgaaacgcagcaatatgttattttatg

SEQ ID NO: 146514 - DNA, 33 bp, Homo sapien
caaccctgaaacgcaggaatatgttattttatg

SEQ ID NO: 146515 - DNA, 33 bp, Homo sapien
tgttgtgtttctagaaatcgtcagctgggaggt

SEQ ID NO: 146516 - DNA, 33 bp, Homo sapien
tgttgtgtttctagaactcgtcagctgggaggt

SEQ ID NO: 146517 - DNA, 33 bp, Homo sapien
ttcccggtcacggcaccgccttttcactgatgc

SEQ ID NO: 146518 - DNA, 33 bp, Homo sapien
ttcccggtcacggcactgccttttcactgatgc

SEQ ID NO: 146519 - DNA, 33 bp, Homo sapien
tctgagtttcctaacacatgaaagggacagttt

SEQ ID NO: 146520 - DNA, 33 bp, Homo sapien
tctgagtttcctaacagatgaaagggacagttt

SEQ ID NO: 146521 - DNA, 33 bp, Homo sapien
taacatttatgaaaccagctaaaactcaaaacc

SEQ ID NO: 146522 - DNA, 33 bp, Homo sapien
taacatttatgaaaccggctaaaactcaaaacc

SEQ ID NO: 146523 - DNA, 33 bp, Homo sapien
actgctgattcgtcgacggaaactaaagttagt

SEQ ID NO: 146524 - DNA, 33 bp, Homo sapien
actgctgattcgtcgatggaaactaaagttagt

SEQ ID NO: 146525 - DNA, 33 bp, Homo sapien
gtcccttccttcgtcacgtccctgttttgagcc

SEQ ID NO: 146526 - DNA, 33 bp, Homo sapien
gtcccttccttcgtcatgtccctgttttgagcc

SEQ ID NO: 146527 - DNA, 33 bp, Homo sapien
ggggaagttttgtgtaaaacagtgaaaacggca

SEQ ID NO: 146528 - DNA, 33 bp, Homo sapien
ggggaagttttgtgtacaacagtgaaaacggca

SEQ ID NO: 146529 - DNA, 33 bp, Homo sapien
taatacaaaggcaagccagggtctgtctcggag

SEQ ID NO: 146530 - DNA, 33 bp, Homo sapien
taatacaaaggcaagcgagggtctgtctcggag

SEQ ID NO: 146531 - DNA, 33 bp, Homo sapien
aacacatactgtaatcgatcacacaaggggcag

SEQ ID NO: 146532 - DNA, 33 bp, Homo sapien
aacacatactgtaatctatcacacaaggggcag

SEQ ID NO: 146533 - DNA, 33 bp, Homo sapien
cattagtgccagttgaaaaaaaagttgtttgat

SEQ ID NO: 146534 - DNA, 33 bp, Homo sapien
cattagtgccagttgagaaaaaagttgtttgat

SEQ ID NO: 146535 - DNA, 33 bp, Homo sapien
caggaccagtgaaaaaacaggatcccacatgat

SEQ ID NO: 146536 - DNA, 33 bp, Homo sapien
caggaccagtgaaaaaccaggatcccacatgat

SEQ ID NO: 146537 - DNA, 33 bp, Homo sapien
ggcctccttctaatgacaaaagggctgtttgct

SEQ ID NO: 146538 - DNA, 33 bp, Homo sapien
ggcctccttctaatgataaaagggctgtttgct

SEQ ID NO: 146539 - DNA, 33 bp, Homo sapien
ttgtggtgtctacagacgtaaatttcatcaaat

SEQ ID NO: 146540 - DNA, 33 bp, Homo sapien
ttgtggtgtctacagatgtaaatttcatcaaat

SEQ ID NO: 146541 - DNA, 33 bp, Homo sapien
aaccttttggagataacgggcatgttcattatc

SEQ ID NO: 146542 - DNA, 33 bp, Homo sapien
aaccttttggagataatgggcatgttcattatc

SEQ ID NO: 146543 - DNA, 33 bp, Homo sapien
gtctaaagacctgggacggctagaaagggaata

SEQ ID NO: 146544 - DNA, 33 bp, Homo sapien
gtctaaagacctgggatggctagaaagggaata

SEQ ID NO: 146545 - DNA, 33 bp, Homo sapien
aggcattaatgttgtcaatgaaaagagtcgaac

SEQ ID NO: 146546 - DNA, 33 bp, Homo sapien
aggcattaatgttgtcgatgaaaagagtcgaac

SEQ ID NO: 146547 - DNA, 33 bp, Homo sapien
gaccctgtctctaaaaaaataaaggagctcgtg

SEQ ID NO: 146548 - DNA, 33 bp, Homo sapien
gaccctgtctctaaaagaataaaggagctcgtg

SEQ ID NO: 146549 - DNA, 33 bp, Homo sapien
tgtgctgacttctcaacgctggatcaaaaggaa

SEQ ID NO: 146550 - DNA, 33 bp, Homo sapien
tgtgctgacttctcaatgctggatcaaaaggaa

SEQ ID NO: 146551 - DNA, 33 bp, Homo sapien
ctctgagattggagtgaacactgaaagcaggga

SEQ ID NO: 146552 - DNA, 33 bp, Homo sapien
ctctgagattggagtggacactgaaagcaggga

SEQ ID NO: 146553 - DNA, 33 bp, Homo sapien
gtccctcaacttcagacgtttgctcatggtatg

SEQ ID NO: 146554 - DNA, 33 bp, Homo sapien
gtccctcaacttcagatgtttgctcatggtatg

SEQ ID NO: 146555 - DNA, 33 bp, Homo sapien
tatgagcctcaaaagagaactgagacacaattt

SEQ ID NO: 146556 - DNA, 33 bp, Homo sapien
tatgagcctcaaaagataactgagacacaattt

SEQ ID NO: 146557 - DNA, 33 bp, Homo sapien
caggtttcccctctgtaaatataccatatcccc

SEQ ID NO: 146558 - DNA, 33 bp, Homo sapien
caggtttcccctctgtgaatataccatatcccc

SEQ ID NO: 146559 - DNA, 33 bp, Homo sapien
tcatcgggagtggttcacaattgtaaaggatta

SEQ ID NO: 146560 - DNA, 33 bp, Homo sapien
tcatcgggagtggttcccaattgtaaaggatta

SEQ ID NO: 146561 - DNA, 33 bp, Homo sapien
gccgggatcaaaacggaacagaatggaaaggga

SEQ ID NO: 146562 - DNA, 33 bp, Homo sapien
gccgggatcaaaacggcacagaatggaaaggga

SEQ ID NO: 146563 - DNA, 33 bp, Homo sapien
gttttgttaaacaaatcactccagctttgagct

SEQ ID NO: 146564 - DNA, 33 bp, Homo sapien
gttttgttaaacaaattactccagctttgagct

SEQ ID NO: 146565 - DNA, 33 bp, Homo sapien
ggggtgtttttccatacccttgaatgctgtttg

SEQ ID NO: 146566 - DNA, 33 bp, Homo sapien
ggggtgtttttccatatccttgaatgctgtttg

SEQ ID NO: 146567 - DNA, 33 bp, Homo sapien
atcagtacttggtctcaaaaacagtggctaaga

SEQ ID NO: 146568 - DNA, 33 bp, Homo sapien
atcagtacttggtctcgaaaacagtggctaaga

SEQ ID NO: 146569 - DNA, 33 bp, Homo sapien
ttaaaaagacaaacacaaactgaccacaaacaa

SEQ ID NO: 146570 - DNA, 33 bp, Homo sapien
ttaaaaagacaaacacgaactgaccacaaacaa

SEQ ID NO: 146571 - DNA, 33 bp, Homo sapien
aaccagaatgacacataaaaatactaagaagca

SEQ ID NO: 146572 - DNA, 33 bp, Homo sapien
aaccagaatgacacatgaaaatactaagaagca

SEQ ID NO: 146573 - DNA, 33 bp, Homo sapien
caccgtatgttcaagcgatcaaaaatgcataaa

SEQ ID NO: 146574 - DNA, 33 bp, Homo sapien
caccgtatgttcaagctatcaaaaatgcataaa

SEQ ID NO: 146575 - DNA, 33 bp, Homo sapien
tcgcgcggacgacaaacgcgacccaggatgctg

SEQ ID NO: 146576 - DNA, 33 bp, Homo sapien
tcgcgcggacgacaaatgcgacccaggatgctg

SEQ ID NO: 146577 - DNA, 33 bp, Homo sapien
ataatgagtttatagactaaccgggaaagaaat

SEQ ID NO: 146578 - DNA, 33 bp, Homo sapien
ataatgagtttatagattaaccgggaaagaaat

SEQ ID NO: 146579 - DNA, 33 bp, Homo sapien
tgatcatactatacacacttttttaaacagaaa

SEQ ID NO: 146580 - DNA, 33 bp, Homo sapien
tgatcatactatacacgcttttttaaacagaaa

SEQ ID NO: 146581 - DNA, 33 bp, Homo sapien
tgtgagcatacgatacaagcttttttatggctg

SEQ ID NO: 146582 - DNA, 33 bp, Homo sapien
tgtgagcatacgataccagcttttttatggctg

SEQ ID NO: 146583 - DNA, 33 bp, Homo sapien
gttctctggccaaaaaaaaattgaacgagaaat

SEQ ID NO: 146584 - DNA, 33 bp, Homo sapien
gttctctggccaaaaagaaattgaacgagaaat

SEQ ID NO: 146585 - DNA, 33 bp, Homo sapien
ccccgtgttaaggaaacagccgtcggctccagg

SEQ ID NO: 146586 - DNA, 33 bp, Homo sapien
ccccgtgttaaggaaatagccgtcggctccagg

SEQ ID NO: 146587 - DNA, 33 bp, Homo sapien
agctcacagacatccaaatcgagctgcagcagg

SEQ ID NO: 146588 - DNA, 33 bp, Homo sapien
agctcacagacatccagatcgagctgcagcagg

SEQ ID NO: 146589 - DNA, 33 bp, Homo sapien
ggcagtccagtaccgcagcagagaaacaagcag

SEQ ID NO: 146590 - DNA, 33 bp, Homo sapien
ggcagtccagtaccgcggcagagaaacaagcag

SEQ ID NO: 146591 - DNA, 33 bp, Homo sapien
atggttaatcgatcaccgaggaagacttgagca

SEQ ID NO: 146592 - DNA, 33 bp, Homo sapien
atggttaatcgatcactgaggaagacttgagca

SEQ ID NO: 146593 - DNA, 33 bp, Homo sapien
ttatgtgaatgtcttgcattttaaagaagtctc

SEQ ID NO: 146594 - DNA, 33 bp, Homo sapien
ttatgtgaatgtcttgtattttaaagaagtctc

SEQ ID NO: 146595 - DNA, 33 bp, Homo sapien
cttattactgtgggtaactgaatgttctgagcc

SEQ ID NO: 146596 - DNA, 33 bp, Homo sapien
cttattactgtgggtacctgaatgttctgagcc

SEQ ID NO: 146597 - DNA, 33 bp, Homo sapien
gaagaatgtttgctaacagaggaattcctcatc

SEQ ID NO: 146598 - DNA, 33 bp, Homo sapien
gaagaatgtttgctaatagaggaattcctcatc

SEQ ID NO: 146599 - DNA, 33 bp, Homo sapien
tgattttggcacatgaagtaagcagggtatgac

SEQ ID NO: 146600 - DNA, 33 bp, Homo sapien
tgattttggcacatgacgtaagcagggtatgac

SEQ ID NO: 146601 - DNA, 33 bp, Homo sapien
ctactgagagcatcgaatccaaccaagacaaat

SEQ ID NO: 146602 - DNA, 33 bp, Homo sapien
ctactgagagcatcgattccaaccaagacaaat

SEQ ID NO: 146603 - DNA, 33 bp, Homo sapien
gtctagagaattcactatgatcttctattctgt

SEQ ID NO: 146604 - DNA, 33 bp, Homo sapien
gtctagagaattcactgtgatcttctattctgt

SEQ ID NO: 146605 - DNA, 33 bp, Homo sapien
tcacgtcaccacccacagaaccaagagttgatg

SEQ ID NO: 146606 - DNA, 33 bp, Homo sapien
tcacgtcaccacccacggaaccaagagttgatg

SEQ ID NO: 146607 - DNA, 33 bp, Homo sapien
gcttggaaacaaagaaatgagatgtctaattag

SEQ ID NO: 146608 - DNA, 33 bp, Homo sapien
gcttggaaacaaagaagtgagatgtctaattag

SEQ ID NO: 146609 - DNA, 33 bp, Homo sapien
ctggaagggttggccacgtctaggagtgactga

SEQ ID NO: 146610 - DNA, 33 bp, Homo sapien
ctggaagggttggccatgtctaggagtgactga

SEQ ID NO: 146611 - DNA, 33 bp, Homo sapien
gtgcacttaagggcacacacttgaacacgcaca

SEQ ID NO: 146612 - DNA, 33 bp, Homo sapien
gtgcacttaagggcacccacttgaacacgcaca

SEQ ID NO: 146613 - DNA, 33 bp, Homo sapien
caacacagaaaaatccaagaaaaaagttcacta

SEQ ID NO: 146614 - DNA, 33 bp, Homo sapien
caacacagaaaaatccgagaaaaaagttcacta

SEQ ID NO: 146615 - DNA, 33 bp, Homo sapien
ccatcaggagagaaacaagaatgcccacagtct

SEQ ID NO: 146616 - DNA, 33 bp, Homo sapien
ccatcaggagagaaaccagaatgcccacagtct

SEQ ID NO: 146617 - DNA, 33 bp, Homo sapien
atgatgaccatctctcagagaacaagcctcaga

SEQ ID NO: 146618 - DNA, 33 bp, Homo sapien
atgatgaccatctctcggagaacaagcctcaga

SEQ ID NO: 146619 - DNA, 33 bp, Homo sapien
aatacatccataaagccgcctcccagccaacct

SEQ ID NO: 146620 - DNA, 33 bp, Homo sapien
aatacatccataaagctgcctcccagccaacct

SEQ ID NO: 146621 - DNA, 33 bp, Homo sapien
tttcaactaagccttcactagtggtgttcttaa

SEQ ID NO: 146622 - DNA, 33 bp, Homo sapien
tttcaactaagccttcgctagtggtgttcttaa

SEQ ID NO: 146623 - DNA, 33 bp, Homo sapien
ggcggccccttactccactgcggtggcatctgg

SEQ ID NO: 146624 - DNA, 33 bp, Homo sapien
ggcggccccttactccgctgcggtggcatctgg

SEQ ID NO: 146625 - DNA, 33 bp, Homo sapien
gttgattaactgtcagcaggttcagatttacag

SEQ ID NO: 146626 - DNA, 33 bp, Homo sapien
gttgattaactgtcagtaggttcagatttacag

SEQ ID NO: 146627 - DNA, 33 bp, Homo sapien
tatcttgggctgcaacaaggatagctgatgaag

SEQ ID NO: 146628 - DNA, 33 bp, Homo sapien
tatcttgggctgcaacgaggatagctgatgaag

SEQ ID NO: 146629 - DNA, 33 bp, Homo sapien
aaatgagacaaaactacgcacagaggactaaac

SEQ ID NO: 146630 - DNA, 33 bp, Homo sapien
aaatgagacaaaactatgcacagaggactaaac

SEQ ID NO: 146631 - DNA, 33 bp, Homo sapien
tcttccacaaccagcccgagagtaaatgttgtc

SEQ ID NO: 146632 - DNA, 33 bp, Homo sapien
tcttccacaaccagcctgagagtaaatgttgtc

SEQ ID NO: 146633 - DNA, 33 bp, Homo sapien
tgcagcatccacagataaagttttgttggaaca

SEQ ID NO: 146634 - DNA, 33 bp, Homo sapien
tgcagcatccacagatgaagttttgttggaaca

SEQ ID NO: 146635 - DNA, 33 bp, Homo sapien
gggctggactcggcaacgcttttccctccaccg

SEQ ID NO: 146636 - DNA, 33 bp, Homo sapien
gggctggactcggcaatgcttttccctccaccg

SEQ ID NO: 146637 - DNA, 33 bp, Homo sapien
gttctaggcccagaacacacccctggtcaacct

SEQ ID NO: 146638 - DNA, 33 bp, Homo sapien
gttctaggcccagaacgcacccctggtcaacct

SEQ ID NO: 146639 - DNA, 33 bp, Homo sapien
cttctggctggaaacacgccgagcctcgccagc

SEQ ID NO: 146640 - DNA, 33 bp, Homo sapien
cttctggctggaaacatgccgagcctcgccagc

SEQ ID NO: 146641 - DNA, 33 bp, Homo sapien
ttgtcacgcattgcataacgatgcttccgtcac

SEQ ID NO: 146642 - DNA, 33 bp, Homo sapien
ttgtcacgcattgcatgacgatgcttccgtcac

SEQ ID NO: 146643 - DNA, 33 bp, Homo sapien
gtgtacgtgtggggaacgcccaggaccagggtg

SEQ ID NO: 146644 - DNA, 33 bp, Homo sapien
gtgtacgtgtggggaatgcccaggaccagggtg

SEQ ID NO: 146645 - DNA, 33 bp, Homo sapien
aagacatgactccgacaaagaaacacagagacg

SEQ ID NO: 146646 - DNA, 33 bp, Homo sapien
aagacatgactccgacgaagaaacacagagacg

SEQ ID NO: 146647 - DNA, 33 bp, Homo sapien
ggcttctgctctgcggcaaacaacgtggaaggc

SEQ ID NO: 146648 - DNA, 33 bp, Homo sapien
ggcttctgctctgcggtaaacaacgtggaaggc

SEQ ID NO: 146649 - DNA, 33 bp, Homo sapien
cctgtagttccagtgacgtgagaggattgcttg

SEQ ID NO: 146650 - DNA, 33 bp, Homo sapien
cctgtagttccagtgatgtgagaggattgcttg

SEQ ID NO: 146651 - DNA, 33 bp, Homo sapien
tctcagtttctgtaaaccggaagtccaggcatg

SEQ ID NO: 146652 - DNA, 33 bp, Homo sapien
tctcagtttctgtaaatcggaagtccaggcatg

SEQ ID NO: 146653 - DNA, 33 bp, Homo sapien
gctgcaccttcttcagccgctgcagacaccttc

SEQ ID NO: 146654 - DNA, 33 bp, Homo sapien
gctgcaccttcttcagtcgctgcagacaccttc

SEQ ID NO: 146655 - DNA, 33 bp, Homo sapien
tgcaagcgatcgttccaatgaggtctgggattc

SEQ ID NO: 146656 - DNA, 33 bp, Homo sapien
tgcaagcgatcgttccgatgaggtctgggattc

SEQ ID NO: 146657 - DNA, 33 bp, Homo sapien
gcatttgaaaggcaacaaaaggcaagtgtttct

SEQ ID NO: 146658 - DNA, 33 bp, Homo sapien
gcatttgaaaggcaaccaaaggcaagtgtttct

SEQ ID NO: 146659 - DNA, 33 bp, Homo sapien
gctcaggctgaaagaactctgggtgtgtgactc

SEQ ID NO: 146660 - DNA, 33 bp, Homo sapien
gctcaggctgaaagaattctgggtgtgtgactc

SEQ ID NO: 146661 - DNA, 33 bp, Homo sapien
tcagtgtgttcagaggccagcacgagatgggta

SEQ ID NO: 146662 - DNA, 33 bp, Homo sapien
tcagtgtgttcagaggtcagcacgagatgggta

SEQ ID NO: 146663 - DNA, 33 bp, Homo sapien
cttcgagtgctgttgacggtttggggaaaggtg

SEQ ID NO: 146664 - DNA, 33 bp, Homo sapien
cttcgagtgctgttgatggtttggggaaaggtg

SEQ ID NO: 146665 - DNA, 33 bp, Homo sapien
gggaagatgcagaaaaatgagctttcagcagag

SEQ ID NO: 146666 - DNA, 33 bp, Homo sapien
gggaagatgcagaaaagtgagctttcagcagag

SEQ ID NO: 146667 - DNA, 33 bp, Homo sapien
cagttggtcaaaaataagcacatccctttccca

SEQ ID NO: 146668 - DNA, 33 bp, Homo sapien
cagttggtcaaaaataggcacatccctttccca

SEQ ID NO: 146669 - DNA, 33 bp, Homo sapien
gaaggcctggtcgtccactaacacgaggtccga

SEQ ID NO: 146670 - DNA, 33 bp, Homo sapien
gaaggcctggtcgtccgctaacacgaggtccga

SEQ ID NO: 146671 - DNA, 33 bp, Homo sapien
gcccgtagggagtatcacttgacggagagtgag

SEQ ID NO: 146672 - DNA, 33 bp, Homo sapien
gcccgtagggagtatcgcttgacggagagtgag

SEQ ID NO: 146673 - DNA, 33 bp, Homo sapien
taaaatgcccattttcaacataaaaactaccag

SEQ ID NO: 146674 - DNA, 33 bp, Homo sapien
taaaatgcccattttccacataaaaactaccag

SEQ ID NO: 146675 - DNA, 33 bp, Homo sapien
gttccagaacatgacaactcctcaccatgaccc

SEQ ID NO: 146676 - DNA, 33 bp, Homo sapien
gttccagaacatgacacctcctcaccatgaccc

SEQ ID NO: 146677 - DNA, 33 bp, Homo sapien
tgcgccagggtttgtacgtcaagtgtcaaacat

SEQ ID NO: 146678 - DNA, 33 bp, Homo sapien
tgcgccagggtttgtatgtcaagtgtcaaacat

SEQ ID NO: 146679 - DNA, 33 bp, Homo sapien
tgtcagggaggccccaaaaagatgtccaaacag

SEQ ID NO: 146680 - DNA, 33 bp, Homo sapien
tgtcagggaggccccagaaagatgtccaaacag

SEQ ID NO: 146681 - DNA, 33 bp, Homo sapien
tttcagtgctaagcaacgttccactatctggat

SEQ ID NO: 146682 - DNA, 33 bp, Homo sapien
tttcagtgctaagcaatgttccactatctggat

SEQ ID NO: 146683 - DNA, 33 bp, Homo sapien
tgtgagggccaaacacggtaactgaaacacaga

SEQ ID NO: 146684 - DNA, 33 bp, Homo sapien
tgtgagggccaaacactgtaactgaaacacaga

SEQ ID NO: 146685 - DNA, 33 bp, Homo sapien
ccaaaggaaaagtgtgaaagaggaagtagaaaa

SEQ ID NO: 146686 - DNA, 33 bp, Homo sapien
ccaaaggaaaagtgtggaagaggaagtagaaaa

SEQ ID NO: 146687 - DNA, 33 bp, Homo sapien
tcttggcaggttcataaaaacaaaaggtctcag

SEQ ID NO: 146688 - DNA, 33 bp, Homo sapien
tcttggcaggttcatacaaacaaaaggtctcag

SEQ ID NO: 146689 - DNA, 33 bp, Homo sapien
cagtgtttaactgtggaagtttctcatggtgtc

SEQ ID NO: 146690 - DNA, 33 bp, Homo sapien
cagtgtttaactgtgggagtttctcatggtgtc

SEQ ID NO: 146691 - DNA, 33 bp, Homo sapien
gtgagcgcgtcaggaaaacagttctgcgaacgc

SEQ ID NO: 146692 - DNA, 33 bp, Homo sapien
gtgagcgcgtcaggaagacagttctgcgaacgc

SEQ ID NO: 146693 - DNA, 33 bp, Homo sapien
cgctgctgtttctaaacctttgcagtcaacaca

SEQ ID NO: 146694 - DNA, 33 bp, Homo sapien
cgctgctgtttctaaatctttgcagtcaacaca

SEQ ID NO: 146695 - DNA, 33 bp, Homo sapien
gtatgatttgaaataaaaacagcactaagccat

SEQ ID NO: 146696 - DNA, 33 bp, Homo sapien
gtatgatttgaaataacaacagcactaagccat

SEQ ID NO: 146697 - DNA, 33 bp, Homo sapien
ttctataaataaaaacacatacgtctgtaagta

SEQ ID NO: 146698 - DNA, 33 bp, Homo sapien
ttctataaataaaaacgcatacgtctgtaagta

SEQ ID NO: 146699 - DNA, 33 bp, Homo sapien
tcacagagcacctagcagaagacgtctgcgcct

SEQ ID NO: 146700 - DNA, 33 bp, Homo sapien
tcacagagcacctagccgaagacgtctgcgcct

SEQ ID NO: 146701 - DNA, 33 bp, Homo sapien
cagatgtgccaagaccaagaccaagaccagacc

SEQ ID NO: 146702 - DNA, 33 bp, Homo sapien
cagatgtgccaagaccgagaccaagaccagacc

SEQ ID NO: 146703 - DNA, 33 bp, Homo sapien
aggctgccctgcgttaaacctcggctggatctc

SEQ ID NO: 146704 - DNA, 33 bp, Homo sapien
aggctgccctgcgttacacctcggctggatctc

SEQ ID NO: 146705 - DNA, 33 bp, Homo sapien
gtgagaagcctgacaaaaccaagcgttgggtgg

SEQ ID NO: 146706 - DNA, 33 bp, Homo sapien
gtgagaagcctgacaagaccaagcgttgggtgg

SEQ ID NO: 146707 - DNA, 33 bp, Homo sapien
agctctctggtcaagacatgcttcttcctagag

SEQ ID NO: 146708 - DNA, 33 bp, Homo sapien
agctctctggtcaagatatgcttcttcctagag

SEQ ID NO: 146709 - DNA, 33 bp, Homo sapien
gttcaagccttcagcaaaggaggtaactgcaga

SEQ ID NO: 146710 - DNA, 33 bp, Homo sapien
gttcaagccttcagcagaggaggtaactgcaga

SEQ ID NO: 146711 - DNA, 33 bp, Homo sapien
gctttaacactgaatagaattacatcctgcctg

SEQ ID NO: 146712 - DNA, 33 bp, Homo sapien
gctttaacactgaatataattacatcctgcctg

SEQ ID NO: 146713 - DNA, 33 bp, Homo sapien
atccaatgtaaccataacctcaccaacaattgt

SEQ ID NO: 146714 - DNA, 33 bp, Homo sapien
atccaatgtaaccatatcctcaccaacaattgt

SEQ ID NO: 146715 - DNA, 33 bp, Homo sapien
ggagatgtgaacgtcccgatgtccaggccatgc

SEQ ID NO: 146716 - DNA, 33 bp, Homo sapien
ggagatgtgaacgtcctgatgtccaggccatgc

SEQ ID NO: 146717 - DNA, 33 bp, Homo sapien
aaagtgctttccagaaagtttttgtcttacaca

SEQ ID NO: 146718 - DNA, 33 bp, Homo sapien
aaagtgctttccagaacgtttttgtcttacaca

SEQ ID NO: 146719 - DNA, 33 bp, Homo sapien
tttaatatttgaaaacgatcacttccggttttc

SEQ ID NO: 146720 - DNA, 33 bp, Homo sapien
tttaatatttgaaaactatcacttccggttttc

SEQ ID NO: 146721 - DNA, 33 bp, Homo sapien
catataaggaaagcaacgctgtagaattaagaa

SEQ ID NO: 146722 - DNA, 33 bp, Homo sapien
catataaggaaagcaaggctgtagaattaagaa

SEQ ID NO: 146723 - DNA, 33 bp, Homo sapien
caacagctctcactgacgtgtacacaaagcaag

SEQ ID NO: 146724 - DNA, 33 bp, Homo sapien
caacagctctcactgatgtgtacacaaagcaag

SEQ ID NO: 146725 - DNA, 33 bp, Homo sapien
gactggaagctccacaatggtgagaagcattac

SEQ ID NO: 146726 - DNA, 33 bp, Homo sapien
gactggaagctccacagtggtgagaagcattac

SEQ ID NO: 146727 - DNA, 33 bp, Homo sapien
cacggctggaaaaggacacggtctacaagtgga

SEQ ID NO: 146728 - DNA, 33 bp, Homo sapien
cacggctggaaaaggatacggtctacaagtgga

SEQ ID NO: 146729 - DNA, 33 bp, Homo sapien
gcagccgcgtgagacccgagcaaaggacccagc

SEQ ID NO: 146730 - DNA, 33 bp, Homo sapien
gcagccgcgtgagacctgagcaaaggacccagc

SEQ ID NO: 146731 - DNA, 33 bp, Homo sapien
gaaaaagttcttcaggaaggagaatatgacaca

SEQ ID NO: 146732 - DNA, 33 bp, Homo sapien
gaaaaagttcttcagggaggagaatatgacaca

SEQ ID NO: 146733 - DNA, 33 bp, Homo sapien
aatgtagcctctaaccacgtgtgattattaaaa

SEQ ID NO: 146734 - DNA, 33 bp, Homo sapien
aatgtagcctctaaccgcgtgtgattattaaaa

SEQ ID NO: 146735 - DNA, 33 bp, Homo sapien
gtaggtgtgcccacacgcataggcatgtggtga

SEQ ID NO: 146736 - DNA, 33 bp, Homo sapien
gtaggtgtgcccacactcataggcatgtggtga

SEQ ID NO: 146737 - DNA, 33 bp, Homo sapien
acaggcagttatttaacattctggccaaagtgg

SEQ ID NO: 146738 - DNA, 33 bp, Homo sapien
acaggcagttatttaagattctggccaaagtgg

SEQ ID NO: 146739 - DNA, 33 bp, Homo sapien
agagcaacagaaagaaacccaggctagccggac

SEQ ID NO: 146740 - DNA, 33 bp, Homo sapien
agagcaacagaaagaagcccaggctagccggac

SEQ ID NO: 146741 - DNA, 33 bp, Homo sapien
ggaaagagctgagcgacggtccccatgaggaag

SEQ ID NO: 146742 - DNA, 33 bp, Homo sapien
ggaaagagctgagcgatggtccccatgaggaag

SEQ ID NO: 146743 - DNA, 33 bp, Homo sapien
ctttctttcctgtgcaaattcttgcgggtccct

SEQ ID NO: 146744 - DNA, 33 bp, Homo sapien
ctttctttcctgtgcagattcttgcgggtccct

SEQ ID NO: 146745 - DNA, 33 bp, Homo sapien
tcctattcttaacctcaaggctttctatgtagc

SEQ ID NO: 146746 - DNA, 33 bp, Homo sapien
tcctattcttaacctcgaggctttctatgtagc

SEQ ID NO: 146747 - DNA, 33 bp, Homo sapien
tttgatttattactcaatctgttaaattgtttc

SEQ ID NO: 146748 - DNA, 33 bp, Homo sapien
tttgatttattactcagtctgttaaattgtttc

SEQ ID NO: 146749 - DNA, 33 bp, Homo sapien
ctgtgaaattgcgcggcagtcttatctcagttg

SEQ ID NO: 146750 - DNA, 33 bp, Homo sapien
ctgtgaaattgcgcggtagtcttatctcagttg

SEQ ID NO: 146751 - DNA, 33 bp, Homo sapien
cgcttcccagttcttacgtggtcttgttctgcg

SEQ ID NO: 146752 - DNA, 33 bp, Homo sapien
cgcttcccagttcttatgtggtcttgttctgcg

SEQ ID NO: 146753 - DNA, 33 bp, Homo sapien
gtcggagtcaaaggccagcaggagtgtcttgca

SEQ ID NO: 146754 - DNA, 33 bp, Homo sapien
gtcggagtcaaaggccggcaggagtgtcttgca

SEQ ID NO: 146755 - DNA, 33 bp, Homo sapien
caacgtggcctctgaacgtggtatctccacacg

SEQ ID NO: 146756 - DNA, 33 bp, Homo sapien
caacgtggcctctgaatgtggtatctccacacg

SEQ ID NO: 146757 - DNA, 33 bp, Homo sapien
cactacaccaacgtaacgctttcgctgtgaaag

SEQ ID NO: 146758 - DNA, 33 bp, Homo sapien
cactacaccaacgtaatgctttcgctgtgaaag

SEQ ID NO: 146759 - DNA, 33 bp, Homo sapien
cggctcaggaaattcacggctctgtctcccaaa

SEQ ID NO: 146760 - DNA, 33 bp, Homo sapien
cggctcaggaaattcatggctctgtctcccaaa

SEQ ID NO: 146761 - DNA, 33 bp, Homo sapien
gaagtggaggcgttcaatcaaagagctggtgga

SEQ ID NO: 146762 - DNA, 33 bp, Homo sapien
gaagtggaggcgttcagtcaaagagctggtgga

SEQ ID NO: 146763 - DNA, 33 bp, Homo sapien
aaaggtctgagttacactgggaggaatgagagg

SEQ ID NO: 146764 - DNA, 33 bp, Homo sapien
aaaggtctgagttacattgggaggaatgagagg

SEQ ID NO: 146765 - DNA, 33 bp, Homo sapien
ctacccgccgagtctgcaacacgcaagcacagc

SEQ ID NO: 146766 - DNA, 33 bp, Homo sapien
ctacccgccgagtctggaacacgcaagcacagc

SEQ ID NO: 146767 - DNA, 33 bp, Homo sapien
atgcttacacagttaacgatgaaatgacacaga

SEQ ID NO: 146768 - DNA, 33 bp, Homo sapien
atgcttacacagttaatgatgaaatgacacaga

SEQ ID NO: 146769 - DNA, 33 bp, Homo sapien
ctgcgccgtccgcctcaaattcgggggtctcgc

SEQ ID NO: 146770 - DNA, 33 bp, Homo sapien
ctgcgccgtccgcctcgaattcgggggtctcgc

SEQ ID NO: 146771 - DNA, 33 bp, Homo sapien
tttgataaaatgcacacatttacttcgtgagcc

SEQ ID NO: 146772 - DNA, 33 bp, Homo sapien
tttgataaaatgcacatatttacttcgtgagcc

SEQ ID NO: 146773 - DNA, 33 bp, Homo sapien
gtagtgatgctgcctccatcatttttgatattg

SEQ ID NO: 146774 - DNA, 33 bp, Homo sapien
gtagtgatgctgcctctatcatttttgatattg

SEQ ID NO: 146775 - DNA, 33 bp, Homo sapien
gaggacaaatcaatacaacatcagaaacagcga

SEQ ID NO: 146776 - DNA, 33 bp, Homo sapien
gaggacaaatcaatacgacatcagaaacagcga

SEQ ID NO: 146777 - DNA, 33 bp, Homo sapien
tcaacatgagtttcaacggagacaaacgttcaa

SEQ ID NO: 146778 - DNA, 33 bp, Homo sapien
tcaacatgagtttcaagggagacaaacgttcaa

SEQ ID NO: 146779 - DNA, 33 bp, Homo sapien
aatgcagtagcccttacccccaaatctcttcgc

SEQ ID NO: 146780 - DNA, 33 bp, Homo sapien
aatgcagtagcccttatccccaaatctcttcgc

SEQ ID NO: 146781 - DNA, 33 bp, Homo sapien
ccagacggaaagacagcactctgtgcgcctcca

SEQ ID NO: 146782 - DNA, 33 bp, Homo sapien
ccagacggaaagacagtactctgtgcgcctcca

SEQ ID NO: 146783 - DNA, 33 bp, Homo sapien
tatcctgcaaccttacaaaactcagcattagta

SEQ ID NO: 146784 - DNA, 33 bp, Homo sapien
tatcctgcaaccttacgaaactcagcattagta

SEQ ID NO: 146785 - DNA, 33 bp, Homo sapien
taggccggaactcccacgtcaacacggaacaca

SEQ ID NO: 146786 - DNA, 33 bp, Homo sapien
taggccggaactcccatgtcaacacggaacaca

SEQ ID NO: 146787 - DNA, 33 bp, Homo sapien
taggagaattgctcaacgttattctcatgtgtt

SEQ ID NO: 146788 - DNA, 33 bp, Homo sapien
taggagaattgctcaatgttattctcatgtgtt

SEQ ID NO: 146789 - DNA, 33 bp, Homo sapien
cctgacaatgttgtaccggccactattgccaaa

SEQ ID NO: 146790 - DNA, 33 bp, Homo sapien
cctgacaatgttgtactggccactattgccaaa

SEQ ID NO: 146791 - DNA, 33 bp, Homo sapien
taaagctgtaaatttaaacatatggtgacaggg

SEQ ID NO: 146792 - DNA, 33 bp, Homo sapien
taaagctgtaaatttatacatatggtgacaggg

SEQ ID NO: 146793 - DNA, 33 bp, Homo sapien
ctaccaagacgttttgcaaggagcaggtgttca

SEQ ID NO: 146794 - DNA, 33 bp, Homo sapien
ctaccaagacgttttgtaaggagcaggtgttca

SEQ ID NO: 146795 - DNA, 33 bp, Homo sapien
gccacaaaagaccagacaggaccttactaaaac

SEQ ID NO: 146796 - DNA, 33 bp, Homo sapien
gccacaaaagaccagagaggaccttactaaaac

SEQ ID NO: 146797 - DNA, 33 bp, Homo sapien
atgccaacttatgtacaagtgtgtgtgcgtgtc

SEQ ID NO: 146798 - DNA, 33 bp, Homo sapien
atgccaacttatgtacgagtgtgtgtgcgtgtc

SEQ ID NO: 146799 - DNA, 33 bp, Homo sapien
ggcatctggcctccagaactaaacagtgacagt

SEQ ID NO: 146800 - DNA, 33 bp, Homo sapien
ggcatctggcctccaggactaaacagtgacagt

SEQ ID NO: 146801 - DNA, 33 bp, Homo sapien
cgtagacactaaacgacagggaagcatctgcag

SEQ ID NO: 146802 - DNA, 33 bp, Homo sapien
cgtagacactaaacgatagggaagcatctgcag

SEQ ID NO: 146803 - DNA, 33 bp, Homo sapien
gccccctccgagagaccggaaatatgttggtac

SEQ ID NO: 146804 - DNA, 33 bp, Homo sapien
gccccctccgagagactggaaatatgttggtac

SEQ ID NO: 146805 - DNA, 33 bp, Homo sapien
tgtggtcacaggaagcaaatccgcctccgaacc

SEQ ID NO: 146806 - DNA, 33 bp, Homo sapien
tgtggtcacaggaagcgaatccgcctccgaacc

SEQ ID NO: 146807 - DNA, 33 bp, Homo sapien
ggaaaggcgcgaaccacgggcgacaggacatcc

SEQ ID NO: 146808 - DNA, 33 bp, Homo sapien
ggaaaggcgcgaaccatgggcgacaggacatcc

SEQ ID NO: 146809 - DNA, 33 bp, Homo sapien
aaattacctcaaaatgcaccataggtttaaatg

SEQ ID NO: 146810 - DNA, 33 bp, Homo sapien
aaattacctcaaaatggaccataggtttaaatg

SEQ ID NO: 146811 - DNA, 33 bp, Homo sapien
cacctctctccacaaaactctcaggaagagcag

SEQ ID NO: 146812 - DNA, 33 bp, Homo sapien
cacctctctccacaaagctctcaggaagagcag

SEQ ID NO: 146813 - DNA, 33 bp, Homo sapien
cgagttggtaggacggcactaaccaccaagctg

SEQ ID NO: 146814 - DNA, 33 bp, Homo sapien
cgagttggtaggacgggactaaccaccaagctg

SEQ ID NO: 146815 - DNA, 33 bp, Homo sapien
tcggcccgggcttgcaacttcaagaatgagaac

SEQ ID NO: 146816 - DNA, 33 bp, Homo sapien
tcggcccgggcttgcatcttcaagaatgagaac

SEQ ID NO: 146817 - DNA, 33 bp, Homo sapien
ttcagaaaaggaaacaccaaaggcgctggagct

SEQ ID NO: 146818 - DNA, 33 bp, Homo sapien
ttcagaaaaggaaacatcaaaggcgctggagct

SEQ ID NO: 146819 - DNA, 33 bp, Homo sapien
tcactggtgactttccagagatacttaggcaaa

SEQ ID NO: 146820 - DNA, 33 bp, Homo sapien
tcactggtgactttccggagatacttaggcaaa

SEQ ID NO: 146821 - DNA, 33 bp, Homo sapien
tgccttagagaccgaccgacaccaagtagcaat

SEQ ID NO: 146822 - DNA, 33 bp, Homo sapien
tgccttagagaccgactgacaccaagtagcaat

SEQ ID NO: 146823 - DNA, 33 bp, Homo sapien
gaaaacctgctataaaatggtaatgatgacaaa

SEQ ID NO: 146824 - DNA, 33 bp, Homo sapien
gaaaacctgctataaactggtaatgatgacaaa

SEQ ID NO: 146825 - DNA, 33 bp, Homo sapien
tcagagaaaagctggccgacggtgtcctctgct

SEQ ID NO: 146826 - DNA, 33 bp, Homo sapien
tcagagaaaagctggctgacggtgtcctctgct

SEQ ID NO: 146827 - DNA, 33 bp, Homo sapien
atcacattcctgaggaaaatctaataaactata

SEQ ID NO: 146828 - DNA, 33 bp, Homo sapien
atcacattcctgaggataatctaataaactata

SEQ ID NO: 146829 - DNA, 33 bp, Homo sapien
tttaacaatgtgaacaaattggttttttcttac

SEQ ID NO: 146830 - DNA, 33 bp, Homo sapien
tttaacaatgtgaacagattggttttttcttac

SEQ ID NO: 146831 - DNA, 33 bp, Homo sapien
catattgagacttggaagtaaagaagccggtga

SEQ ID NO: 146832 - DNA, 33 bp, Homo sapien
catattgagacttggaggtaaagaagccggtga

SEQ ID NO: 146833 - DNA, 33 bp, Homo sapien
ttaaaatcagtcaagaccgtcctcctcatggag

SEQ ID NO: 146834 - DNA, 33 bp, Homo sapien
ttaaaatcagtcaagatcgtcctcctcatggag

SEQ ID NO: 146835 - DNA, 33 bp, Homo sapien
tttgcaaaataaaaaaatgcaggcgacatttct

SEQ ID NO: 146836 - DNA, 33 bp, Homo sapien
tttgcaaaataaaaaactgcaggcgacatttct

SEQ ID NO: 146837 - DNA, 33 bp, Homo sapien
acacaccccacactcacacaaagcacactacat

SEQ ID NO: 146838 - DNA, 33 bp, Homo sapien
acacaccccacactcatacaaagcacactacat

SEQ ID NO: 146839 - DNA, 33 bp, Homo sapien
gggtctggaccccacactcggcccaggtcccag

SEQ ID NO: 146840 - DNA, 33 bp, Homo sapien
gggtctggaccccacagtcggcccaggtcccag

SEQ ID NO: 146841 - DNA, 33 bp, Homo sapien
gaggctccacgtcaccaatgcgacccagtcagt

SEQ ID NO: 146842 - DNA, 33 bp, Homo sapien
gaggctccacgtcaccgatgcgacccagtcagt

SEQ ID NO: 146843 - DNA, 33 bp, Homo sapien
aaaaatagcctagagaatcctgcatgcccttcg

SEQ ID NO: 146844 - DNA, 33 bp, Homo sapien
aaaaatagcctagagagtcctgcatgcccttcg

SEQ ID NO: 146845 - DNA, 33 bp, Homo sapien
ccacctgtgggaccagaagcgggttagccctgg

SEQ ID NO: 146846 - DNA, 33 bp, Homo sapien
ccacctgtgggaccaggagcgggttagccctgg

SEQ ID NO: 146847 - DNA, 33 bp, Homo sapien
gccttgttacgtagaacttactcagcagactga

SEQ ID NO: 146848 - DNA, 33 bp, Homo sapien
gccttgttacgtagaagttactcagcagactga

SEQ ID NO: 146849 - DNA, 33 bp, Homo sapien
cagctccctttccacagcctgagacctagttcc

SEQ ID NO: 146850 - DNA, 33 bp, Homo sapien
cagctccctttccacatcctgagacctagttcc

SEQ ID NO: 146851 - DNA, 33 bp, Homo sapien
caggtgtagctctcagccacaaggatagatggt

SEQ ID NO: 146852 - DNA, 33 bp, Homo sapien
caggtgtagctctcaggcacaaggatagatggt

SEQ ID NO: 146853 - DNA, 33 bp, Homo sapien
gctgtggcaccacatccaggggacaaagagcgc

SEQ ID NO: 146854 - DNA, 33 bp, Homo sapien
gctgtggcaccacatcgaggggacaaagagcgc

SEQ ID NO: 146855 - DNA, 33 bp, Homo sapien
ttctctctccgcgccacaaagccagagttccca

SEQ ID NO: 146856 - DNA, 33 bp, Homo sapien
ttctctctccgcgccataaagccagagttccca

SEQ ID NO: 146857 - DNA, 33 bp, Homo sapien
gttgctgagccaagtagcttttatgggatcctg

SEQ ID NO: 146858 - DNA, 33 bp, Homo sapien
gttgctgagccaagtatcttttatgggatcctg

SEQ ID NO: 146859 - DNA, 33 bp, Homo sapien
agggactgggcctctacgaaaccagcacttccg

SEQ ID NO: 146860 - DNA, 33 bp, Homo sapien
agggactgggcctctatgaaaccagcacttccg

SEQ ID NO: 146861 - DNA, 33 bp, Homo sapien
ccacctaataccctaacgcctagctgtaaatat

SEQ ID NO: 146862 - DNA, 33 bp, Homo sapien
ccacctaataccctaatgcctagctgtaaatat

SEQ ID NO: 146863 - DNA, 33 bp, Homo sapien
attcagcatcgcttcacgataaaagctctcagc

SEQ ID NO: 146864 - DNA, 33 bp, Homo sapien
attcagcatcgcttcatgataaaagctctcagc

SEQ ID NO: 146865 - DNA, 33 bp, Homo sapien
cccccagaccataacacaaggagaccctggaga

SEQ ID NO: 146866 - DNA, 33 bp, Homo sapien
cccccagaccataacataaggagaccctggaga

SEQ ID NO: 146867 - DNA, 33 bp, Homo sapien
agccctggcttcacaacgtgtcctgccggggca

SEQ ID NO: 146868 - DNA, 33 bp, Homo sapien
agccctggcttcacaatgtgtcctgccggggca

SEQ ID NO: 146869 - DNA, 33 bp, Homo sapien
tctactttcctagcaaacttccagtgtacaatg

SEQ ID NO: 146870 - DNA, 33 bp, Homo sapien
tctactttcctagcaagcttccagtgtacaatg

SEQ ID NO: 146871 - DNA, 33 bp, Homo sapien
gaatttgataaaagtcaacacttatgataaaaa

SEQ ID NO: 146872 - DNA, 33 bp, Homo sapien
gaatttgataaaagtcgacacttatgataaaaa

SEQ ID NO: 146873 - DNA, 33 bp, Homo sapien
gacatgcacgtacacccctgaaaggatcgcagc

SEQ ID NO: 146874 - DNA, 33 bp, Homo sapien
gacatgcacgtacacctctgaaaggatcgcagc

SEQ ID NO: 146875 - DNA, 33 bp, Homo sapien
acacaccacttttcttaaaaaataatgttgatt

SEQ ID NO: 146876 - DNA, 33 bp, Homo sapien
acacaccacttttctttaaaaataatgttgatt

SEQ ID NO: 146877 - DNA, 33 bp, Homo sapien
atagctgaaggttataacacatttgaataaatt

SEQ ID NO: 146878 - DNA, 33 bp, Homo sapien
atagctgaaggttatatcacatttgaataaatt

SEQ ID NO: 146879 - DNA, 33 bp, Homo sapien
tgtgtttttatttctacgctctctcgtctccac

SEQ ID NO: 146880 - DNA, 33 bp, Homo sapien
tgtgtttttatttctatgctctctcgtctccac

SEQ ID NO: 146881 - DNA, 33 bp, Homo sapien
tcaatttgtggagaacggatatgttgcaacaat

SEQ ID NO: 146882 - DNA, 33 bp, Homo sapien
tcaatttgtggagaactgatatgttgcaacaat

SEQ ID NO: 146883 - DNA, 33 bp, Homo sapien
gattgagtgcgattccagacatttcagtagttt

SEQ ID NO: 146884 - DNA, 33 bp, Homo sapien
gattgagtgcgattccggacatttcagtagttt

SEQ ID NO: 146885 - DNA, 33 bp, Homo sapien
aagttaagttcacaaacatgagtgaatcacaca

SEQ ID NO: 146886 - DNA, 33 bp, Homo sapien
aagttaagttcacaaatatgagtgaatcacaca

SEQ ID NO: 146887 - DNA, 33 bp, Homo sapien
ttcatgggttggaaaaaattcttgttagtgcat

SEQ ID NO: 146888 - DNA, 33 bp, Homo sapien
ttcatgggttggaaaagattcttgttagtgcat

SEQ ID NO: 146889 - DNA, 33 bp, Homo sapien
ggaataaattaggtaacgagagtcctacaactt

SEQ ID NO: 146890 - DNA, 33 bp, Homo sapien
ggaataaattaggtaatgagagtcctacaactt

SEQ ID NO: 146891 - DNA, 33 bp, Homo sapien
caatatcttctgatctaaacaagaagggacctt

SEQ ID NO: 146892 - DNA, 33 bp, Homo sapien
caatatcttctgatctgaacaagaagggacctt

SEQ ID NO: 146893 - DNA, 33 bp, Homo sapien
aatattatgatgagcaaagatagaccagggaaa

SEQ ID NO: 146894 - DNA, 33 bp, Homo sapien
aatattatgatgagcagagatagaccagggaaa

SEQ ID NO: 146895 - DNA, 33 bp, Homo sapien
gaaccacagggacctacggacaaggagagggtc

SEQ ID NO: 146896 - DNA, 33 bp, Homo sapien
gaaccacagggacctatggacaaggagagggtc

SEQ ID NO: 146897 - DNA, 33 bp, Homo sapien
aactgtgtagctggaaactagagttgtaaaatg

SEQ ID NO: 146898 - DNA, 33 bp, Homo sapien
aactgtgtagctggaacctagagttgtaaaatg

SEQ ID NO: 146899 - DNA, 33 bp, Homo sapien
cgtcagttcctgaaagcaggtattataggctat

SEQ ID NO: 146900 - DNA, 33 bp, Homo sapien
cgtcagttcctgaaagtaggtattataggctat

SEQ ID NO: 146901 - DNA, 33 bp, Homo sapien
tttaagagctctgatggaagtatcgcaaaatgt

SEQ ID NO: 146902 - DNA, 33 bp, Homo sapien
tttaagagctctgatgtaagtatcgcaaaatgt

SEQ ID NO: 146903 - DNA, 33 bp, Homo sapien
taggatagtatatttccagttgaaggagttgct

SEQ ID NO: 146904 - DNA, 33 bp, Homo sapien
taggatagtatatttcgagttgaaggagttgct

SEQ ID NO: 146905 - DNA, 33 bp, Homo sapien
gcataatattcaaaacaacattcttcactgggg

SEQ ID NO: 146906 - DNA, 33 bp, Homo sapien
gcataatattcaaaactacattcttcactgggg

SEQ ID NO: 146907 - DNA, 33 bp, Homo sapien
tactctgcacagtagaacttagaggatgtttgg

SEQ ID NO: 146908 - DNA, 33 bp, Homo sapien
tactctgcacagtagaccttagaggatgtttgg

SEQ ID NO: 146909 - DNA, 33 bp, Homo sapien
gctccttgacttaaaagatatttgccagtcaga

SEQ ID NO: 146910 - DNA, 33 bp, Homo sapien
gctccttgacttaaaatatatttgccagtcaga

SEQ ID NO: 146911 - DNA, 33 bp, Homo sapien
acctatttgcaatagaacatcacccatatgggg

SEQ ID NO: 146912 - DNA, 33 bp, Homo sapien
acctatttgcaatagagcatcacccatatgggg

SEQ ID NO: 146913 - DNA, 33 bp, Homo sapien
tttaaacaatggcttaactggaaggttttagcc

SEQ ID NO: 146914 - DNA, 33 bp, Homo sapien
tttaaacaatggcttacctggaaggttttagcc

SEQ ID NO: 146915 - DNA, 33 bp, Homo sapien
atatgtttcatctctacgtatataaagactgtt

SEQ ID NO: 146916 - DNA, 33 bp, Homo sapien
atatgtttcatctctatgtatataaagactgtt

SEQ ID NO: 146917 - DNA, 33 bp, Homo sapien
tcccacttcaaatatacgaaagggtgatgggaa

SEQ ID NO: 146918 - DNA, 33 bp, Homo sapien
tcccacttcaaatataggaaagggtgatgggaa

SEQ ID NO: 146919 - DNA, 33 bp, Homo sapien
acaatcatgggaacaggatgcaaaacttttact

SEQ ID NO: 146920 - DNA, 33 bp, Homo sapien
acaatcatgggaacagtatgcaaaacttttact

SEQ ID NO: 146921 - DNA, 33 bp, Homo sapien
tgagtttccattaatgaacatgacctttctctc

SEQ ID NO: 146922 - DNA, 33 bp, Homo sapien
tgagtttccattaatggacatgacctttctctc

SEQ ID NO: 146923 - DNA, 33 bp, Homo sapien
ctgggaaccaaccacaagcatgaggggatatgg

SEQ ID NO: 146924 - DNA, 33 bp, Homo sapien
ctgggaaccaaccacaggcatgaggggatatgg

SEQ ID NO: 146925 - DNA, 33 bp, Homo sapien
atatgggctgaaatcaccaccttcacagcctgt

SEQ ID NO: 146926 - DNA, 33 bp, Homo sapien
atatgggctgaaatcatcaccttcacagcctgt

SEQ ID NO: 146927 - DNA, 33 bp, Homo sapien
ttaatgtggacatggtcaagtgagcaaatgcac

SEQ ID NO: 146928 - DNA, 33 bp, Homo sapien
ttaatgtggacatggttaagtgagcaaatgcac

SEQ ID NO: 146929 - DNA, 33 bp, Homo sapien
agacatccaaggagtacgacaaagagtaaaagg

SEQ ID NO: 146930 - DNA, 33 bp, Homo sapien
agacatccaaggagtatgacaaagagtaaaagg

SEQ ID NO: 146931 - DNA, 33 bp, Homo sapien
aggcaaaaaataaaaaccagctgaagaaattta

SEQ ID NO: 146932 - DNA, 33 bp, Homo sapien
aggcaaaaaataaaaatcagctgaagaaattta

SEQ ID NO: 146933 - DNA, 33 bp, Homo sapien
gcagtagtgttaagggaaactctctcaatggca

SEQ ID NO: 146934 - DNA, 33 bp, Homo sapien
gcagtagtgttaagggtaactctctcaatggca

SEQ ID NO: 146935 - DNA, 33 bp, Homo sapien
gtgcctttgccaacccacagaagcccactctcc

SEQ ID NO: 146936 - DNA, 33 bp, Homo sapien
gtgcctttgccaacccgcagaagcccactctcc

SEQ ID NO: 146937 - DNA, 33 bp, Homo sapien
accctgtattccagataatcagcatccttgcca

SEQ ID NO: 146938 - DNA, 33 bp, Homo sapien
accctgtattccagatgatcagcatccttgcca

SEQ ID NO: 146939 - DNA, 33 bp, Homo sapien
ttccagctctccttgccaggctctgctgatagc

SEQ ID NO: 146940 - DNA, 33 bp, Homo sapien
ttccagctctccttgctaggctctgctgatagc

SEQ ID NO: 146941 - DNA, 33 bp, Homo sapien
cttctttaattttgaaacatggggccctatttt

SEQ ID NO: 146942 - DNA, 33 bp, Homo sapien
cttctttaattttgaatcatggggccctatttt

SEQ ID NO: 146943 - DNA, 33 bp, Homo sapien
tccacctcaggacaagaagaaggggcaccactc

SEQ ID NO: 146944 - DNA, 33 bp, Homo sapien
tccacctcaggacaaggagaaggggcaccactc

SEQ ID NO: 146945 - DNA, 33 bp, Homo sapien
tcttaatttttccttaccattagagtgtccagt

SEQ ID NO: 146946 - DNA, 33 bp, Homo sapien
tcttaatttttccttatcattagagtgtccagt

SEQ ID NO: 146947 - DNA, 33 bp, Homo sapien
agctgaaatatgttgacgagatcttaaaaattt

SEQ ID NO: 146948 - DNA, 33 bp, Homo sapien
agctgaaatatgttgatgagatcttaaaaattt

SEQ ID NO: 146949 - DNA, 33 bp, Homo sapien
tcacacacaacaccacacatctgttgagtacct

SEQ ID NO: 146950 - DNA, 33 bp, Homo sapien
tcacacacaacaccactcatctgttgagtacct

SEQ ID NO: 146951 - DNA, 33 bp, Homo sapien
accagtttattgtacactgattatacctcaata

SEQ ID NO: 146952 - DNA, 33 bp, Homo sapien
accagtttattgtacattgattatacctcaata

SEQ ID NO: 146953 - DNA, 33 bp, Homo sapien
ttcttctggctttcacaacacaatatttttaga

SEQ ID NO: 146954 - DNA, 33 bp, Homo sapien
ttcttctggctttcacgacacaatatttttaga

SEQ ID NO: 146955 - DNA, 33 bp, Homo sapien
aaaacattcccggccacgggagaaacagcctct

SEQ ID NO: 146956 - DNA, 33 bp, Homo sapien
aaaacattcccggccatgggagaaacagcctct

SEQ ID NO: 146957 - DNA, 33 bp, Homo sapien
catctcctcgaccaaccgaaatgaggggcttat

SEQ ID NO: 146958 - DNA, 33 bp, Homo sapien
catctcctcgaccaactgaaatgaggggcttat

SEQ ID NO: 146959 - DNA, 33 bp, Homo sapien
acaacggggactgccaagaaagaagggtttaat

SEQ ID NO: 146960 - DNA, 33 bp, Homo sapien
acaacggggactgccaggaaagaagggtttaat

SEQ ID NO: 146961 - DNA, 33 bp, Homo sapien
tcaacaaatggtgttgaagttaatgcaaataaa

SEQ ID NO: 146962 - DNA, 33 bp, Homo sapien
tcaacaaatggtgttggagttaatgcaaataaa

SEQ ID NO: 146963 - DNA, 33 bp, Homo sapien
gtctcagtgtaaagccaaacattcattctattc

SEQ ID NO: 146964 - DNA, 33 bp, Homo sapien
gtctcagtgtaaagccgaacattcattctattc

SEQ ID NO: 146965 - DNA, 33 bp, Homo sapien
cattcaaaaagattcacagttgctcttgtattt

SEQ ID NO: 146966 - DNA, 33 bp, Homo sapien
cattcaaaaagattcatagttgctcttgtattt

SEQ ID NO: 146967 - DNA, 33 bp, Homo sapien
atcggatatattccaaacacaacgcatttgaat

SEQ ID NO: 146968 - DNA, 33 bp, Homo sapien
atcggatatattccaaccacaacgcatttgaat

SEQ ID NO: 146969 - DNA, 33 bp, Homo sapien
ttaaacgccatctagacggcagagaggaaaatc

SEQ ID NO: 146970 - DNA, 33 bp, Homo sapien
ttaaacgccatctagagggcagagaggaaaatc

SEQ ID NO: 146971 - DNA, 33 bp, Homo sapien
gccatgaacatctgcaacggcctaattaagaca

SEQ ID NO: 146972 - DNA, 33 bp, Homo sapien
gccatgaacatctgcaccggcctaattaagaca

SEQ ID NO: 146973 - DNA, 33 bp, Homo sapien
tatgaaaaacagctcacatgaatgaggacggct

SEQ ID NO: 146974 - DNA, 33 bp, Homo sapien
tatgaaaaacagctcatatgaatgaggacggct

SEQ ID NO: 146975 - DNA, 33 bp, Homo sapien
aaggcagctatgaaaacgtaggcatggcccagt

SEQ ID NO: 146976 - DNA, 33 bp, Homo sapien
aaggcagctatgaaaatgtaggcatggcccagt

SEQ ID NO: 146977 - DNA, 33 bp, Homo sapien
gcatcccttcctgacactgaagctagggaggag

SEQ ID NO: 146978 - DNA, 33 bp, Homo sapien
gcatcccttcctgacattgaagctagggaggag

SEQ ID NO: 146979 - DNA, 33 bp, Homo sapien
accaagacaatctccacgtaccagtgtggacag

SEQ ID NO: 146980 - DNA, 33 bp, Homo sapien
accaagacaatctccatgtaccagtgtggacag

SEQ ID NO: 146981 - DNA, 33 bp, Homo sapien
cacagaacaaccggaaaagtcgcccatatcaca

SEQ ID NO: 146982 - DNA, 33 bp, Homo sapien
cacagaacaaccggaagagtcgcccatatcaca

SEQ ID NO: 146983 - DNA, 33 bp, Homo sapien
gctaccagagttacaacctgcttttctatgaaa

SEQ ID NO: 146984 - DNA, 33 bp, Homo sapien
gctaccagagttacaatctgcttttctatgaaa

SEQ ID NO: 146985 - DNA, 33 bp, Homo sapien
cacagactctatctcacgtgctttgtggacgaa

SEQ ID NO: 146986 - DNA, 33 bp, Homo sapien
cacagactctatctcatgtgctttgtggacgaa

SEQ ID NO: 146987 - DNA, 33 bp, Homo sapien
aattagctatgaaaaccggtaattcctgaagct

SEQ ID NO: 146988 - DNA, 33 bp, Homo sapien
aattagctatgaaaactggtaattcctgaagct

SEQ ID NO: 146989 - DNA, 33 bp, Homo sapien
ttataagcattgtctcaaaaggacagttgaaca

SEQ ID NO: 146990 - DNA, 33 bp, Homo sapien
ttataagcattgtctcgaaaggacagttgaaca

SEQ ID NO: 146991 - DNA, 33 bp, Homo sapien
aaaccagcgattcacacgttgtgccaacttctg

SEQ ID NO: 146992 - DNA, 33 bp, Homo sapien
aaaccagcgattcacaggttgtgccaacttctg

SEQ ID NO: 146993 - DNA, 33 bp, Homo sapien
ggtgatgaggacaggacggttcgttacattgct

SEQ ID NO: 146994 - DNA, 33 bp, Homo sapien
ggtgatgaggacaggatggttcgttacattgct

SEQ ID NO: 146995 - DNA, 33 bp, Homo sapien
aaatgtctggaacataagtaagatgtatggctt

SEQ ID NO: 146996 - DNA, 33 bp, Homo sapien
aaatgtctggaacatacgtaagatgtatggctt

SEQ ID NO: 146997 - DNA, 33 bp, Homo sapien
ggcagaagtgcatcagacaaagggagaggcttc

SEQ ID NO: 146998 - DNA, 33 bp, Homo sapien
ggcagaagtgcatcagccaaagggagaggcttc

SEQ ID NO: 146999 - DNA, 33 bp, Homo sapien
cttttattctgcaaaacgaagaccccaaacact

SEQ ID NO: 147000 - DNA, 33 bp, Homo sapien
cttttattctgcaaaatgaagaccccaaacact

SEQ ID NO: 147001 - DNA, 33 bp, Homo sapien
tggaaatcattcttcacgtagttagacagatga

SEQ ID NO: 147002 - DNA, 33 bp, Homo sapien
tggaaatcattcttcatgtagttagacagatga

SEQ ID NO: 147003 - DNA, 33 bp, Homo sapien
aggatctggaaaagaaagaacaatcagaaggac

SEQ ID NO: 147004 - DNA, 33 bp, Homo sapien
aggatctggaaaagaaggaacaatcagaaggac

SEQ ID NO: 147005 - DNA, 33 bp, Homo sapien
actgatgaatgtgaccacgttaaaatggaaaac

SEQ ID NO: 147006 - DNA, 33 bp, Homo sapien
actgatgaatgtgaccgcgttaaaatggaaaac

SEQ ID NO: 147007 - DNA, 33 bp, Homo sapien
tgtatgagcgagtagacacatgggggaataagg

SEQ ID NO: 147008 - DNA, 33 bp, Homo sapien
tgtatgagcgagtagatacatgggggaataagg

SEQ ID NO: 147009 - DNA, 33 bp, Homo sapien
aaagaaagcagacaagaacagaggaaatccaca

SEQ ID NO: 147010 - DNA, 33 bp, Homo sapien
aaagaaagcagacaaggacagaggaaatccaca

SEQ ID NO: 147011 - DNA, 33 bp, Homo sapien
tgcaagttttttctaacgttcctgtgaaaagaa

SEQ ID NO: 147012 - DNA, 33 bp, Homo sapien
tgcaagttttttctaatgttcctgtgaaaagaa

SEQ ID NO: 147013 - DNA, 33 bp, Homo sapien
cttcattggctgcaaacgcctctctcaggtgag

SEQ ID NO: 147014 - DNA, 33 bp, Homo sapien
cttcattggctgcaaatgcctctctcaggtgag

SEQ ID NO: 147015 - DNA, 33 bp, Homo sapien
gtgatacgggagagaaagaacgtgccaggcagg

SEQ ID NO: 147016 - DNA, 33 bp, Homo sapien
gtgatacgggagagaaggaacgtgccaggcagg

SEQ ID NO: 147017 - DNA, 33 bp, Homo sapien
tcaaacctgtcctccacaaccgctcctccacac

SEQ ID NO: 147018 - DNA, 33 bp, Homo sapien
tcaaacctgtcctccataaccgctcctccacac

SEQ ID NO: 147019 - DNA, 33 bp, Homo sapien
tggtaaattggtgatacgagcaaatttcactag

SEQ ID NO: 147020 - DNA, 33 bp, Homo sapien
tggtaaattggtgatatgagcaaatttcactag

SEQ ID NO: 147021 - DNA, 33 bp, Homo sapien
cacgcactcaggtccacagccttatccagaact

SEQ ID NO: 147022 - DNA, 33 bp, Homo sapien
cacgcactcaggtccatagccttatccagaact

SEQ ID NO: 147023 - DNA, 33 bp, Homo sapien
aaatatgcatgagtaacgtagcagagattgcta

SEQ ID NO: 147024 - DNA, 33 bp, Homo sapien
aaatatgcatgagtaatgtagcagagattgcta

SEQ ID NO: 147025 - DNA, 33 bp, Homo sapien
tggttgtgatctcaaaatggtgatattaaaaca

SEQ ID NO: 147026 - DNA, 33 bp, Homo sapien
tggttgtgatctcaaagtggtgatattaaaaca

SEQ ID NO: 147027 - DNA, 33 bp, Homo sapien
cctaaggtactccccaagtttactctcttgtgc

SEQ ID NO: 147028 - DNA, 33 bp, Homo sapien
cctaaggtactccccaggtttactctcttgtgc

SEQ ID NO: 147029 - DNA, 33 bp, Homo sapien
accattagggaatagcggactaaataaactgag

SEQ ID NO: 147030 - DNA, 33 bp, Homo sapien
accattagggaatagctgactaaataaactgag

SEQ ID NO: 147031 - DNA, 33 bp, Homo sapien
acagagcagcagagatcaaaggcctgggctctc

SEQ ID NO: 147032 - DNA, 33 bp, Homo sapien
acagagcagcagagattaaaggcctgggctctc

SEQ ID NO: 147033 - DNA, 33 bp, Homo sapien
ggcccctcggttccacaattaaaagtgcctggt

SEQ ID NO: 147034 - DNA, 33 bp, Homo sapien
ggcccctcggttccacgattaaaagtgcctggt

SEQ ID NO: 147035 - DNA, 33 bp, Homo sapien
aggcagcaccggttcacgggaaaaacaggcggc

SEQ ID NO: 147036 - DNA, 33 bp, Homo sapien
aggcagcaccggttcatgggaaaaacaggcggc

SEQ ID NO: 147037 - DNA, 33 bp, Homo sapien
tgtctctgagctgatacacaagtgtcttcaggt

SEQ ID NO: 147038 - DNA, 33 bp, Homo sapien
tgtctctgagctgatatacaagtgtcttcaggt

SEQ ID NO: 147039 - DNA, 33 bp, Homo sapien
ctttctagatagtcgacgaataaccatcattta

SEQ ID NO: 147040 - DNA, 33 bp, Homo sapien
ctttctagatagtcgatgaataaccatcattta

SEQ ID NO: 147041 - DNA, 33 bp, Homo sapien
tttagtgaacttaatacctgacatgcattattt

SEQ ID NO: 147042 - DNA, 33 bp, Homo sapien
tttagtgaacttaatatctgacatgcattattt

SEQ ID NO: 147043 - DNA, 33 bp, Homo sapien
agcagatgccaccgacagaagtggtctacacgt

SEQ ID NO: 147044 - DNA, 33 bp, Homo sapien
agcagatgccaccgacggaagtggtctacacgt

SEQ ID NO: 147045 - DNA, 33 bp, Homo sapien
cagtcccttctggttgaaatatttgcatcatgt

SEQ ID NO: 147046 - DNA, 33 bp, Homo sapien
cagtcccttctggttggaatatttgcatcatgt

SEQ ID NO: 147047 - DNA, 33 bp, Homo sapien
gtcccccgacagaacagtctgctcactcgccct

SEQ ID NO: 147048 - DNA, 33 bp, Homo sapien
gtcccccgacagaacattctgctcactcgccct

SEQ ID NO: 147049 - DNA, 33 bp, Homo sapien
cagactgtcaggacccaactgcagaggaaggtg

SEQ ID NO: 147050 - DNA, 33 bp, Homo sapien
cagactgtcaggacccgactgcagaggaaggtg

SEQ ID NO: 147051 - DNA, 33 bp, Homo sapien
ccatgaggcccccaagaaatgacgagctgctct

SEQ ID NO: 147052 - DNA, 33 bp, Homo sapien
ccatgaggcccccaaggaatgacgagctgctct

SEQ ID NO: 147053 - DNA, 33 bp, Homo sapien
cggtggagccgaaggaagaaccagggggacctg

SEQ ID NO: 147054 - DNA, 33 bp, Homo sapien
cggtggagccgaaggaggaaccagggggacctg

SEQ ID NO: 147055 - DNA, 33 bp, Homo sapien
aagcttcagaggccctcagactgagtgtgtagg

SEQ ID NO: 147056 - DNA, 33 bp, Homo sapien
aagcttcagaggccctgagactgagtgtgtagg

SEQ ID NO: 147057 - DNA, 33 bp, Homo sapien
taggcttcttggccaaatggagagcttggactt

SEQ ID NO: 147058 - DNA, 33 bp, Homo sapien
taggcttcttggccaactggagagcttggactt

SEQ ID NO: 147059 - DNA, 33 bp, Homo sapien
tttcagaaggcaggacaagagggcagcttacct

SEQ ID NO: 147060 - DNA, 33 bp, Homo sapien
tttcagaaggcaggacgagagggcagcttacct

SEQ ID NO: 147061 - DNA, 33 bp, Homo sapien
aggctcatgggcacaccaaaaaagaaacataag

SEQ ID NO: 147062 - DNA, 33 bp, Homo sapien
aggctcatgggcacacgaaaaaagaaacataag

SEQ ID NO: 147063 - DNA, 33 bp, Homo sapien
cgtattcgtccacaaaatggttctggatcagct

SEQ ID NO: 147064 - DNA, 33 bp, Homo sapien
cgtattcgtccacaaagtggttctggatcagct

SEQ ID NO: 147065 - DNA, 33 bp, Homo sapien
ctttgtgtgctccagaaaaagggggcagcacca

SEQ ID NO: 147066 - DNA, 33 bp, Homo sapien
ctttgtgtgctccagagaaagggggcagcacca

SEQ ID NO: 147067 - DNA, 33 bp, Homo sapien
ctctggcccaccgagaatagattgctccagagt

SEQ ID NO: 147068 - DNA, 33 bp, Homo sapien
ctctggcccaccgagagtagattgctccagagt

SEQ ID NO: 147069 - DNA, 33 bp, Homo sapien
ttattcttgtattcaccatctgctgtatcagct

SEQ ID NO: 147070 - DNA, 33 bp, Homo sapien
ttattcttgtattcactatctgctgtatcagct

SEQ ID NO: 147071 - DNA, 33 bp, Homo sapien
tgagcacctcttagaacagcagccggagccagg

SEQ ID NO: 147072 - DNA, 33 bp, Homo sapien
tgagcacctcttagaatagcagccggagccagg

SEQ ID NO: 147073 - DNA, 33 bp, Homo sapien
ctcagtatctttgggcaactggactcattcatt

SEQ ID NO: 147074 - DNA, 33 bp, Homo sapien
ctcagtatctttgggccactggactcattcatt

SEQ ID NO: 147075 - DNA, 33 bp, Homo sapien
ggctggtcctgggaagcaggtagtcggagaagg

SEQ ID NO: 147076 - DNA, 33 bp, Homo sapien
ggctggtcctgggaagtaggtagtcggagaagg

SEQ ID NO: 147077 - DNA, 33 bp, Homo sapien
accacttgggcctttcacggtatgccctttgca

SEQ ID NO: 147078 - DNA, 33 bp, Homo sapien
accacttgggcctttcgcggtatgccctttgca

SEQ ID NO: 147079 - DNA, 33 bp, Homo sapien
ggtattgactccagagccagtcttttgttgttg

SEQ ID NO: 147080 - DNA, 33 bp, Homo sapien
ggtattgactccagaggcagtcttttgttgttg

SEQ ID NO: 147081 - DNA, 33 bp, Homo sapien
gtgggccacactttaccagccactgatctaatg

SEQ ID NO: 147082 - DNA, 33 bp, Homo sapien
gtgggccacactttactagccactgatctaatg

SEQ ID NO: 147083 - DNA, 33 bp, Homo sapien
agagtttccaacagaccgagttggccgccacag

SEQ ID NO: 147084 - DNA, 33 bp, Homo sapien
agagtttccaacagactgagttggccgccacag

SEQ ID NO: 147085 - DNA, 33 bp, Homo sapien
gatcaggttacagcaacgagtgcagcggaatca

SEQ ID NO: 147086 - DNA, 33 bp, Homo sapien
gatcaggttacagcaatgagtgcagcggaatca

SEQ ID NO: 147087 - DNA, 33 bp, Homo sapien
ggtttctacatgctaaagagcaacacggagcgg

SEQ ID NO: 147088 - DNA, 33 bp, Homo sapien
ggtttctacatgctaaggagcaacacggagcgg

SEQ ID NO: 147089 - DNA, 33 bp, Homo sapien
gcagtttccaaaactcaaatgtccactggaaaa

SEQ ID NO: 147090 - DNA, 33 bp, Homo sapien
gcagtttccaaaactctaatgtccactggaaaa

SEQ ID NO: 147091 - DNA, 33 bp, Homo sapien
tgccatcataggcaagactgctccaccacctga

SEQ ID NO: 147092 - DNA, 33 bp, Homo sapien
tgccatcataggcaaggctgctccaccacctga

SEQ ID NO: 147093 - DNA, 33 bp, Homo sapien
ggccttctttcactcaccacatcccttgggggc

SEQ ID NO: 147094 - DNA, 33 bp, Homo sapien
ggccttctttcactcatcacatcccttgggggc

SEQ ID NO: 147095 - DNA, 33 bp, Homo sapien
gggtgattttacaggacgaaatgggctgttttc

SEQ ID NO: 147096 - DNA, 33 bp, Homo sapien
gggtgattttacaggatgaaatgggctgttttc

SEQ ID NO: 147097 - DNA, 33 bp, Homo sapien
aaaaaaaaagttactgaactggctaatctggag

SEQ ID NO: 147098 - DNA, 33 bp, Homo sapien
aaaaaaaaagttactgtactggctaatctggag

SEQ ID NO: 147099 - DNA, 33 bp, Homo sapien
aggggcatatttgatcactgggcacttagtgtt

SEQ ID NO: 147100 - DNA, 33 bp, Homo sapien
aggggcatatttgatcgctgggcacttagtgtt

SEQ ID NO: 147101 - DNA, 33 bp, Homo sapien
ctggctccatccgaaaagctgagtgtgttccca

SEQ ID NO: 147102 - DNA, 33 bp, Homo sapien
ctggctccatccgaaaggctgagtgtgttccca

SEQ ID NO: 147103 - DNA, 33 bp, Homo sapien
ctgggcaggggaacaaaaaggtatgtgcaccag

SEQ ID NO: 147104 - DNA, 33 bp, Homo sapien
ctgggcaggggaacaagaaggtatgtgcaccag

SEQ ID NO: 147105 - DNA, 33 bp, Homo sapien
ccatgacgtctgcttacgcccacccggctctgc

SEQ ID NO: 147106 - DNA, 33 bp, Homo sapien
ccatgacgtctgcttatgcccacccggctctgc

SEQ ID NO: 147107 - DNA, 33 bp, Homo sapien
agggaacctcaaagagacccgagatggaaggct

SEQ ID NO: 147108 - DNA, 33 bp, Homo sapien
agggaacctcaaagagccccgagatggaaggct

SEQ ID NO: 147109 - DNA, 33 bp, Homo sapien
gtgcccagctgtagcaaagttgttgggtcagtg

SEQ ID NO: 147110 - DNA, 33 bp, Homo sapien
gtgcccagctgtagcagagttgttgggtcagtg

SEQ ID NO: 147111 - DNA, 33 bp, Homo sapien
ctgtcctgagcatgtcaaggacgccccctacca

SEQ ID NO: 147112 - DNA, 33 bp, Homo sapien
ctgtcctgagcatgtcgaggacgccccctacca

SEQ ID NO: 147113 - DNA, 33 bp, Homo sapien
cacaggttactttgaccgctcagagatgaggct

SEQ ID NO: 147114 - DNA, 33 bp, Homo sapien
cacaggttactttgactgctcagagatgaggct

SEQ ID NO: 147115 - DNA, 33 bp, Homo sapien
agcttccacgtgaagggcatgtcgtttgctttc

SEQ ID NO: 147116 - DNA, 33 bp, Homo sapien
agcttccacgtgaaggtcatgtcgtttgctttc

SEQ ID NO: 147117 - DNA, 33 bp, Homo sapien
aaggaaaaaaatcaacacagcagacaggaaact

SEQ ID NO: 147118 - DNA, 33 bp, Homo sapien
aaggaaaaaaatcaacgcagcagacaggaaact

SEQ ID NO: 147119 - DNA, 33 bp, Homo sapien
ttattccttgtctgaactaagcaagtaggaagg

SEQ ID NO: 147120 - DNA, 33 bp, Homo sapien
ttattccttgtctgaagtaagcaagtaggaagg

SEQ ID NO: 147121 - DNA, 33 bp, Homo sapien
aggcctctgtaatccaatcctccataaaagcag

SEQ ID NO: 147122 - DNA, 33 bp, Homo sapien
aggcctctgtaatccagtcctccataaaagcag

SEQ ID NO: 147123 - DNA, 33 bp, Homo sapien
tttccatggttaccacagagctggggagaagag

SEQ ID NO: 147124 - DNA, 33 bp, Homo sapien
tttccatggttaccacggagctggggagaagag

SEQ ID NO: 147125 - DNA, 33 bp, Homo sapien
tcctttgaaaatagagaaattggctgggtgtgg

SEQ ID NO: 147126 - DNA, 33 bp, Homo sapien
tcctttgaaaatagaggaattggctgggtgtgg

SEQ ID NO: 147127 - DNA, 33 bp, Homo sapien
aaaagacaggagactaaaagttacaaaagtgca

SEQ ID NO: 147128 - DNA, 33 bp, Homo sapien
aaaagacaggagactagaagttacaaaagtgca

SEQ ID NO: 147129 - DNA, 33 bp, Homo sapien
atattccaaagtcacaaaaacttactcctgttt

SEQ ID NO: 147130 - DNA, 33 bp, Homo sapien
atattccaaagtcacagaaacttactcctgttt

SEQ ID NO: 147131 - DNA, 33 bp, Homo sapien
cagattgttacctgcgcccgtcatgactgcagg

SEQ ID NO: 147132 - DNA, 33 bp, Homo sapien
cagattgttacctgcgtccgtcatgactgcagg

SEQ ID NO: 147133 - DNA, 33 bp, Homo sapien
tatctgttgatagacactacaacctatctgttg

SEQ ID NO: 147134 - DNA, 33 bp, Homo sapien
tatctgttgatagacattacaacctatctgttg

SEQ ID NO: 147135 - DNA, 33 bp, Homo sapien
ttccatcttcagataccatgacattggggttag

SEQ ID NO: 147136 - DNA, 33 bp, Homo sapien
ttccatcttcagatactatgacattggggttag

SEQ ID NO: 147137 - DNA, 33 bp, Homo sapien
gctgttaaacaaccgaagtgcatagagtggccc

SEQ ID NO: 147138 - DNA, 33 bp, Homo sapien
gctgttaaacaaccgacgtgcatagagtggccc

SEQ ID NO: 147139 - DNA, 33 bp, Homo sapien
caaaaatacctttcaacaatgaagctaccctgt

SEQ ID NO: 147140 - DNA, 33 bp, Homo sapien
caaaaatacctttcaagaatgaagctaccctgt

SEQ ID NO: 147141 - DNA, 33 bp, Homo sapien
cagggtttgcaagttccatcacagcagggccct

SEQ ID NO: 147142 - DNA, 33 bp, Homo sapien
cagggtttgcaagttctatcacagcagggccct

SEQ ID NO: 147143 - DNA, 33 bp, Homo sapien
ccgtaagggaggttgcaaagaaaggaggaaaag

SEQ ID NO: 147144 - DNA, 33 bp, Homo sapien
ccgtaagggaggttgcgaagaaaggaggaaaag

SEQ ID NO: 147145 - DNA, 33 bp, Homo sapien
ggaggctctgcagcaccagaaagcccgagctct

SEQ ID NO: 147146 - DNA, 33 bp, Homo sapien
ggaggctctgcagcacgagaaagcccgagctct

SEQ ID NO: 147147 - DNA, 33 bp, Homo sapien
cctgccatcctgcgggacatacctcgaacacag

SEQ ID NO: 147148 - DNA, 33 bp, Homo sapien
cctgccatcctgcgggccatacctcgaacacag

SEQ ID NO: 147149 - DNA, 33 bp, Homo sapien
accacatttcgtttaactaggcatccacccatg

SEQ ID NO: 147150 - DNA, 33 bp, Homo sapien
accacatttcgtttaattaggcatccacccatg

SEQ ID NO: 147151 - DNA, 33 bp, Homo sapien
tgcactaaagagctacacatctcaccacgtaca

SEQ ID NO: 147152 - DNA, 33 bp, Homo sapien
tgcactaaagagctacgcatctcaccacgtaca

SEQ ID NO: 147153 - DNA, 33 bp, Homo sapien
tatcattatgaaaggaccttctttattgccagt

SEQ ID NO: 147154 - DNA, 33 bp, Homo sapien
tatcattatgaaaggatcttctttattgccagt

SEQ ID NO: 147155 - DNA, 33 bp, Homo sapien
cctccatgtctttcacaccttgacacttttgag

SEQ ID NO: 147156 - DNA, 33 bp, Homo sapien
cctccatgtctttcacgccttgacacttttgag

SEQ ID NO: 147157 - DNA, 33 bp, Homo sapien
atttcttctgcattaagtaactggaattctatt

SEQ ID NO: 147158 - DNA, 33 bp, Homo sapien
atttcttctgcattaattaactggaattctatt

SEQ ID NO: 147159 - DNA, 33 bp, Homo sapien
gcagttatttacttcactatgggtttgtagata

SEQ ID NO: 147160 - DNA, 33 bp, Homo sapien
gcagttatttacttcattatgggtttgtagata

SEQ ID NO: 147161 - DNA, 33 bp, Homo sapien
aatatgtgtagaatccacagtggcgtcacctgt

SEQ ID NO: 147162 - DNA, 33 bp, Homo sapien
aatatgtgtagaatccgcagtggcgtcacctgt

SEQ ID NO: 147163 - DNA, 33 bp, Homo sapien
ggacaaactccttggacacaggatgaatcgaag

SEQ ID NO: 147164 - DNA, 33 bp, Homo sapien
ggacaaactccttggagacaggatgaatcgaag

SEQ ID NO: 147165 - DNA, 33 bp, Homo sapien
cattatcaaaataaccaggaaacataggacaaa

SEQ ID NO: 147166 - DNA, 33 bp, Homo sapien
cattatcaaaataaccgggaaacataggacaaa

SEQ ID NO: 147167 - DNA, 33 bp, Homo sapien
gattttatgtggcaacaaggaaaacacttagga

SEQ ID NO: 147168 - DNA, 33 bp, Homo sapien
gattttatgtggcaacgaggaaaacacttagga

SEQ ID NO: 147169 - DNA, 33 bp, Homo sapien
tgtcggcctccagcaactgcaggctgcccacat

SEQ ID NO: 147170 - DNA, 33 bp, Homo sapien
tgtcggcctccagcaagtgcaggctgcccacat

SEQ ID NO: 147171 - DNA, 33 bp, Homo sapien
ttgggccccgagtctccataactgttggggtga

SEQ ID NO: 147172 - DNA, 33 bp, Homo sapien
ttgggccccgagtctctataactgttggggtga

SEQ ID NO: 147173 - DNA, 33 bp, Homo sapien
cccccacggggctgtcaaaatgtggtcagattc

SEQ ID NO: 147174 - DNA, 33 bp, Homo sapien
cccccacggggctgtcgaaatgtggtcagattc

SEQ ID NO: 147175 - DNA, 33 bp, Homo sapien
ccgacccccggggctacgcactcacacacacac

SEQ ID NO: 147176 - DNA, 33 bp, Homo sapien
ccgacccccggggctatgcactcacacacacac

SEQ ID NO: 147177 - DNA, 33 bp, Homo sapien
gctgttctgttcccacagcggcctccctgtttc

SEQ ID NO: 147178 - DNA, 33 bp, Homo sapien
gctgttctgttcccacggcggcctccctgtttc

SEQ ID NO: 147179 - DNA, 33 bp, Homo sapien
ttcattccttctgctcaatgctgggtttgcgat

SEQ ID NO: 147180 - DNA, 33 bp, Homo sapien
ttcattccttctgctcgatgctgggtttgcgat

SEQ ID NO: 147181 - DNA, 33 bp, Homo sapien
attactctgttcttcacagggtttgaaatcatc

SEQ ID NO: 147182 - DNA, 33 bp, Homo sapien
attactctgttcttcatagggtttgaaatcatc

SEQ ID NO: 147183 - DNA, 33 bp, Homo sapien
ctcttgccaaaccttcactgagggtctcacgga

SEQ ID NO: 147184 - DNA, 33 bp, Homo sapien
ctcttgccaaaccttcgctgagggtctcacgga

SEQ ID NO: 147185 - DNA, 33 bp, Homo sapien
ctaagcagagacttccaaaaagcagtttcctga

SEQ ID NO: 147186 - DNA, 33 bp, Homo sapien
ctaagcagagacttccgaaaagcagtttcctga

SEQ ID NO: 147187 - DNA, 33 bp, Homo sapien
acacagtggacacgctaaaggttggcaggctgc

SEQ ID NO: 147188 - DNA, 33 bp, Homo sapien
acacagtggacacgctgaaggttggcaggctgc

SEQ ID NO: 147189 - DNA, 33 bp, Homo sapien
catgtgctatttttgcaattgtgattaagtctc

SEQ ID NO: 147190 - DNA, 33 bp, Homo sapien
catgtgctatttttgcgattgtgattaagtctc

SEQ ID NO: 147191 - DNA, 33 bp, Homo sapien; identical to SEQ ID NO: 147189

SEQ ID NO: 147192 - DNA, 33 bp, Homo sapien; identical to SEQ ID NO: 147190

SEQ ID NO: 147193 - DNA, 33 bp, Homo sapien
gtatttgttcagcagacgccgaccactcagacg

SEQ ID NO: 147194 - DNA, 33 bp, Homo sapien
gtatttgttcagcagatgccgaccactcagacg

SEQ ID NO: 147195 - DNA, 33 bp, Homo sapien
atgcttcatgaggccacgcggtctccagatgct

SEQ ID NO: 147196 - DNA, 33 bp, Homo sapien
atgcttcatgaggccatgcggtctccagatgct

SEQ ID NO: 147197 - DNA, 33 bp, Homo sapien
agcccgccgtgagggacgagcaagtcacaccac

SEQ ID NO: 147198 - DNA, 33 bp, Homo sapien
agcccgccgtgagggatgagcaagtcacaccac

SEQ ID NO: 147199 - DNA, 33 bp, Homo sapien
gaataaataaagaagaagttaatcattgtctgt

SEQ ID NO: 147200 - DNA, 33 bp, Homo sapien
gaataaataaagaagaggttaatcattgtctgt

SEQ ID NO: 147201 - DNA, 33 bp, Homo sapien
tctgagtctcctgttaagcagaaaggagcactt

SEQ ID NO: 147202 - DNA, 33 bp, Homo sapien
tctgagtctcctgttaggcagaaaggagcactt

SEQ ID NO: 147203 - DNA, 33 bp, Homo sapien
acatcagatgtaaaagccagtaaagttcagcaa

SEQ ID NO: 147204 - DNA, 33 bp, Homo sapien
acatcagatgtaaaaggcagtaaagttcagcaa

SEQ ID NO: 147205 - DNA, 33 bp, Homo sapien
acctagcagaccaggaatagcaggaaacatccc

SEQ ID NO: 147206 - DNA, 33 bp, Homo sapien
acctagcagaccaggagtagcaggaaacatccc

SEQ ID NO: 147207 - DNA, 33 bp, Homo sapien
gaagccaaagttcatgaatgacattttgttgtt

SEQ ID NO: 147208 - DNA, 33 bp, Homo sapien
gaagccaaagttcatggatgacattttgttgtt

SEQ ID NO: 147209 - DNA, 33 bp, Homo sapien
ttgtttgttgtctaccagaggaagtgagttaag

SEQ ID NO: 147210 - DNA, 33 bp, Homo sapien
ttgtttgttgtctaccggaggaagtgagttaag

SEQ ID NO: 147211 - DNA, 33 bp, Homo sapien
ttcacccaaattattccactcaccaaatcagcc

SEQ ID NO: 147212 - DNA, 33 bp, Homo sapien
ttcacccaaattattctactcaccaaatcagcc

SEQ ID NO: 147213 - DNA, 33 bp, Homo sapien
cagcagtgaatgaaaacgtgcagggtaacaagc

SEQ ID NO: 147214 - DNA, 33 bp, Homo sapien
cagcagtgaatgaaaatgtgcagggtaacaagc

SEQ ID NO: 147215 - DNA, 33 bp, Homo sapien
acgacatcacaagaaaagagttataggccgggt

SEQ ID NO: 147216 - DNA, 33 bp, Homo sapien
acgacatcacaagaaaggagttataggccgggt

SEQ ID NO: 147217 - DNA, 33 bp, Homo sapien
gctgtcttctgctaaaagtgatgtttgtaacat

SEQ ID NO: 147218 - DNA, 33 bp, Homo sapien
gctgtcttctgctaaatgtgatgtttgtaacat

SEQ ID NO: 147219 - DNA, 33 bp, Homo sapien
acaggagtaaccagagaagtcccccaggcaggc

SEQ ID NO: 147220 - DNA, 33 bp, Homo sapien
acaggagtaaccagaggagtcccccaggcaggc

SEQ ID NO: 147221 - DNA, 33 bp, Homo sapien
cccaggctgaccacccgcgagtgctgcccgcac

SEQ ID NO: 147222 - DNA, 33 bp, Homo sapien
cccaggctgaccaccctcgagtgctgcccgcac

SEQ ID NO: 147223 - DNA, 33 bp, Homo sapien
ttctctggctgcgcagaaagtgggcgagccccc

SEQ ID NO: 147224 - DNA, 33 bp, Homo sapien
ttctctggctgcgcaggaagtgggcgagccccc

SEQ ID NO: 147225 - DNA, 33 bp, Homo sapien
caatttattacctttcaaagtcatcacattttg

SEQ ID NO: 147226 - DNA, 33 bp, Homo sapien
caatttattacctttccaagtcatcacattttg

SEQ ID NO: 147227 - DNA, 33 bp, Homo sapien
ccataaatgtgtgtgcaccagacaacagggctt

SEQ ID NO: 147228 - DNA, 33 bp, Homo sapien
ccataaatgtgtgtgcgccagacaacagggctt

SEQ ID NO: 147229 - DNA, 33 bp, Homo sapien
gggactgggcagcttaggagaatgtatttttaa

SEQ ID NO: 147230 - DNA, 33 bp, Homo sapien
gggactgggcagcttatgagaatgtatttttaa

SEQ ID NO: 147231 - DNA, 33 bp, Homo sapien
gccagtccctaagccacgctctgagcagtgcgt

SEQ ID NO: 147232 - DNA, 33 bp, Homo sapien
gccagtccctaagccatgctctgagcagtgcgt

SEQ ID NO: 147233 - DNA, 33 bp, Homo sapien
ctggcgttttcccactaacatcacatctgtggg

SEQ ID NO: 147234 - DNA, 33 bp, Homo sapien
ctggcgttttcccactgacatcacatctgtggg

SEQ ID NO: 147235 - DNA, 33 bp, Homo sapien
aagtcccataaatggccgaatggcagaattagt

SEQ ID NO: 147236 - DNA, 33 bp, Homo sapien
aagtcccataaatggctgaatggcagaattagt

SEQ ID NO: 147237 - DNA, 33 bp, Homo sapien
caaaatcctgtatcataaaaaaaaccagctgct

SEQ ID NO: 147238 - DNA, 33 bp, Homo sapien
caaaatcctgtatcattaaaaaaaccagctgct

SEQ ID NO: 147239 - DNA, 33 bp, Homo sapien
ttcctctctcctcacactcgacctcctcagaac

SEQ ID NO: 147240 - DNA, 33 bp, Homo sapien
ttcctctctcctcacattcgacctcctcagaac

SEQ ID NO: 147241 - DNA, 33 bp, Homo sapien
cgcctctgaccgtgagaaaaggtattgtcttag

SEQ ID NO: 147242 - DNA, 33 bp, Homo sapien
cgcctctgaccgtgagcaaaggtattgtcttag

SEQ ID NO: 147243 - DNA, 33 bp, Homo sapien
cctgacaacagccacaacaaggacatgtgtgca

SEQ ID NO: 147244 - DNA, 33 bp, Homo sapien
cctgacaacagccacagcaaggacatgtgtgca

SEQ ID NO: 147245 - DNA, 33 bp, Homo sapien
gttggggaaatagtggcatggaggtttgctaca

SEQ ID NO: 147246 - DNA, 33 bp, Homo sapien
gttggggaaatagtggtatggaggtttgctaca

SEQ ID NO: 147247 - DNA, 33 bp, Homo sapien
gacacgagattattaactgataatatgttatca

SEQ ID NO: 147248 - DNA, 33 bp, Homo sapien
gacacgagattattaagtgataatatgttatca

SEQ ID NO: 147249 - DNA, 33 bp, Homo sapien
aaccaggaagagggaagattaaaccacagtgtg

SEQ ID NO: 147250 - DNA, 33 bp, Homo sapien
aaccaggaagagggaatattaaaccacagtgtg

SEQ ID NO: 147251 - DNA, 33 bp, Homo sapien
tcaacacaggaaagatgagagcacgtgggcaga

SEQ ID NO: 147252 - DNA, 33 bp, Homo sapien
tcaacacaggaaagattagagcacgtgggcaga

SEQ ID NO: 147253 - DNA, 33 bp, Homo sapien
cagctgcaaaaaagaacgaagtcatatcttttg

SEQ ID NO: 147254 - DNA, 33 bp, Homo sapien
cagctgcaaaaaagaatgaagtcatatcttttg

SEQ ID NO: 147255 - DNA, 33 bp, Homo sapien
tgactttttctgaccacgaaatgcacctgccaa

SEQ ID NO: 147256 - DNA, 33 bp, Homo sapien
tgactttttctgaccatgaaatgcacctgccaa

SEQ ID NO: 147257 - DNA, 33 bp, Homo sapien
aatagcagaaacaacaacagaagtattcacgtg

SEQ ID NO: 147258 - DNA, 33 bp, Homo sapien
aatagcagaaacaacagcagaagtattcacgtg

SEQ ID NO: 147259 - DNA, 33 bp, Homo sapien
caggcctgtcagtaccagccagcggcttttcaa

SEQ ID NO: 147260 - DNA, 33 bp, Homo sapien
caggcctgtcagtaccggccagcggcttttcaa

SEQ ID NO: 147261 - DNA, 33 bp, Homo sapien
aggcccgagaaccagggagctgacggtgtgagt

SEQ ID NO: 147262 - DNA, 33 bp, Homo sapien
aggcccgagaaccaggtagctgacggtgtgagt

SEQ ID NO: 147263 - DNA, 33 bp, Homo sapien
atctgtgaggtatgcactcttttttcaatttaa

SEQ ID NO: 147264 - DNA, 33 bp, Homo sapien
atctgtgaggtatgcattcttttttcaatttaa

SEQ ID NO: 147265 - DNA, 33 bp, Homo sapien
atctatcgatcatctaggtatctctgtatccat

SEQ ID NO: 147266 - DNA, 33 bp, Homo sapien
atctatcgatcatctatgtatctctgtatccat

SEQ ID NO: 147267 - DNA, 33 bp, Homo sapien
cactcttcctaatcaccgactcgaactgtaatg

SEQ ID NO: 147268 - DNA, 33 bp, Homo sapien
cactcttcctaatcactgactcgaactgtaatg

SEQ ID NO: 147269 - DNA, 33 bp, Homo sapien
atttctcctcctaaaacgagctaggctgacccc

SEQ ID NO: 147270 - DNA, 33 bp, Homo sapien
atttctcctcctaaaatgagctaggctgacccc

SEQ ID NO: 147271 - DNA, 33 bp, Homo sapien
gctccagcatacacggcaagagtcaccgagtgc

SEQ ID NO: 147272 - DNA, 33 bp, Homo sapien
gctccagcatacacgggaagagtcaccgagtgc

SEQ ID NO: 147273 - DNA, 33 bp, Homo sapien
aaactcaccgcggggccagtgtttactgagggg

SEQ ID NO: 147274 - DNA, 33 bp, Homo sapien
aaactcaccgcggggctagtgtttactgagggg

SEQ ID NO: 147275 - DNA, 33 bp, Homo sapien
cacagggccttgaaaaaccagacaggagaaggc

SEQ ID NO: 147276 - DNA, 33 bp, Homo sapien
cacagggccttgaaaatccagacaggagaaggc

SEQ ID NO: 147277 - DNA, 33 bp, Homo sapien
tagtggtgccaagtaacaacaccaatttacaaa

SEQ ID NO: 147278 - DNA, 33 bp, Homo sapien
tagtggtgccaagtaataacaccaatttacaaa

SEQ ID NO: 147279 - DNA, 33 bp, Homo sapien
gcatctactgtccaacactatggcttgactaac

SEQ ID NO: 147280 - DNA, 33 bp, Homo sapien
gcatctactgtccaactctatggcttgactaac

SEQ ID NO: 147281 - DNA, 33 bp, Homo sapien
ggcctccgaggtgacacggaatcgggaggaatg

SEQ ID NO: 147282 - DNA, 33 bp, Homo sapien
ggcctccgaggtgacatggaatcgggaggaatg

SEQ ID NO: 147283 - DNA, 33 bp, Homo sapien
tatagatgagtgtgtacagagatagaaatatct

SEQ ID NO: 147284 - DNA, 33 bp, Homo sapien
tatagatgagtgtgtatagagatagaaatatct

SEQ ID NO: 147285 - DNA, 33 bp, Homo sapien
ctccaaccttctctcacgctggagacagcaagg

SEQ ID NO: 147286 - DNA, 33 bp, Homo sapien
ctccaaccttctctcatgctggagacagcaagg

SEQ ID NO: 147287 - DNA, 33 bp, Homo sapien
gcaggcaggagacgccacgggtgatgcaggccc

SEQ ID NO: 147288 - DNA, 33 bp, Homo sapien
gcaggcaggagacgccgcgggtgatgcaggccc

SEQ ID NO: 147289 - DNA, 33 bp, Homo sapien
ggggccctcaccagacacgaacctaccagtgcc

SEQ ID NO: 147290 - DNA, 33 bp, Homo sapien
ggggccctcaccagacgcgaacctaccagtgcc

SEQ ID NO: 147291 - DNA, 33 bp, Homo sapien
tggggattatgaataaagaacagctgccatgtg

SEQ ID NO: 147292 - DNA, 33 bp, Homo sapien
tggggattatgaataaggaacagctgccatgtg

SEQ ID NO: 147293 - DNA, 33 bp, Homo sapien
gacaacctcattctaacgttctgtctgtttgga

SEQ ID NO: 147294 - DNA, 33 bp, Homo sapien
gacaacctcattctaatgttctgtctgtttgga

SEQ ID NO: 147295 - DNA, 33 bp, Homo sapien
cagaacttgcatggacgctacagctggcctgca

SEQ ID NO: 147296 - DNA, 33 bp, Homo sapien
cagaacttgcatggactctacagctggcctgca

SEQ ID NO: 147297 - DNA, 33 bp, Homo sapien
gatggaattaccagaaacaattagacaaaggag

SEQ ID NO: 147298 - DNA, 33 bp, Homo sapien
gatggaattaccagaagcaattagacaaaggag

SEQ ID NO: 147299 - DNA, 33 bp, Homo sapien
ttggtcctgtgattcaagacagggtgaaagtca

SEQ ID NO: 147300 - DNA, 33 bp, Homo sapien
ttggtcctgtgattcaggacagggtgaaagtca

SEQ ID NO: 147301 - DNA, 33 bp, Homo sapien
gacatttgcatccaggaaacatgcaggcaattc

SEQ ID NO: 147302 - DNA, 33 bp, Homo sapien
gacatttgcatccagggaacatgcaggcaattc

SEQ ID NO: 147303 - DNA, 33 bp, Homo sapien
agaagaagaaaggaagaatcgtgcccctcaatg

SEQ ID NO: 147304 - DNA, 33 bp, Homo sapien
agaagaagaaaggaagtatcgtgcccctcaatg

SEQ ID NO: 147305 - DNA, 33 bp, Homo sapien
tccttagaaacattagcagactttaaaaaatga

SEQ ID NO: 147306 - DNA, 33 bp, Homo sapien
tccttagaaacattagtagactttaaaaaatga

SEQ ID NO: 147307 - DNA, 33 bp, Homo sapien
gctttctcagagtttccatccctgtgtcctcct

SEQ ID NO: 147308 - DNA, 33 bp, Homo sapien
gctttctcagagtttctatccctgtgtcctcct

SEQ ID NO: 147309 - DNA, 33 bp, Homo sapien
agggcatagtccaatgaaccggcagagttggag

SEQ ID NO: 147310 - DNA, 33 bp, Homo sapien
agggcatagtccaatggaccggcagagttggag

SEQ ID NO: 147311 - DNA, 33 bp, Homo sapien
ggtcagggaaagagacaaagagagccttcccac

SEQ ID NO: 147312 - DNA, 33 bp, Homo sapien
ggtcagggaaagagacgaagagagccttcccac

SEQ ID NO: 147313 - DNA, 33 bp, Homo sapien
tgctggaataaacatacccgtgcaagggtcttt

SEQ ID NO: 147314 - DNA, 33 bp, Homo sapien
tgctggaataaacatatccgtgcaagggtcttt

SEQ ID NO: 147315 - DNA, 33 bp, Homo sapien
gcctcttctccagacactggaaatccgcataac

SEQ ID NO: 147316 - DNA, 33 bp, Homo sapien
gcctcttctccagacattggaaatccgcataac

SEQ ID NO: 147317 - DNA, 33 bp, Homo sapien
taagattggtggataagagaaaggaaggagggt

SEQ ID NO: 147318 - DNA, 33 bp, Homo sapien
taagattggtggataatagaaaggaaggagggt

SEQ ID NO: 147319 - DNA, 33 bp, Homo sapien
acaggttgagcttgacacccttcctctgtgtgt

SEQ ID NO: 147320 - DNA, 33 bp, Homo sapien
acaggttgagcttgacgcccttcctctgtgtgt

SEQ ID NO: 147321 - DNA, 33 bp, Homo sapien
cttctggtgcattctccctgagtttatccagaa

SEQ ID NO: 147322 - DNA, 33 bp, Homo sapien
cttctggtgcattctctctgagtttatccagaa

SEQ ID NO: 147323 - DNA, 33 bp, Homo sapien
caaatttatagtgacacaaagtaggatggcgag

SEQ ID NO: 147324 - DNA, 33 bp, Homo sapien
caaatttatagtgacagaaagtaggatggcgag

SEQ ID NO: 147325 - DNA, 33 bp, Homo sapien
tcttttcattcttgccacttatttgttgaagaa

SEQ ID NO: 147326 - DNA, 33 bp, Homo sapien
tcttttcattcttgccgcttatttgttgaagaa

SEQ ID NO: 147327 - DNA, 33 bp, Homo sapien
ccactgcggcttgctagaataaaaggaatctag

SEQ ID NO: 147328 - DNA, 33 bp, Homo sapien
ccactgcggcttgctataataaaaggaatctag

SEQ ID NO: 147329 - DNA, 33 bp, Homo sapien
tgggcctcacaaatgacggagcttgtcgagttc

SEQ ID NO: 147330 - DNA, 33 bp, Homo sapien
tgggcctcacaaatgatggagcttgtcgagttc

SEQ ID NO: 147331 - DNA, 33 bp, Homo sapien
agctctggcagtcctacacacaacctctgccat

SEQ ID NO: 147332 - DNA, 33 bp, Homo sapien
agctctggcagtcctatacacaacctctgccat

SEQ ID NO: 147333 - DNA, 33 bp, Homo sapien
ctgtgggcaccttttcccggcacacggtgctgt

SEQ ID NO: 147334 - DNA, 33 bp, Homo sapien
ctgtgggcaccttttcgcggcacacggtgctgt

SEQ ID NO: 147335 - DNA, 33 bp, Homo sapien
ctctagtgaaatgagcagagagtttgaatctgg

SEQ ID NO: 147336 - DNA, 33 bp, Homo sapien
ctctagtgaaatgagcggagagtttgaatctgg

SEQ ID NO: 147337 - DNA, 33 bp, Homo sapien
caaactcgaacttgtcaatctccagctggtgca

SEQ ID NO: 147338 - DNA, 33 bp, Homo sapien
caaactcgaacttgtcgatctccagctggtgca

SEQ ID NO: 147339 - DNA, 33 bp, Homo sapien
catgctagatagaccccctggagtcatttccac

SEQ ID NO: 147340 - DNA, 33 bp, Homo sapien
catgctagatagaccctctggagtcatttccac

SEQ ID NO: 147341 - DNA, 33 bp, Homo sapien
ttccccatttcttcccaaagctgtgacaaatgg

SEQ ID NO: 147342 - DNA, 33 bp, Homo sapien
ttccccatttcttcccgaagctgtgacaaatgg

SEQ ID NO: 147343 - DNA, 33 bp, Homo sapien
ttggttccagtgcttcccgagaaaatccaacat

SEQ ID NO: 147344 - DNA, 33 bp, Homo sapien
ttggttccagtgcttcgcgagaaaatccaacat

SEQ ID NO: 147345 - DNA, 33 bp, Homo sapien
aactcttagccggttacggagatgagacgggca

SEQ ID NO: 147346 - DNA, 33 bp, Homo sapien
aactcttagccggttagggagatgagacgggca

SEQ ID NO: 147347 - DNA, 33 bp, Homo sapien
gcgagcagcatcgcgtaaccgggactggcccgg

SEQ ID NO: 147348 - DNA, 33 bp, Homo sapien
gcgagcagcatcgcgtgaccgggactggcccgg

SEQ ID NO: 147349 - DNA, 33 bp, Homo sapien
tatcccaggatagaaacctgaacgcatccctga

SEQ ID NO: 147350 - DNA, 33 bp, Homo sapien
tatcccaggatagaaatctgaacgcatccctga

SEQ ID NO: 147351 - DNA, 33 bp, Homo sapien
gatcgctcaggatggaagtcttctactcaagta

SEQ ID NO: 147352 - DNA, 33 bp, Homo sapien
gatcgctcaggatggacgtcttctactcaagta

SEQ ID NO: 147353 - DNA, 33 bp, Homo sapien
aattttttaatgaaacagatagttgagggctgg

SEQ ID NO: 147354 - DNA, 33 bp, Homo sapien
aattttttaatgaaacggatagttgagggctgg

SEQ ID NO: 147355 - DNA, 33 bp, Homo sapien
gatctggtgcggctcccatgagtgtcctattcc

SEQ ID NO: 147356 - DNA, 33 bp, Homo sapien
gatctggtgcggctcctatgagtgtcctattcc

SEQ ID NO: 147357 - DNA, 33 bp, Homo sapien
ttccacccactggtcacgttgcagccgggtgag

SEQ ID NO: 147358 - DNA, 33 bp, Homo sapien
ttccacccactggtcatgttgcagccgggtgag

SEQ ID NO: 147359 - DNA, 33 bp, Homo sapien
cacctggaacactcaaagggaacgtccttctgt

SEQ ID NO: 147360 - DNA, 33 bp, Homo sapien
cacctggaacactcaatgggaacgtccttctgt

SEQ ID NO: 147361 - DNA, 33 bp, Homo sapien
gtgctaccctcagacactacctctgcaggggac

SEQ ID NO: 147362 - DNA, 33 bp, Homo sapien
gtgctaccctcagacattacctctgcaggggac

SEQ ID NO: 147363 - DNA, 33 bp, Homo sapien
cgtctgaggtcagtgagcagggtttccaccacg

SEQ ID NO: 147364 - DNA, 33 bp, Homo sapien
cgtctgaggtcagtgatcagggtttccaccacg

SEQ ID NO: 147365 - DNA, 33 bp, Homo sapien
ccagtgccaggaggaacaaaatttgcttagaaa

SEQ ID NO: 147366 - DNA, 33 bp, Homo sapien
ccagtgccaggaggaagaaaatttgcttagaaa

SEQ ID NO: 147367 - DNA, 33 bp, Homo sapien
agagtggaatatggacaatggtaggtgtatgaa

SEQ ID NO: 147368 - DNA, 33 bp, Homo sapien
agagtggaatatggacgatggtaggtgtatgaa

SEQ ID NO: 147369 - DNA, 33 bp, Homo sapien
tctaattccagttttacgaggtccttagagtag

SEQ ID NO: 147370 - DNA, 33 bp, Homo sapien
tctaattccagttttatgaggtccttagagtag

SEQ ID NO: 147371 - DNA, 33 bp, Homo sapien
gtggaatggcctataaatgtcaattggatcaaa

SEQ ID NO: 147372 - DNA, 33 bp, Homo sapien
gtggaatggcctataattgtcaattggatcaaa

SEQ ID NO: 147373 - DNA, 33 bp, Homo sapien
ggagccccctttaaacccaggcagctgctggcc

SEQ ID NO: 147374 - DNA, 33 bp, Homo sapien
ggagccccctttaaactcaggcagctgctggcc

SEQ ID NO: 147375 - DNA, 33 bp, Homo sapien
ggccagggcagaaggaggtcaacttgtgcaatg

SEQ ID NO: 147376 - DNA, 33 bp, Homo sapien
ggccagggcagaaggatgtcaacttgtgcaatg

SEQ ID NO: 147377 - DNA, 33 bp, Homo sapien
gtgcgggaccttccacaacactctggtccttcc

SEQ ID NO: 147378 - DNA, 33 bp, Homo sapien
gtgcgggaccttccacgacactctggtccttcc

SEQ ID NO: 147379 - DNA, 33 bp, Homo sapien
cgcacgtcccttgtcaaaatgtccaaaaggtgc

SEQ ID NO: 147380 - DNA, 33 bp, Homo sapien
cgcacgtcccttgtcagaatgtccaaaaggtgc

SEQ ID NO: 147381 - DNA, 33 bp, Homo sapien
tgcaataatgaccgtgcagatggtcacccctcg

SEQ ID NO: 147382 - DNA, 33 bp, Homo sapien
tgcaataatgaccgtggagatggtcacccctcg

SEQ ID NO: 147383 - DNA, 33 bp, Homo sapien
tcgatttgaggcctggaaaggaggctctgggcg

SEQ ID NO: 147384 - DNA, 33 bp, Homo sapien
tcgatttgaggcctggtaaggaggctctgggcg

SEQ ID NO: 147385 - DNA, 33 bp, Homo sapien
cccgtcgaaatggtgaatatatttagaagactt

SEQ ID NO: 147386 - DNA, 33 bp, Homo sapien
cccgtcgaaatggtgagtatatttagaagactt

SEQ ID NO: 147387 - DNA, 33 bp, Homo sapien
cgggagaggcaacaaccgccctccatgtccccc

SEQ ID NO: 147388 - DNA, 33 bp, Homo sapien
cgggagaggcaacaacggccctccatgtccccc

SEQ ID NO: 147389 - DNA, 33 bp, Homo sapien
ggagactgaggagaaacgccgggagaggcaaca

SEQ ID NO: 147390 - DNA, 33 bp, Homo sapien
ggagactgaggagaaatgccgggagaggcaaca

SEQ ID NO: 147391 - DNA, 33 bp, Homo sapien
cagcatctcctgtttccctgccgcaggcgtgag

SEQ ID NO: 147392 - DNA, 33 bp, Homo sapien
cagcatctcctgtttctctgccgcaggcgtgag

SEQ ID NO: 147393 - DNA, 33 bp, Homo sapien
gcagcatgcagtaggcacttataaaggcctcgg

SEQ ID NO: 147394 - DNA, 33 bp, Homo sapien
gcagcatgcagtaggcgcttataaaggcctcgg

SEQ ID NO: 147395 - DNA, 33 bp, Homo sapien
tcatccatgcctggaacctgcatccacgtggca

SEQ ID NO: 147396 - DNA, 33 bp, Homo sapien
tcatccatgcctggaatctgcatccacgtggca

SEQ ID NO: 147397 - DNA, 33 bp, Homo sapien
catgactgaaagagggcataatgctaacagtca

SEQ ID NO: 147398 - DNA, 33 bp, Homo sapien
catgactgaaagagggtataatgctaacagtca

SEQ ID NO: 147399 - DNA, 33 bp, Homo sapien
atgttttcaggagaggaattcaaggtcctttgt

SEQ ID NO: 147400 - DNA, 33 bp, Homo sapien
atgttttcaggagagggattcaaggtcctttgt

SEQ ID NO: 147401 - DNA, 33 bp, Homo sapien
acaggccaggctgaaaattgtctaaatttgtat

SEQ ID NO: 147402 - DNA, 33 bp, Homo sapien
acaggccaggctgaaagttgtctaaatttgtat

SEQ ID NO: 147403 - DNA, 33 bp, Homo sapien
agatgggtaatcgagcagagatatgataatcct

SEQ ID NO: 147404 - DNA, 33 bp, Homo sapien
agatgggtaatcgagcggagatatgataatcct

SEQ ID NO: 147405 - DNA, 33 bp, Homo sapien
caataacttcatggtaataagatcatgatgtag

SEQ ID NO: 147406 - DNA, 33 bp, Homo sapien
caataacttcatggtattaagatcatgatgtag

SEQ ID NO: 147407 - DNA, 33 bp, Homo sapien
ggggcggtggctatcagtcagggccccaggcaa

SEQ ID NO: 147408 - DNA, 33 bp, Homo sapien
ggggcggtggctatcattcagggccccaggcaa

SEQ ID NO: 147409 - DNA, 33 bp, Homo sapien
tctggagggcataaaacccaacccataatgggc

SEQ ID NO: 147410 - DNA, 33 bp, Homo sapien
tctggagggcataaaatccaacccataatgggc

SEQ ID NO: 147411 - DNA, 33 bp, Homo sapien
ttactcagccctaaaaagagacgaagctggtga

SEQ ID NO: 147412 - DNA, 33 bp, Homo sapien
ttactcagccctaaaaggagacgaagctggtga

SEQ ID NO: 147413 - DNA, 33 bp, Homo sapien
agaaagccattgcctcacatgacagaccaggaa

SEQ ID NO: 147414 - DNA, 33 bp, Homo sapien
agaaagccattgcctcgcatgacagaccaggaa

SEQ ID NO: 147415 - DNA, 33 bp, Homo sapien
atttgtacttaagtcaactttcaccctttctgg

SEQ ID NO: 147416 - DNA, 33 bp, Homo sapien
atttgtacttaagtcacctttcaccctttctgg

SEQ ID NO: 147417 - DNA, 33 bp, Homo sapien
tgtcctgagtatatggccactttctgcatgatc

SEQ ID NO: 147418 - DNA, 33 bp, Homo sapien
tgtcctgagtatatggtcactttctgcatgatc

SEQ ID NO: 147419 - DNA, 33 bp, Homo sapien
tgcagaaaagcttcataaatagtacaaaggatt

SEQ ID NO: 147420 - DNA, 33 bp, Homo sapien
tgcagaaaagcttcattaatagtacaaaggatt

SEQ ID NO: 147421 - DNA, 33 bp, Homo sapien
aatcaacaatgtggcaaatctctaagaatacta

SEQ ID NO: 147422 - DNA, 33 bp, Homo sapien
aatcaacaatgtggcacatctctaagaatacta

SEQ ID NO: 147423 - DNA, 33 bp, Homo sapien
gagaggtgcgacctgacagccattctggacact

SEQ ID NO: 147424 - DNA, 33 bp, Homo sapien
gagaggtgcgacctgagagccattctggacact

SEQ ID NO: 147425 - DNA, 33 bp, Homo sapien
attcggcattctcacactgctgctcaaggaatt

SEQ ID NO: 147426 - DNA, 33 bp, Homo sapien
attcggcattctcacagtgctgctcaaggaatt

SEQ ID NO: 147427 - DNA, 33 bp, Homo sapien
ggtcccaggtgcgcccactcactctacaatgtc

SEQ ID NO: 147428 - DNA, 33 bp, Homo sapien
ggtcccaggtgcgcccgctcactctacaatgtc

SEQ ID NO: 147429 - DNA, 33 bp, Homo sapien
cagaccacgttgatgacgaattagctctaatgg

SEQ ID NO: 147430 - DNA, 33 bp, Homo sapien
cagaccacgttgatgatgaattagctctaatgg

SEQ ID NO: 147431 - DNA, 33 bp, Homo sapien
ctgcagtgaagtcctacaggatatggccctgct

SEQ ID NO: 147432 - DNA, 33 bp, Homo sapien
ctgcagtgaagtcctataggatatggccctgct

SEQ ID NO: 147433 - DNA, 33 bp, Homo sapien
agtgcggaggggacagaatcatttaggagcaca

SEQ ID NO: 147434 - DNA, 33 bp, Homo sapien
agtgcggaggggacaggatcatttaggagcaca

SEQ ID NO: 147435 - DNA, 33 bp, Homo sapien
gataaggagattagtacgggtagaaggaggtca

SEQ ID NO: 147436 - DNA, 33 bp, Homo sapien
gataaggagattagtatgggtagaaggaggtca

SEQ ID NO: 147437 - DNA, 33 bp, Homo sapien
ggaatggctgcttaaggagagtaaagctaggac

SEQ ID NO: 147438 - DNA, 33 bp, Homo sapien
ggaatggctgcttaagtagagtaaagctaggac

SEQ ID NO: 147439 - DNA, 33 bp, Homo sapien
acaacccaaatgcgtaagggataaatacatctg

SEQ ID NO: 147440 - DNA, 33 bp, Homo sapien
acaacccaaatgcgtacgggataaatacatctg

SEQ ID NO: 147441 - DNA, 33 bp, Homo sapien
gaagagcttggtatcacgtgttcattcccaaca

SEQ ID NO: 147442 - DNA, 33 bp, Homo sapien
gaagagcttggtatcatgtgttcattcccaaca

SEQ ID NO: 147443 - DNA, 33 bp, Homo sapien
catgctgttccctccaatctaggctgccagtcc

SEQ ID NO: 147444 - DNA, 33 bp, Homo sapien
catgctgttccctccactctaggctgccagtcc

SEQ ID NO: 147445 - DNA, 33 bp, Homo sapien
tgacagagtccacctgaatatttgtcctggagc

SEQ ID NO: 147446 - DNA, 33 bp, Homo sapien
tgacagagtccacctggatatttgtcctggagc

SEQ ID NO: 147447 - DNA, 33 bp, Homo sapien
ggacttactaagaaaacgctagtgtgtaaataa

SEQ ID NO: 147448 - DNA, 33 bp, Homo sapien
ggacttactaagaaaatgctagtgtgtaaataa

SEQ ID NO: 147449 - DNA, 33 bp, Homo sapien
ggaccccggtcagggacggctcacgctctcctg

SEQ ID NO: 147450 - DNA, 33 bp, Homo sapien
ggaccccggtcagggatggctcacgctctcctg

SEQ ID NO: 147451 - DNA, 33 bp, Homo sapien
ttaaggtagttcaaaggcctcctgcccgaggaa

SEQ ID NO: 147452 - DNA, 33 bp, Homo sapien
ttaaggtagttcaaagtcctcctgcccgaggaa

SEQ ID NO: 147453 - DNA, 33 bp, Homo sapien
catttttaacacactacgggtttagtctgccat

SEQ ID NO: 147454 - DNA, 33 bp, Homo sapien
catttttaacacactatgggtttagtctgccat

SEQ ID NO: 147455 - DNA, 33 bp, Homo sapien
aatgttaatcagagaacgtgcagaaatttttaa

SEQ ID NO: 147456 - DNA, 33 bp, Homo sapien
aatgttaatcagagaatgtgcagaaatttttaa

SEQ ID NO: 147457 - DNA, 33 bp, Homo sapien
aggagctcaaacaaccacacaaggaaaacatct

SEQ ID NO: 147458 - DNA, 33 bp, Homo sapien
aggagctcaaacaaccgcacaaggaaaacatct

SEQ ID NO: 147459 - DNA, 33 bp, Homo sapien
gaggcataaatgtttacaatggttatctgtaac

SEQ ID NO: 147460 - DNA, 33 bp, Homo sapien
gaggcataaatgtttataatggttatctgtaac

SEQ ID NO: 147461 - DNA, 33 bp, Homo sapien
taaacgtaggagtgcgcatctgtccctgctgga

SEQ ID NO: 147462 - DNA, 33 bp, Homo sapien
taaacgtaggagtgcggatctgtccctgctgga

SEQ ID NO: 147463 - DNA, 33 bp, Homo sapien
gatgatttcttgaatacgacattgaaggcacag

SEQ ID NO: 147464 - DNA, 33 bp, Homo sapien
gatgatttcttgaatatgacattgaaggcacag

SEQ ID NO: 147465 - DNA, 33 bp, Homo sapien
atggacctggcaaaaaatggtgtgacagcacgc

SEQ ID NO: 147466 - DNA, 33 bp, Homo sapien
atggacctggcaaaaagtggtgtgacagcacgc

SEQ ID NO: 147467 - DNA, 33 bp, Homo sapien
gcaaagtcaaagacaaatgaccagctgggaaaa

SEQ ID NO: 147468 - DNA, 33 bp, Homo sapien
gcaaagtcaaagacaagtgaccagctgggaaaa

SEQ ID NO: 147469 - DNA, 33 bp, Homo sapien
ctgtggccctgaatccagagtcagtagaaagaa

SEQ ID NO: 147470 - DNA, 33 bp, Homo sapien
ctgtggccctgaatccggagtcagtagaaagaa

SEQ ID NO: 147471 - DNA, 33 bp, Homo sapien
cagtcacagaggcaaacgaagaatgtagagctc

SEQ ID NO: 147472 - DNA, 33 bp, Homo sapien
cagtcacagaggcaaatgaagaatgtagagctc

SEQ ID NO: 147473 - DNA, 33 bp, Homo sapien
acaaatcttgcacgccaagcccgacagcgcagc

SEQ ID NO: 147474 - DNA, 33 bp, Homo sapien
acaaatcttgcacgccgagcccgacagcgcagc

SEQ ID NO: 147475 - DNA, 33 bp, Homo sapien
tggtcccggtactaaaatcaatttcatgatgtc

SEQ ID NO: 147476 - DNA, 33 bp, Homo sapien
tggtcccggtactaaagtcaatttcatgatgtc

SEQ ID NO: 147477 - DNA, 33 bp, Homo sapien
cctgcaatctacataacgaaaccataaaatgct

SEQ ID NO: 147478 - DNA, 33 bp, Homo sapien
cctgcaatctacataatgaaaccataaaatgct

SEQ ID NO: 147479 - DNA, 33 bp, Homo sapien
gggatttgagggtccaactgtcactcagtcatg

SEQ ID NO: 147480 - DNA, 33 bp, Homo sapien
gggatttgagggtccagctgtcactcagtcatg

SEQ ID NO: 147481 - DNA, 33 bp, Homo sapien
cactcaccatttcttacccgcgaagtagtcagt

SEQ ID NO: 147482 - DNA, 33 bp, Homo sapien
cactcaccatttcttatccgcgaagtagtcagt

SEQ ID NO: 147483 - DNA, 33 bp, Homo sapien
gtgcaggagagggggaacttttcgtgatcgcca

SEQ ID NO: 147484 - DNA, 33 bp, Homo sapien
gtgcaggagagggggagcttttcgtgatcgcca

SEQ ID NO: 147485 - DNA, 33 bp, Homo sapien
tttcagcagccttagaagcatttttactatttt

SEQ ID NO: 147486 - DNA, 33 bp, Homo sapien
tttcagcagccttagaggcatttttactatttt

SEQ ID NO: 147487 - DNA, 33 bp, Homo sapien
agcttaagcaaaaacaatctgcttcaggttaat

SEQ ID NO: 147488 - DNA, 33 bp, Homo sapien
agcttaagcaaaaacagtctgcttcaggttaat

SEQ ID NO: 147489 - DNA, 33 bp, Homo sapien
aagaatcaatgaacttcaacgcagatccataaa

SEQ ID NO: 147490 - DNA, 33 bp, Homo sapien
aagaatcaatgaacttgaacgcagatccataaa

SEQ ID NO: 147491 - DNA, 33 bp, Homo sapien
cactccacccaactacacattcttctcaagtgc

SEQ ID NO: 147492 - DNA, 33 bp, Homo sapien
cactccacccaactacgcattcttctcaagtgc

SEQ ID NO: 147493 - DNA, 33 bp, Homo sapien
tataccatgcaacatacagacctgtacatatac

SEQ ID NO: 147494 - DNA, 33 bp, Homo sapien
tataccatgcaacatatagacctgtacatatac

SEQ ID NO: 147495 - DNA, 33 bp, Homo sapien
acttcgcaattggaaacgtatacacaccaaaat

SEQ ID NO: 147496 - DNA, 33 bp, Homo sapien
acttcgcaattggaaatgtatacacaccaaaat

SEQ ID NO: 147497 - DNA, 33 bp, Homo sapien
agacccatctctagtaccagctacgtgggaggt

SEQ ID NO: 147498 - DNA, 33 bp, Homo sapien
agacccatctctagtatcagctacgtgggaggt

SEQ ID NO: 147499 - DNA, 33 bp, Homo sapien
acacatggcaactatggaaggtatatgttaatt

SEQ ID NO: 147500 - DNA, 33 bp, Homo sapien
acacatggcaactatgtaaggtatatgttaatt

SEQ ID NO: 147501 - DNA, 33 bp, Homo sapien
gaactggcacatttccacgatgttgtgatgaag

SEQ ID NO: 147502 - DNA, 33 bp, Homo sapien
gaactggcacatttccgcgatgttgtgatgaag

SEQ ID NO: 147503 - DNA, 33 bp, Homo sapien
tggaggtctttggatgaagaaaacaaaaaagtg

SEQ ID NO: 147504 - DNA, 33 bp, Homo sapien
tggaggtctttggatggagaaaacaaaaaagtg

SEQ ID NO: 147505 - DNA, 33 bp, Homo sapien
ccaggagaagggctcacagtgaaagggctctgt

SEQ ID NO: 147506 - DNA, 33 bp, Homo sapien
ccaggagaagggctcagagtgaaagggctctgt

SEQ ID NO: 147507 - DNA, 33 bp, Homo sapien
tcttgacaagcccctcactcatccttctggaca

SEQ ID NO: 147508 - DNA, 33 bp, Homo sapien
tcttgacaagcccctcgctcatccttctggaca

SEQ ID NO: 147509 - DNA, 33 bp, Homo sapien
ctggaagaaatgtgtacggcatgttgtgactgc

SEQ ID NO: 147510 - DNA, 33 bp, Homo sapien
ctggaagaaatgtgtatggcatgttgtgactgc

SEQ ID NO: 147511 - DNA, 33 bp, Homo sapien
tcagggcatcttggaaaaactgaatttgctaac

SEQ ID NO: 147512 - DNA, 33 bp, Homo sapien
tcagggcatcttggaagaactgaatttgctaac

SEQ ID NO: 147513 - DNA, 33 bp, Homo sapien
tagcagtggtgtcttccagattctcaaggatcc

SEQ ID NO: 147514 - DNA, 33 bp, Homo sapien
tagcagtggtgtcttctagattctcaaggatcc

SEQ ID NO: 147515 - DNA, 33 bp, Homo sapien
gcctgggagtaccagaagttggagcaggtggga

SEQ ID NO: 147516 - DNA, 33 bp, Homo sapien
gcctgggagtaccagaggttggagcaggtggga

SEQ ID NO: 147517 - DNA, 33 bp, Homo sapien
gaggctataggtgttaaatgtggcaggatgcaa

SEQ ID NO: 147518 - DNA, 33 bp, Homo sapien
gaggctataggtgttagatgtggcaggatgcaa

SEQ ID NO: 147519 - DNA, 33 bp, Homo sapien
caaccacttccttagaacagctcttgggactgg

SEQ ID NO: 147520 - DNA, 33 bp, Homo sapien
caaccacttccttagaccagctcttgggactgg

SEQ ID NO: 147521 - DNA, 33 bp, Homo sapien
tcagttatcagagaaaagtaaatgaaagcaaca

SEQ ID NO: 147522 - DNA, 33 bp, Homo sapien
tcagttatcagagaaatgtaaatgaaagcaaca

SEQ ID NO: 147523 - DNA, 33 bp, Homo sapien
atcatggcaagggtcaagactgttttcataata

SEQ ID NO: 147524 - DNA, 33 bp, Homo sapien
atcatggcaagggtcaggactgttttcataata

SEQ ID NO: 147525 - DNA, 33 bp, Homo sapien
cgacatccttggagaaaacaacaacaaaggctg

SEQ ID NO: 147526 - DNA, 33 bp, Homo sapien
cgacatccttggagaacacaacaacaaaggctg

SEQ ID NO: 147527 - DNA, 33 bp, Homo sapien
ttggcactgccttgcccaaaacctcctagagac

SEQ ID NO: 147528 - DNA, 33 bp, Homo sapien
ttggcactgccttgccgaaaacctcctagagac

SEQ ID NO: 147529 - DNA, 33 bp, Homo sapien
caggaacatttgggtacgagtttttattgtgga

SEQ ID NO: 147530 - DNA, 33 bp, Homo sapien
caggaacatttgggtatgagtttttattgtgga

SEQ ID NO: 147531 - DNA, 33 bp, Homo sapien
atcgtcgtcatctttcaaatggtggcatccctt

SEQ ID NO: 147532 - DNA, 33 bp, Homo sapien
atcgtcgtcatctttccaatggtggcatccctt

SEQ ID NO: 147533 - DNA, 33 bp, Homo sapien
gggagctgatgagagcaatgccgtagccagggt

SEQ ID NO: 147534 - DNA, 33 bp, Homo sapien
gggagctgatgagagcgatgccgtagccagggt

SEQ ID NO: 147535 - DNA, 33 bp, Homo sapien
gctgctccttcctgaaatctggcttatgtctgt

SEQ ID NO: 147536 - DNA, 33 bp, Homo sapien
gctgctccttcctgaagtctggcttatgtctgt

SEQ ID NO: 147537 - DNA, 33 bp, Homo sapien
attccacaacggtgtcaatgtacaacaccaagc

SEQ ID NO: 147538 - DNA, 33 bp, Homo sapien
attccacaacggtgtcgatgtacaacaccaagc

SEQ ID NO: 147539 - DNA, 33 bp, Homo sapien
ggtgcccacacctatacaatgggggtaataaag

SEQ ID NO: 147540 - DNA, 33 bp, Homo sapien
ggtgcccacacctatataatgggggtaataaag

SEQ ID NO: 147541 - DNA, 33 bp, Homo sapien
caatacaaaactgatacgaaattccaaagggat

SEQ ID NO: 147542 - DNA, 33 bp, Homo sapien
caatacaaaactgatatgaaattccaaagggat

SEQ ID NO: 147543 - DNA, 33 bp, Homo sapien
ggcagcctctggtccaactggcctggtgcccag

SEQ ID NO: 147544 - DNA, 33 bp, Homo sapien
ggcagcctctggtccatctggcctggtgcccag

SEQ ID NO: 147545 - DNA, 33 bp, Homo sapien
gagtaatgttgttctacgaaatgtccttttttg

SEQ ID NO: 147546 - DNA, 33 bp, Homo sapien
gagtaatgttgttctatgaaatgtccttttttg

SEQ ID NO: 147547 - DNA, 33 bp, Homo sapien
gcaactcaagtcaacactacacaacacaactcc

SEQ ID NO: 147548 - DNA, 33 bp, Homo sapien
gcaactcaagtcaacagtacacaacacaactcc

SEQ ID NO: 147549 - DNA, 33 bp, Homo sapien
gttgcatgactctgaacataccaaaagccactg

SEQ ID NO: 147550 - DNA, 33 bp, Homo sapien
gttgcatgactctgaatataccaaaagccactg

SEQ ID NO: 147551 - DNA, 33 bp, Homo sapien
ctgtcttgtccactggcataatgggctaattgt

SEQ ID NO: 147552 - DNA, 33 bp, Homo sapien
ctgtcttgtccactgggataatgggctaattgt

SEQ ID NO: 147553 - DNA, 33 bp, Homo sapien
tgttaaaagcaaacctcaaaactcttactggat

SEQ ID NO: 147554 - DNA, 33 bp, Homo sapien
tgttaaaagcaaaccttaaaactcttactggat

SEQ ID NO: 147555 - DNA, 33 bp, Homo sapien
caatgtttttctttcacagtcaatgcttttgtg

SEQ ID NO: 147556 - DNA, 33 bp, Homo sapien
caatgtttttctttcatagtcaatgcttttgtg

SEQ ID NO: 147557 - DNA, 33 bp, Homo sapien
gggttggacctctgaccgacagaagtgaaagag

SEQ ID NO: 147558 - DNA, 33 bp, Homo sapien
gggttggacctctgactgacagaagtgaaagag

SEQ ID NO: 147559 - DNA, 33 bp, Homo sapien
ctctctgaccacagccaggaaagagcctccact

SEQ ID NO: 147560 - DNA, 33 bp, Homo sapien
ctctctgaccacagccgggaaagagcctccact

SEQ ID NO: 147561 - DNA, 33 bp, Homo sapien
ccgcttaggttgtaccaatagtgggttcctttc

SEQ ID NO: 147562 - DNA, 33 bp, Homo sapien
ccgcttaggttgtaccgatagtgggttcctttc

SEQ ID NO: 147563 - DNA, 33 bp, Homo sapien
atcccgtgcctataaaaatctcgagaccttagt

SEQ ID NO: 147564 - DNA, 33 bp, Homo sapien
atcccgtgcctataaagatctcgagaccttagt

SEQ ID NO: 147565 - DNA, 33 bp, Homo sapien
acccaaaccctaagcacacatcatacttaatag

SEQ ID NO: 147566 - DNA, 33 bp, Homo sapien
acccaaaccctaagcagacatcatacttaatag

SEQ ID NO: 147567 - DNA, 33 bp, Homo sapien
taagtcagaaaaaatacaatcaacacaacagat

SEQ ID NO: 147568 - DNA, 33 bp, Homo sapien
taagtcagaaaaaatagaatcaacacaacagat

SEQ ID NO: 147569 - DNA, 33 bp, Homo sapien
cctgtgctggtcatcccctcactgcccctgcac

SEQ ID NO: 147570 - DNA, 33 bp, Homo sapien
cctgtgctggtcatcctctcactgcccctgcac

SEQ ID NO: 147571 - DNA, 33 bp, Homo sapien
caggtaagccctgtgccgagccttcctgccctc

SEQ ID NO: 147572 - DNA, 33 bp, Homo sapien
caggtaagccctgtgctgagccttcctgccctc

SEQ ID NO: 147573 - DNA, 33 bp, Homo sapien
tcatcttcattctcaacggtaacagtggaagcc

SEQ ID NO: 147574 - DNA, 33 bp, Homo sapien
tcatcttcattctcaatggtaacagtggaagcc

SEQ ID NO: 147575 - DNA, 33 bp, Homo sapien
gagtcggcaggctgcacggggggttccagtcac

SEQ ID NO: 147576 - DNA, 33 bp, Homo sapien
gagtcggcaggctgcatggggggttccagtcac

SEQ ID NO: 147577 - DNA, 33 bp, Homo sapien
gctgggcctcttgccactaagccttggggtctg

SEQ ID NO: 147578 - DNA, 33 bp, Homo sapien
gctgggcctcttgccagtaagccttggggtctg

SEQ ID NO: 147579 - DNA, 33 bp, Homo sapien
gccttcgactccccgagaccttccgctgcagtt

SEQ ID NO: 147580 - DNA, 33 bp, Homo sapien
gccttcgactccccgataccttccgctgcagtt

SEQ ID NO: 147581 - DNA, 33 bp, Homo sapien
caccacagtcagatacaatgctgacagggacgg

SEQ ID NO: 147582 - DNA, 33 bp, Homo sapien
caccacagtcagatacgatgctgacagggacgg

SEQ ID NO: 147583 - DNA, 33 bp, Homo sapien
ccagagctcaaggactaaagtttccaaagagcc

SEQ ID NO: 147584 - DNA, 33 bp, Homo sapien
ccagagctcaaggactgaagtttccaaagagcc

SEQ ID NO: 147585 - DNA, 33 bp, Homo sapien
tggtcaggctgctgaaagtgagaccacactcac

SEQ ID NO: 147586 - DNA, 33 bp, Homo sapien
tggtcaggctgctgaacgtgagaccacactcac

SEQ ID NO: 147587 - DNA, 33 bp, Homo sapien
gccgtgaggagcttgcaccgttaacccttgaaa

SEQ ID NO: 147588 - DNA, 33 bp, Homo sapien
gccgtgaggagcttgcgccgttaacccttgaaa

SEQ ID NO: 147589 - DNA, 33 bp, Homo sapien
ccatgtttggaaaatcacctgttacttctttga

SEQ ID NO: 147590 - DNA, 33 bp, Homo sapien
ccatgtttggaaaatcgcctgttacttctttga

SEQ ID NO: 147591 - DNA, 33 bp, Homo sapien
tcccttatctttccaacacagttaaattagaat

SEQ ID NO: 147592 - DNA, 33 bp, Homo sapien
tcccttatctttccaatacagttaaattagaat

SEQ ID NO: 147593 - DNA, 33 bp, Homo sapien
catggtgacgtttcagcccggaggtagaagttt

SEQ ID NO: 147594 - DNA, 33 bp, Homo sapien
catggtgacgtttcaggccggaggtagaagttt

SEQ ID NO: 147595 - DNA, 33 bp, Homo sapien
tcctcagtctgtcccacgttgccaccatttttc

SEQ ID NO: 147596 - DNA, 33 bp, Homo sapien
tcctcagtctgtcccaggttgccaccatttttc

SEQ ID NO: 147597 - DNA, 33 bp, Homo sapien
gaaatcaatcccaggcaattcaaagatttaggg

SEQ ID NO: 147598 - DNA, 33 bp, Homo sapien
gaaatcaatcccaggcgattcaaagatttaggg

SEQ ID NO: 147599 - DNA, 33 bp, Homo sapien
agggtagagttggcgcggcacaaatgtttgttg

SEQ ID NO: 147600 - DNA, 33 bp, Homo sapien
agggtagagttggcgctgcacaaatgtttgttg

SEQ ID NO: 147601 - DNA, 33 bp, Homo sapien
ataatcaaaatcacaccgtgaaactcattaaaa

SEQ ID NO: 147602 - DNA, 33 bp, Homo sapien
ataatcaaaatcacactgtgaaactcattaaaa

SEQ ID NO: 147603 - DNA, 33 bp, Homo sapien
tcccagccgccttgggaattttttcaaagtata

SEQ ID NO: 147604 - DNA, 33 bp, Homo sapien
tcccagccgccttgggcattttttcaaagtata

SEQ ID NO: 147605 - DNA, 33 bp, Homo sapien
ttccttgagtgcttgaacgaagcttgcccatgg

SEQ ID NO: 147606 - DNA, 33 bp, Homo sapien
ttccttgagtgcttgagcgaagcttgcccatgg

SEQ ID NO: 147607 - DNA, 33 bp, Homo sapien
cccgtggtcttagccacgcggacttacatttgg

SEQ ID NO: 147608 - DNA, 33 bp, Homo sapien
cccgtggtcttagccatgcggacttacatttgg

SEQ ID NO: 147609 - DNA, 33 bp, Homo sapien
gatcccctggctccgacacattcacccttctcc

SEQ ID NO: 147610 - DNA, 33 bp, Homo sapien
gatcccctggctccgatacattcacccttctcc

SEQ ID NO: 147611 - DNA, 33 bp, Homo sapien
cacaattttcatcttaagaaaacaaagagaagc

SEQ ID NO: 147612 - DNA, 33 bp, Homo sapien
cacaattttcatcttaggaaaacaaagagaagc

SEQ ID NO: 147613 - DNA, 33 bp, Homo sapien
ggatgaagagagagaacctttgtttacaatttt

SEQ ID NO: 147614 - DNA, 33 bp, Homo sapien
ggatgaagagagagaatctttgtttacaatttt

SEQ ID NO: 147615 - DNA, 33 bp, Homo sapien
aatgactcactgcctacgagcacttgagttctt

SEQ ID NO: 147616 - DNA, 33 bp, Homo sapien
aatgactcactgcctatgagcacttgagttctt

SEQ ID NO: 147617 - DNA, 33 bp, Homo sapien
gatgcaagctaccaccaggcggtcagctttgcc

SEQ ID NO: 147618 - DNA, 33 bp, Homo sapien
gatgcaagctaccaccgggcggtcagctttgcc

SEQ ID NO: 147619 - DNA, 33 bp, Homo sapien
ggttaagataggcccaaagccatttcaaatgtc

SEQ ID NO: 147620 - DNA, 33 bp, Homo sapien
ggttaagataggcccagagccatttcaaatgtc

SEQ ID NO: 147621 - DNA, 33 bp, Homo sapien
aagccattccaagtcaccgtgggagtggttcag

SEQ ID NO: 147622 - DNA, 33 bp, Homo sapien
aagccattccaagtcatcgtgggagtggttcag

SEQ ID NO: 147623 - DNA, 33 bp, Homo sapien
atttttacactctgcaatatttcaggttctgac

SEQ ID NO: 147624 - DNA, 33 bp, Homo sapien
atttttacactctgcagtatttcaggttctgac

SEQ ID NO: 147625 - DNA, 33 bp, Homo sapien
agccagctggtaaagcaagtccttctcagatgg

SEQ ID NO: 147626 - DNA, 33 bp, Homo sapien
agccagctggtaaagcgagtccttctcagatgg

SEQ ID NO: 147627 - DNA, 33 bp, Homo sapien
tatatcacaccctagccactaaggtcatgttca

SEQ ID NO: 147628 - DNA, 33 bp, Homo sapien
tatatcacaccctagcgactaaggtcatgttca

SEQ ID NO: 147629 - DNA, 33 bp, Homo sapien
acatttaagggatggccgaaaaaatatgtgtaa

SEQ ID NO: 147630 - DNA, 33 bp, Homo sapien
acatttaagggatggctgaaaaaatatgtgtaa

SEQ ID NO: 147631 - DNA, 33 bp, Homo sapien
cacgatgtctagagaacccactactttcattaa

SEQ ID NO: 147632 - DNA, 33 bp, Homo sapien
cacgatgtctagagaatccactactttcattaa

SEQ ID NO: 147633 - DNA, 33 bp, Homo sapien
tccaagttctgcactacgagcattcccaaactg

SEQ ID NO: 147634 - DNA, 33 bp, Homo sapien
tccaagttctgcactatgagcattcccaaactg

SEQ ID NO: 147635 - DNA, 33 bp, Homo sapien
atgcatgcaaacttcaaagacacttgggaaaag

SEQ ID NO: 147636 - DNA, 33 bp, Homo sapien
atgcatgcaaacttcagagacacttgggaaaag

SEQ ID NO: 147637 - DNA, 33 bp, Homo sapien
tgctgcttctctatgacagggagttggtgaata

SEQ ID NO: 147638 - DNA, 33 bp, Homo sapien
tgctgcttctctatgatagggagttggtgaata

SEQ ID NO: 147639 - DNA, 33 bp, Homo sapien
taatcttacaggaccgccatcctatatgcagtc

SEQ ID NO: 147640 - DNA, 33 bp, Homo sapien
taatcttacaggaccgtcatcctatatgcagtc

SEQ ID NO: 147641 - DNA, 33 bp, Homo sapien
aactcacaatacacacagtcacttctttatttt

SEQ ID NO: 147642 - DNA, 33 bp, Homo sapien
aactcacaatacacacggtcacttctttatttt

SEQ ID NO: 147643 - DNA, 33 bp, Homo sapien
ctaaatacatacaccaatgacttcttaaacatg

SEQ ID NO: 147644 - DNA, 33 bp, Homo sapien
ctaaatacatacaccagtgacttcttaaacatg

SEQ ID NO: 147645 - DNA, 33 bp, Homo sapien
tggcttctggacaccaacatgggacttgggggt

SEQ ID NO: 147646 - DNA, 33 bp, Homo sapien
tggcttctggacaccaccatgggacttgggggt

SEQ ID NO: 147647 - DNA, 33 bp, Homo sapien
ttgcttagagccagtacatacccgagtattctc

SEQ ID NO: 147648 - DNA, 33 bp, Homo sapien
ttgcttagagccagtatatacccgagtattctc

SEQ ID NO: 147649 - DNA, 33 bp, Homo sapien
gactatcctcagtttacacgaaaagaagctgag

SEQ ID NO: 147650 - DNA, 33 bp, Homo sapien
gactatcctcagtttatacgaaaagaagctgag

SEQ ID NO: 147651 - DNA, 33 bp, Homo sapien
aactctgacaggttaggaagttttcatttcagt

SEQ ID NO: 147652 - DNA, 33 bp, Homo sapien
aactctgacaggttagtaagttttcatttcagt

SEQ ID NO: 147653 - DNA, 33 bp, Homo sapien
ccacactgctctggagccagcacactcatctgg

SEQ ID NO: 147654 - DNA, 33 bp, Homo sapien
ccacactgctctggagtcagcacactcatctgg

SEQ ID NO: 147655 - DNA, 33 bp, Homo sapien
atgctccacagacagacgaaaaagaaactgttt

SEQ ID NO: 147656 - DNA, 33 bp, Homo sapien
atgctccacagacagatgaaaaagaaactgttt

SEQ ID NO: 147657 - DNA, 33 bp, Homo sapien
cactcagctgcactcactcgaggattctgccct

SEQ ID NO: 147658 - DNA, 33 bp, Homo sapien
cactcagctgcactcagtcgaggattctgccct

SEQ ID NO: 147659 - DNA, 33 bp, Homo sapien
ctctcagcgaacaaaaactcttctttccacagc

SEQ ID NO: 147660 - DNA, 33 bp, Homo sapien
ctctcagcgaacaaaagctcttctttccacagc

SEQ ID NO: 147661 - DNA, 33 bp, Homo sapien
ttctacagcagaaggacaggactgacagtgtgt

SEQ ID NO: 147662 - DNA, 33 bp, Homo sapien
ttctacagcagaaggataggactgacagtgtgt

SEQ ID NO: 147663 - DNA, 33 bp, Homo sapien
tgccacgtgccttccccagtggtctgcatggcc

SEQ ID NO: 147664 - DNA, 33 bp, Homo sapien
tgccacgtgccttcccgagtggtctgcatggcc

SEQ ID NO: 147665 - DNA, 33 bp, Homo sapien
aataaaaaagataccaacactgacaggacggac

SEQ ID NO: 147666 - DNA, 33 bp, Homo sapien
aataaaaaagataccagcactgacaggacggac

SEQ ID NO: 147667 - DNA, 33 bp, Homo sapien
ccaggttgacacataaatatcagacccatggca

SEQ ID NO: 147668 - DNA, 33 bp, Homo sapien
ccaggttgacacataagtatcagacccatggca

SEQ ID NO: 147669 - DNA, 33 bp, Homo sapien
taagctaaactgctaaatgagacaaagaaaaac

SEQ ID NO: 147670 - DNA, 33 bp, Homo sapien
taagctaaactgctaagtgagacaaagaaaaac

SEQ ID NO: 147671 - DNA, 33 bp, Homo sapien
tgagatttgaggaatcaagactgaatttcttct

SEQ ID NO: 147672 - DNA, 33 bp, Homo sapien
tgagatttgaggaatcgagactgaatttcttct

SEQ ID NO: 147673 - DNA, 33 bp, Homo sapien
cccaggagtatctcccacaaataaccacaggca

SEQ ID NO: 147674 - DNA, 33 bp, Homo sapien
cccaggagtatctcccgcaaataaccacaggca

SEQ ID NO: 147675 - DNA, 33 bp, Homo sapien
agttttccaggacctcactttggggtgcttgga

SEQ ID NO: 147676 - DNA, 33 bp, Homo sapien
agttttccaggacctcgctttggggtgcttgga

SEQ ID NO: 147677 - DNA, 33 bp, Homo sapien
agactgcttcctcagcactcaaaagccactgca

SEQ ID NO: 147678 - DNA, 33 bp, Homo sapien
agactgcttcctcagcgctcaaaagccactgca

SEQ ID NO: 147679 - DNA, 33 bp, Homo sapien
tatgcaccttcaagaccgcaaaggaaaagctgt

SEQ ID NO: 147680 - DNA, 33 bp, Homo sapien
tatgcaccttcaagactgcaaaggaaaagctgt

SEQ ID NO: 147681 - DNA, 33 bp, Homo sapien
gctgtacacccagtgaaatcaggaaagagaaat

SEQ ID NO: 147682 - DNA, 33 bp, Homo sapien
gctgtacacccagtgagatcaggaaagagaaat

SEQ ID NO: 147683 - DNA, 33 bp, Homo sapien
cttaaacacctattacaggacgctcagtcttta

SEQ ID NO: 147684 - DNA, 33 bp, Homo sapien
cttaaacacctattaccggacgctcagtcttta

SEQ ID NO: 147685 - DNA, 33 bp, Homo sapien
tgatggggggagaaaaacggccagcaaaaggaa

SEQ ID NO: 147686 - DNA, 33 bp, Homo sapien
tgatggggggagaaaagcggccagcaaaaggaa

SEQ ID NO: 147687 - DNA, 33 bp, Homo sapien
tgccttgtcttccccccacggtacccagcatgg

SEQ ID NO: 147688 - DNA, 33 bp, Homo sapien
tgccttgtcttccccctacggtacccagcatgg

SEQ ID NO: 147689 - DNA, 33 bp, Homo sapien
ctgctgcactgatggaccttaaagcccccaggt

SEQ ID NO: 147690 - DNA, 33 bp, Homo sapien
ctgctgcactgatggatcttaaagcccccaggt

SEQ ID NO: 147691 - DNA, 33 bp, Homo sapien
agtgctctgatgctgacagccacccaggcttcc

SEQ ID NO: 147692 - DNA, 33 bp, Homo sapien
agtgctctgatgctgatagccacccaggcttcc

SEQ ID NO: 147693 - DNA, 33 bp, Homo sapien
acacatgcgacgacacagatgagccgcagagat

SEQ ID NO: 147694 - DNA, 33 bp, Homo sapien
acacatgcgacgacacggatgagccgcagagat

SEQ ID NO: 147695 - DNA, 33 bp, Homo sapien
gcctgtcacttccacccgcgttgggttttttgt

SEQ ID NO: 147696 - DNA, 33 bp, Homo sapien
gcctgtcacttccacctgcgttgggttttttgt

SEQ ID NO: 147697 - DNA, 33 bp, Homo sapien
cagaccagcagggccaacgaggcatttacagcc

SEQ ID NO: 147698 - DNA, 33 bp, Homo sapien
cagaccagcagggccagcgaggcatttacagcc

SEQ ID NO: 147699 - DNA, 33 bp, Homo sapien
tttctttttggattaacgccaggacagtgtgtt

SEQ ID NO: 147700 - DNA, 33 bp, Homo sapien
tttctttttggattaatgccaggacagtgtgtt

SEQ ID NO: 147701 - DNA, 33 bp, Homo sapien
ttgctcacttttctaacaatcttactcatctgg

SEQ ID NO: 147702 - DNA, 33 bp, Homo sapien
ttgctcacttttctaataatcttactcatctgg

SEQ ID NO: 147703 - DNA, 33 bp, Homo sapien
actgagtgattggaaacctttctcgtccttcct

SEQ ID NO: 147704 - DNA, 33 bp, Homo sapien
actgagtgattggaaatctttctcgtccttcct

SEQ ID NO: 147705 - DNA, 33 bp, Homo sapien
tctgtctgtatagcaaaaataaagaccatcaca

SEQ ID NO: 147706 - DNA, 33 bp, Homo sapien
tctgtctgtatagcaacaataaagaccatcaca

SEQ ID NO: 147707 - DNA, 33 bp, Homo sapien
tgccagaggctcctgtcaagttcacttaccaaa

SEQ ID NO: 147708 - DNA, 33 bp, Homo sapien
tgccagaggctcctgtgaagttcacttaccaaa

SEQ ID NO: 147709 - DNA, 33 bp, Homo sapien
acacagatgcagaccacatcactacggtttttt

SEQ ID NO: 147710 - DNA, 33 bp, Homo sapien
acacagatgcagaccatatcactacggtttttt

SEQ ID NO: 147711 - DNA, 33 bp, Homo sapien
ggcagccagcgctgtaagtggccggagaagaag

SEQ ID NO: 147712 - DNA, 33 bp, Homo sapien
ggcagccagcgctgtatgtggccggagaagaag

SEQ ID NO: 147713 - DNA, 33 bp, Homo sapien
gacaatgtaggttctaaaaggtcctcaggctgc

SEQ ID NO: 147714 - DNA, 33 bp, Homo sapien
gacaatgtaggttctagaaggtcctcaggctgc

SEQ ID NO: 147715 - DNA, 33 bp, Homo sapien
gctgaccttagccagccagagcttcccagagac

SEQ ID NO: 147716 - DNA, 33 bp, Homo sapien
gctgaccttagccagctagagcttcccagagac

SEQ ID NO: 147717 - DNA, 33 bp, Homo sapien
ccacgggatgatttgacgtccaactgggccctc

SEQ ID NO: 147718 - DNA, 33 bp, Homo sapien
ccacgggatgatttgaggtccaactgggccctc

SEQ ID NO: 147719 - DNA, 33 bp, Homo sapien
ggaagatgagatccgcacaggccacgtccagga

SEQ ID NO: 147720 - DNA, 33 bp, Homo sapien
ggaagatgagatccgcgcaggccacgtccagga

SEQ ID NO: 147721 - DNA, 33 bp, Homo sapien
gtgccttgatcctcagaatgggctttttttttt

SEQ ID NO: 147722 - DNA, 33 bp, Homo sapien
gtgccttgatcctcagtatgggctttttttttt

SEQ ID NO: 147723 - DNA, 33 bp, Homo sapien
tttaagtatctgggaccggtagtggtatcccct

SEQ ID NO: 147724 - DNA, 33 bp, Homo sapien
tttaagtatctgggactggtagtggtatcccct

SEQ ID NO: 147725 - DNA, 33 bp, Homo sapien
gttctcaatatgaaaaaaatgagctcgtaattt

SEQ ID NO: 147726 - DNA, 33 bp, Homo sapien
gttctcaatatgaaaacaatgagctcgtaattt

SEQ ID NO: 147727 - DNA, 33 bp, Homo sapien
ctgatatacaaactggacaaagacattctaaga

SEQ ID NO: 147728 - DNA, 33 bp, Homo sapien
ctgatatacaaactgggcaaagacattctaaga

SEQ ID NO: 147729 - DNA, 33 bp, Homo sapien
gattccaggtcttttacataataactcttttaa

SEQ ID NO: 147730 - DNA, 33 bp, Homo sapien
gattccaggtcttttagataataactcttttaa

SEQ ID NO: 147731 - DNA, 33 bp, Homo sapien
gcattcacattaaaacaagaacttaaggctgac

SEQ ID NO: 147732 - DNA, 33 bp, Homo sapien
gcattcacattaaaacgagaacttaaggctgac

SEQ ID NO: 147733 - DNA, 33 bp, Homo sapien
gcagagatgcctgaatcagtggcaaaaaaaggg

SEQ ID NO: 147734 - DNA, 33 bp, Homo sapien
gcagagatgcctgaattagtggcaaaaaaaggg

SEQ ID NO: 147735 - DNA, 33 bp, Homo sapien
atgaattctgtctccccaaattggcccttacaa

SEQ ID NO: 147736 - DNA, 33 bp, Homo sapien
atgaattctgtctccctaaattggcccttacaa

SEQ ID NO: 147737 - DNA, 33 bp, Homo sapien
acattcttactaaacccatgcaaacaactaaat

SEQ ID NO: 147738 - DNA, 33 bp, Homo sapien
acattcttactaaacctatgcaaacaactaaat

SEQ ID NO: 147739 - DNA, 33 bp, Homo sapien
agataagggttgtggagaccaatgttctttttt

SEQ ID NO: 147740 - DNA, 33 bp, Homo sapien
agataagggttgtggataccaatgttctttttt

SEQ ID NO: 147741 - DNA, 33 bp, Homo sapien
ccccttaaggctgatacgaaacacttacaatct

SEQ ID NO: 147742 - DNA, 33 bp, Homo sapien
ccccttaaggctgataggaaacacttacaatct

SEQ ID NO: 147743 - DNA, 33 bp, Homo sapien
gtggtcatggttttaacagcaacatcctcaggc

SEQ ID NO: 147744 - DNA, 33 bp, Homo sapien
gtggtcatggttttaagagcaacatcctcaggc

SEQ ID NO: 147745 - DNA, 33 bp, Homo sapien
gggtgatgtaatattgcagatcttgaaaggggc

SEQ ID NO: 147746 - DNA, 33 bp, Homo sapien
gggtgatgtaatattgtagatcttgaaaggggc

SEQ ID NO: 147747 - DNA, 33 bp, Homo sapien
aacatacttccgaggaatagtttagcaaaacta

SEQ ID NO: 147748 - DNA, 33 bp, Homo sapien
aacatacttccgaggagtagtttagcaaaacta

SEQ ID NO: 147749 - DNA, 33 bp, Homo sapien
aatatatccaaaaataagtccacactgtatgga

SEQ ID NO: 147750 - DNA, 33 bp, Homo sapien
aatatatccaaaaatatgtccacactgtatgga

SEQ ID NO: 147751 - DNA, 33 bp, Homo sapien
gccatcagtccagccacgtgagtacactatgga

SEQ ID NO: 147752 - DNA, 33 bp, Homo sapien
gccatcagtccagccatgtgagtacactatgga

SEQ ID NO: 147753 - DNA, 33 bp, Homo sapien
tgaaaagctcaaaaaaatctcccaaagggccga

SEQ ID NO: 147754 - DNA, 33 bp, Homo sapien
tgaaaagctcaaaaaagtctcccaaagggccga

SEQ ID NO: 147755 - DNA, 33 bp, Homo sapien
ctcacccaatcttacaaactcacttggcatgat

SEQ ID NO: 147756 - DNA, 33 bp, Homo sapien
ctcacccaatcttacagactcacttggcatgat

SEQ ID NO: 147757 - DNA, 33 bp, Homo sapien
aagggaatgtggacgcaaacgactcctttagcc

SEQ ID NO: 147758 - DNA, 33 bp, Homo sapien
aagggaatgtggacgcgaacgactcctttagcc

SEQ ID NO: 147759 - DNA, 33 bp, Homo sapien
gagaagtgaagcaagacgtacacagcaatacaa

SEQ ID NO: 147760 - DNA, 33 bp, Homo sapien
gagaagtgaagcaagatgtacacagcaatacaa

SEQ ID NO: 147761 - DNA, 33 bp, Homo sapien
tatggagcatccagataaaacctaaagagtgca

SEQ ID NO: 147762 - DNA, 33 bp, Homo sapien
tatggagcatccagatgaaacctaaagagtgca

SEQ ID NO: 147763 - DNA, 33 bp, Homo sapien
ccacaaccatcaacagaaagaccaagaaataca

SEQ ID NO: 147764 - DNA, 33 bp, Homo sapien
ccacaaccatcaacaggaagaccaagaaataca

SEQ ID NO: 147765 - DNA, 33 bp, Homo sapien
ggctgacaaaacggtccatctgtgcttctgttg

SEQ ID NO: 147766 - DNA, 33 bp, Homo sapien
ggctgacaaaacggtctatctgtgcttctgttg

SEQ ID NO: 147767 - DNA, 33 bp, Homo sapien
ttattgaactctaaagaaggattgcaacaggga

SEQ ID NO: 147768 - DNA, 33 bp, Homo sapien
ttattgaactctaaaggaggattgcaacaggga

SEQ ID NO: 147769 - DNA, 33 bp, Homo sapien
atccaacaaaatcactcaaacagtttacagaag

SEQ ID NO: 147770 - DNA, 33 bp, Homo sapien
atccaacaaaatcactgaaacagtttacagaag

SEQ ID NO: 147771 - DNA, 33 bp, Homo sapien
aaaacagagatactcacgacaacaaattcatcc

SEQ ID NO: 147772 - DNA, 33 bp, Homo sapien
aaaacagagatactcatgacaacaaattcatcc

SEQ ID NO: 147773 - DNA, 33 bp, Homo sapien
tattcacttactgcaacgttggatttttaattg

SEQ ID NO: 147774 - DNA, 33 bp, Homo sapien
tattcacttactgcaatgttggatttttaattg

SEQ ID NO: 147775 - DNA, 33 bp, Homo sapien
ttttgcaccatctcacagggtggagtttttctt

SEQ ID NO: 147776 - DNA, 33 bp, Homo sapien
ttttgcaccatctcacggggtggagtttttctt

SEQ ID NO: 147777 - DNA, 33 bp, Homo sapien
gcaatttatccgaacaactaagtacatcttgga

SEQ ID NO: 147778 - DNA, 33 bp, Homo sapien
gcaatttatccgaacagctaagtacatcttgga

SEQ ID NO: 147779 - DNA, 33 bp, Homo sapien
gtccgttgatttttaacaaggaagagctatttt

SEQ ID NO: 147780 - DNA, 33 bp, Homo sapien
gtccgttgatttttaataaggaagagctatttt

SEQ ID NO: 147781 - DNA, 33 bp, Homo sapien
ttatccacaaccttacaacctctctgcccactg

SEQ ID NO: 147782 - DNA, 33 bp, Homo sapien
ttatccacaaccttacgacctctctgcccactg

SEQ ID NO: 147783 - DNA, 33 bp, Homo sapien
gaggccctgagatgaaggagtaacccaaacaca

SEQ ID NO: 147784 - DNA, 33 bp, Homo sapien
gaggccctgagatgaatgagtaacccaaacaca

SEQ ID NO: 147785 - DNA, 33 bp, Homo sapien
ggtatcctccagattgacaaattatatgctaat

SEQ ID NO: 147786 - DNA, 33 bp, Homo sapien
ggtatcctccagattggcaaattatatgctaat

SEQ ID NO: 147787 - DNA, 33 bp, Homo sapien
gtggctgaaaaccacacaaattcatcctctcac

SEQ ID NO: 147788 - DNA, 33 bp, Homo sapien
gtggctgaaaaccacagaaattcatcctctcac

SEQ ID NO: 147789 - DNA, 33 bp, Homo sapien
gcagcaacaatatacactgggtgactgctgccc

SEQ ID NO: 147790 - DNA, 33 bp, Homo sapien
gcagcaacaatatacagtgggtgactgctgccc

SEQ ID NO: 147791 - DNA, 33 bp, Homo sapien; identical to SEQ ID NO: 147789

SEQ ID NO: 147792 - DNA, 33 bp, Homo sapien; identical to SEQ ID NO: 147790

SEQ ID NO: 147793 - DNA, 33 bp, Homo sapien
cgccaggtttcctttacgatgagatacaagaga

SEQ ID NO: 147794 - DNA, 33 bp, Homo sapien
cgccaggtttcctttatgatgagatacaagaga

SEQ ID NO: 147795 - DNA, 33 bp, Homo sapien
ccagccctggagctacccgatctaacaaagcct

SEQ ID NO: 147796 - DNA, 33 bp, Homo sapien
ccagccctggagctactcgatctaacaaagcct

SEQ ID NO: 147797 - DNA, 33 bp, Homo sapien; identical to SEQ ID NO: 147795

SEQ ID NO: 147798 - DNA, 33 bp, Homo sapien; identical to SEQ ID NO: 147796

SEQ ID NO: 147799 - DNA, 33 bp, Homo sapien
aaataaatgaataaaactgtggtataatatatg

SEQ ID NO: 147800 - DNA, 33 bp, Homo sapien
aaataaatgaataaaattgtggtataatatatg

SEQ ID NO: 147801 - DNA, 33 bp, Homo sapien
acaactttcgaggcaaactatcttcctaccaaa

SEQ ID NO: 147802 - DNA, 33 bp, Homo sapien
acaactttcgaggcaatctatcttcctaccaaa

SEQ ID NO: 147803 - DNA, 33 bp, Homo sapien
gttcagttacattgcacgagcatttgcagaaag

SEQ ID NO: 147804 - DNA, 33 bp, Homo sapien
gttcagttacattgcaggagcatttgcagaaag

SEQ ID NO: 147805 - DNA, 33 bp, Homo sapien
ctgaaatcttcaggaacagcaccattttgtcaa

SEQ ID NO: 147806 - DNA, 33 bp, Homo sapien
ctgaaatcttcaggaatagcaccattttgtcaa

SEQ ID NO: 147807 - DNA, 33 bp, Homo sapien
gtgataaatgatatgacgaccgcacctgtgtct

SEQ ID NO: 147808 - DNA, 33 bp, Homo sapien
gtgataaatgatatgatgaccgcacctgtgtct

SEQ ID NO: 147809 - DNA, 33 bp, Homo sapien
aggtggattagtgaaagaggaaagccgcttgca

SEQ ID NO: 147810 - DNA, 33 bp, Homo sapien
aggtggattagtgaaataggaaagccgcttgca

SEQ ID NO: 147811 - DNA, 33 bp, Homo sapien
attgtacttgtaggtacgaagcacaaaacattt

SEQ ID NO: 147812 - DNA, 33 bp, Homo sapien
attgtacttgtaggtatgaagcacaaaacattt

SEQ ID NO: 147813 - DNA, 33 bp, Homo sapien
ttccaagtgtatgatacgttgtttttaactata

SEQ ID NO: 147814 - DNA, 33 bp, Homo sapien
ttccaagtgtatgatatgttgtttttaactata

SEQ ID NO: 147815 - DNA, 33 bp, Homo sapien
cactggtagccatatgcataagaagagagggaa

SEQ ID NO: 147816 - DNA, 33 bp, Homo sapien
cactggtagccatatggataagaagagagggaa

SEQ ID NO: 147817 - DNA, 33 bp, Homo sapien
accatgtccgtctcaccgtctatcagctgggcc

SEQ ID NO: 147818 - DNA, 33 bp, Homo sapien
accatgtccgtctcactgtctatcagctgggcc

SEQ ID NO: 147819 - DNA, 33 bp, Homo sapien
taactgacttttggtcaattgccttttcatata

SEQ ID NO: 147820 - DNA, 33 bp, Homo sapien
taactgacttttggtccattgccttttcatata

SEQ ID NO: 147821 - DNA, 33 bp, Homo sapien
caaacaacaactgacaacagataaagatacagc

SEQ ID NO: 147822 - DNA, 33 bp, Homo sapien
caaacaacaactgacatcagataaagatacagc

SEQ ID NO: 147823 - DNA, 33 bp, Homo sapien
actgagacaacagataagactgttccaggcaaa

SEQ ID NO: 147824 - DNA, 33 bp, Homo sapien
actgagacaacagataggactgttccaggcaaa

SEQ ID NO: 147825 - DNA, 33 bp, Homo sapien
gccaaaatggaaaagaactctgagaaactttta

SEQ ID NO: 147826 - DNA, 33 bp, Homo sapien
gccaaaatggaaaagatctctgagaaactttta

SEQ ID NO: 147827 - DNA, 33 bp, Homo sapien
tcacacgaaaacttaacgggcaaatgttcaaag

SEQ ID NO: 147828 - DNA, 33 bp, Homo sapien
tcacacgaaaacttaatgggcaaatgttcaaag

SEQ ID NO: 147829 - DNA, 33 bp, Homo sapien
agaacacttggcaaagaagaaccgtttgaacag

SEQ ID NO: 147830 - DNA, 33 bp, Homo sapien
agaacacttggcaaagtagaaccgtttgaacag

SEQ ID NO: 147831 - DNA, 33 bp, Homo sapien
ggtggtaggcatacacagacctgcttctctaca

SEQ ID NO: 147832 - DNA, 33 bp, Homo sapien
ggtggtaggcatacacggacctgcttctctaca

SEQ ID NO: 147833 - DNA, 33 bp, Homo sapien
cttatttgtgagagaacagaaacctccagggtg

SEQ ID NO: 147834 - DNA, 33 bp, Homo sapien
cttatttgtgagagaagagaaacctccagggtg

SEQ ID NO: 147835 - DNA, 33 bp, Homo sapien
cttcttttatttttaaaggatggcgtctctcta

SEQ ID NO: 147836 - DNA, 33 bp, Homo sapien
cttcttttatttttaagggatggcgtctctcta

SEQ ID NO: 147837 - DNA, 33 bp, Homo sapien
gccaaacatacctgccactgtgtttctcccata

SEQ ID NO: 147838 - DNA, 33 bp, Homo sapien
gccaaacatacctgcccctgtgtttctcccata

SEQ ID NO: 147839 - DNA, 33 bp, Homo sapien
acttgatggagggcacagagaaacaaatttcag

SEQ ID NO: 147840 - DNA, 33 bp, Homo sapien
acttgatggagggcacggagaaacaaatttcag

SEQ ID NO: 147841 - DNA, 33 bp, Homo sapien
ttccttccaaaactccccagctcttgggtaaca

SEQ ID NO: 147842 - DNA, 33 bp, Homo sapien
ttccttccaaaactcctcagctcttgggtaaca

SEQ ID NO: 147843 - DNA, 33 bp, Homo sapien
accctctctgcagaaaaatatacacttaccctc

SEQ ID NO: 147844 - DNA, 33 bp, Homo sapien
accctctctgcagaaacatatacacttaccctc

SEQ ID NO: 147845 - DNA, 33 bp, Homo sapien
ggtgactctctggagccataatcagacctgtag

SEQ ID NO: 147846 - DNA, 33 bp, Homo sapien
ggtgactctctggagctataatcagacctgtag

SEQ ID NO: 147847 - DNA, 33 bp, Homo sapien
tcattttctgaagggaagtttcagcttttatca

SEQ ID NO: 147848 - DNA, 33 bp, Homo sapien
tcattttctgaagggaggtttcagcttttatca

SEQ ID NO: 147849 - DNA, 33 bp, Homo sapien
gacaggcggagtgcccaaagtggttccaggaag

SEQ ID NO: 147850 - DNA, 33 bp, Homo sapien
gacaggcggagtgcccgaagtggttccaggaag

SEQ ID NO: 147851 - DNA, 33 bp, Homo sapien
gtttcctggccaacgcagcggtctctggccatt

SEQ ID NO: 147852 - DNA, 33 bp, Homo sapien
gtttcctggccaacgcggcggtctctggccatt

SEQ ID NO: 147853 - DNA, 33 bp, Homo sapien
cagcagggaaaggtaacagccaaagccctgcaa

SEQ ID NO: 147854 - DNA, 33 bp, Homo sapien
cagcagggaaaggtaagagccaaagccctgcaa

SEQ ID NO: 147855 - DNA, 33 bp, Homo sapien
ctacacgtgggtcatcagaagctactgctctct

SEQ ID NO: 147856 - DNA, 33 bp, Homo sapien
ctacacgtgggtcatcggaagctactgctctct

SEQ ID NO: 147857 - DNA, 33 bp, Homo sapien
aggctttactgacacaaattttcctcaatccct

SEQ ID NO: 147858 - DNA, 33 bp, Homo sapien
aggctttactgacacacattttcctcaatccct

SEQ ID NO: 147859 - DNA, 33 bp, Homo sapien
agggtagactcaagacaatgtttcgcaaaatct

SEQ ID NO: 147860 - DNA, 33 bp, Homo sapien
agggtagactcaagacgatgtttcgcaaaatct

SEQ ID NO: 147861 - DNA, 33 bp, Homo sapien
attaacaaaaatctccagccttatcttgttcaa

SEQ ID NO: 147862 - DNA, 33 bp, Homo sapien
attaacaaaaatctccggccttatcttgttcaa

SEQ ID NO: 147863 - DNA, 33 bp, Homo sapien
gagaaaaagcaagccagtggacacagaaaaagc

SEQ ID NO: 147864 - DNA, 33 bp, Homo sapien
gagaaaaagcaagccattggacacagaaaaagc

SEQ ID NO: 147865 - DNA, 33 bp, Homo sapien
aaaaaacaataagcaacctatccgagtttacaa

SEQ ID NO: 147866 - DNA, 33 bp, Homo sapien
aaaaaacaataagcaatctatccgagtttacaa

SEQ ID NO: 147867 - DNA, 33 bp, Homo sapien
tggcatggtgggtttcactgtaatttcagcact

SEQ ID NO: 147868 - DNA, 33 bp, Homo sapien
tggcatggtgggtttcgctgtaatttcagcact

SEQ ID NO: 147869 - DNA, 33 bp, Homo sapien
tttttacctactctgcacaaaaacagtatataa

SEQ ID NO: 147870 - DNA, 33 bp, Homo sapien
tttttacctactctgcgcaaaaacagtatataa

SEQ ID NO: 147871 - DNA, 33 bp, Homo sapien
tttagaagacatcgggaacatactacatgctca

SEQ ID NO: 147872 - DNA, 33 bp, Homo sapien
tttagaagacatcgggtacatactacatgctca

SEQ ID NO: 147873 - DNA, 33 bp, Homo sapien
atgtttaatgaaagaactaatggtccacaattt

SEQ ID NO: 147874 - DNA, 33 bp, Homo sapien
atgtttaatgaaagaagtaatggtccacaattt

SEQ ID NO: 147875 - DNA, 33 bp, Homo sapien
ggttgagaaacgctaactgacccttaactatct

SEQ ID NO: 147876 - DNA, 33 bp, Homo sapien
ggttgagaaacgctaattgacccttaactatct

SEQ ID NO: 147877 - DNA, 33 bp, Homo sapien
cagcattctgtacccaatgaaaaatacaggttt

SEQ ID NO: 147878 - DNA, 33 bp, Homo sapien
cagcattctgtacccactgaaaaatacaggttt

SEQ ID NO: 147879 - DNA, 33 bp, Homo sapien
gggagacttgaaaggtaaaaaatttcaggatat

SEQ ID NO: 147880 - DNA, 33 bp, Homo sapien
gggagacttgaaaggtgaaaaatttcaggatat

SEQ ID NO: 147881 - DNA, 33 bp, Homo sapien
agatgaatggactgtagagtacttcctacttta

SEQ ID NO: 147882 - DNA, 33 bp, Homo sapien
agatgaatggactgtatagtacttcctacttta

SEQ ID NO: 147883 - DNA, 33 bp, Homo sapien
cagaagtgtaaaggtccattcaaagtacaacac

SEQ ID NO: 147884 - DNA, 33 bp, Homo sapien
cagaagtgtaaaggtctattcaaagtacaacac

SEQ ID NO: 147885 - DNA, 33 bp, Homo sapien
tttttaatacaacagaatacaaaagttcaatga

SEQ ID NO: 147886 - DNA, 33 bp, Homo sapien
tttttaatacaacagagtacaaaagttcaatga

SEQ ID NO: 147887 - DNA, 33 bp, Homo sapien
acaaaacaaaacagtacgtattagaggcaaggt

SEQ ID NO: 147888 - DNA, 33 bp, Homo sapien
acaaaacaaaacagtatgtattagaggcaaggt

SEQ ID NO: 147889 - DNA, 33 bp, Homo sapien
cgggcagagagactagaaagccttcccagcagc

SEQ ID NO: 147890 - DNA, 33 bp, Homo sapien
cgggcagagagactaggaagccttcccagcagc

SEQ ID NO: 147891 - DNA, 33 bp, Homo sapien
gagggaagacaatgaaacaaatctgtgctagga

SEQ ID NO: 147892 - DNA, 33 bp, Homo sapien
gagggaagacaatgaaccaaatctgtgctagga

SEQ ID NO: 147893 - DNA, 33 bp, Homo sapien
gctcctcagagtataaagaaaagccagagcaga

SEQ ID NO: 147894 - DNA, 33 bp, Homo sapien
gctcctcagagtataaggaaaagccagagcaga

SEQ ID NO: 147895 - DNA, 33 bp, Homo sapien
attccatgcccctagcacaacagaacctttatc

SEQ ID NO: 147896 - DNA, 33 bp, Homo sapien
attccatgcccctagcgcaacagaacctttatc

SEQ ID NO: 147897 - DNA, 33 bp, Homo sapien
gtgggattgacagcaaatggagtttttgtgcag

SEQ ID NO: 147898 - DNA, 33 bp, Homo sapien
gtgggattgacagcaagtggagtttttgtgcag

SEQ ID NO: 147899 - DNA, 33 bp, Homo sapien
ctcctgctcaccaaaacaaaggcttagaccagc

SEQ ID NO: 147900 - DNA, 33 bp, Homo sapien
ctcctgctcaccaaaataaaggcttagaccagc

SEQ ID NO: 147901 - DNA, 33 bp, Homo sapien
gagagctgtacttccactctcttgggccttgtg

SEQ ID NO: 147902 - DNA, 33 bp, Homo sapien
gagagctgtacttccagtctcttgggccttgtg

SEQ ID NO: 147903 - DNA, 33 bp, Homo sapien
catcggacagcaatgacaggcaaaagctatgcc

SEQ ID NO: 147904 - DNA, 33 bp, Homo sapien
catcggacagcaatgataggcaaaagctatgcc

SEQ ID NO: 147905 - DNA, 33 bp, Homo sapien
ctctcaagctctaacaatccttgtgcttgggga

SEQ ID NO: 147906 - DNA, 33 bp, Homo sapien
ctctcaagctctaacagtccttgtgcttgggga

SEQ ID NO: 147907 - DNA, 33 bp, Homo sapien
ggtcaaggttgtgacacgaagaagggggctcag

SEQ ID NO: 147908 - DNA, 33 bp, Homo sapien
ggtcaaggttgtgacatgaagaagggggctcag

SEQ ID NO: 147909 - DNA, 33 bp, Homo sapien
tcgtccctctcccatgaattgttcttcttccag

SEQ ID NO: 147910 - DNA, 33 bp, Homo sapien
tcgtccctctcccatgtattgttcttcttccag

SEQ ID NO: 147911 - DNA, 33 bp, Homo sapien
cctaaatggtattaaacaactatgagcaacatg

SEQ ID NO: 147912 - DNA, 33 bp, Homo sapien
cctaaatggtattaaagaactatgagcaacatg

SEQ ID NO: 147913 - DNA, 33 bp, Homo sapien
actcatctaagccttacaggatcctactttttt

SEQ ID NO: 147914 - DNA, 33 bp, Homo sapien
actcatctaagccttataggatcctactttttt

SEQ ID NO: 147915 - DNA, 33 bp, Homo sapien
ttcatttaacacctaccgagcacctatttgtaa

SEQ ID NO: 147916 - DNA, 33 bp, Homo sapien
ttcatttaacacctactgagcacctatttgtaa

SEQ ID NO: 147917 - DNA, 33 bp, Homo sapien
gaaactctgcggtgtgaagaaaggacagttatg

SEQ ID NO: 147918 - DNA, 33 bp, Homo sapien
gaaactctgcggtgtggagaaaggacagttatg

SEQ ID NO: 147919 - DNA, 33 bp, Homo sapien
tccagcccaggtgatacagcaaaaatctgttta

SEQ ID NO: 147920 - DNA, 33 bp, Homo sapien
tccagcccaggtgatagagcaaaaatctgttta

SEQ ID NO: 147921 - DNA, 33 bp, Homo sapien
tgctcccagttcctcacgtagctggtctcttac

SEQ ID NO: 147922 - DNA, 33 bp, Homo sapien
tgctcccagttcctcatgtagctggtctcttac

SEQ ID NO: 147923 - DNA, 33 bp, Homo sapien
ggtgtataacaaattaggccaaaacagagaggg

SEQ ID NO: 147924 - DNA, 33 bp, Homo sapien
ggtgtataacaaattatgccaaaacagagaggg

SEQ ID NO: 147925 - DNA, 33 bp, Homo sapien
tgacttcctttgcttacgacctagagtcttgtg

SEQ ID NO: 147926 - DNA, 33 bp, Homo sapien
tgacttcctttgcttatgacctagagtcttgtg

SEQ ID NO: 147927 - DNA, 33 bp, Homo sapien
atacctgggatgaggaaatttaagcccagaaaa

SEQ ID NO: 147928 - DNA, 33 bp, Homo sapien
atacctgggatgaggacatttaagcccagaaaa

SEQ ID NO: 147929 - DNA, 33 bp, Homo sapien
gagagggataaaccaaagaattgcaaagaacag

SEQ ID NO: 147930 - DNA, 33 bp, Homo sapien
gagagggataaaccaacgaattgcaaagaacag

SEQ ID NO: 147931 - DNA, 33 bp, Homo sapien
acccactagcctttaaatatacctagctctttc

SEQ ID NO: 147932 - DNA, 33 bp, Homo sapien
acccactagcctttaactatacctagctctttc

SEQ ID NO: 147933 - DNA, 33 bp, Homo sapien
acctgctcacttttgccctgcaacaaataaacc

SEQ ID NO: 147934 - DNA, 33 bp, Homo sapien
acctgctcacttttgctctgcaacaaataaacc

SEQ ID NO: 147935 - DNA, 33 bp, Homo sapien
cagcaccaagcctagaaaactgcatctcctgca

SEQ ID NO: 147936 - DNA, 33 bp, Homo sapien
cagcaccaagcctagacaactgcatctcctgca

SEQ ID NO: 147937 - DNA, 33 bp, Homo sapien
ggtggtgtcatgcctaagagcagtacaggatac

SEQ ID NO: 147938 - DNA, 33 bp, Homo sapien
ggtggtgtcatgcctaggagcagtacaggatac

SEQ ID NO: 147939 - DNA, 33 bp, Homo sapien
tggtttataaactccactcagcagcaaagcaac

SEQ ID NO: 147940 - DNA, 33 bp, Homo sapien
tggtttataaactccattcagcagcaaagcaac

SEQ ID NO: 147941 - DNA, 33 bp, Homo sapien
tcgcaaatccttaacacatagacaaggctctct

SEQ ID NO: 147942 - DNA, 33 bp, Homo sapien
tcgcaaatccttaacagatagacaaggctctct

SEQ ID NO: 147943 - DNA, 33 bp, Homo sapien
gacacacccttatgtacgcgtagtgagatgctc

SEQ ID NO: 147944 - DNA, 33 bp, Homo sapien
gacacacccttatgtatgcgtagtgagatgctc

SEQ ID NO: 147945 - DNA, 33 bp, Homo sapien
tagtcagtaagcctcaaaccttttctgagaatc

SEQ ID NO: 147946 - DNA, 33 bp, Homo sapien
tagtcagtaagcctcagaccttttctgagaatc

SEQ ID NO: 147947 - DNA, 33 bp, Homo sapien
gaaatgagtttgaatgaaaaaggcattggggct

SEQ ID NO: 147948 - DNA, 33 bp, Homo sapien
gaaatgagtttgaatggaaaaggcattggggct

SEQ ID NO: 147949 - DNA, 33 bp, Homo sapien
gactagtgtcaggtgacgctagacactggtctt

SEQ ID NO: 147950 - DNA, 33 bp, Homo sapien
gactagtgtcaggtgaggctagacactggtctt

SEQ ID NO: 147951 - DNA, 33 bp, Homo sapien
cactgtgacttatggaaaatcaggttcttgtgg

SEQ ID NO: 147952 - DNA, 33 bp, Homo sapien
cactgtgacttatggagaatcaggttcttgtgg

SEQ ID NO: 147953 - DNA, 33 bp, Homo sapien
ctctggggctatcagaagatatacacttagaca

SEQ ID NO: 147954 - DNA, 33 bp, Homo sapien
ctctggggctatcagaggatatacacttagaca

SEQ ID NO: 147955 - DNA, 33 bp, Homo sapien
tcaatataggtttttcaaagagagccacagtcc

SEQ ID NO: 147956 - DNA, 33 bp, Homo sapien
tcaatataggtttttccaagagagccacagtcc

SEQ ID NO: 147957 - DNA, 33 bp, Homo sapien
ggttcagaaagtattaaacatgaaaagctagag

SEQ ID NO: 147958 - DNA, 33 bp, Homo sapien
ggttcagaaagtattagacatgaaaagctagag

SEQ ID NO: 147959 - DNA, 33 bp, Homo sapien
ttcagttccataaatacgcaaggctcactttgt

SEQ ID NO: 147960 - DNA, 33 bp, Homo sapien
ttcagttccataaatatgcaaggctcactttgt

SEQ ID NO: 147961 - DNA, 33 bp, Homo sapien
tggcgcctgacccaaaagttcttgtgccctagc

SEQ ID NO: 147962 - DNA, 33 bp, Homo sapien
tggcgcctgacccaaacgttcttgtgccctagc

SEQ ID NO: 147963 - DNA, 33 bp, Homo sapien
caaatacaagaaactccatctgggcttgaacca

SEQ ID NO: 147964 - DNA, 33 bp, Homo sapien
caaatacaagaaactctatctgggcttgaacca

SEQ ID NO: 147965 - DNA, 33 bp, Homo sapien
caaggaagtagttgtcaagatccaggtcaaaag

SEQ ID NO: 147966 - DNA, 33 bp, Homo sapien
caaggaagtagttgtcgagatccaggtcaaaag

SEQ ID NO: 147967 - DNA, 33 bp, Homo sapien
ccctgtctaaccaaacaaacccactatatttct

SEQ ID NO: 147968 - DNA, 33 bp, Homo sapien
ccctgtctaaccaaaccaacccactatatttct

SEQ ID NO: 147969 - DNA, 33 bp, Homo sapien
ggcagttttctttgctgagacatgaagcagttt

SEQ ID NO: 147970 - DNA, 33 bp, Homo sapien
ggcagttttctttgcttagacatgaagcagttt

SEQ ID NO: 147971 - DNA, 33 bp, Homo sapien
gcagctatggtggttccagtcagtagctatggc

SEQ ID NO: 147972 - DNA, 33 bp, Homo sapien
gcagctatggtggttctagtcagtagctatggc

SEQ ID NO: 147973 - DNA, 33 bp, Homo sapien
aatgcaagatgataccaccagtctggaaaagtt

SEQ ID NO: 147974 - DNA, 33 bp, Homo sapien
aatgcaagatgataccgccagtctggaaaagtt

SEQ ID NO: 147975 - DNA, 33 bp, Homo sapien
tataaatgtgtgatcccgctttatcatgccctc

SEQ ID NO: 147976 - DNA, 33 bp, Homo sapien
tataaatgtgtgatcctgctttatcatgccctc

SEQ ID NO: 147977 - DNA, 33 bp, Homo sapien
atttatagggactacaacttttctggcagctca

SEQ ID NO: 147978 - DNA, 33 bp, Homo sapien
atttatagggactacagcttttctggcagctca

SEQ ID NO: 147979 - DNA, 33 bp, Homo sapien
tatatcaagtacccagcctatggtctagtttat

SEQ ID NO: 147980 - DNA, 33 bp, Homo sapien
tatatcaagtacccagtctatggtctagtttat

SEQ ID NO: 147981 - DNA, 33 bp, Homo sapien
atccatctgaggatgacaggaaacactatccag

SEQ ID NO: 147982 - DNA, 33 bp, Homo sapien
atccatctgaggatgataggaaacactatccag

SEQ ID NO: 147983 - DNA, 33 bp, Homo sapien
ggacaccagtaacatacaccttcaatggctgat

SEQ ID NO: 147984 - DNA, 33 bp, Homo sapien
ggacaccagtaacatataccttcaatggctgat

SEQ ID NO: 147985 - DNA, 33 bp, Homo sapien
atttgtaaaatgaagacagtagcacaaaaccta

SEQ ID NO: 147986 - DNA, 33 bp, Homo sapien
atttgtaaaatgaagatagtagcacaaaaccta

SEQ ID NO: 147987 - DNA, 33 bp, Homo sapien
tcctaatgaagaaaaacgccaactctggagaac

SEQ ID NO: 147988 - DNA, 33 bp, Homo sapien
tcctaatgaagaaaaatgccaactctggagaac

SEQ ID NO: 147989 - DNA, 33 bp, Homo sapien
tggctcaaatatgcaaacagtaattctatttct

SEQ ID NO: 147990 - DNA, 33 bp, Homo sapien
tggctcaaatatgcaagcagtaattctatttct

SEQ ID NO: 147991 - DNA, 33 bp, Homo sapien
caggtgtcttgatttgaatttgcaatctgccac

SEQ ID NO: 147992 - DNA, 33 bp, Homo sapien
caggtgtcttgatttggatttgcaatctgccac

SEQ ID NO: 147993 - DNA, 33 bp, Homo sapien
tgaactaagagcttcacatacagtggcatcaat

SEQ ID NO: 147994 - DNA, 33 bp, Homo sapien
tgaactaagagcttcatatacagtggcatcaat

SEQ ID NO: 147995 - DNA, 33 bp, Homo sapien
tgatgggcgctttgtaaccactctcttctttaa

SEQ ID NO: 147996 - DNA, 33 bp, Homo sapien
tgatgggcgctttgtatccactctcttctttaa

SEQ ID NO: 147997 - DNA, 33 bp, Homo sapien
tagactgtagaaaagacgacaatgtttattctc

SEQ ID NO: 147998 - DNA, 33 bp, Homo sapien
tagactgtagaaaagatgacaatgtttattctc

SEQ ID NO: 147999 - DNA, 33 bp, Homo sapien
cctgctgggtgtttacaaaaagtcccttgatct

SEQ ID NO: 148000 - DNA, 33 bp, Homo sapien
cctgctgggtgtttaccaaaagtcccttgatct

SEQ ID NO: 148001 - DNA, 33 bp, Homo sapien
tccatgctcagaggggaaataaagtctagaggg

SEQ ID NO: 148002 - DNA, 33 bp, Homo sapien
tccatgctcagaggggtaataaagtctagaggg

SEQ ID NO: 148003 - DNA, 33 bp, Homo sapien
atttgccctctatatgcactttgtattgtagct

SEQ ID NO: 148004 - DNA, 33 bp, Homo sapien
atttgccctctatatgtactttgtattgtagct

SEQ ID NO: 148005 - DNA, 33 bp, Homo sapien
ccctgatctgtgccaaaaatggcctggtagtcc

SEQ ID NO: 148006 - DNA, 33 bp, Homo sapien
ccctgatctgtgccaagaatggcctggtagtcc

SEQ ID NO: 148007 - DNA, 33 bp, Homo sapien
taaaatgtgtctcttacgaacagcatataattg

SEQ ID NO: 148008 - DNA, 33 bp, Homo sapien
taaaatgtgtctcttatgaacagcatataattg

SEQ ID NO: 148009 - DNA, 33 bp, Homo sapien
accagaatgcttacagcagaatgcagaattaaa

SEQ ID NO: 148010 - DNA, 33 bp, Homo sapien
accagaatgcttacagtagaatgcagaattaaa

SEQ ID NO: 148011 - DNA, 33 bp, Homo sapien
cattgtctgagagtagaaacccactggatgggt

SEQ ID NO: 148012 - DNA, 33 bp, Homo sapien
cattgtctgagagtaggaacccactggatgggt

SEQ ID NO: 148013 - DNA, 33 bp, Homo sapien
tcctcctagcacaactgaggctgtacaaggaaa

SEQ ID NO: 148014 - DNA, 33 bp, Homo sapien
tcctcctagcacaacttaggctgtacaaggaaa

SEQ ID NO: 148015 - DNA, 33 bp, Homo sapien
ggattcgagaatggaagaaatgagaaaggcctt

SEQ ID NO: 148016 - DNA, 33 bp, Homo sapien
ggattcgagaatggaataaatgagaaaggcctt

SEQ ID NO: 148017 - DNA, 33 bp, Homo sapien
cccaataggaatgaagcctcttctcagaggaac

SEQ ID NO: 148018 - DNA, 33 bp, Homo sapien
cccaataggaatgaagtctcttctcagaggaac

SEQ ID NO: 148019 - DNA, 33 bp, Homo sapien
ttttctttggatcagaagctattttaagtaagt

SEQ ID NO: 148020 - DNA, 33 bp, Homo sapien
ttttctttggatcagatgctattttaagtaagt

SEQ ID NO: 148021 - DNA, 33 bp, Homo sapien
tgtattgctttaacaaaggcaagtaggttcaac

SEQ ID NO: 148022 - DNA, 33 bp, Homo sapien
tgtattgctttaacaagggcaagtaggttcaac

SEQ ID NO: 148023 - DNA, 33 bp, Homo sapien
tgtaaattgaccaacaagaagtgctatttcaca

SEQ ID NO: 148024 - DNA, 33 bp, Homo sapien
tgtaaattgaccaacatgaagtgctatttcaca

SEQ ID NO: 148025 - DNA, 33 bp, Homo sapien
aagattgtttccttaaatgaggcattacatatt

SEQ ID NO: 148026 - DNA, 33 bp, Homo sapien
aagattgtttccttaagtgaggcattacatatt

SEQ ID NO: 148027 - DNA, 33 bp, Homo sapien
ttgattggctaataaacgtctgagatgttaaac

SEQ ID NO: 148028 - DNA, 33 bp, Homo sapien
ttgattggctaataaatgtctgagatgttaaac

SEQ ID NO: 148029 - DNA, 33 bp, Homo sapien
atgaaaaggctgacaaatccaagcactgataag

SEQ ID NO: 148030 - DNA, 33 bp, Homo sapien
atgaaaaggctgacaattccaagcactgataag

SEQ ID NO: 148031 - DNA, 33 bp, Homo sapien
taatttgttgcaccagccataggaaacttaaat

SEQ ID NO: 148032 - DNA, 33 bp, Homo sapien
taatttgttgcaccagtcataggaaacttaaat

SEQ ID NO: 148033 - DNA, 33 bp, Homo sapien
tgtactgaaaaagatccagaaaaatacacacca

SEQ ID NO: 148034 - DNA, 33 bp, Homo sapien
tgtactgaaaaagatctagaaaaatacacacca

SEQ ID NO: 148035 - DNA, 33 bp, Homo sapien
gaacaaagactttggcaatcatacgtgacaaag

SEQ ID NO: 148036 - DNA, 33 bp, Homo sapien
gaacaaagactttggcgatcatacgtgacaaag

SEQ ID NO: 148037 - DNA, 33 bp, Homo sapien
tgaaacctaaattcaacgggagtaattagattt

SEQ ID NO: 148038 - DNA, 33 bp, Homo sapien
tgaaacctaaattcaatgggagtaattagattt

SEQ ID NO: 148039 - DNA, 33 bp, Homo sapien
aagttgagtcggacaacagccaactcaagtcac

SEQ ID NO: 148040 - DNA, 33 bp, Homo sapien
aagttgagtcggacaatagccaactcaagtcac

SEQ ID NO: 148041 - DNA, 33 bp, Homo sapien
catctacagaagggaaaagtgttcaggtaatgt

SEQ ID NO: 148042 - DNA, 33 bp, Homo sapien
catctacagaagggaagagtgttcaggtaatgt

SEQ ID NO: 148043 - DNA, 33 bp, Homo sapien
cagggacaggctcaaacttcctcagcagattac

SEQ ID NO: 148044 - DNA, 33 bp, Homo sapien
cagggacaggctcaaatttcctcagcagattac

SEQ ID NO: 148045 - DNA, 33 bp, Homo sapien
atttgtgataaaagcccacttcttcatgtatgt

SEQ ID NO: 148046 - DNA, 33 bp, Homo sapien
atttgtgataaaagcctacttcttcatgtatgt

SEQ ID NO: 148047 - DNA, 33 bp, Homo sapien
ctctccccaattatcccctttgagtgtcccgtc

SEQ ID NO: 148048 - DNA, 33 bp, Homo sapien
ctctccccaattatcctctttgagtgtcccgtc

SEQ ID NO: 148049 - DNA, 33 bp, Homo sapien
tttctttctagcttgaagatttcaacttgggat

SEQ ID NO: 148050 - DNA, 33 bp, Homo sapien
tttctttctagcttgatgatttcaacttgggat

SEQ ID NO: 148051 - DNA, 33 bp, Homo sapien
cttcaacaggctctctcaaagcctcattctcct

SEQ ID NO: 148052 - DNA, 33 bp, Homo sapien
cttcaacaggctctcttaaagcctcattctcct

SEQ ID NO: 148053 - DNA, 33 bp, Homo sapien
ggaggccccggaagaacgtggagcaccccaggg

SEQ ID NO: 148054 - DNA, 33 bp, Homo sapien
ggaggccccggaagaatgtggagcaccccaggg

SEQ ID NO: 148055 - DNA, 33 bp, Homo sapien
caccctagattacctacatgaacgctaaatcca

SEQ ID NO: 148056 - DNA, 33 bp, Homo sapien
caccctagattacctagatgaacgctaaatcca

SEQ ID NO: 148057 - DNA, 33 bp, Homo sapien
gtctggtctggtcataacatccttgactccaat

SEQ ID NO: 148058 - DNA, 33 bp, Homo sapien
gtctggtctggtcatagcatccttgactccaat

SEQ ID NO: 148059 - DNA, 33 bp, Homo sapien
atctcttcagcctgtacgctctctctgcacccc

SEQ ID NO: 148060 - DNA, 33 bp, Homo sapien
atctcttcagcctgtatgctctctctgcacccc

SEQ ID NO: 148061 - DNA, 33 bp, Homo sapien
atagctgtacatataaaagataagacagacttt

SEQ ID NO: 148062 - DNA, 33 bp, Homo sapien
atagctgtacatataagagataagacagacttt

SEQ ID NO: 148063 - DNA, 33 bp, Homo sapien
gggcttgtgaaatgcacagtaactgctgctggg

SEQ ID NO: 148064 - DNA, 33 bp, Homo sapien
gggcttgtgaaatgcatagtaactgctgctggg

SEQ ID NO: 148065 - DNA, 33 bp, Homo sapien
acagaagccattggcacggattccagtgccccc

SEQ ID NO: 148066 - DNA, 33 bp, Homo sapien
acagaagccattggcagggattccagtgccccc

SEQ ID NO: 148067 - DNA, 33 bp, Homo sapien
tacctcccaagtgttcaaaaaatcaagtcaatt

SEQ ID NO: 148068 - DNA, 33 bp, Homo sapien
tacctcccaagtgttcgaaaaatcaagtcaatt

SEQ ID NO: 148069 - DNA, 33 bp, Homo sapien
taatcctctgaacaccactgcgaggcttcactt

SEQ ID NO: 148070 - DNA, 33 bp, Homo sapien
taatcctctgaacaccgctgcgaggcttcactt

SEQ ID NO: 148071 - DNA, 33 bp, Homo sapien
tgccgagaaggccagacgacactaaagtactgc

SEQ ID NO: 148072 - DNA, 33 bp, Homo sapien
tgccgagaaggccagatgacactaaagtactgc

SEQ ID NO: 148073 - DNA, 33 bp, Homo sapien
attctaactcatttaacacaacaatcatatgat

SEQ ID NO: 148074 - DNA, 33 bp, Homo sapien
attctaactcatttaatacaacaatcatatgat

SEQ ID NO: 148075 - DNA, 33 bp, Homo sapien
ccagttactgaaataccgaaacactagttgtca

SEQ ID NO: 148076 - DNA, 33 bp, Homo sapien
ccagttactgaaatactgaaacactagttgtca

SEQ ID NO: 148077 - DNA, 33 bp, Homo sapien
tcagcacatttggagacgttcaaaggggcagtg

SEQ ID NO: 148078 - DNA, 33 bp, Homo sapien
tcagcacatttggagatgttcaaaggggcagtg

SEQ ID NO: 148079 - DNA, 33 bp, Homo sapien
ctgagtaaaaagtaaaacattgcagggttcagt

SEQ ID NO: 148080 - DNA, 33 bp, Homo sapien
ctgagtaaaaagtaaagcattgcagggttcagt

SEQ ID NO: 148081 - DNA, 33 bp, Homo sapien
ctttatcatccacaaaattcagggaaaagatag

SEQ ID NO: 148082 - DNA, 33 bp, Homo sapien
ctttatcatccacaaacttcagggaaaagatag

SEQ ID NO: 148083 - DNA, 33 bp, Homo sapien
gtttgaaaaatgttgaagcctgttgtcagaatc

SEQ ID NO: 148084 - DNA, 33 bp, Homo sapien
gtttgaaaaatgttgatgcctgttgtcagaatc

SEQ ID NO: 148085 - DNA, 33 bp, Homo sapien
ggtatgttagagaaaacagactgtcctagaaaa

SEQ ID NO: 148086 - DNA, 33 bp, Homo sapien
ggtatgttagagaaaatagactgtcctagaaaa

SEQ ID NO: 148087 - DNA, 33 bp, Homo sapien
cattccttcgacagaaaacgaacatgatgaaca

SEQ ID NO: 148088 - DNA, 33 bp, Homo sapien
cattccttcgacagaagacgaacatgatgaaca

SEQ ID NO: 148089 - DNA, 33 bp, Homo sapien
ttctgtaagaacctcaatgaacacacatgagaa

SEQ ID NO: 148090 - DNA, 33 bp, Homo sapien
ttctgtaagaacctcagtgaacacacatgagaa

SEQ ID NO: 148091 - DNA, 33 bp, Homo sapien
gttgccctcaaaattaccttgtctttctgcaat

SEQ ID NO: 148092 - DNA, 33 bp, Homo sapien
gttgccctcaaaattatcttgtctttctgcaat

SEQ ID NO: 148093 - DNA, 33 bp, Homo sapien
ttttttctaggatggacgaaaacggaaaaaaag

SEQ ID NO: 148094 - DNA, 33 bp, Homo sapien
ttttttctaggatggatgaaaacggaaaaaaag

SEQ ID NO: 148095 - DNA, 33 bp, Homo sapien
cctactggtatcaccacagtgaagctgaaaggg

SEQ ID NO: 148096 - DNA, 33 bp, Homo sapien
cctactggtatcaccagagtgaagctgaaaggg

SEQ ID NO: 148097 - DNA, 33 bp, Homo sapien
cagcctctcaatgtatcaggattataggtgtga

SEQ ID NO: 148098 - DNA, 33 bp, Homo sapien
cagcctctcaatgtattaggattataggtgtga

SEQ ID NO: 148099 - DNA, 33 bp, Homo sapien
ccttctcaaacactttaaaaaaactgaagaggg

SEQ ID NO: 148100 - DNA, 33 bp, Homo sapien
ccttctcaaacactttcaaaaaactgaagaggg

SEQ ID NO: 148101 - DNA, 33 bp, Homo sapien
ttaattatttttagtacagttgacaagcaaaaa

SEQ ID NO: 148102 - DNA, 33 bp, Homo sapien
ttaattatttttagtatagttgacaagcaaaaa

SEQ ID NO: 148103 - DNA, 33 bp, Homo sapien
taccatttattaaagacactgattgtccccctt

SEQ ID NO: 148104 - DNA, 33 bp, Homo sapien
taccatttattaaagagactgattgtccccctt

SEQ ID NO: 148105 - DNA, 33 bp, Homo sapien; identical to SEQ ID NO: 148103

SEQ ID NO: 148106 - DNA, 33 bp, Homo sapien; identical to SEQ ID NO: 148104

SEQ ID NO: 148107 - DNA, 33 bp, Homo sapien
agatccacttggtccaatattgagtttaggtcc

SEQ ID NO: 148108 - DNA, 33 bp, Homo sapien
agatccacttggtccattattgagtttaggtcc

SEQ ID NO: 148109 - DNA, 33 bp, Homo sapien
ctcctgactagattgaacaatacccatgctgaa

SEQ ID NO: 148110 - DNA, 33 bp, Homo sapien
ctcctgactagattgatcaatacccatgctgaa

SEQ ID NO: 148111 - DNA, 33 bp, Homo sapien; identical to SEQ ID NO: 148109

SEQ ID NO: 148112 - DNA, 33 bp, Homo sapien; identical to SEQ ID NO: 148110

SEQ ID NO: 148113 - DNA, 33 bp, Homo sapien
attcaataagaatctacaggttggctaaaatga

SEQ ID NO: 148114 - DNA, 33 bp, Homo sapien
attcaataagaatctataggttggctaaaatga

SEQ ID NO: 148115 - DNA, 33 bp, Homo sapien
gaaagtcacgtggataagactatgctccctgaa

SEQ ID NO: 148116 - DNA, 33 bp, Homo sapien
gaaagtcacgtggataggactatgctccctgaa

SEQ ID NO: 148117 - DNA, 33 bp, Homo sapien
tccccatccatcttacacaatactgccggagag

SEQ ID NO: 148118 - DNA, 33 bp, Homo sapien
tccccatccatcttacccaatactgccggagag

SEQ ID NO: 148119 - DNA, 33 bp, Homo sapien
tttcctccaaaccctacgtcttttcagatctct

SEQ ID NO: 148120 - DNA, 33 bp, Homo sapien
tttcctccaaaccctatgtcttttcagatctct

SEQ ID NO: 148121 - DNA, 33 bp, Homo sapien
acttccctgttctggacgtctcttttatcacct

SEQ ID NO: 148122 - DNA, 33 bp, Homo sapien
acttccctgttctggatgtctcttttatcacct

SEQ ID NO: 148123 - DNA, 33 bp, Homo sapien
gtgctcagtcgtgcaaaaatcacaaagattggc

SEQ ID NO: 148124 - DNA, 33 bp, Homo sapien
gtgctcagtcgtgcaacaatcacaaagattggc

SEQ ID NO: 148125 - DNA, 33 bp, Homo sapien
atctagcactacagtagagagaaggacagacaa

SEQ ID NO: 148126 - DNA, 33 bp, Homo sapien
atctagcactacagtatagagaaggacagacaa

SEQ ID NO: 148127 - DNA, 33 bp, Homo sapien
atgacaactaaatcaacataaatgacaaagtcg

SEQ ID NO: 148128 - DNA, 33 bp, Homo sapien
atgacaactaaatcaagataaatgacaaagtcg

SEQ ID NO: 148129 - DNA, 33 bp, Homo sapien
aggaaataacttgacactgggaaatagccctat

SEQ ID NO: 148130 - DNA, 33 bp, Homo sapien
aggaaataacttgacattgggaaatagccctat

SEQ ID NO: 148131 - DNA, 33 bp, Homo sapien
ctgtctctcctgtctaagcctgaggtcacctgg

SEQ ID NO: 148132 - DNA, 33 bp, Homo sapien
ctgtctctcctgtctaggcctgaggtcacctgg

SEQ ID NO: 148133 - DNA, 33 bp, Homo sapien
gcccagaaacaatcacaggcagagaatggccga

SEQ ID NO: 148134 - DNA, 33 bp, Homo sapien
gcccagaaacaatcacgggcagagaatggccga

SEQ ID NO: 148135 - DNA, 33 bp, Homo sapien
ttgaggaggctgcacaagagtaccaggtgaggc

SEQ ID NO: 148136 - DNA, 33 bp, Homo sapien
ttgaggaggctgcacaggagtaccaggtgaggc

SEQ ID NO: 148137 - DNA, 33 bp, Homo sapien
tggtgggactgtcaacaagttcatccattgtgg

SEQ ID NO: 148138 - DNA, 33 bp, Homo sapien
tggtgggactgtcaacgagttcatccattgtgg

SEQ ID NO: 148139 - DNA, 33 bp, Homo sapien
gatacactgcctgatgaatccttccatgtccca

SEQ ID NO: 148140 - DNA, 33 bp, Homo sapien
gatacactgcctgatgcatccttccatgtccca

SEQ ID NO: 148141 - DNA, 33 bp, Homo sapien
tattgtctcactttcacagttggcaaccaaaat

SEQ ID NO: 148142 - DNA, 33 bp, Homo sapien
tattgtctcactttcatagttggcaaccaaaat

SEQ ID NO: 148143 - DNA, 33 bp, Homo sapien
ctagcactatccagaaattatagtgagcaactt

SEQ ID NO: 148144 - DNA, 33 bp, Homo sapien
ctagcactatccagaagttatagtgagcaactt

SEQ ID NO: 148145 - DNA, 33 bp, Homo sapien
cagcaattgctcattgaatcagtcactgtaggt

SEQ ID NO: 148146 - DNA, 33 bp, Homo sapien
cagcaattgctcattggatcagtcactgtaggt

SEQ ID NO: 148147 - DNA, 33 bp, Homo sapien
gtttggctctgcaatcgcaacagtagcacaagc

SEQ ID NO: 148148 - DNA, 33 bp, Homo sapien
gtttggctctgcaatctcaacagtagcacaagc

SEQ ID NO: 148149 - DNA, 33 bp, Homo sapien
gtgaaaaataaatcttcaactctaggttataac

SEQ ID NO: 148150 - DNA, 33 bp, Homo sapien
gtgaaaaataaatcttgaactctaggttataac

SEQ ID NO: 148151 - DNA, 33 bp, Homo sapien
gtatgtccaacacctagaatagcatttggcata

SEQ ID NO: 148152 - DNA, 33 bp, Homo sapien
gtatgtccaacacctataatagcatttggcata

SEQ ID NO: 148153 - DNA, 33 bp, Homo sapien
gccatgaacccttttacgcctatactctagtgt

SEQ ID NO: 148154 - DNA, 33 bp, Homo sapien
gccatgaacccttttatgcctatactctagtgt

SEQ ID NO: 148155 - DNA, 33 bp, Homo sapien
tgctgccactctggtccaaggcaaaatcatttc

SEQ ID NO: 148156 - DNA, 33 bp, Homo sapien
tgctgccactctggtctaaggcaaaatcatttc

SEQ ID NO: 148157 - DNA, 33 bp, Homo sapien
cagaatccagctcttgaagatcacttatgctca

SEQ ID NO: 148158 - DNA, 33 bp, Homo sapien
cagaatccagctcttgcagatcacttatgctca

SEQ ID NO: 148159 - DNA, 33 bp, Homo sapien
gcattaccttatctcccgattctcttctctcat

SEQ ID NO: 148160 - DNA, 33 bp, Homo sapien
gcattaccttatctcctgattctcttctctcat

SEQ ID NO: 148161 - DNA, 33 bp, Homo sapien
gctgaaaactttaataagtaagtgtacctgacc

SEQ ID NO: 148162 - DNA, 33 bp, Homo sapien
gctgaaaactttaatacgtaagtgtacctgacc

SEQ ID NO: 148163 - DNA, 33 bp, Homo sapien
aaagaatgtcctcttaaacatgttgtcaccctt

SEQ ID NO: 148164 - DNA, 33 bp, Homo sapien
aaagaatgtcctcttatacatgttgtcaccctt

SEQ ID NO: 148165 - DNA, 33 bp, Homo sapien
catataggcacttgctaactatttcttgaatac

SEQ ID NO: 148166 - DNA, 33 bp, Homo sapien
catataggcacttgctgactatttcttgaatac

SEQ ID NO: 148167 - DNA, 33 bp, Homo sapien
ggccatggcctttgaccgctatgtggctatctg

SEQ ID NO: 148168 - DNA, 33 bp, Homo sapien
ggccatggcctttgactgctatgtggctatctg

SEQ ID NO: 148169 - DNA, 33 bp, Homo sapien
acatctatgtgcaaagaaagagttgcatgaaac

SEQ ID NO: 148170 - DNA, 33 bp, Homo sapien
acatctatgtgcaaagcaagagttgcatgaaac

SEQ ID NO: 148171 - DNA, 33 bp, Homo sapien
atggtttttcttaccacagtctgtgcacagtta

SEQ ID NO: 148172 - DNA, 33 bp, Homo sapien
atggtttttcttaccatagtctgtgcacagtta

SEQ ID NO: 148173 - DNA, 33 bp, Homo sapien
acagaaattccctcctcaagatccccaatggaa

SEQ ID NO: 148174 - DNA, 33 bp, Homo sapien
acagaaattccctccttaagatccccaatggaa

SEQ ID NO: 148175 - DNA, 33 bp, Homo sapien
aacccgatcacttttcccccaaacaattacatt

SEQ ID NO: 148176 - DNA, 33 bp, Homo sapien
aacccgatcacttttctcccaaacaattacatt

SEQ ID NO: 148177 - DNA, 33 bp, Homo sapien
ggatgttgcattctgacatatgggtggcacaag

SEQ ID NO: 148178 - DNA, 33 bp, Homo sapien
ggatgttgcattctgagatatgggtggcacaag

SEQ ID NO: 148179 - DNA, 33 bp, Homo sapien
agagggaggagacttacacttttaaagttttct

SEQ ID NO: 148180 - DNA, 33 bp, Homo sapien
agagggaggagacttagacttttaaagttttct

SEQ ID NO: 148181 - DNA, 33 bp, Homo sapien
ctagaattccctttgcaatgaggcctgcaatga

SEQ ID NO: 148182 - DNA, 33 bp, Homo sapien
ctagaattccctttgccatgaggcctgcaatga

SEQ ID NO: 148183 - DNA, 33 bp, Homo sapien
aggctggctgtgggaaaactagcttcaacaata

SEQ ID NO: 148184 - DNA, 33 bp, Homo sapien
aggctggctgtgggaacactagcttcaacaata

SEQ ID NO: 148185 - DNA, 33 bp, Homo sapien; identical to SEQ ID NO: 148183

SEQ ID NO: 148186 - DNA, 33 bp, Homo sapien; identical to SEQ ID NO: 148184

SEQ ID NO: 148187 - DNA, 33 bp, Homo sapien
tcaatcccatcatctacggcgttaagaccaagc

SEQ ID NO: 148188 - DNA, 33 bp, Homo sapien
tcaatcccatcatctatggcgttaagaccaagc

SEQ ID NO: 148189 - DNA, 33 bp, Homo sapien
aagctcagtgccaacactctgtttagaatttgt

SEQ ID NO: 148190 - DNA, 33 bp, Homo sapien
aagctcagtgccaacagtctgtttagaatttgt

SEQ ID NO: 148191 - DNA, 33 bp, Homo sapien
acattctaacagttgaaccctagactctaccta

SEQ ID NO: 148192 - DNA, 33 bp, Homo sapien
acattctaacagttgatccctagactctaccta

SEQ ID NO: 148193 - DNA, 33 bp, Homo sapien
gaaatgaacagagttaggatgacatgaaagaag

SEQ ID NO: 148194 - DNA, 33 bp, Homo sapien
gaaatgaacagagttatgatgacatgaaagaag

SEQ ID NO: 148195 - DNA, 33 bp, Homo sapien
gctatttagctgcaaacgtgcattatccttaaa

SEQ ID NO: 148196 - DNA, 33 bp, Homo sapien
gctatttagctgcaaaggtgcattatccttaaa

SEQ ID NO: 148197 - DNA, 33 bp, Homo sapien
gagggctgcatcagcccggataatgaagagaag

SEQ ID NO: 148198 - DNA, 33 bp, Homo sapien
gagggctgcatcagcctggataatgaagagaag

SEQ ID NO: 148199 - DNA, 33 bp, Homo sapien; identical to SEQ ID NO: 148197

SEQ ID NO: 148200 - DNA, 33 bp, Homo sapien; identical to SEQ ID NO: 148198

SEQ ID NO: 148201 - DNA, 33 bp, Homo sapien
ggaggcatctgcaggccaaaagtagacaacaca

SEQ ID NO: 148202 - DNA, 33 bp, Homo sapien
ggaggcatctgcaggctaaaagtagacaacaca

SEQ ID NO: 148203 - DNA, 33 bp, Homo sapien
ggctgggagatagttacgaatttggaatgctgt

SEQ ID NO: 148204 - DNA, 33 bp, Homo sapien
ggctgggagatagttatgaatttggaatgctgt

SEQ ID NO: 148205 - DNA, 33 bp, Homo sapien
ttcagggtatgggtgtcaattagcttgctgtgg

SEQ ID NO: 148206 - DNA, 33 bp, Homo sapien
ttcagggtatgggtgtgaattagcttgctgtgg

SEQ ID NO: 148207 - DNA, 33 bp, Homo sapien
cccttctcatcagtgaacctttgtgtggatatt

SEQ ID NO: 148208 - DNA, 33 bp, Homo sapien
cccttctcatcagtgatcctttgtgtggatatt

SEQ ID NO: 148209 - DNA, 33 bp, Homo sapien
gaattcccatctcatacgcttagttatggcctg

SEQ ID NO: 148210 - DNA, 33 bp, Homo sapien
gaattcccatctcatatgcttagttatggcctg

SEQ ID NO: 148211 - DNA, 33 bp, Homo sapien
gatcatgatggatacaaatgtcatcttcagatt

SEQ ID NO: 148212 - DNA, 33 bp, Homo sapien
gatcatgatggatacagatgtcatcttcagatt

SEQ ID NO: 148213 - DNA, 33 bp, Homo sapien
agccacaccaaaataacggaacggcgtagaggg

SEQ ID NO: 148214 - DNA, 33 bp, Homo sapien
agccacaccaaaataatggaacggcgtagaggg

SEQ ID NO: 148215 - DNA, 33 bp, Homo sapien
tatcccatttaaacagacagatgagtttgcagt

SEQ ID NO: 148216 - DNA, 33 bp, Homo sapien
tatcccatttaaacagccagatgagtttgcagt

SEQ ID NO: 148217 - DNA, 33 bp, Homo sapien
tcctgtcatgactaagaatttatatgccctgta

SEQ ID NO: 148218 - DNA, 33 bp, Homo sapien
tcctgtcatgactaagtatttatatgccctgta

SEQ ID NO: 148219 - DNA, 33 bp, Homo sapien
aacctcagacaaatcactaggggcagaggtcca

SEQ ID NO: 148220 - DNA, 33 bp, Homo sapien
aacctcagacaaatcattaggggcagaggtcca

SEQ ID NO: 148221 - DNA, 33 bp, Homo sapien
gttggaaatgaaaatccagtctacagttcccga

SEQ ID NO: 148222 - DNA, 33 bp, Homo sapien
gttggaaatgaaaatctagtctacagttcccga

SEQ ID NO: 148223 - DNA, 33 bp, Homo sapien
tggtgcctataataaaaaattctgaatgccaac

SEQ ID NO: 148224 - DNA, 33 bp, Homo sapien
tggtgcctataataaagaattctgaatgccaac

SEQ ID NO: 148225 - DNA, 33 bp, Homo sapien
tccccaacactatgcacccccctttaactcata

SEQ ID NO: 148226 - DNA, 33 bp, Homo sapien
tccccaacactatgcatccccctttaactcata

SEQ ID NO: 148227 - DNA, 33 bp, Homo sapien
acccattcagagaaaaagtaatgtgcttcctta

SEQ ID NO: 148228 - DNA, 33 bp, Homo sapien
acccattcagagaaaaggtaatgtgcttcctta

SEQ ID NO: 148229 - DNA, 33 bp, Homo sapien
gatttgacaatctgaaaaaaccaatattaaacc

SEQ ID NO: 148230 - DNA, 33 bp, Homo sapien
gatttgacaatctgaacaaaccaatattaaacc

SEQ ID NO: 148231 - DNA, 33 bp, Homo sapien
gaacccggcctggagacagtagacggtggggag

SEQ ID NO: 148232 - DNA, 33 bp, Homo sapien
gaacccggcctggagagagtagacggtggggag

SEQ ID NO: 148233 - DNA, 33 bp, Homo sapien
ctcacagcgacaacagaccacttctttctgttt

SEQ ID NO: 148234 - DNA, 33 bp, Homo sapien
ctcacagcgacaacaggccacttctttctgttt

SEQ ID NO: 148235 - DNA, 33 bp, Homo sapien
agtagaaggactaaaaggtgatcaaaaataaca

SEQ ID NO: 148236 - DNA, 33 bp, Homo sapien
agtagaaggactaaaatgtgatcaaaaataaca

SEQ ID NO: 148237 - DNA, 33 bp, Homo sapien
ttaataaatggtgccaagaaaatgggctagcca

SEQ ID NO: 148238 - DNA, 33 bp, Homo sapien
ttaataaatggtgccaggaaaatgggctagcca

SEQ ID NO: 148239 - DNA, 33 bp, Homo sapien
actgggatgaagtagaaagcttatccaggtaga

SEQ ID NO: 148240 - DNA, 33 bp, Homo sapien
actgggatgaagtagagagcttatccaggtaga

SEQ ID NO: 148241 - DNA, 33 bp, Homo sapien
gacatgttgaaacttacggaagaacatcattga

SEQ ID NO: 148242 - DNA, 33 bp, Homo sapien
gacatgttgaaacttatggaagaacatcattga

SEQ ID NO: 148243 - DNA, 33 bp, Homo sapien
caagaacagtacttacccttagccctcaatggt

SEQ ID NO: 148244 - DNA, 33 bp, Homo sapien
caagaacagtacttactcttagccctcaatggt

SEQ ID NO: 148245 - DNA, 33 bp, Homo sapien
tgagaacacagtacacgcaatgtaaggaagatg

SEQ ID NO: 148246 - DNA, 33 bp, Homo sapien
tgagaacacagtacactcaatgtaaggaagatg

SEQ ID NO: 148247 - DNA, 33 bp, Homo sapien
gagggagtgaggaataaaaggctacacactggg

SEQ ID NO: 148248 - DNA, 33 bp, Homo sapien
gagggagtgaggaatagaaggctacacactggg

SEQ ID NO: 148249 - DNA, 33 bp, Homo sapien
ttctacttggtgtccccagaatagctgcagata

SEQ ID NO: 148250 - DNA, 33 bp, Homo sapien
ttctacttggtgtccctagaatagctgcagata

SEQ ID NO: 148251 - DNA, 33 bp, Homo sapien
agacccattaactgagacataatcccttgtatc

SEQ ID NO: 148252 - DNA, 33 bp, Homo sapien
agacccattaactgagtcataatcccttgtatc

SEQ ID NO: 148253 - DNA, 33 bp, Homo sapien
actagaggcttcatcaatctccttgtttgtggc

SEQ ID NO: 148254 - DNA, 33 bp, Homo sapien
actagaggcttcatcagtctccttgtttgtggc

SEQ ID NO: 148255 - DNA, 33 bp, Homo sapien
aacatggtgatgtattaaaaggtcttgtattgt

SEQ ID NO: 148256 - DNA, 33 bp, Homo sapien
aacatggtgatgtattcaaaggtcttgtattgt

SEQ ID NO: 148257 - DNA, 33 bp, Homo sapien
ttggtatttggagaagcctctctcggatctgct

SEQ ID NO: 148258 - DNA, 33 bp, Homo sapien
ttggtatttggagaaggctctctcggatctgct

SEQ ID NO: 148259 - DNA, 33 bp, Homo sapien
taaagcagaagacttaccttatgattgcttttc

SEQ ID NO: 148260 - DNA, 33 bp, Homo sapien
taaagcagaagacttatcttatgattgcttttc

SEQ ID NO: 148261 - DNA, 33 bp, Homo sapien
cacaactttaggaaaacgaagacaagattcatt

SEQ ID NO: 148262 - DNA, 33 bp, Homo sapien
cacaactttaggaaaatgaagacaagattcatt

SEQ ID NO: 148263 - DNA, 33 bp, Homo sapien
gactgtggcaatgatactaaatgatggcatttg

SEQ ID NO: 148264 - DNA, 33 bp, Homo sapien
gactgtggcaatgatattaaatgatggcatttg

SEQ ID NO: 148265 - DNA, 33 bp, Homo sapien
ccagctcttgtagaacggcagccttttgacttc

SEQ ID NO: 148266 - DNA, 33 bp, Homo sapien
ccagctcttgtagaactgcagccttttgacttc

SEQ ID NO: 148267 - DNA, 33 bp, Homo sapien
atatgaatatgaacttcctgatcctcttataac

SEQ ID NO: 148268 - DNA, 33 bp, Homo sapien
atatgaatatgaactttctgatcctcttataac

SEQ ID NO: 148269 - DNA, 33 bp, Homo sapien
cctggtattttgaaatcagtcttatctagagca

SEQ ID NO: 148270 - DNA, 33 bp, Homo sapien
cctggtattttgaaattagtcttatctagagca

SEQ ID NO: 148271 - DNA, 33 bp, Homo sapien
aagcctgacaaaaccacagagcataagtaagtt

SEQ ID NO: 148272 - DNA, 33 bp, Homo sapien
aagcctgacaaaaccagagagcataagtaagtt

SEQ ID NO: 148273 - DNA, 33 bp, Homo sapien
ccaggggcagtttcaacagagtggagaagtagt

SEQ ID NO: 148274 - DNA, 33 bp, Homo sapien
ccaggggcagtttcaagagagtggagaagtagt

SEQ ID NO: 148275 - DNA, 33 bp, Homo sapien
agtttcactaattgaacactacttctccactct

SEQ ID NO: 148276 - DNA, 33 bp, Homo sapien
agtttcactaattgaagactacttctccactct

SEQ ID NO: 148277 - DNA, 33 bp, Homo sapien
atgagaatttctctaaatccctgggcagtggtc

SEQ ID NO: 148278 - DNA, 33 bp, Homo sapien
atgagaatttctctaagtccctgggcagtggtc

SEQ ID NO: 148279 - DNA, 33 bp, Homo sapien
atcctatgtatggttccaaccatgcaggctccc

SEQ ID NO: 148280 - DNA, 33 bp, Homo sapien
atcctatgtatggttctaaccatgcaggctccc

SEQ ID NO: 148281 - DNA, 33 bp, Homo sapien
cccaaaacaaacataactggaagtagaaaccac

SEQ ID NO: 148282 - DNA, 33 bp, Homo sapien
cccaaaacaaacataattggaagtagaaaccac

SEQ ID NO: 148283 - DNA, 33 bp, Homo sapien
aagttattcaataggactcaaggcatagaggtt

SEQ ID NO: 148284 - DNA, 33 bp, Homo sapien
aagttattcaataggattcaaggcatagaggtt

SEQ ID NO: 148285 - DNA, 33 bp, Homo sapien
tgccttggaacaaacactgcctagttaacactt

SEQ ID NO: 148286 - DNA, 33 bp, Homo sapien
tgccttggaacaaacagtgcctagttaacactt

SEQ ID NO: 148287 - DNA, 33 bp, Homo sapien
gtcccgttgcatttagaatagaacacatagtca

SEQ ID NO: 148288 - DNA, 33 bp, Homo sapien
gtcccgttgcatttaggatagaacacatagtca

SEQ ID NO: 148289 - DNA, 33 bp, Homo sapien
cttgtaaaccctaaaccgagggcagcaggaggg

SEQ ID NO: 148290 - DNA, 33 bp, Homo sapien
cttgtaaaccctaaactgagggcagcaggaggg

SEQ ID NO: 148291 - DNA, 33 bp, Homo sapien
ctgtagcacatagttagcttcctttatgtgccg

SEQ ID NO: 148292 - DNA, 33 bp, Homo sapien
ctgtagcacatagttatcttcctttatgtgccg

SEQ ID NO: 148293 - DNA, 33 bp, Homo sapien
gattcagggtaaaaaaaactcctgtgcttcaga

SEQ ID NO: 148294 - DNA, 33 bp, Homo sapien
gattcagggtaaaaaagactcctgtgcttcaga

SEQ ID NO: 148295 - DNA, 33 bp, Homo sapien
agagaatgcaacagaactgttcaaacagcagaa

SEQ ID NO: 148296 - DNA, 33 bp, Homo sapien
agagaatgcaacagaattgttcaaacagcagaa

SEQ ID NO: 148297 - DNA, 33 bp, Homo sapien
tcaagattctgcatcaactaatgtaaatagcca

SEQ ID NO: 148298 - DNA, 33 bp, Homo sapien
tcaagattctgcatcagctaatgtaaatagcca

SEQ ID NO: 148299 - DNA, 33 bp, Homo sapien
tagtccttgccattcaacctttacaacctgcat

SEQ ID NO: 148300 - DNA, 33 bp, Homo sapien
tagtccttgccattcagcctttacaacctgcat

SEQ ID NO: 148301 - DNA, 33 bp, Homo sapien
aaagaaacagccaacaaaatcaaatatcctgtt

SEQ ID NO: 148302 - DNA, 33 bp, Homo sapien
aaagaaacagccaacagaatcaaatatcctgtt

SEQ ID NO: 148303 - DNA, 33 bp, Homo sapien
tttctaaaaagccaaaattcttggacatgatta

SEQ ID NO: 148304 - DNA, 33 bp, Homo sapien
tttctaaaaagccaaatttcttggacatgatta

SEQ ID NO: 148305 - DNA, 33 bp, Homo sapien
tagtgcttggctaacacagaaaatgtctactgc

SEQ ID NO: 148306 - DNA, 33 bp, Homo sapien
tagtgcttggctaacagagaaaatgtctactgc

SEQ ID NO: 148307 - DNA, 33 bp, Homo sapien
gtgtgatttgtgttgacgtaacagtagtcatat

SEQ ID NO: 148308 - DNA, 33 bp, Homo sapien
gtgtgatttgtgttgatgtaacagtagtcatat

SEQ ID NO: 148309 - DNA, 33 bp, Homo sapien
aacaactaaccaaaccaagtgtcctgttctttg

SEQ ID NO: 148310 - DNA, 33 bp, Homo sapien
aacaactaaccaaaccgagtgtcctgttctttg

SEQ ID NO: 148311 - DNA, 33 bp, Homo sapien
gaggctgcctcttgaaaaaaggtgaatttaaac

SEQ ID NO: 148312 - DNA, 33 bp, Homo sapien
gaggctgcctcttgaagaaaggtgaatttaaac

SEQ ID NO: 148313 - DNA, 33 bp, Homo sapien
cctattaatgtatagacgatgtaagagaatggt

SEQ ID NO: 148314 - DNA, 33 bp, Homo sapien
cctattaatgtatagatgatgtaagagaatggt

SEQ ID NO: 148315 - DNA, 33 bp, Homo sapien
aaaccacttattttaaaaagcagaggcccagtc

SEQ ID NO: 148316 - DNA, 33 bp, Homo sapien
aaaccacttattttaacaagcagaggcccagtc

SEQ ID NO: 148317 - DNA, 33 bp, Homo sapien
ccacctgggagatccagctaaaattgagattct

SEQ ID NO: 148318 - DNA, 33 bp, Homo sapien
ccacctgggagatccatctaaaattgagattct

SEQ ID NO: 148319 - DNA, 33 bp, Homo sapien
tctacacctacatcctaacagggctcaattcct

SEQ ID NO: 148320 - DNA, 33 bp, Homo sapien
tctacacctacatcctgacagggctcaattcct

SEQ ID NO: 148321 - DNA, 33 bp, Homo sapien
aaccagggagaagtagaaaaggctgagaagaag

SEQ ID NO: 148322 - DNA, 33 bp, Homo sapien
aaccagggagaagtagtaaaggctgagaagaag

SEQ ID NO: 148323 - DNA, 33 bp, Homo sapien
aatgcttattaaagaaagtcagtaaagggtcaa

SEQ ID NO: 148324 - DNA, 33 bp, Homo sapien
aatgcttattaaagaaggtcagtaaagggtcaa

SEQ ID NO: 148325 - DNA, 33 bp, Homo sapien
ggggagatcattttcaggtgtaaggtgcaattt

SEQ ID NO: 148326 - DNA, 33 bp, Homo sapien
ggggagatcattttcatgtgtaaggtgcaattt

SEQ ID NO: 148327 - DNA, 33 bp, Homo sapien
tgccataggatagggaagagtagtgtttgcttc

SEQ ID NO: 148328 - DNA, 33 bp, Homo sapien
tgccataggatagggacgagtagtgtttgcttc

SEQ ID NO: 148329 - DNA, 33 bp, Homo sapien
atgagtgatcatcttacaataaactttgtggcc

SEQ ID NO: 148330 - DNA, 33 bp, Homo sapien
atgagtgatcatcttataataaactttgtggcc

SEQ ID NO: 148331 - DNA, 33 bp, Homo sapien
gtactcaccagagaaacggtaaagacgtttatt

SEQ ID NO: 148332 - DNA, 33 bp, Homo sapien
gtactcaccagagaaatggtaaagacgtttatt

SEQ ID NO: 148333 - DNA, 33 bp, Homo sapien
tatacggagagcataggagacataatgaccatg

SEQ ID NO: 148334 - DNA, 33 bp, Homo sapien
tatacggagagcatagtagacataatgaccatg

SEQ ID NO: 148335 - DNA, 33 bp, Homo sapien
aggaaagttttgtgacaggatagctggagatcc

SEQ ID NO: 148336 - DNA, 33 bp, Homo sapien
aggaaagttttgtgacgggatagctggagatcc

SEQ ID NO: 148337 - DNA, 33 bp, Homo sapien
atttgtatcttaaaagcacagagctgagacttc

SEQ ID NO: 148338 - DNA, 33 bp, Homo sapien
atttgtatcttaaaagtacagagctgagacttc

SEQ ID NO: 148339 - DNA, 33 bp, Homo sapien
tgagagatcttgatggcagatgctgcttattgt

SEQ ID NO: 148340 - DNA, 33 bp, Homo sapien
tgagagatcttgatggtagatgctgcttattgt

SEQ ID NO: 148341 - DNA, 33 bp, Homo sapien
atgagatttcaagagacgtttgtgtttaggcct

SEQ ID NO: 148342 - DNA, 33 bp, Homo sapien
atgagatttcaagagaggtttgtgtttaggcct

SEQ ID NO: 148343 - DNA, 33 bp, Homo sapien
tagcagaggcaggaaacgtaggaagaggtaaca

SEQ ID NO: 148344 - DNA, 33 bp, Homo sapien
tagcagaggcaggaaatgtaggaagaggtaaca

SEQ ID NO: 148345 - DNA, 33 bp, Homo sapien
tcctgcctcaatagcaagtcatggtatcctcac

SEQ ID NO: 148346 - DNA, 33 bp, Homo sapien
tcctgcctcaatagcaggtcatggtatcctcac

SEQ ID NO: 148347 - DNA, 33 bp, Homo sapien
ttccatgaatcccccaatatcattcttgctggg

SEQ ID NO: 148348 - DNA, 33 bp, Homo sapien
ttccatgaatcccccagtatcattcttgctggg

SEQ ID NO: 148349 - DNA, 33 bp, Homo sapien
aggactgaaggcctccacgtggatttccagtct

SEQ ID NO: 148350 - DNA, 33 bp, Homo sapien
aggactgaaggcctccccgtggatttccagtct

SEQ ID NO: 148351 - DNA, 33 bp, Homo sapien
ctgggagctcctgttcccctattcctgagaaaa

SEQ ID NO: 148352 - DNA, 33 bp, Homo sapien
ctgggagctcctgttctcctattcctgagaaaa

SEQ ID NO: 148353 - DNA, 33 bp, Homo sapien
tgcatagtgctgctgtaaaattgtatgagataa

SEQ ID NO: 148354 - DNA, 33 bp, Homo sapien
tgcatagtgctgctgtgaaattgtatgagataa

SEQ ID NO: 148355 - DNA, 33 bp, Homo sapien
cactctaccttcagagacaatagtgttgcatat

SEQ ID NO: 148356 - DNA, 33 bp, Homo sapien
cactctaccttcagaggcaatagtgttgcatat

SEQ ID NO: 148357 - DNA, 33 bp, Homo sapien
tcactgcctatcagaaacacctatggaactttt

SEQ ID NO: 148358 - DNA, 33 bp, Homo sapien
tcactgcctatcagaatcacctatggaactttt

SEQ ID NO: 148359 - DNA, 33 bp, Homo sapien
ccaatgttatcttcaacacctgccattccatac

SEQ ID NO: 148360 - DNA, 33 bp, Homo sapien
ccaatgttatcttcaagacctgccattccatac

SEQ ID NO: 148361 - DNA, 33 bp, Homo sapien
cagggactttgagaccaggaaagcaatctgact

SEQ ID NO: 148362 - DNA, 33 bp, Homo sapien
cagggactttgagaccgggaaagcaatctgact

SEQ ID NO: 148363 - DNA, 33 bp, Homo sapien
ctggctatgtgttcagcacagaaggaatcaggt

SEQ ID NO: 148364 - DNA, 33 bp, Homo sapien
ctggctatgtgttcaggacagaaggaatcaggt

SEQ ID NO: 148365 - DNA, 33 bp, Homo sapien
cattggaagtaatggccagaatttaataatacc

SEQ ID NO: 148366 - DNA, 33 bp, Homo sapien
cattggaagtaatggctagaatttaataatacc

SEQ ID NO: 148367 - DNA, 33 bp, Homo sapien
taaaattagtttcagcagactgggttctaattt

SEQ ID NO: 148368 - DNA, 33 bp, Homo sapien
taaaattagtttcagcggactgggttctaattt

SEQ ID NO: 148369 - DNA, 33 bp, Homo sapien
tctctaacttagactacgggggggatacactac

SEQ ID NO: 148370 - DNA, 33 bp, Homo sapien
tctctaacttagactatgggggggatacactac

SEQ ID NO: 148371 - DNA, 33 bp, Homo sapien
tttcctgcttctgacaccttctcatctctcatc

SEQ ID NO: 148372 - DNA, 33 bp, Homo sapien
tttcctgcttctgacatcttctcatctctcatc

SEQ ID NO: 148373 - DNA, 33 bp, Homo sapien
aaaaccactttactccagcaaaacactgcagaa

SEQ ID NO: 148374 - DNA, 33 bp, Homo sapien
aaaaccactttactccggcaaaacactgcagaa

SEQ ID NO: 148375 - DNA, 33 bp, Homo sapien
tgcccaggggcggtcaatctggcctattaaggc

SEQ ID NO: 148376 - DNA, 33 bp, Homo sapien
tgcccaggggcggtcattctggcctattaaggc

SEQ ID NO: 148377 - DNA, 33 bp, Homo sapien
caagcaataagatcacaaaaggcagctgtaaaa

SEQ ID NO: 148378 - DNA, 33 bp, Homo sapien
caagcaataagatcacgaaaggcagctgtaaaa

SEQ ID NO: 148379 - DNA, 33 bp, Homo sapien
ttccaaagcggtgtacaactgagaggccaataa

SEQ ID NO: 148380 - DNA, 33 bp, Homo sapien
ttccaaagcggtgtaccactgagaggccaataa

SEQ ID NO: 148381 - DNA, 33 bp, Homo sapien
actccaatgtcctctcacactcctattgtgtcc

SEQ ID NO: 148382 - DNA, 33 bp, Homo sapien
actccaatgtcctctcgcactcctattgtgtcc

SEQ ID NO: 148383 - DNA, 33 bp, Homo sapien
ggtctctggaggacgaacattccaggttgtgag

SEQ ID NO: 148384 - DNA, 33 bp, Homo sapien
ggtctctggaggacgagcattccaggttgtgag

SEQ ID NO: 148385 - DNA, 33 bp, Homo sapien
gatctagaagaaagggccaccaggatttactaa

SEQ ID NO: 148386 - DNA, 33 bp, Homo sapien
gatctagaagaaagggtcaccaggatttactaa

SEQ ID NO: 148387 - DNA, 33 bp, Homo sapien
aacacgatagatatcaacccaaatattacacag

SEQ ID NO: 148388 - DNA, 33 bp, Homo sapien
aacacgatagatatcaccccaaatattacacag

SEQ ID NO: 148389 - DNA, 33 bp, Homo sapien
cttactatccatgctaagaattccagtctgagg

SEQ ID NO: 148390 - DNA, 33 bp, Homo sapien
cttactatccatgctaggaattccagtctgagg

SEQ ID NO: 148391 - DNA, 33 bp, Homo sapien
atatcgttgtagcgttcaaaatagttattccaa

SEQ ID NO: 148392 - DNA, 33 bp, Homo sapien
atatcgttgtagcgtttaaaatagttattccaa

SEQ ID NO: 148393 - DNA, 33 bp, Homo sapien
gagacacttaaagagaactgtttaagaagagtt

SEQ ID NO: 148394 - DNA, 33 bp, Homo sapien
gagacacttaaagagacctgtttaagaagagtt

SEQ ID NO: 148395 - DNA, 33 bp, Homo sapien
ttgctcattagttttaacgcaggacaactcaag

SEQ ID NO: 148396 - DNA, 33 bp, Homo sapien
ttgctcattagttttagcgcaggacaactcaag

SEQ ID NO: 148397 - DNA, 33 bp, Homo sapien
attttcataccacataacgagtgtgagttagat

SEQ ID NO: 148398 - DNA, 33 bp, Homo sapien
attttcataccacatagcgagtgtgagttagat

SEQ ID NO: 148399 - DNA, 33 bp, Homo sapien
ttagagaaagctgtgtgaagattttattcactc

SEQ ID NO: 148400 - DNA, 33 bp, Homo sapien
ttagagaaagctgtgttaagattttattcactc

SEQ ID NO: 148401 - DNA, 33 bp, Homo sapien
aaacccaactagaatacggttaacatggaaggc

SEQ ID NO: 148402 - DNA, 33 bp, Homo sapien
aaacccaactagaatatggttaacatggaaggc

SEQ ID NO: 148403 - DNA, 33 bp, Homo sapien
catctttcatttccaaacaccacaaagatgcac

SEQ ID NO: 148404 - DNA, 33 bp, Homo sapien
catctttcatttccaaccaccacaaagatgcac

SEQ ID NO: 148405 - DNA, 33 bp, Homo sapien
gccatttgtaaccccccgaggtatactaccatc

SEQ ID NO: 148406 - DNA, 33 bp, Homo sapien
gccatttgtaaccccctgaggtatactaccatc

SEQ ID NO: 148407 - DNA, 33 bp, Homo sapien
taactgcatatttgacagaagagtatattaact

SEQ ID NO: 148408 - DNA, 33 bp, Homo sapien
taactgcatatttgacggaagagtatattaact

SEQ ID NO: 148409 - DNA, 33 bp, Homo sapien
ctttggacatctcctccaagacaacctggaaca

SEQ ID NO: 148410 - DNA, 33 bp, Homo sapien
ctttggacatctcctctaagacaacctggaaca

SEQ ID NO: 148411 - DNA, 33 bp, Homo sapien
gaaaccaagaatatcaagtggcttcagtggttt

SEQ ID NO: 148412 - DNA, 33 bp, Homo sapien
gaaaccaagaatatcaggtggcttcagtggttt

SEQ ID NO: 148413 - DNA, 33 bp, Homo sapien
tggcatttttagactgcagagtatgggaaaaga

SEQ ID NO: 148414 - DNA, 33 bp, Homo sapien
tggcatttttagactgtagagtatgggaaaaga

SEQ ID NO: 148415 - DNA, 33 bp, Homo sapien
gctagataagaataaggcctttgtgctcatttc

SEQ ID NO: 148416 - DNA, 33 bp, Homo sapien
gctagataagaataagtcctttgtgctcatttc

SEQ ID NO: 148417 - DNA, 33 bp, Homo sapien
tggtacatttcttccacctatcactatttttcc

SEQ ID NO: 148418 - DNA, 33 bp, Homo sapien
tggtacatttcttccatctatcactatttttcc

SEQ ID NO: 148419 - DNA, 33 bp, Homo sapien
attcttccaaaacagcaaaatgaaatatatatt

SEQ ID NO: 148420 - DNA, 33 bp, Homo sapien
attcttccaaaacagcgaaatgaaatatatatt

SEQ ID NO: 148421 - DNA, 33 bp, Homo sapien
attcagtgatggctaacgtatacctgcttttac

SEQ ID NO: 148422 - DNA, 33 bp, Homo sapien
attcagtgatggctaatgtatacctgcttttac

SEQ ID NO: 148423 - DNA, 33 bp, Homo sapien
gtgaaatcagtctatacagctgcattgtccaga

SEQ ID NO: 148424 - DNA, 33 bp, Homo sapien
gtgaaatcagtctatatagctgcattgtccaga

SEQ ID NO: 148425 - DNA, 33 bp, Homo sapien
ttgctagatgaggaagaatagactacagttctg

SEQ ID NO: 148426 - DNA, 33 bp, Homo sapien
ttgctagatgaggaaggatagactacagttctg

SEQ ID NO: 148427 - DNA, 33 bp, Homo sapien
agacagagcaaaaaagaaaccaccctctctccc

SEQ ID NO: 148428 - DNA, 33 bp, Homo sapien
agacagagcaaaaaaggaaccaccctctctccc

SEQ ID NO: 148429 - DNA, 33 bp, Homo sapien
ttataatccagagacaatgatgtacatctctct

SEQ ID NO: 148430 - DNA, 33 bp, Homo sapien
ttataatccagagacagtgatgtacatctctct

SEQ ID NO: 148431 - DNA, 33 bp, Homo sapien
ggcataggagcctagaaactgggtgtaaagttt

SEQ ID NO: 148432 - DNA, 33 bp, Homo sapien
ggcataggagcctagagactgggtgtaaagttt

SEQ ID NO: 148433 - DNA, 33 bp, Homo sapien
ttgcattaatactttcaagcacctgattattga

SEQ ID NO: 148434 - DNA, 33 bp, Homo sapien
ttgcattaatactttcgagcacctgattattga

SEQ ID NO: 148435 - DNA, 33 bp, Homo sapien
ttggctccagaataacaaccaataggatcatgc

SEQ ID NO: 148436 - DNA, 33 bp, Homo sapien
ttggctccagaataacgaccaataggatcatgc

SEQ ID NO: 148437 - DNA, 33 bp, Homo sapien
cttaggactattgctacaccaatctttagaatt

SEQ ID NO: 148438 - DNA, 33 bp, Homo sapien
cttaggactattgctataccaatctttagaatt

SEQ ID NO: 148439 - DNA, 33 bp, Homo sapien
ctcttcctggatatcacgctggttctaagtata

SEQ ID NO: 148440 - DNA, 33 bp, Homo sapien
ctcttcctggatatcatgctggttctaagtata

SEQ ID NO: 148441 - DNA, 33 bp, Homo sapien
ctcattcaaattagaaactactatttttcaaca

SEQ ID NO: 148442 - DNA, 33 bp, Homo sapien
ctcattcaaattagaagctactatttttcaaca

SEQ ID NO: 148443 - DNA, 33 bp, Homo sapien
atttgatctcatacaactgccagtacttatgtc

SEQ ID NO: 148444 - DNA, 33 bp, Homo sapien
atttgatctcatacaattgccagtacttatgtc

SEQ ID NO: 148445 - DNA, 33 bp, Homo sapien
acttaccatgttcttacctgggccctttcctac

SEQ ID NO: 148446 - DNA, 33 bp, Homo sapien
acttaccatgttcttatctgggccctttcctac

SEQ ID NO: 148447 - DNA, 33 bp, Homo sapien
actcataatcagttgacaaacaattacaaaaca

SEQ ID NO: 148448 - DNA, 33 bp, Homo sapien
actcataatcagttgagaaacaattacaaaaca

SEQ ID NO: 148449 - DNA, 33 bp, Homo sapien
atagagaagcctaacaagtggtaacataggctg

SEQ ID NO: 148450 - DNA, 33 bp, Homo sapien
atagagaagcctaacacgtggtaacataggctg

SEQ ID NO: 148451 - DNA, 33 bp, Homo sapien
ggaagatgataaagccaaaggctgaaggtgggt

SEQ ID NO: 148452 - DNA, 33 bp, Homo sapien
ggaagatgataaagccgaaggctgaaggtgggt

SEQ ID NO: 148453 - DNA, 33 bp, Homo sapien
atacacacaatactcaaaatgcaaagtattgaa

SEQ ID NO: 148454 - DNA, 33 bp, Homo sapien
atacacacaatactcacaatgcaaagtattgaa

SEQ ID NO: 148455 - DNA, 33 bp, Homo sapien
aaatgaaggacatggaataaggggcgattattt

SEQ ID NO: 148456 - DNA, 33 bp, Homo sapien
aaatgaaggacatggagtaaggggcgattattt

SEQ ID NO: 148457 - DNA, 33 bp, Homo sapien
gtggtgggatggactacctcaaaatactctgaa

SEQ ID NO: 148458 - DNA, 33 bp, Homo sapien
gtggtgggatggactatctcaaaatactctgaa

SEQ ID NO: 148459 - DNA, 33 bp, Homo sapien
caaaacaatgaataccggcaattccagcccaaa

SEQ ID NO: 148460 - DNA, 33 bp, Homo sapien
caaaacaatgaatacctgcaattccagcccaaa

SEQ ID NO: 148461 - DNA, 33 bp, Homo sapien
ctgatagatgaaaaatgatgacctttgtgacct

SEQ ID NO: 148462 - DNA, 33 bp, Homo sapien
ctgatagatgaaaaattatgacctttgtgacct

SEQ ID NO: 148463 - DNA, 33 bp, Homo sapien
tggatctgcttcagtccagtgtgaggaatctcc

SEQ ID NO: 148464 - DNA, 33 bp, Homo sapien
tggatctgcttcagtctagtgtgaggaatctcc

SEQ ID NO: 148465 - DNA, 33 bp, Homo sapien
cactcagtaaagctgaagaatgcataaaaggaa

SEQ ID NO: 148466 - DNA, 33 bp, Homo sapien
cactcagtaaagctgaggaatgcataaaaggaa

SEQ ID NO: 148467 - DNA, 33 bp, Homo sapien
ttgatgtgtattttagaatccaccctatagaat

SEQ ID NO: 148468 - DNA, 33 bp, Homo sapien
ttgatgtgtattttaggatccaccctatagaat

SEQ ID NO: 148469 - DNA, 33 bp, Homo sapien
acaattagaactctcaacttggaaaggctaaat

SEQ ID NO: 148470 - DNA, 33 bp, Homo sapien
acaattagaactctcatcttggaaaggctaaat

SEQ ID NO: 148471 - DNA, 33 bp, Homo sapien
ctaaaggagagtatgaagatataaacaaaggtg

SEQ ID NO: 148472 - DNA, 33 bp, Homo sapien
ctaaaggagagtatgaggatataaacaaaggtg

SEQ ID NO: 148473 - DNA, 33 bp, Homo sapien
gttgatctctataaaccacagtgttttcattgg

SEQ ID NO: 148474 - DNA, 33 bp, Homo sapien
gttgatctctataaactacagtgttttcattgg

SEQ ID NO: 148475 - DNA, 33 bp, Homo sapien
aaaagcgggtatcaaaacaccttctttctagct

SEQ ID NO: 148476 - DNA, 33 bp, Homo sapien
aaaagcgggtatcaaagcaccttctttctagct

SEQ ID NO: 148477 - DNA, 33 bp, Homo sapien
ctatatttaatttaacaaacaactgaacttaaa

SEQ ID NO: 148478 - DNA, 33 bp, Homo sapien
ctatatttaatttaaccaacaactgaacttaaa

SEQ ID NO: 148479 - DNA, 33 bp, Homo sapien
taaatatgttcagcaaatacaattaaaaacttt

SEQ ID NO: 148480 - DNA, 33 bp, Homo sapien
taaatatgttcagcaagtacaattaaaaacttt

SEQ ID NO: 148481 - DNA, 33 bp, Homo sapien
tctttctttagacccacgagtggataagctagt

SEQ ID NO: 148482 - DNA, 33 bp, Homo sapien
tctttctttagacccatgagtggataagctagt

SEQ ID NO: 148483 - DNA, 33 bp, Homo sapien
ccctttcacatcacccaagaaaagtgttcctta

SEQ ID NO: 148484 - DNA, 33 bp, Homo sapien
ccctttcacatcacccgagaaaagtgttcctta

SEQ ID NO: 148485 - DNA, 33 bp, Homo sapien
tagttagtgagagagagatatgcatcatggtgg

SEQ ID NO: 148486 - DNA, 33 bp, Homo sapien
tagttagtgagagagatatatgcatcatggtgg

SEQ ID NO: 148487 - DNA, 33 bp, Homo sapien
tgcaaatttggcacgcaattaagtaaacctttc

SEQ ID NO: 148488 - DNA, 33 bp, Homo sapien
tgcaaatttggcacgcgattaagtaaacctttc

SEQ ID NO: 148489 - DNA, 33 bp, Homo sapien
atagggacacagcaaaattaagtaaaaggctaa

SEQ ID NO: 148490 - DNA, 33 bp, Homo sapien
atagggacacagcaaagttaagtaaaaggctaa

SEQ ID NO: 148491 - DNA, 33 bp, Homo sapien
aatttaaattgcctggaacatccaaggtaagat

SEQ ID NO: 148492 - DNA, 33 bp, Homo sapien
aatttaaattgcctgggacatccaaggtaagat

SEQ ID NO: 148493 - DNA, 33 bp, Homo sapien
gttaagatctgctttgaattatttgaatttaaa

SEQ ID NO: 148494 - DNA, 33 bp, Homo sapien
gttaagatctgctttggattatttgaatttaaa

SEQ ID NO: 148495 - DNA, 33 bp, Homo sapien
gtgtgaagaccaagcaaatttgaagaatgatct

SEQ ID NO: 148496 - DNA, 33 bp, Homo sapien
gtgtgaagaccaagcagatttgaagaatgatct

SEQ ID NO: 148497 - DNA, 33 bp, Homo sapien
accttaagctactatgcatatttggaatcggca

SEQ ID NO: 148498 - DNA, 33 bp, Homo sapien
accttaagctactatggatatttggaatcggca

SEQ ID NO: 148499 - DNA, 33 bp, Homo sapien
tctgaattgttattccaatacctcatgtataat

SEQ ID NO: 148500 - DNA, 33 bp, Homo sapien
tctgaattgttattcctatacctcatgtataat

SEQ ID NO: 148501 - DNA, 33 bp, Homo sapien
gatcttgtcacagaacagcaaagactgcagtat

SEQ ID NO: 148502 - DNA, 33 bp, Homo sapien
gatcttgtcacagaacggcaaagactgcagtat

SEQ ID NO: 148503 - DNA, 33 bp, Homo sapien
gatgtgcagatataaacgtgtggatgtatgtgt

SEQ ID NO: 148504 - DNA, 33 bp, Homo sapien
gatgtgcagatataaatgtgtggatgtatgtgt

SEQ ID NO: 148505 - DNA, 33 bp, Homo sapien
ttggttgttacataagacataggcctactatca

SEQ ID NO: 148506 - DNA, 33 bp, Homo sapien
ttggttgttacataagtcataggcctactatca

SEQ ID NO: 148507 - DNA, 33 bp, Homo sapien
accttctttctgattgcaataccagggctggag

SEQ ID NO: 148508 - DNA, 33 bp, Homo sapien
accttctttctgattggaataccagggctggag

SEQ ID NO: 148509 - DNA, 33 bp, Homo sapien
tgagttcattccagatcagggaagggggtccta

SEQ ID NO: 148510 - DNA, 33 bp, Homo sapien
tgagttcattccagattagggaagggggtccta

SEQ ID NO: 148511 - DNA, 33 bp, Homo sapien
gtcagtgtggccataccattactagcaaaaatg

SEQ ID NO: 148512 - DNA, 33 bp, Homo sapien
gtcagtgtggccatactattactagcaaaaatg

SEQ ID NO: 148513 - DNA, 33 bp, Homo sapien
tcttttctttgttatagctttctcacttatttt

SEQ ID NO: 148514 - DNA, 33 bp, Homo sapien
tcttttctttgttatatctttctcacttatttt

SEQ ID NO: 148515 - DNA, 33 bp, Homo sapien
tttgccacataaataccacatacttgataatcg

SEQ ID NO: 148516 - DNA, 33 bp, Homo sapien
tttgccacataaatactacatacttgataatcg

SEQ ID NO: 148517 - DNA, 33 bp, Homo sapien
ctgttagatttttaaaccagtgtctcaaaacta

SEQ ID NO: 148518 - DNA, 33 bp, Homo sapien
ctgttagatttttaaagcagtgtctcaaaacta

SEQ ID NO: 148519 - DNA, 33 bp, Homo sapien
tttaaccgtcagggcagaatatattcactcttc

SEQ ID NO: 148520 - DNA, 33 bp, Homo sapien
tttaaccgtcagggcataatatattcactcttc

SEQ ID NO: 148521 - DNA, 33 bp, Homo sapien
tctgaaaccaaagagtaaatgaaatcatacagt

SEQ ID NO: 148522 - DNA, 33 bp, Homo sapien
tctgaaaccaaagagtgaatgaaatcatacagt

SEQ ID NO: 148523 - DNA, 33 bp, Homo sapien
tgttctcaataactccaaagtcaagcttttcct

SEQ ID NO: 148524 - DNA, 33 bp, Homo sapien
tgttctcaataactccgaagtcaagcttttcct

SEQ ID NO: 148525 - DNA, 33 bp, Homo sapien
tttccatcattcagtacctgcttttctctactg

SEQ ID NO: 148526 - DNA, 33 bp, Homo sapien
tttccatcattcagtatctgcttttctctactg

SEQ ID NO: 148527 - DNA, 33 bp, Homo sapien
ccaggcgacgtggagaaggcccatgtaggtgtt

SEQ ID NO: 148528 - DNA, 33 bp, Homo sapien
ccaggcgacgtggagagggcccatgtaggtgtt

SEQ ID NO: 148529 - DNA, 33 bp, Homo sapien
atgcctcatgaattgaatattgtggaaatagcc

SEQ ID NO: 148530 - DNA, 33 bp, Homo sapien
atgcctcatgaattgagtattgtggaaatagcc

SEQ ID NO: 148531 - DNA, 33 bp, Homo sapien
tcaaggaccagaaagaaataaccactagaaaga

SEQ ID NO: 148532 - DNA, 33 bp, Homo sapien
tcaaggaccagaaagacataaccactagaaaga

SEQ ID NO: 148533 - DNA, 33 bp, Homo sapien
ttgtctcatagtttcaataagaagcaaagacat

SEQ ID NO: 148534 - DNA, 33 bp, Homo sapien
ttgtctcatagtttcagtaagaagcaaagacat

SEQ ID NO: 148535 - DNA, 33 bp, Homo sapien
agagttttgaaccaacaccacaactttgggaaa

SEQ ID NO: 148536 - DNA, 33 bp, Homo sapien
agagttttgaaccaacgccacaactttgggaaa

SEQ ID NO: 148537 - DNA, 33 bp, Homo sapien
ggataacagaactgataactccattgaagacaa

SEQ ID NO: 148538 - DNA, 33 bp, Homo sapien
ggataacagaactgatgactccattgaagacaa

SEQ ID NO: 148539 - DNA, 33 bp, Homo sapien
tcctggaaagtgacaaagctgaattctcactca

SEQ ID NO: 148540 - DNA, 33 bp, Homo sapien
tcctggaaagtgacaaggctgaattctcactca

SEQ ID NO: 148541 - DNA, 33 bp, Homo sapien
cattcaactctgacaccagttctatcttgtaag

SEQ ID NO: 148542 - DNA, 33 bp, Homo sapien
cattcaactctgacactagttctatcttgtaag

SEQ ID NO: 148543 - DNA, 33 bp, Homo sapien
agtactttagccattacaagagaacattaaaaa

SEQ ID NO: 148544 - DNA, 33 bp, Homo sapien
agtactttagccattagaagagaacattaaaaa

SEQ ID NO: 148545 - DNA, 33 bp, Homo sapien
actattctgtgtaatccctattgcatttcatct

SEQ ID NO: 148546 - DNA, 33 bp, Homo sapien
actattctgtgtaatctctattgcatttcatct

SEQ ID NO: 148547 - DNA, 33 bp, Homo sapien
gattgtcatgatacaacttaaggtgaggaaggt

SEQ ID NO: 148548 - DNA, 33 bp, Homo sapien
gattgtcatgatacaatttaaggtgaggaaggt

SEQ ID NO: 148549 - DNA, 33 bp, Homo sapien
gtttatacaacacagaacagaatgattatttag

SEQ ID NO: 148550 - DNA, 33 bp, Homo sapien
gtttatacaacacagaccagaatgattatttag

SEQ ID NO: 148551 - DNA, 33 bp, Homo sapien
tggaaaagcttctaaacgttgactcaagggaca

SEQ ID NO: 148552 - DNA, 33 bp, Homo sapien
tggaaaagcttctaaatgttgactcaagggaca

SEQ ID NO: 148553 - DNA, 33 bp, Homo sapien
attttcacttttcaccagaaatctttgtaagtc

SEQ ID NO: 148554 - DNA, 33 bp, Homo sapien
attttcacttttcacctgaaatctttgtaagtc

SEQ ID NO: 148555 - DNA, 33 bp, Homo sapien
taatgtgcaaataaatcatctgaagagtttgtt

SEQ ID NO: 148556 - DNA, 33 bp, Homo sapien
taatgtgcaaataaattatctgaagagtttgtt

SEQ ID NO: 148557 - DNA, 33 bp, Homo sapien
ggaagcaaatctgtcaataatgtttaatctgtt

SEQ ID NO: 148558 - DNA, 33 bp, Homo sapien
ggaagcaaatctgtcagtaatgtttaatctgtt

SEQ ID NO: 148559 - DNA, 33 bp, Homo sapien
tgtctgtacaacctaaacatcttagttttacta

SEQ ID NO: 148560 - DNA, 33 bp, Homo sapien
tgtctgtacaacctaagcatcttagttttacta

SEQ ID NO: 148561 - DNA, 33 bp, Homo sapien
catcatttagtccaagcagagaatatgtgaatt

SEQ ID NO: 148562 - DNA, 33 bp, Homo sapien
catcatttagtccaagtagagaatatgtgaatt

SEQ ID NO: 148563 - DNA, 33 bp, Homo sapien
ttacaatgttttcccacaaacctctcacaaatg

SEQ ID NO: 148564 - DNA, 33 bp, Homo sapien
ttacaatgttttcccataaacctctcacaaatg

SEQ ID NO: 148565 - DNA, 33 bp, Homo sapien
aacaaaatgaaacacaacgaaacaataagaaga

SEQ ID NO: 148566 - DNA, 33 bp, Homo sapien
aacaaaatgaaacacagcgaaacaataagaaga

SEQ ID NO: 148567 - DNA, 33 bp, Homo sapien
aaaagaacttggtataagagattgaatgtagat

SEQ ID NO: 148568 - DNA, 33 bp, Homo sapien
aaaagaacttggtataggagattgaatgtagat

SEQ ID NO: 148569 - DNA, 33 bp, Homo sapien; identical to SEQ ID NO: 148567

SEQ ID NO: 148570 - DNA, 33 bp, Homo sapien; identical to SEQ ID NO: 148568

SEQ ID NO: 148571 - DNA, 33 bp, Homo sapien
tccaacttctgtcagaactgtaaaaattatcat

SEQ ID NO: 148572 - DNA, 33 bp, Homo sapien
tccaacttctgtcagagctgtaaaaattatcat

SEQ ID NO: 148573 - DNA, 33 bp, Homo sapien
aatgagaatagaactaaaaacaggaagtacgtt

SEQ ID NO: 148574 - DNA, 33 bp, Homo sapien
aatgagaatagaactataaacaggaagtacgtt

SEQ ID NO: 148575 - DNA, 33 bp, Homo sapien; identical to SEQ ID NO: 148573

SEQ ID NO: 148576 - DNA, 33 bp, Homo sapien; identical to SEQ ID NO: 148574

SEQ ID NO: 148577 - DNA, 33 bp, Homo sapien
cttgtacctccactgacgaacccaattgtttat

SEQ ID NO: 148578 - DNA, 33 bp, Homo sapien
cttgtacctccactgatgaacccaattgtttat

SEQ ID NO: 148579 - DNA, 33 bp, Homo sapien
cctttcactttaagaaacttgagatattgcaag

SEQ ID NO: 148580 - DNA, 33 bp, Homo sapien
cctttcactttaagaagcttgagatattgcaag

SEQ ID NO: 148581 - DNA, 33 bp, Homo sapien; identical to SEQ ID NO: 148579

SEQ ID NO: 148582 - DNA, 33 bp, Homo sapien; identical to SEQ ID NO: 148580

SEQ ID NO: 148583 - DNA, 33 bp, Homo sapien
gccaacatttgaaaaacactctaatattcatca

SEQ ID NO: 148584 - DNA, 33 bp, Homo sapien
gccaacatttgaaaaagactctaatattcatca

SEQ ID NO: 148585 - DNA, 33 bp, Homo sapien
ctatttttcacaatgaaccagctttttataaag

SEQ ID NO: 148586 - DNA, 33 bp, Homo sapien
ctatttttcacaatgacccagctttttataaag

SEQ ID NO: 148587 - DNA, 33 bp, Homo sapien
tcctagccatccacaaccctctgagatacacct

SEQ ID NO: 148588 - DNA, 33 bp, Homo sapien
tcctagccatccacaatcctctgagatacacct

SEQ ID NO: 148589 - DNA, 33 bp, Homo sapien
tgtatttccatattaaaggcaaatgatttatag

SEQ ID NO: 148590 - DNA, 33 bp, Homo sapien
tgtatttccatattaacggcaaatgatttatag

SEQ ID NO: 148591 - DNA, 33 bp, Homo sapien
tttctacttctgaatactattaccaaattagtt

SEQ ID NO: 148592 - DNA, 33 bp, Homo sapien
tttctacttctgaatagtattaccaaattagtt

SEQ ID NO: 148593 - DNA, 33 bp, Homo sapien
tgatggtttgtgagaacgttttattacttccat

SEQ ID NO: 148594 - DNA, 33 bp, Homo sapien
tgatggtttgtgagaatgttttattacttccat

SEQ ID NO: 148595 - DNA, 33 bp, Homo sapien
ggtacatgtacgccacagaatattatacagcca

SEQ ID NO: 148596 - DNA, 33 bp, Homo sapien
ggtacatgtacgccacggaatattatacagcca

SEQ ID NO: 148597 - DNA, 33 bp, Homo sapien
ttacttttctttctgtcaaattctgctttttcc

SEQ ID NO: 148598 - DNA, 33 bp, Homo sapien
ttacttttctttctgtgaaattctgctttttcc

SEQ ID NO: 148599 - DNA, 33 bp, Homo sapien
ccagtgaatttaacataacaagagtccacagtt

SEQ ID NO: 148600 - DNA, 33 bp, Homo sapien
ccagtgaatttaacatgacaagagtccacagtt

SEQ ID NO: 148601 - DNA, 33 bp, Homo sapien
ccattttatttgcacaactttcactatttcgtt

SEQ ID NO: 148602 - DNA, 33 bp, Homo sapien
ccattttatttgcacagctttcactatttcgtt

SEQ ID NO: 148603 - DNA, 33 bp, Homo sapien
aaagcccttaaccacaagtatggcaagagcata

SEQ ID NO: 148604 - DNA, 33 bp, Homo sapien
aaagcccttaaccacaggtatggcaagagcata

SEQ ID NO: 148605 - DNA, 33 bp, Homo sapien
aagcatcgtttggaaacagaaatcaatcaatca

SEQ ID NO: 148606 - DNA, 33 bp, Homo sapien
aagcatcgtttggaaagagaaatcaatcaatca

SEQ ID NO: 148607 - DNA, 33 bp, Homo sapien
tcacaatataactacgaaagtccattaaagaca

SEQ ID NO: 148608 - DNA, 33 bp, Homo sapien
tcacaatataactacggaagtccattaaagaca

SEQ ID NO: 148609 - DNA, 33 bp, Homo sapien
ttgccagagatgaccacatttgtgtagtccaca

SEQ ID NO: 148610 - DNA, 33 bp, Homo sapien
ttgccagagatgaccatatttgtgtagtccaca

SEQ ID NO: 148611 - DNA, 33 bp, Homo sapien
gtacaaataatggaatcaggacaaaaatacatc

SEQ ID NO: 148612 - DNA, 33 bp, Homo sapien
gtacaaataatggaatgaggacaaaaatacatc

SEQ ID NO: 148613 - DNA, 33 bp, Homo sapien
ttgagtaattcagcaaatagtgaggaatggttc

SEQ ID NO: 148614 - DNA, 33 bp, Homo sapien
ttgagtaattcagcaagtagtgaggaatggttc

SEQ ID NO: 148615 - DNA, 33 bp, Homo sapien
ccaggtcattcactgccaagatggaaataaagt

SEQ ID NO: 148616 - DNA, 33 bp, Homo sapien
ccaggtcattcactgctaagatggaaataaagt

SEQ ID NO: 148617 - DNA, 33 bp, Homo sapien
caaacttgtgcagaagcaaagactaagtcctga

SEQ ID NO: 148618 - DNA, 33 bp, Homo sapien
caaacttgtgcagaagtaaagactaagtcctga

SEQ ID NO: 148619 - DNA, 33 bp, Homo sapien
aagtctcaatcactgaagtttattaagccaggt

SEQ ID NO: 148620 - DNA, 33 bp, Homo sapien
aagtctcaatcactgaggtttattaagccaggt

SEQ ID NO: 148621 - DNA, 33 bp, Homo sapien
ggcacactcttagttacagaaatgtgccatctt

SEQ ID NO: 148622 - DNA, 33 bp, Homo sapien
ggcacactcttagttatagaaatgtgccatctt

SEQ ID NO: 148623 - DNA, 33 bp, Homo sapien
agggtataaggcagaactattgaagacagacat

SEQ ID NO: 148624 - DNA, 33 bp, Homo sapien
agggtataaggcagaagtattgaagacagacat

SEQ ID NO: 148625 - DNA, 33 bp, Homo sapien
attttgaatgtcgataagaattaagatcatcaa

SEQ ID NO: 148626 - DNA, 33 bp, Homo sapien
attttgaatgtcgataggaattaagatcatcaa

SEQ ID NO: 148627 - DNA, 33 bp, Homo sapien
aacacaaagaagctaacgagacactggaattta

SEQ ID NO: 148628 - DNA, 33 bp, Homo sapien
aacacaaagaagctaatgagacactggaattta

SEQ ID NO: 148629 - DNA, 33 bp, Homo sapien
tgcattgtattcactgcatgatttaaatatgtt

SEQ ID NO: 148630 - DNA, 33 bp, Homo sapien
tgcattgtattcactgtatgatttaaatatgtt

SEQ ID NO: 148631 - DNA, 33 bp, Homo sapien
ctatttaaagaacaaactttccacattgttgat

SEQ ID NO: 148632 - DNA, 33 bp, Homo sapien
ctatttaaagaacaaattttccacattgttgat

SEQ ID NO: 148633 - DNA, 33 bp, Homo sapien
aaaaatatgtaatataaagtatcccaacagaca

SEQ ID NO: 148634 - DNA, 33 bp, Homo sapien
aaaaatatgtaatatagagtatcccaacagaca

SEQ ID NO: 148635 - DNA, 33 bp, Homo sapien
agaactggacgaattaaaatgcacatagtgatg

SEQ ID NO: 148636 - DNA, 33 bp, Homo sapien
agaactggacgaattacaatgcacatagtgatg

SEQ ID NO: 148637 - DNA, 33 bp, Homo sapien
tagcaacaagaatgtgaatgtaatgtggaatgt

SEQ ID NO: 148638 - DNA, 33 bp, Homo sapien
tagcaacaagaatgtgcatgtaatgtggaatgt

SEQ ID NO: 148639 - DNA, 33 bp, Homo sapien
aatatgttctgattcactaaaattctgttgctt

SEQ ID NO: 148640 - DNA, 33 bp, Homo sapien
aatatgttctgattcattaaaattctgttgctt

SEQ ID NO: 148641 - DNA, 33 bp, Homo sapien
gaatttttgggctcacacagtcttcctacctct

SEQ ID NO: 148642 - DNA, 33 bp, Homo sapien
gaatttttgggctcacgcagtcttcctacctct

SEQ ID NO: 148643 - DNA, 33 bp, Homo sapien
tatattcttgcttaccaattcttaggagaaaca

SEQ ID NO: 148644 - DNA, 33 bp, Homo sapien
tatattcttgcttaccgattcttaggagaaaca

SEQ ID NO: 148645 - DNA, 33 bp, Homo sapien
catgtacttttctctacctatgaaagtgctagg

SEQ ID NO: 148646 - DNA, 33 bp, Homo sapien
catgtacttttctctagctatgaaagtgctagg

SEQ ID NO: 148647 - DNA, 33 bp, Homo sapien
gagacagactaatgagaacatgaagttacagac

SEQ ID NO: 148648 - DNA, 33 bp, Homo sapien
gagacagactaatgaggacatgaagttacagac

SEQ ID NO: 148649 - DNA, 33 bp, Homo sapien
cacacaagcgaaatgcagattaattcaggagga

SEQ ID NO: 148650 - DNA, 33 bp, Homo sapien
cacacaagcgaaatgccgattaattcaggagga

SEQ ID NO: 148651 - DNA, 33 bp, Homo sapien
cattcctcttcaaccaagggactaataaagggt

SEQ ID NO: 148652 - DNA, 33 bp, Homo sapien
cattcctcttcaaccaggggactaataaagggt

SEQ ID NO: 148653 - DNA, 33 bp, Homo sapien
ttattaacagagcaacggtaagcattttgtgca

SEQ ID NO: 148654 - DNA, 33 bp, Homo sapien
ttattaacagagcaactgtaagcattttgtgca

SEQ ID NO: 148655 - DNA, 33 bp, Homo sapien
taaagggcattgtgtaacaacagtagttcaaaa

SEQ ID NO: 148656 - DNA, 33 bp, Homo sapien
taaagggcattgtgtagcaacagtagttcaaaa

SEQ ID NO: 148657 - DNA, 33 bp, Homo sapien
ctgtgatgtcaaacaccagattacaaatggcac

SEQ ID NO: 148658 - DNA, 33 bp, Homo sapien
ctgtgatgtcaaacactagattacaaatggcac

SEQ ID NO: 148659 - DNA, 33 bp, Homo sapien; identical to SEQ ID NO: 148657

SEQ ID NO: 148660 - DNA, 33 bp, Homo sapien; identical to SEQ ID NO: 148658

SEQ ID NO: 148661 - DNA, 33 bp, Homo sapien
ccacagaagggcaaccacaatataagaagtata

SEQ ID NO: 148662 - DNA, 33 bp, Homo sapien
ccacagaagggcaaccgcaatataagaagtata

SEQ ID NO: 148663 - DNA, 33 bp, Homo sapien
aaactcattgatcgctaacatggaaaatatgaa

SEQ ID NO: 148664 - DNA, 33 bp, Homo sapien
aaactcattgatcgcttacatggaaaatatgaa

SEQ ID NO: 148665 - DNA, 33 bp, Homo sapien
tcttttgcaatcagtcacagcatataatctggt

SEQ ID NO: 148666 - DNA, 33 bp, Homo sapien
tcttttgcaatcagtcgcagcatataatctggt

SEQ ID NO: 148667 - DNA, 33 bp, Homo sapien
cactctttcctactacactggcttccctactgc

SEQ ID NO: 148668 - DNA, 33 bp, Homo sapien
cactctttcctactacgctggcttccctactgc

SEQ ID NO: 148669 - DNA, 33 bp, Homo sapien
aagaactattagaggacgaagacgattttcaaa

SEQ ID NO: 148670 - DNA, 33 bp, Homo sapien
aagaactattagaggatgaagacgattttcaaa

SEQ ID NO: 148671 - DNA, 33 bp, Homo sapien
tattccaaaccagacaacattgtactctgactt

SEQ ID NO: 148672 - DNA, 33 bp, Homo sapien
tattccaaaccagacagcattgtactctgactt

SEQ ID NO: 148673 - DNA, 33 bp, Homo sapien
caatctctgttacgtaagaagaataagtgcaag

SEQ ID NO: 148674 - DNA, 33 bp, Homo sapien
caatctctgttacgtaggaagaataagtgcaag

SEQ ID NO: 148675 - DNA, 33 bp, Homo sapien
ctttggcttctaaggacatgatgacaaataatt

SEQ ID NO: 148676 - DNA, 33 bp, Homo sapien
ctttggcttctaaggagatgatgacaaataatt

SEQ ID NO: 148677 - DNA, 33 bp, Homo sapien
tccagattcaaggttaacatttttcatgcctta

SEQ ID NO: 148678 - DNA, 33 bp, Homo sapien
tccagattcaaggttaccatttttcatgcctta

SEQ ID NO: 148679 - DNA, 33 bp, Homo sapien
tgttttcatgtttctcactcctttatctccagg

SEQ ID NO: 148680 - DNA, 33 bp, Homo sapien
tgttttcatgtttctcgctcctttatctccagg

SEQ ID NO: 148681 - DNA, 33 bp, Homo sapien
acagtgagaaagtaaaggaaaccacaaacagat

SEQ ID NO: 148682 - DNA, 33 bp, Homo sapien
acagtgagaaagtaaatgaaaccacaaacagat

SEQ ID NO: 148683 - DNA, 33 bp, Homo sapien
aatagttgttcgccatcactagagtcatcttat

SEQ ID NO: 148684 - DNA, 33 bp, Homo sapien
aatagttgttcgccattactagagtcatcttat

SEQ ID NO: 148685 - DNA, 33 bp, Homo sapien
ttatcaatttccctccaataagaacttcaagga

SEQ ID NO: 148686 - DNA, 33 bp, Homo sapien
ttatcaatttccctccgataagaacttcaagga

SEQ ID NO: 148687 - DNA, 33 bp, Homo sapien
gtagattttatcaaaaaattggcatatctccac

SEQ ID NO: 148688 - DNA, 33 bp, Homo sapien
gtagattttatcaaaacattggcatatctccac

SEQ ID NO: 148689 - DNA, 33 bp, Homo sapien
tgaaaccatagcatagaaaaccagatttaagta

SEQ ID NO: 148690 - DNA, 33 bp, Homo sapien
tgaaaccatagcataggaaaccagatttaagta

SEQ ID NO: 148691 - DNA, 33 bp, Homo sapien
aacatcaagcctcaaaggatgtatgtacgttac

SEQ ID NO: 148692 - DNA, 33 bp, Homo sapien
aacatcaagcctcaaatgatgtatgtacgttac

SEQ ID NO: 148693 - DNA, 33 bp, Homo sapien
acaatttctggcatgactaaaaggatcagaaca

SEQ ID NO: 148694 - DNA, 33 bp, Homo sapien
acaatttctggcatgattaaaaggatcagaaca

SEQ ID NO: 148695 - DNA, 33 bp, Homo sapien
aatctatagcccagacacgtattaggctgtacc

SEQ ID NO: 148696 - DNA, 33 bp, Homo sapien
aatctatagcccagacgcgtattaggctgtacc

SEQ ID NO: 148697 - DNA, 33 bp, Homo sapien
gtctctgtctcagtaacagattcctctccacct

SEQ ID NO: 148698 - DNA, 33 bp, Homo sapien
gtctctgtctcagtaatagattcctctccacct

SEQ ID NO: 148699 - DNA, 33 bp, Homo sapien
gagaacaacatacaaccaagtcctaggtcagca

SEQ ID NO: 148700 - DNA, 33 bp, Homo sapien
gagaacaacatacaactaagtcctaggtcagca

SEQ ID NO: 148701 - DNA, 33 bp, Homo sapien
ttcacagtaagtgtgggatattaacttggttcg

SEQ ID NO: 148702 - DNA, 33 bp, Homo sapien
ttcacagtaagtgtggtatattaacttggttcg

SEQ ID NO: 148703 - DNA, 33 bp, Homo sapien
ggattgcaaaggcaacaaataggccatatatct

SEQ ID NO: 148704 - DNA, 33 bp, Homo sapien
ggattgcaaaggcaacgaataggccatatatct

SEQ ID NO: 148705 - DNA, 33 bp, Homo sapien
tgtattttaactcaaacgccttgtttctgcttt

SEQ ID NO: 148706 - DNA, 33 bp, Homo sapien
tgtattttaactcaaatgccttgtttctgcttt

SEQ ID NO: 148707 - DNA, 33 bp, Homo sapien
gtttgggtctcacatccccccttatatccatat

SEQ ID NO: 148708 - DNA, 33 bp, Homo sapien
gtttgggtctcacatctccccttatatccatat

SEQ ID NO: 148709 - DNA, 33 bp, Homo sapien
tctcaatagaaatcacacagtccaagagagagt

SEQ ID NO: 148710 - DNA, 33 bp, Homo sapien
tctcaatagaaatcacgcagtccaagagagagt

SEQ ID NO: 148711 - DNA, 33 bp, Homo sapien
atcaggtcaaggacaaaaagatgatcctaaaag

SEQ ID NO: 148712 - DNA, 33 bp, Homo sapien
atcaggtcaaggacaagaagatgatcctaaaag

SEQ ID NO: 148713 - DNA, 33 bp, Homo sapien
gagttctaatggagaccgaagataccctgacag

SEQ ID NO: 148714 - DNA, 33 bp, Homo sapien
gagttctaatggagactgaagataccctgacag

SEQ ID NO: 148715 - DNA, 33 bp, Homo sapien
tgaccacaggaggaaaaaagaggtaagcattgg

SEQ ID NO: 148716 - DNA, 33 bp, Homo sapien
tgaccacaggaggaaagaagaggtaagcattgg

SEQ ID NO: 148717 - DNA, 33 bp, Homo sapien
ttccacttatctgcagcagagccttaggtatta

SEQ ID NO: 148718 - DNA, 33 bp, Homo sapien
ttccacttatctgcagtagagccttaggtatta

SEQ ID NO: 148719 - DNA, 33 bp, Homo sapien
gataggaagagatacaagggctcatggagactg

SEQ ID NO: 148720 - DNA, 33 bp, Homo sapien
gataggaagagatacatgggctcatggagactg

SEQ ID NO: 148721 - DNA, 33 bp, Homo sapien
ggaaaatagagagttaagaaatttagttgtgct

SEQ ID NO: 148722 - DNA, 33 bp, Homo sapien
ggaaaatagagagttatgaaatttagttgtgct

SEQ ID NO: 148723 - DNA, 33 bp, Homo sapien
ttagatatttgcaatggcagacggagctgggtt

SEQ ID NO: 148724 - DNA, 33 bp, Homo sapien
ttagatatttgcaatgtcagacggagctgggtt

SEQ ID NO: 148725 - DNA, 33 bp, Homo sapien
ggtcagaatctgaaggaccaagaaattatatta

SEQ ID NO: 148726 - DNA, 33 bp, Homo sapien
ggtcagaatctgaagggccaagaaattatatta

SEQ ID NO: 148727 - DNA, 33 bp, Homo sapien
tgagaactaagatgcccagatgactgattggag

SEQ ID NO: 148728 - DNA, 33 bp, Homo sapien
tgagaactaagatgcctagatgactgattggag

SEQ ID NO: 148729 - DNA, 33 bp, Homo sapien
ttgttcgaagaaaggaccatctggaattctttt

SEQ ID NO: 148730 - DNA, 33 bp, Homo sapien
ttgttcgaagaaaggatcatctggaattctttt

SEQ ID NO: 148731 - DNA, 33 bp, Homo sapien
ttgaaaaagctacaagactctgcaaatattgat

SEQ ID NO: 148732 - DNA, 33 bp, Homo sapien
ttgaaaaagctacaaggctctgcaaatattgat

SEQ ID NO: 148733 - DNA, 33 bp, Homo sapien
ccttcctttgatactcaatgtgatcaagatttg

SEQ ID NO: 148734 - DNA, 33 bp, Homo sapien
ccttcctttgatactcgatgtgatcaagatttg

SEQ ID NO: 148735 - DNA, 33 bp, Homo sapien
ttgacttagtttcagaaagctattgcatagaat

SEQ ID NO: 148736 - DNA, 33 bp, Homo sapien
ttgacttagtttcagacagctattgcatagaat

SEQ ID NO: 148737 - DNA, 33 bp, Homo sapien
tcttttgttcagaaaaatgtcttgtattgatct

SEQ ID NO: 148738 - DNA, 33 bp, Homo sapien
tcttttgttcagaaaattgtcttgtattgatct

SEQ ID NO: 148739 - DNA, 33 bp, Homo sapien
ttttcctctttcttaaatatggtcagactgata

SEQ ID NO: 148740 - DNA, 33 bp, Homo sapien
ttttcctctttcttaagtatggtcagactgata

SEQ ID NO: 148741 - DNA, 33 bp, Homo sapien
tttaaatattttttaaagtcatttgtcatggac

SEQ ID NO: 148742 - DNA, 33 bp, Homo sapien
tttaaatattttttaaggtcatttgtcatggac

SEQ ID NO: 148743 - DNA, 33 bp, Homo sapien
ggcaactgccaggactaacttaagaatcaggat

SEQ ID NO: 148744 - DNA, 33 bp, Homo sapien
ggcaactgccaggactgacttaagaatcaggat

SEQ ID NO: 148745 - DNA, 33 bp, Homo sapien
acaaaatggaaaatgacggaaaagtgactattt

SEQ ID NO: 148746 - DNA, 33 bp, Homo sapien
acaaaatggaaaatgatggaaaagtgactattt

SEQ ID NO: 148747 - DNA, 33 bp, Homo sapien
ctctcagatagcataacacaacatgatgtcttg

SEQ ID NO: 148748 - DNA, 33 bp, Homo sapien
ctctcagatagcataagacaacatgatgtcttg

SEQ ID NO: 148749 - DNA, 33 bp, Homo sapien
ttatagaatgttcttacctcttcagccatccca

SEQ ID NO: 148750 - DNA, 33 bp, Homo sapien
ttatagaatgttcttatctcttcagccatccca

SEQ ID NO: 148751 - DNA, 33 bp, Homo sapien
gattaggaagtgccccaagagagtgcatagagg

SEQ ID NO: 148752 - DNA, 33 bp, Homo sapien
gattaggaagtgccccgagagagtgcatagagg

SEQ ID NO: 148753 - DNA, 33 bp, Homo sapien
atgacaaagatgccaacagtcattgcagcaaaa

SEQ ID NO: 148754 - DNA, 33 bp, Homo sapien
atgacaaagatgccaagagtcattgcagcaaaa

SEQ ID NO: 148755 - DNA, 33 bp, Homo sapien
aagatatgcttagaaccgaggtagagttttcat

SEQ ID NO: 148756 - DNA, 33 bp, Homo sapien
aagatatgcttagaactgaggtagagttttcat

SEQ ID NO: 148757 - DNA, 33 bp, Homo sapien
aaggcgatcacgttggaaagctatagagaaaga

SEQ ID NO: 148758 - DNA, 33 bp, Homo sapien
aaggcgatcacgttgggaagctatagagaaaga

SEQ ID NO: 148759 - DNA, 33 bp, Homo sapien
tacacatggacacaaaaaatagatcaacagaca

SEQ ID NO: 148760 - DNA, 33 bp, Homo sapien
tacacatggacacaaagaatagatcaacagaca

SEQ ID NO: 148761 - DNA, 33 bp, Homo sapien
gtgagtttagtggtacaataaaatcagaaatac

SEQ ID NO: 148762 - DNA, 33 bp, Homo sapien
gtgagtttagtggtacgataaaatcagaaatac

SEQ ID NO: 148763 - DNA, 33 bp, Homo sapien
agaaagaatacaaccaggtcaagaatacagaat

SEQ ID NO: 148764 - DNA, 33 bp, Homo sapien
agaaagaatacaaccatgtcaagaatacagaat

SEQ ID NO: 148765 - DNA, 33 bp, Homo sapien
ctctaatcaacagttcaattctgcttcaatttg

SEQ ID NO: 148766 - DNA, 33 bp, Homo sapien
ctctaatcaacagttcgattctgcttcaatttg

SEQ ID NO: 148767 - DNA, 33 bp, Homo sapien
aaacacagaattcaaacagcagtgaactgagat

SEQ ID NO: 148768 - DNA, 33 bp, Homo sapien
aaacacagaattcaaagagcagtgaactgagat

SEQ ID NO: 148769 - DNA, 33 bp, Homo sapien
gtgattattgcaatgactaatgtattgataaga

SEQ ID NO: 148770 - DNA, 33 bp, Homo sapien
gtgattattgcaatgattaatgtattgataaga

SEQ ID NO: 148771 - DNA, 33 bp, Homo sapien
agtgtgagattttaaaatgtgattgtttggaca

SEQ ID NO: 148772 - DNA, 33 bp, Homo sapien
agtgtgagattttaaagtgtgattgtttggaca

SEQ ID NO: 148773 - DNA, 33 bp, Homo sapien
caaagcagaataaataacagttgctcatgtaca

SEQ ID NO: 148774 - DNA, 33 bp, Homo sapien
caaagcagaataaataccagttgctcatgtaca

SEQ ID NO: 148775 - DNA, 33 bp, Homo sapien
caaggatggttcttaaggaagggaaagtgttcc

SEQ ID NO: 148776 - DNA, 33 bp, Homo sapien
caaggatggttcttaatgaagggaaagtgttcc

SEQ ID NO: 148777 - DNA, 33 bp, Homo sapien
ctaatccactgaacaccgaagcttatttttttc

SEQ ID NO: 148778 - DNA, 33 bp, Homo sapien
ctaatccactgaacacggaagcttatttttttc

SEQ ID NO: 148779 - DNA, 33 bp, Homo sapien
gacatctttatctgtaactcagtgctgtttctg

SEQ ID NO: 148780 - DNA, 33 bp, Homo sapien
gacatctttatctgtatctcagtgctgtttctg

SEQ ID NO: 148781 - DNA, 33 bp, Homo sapien
ccttggtagattatgacgtcagaaactctggaa

SEQ ID NO: 148782 - DNA, 33 bp, Homo sapien
ccttggtagattatgatgtcagaaactctggaa

SEQ ID NO: 148783 - DNA, 33 bp, Homo sapien
cctttgatatcaaggaatcaaggacgtgatgtt

SEQ ID NO: 148784 - DNA, 33 bp, Homo sapien
cctttgatatcaaggagtcaaggacgtgatgtt

SEQ ID NO: 148785 - DNA, 33 bp, Homo sapien
cctgttttgtttctaactgagtttatttgcact

SEQ ID NO: 148786 - DNA, 33 bp, Homo sapien
cctgttttgtttctaattgagtttatttgcact

SEQ ID NO: 148787 - DNA, 33 bp, Homo sapien
aagtttcagccaaagcacatttaacatttgcct

SEQ ID NO: 148788 - DNA, 33 bp, Homo sapien
aagtttcagccaaagcgcatttaacatttgcct

SEQ ID NO: 148789 - DNA, 33 bp, Homo sapien
tctacacatggaggaaaaactcatcagggatgg

SEQ ID NO: 148790 - DNA, 33 bp, Homo sapien
tctacacatggaggaataactcatcagggatgg

SEQ ID NO: 148791 - DNA, 33 bp, Homo sapien
gcttagaaggttacacagaaccagaaggcgggg

SEQ ID NO: 148792 - DNA, 33 bp, Homo sapien
gcttagaaggttacacggaaccagaaggcgggg

SEQ ID NO: 148793 - DNA, 33 bp, Homo sapien
atccctgatgaattaaagcaatcaacactttag

SEQ ID NO: 148794 - DNA, 33 bp, Homo sapien
atccctgatgaattaaggcaatcaacactttag

SEQ ID NO: 148795 - DNA, 33 bp, Homo sapien
ccacaacttccaatcgacaagaagtaaaagtaa

SEQ ID NO: 148796 - DNA, 33 bp, Homo sapien
ccacaacttccaatcgccaagaagtaaaagtaa

SEQ ID NO: 148797 - DNA, 33 bp, Homo sapien
gggaaggattaatggacgataaaatctactact

SEQ ID NO: 148798 - DNA, 33 bp, Homo sapien
gggaaggattaatggatgataaaatctactact

SEQ ID NO: 148799 - DNA, 33 bp, Homo sapien
aaactgagtcatacaactactaagagaaactga

SEQ ID NO: 148800 - DNA, 33 bp, Homo sapien
aaactgagtcatacaattactaagagaaactga

SEQ ID NO: 148801 - DNA, 33 bp, Homo sapien
tttgtattctcacatacctttaggaaagaactt

SEQ ID NO: 148802 - DNA, 33 bp, Homo sapien
tttgtattctcacatatctttaggaaagaactt

SEQ ID NO: 148803 - DNA, 33 bp, Homo sapien
ttgcatcaagagtgagaattgaaggtcttagaa

SEQ ID NO: 148804 - DNA, 33 bp, Homo sapien
ttgcatcaagagtgagtattgaaggtcttagaa

SEQ ID NO: 148805 - DNA, 33 bp, Homo sapien
atcacttttataaggagctgctatctatccatc

SEQ ID NO: 148806 - DNA, 33 bp, Homo sapien
atcacttttataaggatctgctatctatccatc

SEQ ID NO: 148807 - DNA, 33 bp, Homo sapien
aaaggatgttggcaaggctatgttcatgaaagt

SEQ ID NO: 148808 - DNA, 33 bp, Homo sapien
aaaggatgttggcaagtctatgttcatgaaagt

SEQ ID NO: 148809 - DNA, 33 bp, Homo sapien
ctaagtaaggcacctacgtgtcagtctcttcat

SEQ ID NO: 148810 - DNA, 33 bp, Homo sapien
ctaagtaaggcacctatgtgtcagtctcttcat

SEQ ID NO: 148811 - DNA, 33 bp, Homo sapien
aatcttattacaaacaaatgtagaggttgtaaa

SEQ ID NO: 148812 - DNA, 33 bp, Homo sapien
aatcttattacaaacagatgtagaggttgtaaa

SEQ ID NO: 148813 - DNA, 33 bp, Homo sapien
aaatacctcatgagcaccaaagaagccatatat

SEQ ID NO: 148814 - DNA, 33 bp, Homo sapien
aaatacctcatgagcagcaaagaagccatatat

SEQ ID NO: 148815 - DNA, 33 bp, Homo sapien
agaggagtctttggggcataaccagattttaag

SEQ ID NO: 148816 - DNA, 33 bp, Homo sapien
agaggagtctttgggggataaccagattttaag

SEQ ID NO: 148817 - DNA, 33 bp, Homo sapien
gaataaaccttaaaaaactatcctaagtgcaat

SEQ ID NO: 148818 - DNA, 33 bp, Homo sapien
gaataaaccttaaaaagctatcctaagtgcaat

SEQ ID NO: 148819 - DNA, 33 bp, Homo sapien
aaaaaatactgccaaacgtgagataatatatca

SEQ ID NO: 148820 - DNA, 33 bp, Homo sapien
aaaaaatactgccaaatgtgagataatatatca

SEQ ID NO: 148821 - DNA, 33 bp, Homo sapien
ttttgagtaattggaaaggagcttattttatac

SEQ ID NO: 148822 - DNA, 33 bp, Homo sapien
ttttgagtaattggaagggagcttattttatac

SEQ ID NO: 148823 - DNA, 33 bp, Homo sapien
tagttgaatgcagggtaacatgtgtctttgtcc

SEQ ID NO: 148824 - DNA, 33 bp, Homo sapien
tagttgaatgcagggtcacatgtgtctttgtcc

SEQ ID NO: 148825 - DNA, 33 bp, Homo sapien
aacaaataaataaaaacaagtctatcctgaacc

SEQ ID NO: 148826 - DNA, 33 bp, Homo sapien
aacaaataaataaaaagaagtctatcctgaacc

SEQ ID NO: 148827 - DNA, 33 bp, Homo sapien
catgtaaaaaacctgcacaagtacccactgtat

SEQ ID NO: 148828 - DNA, 33 bp, Homo sapien
catgtaaaaaacctgcgcaagtacccactgtat

SEQ ID NO: 148829 - DNA, 33 bp, Homo sapien
gtaatcacagcaagaaaacaactaagccagatt

SEQ ID NO: 148830 - DNA, 33 bp, Homo sapien
gtaatcacagcaagaagacaactaagccagatt

SEQ ID NO: 148831 - DNA, 33 bp, Homo sapien
ccaattctgtgctgacccaaaatagtcattttc

SEQ ID NO: 148832 - DNA, 33 bp, Homo sapien
ccaattctgtgctgactcaaaatagtcattttc

SEQ ID NO: 148833 - DNA, 33 bp, Homo sapien
ctaggcagacctctggaaaaccttcttatatgc

SEQ ID NO: 148834 - DNA, 33 bp, Homo sapien
ctaggcagacctctgggaaaccttcttatatgc

SEQ ID NO: 148835 - DNA, 33 bp, Homo sapien
tcatatgtacctctaccggtcctagagcttatg

SEQ ID NO: 148836 - DNA, 33 bp, Homo sapien
tcatatgtacctctacgggtcctagagcttatg

SEQ ID NO: 148837 - DNA, 33 bp, Homo sapien
aacctaatataaggaaatagcagatgtgattat

SEQ ID NO: 148838 - DNA, 33 bp, Homo sapien
aacctaatataaggaattagcagatgtgattat

SEQ ID NO: 148839 - DNA, 33 bp, Homo sapien
actgagctattgtcacaagtagtgagtagtact

SEQ ID NO: 148840 - DNA, 33 bp, Homo sapien
actgagctattgtcacgagtagtgagtagtact

SEQ ID NO: 148841 - DNA, 33 bp, Homo sapien
gagtgagagctatttcactgcttaaacgtggtg

SEQ ID NO: 148842 - DNA, 33 bp, Homo sapien
gagtgagagctatttccctgcttaaacgtggtg

SEQ ID NO: 148843 - DNA, 33 bp, Homo sapien
gccctatgacacttgagtactacctgcttcttt

SEQ ID NO: 148844 - DNA, 33 bp, Homo sapien
gccctatgacacttgattactacctgcttcttt

SEQ ID NO: 148845 - DNA, 33 bp, Homo sapien
agttgctccttgagaactctacctgttcataag

SEQ ID NO: 148846 - DNA, 33 bp, Homo sapien
agttgctccttgagaattctacctgttcataag

SEQ ID NO: 148847 - DNA, 33 bp, Homo sapien
ccaggtaaagcaatagcaatcagttgtataaaa

SEQ ID NO: 148848 - DNA, 33 bp, Homo sapien
ccaggtaaagcaatagtaatcagttgtataaaa

SEQ ID NO: 148849 - DNA, 33 bp, Homo sapien
cagctttgcaaagaggaaaatatttactccagg

SEQ ID NO: 148850 - DNA, 33 bp, Homo sapien
cagctttgcaaagaggcaaatatttactccagg

SEQ ID NO: 148851 - DNA, 33 bp, Homo sapien
gcaatggggctcaataagtctgcttccaccttc

SEQ ID NO: 148852 - DNA, 33 bp, Homo sapien
gcaatggggctcaatacgtctgcttccaccttc

SEQ ID NO: 148853 - DNA, 33 bp, Homo sapien
cagtctgtgaagatgacatttttcctgctgcag

SEQ ID NO: 148854 - DNA, 33 bp, Homo sapien
cagtctgtgaagatgatatttttcctgctgcag

SEQ ID NO: 148855 - DNA, 33 bp, Homo sapien
cactacttttattaaaacaagcacagataccaa

SEQ ID NO: 148856 - DNA, 33 bp, Homo sapien
cactacttttattaaaccaagcacagataccaa

SEQ ID NO: 148857 - DNA, 33 bp, Homo sapien
aaatagatataggcagaaagcacaagtgaaaaa

SEQ ID NO: 148858 - DNA, 33 bp, Homo sapien
aaatagatataggcagtaagcacaagtgaaaaa

SEQ ID NO: 148859 - DNA, 33 bp, Homo sapien
aagccagactcatgggaaagtatcaagctgtcc

SEQ ID NO: 148860 - DNA, 33 bp, Homo sapien
aagccagactcatgggcaagtatcaagctgtcc

SEQ ID NO: 148861 - DNA, 33 bp, Homo sapien
atattttgatttgctacaacagagtacctgagt

SEQ ID NO: 148862 - DNA, 33 bp, Homo sapien
atattttgatttgctataacagagtacctgagt

SEQ ID NO: 148863 - DNA, 33 bp, Homo sapien
tcgcatgattacccacagtgatagagataggtc

SEQ ID NO: 148864 - DNA, 33 bp, Homo sapien
tcgcatgattacccacggtgatagagataggtc

SEQ ID NO: 148865 - DNA, 33 bp, Homo sapien
tgatagagataggtccaaggacttgctccttca

SEQ ID NO: 148866 - DNA, 33 bp, Homo sapien
tgatagagataggtccgaggacttgctccttca

SEQ ID NO: 148867 - DNA, 33 bp, Homo sapien
accagtttccaagcaacagatttatttgaaaac

SEQ ID NO: 148868 - DNA, 33 bp, Homo sapien
accagtttccaagcaatagatttatttgaaaac

SEQ ID NO: 148869 - DNA, 33 bp, Homo sapien
atgtcaaacatggtacacattttgatggttggg

SEQ ID NO: 148870 - DNA, 33 bp, Homo sapien
atgtcaaacatggtactcattttgatggttggg

SEQ ID NO: 148871 - DNA, 33 bp, Homo sapien
ttgaccactgtggaaacgttctctaggggttca

SEQ ID NO: 148872 - DNA, 33 bp, Homo sapien
ttgaccactgtggaaatgttctctaggggttca

SEQ ID NO: 148873 - DNA, 33 bp, Homo sapien
caaaacaagaaggaccgggctaaagatggtgtt

SEQ ID NO: 148874 - DNA, 33 bp, Homo sapien
caaaacaagaaggacctggctaaagatggtgtt

SEQ ID NO: 148875 - DNA, 33 bp, Homo sapien
aagccacaactccagaaataaatttgcccatat

SEQ ID NO: 148876 - DNA, 33 bp, Homo sapien
aagccacaactccagacataaatttgcccatat

SEQ ID NO: 148877 - DNA, 33 bp, Homo sapien
aacttggccaggtagagaagatggaagcagtcc

SEQ ID NO: 148878 - DNA, 33 bp, Homo sapien
aacttggccaggtagataagatggaagcagtcc

SEQ ID NO: 148879 - DNA, 33 bp, Homo sapien
tccctttccaatggtaaagcaccaaatgctcca

SEQ ID NO: 148880 - DNA, 33 bp, Homo sapien
tccctttccaatggtagagcaccaaatgctcca

SEQ ID NO: 148881 - DNA, 33 bp, Homo sapien
tcctacaggttaaaatcaccatgaggccaggca

SEQ ID NO: 148882 - DNA, 33 bp, Homo sapien
tcctacaggttaaaattaccatgaggccaggca

SEQ ID NO: 148883 - DNA, 33 bp, Homo sapien
tcagaaaatttgtatacggcaaagatagagaaa

SEQ ID NO: 148884 - DNA, 33 bp, Homo sapien
tcagaaaatttgtatatggcaaagatagagaaa

SEQ ID NO: 148885 - DNA, 33 bp, Homo sapien
gaagtcattggagtgaactctctaatatccctt

SEQ ID NO: 148886 - DNA, 33 bp, Homo sapien
gaagtcattggagtgacctctctaatatccctt

SEQ ID NO: 148887 - DNA, 33 bp, Homo sapien
ttgaatatctgtggaaaaagatttgttctctgt

SEQ ID NO: 148888 - DNA, 33 bp, Homo sapien
ttgaatatctgtggaagaagatttgttctctgt

SEQ ID NO: 148889 - DNA, 33 bp, Homo sapien
catcaagaaatttccagtatggagagtgctaca

SEQ ID NO: 148890 - DNA, 33 bp, Homo sapien
catcaagaaatttccattatggagagtgctaca

SEQ ID NO: 148891 - DNA, 33 bp, Homo sapien
tatccgtccccttctccctgatatacatcatca

SEQ ID NO: 148892 - DNA, 33 bp, Homo sapien
tatccgtccccttctctctgatatacatcatca

SEQ ID NO: 148893 - DNA, 33 bp, Homo sapien
catgcaatctagggccacctgttattatagaga

SEQ ID NO: 148894 - DNA, 33 bp, Homo sapien
catgcaatctagggcctcctgttattatagaga

SEQ ID NO: 148895 - DNA, 33 bp, Homo sapien
atgtgtggaagtggaaaacaatatactgatgat

SEQ ID NO: 148896 - DNA, 33 bp, Homo sapien
atgtgtggaagtggaagacaatatactgatgat

SEQ ID NO: 148897 - DNA, 33 bp, Homo sapien
gtttataaagtccataatagcaaacagtaatgt

SEQ ID NO: 148898 - DNA, 33 bp, Homo sapien
gtttataaagtccatagtagcaaacagtaatgt

SEQ ID NO: 148899 - DNA, 33 bp, Homo sapien
atatatcaaaagtaagccctcagatgtcatact

SEQ ID NO: 148900 - DNA, 33 bp, Homo sapien
atatatcaaaagtaagtcctcagatgtcatact

SEQ ID NO: 148901 - DNA, 33 bp, Homo sapien
aaccaatcttgggtcaaaagtattggaaaaaaa

SEQ ID NO: 148902 - DNA, 33 bp, Homo sapien
aaccaatcttgggtcataagtattggaaaaaaa

SEQ ID NO: 148903 - DNA, 33 bp, Homo sapien
ttttggatgcagttgaacattgttttatgcttc

SEQ ID NO: 148904 - DNA, 33 bp, Homo sapien
ttttggatgcagttgagcattgttttatgcttc

SEQ ID NO: 148905 - DNA, 33 bp, Homo sapien
agcttcggagtacttacagaaggaagtctttta

SEQ ID NO: 148906 - DNA, 33 bp, Homo sapien
agcttcggagtacttatagaaggaagtctttta

SEQ ID NO: 148907 - DNA, 33 bp, Homo sapien
agcttctctggttcaacgttcgtagaatcagct

SEQ ID NO: 148908 - DNA, 33 bp, Homo sapien
agcttctctggttcaatgttcgtagaatcagct

SEQ ID NO: 148909 - DNA, 33 bp, Homo sapien
atccatgaaggaagaaaaactgagcaaaacagg

SEQ ID NO: 148910 - DNA, 33 bp, Homo sapien
atccatgaaggaagaagaactgagcaaaacagg

SEQ ID NO: 148911 - DNA, 33 bp, Homo sapien
gaagtcattggtagaactgggttagccatcatt

SEQ ID NO: 148912 - DNA, 33 bp, Homo sapien
gaagtcattggtagaattgggttagccatcatt

SEQ ID NO: 148913 - DNA, 33 bp, Homo sapien
atgagcagaggatccacgataataatgagcaag

SEQ ID NO: 148914 - DNA, 33 bp, Homo sapien
atgagcagaggatccatgataataatgagcaag

SEQ ID NO: 148915 - DNA, 33 bp, Homo sapien
tctgaatggcagaaaaacttgatgtgtctattg

SEQ ID NO: 148916 - DNA, 33 bp, Homo sapien
tctgaatggcagaaaaccttgatgtgtctattg

SEQ ID NO: 148917 - DNA, 33 bp, Homo sapien
cctgtgctcctcttttaaaaaaccaacataatc

SEQ ID NO: 148918 - DNA, 33 bp, Homo sapien
cctgtgctcctcttttgaaaaaccaacataatc

SEQ ID NO: 148919 - DNA, 33 bp, Homo sapien
cagagaatgaaagtgaagcgttctccctgcccc

SEQ ID NO: 148920 - DNA, 33 bp, Homo sapien
cagagaatgaaagtgaggcgttctccctgcccc

SEQ ID NO: 148921 - DNA, 33 bp, Homo sapien
gattctaagaatctcaacaaaagcagcaaattc

SEQ ID NO: 148922 - DNA, 33 bp, Homo sapien
gattctaagaatctcagcaaaagcagcaaattc

SEQ ID NO: 148923 - DNA, 33 bp, Homo sapien
cccagaatttatgtaccgacactctgagaatga

SEQ ID NO: 148924 - DNA, 33 bp, Homo sapien
cccagaatttatgtactgacactctgagaatga

SEQ ID NO: 148925 - DNA, 33 bp, Homo sapien
ggaattcaaagtattgcaacaggcttgaatctg

SEQ ID NO: 148926 - DNA, 33 bp, Homo sapien
ggaattcaaagtattgtaacaggcttgaatctg

SEQ ID NO: 148927 - DNA, 33 bp, Homo sapien
ttgctctgaatcactgcaaggagtcaggaactg

SEQ ID NO: 148928 - DNA, 33 bp, Homo sapien
ttgctctgaatcactgtaaggagtcaggaactg

SEQ ID NO: 148929 - DNA, 33 bp, Homo sapien
caggaaaacaaggtgaaaattccctgtcttatt

SEQ ID NO: 148930 - DNA, 33 bp, Homo sapien
caggaaaacaaggtgagaattccctgtcttatt

SEQ ID NO: 148931 - DNA, 33 bp, Homo sapien
gtccagagtggagtagaaaagttatctgaaagt

SEQ ID NO: 148932 - DNA, 33 bp, Homo sapien
gtccagagtggagtaggaaagttatctgaaagt

SEQ ID NO: 148933 - DNA, 33 bp, Homo sapien
cacagattgagttaatcttttgagctatggtct

SEQ ID NO: 148934 - DNA, 33 bp, Homo sapien
cacagattgagttaattttttgagctatggtct

SEQ ID NO: 148935 - DNA, 33 bp, Homo sapien
ctagttcttccaattacaagtcccatggtcttc

SEQ ID NO: 148936 - DNA, 33 bp, Homo sapien
ctagttcttccaattataagtcccatggtcttc

SEQ ID NO: 148937 - DNA, 33 bp, Homo sapien
tattaagcatctgttaggtatttgaccctgtgc

SEQ ID NO: 148938 - DNA, 33 bp, Homo sapien
tattaagcatctgttatgtatttgaccctgtgc

SEQ ID NO: 148939 - DNA, 33 bp, Homo sapien
cttctctcatccttcacaagctacttcataacc

SEQ ID NO: 148940 - DNA, 33 bp, Homo sapien
cttctctcatccttcagaagctacttcataacc

SEQ ID NO: 148941 - DNA, 33 bp, Homo sapien
atgggcacataaaaggacagcactgcacagatg

SEQ ID NO: 148942 - DNA, 33 bp, Homo sapien
atgggcacataaaaggccagcactgcacagatg

SEQ ID NO: 148943 - DNA, 33 bp, Homo sapien
ctctctttcaccttcacatagtaaactgcaacc

SEQ ID NO: 148944 - DNA, 33 bp, Homo sapien
ctctctttcaccttcatatagtaaactgcaacc

SEQ ID NO: 148945 - DNA, 33 bp, Homo sapien
cgacatcgaagatctcagaaacaagctggagaa

SEQ ID NO: 148946 - DNA, 33 bp, Homo sapien
cgacatcgaagatctccgaaacaagctggagaa

SEQ ID NO: 148947 - DNA, 33 bp, Homo sapien
ttcatggtagaatttacgtcataagtatactgg

SEQ ID NO: 148948 - DNA, 33 bp, Homo sapien
ttcatggtagaatttaggtcataagtatactgg

SEQ ID NO: 148949 - DNA, 33 bp, Homo sapien
tttgccaaccagctcccaagatctacaaatatg

SEQ ID NO: 148950 - DNA, 33 bp, Homo sapien
tttgccaaccagctcctaagatctacaaatatg

SEQ ID NO: 148951 - DNA, 33 bp, Homo sapien
tacctgtctccaaggccgaacacaaattctcct

SEQ ID NO: 148952 - DNA, 33 bp, Homo sapien
tacctgtctccaaggctgaacacaaattctcct

SEQ ID NO: 148953 - DNA, 33 bp, Homo sapien
acaagcatatgcagacggagctctaagaccaga

SEQ ID NO: 148954 - DNA, 33 bp, Homo sapien
acaagcatatgcagactgagctctaagaccaga

SEQ ID NO: 148955 - DNA, 33 bp, Homo sapien
gggacccaggaacatacgaggtatctaaaagta

SEQ ID NO: 148956 - DNA, 33 bp, Homo sapien
gggacccaggaacatatgaggtatctaaaagta

SEQ ID NO: 148957 - DNA, 33 bp, Homo sapien
cggtcttgctttgttaaaggttggagaggaaag

SEQ ID NO: 148958 - DNA, 33 bp, Homo sapien
cggtcttgctttgttagaggttggagaggaaag

SEQ ID NO: 148959 - DNA, 33 bp, Homo sapien
tctgattcatattagaagctcctatttcaacat

SEQ ID NO: 148960 - DNA, 33 bp, Homo sapien
tctgattcatattagaggctcctatttcaacat

SEQ ID NO: 148961 - DNA, 33 bp, Homo sapien
gtgcaggtgaatgatcgctacaatgagaattac

SEQ ID NO: 148962 - DNA, 33 bp, Homo sapien
gtgcaggtgaatgatctctacaatgagaattac

SEQ ID NO: 148963 - DNA, 33 bp, Homo sapien
ctaaaagcaaagaccacgtaaccatctcaatag

SEQ ID NO: 148964 - DNA, 33 bp, Homo sapien
ctaaaagcaaagaccatgtaaccatctcaatag

SEQ ID NO: 148965 - DNA, 33 bp, Homo sapien
gctggcagactggggcgcattcagatcagactt

SEQ ID NO: 148966 - DNA, 33 bp, Homo sapien
gctggcagactggggctcattcagatcagactt

SEQ ID NO: 148967 - DNA, 33 bp, Homo sapien
ttaaacctatgttcaggatttgattttcttgtg

SEQ ID NO: 148968 - DNA, 33 bp, Homo sapien
ttaaacctatgttcagtatttgattttcttgtg

SEQ ID NO: 148969 - DNA, 33 bp, Homo sapien
agtaactcgacacttacgtcagaaatcaagatt

SEQ ID NO: 148970 - DNA, 33 bp, Homo sapien
agtaactcgacacttatgtcagaaatcaagatt

SEQ ID NO: 148971 - DNA, 33 bp, Homo sapien
tgttgcagaagtactcactcttcccattcatat

SEQ ID NO: 148972 - DNA, 33 bp, Homo sapien
tgttgcagaagtactcgctcttcccattcatat

SEQ ID NO: 148973 - DNA, 33 bp, Homo sapien
gattgtttgttttctacgatagtaactcccaaa

SEQ ID NO: 148974 - DNA, 33 bp, Homo sapien
gattgtttgttttctatgatagtaactcccaaa

SEQ ID NO: 148975 - DNA, 33 bp, Homo sapien
atgttgagggatgagtcacagttggaagtgaga

SEQ ID NO: 148976 - DNA, 33 bp, Homo sapien
atgttgagggatgagtgacagttggaagtgaga

SEQ ID NO: 148977 - DNA, 33 bp, Homo sapien
gtgaatgcctcagtgcaattaactcatatgcca

SEQ ID NO: 148978 - DNA, 33 bp, Homo sapien
gtgaatgcctcagtgcgattaactcatatgcca

SEQ ID NO: 148979 - DNA, 33 bp, Homo sapien
ctggtaagacgtcagtaaagcagaaaaatattc

SEQ ID NO: 148980 - DNA, 33 bp, Homo sapien
ctggtaagacgtcagtgaagcagaaaaatattc

SEQ ID NO: 148981 - DNA, 33 bp, Homo sapien
tcactagagaatgttaggtaagtattagtagat

SEQ ID NO: 148982 - DNA, 33 bp, Homo sapien
tcactagagaatgttatgtaagtattagtagat

SEQ ID NO: 148983 - DNA, 33 bp, Homo sapien
agatggtcatgtttcacggaatttacataataa

SEQ ID NO: 148984 - DNA, 33 bp, Homo sapien
agatggtcatgtttcatggaatttacataataa

SEQ ID NO: 148985 - DNA, 33 bp, Homo sapien
gatggttttgggctcaacattggcactgacctg

SEQ ID NO: 148986 - DNA, 33 bp, Homo sapien
gatggttttgggctcagcattggcactgacctg

SEQ ID NO: 148987 - DNA, 33 bp, Homo sapien
attgagcagccacaagcagctctttagcttcta

SEQ ID NO: 148988 - DNA, 33 bp, Homo sapien
attgagcagccacaagtagctctttagcttcta

SEQ ID NO: 148989 - DNA, 33 bp, Homo sapien
atatagaaattagcagaaggttttaaaatgaat

SEQ ID NO: 148990 - DNA, 33 bp, Homo sapien
atatagaaattagcaggaggttttaaaatgaat

SEQ ID NO: 148991 - DNA, 33 bp, Homo sapien
acaatagccacactacagaatagcccaacaaag

SEQ ID NO: 148992 - DNA, 33 bp, Homo sapien
acaatagccacactacggaatagcccaacaaag

SEQ ID NO: 148993 - DNA, 33 bp, Homo sapien
tccatgcagtctttcaccttccatctcatgatg

SEQ ID NO: 148994 - DNA, 33 bp, Homo sapien
tccatgcagtctttcatcttccatctcatgatg

SEQ ID NO: 148995 - DNA, 33 bp, Homo sapien
tcccacattggcatcaccctggttttctacatc

SEQ ID NO: 148996 - DNA, 33 bp, Homo sapien
tcccacattggcatcatcctggttttctacatc

SEQ ID NO: 148997 - DNA, 33 bp, Homo sapien
ctagacagccatcctacacttttttttaaatct

SEQ ID NO: 148998 - DNA, 33 bp, Homo sapien
ctagacagccatcctatacttttttttaaatct

SEQ ID NO: 148999 - DNA, 33 bp, Homo sapien
aggagaatattcctacccttaaatccagatgcc

SEQ ID NO: 149000 - DNA, 33 bp, Homo sapien
aggagaatattcctactcttaaatccagatgcc

SEQ ID NO: 149001 - DNA, 33 bp, Homo sapien
ttgtttttcacttggactcacaggagaatattc

SEQ ID NO: 149002 - DNA, 33 bp, Homo sapien
ttgtttttcacttggagtcacaggagaatattc

SEQ ID NO: 149003 - DNA, 33 bp, Homo sapien
ccactttgaatattgacgtattggttaaaagca

SEQ ID NO: 149004 - DNA, 33 bp, Homo sapien
ccactttgaatattgatgtattggttaaaagca

SEQ ID NO: 149005 - DNA, 33 bp, Homo sapien
tgtgccttgcacataagtaataagcactcaaaa

SEQ ID NO: 149006 - DNA, 33 bp, Homo sapien
tgtgccttgcacataattaataagcactcaaaa

SEQ ID NO: 149007 - DNA, 33 bp, Homo sapien
aaagaactgtgttgacaactccaggccagagga

SEQ ID NO: 149008 - DNA, 33 bp, Homo sapien
aaagaactgtgttgaccactccaggccagagga

SEQ ID NO: 149009 - DNA, 33 bp, Homo sapien
accgctcatggtttaactgcctaactacatagg

SEQ ID NO: 149010 - DNA, 33 bp, Homo sapien
accgctcatggtttaattgcctaactacatagg

SEQ ID NO: 149011 - DNA, 33 bp, Homo sapien
aagtctagatcctgtcacaatcccgataacaca

SEQ ID NO: 149012 - DNA, 33 bp, Homo sapien
aagtctagatcctgtcccaatcccgataacaca

SEQ ID NO: 149013 - DNA, 33 bp, Homo sapien
gcacttcattagagtcaatgctgctgggaccag

SEQ ID NO: 149014 - DNA, 33 bp, Homo sapien
gcacttcattagagtcgatgctgctgggaccag

SEQ ID NO: 149015 - DNA, 33 bp, Homo sapien
taacaatctctcaccacgtttgcctccaccttc

SEQ ID NO: 149016 - DNA, 33 bp, Homo sapien
taacaatctctcaccatgtttgcctccaccttc

SEQ ID NO: 149017 - DNA, 33 bp, Homo sapien
ccttcaaaagaactcaatacaccttttgccagc

SEQ ID NO: 149018 - DNA, 33 bp, Homo sapien
ccttcaaaagaactcagtacaccttttgccagc

SEQ ID NO: 149019 - DNA, 33 bp, Homo sapien
gagagtccagtaggtaaccagtcattagttgtt

SEQ ID NO: 149020 - DNA, 33 bp, Homo sapien
gagagtccagtaggtagccagtcattagttgtt

SEQ ID NO: 149021 - DNA, 33 bp, Homo sapien
cttattggtcagactgcaatttaaagaggagat

SEQ ID NO: 149022 - DNA, 33 bp, Homo sapien
cttattggtcagactggaatttaaagaggagat

SEQ ID NO: 149023 - DNA, 33 bp, Homo sapien
ccagagctgatccaaacttataaatcctgtttt

SEQ ID NO: 149024 - DNA, 33 bp, Homo sapien
ccagagctgatccaaatttataaatcctgtttt

SEQ ID NO: 149025 - DNA, 33 bp, Homo sapien
tagacttgtgtcataacagtactgatagggtga

SEQ ID NO: 149026 - DNA, 33 bp, Homo sapien
tagacttgtgtcataatagtactgatagggtga

SEQ ID NO: 149027 - DNA, 33 bp, Homo sapien
ttattttaggttgacactaggcagcattgcctg

SEQ ID NO: 149028 - DNA, 33 bp, Homo sapien
ttattttaggttgacattaggcagcattgcctg

SEQ ID NO: 149029 - DNA, 33 bp, Homo sapien
attaaagatgtcacagaaccaaagcttgtgctt

SEQ ID NO: 149030 - DNA, 33 bp, Homo sapien
attaaagatgtcacaggaccaaagcttgtgctt

SEQ ID NO: 149031 - DNA, 33 bp, Homo sapien
tggtggtgctaggggaaatgaagaggaaagtct

SEQ ID NO: 149032 - DNA, 33 bp, Homo sapien
tggtggtgctaggggagatgaagaggaaagtct

SEQ ID NO: 149033 - DNA, 33 bp, Homo sapien
tgctacagcttgcataaaaagctcaggctatcc

SEQ ID NO: 149034 - DNA, 33 bp, Homo sapien
tgctacagcttgcatagaaagctcaggctatcc

SEQ ID NO: 149035 - DNA, 33 bp, Homo sapien
gtgagttttgagcaaagaaatcaaataattcaa

SEQ ID NO: 149036 - DNA, 33 bp, Homo sapien
gtgagttttgagcaaataaatcaaataattcaa

SEQ ID NO: 149037 - DNA, 33 bp, Homo sapien
gtgtgctaaagagacaatagagacagcccatca

SEQ ID NO: 149038 - DNA, 33 bp, Homo sapien
gtgtgctaaagagacagtagagacagcccatca

SEQ ID NO: 149039 - DNA, 33 bp, Homo sapien
atttagtcataaagacggcctgaatttctcaaa

SEQ ID NO: 149040 - DNA, 33 bp, Homo sapien
atttagtcataaagactgcctgaatttctcaaa

SEQ ID NO: 149041 - DNA, 33 bp, Homo sapien
tatgtacattaacacaaaaaccacatgcatata

SEQ ID NO: 149042 - DNA, 33 bp, Homo sapien
tatgtacattaacacacaaaccacatgcatata

SEQ ID NO: 149043 - DNA, 33 bp, Homo sapien
agatgtttcagccacgaccaatgatctattatt

SEQ ID NO: 149044 - DNA, 33 bp, Homo sapien
agatgtttcagccacggccaatgatctattatt

SEQ ID NO: 149045 - DNA, 33 bp, Homo sapien
tggcattgtctctaagcccagatatggctgtgg

SEQ ID NO: 149046 - DNA, 33 bp, Homo sapien
tggcattgtctctaagtccagatatggctgtgg

SEQ ID NO: 149047 - DNA, 33 bp, Homo sapien
accaactggtatgaataaagctccagtggaact

SEQ ID NO: 149048 - DNA, 33 bp, Homo sapien
accaactggtatgaatcaagctccagtggaact

SEQ ID NO: 149049 - DNA, 33 bp, Homo sapien
tattgtgctctcaggcaacaggatagtttcctt

SEQ ID NO: 149050 - DNA, 33 bp, Homo sapien
tattgtgctctcaggccacaggatagtttcctt

SEQ ID NO: 149051 - DNA, 33 bp, Homo sapien
aagcccctgctcttaactagcaaactgatctgc

SEQ ID NO: 149052 - DNA, 33 bp, Homo sapien
aagcccctgctcttaattagcaaactgatctgc

SEQ ID NO: 149053 - DNA, 33 bp, Homo sapien
tggcgttagtcacctacggaaatgagacgcccg

SEQ ID NO: 149054 - DNA, 33 bp, Homo sapien
tggcgttagtcacctatggaaatgagacgcccg

SEQ ID NO: 149055 - DNA, 33 bp, Homo sapien
ctggctgcagttcacactactggaagctgattt

SEQ ID NO: 149056 - DNA, 33 bp, Homo sapien
ctggctgcagttcacattactggaagctgattt

SEQ ID NO: 149057 - DNA, 33 bp, Homo sapien
aagctgaaggcataacaagattaagctatgatg

SEQ ID NO: 149058 - DNA, 33 bp, Homo sapien
aagctgaaggcataaccagattaagctatgatg

SEQ ID NO: 149059 - DNA, 33 bp, Homo sapien
gcactgttttctgcaaaaatctgccaccttctt

SEQ ID NO: 149060 - DNA, 33 bp, Homo sapien
gcactgttttctgcaataatctgccaccttctt

SEQ ID NO: 149061 - DNA, 33 bp, Homo sapien
ctttgacaaagggaagcctcaagaaggaaatgc

SEQ ID NO: 149062 - DNA, 33 bp, Homo sapien
ctttgacaaagggaaggctcaagaaggaaatgc

SEQ ID NO: 149063 - DNA, 33 bp, Homo sapien
gaagcatttacttaacagggtgcacttggatga

SEQ ID NO: 149064 - DNA, 33 bp, Homo sapien
gaagcatttacttaactgggtgcacttggatga

SEQ ID NO: 149065 - DNA, 33 bp, Homo sapien
gtgctcctctggacccaatggctaaggcaaggc

SEQ ID NO: 149066 - DNA, 33 bp, Homo sapien
gtgctcctctggaccccatggctaaggcaaggc

SEQ ID NO: 149067 - DNA, 33 bp, Homo sapien
aatacagacttagaaacatcaggcatagagtgg

SEQ ID NO: 149068 - DNA, 33 bp, Homo sapien
aatacagacttagaaatatcaggcatagagtgg

SEQ ID NO: 149069 - DNA, 33 bp, Homo sapien
catctgtcagtgaatgcagtagaaaatagccat

SEQ ID NO: 149070 - DNA, 33 bp, Homo sapien
catctgtcagtgaatggagtagaaaatagccat

SEQ ID NO: 149071 - DNA, 33 bp, Homo sapien
gattgtttcttctcccgcattcttagcgttgtt

SEQ ID NO: 149072 - DNA, 33 bp, Homo sapien
gattgtttcttctccctcattcttagcgttgtt

SEQ ID NO: 149073 - DNA, 33 bp, Homo sapien
gttgttcctctcttgacgcagcaggataattta

SEQ ID NO: 149074 - DNA, 33 bp, Homo sapien
gttgttcctctcttgatgcagcaggataattta

SEQ ID NO: 149075 - DNA, 33 bp, Homo sapien
cgcaccttccacatcacgtttgccaatctctac

SEQ ID NO: 149076 - DNA, 33 bp, Homo sapien
cgcaccttccacatcatgtttgccaatctctac

SEQ ID NO: 149077 - DNA, 33 bp, Homo sapien
gccatggcatttgatcactatgtagctatctgt

SEQ ID NO: 149078 - DNA, 33 bp, Homo sapien
gccatggcatttgatcgctatgtagctatctgt

SEQ ID NO: 149079 - DNA, 33 bp, Homo sapien
ggagaacagtgtataacgaagagtgtaaccagt

SEQ ID NO: 149080 - DNA, 33 bp, Homo sapien
ggagaacagtgtataaggaagagtgtaaccagt

SEQ ID NO: 149081 - DNA, 33 bp, Homo sapien
gtaatgcctctataacaactcacagcactccca

SEQ ID NO: 149082 - DNA, 33 bp, Homo sapien
gtaatgcctctataacgactcacagcactccca

SEQ ID NO: 149083 - DNA, 33 bp, Homo sapien
ctgctaactgtggtcacacttaacgcagctgtg

SEQ ID NO: 149084 - DNA, 33 bp, Homo sapien
ctgctaactgtggtcatacttaacgcagctgtg

SEQ ID NO: 149085 - DNA, 33 bp, Homo sapien
gaaacctgggtgatataataggcacatacacac

SEQ ID NO: 149086 - DNA, 33 bp, Homo sapien
gaaacctgggtgatatgataggcacatacacac

SEQ ID NO: 149087 - DNA, 33 bp, Homo sapien
atgacagacgtgatccacattgctgtctcctac

SEQ ID NO: 149088 - DNA, 33 bp, Homo sapien
atgacagacgtgatcctcattgctgtctcctac

SEQ ID NO: 149089 - DNA, 33 bp, Homo sapien
tggctgtcgtggccaagagtatccttctctacc

SEQ ID NO: 149090 - DNA, 33 bp, Homo sapien
tggctgtcgtggccaatagtatccttctctacc

SEQ ID NO: 149091 - DNA, 33 bp, Homo sapien
aagctattgatcttaaaggccatgtacaacatg

SEQ ID NO: 149092 - DNA, 33 bp, Homo sapien
aagctattgatcttaatggccatgtacaacatg

SEQ ID NO: 149093 - DNA, 33 bp, Homo sapien
tcagaagaggcgtggacgtgtagcaaaggatgt

SEQ ID NO: 149094 - DNA, 33 bp, Homo sapien
tcagaagaggcgtggatgtgtagcaaaggatgt

SEQ ID NO: 149095 - DNA, 33 bp, Homo sapien
ggaggcatcaaacatcacaatctcagagaacat

SEQ ID NO: 149096 - DNA, 33 bp, Homo sapien
ggaggcatcaaacatcgcaatctcagagaacat

SEQ ID NO: 149097 - DNA, 33 bp, Homo sapien
ctagacttgcttccatcacatttaaatttgtca

SEQ ID NO: 149098 - DNA, 33 bp, Homo sapien
ctagacttgcttccattacatttaaatttgtca

SEQ ID NO: 149099 - DNA, 33 bp, Homo sapien
aaatttcaatgcagaaggaaagtcatagggaat

SEQ ID NO: 149100 - DNA, 33 bp, Homo sapien
aaatttcaatgcagaatgaaagtcatagggaat

SEQ ID NO: 149101 - DNA, 33 bp, Homo sapien
atgtcactggggaagagtcagagagcaaggtac

SEQ ID NO: 149102 - DNA, 33 bp, Homo sapien
atgtcactggggaagattcagagagcaaggtac

SEQ ID NO: 149103 - DNA, 33 bp, Homo sapien
tgtgactctagttagaactgacacactgggatt

SEQ ID NO: 149104 - DNA, 33 bp, Homo sapien
tgtgactctagttagacctgacacactgggatt

SEQ ID NO: 149105 - DNA, 33 bp, Homo sapien
ggattagaatgatgtaactcaaaaaggatgtga

SEQ ID NO: 149106 - DNA, 33 bp, Homo sapien
ggattagaatgatgtagctcaaaaaggatgtga

SEQ ID NO: 149107 - DNA, 33 bp, Homo sapien
ctgaaacaggtgttcaaataaaaacttgtaaat

SEQ ID NO: 149108 - DNA, 33 bp, Homo sapien
ctgaaacaggtgttcacataaaaacttgtaaat

SEQ ID NO: 149109 - DNA, 33 bp, Homo sapien
aaaaggaaaataacaaatgaggatgaggagaaa

SEQ ID NO: 149110 - DNA, 33 bp, Homo sapien
aaaaggaaaataacaagtgaggatgaggagaaa

SEQ ID NO: 149111 - DNA, 33 bp, Homo sapien
tttgagtttagtaagaccatgatattttctgag

SEQ ID NO: 149112 - DNA, 33 bp, Homo sapien
tttgagtttagtaagagcatgatattttctgag

SEQ ID NO: 149113 - DNA, 33 bp, Homo sapien
acacctcaaaactgagcaacgccactttaagtg

SEQ ID NO: 149114 - DNA, 33 bp, Homo sapien
acacctcaaaactgagtaacgccactttaagtg

SEQ ID NO: 149115 - DNA, 33 bp, Homo sapien
acccagtcaatagcaaatgaggcacagtcctgg

SEQ ID NO: 149116 - DNA, 33 bp, Homo sapien
acccagtcaatagcaactgaggcacagtcctgg

SEQ ID NO: 149117 - DNA, 33 bp, Homo sapien
aatcattcttccatgaaagaccacttttgactt

SEQ ID NO: 149118 - DNA, 33 bp, Homo sapien
aatcattcttccatgagagaccacttttgactt

SEQ ID NO: 149119 - DNA, 33 bp, Homo sapien
gtatccattggtttcccctgcatctgtaaattc

SEQ ID NO: 149120 - DNA, 33 bp, Homo sapien
gtatccattggtttccgctgcatctgtaaattc

SEQ ID NO: 149121 - DNA, 33 bp, Homo sapien
tgagccactgatgtaaaaactttttgaactttc

SEQ ID NO: 149122 - DNA, 33 bp, Homo sapien
tgagccactgatgtaagaactttttgaactttc

SEQ ID NO: 149123 - DNA, 33 bp, Homo sapien
tttgatccagaaatcacgtttataggagttaca

SEQ ID NO: 149124 - DNA, 33 bp, Homo sapien
tttgatccagaaatcatgtttataggagttaca

SEQ ID NO: 149125 - DNA, 33 bp, Homo sapien
acaaagagatgaaaacaagtcaacatccacaac

SEQ ID NO: 149126 - DNA, 33 bp, Homo sapien
acaaagagatgaaaacgagtcaacatccacaac

SEQ ID NO: 149127 - DNA, 33 bp, Homo sapien
cctttgtatggacacactgtatctaactaatct

SEQ ID NO: 149128 - DNA, 33 bp, Homo sapien
cctttgtatggacacagtgtatctaactaatct

SEQ ID NO: 149129 - DNA, 33 bp, Homo sapien
gggactgaattaagaaagaacctcacatggcag

SEQ ID NO: 149130 - DNA, 33 bp, Homo sapien
gggactgaattaagaaggaacctcacatggcag

SEQ ID NO: 149131 - DNA, 33 bp, Homo sapien
taaaccagatgagtccactgaggttataacatc

SEQ ID NO: 149132 - DNA, 33 bp, Homo sapien
taaaccagatgagtccgctgaggttataacatc

SEQ ID NO: 149133 - DNA, 33 bp, Homo sapien
tattcacattctagtcaatttgaagaaaatcaa

SEQ ID NO: 149134 - DNA, 33 bp, Homo sapien
tattcacattctagtcgatttgaagaaaatcaa

SEQ ID NO: 149135 - DNA, 33 bp, Homo sapien
tagtcttcacaataacgctatgcagtaggtatt

SEQ ID NO: 149136 - DNA, 33 bp, Homo sapien
tagtcttcacaataactctatgcagtaggtatt

SEQ ID NO: 149137 - DNA, 33 bp, Homo sapien
ctggttccagagtccaccatcttaaataccatc

SEQ ID NO: 149138 - DNA, 33 bp, Homo sapien
ctggttccagagtccatcatcttaaataccatc

SEQ ID NO: 149139 - DNA, 33 bp, Homo sapien
gtcactatttcagtgactacctcatgtctgcag

SEQ ID NO: 149140 - DNA, 33 bp, Homo sapien
gtcactatttcagtgagtacctcatgtctgcag

SEQ ID NO: 149141 - DNA, 33 bp, Homo sapien
gctgggttaagtatcaagagatttctctggaca

SEQ ID NO: 149142 - DNA, 33 bp, Homo sapien
gctgggttaagtatcaggagatttctctggaca

SEQ ID NO: 149143 - DNA, 33 bp, Homo sapien
gactggggtgtccatacaaaagtctggacggag

SEQ ID NO: 149144 - DNA, 33 bp, Homo sapien
gactggggtgtccatataaaagtctggacggag

SEQ ID NO: 149145 - DNA, 33 bp, Homo sapien
gccttcagttgactcagtacccagacatagaat

SEQ ID NO: 149146 - DNA, 33 bp, Homo sapien
gccttcagttgactcattacccagacatagaat

SEQ ID NO: 149147 - DNA, 33 bp, Homo sapien
catcagcagatgagaacggggacatgggtctcg

SEQ ID NO: 149148 - DNA, 33 bp, Homo sapien
catcagcagatgagaatggggacatgggtctcg

SEQ ID NO: 149149 - DNA, 33 bp, Homo sapien
gcctctcacttaatggaaagaagaagctaatct

SEQ ID NO: 149150 - DNA, 33 bp, Homo sapien
gcctctcacttaatgggaagaagaagctaatct

SEQ ID NO: 149151 - DNA, 33 bp, Homo sapien
gtatccacatccaataccttgggaatatgcttt

SEQ ID NO: 149152 - DNA, 33 bp, Homo sapien
gtatccacatccaatagcttgggaatatgcttt

SEQ ID NO: 149153 - DNA, 33 bp, Homo sapien
gcgtcttcacctgtctcagaacttgctcctcat

SEQ ID NO: 149154 - DNA, 33 bp, Homo sapien
gcgtcttcacctgtcttagaacttgctcctcat

SEQ ID NO: 149155 - DNA, 33 bp, Homo sapien
attgctcttttccaacagggctctactacttct

SEQ ID NO: 149156 - DNA, 33 bp, Homo sapien
attgctcttttccaacggggctctactacttct

SEQ ID NO: 149157 - DNA, 33 bp, Homo sapien
ttggactgtgaaaaaaagcagctagacttcatt

SEQ ID NO: 149158 - DNA, 33 bp, Homo sapien
ttggactgtgaaaaaaggcagctagacttcatt

SEQ ID NO: 149159 - DNA, 33 bp, Homo sapien
ttgcaggagataagtcaagacaaagggttgtag

SEQ ID NO: 149160 - DNA, 33 bp, Homo sapien
ttgcaggagataagtcgagacaaagggttgtag

SEQ ID NO: 149161 - DNA, 33 bp, Homo sapien
gctttgggcctcttcacatcagtgataaagtga

SEQ ID NO: 149162 - DNA, 33 bp, Homo sapien
gctttgggcctcttcatatcagtgataaagtga

SEQ ID NO: 149163 - DNA, 33 bp, Homo sapien
aagtacttattagatcaagacacttagatagat

SEQ ID NO: 149164 - DNA, 33 bp, Homo sapien
aagtacttattagatcgagacacttagatagat

SEQ ID NO: 149165 - DNA, 33 bp, Homo sapien
caaaggctacaatcaaagcaaagaaaaaactaa

SEQ ID NO: 149166 - DNA, 33 bp, Homo sapien
caaaggctacaatcaaggcaaagaaaaaactaa

SEQ ID NO: 149167 - DNA, 33 bp, Homo sapien
gaaaatgagcaccaaacgttacctcagacccta

SEQ ID NO: 149168 - DNA, 33 bp, Homo sapien
gaaaatgagcaccaaatgttacctcagacccta

SEQ ID NO: 149169 - DNA, 33 bp, Homo sapien
gattccagaagccatactagctattccactgct

SEQ ID NO: 149170 - DNA, 33 bp, Homo sapien
gattccagaagccatagtagctattccactgct

SEQ ID NO: 149171 - DNA, 33 bp, Homo sapien
ccaaaacacatcctcaatattaaaatcaccaaa

SEQ ID NO: 149172 - DNA, 33 bp, Homo sapien
ccaaaacacatcctcagtattaaaatcaccaaa

SEQ ID NO: 149173 - DNA, 33 bp, Homo sapien
cttctctcagcatgaaatgtttctctgatgtta

SEQ ID NO: 149174 - DNA, 33 bp, Homo sapien
cttctctcagcatgaagtgtttctctgatgtta

SEQ ID NO: 149175 - DNA, 33 bp, Homo sapien
aaattatttatcttcaatatggtgacctgagat

SEQ ID NO: 149176 - DNA, 33 bp, Homo sapien
aaattatttatcttcagtatggtgacctgagat

SEQ ID NO: 149177 - DNA, 33 bp, Homo sapien
agcttaggtgagataccaagagcaggagaagca

SEQ ID NO: 149178 - DNA, 33 bp, Homo sapien
agcttaggtgagatacgaagagcaggagaagca

SEQ ID NO: 149179 - DNA, 33 bp, Homo sapien
cccgaaccagcgtataaactggaactgacaatc

SEQ ID NO: 149180 - DNA, 33 bp, Homo sapien
cccgaaccagcgtatatactggaactgacaatc

SEQ ID NO: 149181 - DNA, 33 bp, Homo sapien
gatgttcaaagccagacgagaataaaaggatgg

SEQ ID NO: 149182 - DNA, 33 bp, Homo sapien
gatgttcaaagccagatgagaataaaaggatgg

SEQ ID NO: 149183 - DNA, 33 bp, Homo sapien
caggcgtgagctataacgttgactccttcttgg

SEQ ID NO: 149184 - DNA, 33 bp, Homo sapien
caggcgtgagctataatgttgactccttcttgg

SEQ ID NO: 149185 - DNA, 33 bp, Homo sapien
gtagagggatttaagacacagaaaggcaaagtt

SEQ ID NO: 149186 - DNA, 33 bp, Homo sapien
gtagagggatttaagatacagaaaggcaaagtt

SEQ ID NO: 149187 - DNA, 33 bp, Homo sapien
aggtgaatgtgctggacaacctggcagcagcta

SEQ ID NO: 149188 - DNA, 33 bp, Homo sapien
aggtgaatgtgctggataacctggcagcagcta

SEQ ID NO: 149189 - DNA, 33 bp, Homo sapien
agtcaagtgaaggatacgggataggtgtgtctt

SEQ ID NO: 149190 - DNA, 33 bp, Homo sapien
agtcaagtgaaggatatgggataggtgtgtctt

SEQ ID NO: 149191 - DNA, 33 bp, Homo sapien
aaggtattaggaaaataatgtacaagcatctct

SEQ ID NO: 149192 - DNA, 33 bp, Homo sapien
aaggtattaggaaaattatgtacaagcatctct

SEQ ID NO: 149193 - DNA, 33 bp, Homo sapien
cttaggaattcaggaaatgttccagactttgcc

SEQ ID NO: 149194 - DNA, 33 bp, Homo sapien
cttaggaattcaggaagtgttccagactttgcc

SEQ ID NO: 149195 - DNA, 33 bp, Homo sapien
agcaagatggtaatgaaactcaataggaaattg

SEQ ID NO: 149196 - DNA, 33 bp, Homo sapien
agcaagatggtaatgacactcaataggaaattg

SEQ ID NO: 149197 - DNA, 33 bp, Homo sapien
ttcaaacgcccaataaagaagggacatgggagc

SEQ ID NO: 149198 - DNA, 33 bp, Homo sapien
ttcaaacgcccaataaggaagggacatgggagc

SEQ ID NO: 149199 - DNA, 33 bp, Homo sapien
aaacaagtcaaccccaatgaccaacagtgcagc

SEQ ID NO: 149200 - DNA, 33 bp, Homo sapien
aaacaagtcaaccccagtgaccaacagtgcagc

SEQ ID NO: 149201 - DNA, 33 bp, Homo sapien
ctctcctatgccctaagtgcacaagctgtcctt

SEQ ID NO: 149202 - DNA, 33 bp, Homo sapien
ctctcctatgccctaattgcacaagctgtcctt

SEQ ID NO: 149203 - DNA, 33 bp, Homo sapien
gaagtgtaaacatgggaagattcttgcaacctg

SEQ ID NO: 149204 - DNA, 33 bp, Homo sapien
gaagtgtaaacatggggagattcttgcaacctg

SEQ ID NO: 149205 - DNA, 33 bp, Homo sapien
atgagaagagatcttacggctatgcagggactc

SEQ ID NO: 149206 - DNA, 33 bp, Homo sapien
atgagaagagatcttatggctatgcagggactc

SEQ ID NO: 149207 - DNA, 33 bp, Homo sapien
gagagcaaaggaacaacttgagaaaaactggag

SEQ ID NO: 149208 - DNA, 33 bp, Homo sapien
gagagcaaaggaacaatttgagaaaaactggag

SEQ ID NO: 149209 - DNA, 33 bp, Homo sapien
catgcctaaattatccgaaaccttttcagtggc

SEQ ID NO: 149210 - DNA, 33 bp, Homo sapien
catgcctaaattatcctaaaccttttcagtggc

SEQ ID NO: 149211 - DNA, 33 bp, Homo sapien
ttttggaaaggccctccaatcctctatatgcta

SEQ ID NO: 149212 - DNA, 33 bp, Homo sapien
ttttggaaaggccctctaatcctctatatgcta

SEQ ID NO: 149213 - DNA, 33 bp, Homo sapien
ttcaaacatacaggcaataagaaacctctgaaa

SEQ ID NO: 149214 - DNA, 33 bp, Homo sapien
ttcaaacatacaggcagtaagaaacctctgaaa

SEQ ID NO: 149215 - DNA, 33 bp, Homo sapien
tgtcttgtagtatttccctgaagatttttgtat

SEQ ID NO: 149216 - DNA, 33 bp, Homo sapien
tgtcttgtagtatttcgctgaagatttttgtat

SEQ ID NO: 149217 - DNA, 33 bp, Homo sapien
ctctctagagcaatcaaggaaaagaaataaata

SEQ ID NO: 149218 - DNA, 33 bp, Homo sapien
ctctctagagcaatcagggaaaagaaataaata

SEQ ID NO: 149219 - DNA, 33 bp, Homo sapien
aacaaaatcaagaactcaatttcattaacaata

SEQ ID NO: 149220 - DNA, 33 bp, Homo sapien
aacaaaatcaagaactgaatttcattaacaata

SEQ ID NO: 149221 - DNA, 33 bp, Homo sapien
tactccaggtgttaacaatcttggtcaaaaaaa

SEQ ID NO: 149222 - DNA, 33 bp, Homo sapien
tactccaggtgttaaccatcttggtcaaaaaaa

SEQ ID NO: 149223 - DNA, 33 bp, Homo sapien
caactatgtgattggaatcaatgacttagctgg

SEQ ID NO: 149224 - DNA, 33 bp, Homo sapien
caactatgtgattggagtcaatgacttagctgg

SEQ ID NO: 149225 - DNA, 33 bp, Homo sapien
tggattacccccacaacaaggagaaatgaaaga

SEQ ID NO: 149226 - DNA, 33 bp, Homo sapien
tggattacccccacaataaggagaaatgaaaga

SEQ ID NO: 149227 - DNA, 33 bp, Homo sapien
ctttacttcccccaaaccatagtctaattttcc

SEQ ID NO: 149228 - DNA, 33 bp, Homo sapien
ctttacttcccccaaatcatagtctaattttcc

SEQ ID NO: 149229 - DNA, 33 bp, Homo sapien
caaaatctaatccacacggagcaagcaaccctc

SEQ ID NO: 149230 - DNA, 33 bp, Homo sapien
caaaatctaatccacatggagcaagcaaccctc

SEQ ID NO: 149231 - DNA, 33 bp, Homo sapien
gttgctggtcatattcccttacttgatttggtt

SEQ ID NO: 149232 - DNA, 33 bp, Homo sapien
gttgctggtcatattctcttacttgatttggtt

SEQ ID NO: 149233 - DNA, 33 bp, Homo sapien
agagtgataactgaaaagcagtatgtggtagaa

SEQ ID NO: 149234 - DNA, 33 bp, Homo sapien
agagtgataactgaaaggcagtatgtggtagaa

SEQ ID NO: 149235 - DNA, 33 bp, Homo sapien
agtatgtcaaagccccaaatcaggagggcaacc

SEQ ID NO: 149236 - DNA, 33 bp, Homo sapien
agtatgtcaaagcccccaatcaggagggcaacc

SEQ ID NO: 149237 - DNA, 33 bp, Homo sapien
atactgtgtatcaccaactcctataccatgatt

SEQ ID NO: 149238 - DNA, 33 bp, Homo sapien
atactgtgtatcaccatctcctataccatgatt

SEQ ID NO: 149239 - DNA, 33 bp, Homo sapien
aaaatctttctggaagcactgtattgatcacaa

SEQ ID NO: 149240 - DNA, 33 bp, Homo sapien
aaaatctttctggaagtactgtattgatcacaa

SEQ ID NO: 149241 - DNA, 33 bp, Homo sapien
ttgagaatgcaccagtcaacaaactccattttg

SEQ ID NO: 149242 - DNA, 33 bp, Homo sapien
ttgagaatgcaccagttaacaaactccattttg

SEQ ID NO: 149243 - DNA, 33 bp, Homo sapien
gttggtgggccttccaatgatgttgagattccc

SEQ ID NO: 149244 - DNA, 33 bp, Homo sapien
gttggtgggccttccagtgatgttgagattccc

SEQ ID NO: 149245 - DNA, 33 bp, Homo sapien
gtaaagagaatactgacgacttttagctttagg

SEQ ID NO: 149246 - DNA, 33 bp, Homo sapien
gtaaagagaatactgatgacttttagctttagg

SEQ ID NO: 149247 - DNA, 33 bp, Homo sapien
ccccctgcattctccaggtctactccaattttc

SEQ ID NO: 149248 - DNA, 33 bp, Homo sapien
ccccctgcattctccatgtctactccaattttc

SEQ ID NO: 149249 - DNA, 33 bp, Homo sapien
ttgttttcaaagcaaacgggttcatggcactga

SEQ ID NO: 149250 - DNA, 33 bp, Homo sapien
ttgttttcaaagcaaatgggttcatggcactga

SEQ ID NO: 149251 - DNA, 33 bp, Homo sapien
tatgagcctttaaagaaaattatgtgttatatg

SEQ ID NO: 149252 - DNA, 33 bp, Homo sapien
tatgagcctttaaagataattatgtgttatatg

SEQ ID NO: 149253 - DNA, 33 bp, Homo sapien
actggaggcgtggacacctacatcaggtaatgg

SEQ ID NO: 149254 - DNA, 33 bp, Homo sapien
actggaggcgtggacatctacatcaggtaatgg

SEQ ID NO: 149255 - DNA, 33 bp, Homo sapien
tggtacctcagaagcaaccccctcattacctgg

SEQ ID NO: 149256 - DNA, 33 bp, Homo sapien
tggtacctcagaagcatccccctcattacctgg

SEQ ID NO: 149257 - DNA, 33 bp, Homo sapien
ataatatgtatgtgtaaaggaatggtgtgtccc

SEQ ID NO: 149258 - DNA, 33 bp, Homo sapien
ataatatgtatgtgtagaggaatggtgtgtccc

SEQ ID NO: 149259 - DNA, 33 bp, Homo sapien
tggatgacagtacatacgtttagagcatggttt

SEQ ID NO: 149260 - DNA, 33 bp, Homo sapien
tggatgacagtacatatgtttagagcatggttt

SEQ ID NO: 149261 - DNA, 33 bp, Homo sapien
tgttgaaacctactgcgcaagaaaaatggattc

SEQ ID NO: 149262 - DNA, 33 bp, Homo sapien
tgttgaaacctactgctcaagaaaaatggattc

SEQ ID NO: 149263 - DNA, 33 bp, Homo sapien
tagggcagttccattccagtttcataacatttt

SEQ ID NO: 149264 - DNA, 33 bp, Homo sapien
tagggcagttccattctagtttcataacatttt

SEQ ID NO: 149265 - DNA, 33 bp, Homo sapien
tatgtataagcaggagaaccatccaaaaaggag

SEQ ID NO: 149266 - DNA, 33 bp, Homo sapien
tatgtataagcaggaggaccatccaaaaaggag

SEQ ID NO: 149267 - DNA, 33 bp, Homo sapien
acattattaagctctacgtaattttcatgcttt

SEQ ID NO: 149268 - DNA, 33 bp, Homo sapien
acattattaagctctatgtaattttcatgcttt

SEQ ID NO: 149269 - DNA, 33 bp, Homo sapien
ggtatcaaagaactcacattgagatttcaattt

SEQ ID NO: 149270 - DNA, 33 bp, Homo sapien
ggtatcaaagaactcagattgagatttcaattt

SEQ ID NO: 149271 - DNA, 33 bp, Homo sapien
agataaagaaaatggaacaaaataacaatacag

SEQ ID NO: 149272 - DNA, 33 bp, Homo sapien
agataaagaaaatggagcaaaataacaatacag

SEQ ID NO: 149273 - DNA, 33 bp, Homo sapien
gtcgactgagggactaccctagcggaaaggaga

SEQ ID NO: 149274 - DNA, 33 bp, Homo sapien
gtcgactgagggactatcctagcggaaaggaga

SEQ ID NO: 149275 - DNA, 33 bp, Homo sapien
cttttattcaaagtgcagacagaatattgaatc

SEQ ID NO: 149276 - DNA, 33 bp, Homo sapien
cttttattcaaagtgcggacagaatattgaatc

SEQ ID NO: 149277 - DNA, 33 bp, Homo sapien
tgctacctctaccaaccatacgcttcctttaga

SEQ ID NO: 149278 - DNA, 33 bp, Homo sapien
tgctacctctaccaacgatacgcttcctttaga

SEQ ID NO: 149279 - DNA, 33 bp, Homo sapien
attgtgatgaataaacccggactctcagcaacg

SEQ ID NO: 149280 - DNA, 33 bp, Homo sapien
attgtgatgaataaactcggactctcagcaacg

SEQ ID NO: 149281 - DNA, 33 bp, Homo sapien
gcgtctcccctgggtaagatgactgaagatccc

SEQ ID NO: 149282 - DNA, 33 bp, Homo sapien
gcgtctcccctgggtaggatgactgaagatccc

SEQ ID NO: 149283 - DNA, 33 bp, Homo sapien
ctttagtgtcatttccaagaaatcattaccaaa

SEQ ID NO: 149284 - DNA, 33 bp, Homo sapien
ctttagtgtcatttccgagaaatcattaccaaa

SEQ ID NO: 149285 - DNA, 33 bp, Homo sapien
gagatattgttaaaaacggaaagttaagctact

SEQ ID NO: 149286 - DNA, 33 bp, Homo sapien
gagatattgttaaaaatggaaagttaagctact

SEQ ID NO: 149287 - DNA, 33 bp, Homo sapien
gtgtcctacaaaacgacgagtgaaaaaagtgaa

SEQ ID NO: 149288 - DNA, 33 bp, Homo sapien
gtgtcctacaaaacgatgagtgaaaaaagtgaa

SEQ ID NO: 149289 - DNA, 33 bp, Homo sapien
ataccctataattcacagaagaatgtccaaggg

SEQ ID NO: 149290 - DNA, 33 bp, Homo sapien
ataccctataattcactgaagaatgtccaaggg

SEQ ID NO: 149291 - DNA, 33 bp, Homo sapien
cattttaaatggagaccctaaactgatgacttg

SEQ ID NO: 149292 - DNA, 33 bp, Homo sapien
cattttaaatggagactctaaactgatgacttg

SEQ ID NO: 149293 - DNA, 33 bp, Homo sapien
catctgcctccctctcaataaatctaagatatg

SEQ ID NO: 149294 - DNA, 33 bp, Homo sapien
catctgcctccctctcgataaatctaagatatg

SEQ ID NO: 149295 - DNA, 33 bp, Homo sapien
gaagaaaatatggaagacaaaatttagagagat

SEQ ID NO: 149296 - DNA, 33 bp, Homo sapien
gaagaaaatatggaagtcaaaatttagagagat

SEQ ID NO: 149297 - DNA, 33 bp, Homo sapien
tgaaaggagaaattaaacatcagagtagcaaaa

SEQ ID NO: 149298 - DNA, 33 bp, Homo sapien
tgaaaggagaaattaagcatcagagtagcaaaa

SEQ ID NO: 149299 - DNA, 33 bp, Homo sapien
atcaaagtcaacattaggtttggtcttggcagt

SEQ ID NO: 149300 - DNA, 33 bp, Homo sapien
atcaaagtcaacattatgtttggtcttggcagt

SEQ ID NO: 149301 - DNA, 33 bp, Homo sapien
agaaacaccagtggaacgaccatgtacaagctc

SEQ ID NO: 149302 - DNA, 33 bp, Homo sapien
agaaacaccagtggaatgaccatgtacaagctc

SEQ ID NO: 149303 - DNA, 33 bp, Homo sapien
atgttttaattttataactgcttaatctcccag

SEQ ID NO: 149304 - DNA, 33 bp, Homo sapien
atgttttaattttatatctgcttaatctcccag

SEQ ID NO: 149305 - DNA, 33 bp, Homo sapien
gaagcatgggcctgagaaatagagtctttcaaa

SEQ ID NO: 149306 - DNA, 33 bp, Homo sapien
gaagcatgggcctgaggaatagagtctttcaaa

SEQ ID NO: 149307 - DNA, 33 bp, Homo sapien
agataagtcatatcaacattcagctgcaaaatg

SEQ ID NO: 149308 - DNA, 33 bp, Homo sapien
agataagtcatatcaagattcagctgcaaaatg

SEQ ID NO: 149309 - DNA, 33 bp, Homo sapien
agtgccttttaagtaaaccatgccaatgtgtca

SEQ ID NO: 149310 - DNA, 33 bp, Homo sapien
agtgccttttaagtaagccatgccaatgtgtca

SEQ ID NO: 149311 - DNA, 33 bp, Homo sapien
tttctctagtctgtgaagggggaaagggactgc

SEQ ID NO: 149312 - DNA, 33 bp, Homo sapien
tttctctagtctgtgacgggggaaagggactgc

SEQ ID NO: 149313 - DNA, 33 bp, Homo sapien
tgcattgtaaacttgcactttttatatggatta

SEQ ID NO: 149314 - DNA, 33 bp, Homo sapien
tgcattgtaaacttgccctttttatatggatta

SEQ ID NO: 149315 - DNA, 33 bp, Homo sapien
caaagttttgttccctcacttcatttatccctc

SEQ ID NO: 149316 - DNA, 33 bp, Homo sapien
caaagttttgttcccttacttcatttatccctc

SEQ ID NO: 149317 - DNA, 33 bp, Homo sapien
atatctaggactcaaacaagaattttctggcca

SEQ ID NO: 149318 - DNA, 33 bp, Homo sapien
atatctaggactcaaagaagaattttctggcca

SEQ ID NO: 149319 - DNA, 33 bp, Homo sapien
gaaccaaggtaaagcaagctaagaaaatagagt

SEQ ID NO: 149320 - DNA, 33 bp, Homo sapien
gaaccaaggtaaagcacgctaagaaaatagagt

SEQ ID NO: 149321 - DNA, 33 bp, Homo sapien
ttttgtcatagtacaacgtaaacagatgctttc

SEQ ID NO: 149322 - DNA, 33 bp, Homo sapien
ttttgtcatagtacaatgtaaacagatgctttc

SEQ ID NO: 149323 - DNA, 33 bp, Homo sapien
tttcattctctctcatgacttctcttgcagatc

SEQ ID NO: 149324 - DNA, 33 bp, Homo sapien
tttcattctctctcattacttctcttgcagatc

SEQ ID NO: 149325 - DNA, 33 bp, Homo sapien
cgtatcaatccttcaccccttcaaaacatggtg

SEQ ID NO: 149326 - DNA, 33 bp, Homo sapien
cgtatcaatccttcactccttcaaaacatggtg

SEQ ID NO: 149327 - DNA, 33 bp, Homo sapien
gctttaggaaccaacactatctgaacatggaat

SEQ ID NO: 149328 - DNA, 33 bp, Homo sapien
gctttaggaaccaacattatctgaacatggaat

SEQ ID NO: 149329 - DNA, 33 bp, Homo sapien
tcaagaccaatcactaaccagttggaggttgga

SEQ ID NO: 149330 - DNA, 33 bp, Homo sapien
tcaagaccaatcactatccagttggaggttgga

SEQ ID NO: 149331 - DNA, 33 bp, Homo sapien
agtatgatgtcagccacgggtttttcataaatg

SEQ ID NO: 149332 - DNA, 33 bp, Homo sapien
agtatgatgtcagccatgggtttttcataaatg

SEQ ID NO: 149333 - DNA, 33 bp, Homo sapien
aaatcattactaaaaaatgctctcaaaaccaca

SEQ ID NO: 149334 - DNA, 33 bp, Homo sapien
aaatcattactaaaaagtgctctcaaaaccaca

SEQ ID NO: 149335 - DNA, 33 bp, Homo sapien
aatatattccatatgacgatgagaagaatgtat

SEQ ID NO: 149336 - DNA, 33 bp, Homo sapien
aatatattccatatgatgatgagaagaatgtat

SEQ ID NO: 149337 - DNA, 33 bp, Homo sapien
tccatttcatggtacacctttctccatttcttt

SEQ ID NO: 149338 - DNA, 33 bp, Homo sapien
tccatttcatggtacatctttctccatttcttt

SEQ ID NO: 149339 - DNA, 33 bp, Homo sapien
actgatttttctacaccgacccaaccatctggt

SEQ ID NO: 149340 - DNA, 33 bp, Homo sapien
actgatttttctacactgacccaaccatctggt

SEQ ID NO: 149341 - DNA, 33 bp, Homo sapien
taaatacgctcaaaaacacctcgacacagaaat

SEQ ID NO: 149342 - DNA, 33 bp, Homo sapien
taaatacgctcaaaaatacctcgacacagaaat

SEQ ID NO: 149343 - DNA, 33 bp, Homo sapien
aaaaagcagaaccacacagtccaaacacaaaaa

SEQ ID NO: 149344 - DNA, 33 bp, Homo sapien
aaaaagcagaaccacatagtccaaacacaaaaa

SEQ ID NO: 149345 - DNA, 33 bp, Homo sapien
ctgatgtagtttcacaactgttacaattgaggc

SEQ ID NO: 149346 - DNA, 33 bp, Homo sapien
ctgatgtagtttcacagctgttacaattgaggc

SEQ ID NO: 149347 - DNA, 33 bp, Homo sapien; identical to SEQ ID NO: 149345

SEQ ID NO: 149348 - DNA, 33 bp, Homo sapien; identical to SEQ ID NO: 149346

SEQ ID NO: 149349 - DNA, 33 bp, Homo sapien
ctgagctaaggagttacatctagcatggtgttt

SEQ ID NO: 149350 - DNA, 33 bp, Homo sapien
ctgagctaaggagttatatctagcatggtgttt

SEQ ID NO: 149351 - DNA, 33 bp, Homo sapien; identical to SEQ ID NO: 149349

SEQ ID NO: 149352 - DNA, 33 bp, Homo sapien; identical to SEQ ID NO: 149350

SEQ ID NO: 149353 - DNA, 33 bp, Homo sapien
attacagaggtaagaacgcttgtgcaggagaag

SEQ ID NO: 149354 - DNA, 33 bp, Homo sapien
attacagaggtaagaatgcttgtgcaggagaag

SEQ ID NO: 149355 - DNA, 33 bp, Homo sapien; identical to SEQ ID NO: 149353

SEQ ID NO: 149356 - DNA, 33 bp, Homo sapien; identical to SEQ ID NO: 149354

SEQ ID NO: 149357 - DNA, 33 bp, Homo sapien
cttacacagtattaggaatttattagctcaacc

SEQ ID NO: 149358 - DNA, 33 bp, Homo sapien
cttacacagtattagggatttattagctcaacc

SEQ ID NO: 149359 - DNA, 33 bp, Homo sapien
aactgctttggaagtacagtggtatgtgtattt

SEQ ID NO: 149360 - DNA, 33 bp, Homo sapien
aactgctttggaagtatagtggtatgtgtattt

SEQ ID NO: 149361 - DNA, 33 bp, Homo sapien
cttggctataatgcagacccaaagaactgcttt

SEQ ID NO: 149362 - DNA, 33 bp, Homo sapien
cttggctataatgcaggcccaaagaactgcttt

SEQ ID NO: 149363 - DNA, 33 bp, Homo sapien
tacaccctgtagcagcaaagtttctaatcaagt

SEQ ID NO: 149364 - DNA, 33 bp, Homo sapien
tacaccctgtagcagccaagtttctaatcaagt

SEQ ID NO: 149365 - DNA, 33 bp, Homo sapien
ccattcacatttctcaccctgagattgcctttc

SEQ ID NO: 149366 - DNA, 33 bp, Homo sapien
ccattcacatttctcatcctgagattgcctttc

SEQ ID NO: 149367 - DNA, 33 bp, Homo sapien
tccaatcacagaaatgccaatgtatcccactga

SEQ ID NO: 149368 - DNA, 33 bp, Homo sapien
tccaatcacagaaatgtcaatgtatcccactga

SEQ ID NO: 149369 - DNA, 33 bp, Homo sapien
tgtgctgagtgccttaagccgggcatcccaggc

SEQ ID NO: 149370 - DNA, 33 bp, Homo sapien
tgtgctgagtgccttaggccgggcatcccaggc

SEQ ID NO: 149371 - DNA, 33 bp, Homo sapien
attgaccttattgcaactggtttctcctatgta

SEQ ID NO: 149372 - DNA, 33 bp, Homo sapien
attgaccttattgcaattggtttctcctatgta

SEQ ID NO: 149373 - DNA, 33 bp, Homo sapien
ctgatcccatagataaaagggttgaatacaggt

SEQ ID NO: 149374 - DNA, 33 bp, Homo sapien
ctgatcccatagataacagggttgaatacaggt

SEQ ID NO: 149375 - DNA, 33 bp, Homo sapien
gttctttaacacctccaaaggatcaaaccagct

SEQ ID NO: 149376 - DNA, 33 bp, Homo sapien
gttctttaacacctccgaaggatcaaaccagct

SEQ ID NO: 149377 - DNA, 33 bp, Homo sapien; identical to SEQ ID NO: 149375

SEQ ID NO: 149378 - DNA, 33 bp, Homo sapien; identical to SEQ ID NO: 149376

SEQ ID NO: 149379 - DNA, 33 bp, Homo sapien
aggattataacttcaaatcagaaaattcatttg

SEQ ID NO: 149380 - DNA, 33 bp, Homo sapien
aggattataacttcaagtcagaaaattcatttg

SEQ ID NO: 149381 - DNA, 33 bp, Homo sapien
tattttgtgaaaaagcagacacctgggaggttc

SEQ ID NO: 149382 - DNA, 33 bp, Homo sapien
tattttgtgaaaaagctgacacctgggaggttc

SEQ ID NO: 149383 - DNA, 33 bp, Homo sapien
tccctttattccttaccgaagcaaatacatcag

SEQ ID NO: 149384 - DNA, 33 bp, Homo sapien
tccctttattccttactgaagcaaatacatcag

SEQ ID NO: 149385 - DNA, 33 bp, Homo sapien
tccagcctccagcaaactggtaaaggtgattga

SEQ ID NO: 149386 - DNA, 33 bp, Homo sapien
tccagcctccagcaaattggtaaaggtgattga

SEQ ID NO: 149387 - DNA, 33 bp, Homo sapien
ggcagaaaggtagacccaaatctagaatagtgg

SEQ ID NO: 149388 - DNA, 33 bp, Homo sapien
ggcagaaaggtagacctaaatctagaatagtgg

SEQ ID NO: 149389 - DNA, 33 bp, Homo sapien
ctgtgctttatccaaacaatcagaccaagtata

SEQ ID NO: 149390 - DNA, 33 bp, Homo sapien
ctgtgctttatccaaataatcagaccaagtata

SEQ ID NO: 149391 - DNA, 33 bp, Homo sapien
cgtacacaaacctcaacgtcaccacccttccac

SEQ ID NO: 149392 - DNA, 33 bp, Homo sapien
cgtacacaaacctcaatgtcaccacccttccac

SEQ ID NO: 149393 - DNA, 33 bp, Homo sapien
gagagtgggccacacaatgcctatttaattcac

SEQ ID NO: 149394 - DNA, 33 bp, Homo sapien
gagagtgggccacacattgcctatttaattcac

SEQ ID NO: 149395 - DNA, 33 bp, Homo sapien
cccattttgttgggaaaacttatcttctgccaa

SEQ ID NO: 149396 - DNA, 33 bp, Homo sapien
cccattttgttgggaacacttatcttctgccaa

SEQ ID NO: 149397 - DNA, 33 bp, Homo sapien
caaatggctacatagcaatccagagccatggcc

SEQ ID NO: 149398 - DNA, 33 bp, Homo sapien
caaatggctacatagcgatccagagccatggcc

SEQ ID NO: 149399 - DNA, 33 bp, Homo sapien
catgctagctgccatcaacctggttctggcctc

SEQ ID NO: 149400 - DNA, 33 bp, Homo sapien
catgctagctgccatcgacctggttctggcctc

SEQ ID NO: 149401 - DNA, 33 bp, Homo sapien
ttgaaggaccaattcaaataaaggaatttggag

SEQ ID NO: 149402 - DNA, 33 bp, Homo sapien
ttgaaggaccaattcagataaaggaatttggag

SEQ ID NO: 149403 - DNA, 33 bp, Homo sapien
aaactggatatgtgtaggtaggtatgtttgtct

SEQ ID NO: 149404 - DNA, 33 bp, Homo sapien
aaactggatatgtgtatgtaggtatgtttgtct

SEQ ID NO: 149405 - DNA, 33 bp, Homo sapien
taaacaaataagcggaaaagcagagacacatgt

SEQ ID NO: 149406 - DNA, 33 bp, Homo sapien
taaacaaataagcggagaagcagagacacatgt

SEQ ID NO: 149407 - DNA, 33 bp, Homo sapien
ggcctcccaccatctacgcttgacttcttctca

SEQ ID NO: 149408 - DNA, 33 bp, Homo sapien
ggcctcccaccatctatgcttgacttcttctca

SEQ ID NO: 149409 - DNA, 33 bp, Homo sapien
tttctagagatggctgcatttgctttttaacag

SEQ ID NO: 149410 - DNA, 33 bp, Homo sapien
tttctagagatggctgtatttgctttttaacag

SEQ ID NO: 149411 - DNA, 33 bp, Homo sapien
ggacagcccccaactccatgcgaaccattcaaa

SEQ ID NO: 149412 - DNA, 33 bp, Homo sapien
ggacagcccccaactctatgcgaaccattcaaa

SEQ ID NO: 149413 - DNA, 33 bp, Homo sapien
ggcagcaccaggcccacgagtaggaagccctgc

SEQ ID NO: 149414 - DNA, 33 bp, Homo sapien
ggcagcaccaggcccatgagtaggaagccctgc

SEQ ID NO: 149415 - DNA, 33 bp, Homo sapien
gggttgaccatggagacagatgcccccaaatct

SEQ ID NO: 149416 - DNA, 33 bp, Homo sapien
gggttgaccatggagatagatgcccccaaatct

SEQ ID NO: 149417 - DNA, 33 bp, Homo sapien
attctttttgcactaaatcttcaaaatcagatg

SEQ ID NO: 149418 - DNA, 33 bp, Homo sapien
attctttttgcactaagtcttcaaaatcagatg

SEQ ID NO: 149419 - DNA, 33 bp, Homo sapien
gtgcactttacacttacagcgtgttgcaatttg

SEQ ID NO: 149420 - DNA, 33 bp, Homo sapien
gtgcactttacacttatagcgtgttgcaatttg

SEQ ID NO: 149421 - DNA, 33 bp, Homo sapien
aggtctgatggtgcatgaaacagtcacaaatag

SEQ ID NO: 149422 - DNA, 33 bp, Homo sapien
aggtctgatggtgcattaaacagtcacaaatag

SEQ ID NO: 149423 - DNA, 33 bp, Homo sapien
tccaactcactcactgaacaggtataagatttg

SEQ ID NO: 149424 - DNA, 33 bp, Homo sapien
tccaactcactcactggacaggtataagatttg

SEQ ID NO: 149425 - DNA, 33 bp, Homo sapien
tcaggtgtcacttggcacttcacctgagaaaaa

SEQ ID NO: 149426 - DNA, 33 bp, Homo sapien
tcaggtgtcacttggcgcttcacctgagaaaaa

SEQ ID NO: 149427 - DNA, 33 bp, Homo sapien
tggagaaaatatgtaacacagcatttatggact

SEQ ID NO: 149428 - DNA, 33 bp, Homo sapien
tggagaaaatatgtaagacagcatttatggact

SEQ ID NO: 149429 - DNA, 33 bp, Homo sapien
gtgaggattcttaacaatgctttgagcagggat

SEQ ID NO: 149430 - DNA, 33 bp, Homo sapien
gtgaggattcttaacactgctttgagcagggat

SEQ ID NO: 149431 - DNA, 33 bp, Homo sapien
agataacaataaggataagatcagagcccaaca

SEQ ID NO: 149432 - DNA, 33 bp, Homo sapien
agataacaataaggatgagatcagagcccaaca

SEQ ID NO: 149433 - DNA, 33 bp, Homo sapien
gccatccattgagatacccgtctatcatcactg

SEQ ID NO: 149434 - DNA, 33 bp, Homo sapien
gccatccattgagatatccgtctatcatcactg

SEQ ID NO: 149435 - DNA, 33 bp, Homo sapien; identical to SEQ ID NO: 149433

SEQ ID NO: 149436 - DNA, 33 bp, Homo sapien; identical to SEQ ID NO: 149434

SEQ ID NO: 149437 - DNA, 33 bp, Homo sapien
agtcaaagaggcagaacgtagccagggagtcat

SEQ ID NO: 149438 - DNA, 33 bp, Homo sapien
agtcaaagaggcagaatgtagccagggagtcat

SEQ ID NO: 149439 - DNA, 33 bp, Homo sapien
gatgctgatgagtggaaggggaatccaggagcc

SEQ ID NO: 149440 - DNA, 33 bp, Homo sapien
gatgctgatgagtggagggggaatccaggagcc

SEQ ID NO: 149441 - DNA, 33 bp, Homo sapien
aaatgtatattgctaaaagcatgcagtttaaac

SEQ ID NO: 149442 - DNA, 33 bp, Homo sapien
aaatgtatattgctaagagcatgcagtttaaac

SEQ ID NO: 149443 - DNA, 33 bp, Homo sapien
attgtactttcaggataaattgaatgctctgga

SEQ ID NO: 149444 - DNA, 33 bp, Homo sapien
attgtactttcaggatgaattgaatgctctgga

SEQ ID NO: 149445 - DNA, 33 bp, Homo sapien
attgcaggtgaaaagaagagctacagccctttc

SEQ ID NO: 149446 - DNA, 33 bp, Homo sapien
attgcaggtgaaaagaggagctacagccctttc

SEQ ID NO: 149447 - DNA, 33 bp, Homo sapien
acccgggcctttctgcactcttgggggctcagg

SEQ ID NO: 149448 - DNA, 33 bp, Homo sapien
acccgggcctttctgcgctcttgggggctcagg

SEQ ID NO: 149449 - DNA, 33 bp, Homo sapien
actcattccaacattaacttgaaagtccaaagt

SEQ ID NO: 149450 - DNA, 33 bp, Homo sapien
actcattccaacattagcttgaaagtccaaagt

SEQ ID NO: 149451 - DNA, 33 bp, Homo sapien
acacaatagggttcaacgcaggaggaataaggt

SEQ ID NO: 149452 - DNA, 33 bp, Homo sapien
acacaatagggttcaatgcaggaggaataaggt

SEQ ID NO: 149453 - DNA, 33 bp, Homo sapien
tcaacaccacaaccagaaggtgctgaagaagag

SEQ ID NO: 149454 - DNA, 33 bp, Homo sapien
tcaacaccacaaccagcaggtgctgaagaagag

SEQ ID NO: 149455 - DNA, 33 bp, Homo sapien
ggagcagaagtgactaccagtgaccacaggaat

SEQ ID NO: 149456 - DNA, 33 bp, Homo sapien
ggagcagaagtgactagcagtgaccacaggaat

SEQ ID NO: 149457 - DNA, 33 bp, Homo sapien
ttgatcaattgagataccccagcccttctaata

SEQ ID NO: 149458 - DNA, 33 bp, Homo sapien
ttgatcaattgagatatcccagcccttctaata

SEQ ID NO: 149459 - DNA, 33 bp, Homo sapien
ggcttagaatcatcaacagccgctcctagatct

SEQ ID NO: 149460 - DNA, 33 bp, Homo sapien
ggcttagaatcatcaatagccgctcctagatct

SEQ ID NO: 149461 - DNA, 33 bp, Homo sapien
acaagccctgggcatcgacttaaatctgtttgt

SEQ ID NO: 149462 - DNA, 33 bp, Homo sapien
acaagccctgggcatctacttaaatctgtttgt

SEQ ID NO: 149463 - DNA, 33 bp, Homo sapien
ctatccctatacaacaccaacttgaaggagcag

SEQ ID NO: 149464 - DNA, 33 bp, Homo sapien
ctatccctatacaacatcaacttgaaggagcag

SEQ ID NO: 149465 - DNA, 33 bp, Homo sapien
ttcttgctgttattaaagctgcaccttttatgc

SEQ ID NO: 149466 - DNA, 33 bp, Homo sapien
ttcttgctgttattaaggctgcaccttttatgc

SEQ ID NO: 149467 - DNA, 33 bp, Homo sapien
catgcatttgggaaaaagaaaaaccatgtgggt

SEQ ID NO: 149468 - DNA, 33 bp, Homo sapien
catgcatttgggaaaacgaaaaaccatgtgggt

SEQ ID NO: 149469 - DNA, 33 bp, Homo sapien
ttaactatgggtcacacggagtataaaaattat

SEQ ID NO: 149470 - DNA, 33 bp, Homo sapien
ttaactatgggtcacatggagtataaaaattat

SEQ ID NO: 149471 - DNA, 33 bp, Homo sapien
cttttctgttttaaccagagtgtaatatagaag

SEQ ID NO: 149472 - DNA, 33 bp, Homo sapien
cttttctgttttaaccggagtgtaatatagaag

SEQ ID NO: 149473 - DNA, 33 bp, Homo sapien
agcttaacttcttgtcaccctgtaggtcaatca

SEQ ID NO: 149474 - DNA, 33 bp, Homo sapien
agcttaacttcttgtcgccctgtaggtcaatca

SEQ ID NO: 149475 - DNA, 33 bp, Homo sapien
aaggcaccctggagtacgctgttcaaaatattc

SEQ ID NO: 149476 - DNA, 33 bp, Homo sapien
aaggcaccctggagtatgctgttcaaaatattc

SEQ ID NO: 149477 - DNA, 33 bp, Homo sapien
gtgggagttttctaggaaatgttctgtgctggt

SEQ ID NO: 149478 - DNA, 33 bp, Homo sapien
gtgggagttttctagggaatgttctgtgctggt

SEQ ID NO: 149479 - DNA, 33 bp, Homo sapien
taataatcctttatccaaaagacagaggtcaac

SEQ ID NO: 149480 - DNA, 33 bp, Homo sapien
taataatcctttatccgaaagacagaggtcaac

SEQ ID NO: 149481 - DNA, 33 bp, Homo sapien
agcaggtgtcatttcacgtagaagcaagattgt

SEQ ID NO: 149482 - DNA, 33 bp, Homo sapien
agcaggtgtcatttcatgtagaagcaagattgt

SEQ ID NO: 149483 - DNA, 33 bp, Homo sapien
gtttgactttaggagaaggttatgagtttcagt

SEQ ID NO: 149484 - DNA, 33 bp, Homo sapien
gtttgactttaggagacggttatgagtttcagt

SEQ ID NO: 149485 - DNA, 33 bp, Homo sapien
tagatgatttttctccaaggtgtttccatctct

SEQ ID NO: 149486 - DNA, 33 bp, Homo sapien
tagatgatttttctccgaggtgtttccatctct

SEQ ID NO: 149487 - DNA, 33 bp, Homo sapien
tttggaaagcaacttgcagacttacttaataaa

SEQ ID NO: 149488 - DNA, 33 bp, Homo sapien
tttggaaagcaacttgtagacttacttaataaa

SEQ ID NO: 149489 - DNA, 33 bp, Homo sapien
caactttttgcaaggaaaatgcttccacaacca

SEQ ID NO: 149490 - DNA, 33 bp, Homo sapien
caactttttgcaaggagaatgcttccacaacca

SEQ ID NO: 149491 - DNA, 33 bp, Homo sapien
aaagcacggatgtttaagctattggaataaaca

SEQ ID NO: 149492 - DNA, 33 bp, Homo sapien
aaagcacggatgtttatgctattggaataaaca

SEQ ID NO: 149493 - DNA, 33 bp, Homo sapien
ctgccacattccaggacagcgctgggaaatgtc

SEQ ID NO: 149494 - DNA, 33 bp, Homo sapien
ctgccacattccaggatagcgctgggaaatgtc

SEQ ID NO: 149495 - DNA, 33 bp, Homo sapien
acctaagataaaggacccctgggctgagatcca

SEQ ID NO: 149496 - DNA, 33 bp, Homo sapien
acctaagataaaggactcctgggctgagatcca

SEQ ID NO: 149497 - DNA, 33 bp, Homo sapien
ctggtaccgtgaacccacataggaaacatggga

SEQ ID NO: 149498 - DNA, 33 bp, Homo sapien
ctggtaccgtgaacccccataggaaacatggga

SEQ ID NO: 149499 - DNA, 33 bp, Homo sapien
agtaaaggaaaaaataagacattcccagtggca

SEQ ID NO: 149500 - DNA, 33 bp, Homo sapien
agtaaaggaaaaaataggacattcccagtggca

SEQ ID NO: 149501 - DNA, 33 bp, Homo sapien
ataattggtcacaaagccaagctgatatctacc

SEQ ID NO: 149502 - DNA, 33 bp, Homo sapien
ataattggtcacaaagtcaagctgatatctacc

SEQ ID NO: 149503 - DNA, 33 bp, Homo sapien
tgattgacagttaagacgactatgagttctcta

SEQ ID NO: 149504 - DNA, 33 bp, Homo sapien
tgattgacagttaagaggactatgagttctcta

SEQ ID NO: 149505 - DNA, 33 bp, Homo sapien
ggtcttaagtaattcaacacttttattcacatt

SEQ ID NO: 149506 - DNA, 33 bp, Homo sapien
ggtcttaagtaattcatcacttttattcacatt

SEQ ID NO: 149507 - DNA, 33 bp, Homo sapien
atgcaattatgtaaaaatgtagtcaataataaa

SEQ ID NO: 149508 - DNA, 33 bp, Homo sapien
atgcaattatgtaaaagtgtagtcaataataaa

SEQ ID NO: 149509 - DNA, 33 bp, Homo sapien
ttttgcatacttatagaagcaccaccttgtcag

SEQ ID NO: 149510 - DNA, 33 bp, Homo sapien
ttttgcatacttataggagcaccaccttgtcag

SEQ ID NO: 149511 - DNA, 33 bp, Homo sapien
gattcacagtctcaacccttattcttttatgct

SEQ ID NO: 149512 - DNA, 33 bp, Homo sapien
gattcacagtctcaactcttattcttttatgct

SEQ ID NO: 149513 - DNA, 33 bp, Homo sapien
aaatagagccagagcaatgctactaatgacttc

SEQ ID NO: 149514 - DNA, 33 bp, Homo sapien
aaatagagccagagcagtgctactaatgacttc

SEQ ID NO: 149515 - DNA, 33 bp, Homo sapien
agaaaataaatgtccaataaatttcctcctaag

SEQ ID NO: 149516 - DNA, 33 bp, Homo sapien
agaaaataaatgtccagtaaatttcctcctaag

SEQ ID NO: 149517 - DNA, 33 bp, Homo sapien
cttttttgagcactcaatacaaacttatttaat

SEQ ID NO: 149518 - DNA, 33 bp, Homo sapien
cttttttgagcactcattacaaacttatttaat

SEQ ID NO: 149519 - DNA, 33 bp, Homo sapien
acaaatgtaatgatgacagaggctgtttaccca

SEQ ID NO: 149520 - DNA, 33 bp, Homo sapien
acaaatgtaatgatgagagaggctgtttaccca

SEQ ID NO: 149521 - DNA, 33 bp, Homo sapien
agtagcagccatctgaagaagaagcatctctga

SEQ ID NO: 149522 - DNA, 33 bp, Homo sapien
agtagcagccatctgaggaagaagcatctctga

SEQ ID NO: 149523 - DNA, 33 bp, Homo sapien
gggacccacttttgtaccgtgaagaaggaaagg

SEQ ID NO: 149524 - DNA, 33 bp, Homo sapien
gggacccacttttgtatcgtgaagaaggaaagg

SEQ ID NO: 149525 - DNA, 33 bp, Homo sapien
tgaacaactggaagatcagtgtttgccttagtc

SEQ ID NO: 149526 - DNA, 33 bp, Homo sapien
tgaacaactggaagatgagtgtttgccttagtc

SEQ ID NO: 149527 - DNA, 33 bp, Homo sapien
tgtagtaaatgatttacatgcatctatggcaga

SEQ ID NO: 149528 - DNA, 33 bp, Homo sapien
tgtagtaaatgatttatatgcatctatggcaga

SEQ ID NO: 149529 - DNA, 33 bp, Homo sapien
tactcccaaagattcaagaaatctgaggtagag

SEQ ID NO: 149530 - DNA, 33 bp, Homo sapien
tactcccaaagattcacgaaatctgaggtagag

SEQ ID NO: 149531 - DNA, 33 bp, Homo sapien
tttagaaacgtctgtgaatctttgaagatgaca

SEQ ID NO: 149532 - DNA, 33 bp, Homo sapien
tttagaaacgtctgtggatctttgaagatgaca

SEQ ID NO: 149533 - DNA, 33 bp, Homo sapien
atggaaggaatctaaactgataaggttactaaa

SEQ ID NO: 149534 - DNA, 33 bp, Homo sapien
atggaaggaatctaaattgataaggttactaaa

SEQ ID NO: 149535 - DNA, 33 bp, Homo sapien
cacctgagttctcccaaccttctatattctcct

SEQ ID NO: 149536 - DNA, 33 bp, Homo sapien
cacctgagttctcccagccttctatattctcct

SEQ ID NO: 149537 - DNA, 33 bp, Homo sapien
ccttacctcctttcatgatctgctgttctcctt

SEQ ID NO: 149538 - DNA, 33 bp, Homo sapien
ccttacctcctttcattatctgctgttctcctt

SEQ ID NO: 149539 - DNA, 33 bp, Homo sapien
atagtgtatagttctacagaaagatcaagtaga

SEQ ID NO: 149540 - DNA, 33 bp, Homo sapien
atagtgtatagttctatagaaagatcaagtaga

SEQ ID NO: 149541 - DNA, 33 bp, Homo sapien
tgaacattgcagagagcctaattaggtgatagg

SEQ ID NO: 149542 - DNA, 33 bp, Homo sapien
tgaacattgcagagagtctaattaggtgatagg

SEQ ID NO: 149543 - DNA, 33 bp, Homo sapien
aatataccacaggatacaggagttggctctgaa

SEQ ID NO: 149544 - DNA, 33 bp, Homo sapien
aatataccacaggatataggagttggctctgaa

SEQ ID NO: 149545 - DNA, 33 bp, Homo sapien
tccttccttttctgcccactcaacttcaagacc

SEQ ID NO: 149546 - DNA, 33 bp, Homo sapien
tccttccttttctgcctactcaacttcaagacc

SEQ ID NO: 149547 - DNA, 33 bp, Homo sapien
tacttcacagagctcaaagtttaatgggcgaga

SEQ ID NO: 149548 - DNA, 33 bp, Homo sapien
tacttcacagagctcagagtttaatgggcgaga

SEQ ID NO: 149549 - DNA, 33 bp, Homo sapien
aggacaagatgtataaaaagctcaaagtttgaa

SEQ ID NO: 149550 - DNA, 33 bp, Homo sapien
aggacaagatgtataagaagctcaaagtttgaa

SEQ ID NO: 149551 - DNA, 33 bp, Homo sapien
gcagggggatactttacaaggttactatattac

SEQ ID NO: 149552 - DNA, 33 bp, Homo sapien
gcagggggatactttagaaggttactatattac

SEQ ID NO: 149553 - DNA, 33 bp, Homo sapien
gtttgatctgttcacccatgcacacagacatca

SEQ ID NO: 149554 - DNA, 33 bp, Homo sapien
gtttgatctgttcaccgatgcacacagacatca

SEQ ID NO: 149555 - DNA, 33 bp, Homo sapien
taaaaaacaaaagttacgcatctgaaatcataa

SEQ ID NO: 149556 - DNA, 33 bp, Homo sapien
taaaaaacaaaagttatgcatctgaaatcataa

SEQ ID NO: 149557 - DNA, 33 bp, Homo sapien
agtaacattctttgctcaagaccacacacctga

SEQ ID NO: 149558 - DNA, 33 bp, Homo sapien
agtaacattctttgcttaagaccacacacctga

SEQ ID NO: 149559 - DNA, 33 bp, Homo sapien
tataatgtagtaaatacatcaaccagtcacaca

SEQ ID NO: 149560 - DNA, 33 bp, Homo sapien
tataatgtagtaaatatatcaaccagtcacaca

SEQ ID NO: 149561 - DNA, 33 bp, Homo sapien
ttcctccagcttcccgcagaattaccacgccaa

SEQ ID NO: 149562 - DNA, 33 bp, Homo sapien
ttcctccagcttcccggagaattaccacgccaa

SEQ ID NO: 149563 - DNA, 33 bp, Homo sapien
tcacgtacttgatctaggactctgagcaagttg

SEQ ID NO: 149564 - DNA, 33 bp, Homo sapien
tcacgtacttgatctatgactctgagcaagttg

SEQ ID NO: 149565 - DNA, 33 bp, Homo sapien
gtcttttataacataactaccctgggagtgata

SEQ ID NO: 149566 - DNA, 33 bp, Homo sapien
gtcttttataacataattaccctgggagtgata

SEQ ID NO: 149567 - DNA, 33 bp, Homo sapien
tggaaaagatcccttcacgaccaacaagcggcc

SEQ ID NO: 149568 - DNA, 33 bp, Homo sapien
tggaaaagatcccttctcgaccaacaagcggcc

SEQ ID NO: 149569 - DNA, 33 bp, Homo sapien
attcctgatgtaggaacggtaaaaggaaagtaa

SEQ ID NO: 149570 - DNA, 33 bp, Homo sapien
attcctgatgtaggaatggtaaaaggaaagtaa

SEQ ID NO: 149571 - DNA, 33 bp, Homo sapien
gaaaattattgataaaaattagctgccattgtt

SEQ ID NO: 149572 - DNA, 33 bp, Homo sapien
gaaaattattgataaagattagctgccattgtt

SEQ ID NO: 149573 - DNA, 33 bp, Homo sapien
ctctgtaaaacatctcagactggatagaacaga

SEQ ID NO: 149574 - DNA, 33 bp, Homo sapien
ctctgtaaaacatctcggactggatagaacaga

SEQ ID NO: 149575 - DNA, 33 bp, Homo sapien
tctcataaataagtcacgccagttggtcttctg

SEQ ID NO: 149576 - DNA, 33 bp, Homo sapien
tctcataaataagtcatgccagttggtcttctg

SEQ ID NO: 149577 - DNA, 33 bp, Homo sapien
tgctaccatactatgtaaaacatcatgaaatgg

SEQ ID NO: 149578 - DNA, 33 bp, Homo sapien
tgctaccatactatgtgaaacatcatgaaatgg

SEQ ID NO: 149579 - DNA, 33 bp, Homo sapien
gagactacaaatttgcccaggaacactaggggg

SEQ ID NO: 149580 - DNA, 33 bp, Homo sapien
gagactacaaatttgctcaggaacactaggggg

SEQ ID NO: 149581 - DNA, 33 bp, Homo sapien
cttctctgccccctccactttgtcctgcctaca

SEQ ID NO: 149582 - DNA, 33 bp, Homo sapien
cttctctgccccctccgctttgtcctgcctaca

SEQ ID NO: 149583 - DNA, 33 bp, Homo sapien
cttttgagccagttccaccttgagacagtgctt

SEQ ID NO: 149584 - DNA, 33 bp, Homo sapien
cttttgagccagttccgccttgagacagtgctt

SEQ ID NO: 149585 - DNA, 33 bp, Homo sapien
acaatatgactcataacaggggatcatctcaaa

SEQ ID NO: 149586 - DNA, 33 bp, Homo sapien
acaatatgactcataataggggatcatctcaaa

SEQ ID NO: 149587 - DNA, 33 bp, Homo sapien
gcagctatttaagcagacggaaggtacattagt

SEQ ID NO: 149588 - DNA, 33 bp, Homo sapien
gcagctatttaagcaggcggaaggtacattagt

SEQ ID NO: 149589 - DNA, 33 bp, Homo sapien
agttatgatcatggcactatactccagcctggg

SEQ ID NO: 149590 - DNA, 33 bp, Homo sapien
agttatgatcatggcattatactccagcctggg

SEQ ID NO: 149591 - DNA, 33 bp, Homo sapien
gcacattgccggagtacagtttttgctccataa

SEQ ID NO: 149592 - DNA, 33 bp, Homo sapien
gcacattgccggagtatagtttttgctccataa

SEQ ID NO: 149593 - DNA, 33 bp, Homo sapien
aagtaggtattaaaaacgttgttatatgatagt

SEQ ID NO: 149594 - DNA, 33 bp, Homo sapien
aagtaggtattaaaaatgttgttatatgatagt

SEQ ID NO: 149595 - DNA, 33 bp, Homo sapien
ttcctcatgggaacacacagttgcagtttttgt

SEQ ID NO: 149596 - DNA, 33 bp, Homo sapien
ttcctcatgggaacacgcagttgcagtttttgt

SEQ ID NO: 149597 - DNA, 33 bp, Homo sapien
tcatggttgtggagggcagaagcctgaaatcaa

SEQ ID NO: 149598 - DNA, 33 bp, Homo sapien
tcatggttgtggagggtagaagcctgaaatcaa

SEQ ID NO: 149599 - DNA, 33 bp, Homo sapien
aaaacaccaacaccaacgccagaaaccccataa

SEQ ID NO: 149600 - DNA, 33 bp, Homo sapien
aaaacaccaacaccaatgccagaaaccccataa

SEQ ID NO: 149601 - DNA, 33 bp, Homo sapien
tcctcagattacagaaagaaactcaatagagtc

SEQ ID NO: 149602 - DNA, 33 bp, Homo sapien
tcctcagattacagaaggaaactcaatagagtc

SEQ ID NO: 149603 - DNA, 33 bp, Homo sapien
tgtcctgcttctaaaacccactgaatccaaata

SEQ ID NO: 149604 - DNA, 33 bp, Homo sapien
tgtcctgcttctaaaatccactgaatccaaata

SEQ ID NO: 149605 - DNA, 33 bp, Homo sapien
aatcagttcttgaagaagggggaggagataaaa

SEQ ID NO: 149606 - DNA, 33 bp, Homo sapien
aatcagttcttgaagatgggggaggagataaaa

SEQ ID NO: 149607 - DNA, 33 bp, Homo sapien
tatattgttggttcttgaacattgaactcccag

SEQ ID NO: 149608 - DNA, 33 bp, Homo sapien
tatattgttggttctttaacattgaactcccag

SEQ ID NO: 149609 - DNA, 33 bp, Homo sapien
gactctgttgtatactcaatactgccatatccc

SEQ ID NO: 149610 - DNA, 33 bp, Homo sapien
gactctgttgtatactgaatactgccatatccc

SEQ ID NO: 149611 - DNA, 33 bp, Homo sapien
tccactggtcacattacagccgaccacccagaa

SEQ ID NO: 149612 - DNA, 33 bp, Homo sapien
tccactggtcacattagagccgaccacccagaa

SEQ ID NO: 149613 - DNA, 33 bp, Homo sapien
ggttagaagtaaggtgaactcagttaggtcaga

SEQ ID NO: 149614 - DNA, 33 bp, Homo sapien
ggttagaagtaaggtggactcagttaggtcaga

SEQ ID NO: 149615 - DNA, 33 bp, Homo sapien
acgtaattttatgccacagtatgactgaaaagg

SEQ ID NO: 149616 - DNA, 33 bp, Homo sapien
acgtaattttatgccagagtatgactgaaaagg

SEQ ID NO: 149617 - DNA, 33 bp, Homo sapien
ggataattataataccaacttccaaatttgttg

SEQ ID NO: 149618 - DNA, 33 bp, Homo sapien
ggataattataataccgacttccaaatttgttg

SEQ ID NO: 149619 - DNA, 33 bp, Homo sapien
tgaggactctgccttaagttaatcctcacaaca

SEQ ID NO: 149620 - DNA, 33 bp, Homo sapien
tgaggactctgccttacgttaatcctcacaaca

SEQ ID NO: 149621 - DNA, 33 bp, Homo sapien
tgaattaggagaggaaatgaatacaaaagttgt

SEQ ID NO: 149622 - DNA, 33 bp, Homo sapien
tgaattaggagaggaagtgaatacaaaagttgt

SEQ ID NO: 149623 - DNA, 33 bp, Homo sapien
agatggaaactactccaggagctctcacgtggt

SEQ ID NO: 149624 - DNA, 33 bp, Homo sapien
agatggaaactactccgggagctctcacgtggt

SEQ ID NO: 149625 - DNA, 33 bp, Homo sapien
aagcagaagactccacaactctgccatgctcag

SEQ ID NO: 149626 - DNA, 33 bp, Homo sapien
aagcagaagactccacgactctgccatgctcag

SEQ ID NO: 149627 - DNA, 33 bp, Homo sapien
caaggaagaagaagcaggatgacgaaccaggaa

SEQ ID NO: 149628 - DNA, 33 bp, Homo sapien
caaggaagaagaagcatgatgacgaaccaggaa

SEQ ID NO: 149629 - DNA, 33 bp, Homo sapien
tagtactccctgcctccgaaaacaagagaaagt

SEQ ID NO: 149630 - DNA, 33 bp, Homo sapien
tagtactccctgcctctgaaaacaagagaaagt

SEQ ID NO: 149631 - DNA, 33 bp, Homo sapien
caaggagagatggaacaccagagagaggaaaga

SEQ ID NO: 149632 - DNA, 33 bp, Homo sapien
caaggagagatggaaccccagagagaggaaaga

SEQ ID NO: 149633 - DNA, 33 bp, Homo sapien
acaaacatatccacaaatgttcatcctgcaatc

SEQ ID NO: 149634 - DNA, 33 bp, Homo sapien
acaaacatatccacaactgttcatcctgcaatc

SEQ ID NO: 149635 - DNA, 33 bp, Homo sapien
agtaaaactctggcagactagagctcaggagag

SEQ ID NO: 149636 - DNA, 33 bp, Homo sapien
agtaaaactctggcagtctagagctcaggagag

SEQ ID NO: 149637 - DNA, 33 bp, Homo sapien
gtccctgctctcagaggatgttctagtgggcag

SEQ ID NO: 149638 - DNA, 33 bp, Homo sapien
gtccctgctctcagagtatgttctagtgggcag

SEQ ID NO: 149639 - DNA, 33 bp, Homo sapien
catatggaatctgttacagtttggagaatcagg

SEQ ID NO: 149640 - DNA, 33 bp, Homo sapien
catatggaatctgttatagtttggagaatcagg

SEQ ID NO: 149641 - DNA, 33 bp, Homo sapien
tgtgaactatgtcttacatgtctagagttctgc

SEQ ID NO: 149642 - DNA, 33 bp, Homo sapien
tgtgaactatgtcttatatgtctagagttctgc

SEQ ID NO: 149643 - DNA, 33 bp, Homo sapien
aatgtgccttctggcacattctggattcttgct

SEQ ID NO: 149644 - DNA, 33 bp, Homo sapien
aatgtgccttctggcatattctggattcttgct

SEQ ID NO: 149645 - DNA, 33 bp, Homo sapien
taacaggtcgtcactcaaaggcagcagagcccc

SEQ ID NO: 149646 - DNA, 33 bp, Homo sapien
taacaggtcgtcactcgaaggcagcagagcccc

SEQ ID NO: 149647 - DNA, 33 bp, Homo sapien
catgcaggtgaggccccgcatctggcatcctgg

SEQ ID NO: 149648 - DNA, 33 bp, Homo sapien
catgcaggtgaggcccggcatctggcatcctgg

SEQ ID NO: 149649 - DNA, 33 bp, Homo sapien
agcgctgtagctcaggaagtgtcaatggtcgca

SEQ ID NO: 149650 - DNA, 33 bp, Homo sapien
agcgctgtagctcaggcagtgtcaatggtcgca

SEQ ID NO: 149651 - DNA, 33 bp, Homo sapien
gattcagtctaaggaacaagatacctggaaaaa

SEQ ID NO: 149652 - DNA, 33 bp, Homo sapien
gattcagtctaaggaataagatacctggaaaaa

SEQ ID NO: 149653 - DNA, 33 bp, Homo sapien
gatggtggtgccacccaacaaggtgaatcccga

SEQ ID NO: 149654 - DNA, 33 bp, Homo sapien
gatggtggtgccacccgacaaggtgaatcccga

SEQ ID NO: 149655 - DNA, 33 bp, Homo sapien
gcttctgcaggagctacactctgtgtcctggct

SEQ ID NO: 149656 - DNA, 33 bp, Homo sapien
gcttctgcaggagctatactctgtgtcctggct

SEQ ID NO: 149657 - DNA, 33 bp, Homo sapien
aggaaaatggctctgaatcaactgtagagtcca

SEQ ID NO: 149658 - DNA, 33 bp, Homo sapien
aggaaaatggctctgattcaactgtagagtcca

SEQ ID NO: 149659 - DNA, 33 bp, Homo sapien
ttcttaattatgcatacgttgcatctgtgatgc

SEQ ID NO: 149660 - DNA, 33 bp, Homo sapien
ttcttaattatgcatatgttgcatctgtgatgc

SEQ ID NO: 149661 - DNA, 33 bp, Homo sapien
agaaccggactatctacacatggtaattagcca

SEQ ID NO: 149662 - DNA, 33 bp, Homo sapien
agaaccggactatctatacatggtaattagcca

SEQ ID NO: 149663 - DNA, 33 bp, Homo sapien
gtgcaaagtcgtaaaaatgcagaggctctttgt

SEQ ID NO: 149664 - DNA, 33 bp, Homo sapien
gtgcaaagtcgtaaaactgcagaggctctttgt

SEQ ID NO: 149665 - DNA, 33 bp, Homo sapien
accctttctctcatcacagctggtctttgatga

SEQ ID NO: 149666 - DNA, 33 bp, Homo sapien
accctttctctcatcagagctggtctttgatga

SEQ ID NO: 149667 - DNA, 33 bp, Homo sapien
agctaggagtactacagggtttgggtgtggata

SEQ ID NO: 149668 - DNA, 33 bp, Homo sapien
agctaggagtactacatggtttgggtgtggata

SEQ ID NO: 149669 - DNA, 33 bp, Homo sapien
gaggaggactcaaaagacgaatttctgatgccc

SEQ ID NO: 149670 - DNA, 33 bp, Homo sapien
gaggaggactcaaaagccgaatttctgatgccc

SEQ ID NO: 149671 - DNA, 33 bp, Homo sapien
tagtaaaaagaggggcagatataatgcttacca

SEQ ID NO: 149672 - DNA, 33 bp, Homo sapien
tagtaaaaagaggggcggatataatgcttacca

SEQ ID NO: 149673 - DNA, 33 bp, Homo sapien
cctggattgaggatcaagaagctaacaaactag

SEQ ID NO: 149674 - DNA, 33 bp, Homo sapien
cctggattgaggatcaggaagctaacaaactag

SEQ ID NO: 149675 - DNA, 33 bp, Homo sapien
tatagtaaggatgactaagatattatttgcaat

SEQ ID NO: 149676 - DNA, 33 bp, Homo sapien
tatagtaaggatgactgagatattatttgcaat

SEQ ID NO: 149677 - DNA, 33 bp, Homo sapien
cagaacacagtcagcgacctcagtgaactgcac

SEQ ID NO: 149678 - DNA, 33 bp, Homo sapien
cagaacacagtcagcggcctcagtgaactgcac

SEQ ID NO: 149679 - DNA, 33 bp, Homo sapien
ttaccatcaaatgtacggactaaagccctaact

SEQ ID NO: 149680 - DNA, 33 bp, Homo sapien
ttaccatcaaatgtactgactaaagccctaact

SEQ ID NO: 149681 - DNA, 33 bp, Homo sapien
tatgaaaatgaaagtaaactatcagaaccatca

SEQ ID NO: 149682 - DNA, 33 bp, Homo sapien
tatgaaaatgaaagtatactatcagaaccatca

SEQ ID NO: 149683 - DNA, 33 bp, Homo sapien
tccactctctagagaaaacagcactggactaat

SEQ ID NO: 149684 - DNA, 33 bp, Homo sapien
tccactctctagagaacacagcactggactaat

SEQ ID NO: 149685 - DNA, 33 bp, Homo sapien
tgctctcagagtcacaaaacttctactccactc

SEQ ID NO: 149686 - DNA, 33 bp, Homo sapien
tgctctcagagtcacacaacttctactccactc

SEQ ID NO: 149687 - DNA, 33 bp, Homo sapien
ccattctgtcttaaaacgggtcttggtagagaa

SEQ ID NO: 149688 - DNA, 33 bp, Homo sapien
ccattctgtcttaaaaggggtcttggtagagaa

SEQ ID NO: 149689 - DNA, 33 bp, Homo sapien
tgctatagaaatattacgtagggtcctggagcc

SEQ ID NO: 149690 - DNA, 33 bp, Homo sapien
tgctatagaaatattatgtagggtcctggagcc

SEQ ID NO: 149691 - DNA, 33 bp, Homo sapien
aatgattgcgctttcccgctaattgtgatcgat

SEQ ID NO: 149692 - DNA, 33 bp, Homo sapien
aatgattgcgctttcctgctaattgtgatcgat

SEQ ID NO: 149693 - DNA, 33 bp, Homo sapien
caccactgggtaccaacagagccactggctggc

SEQ ID NO: 149694 - DNA, 33 bp, Homo sapien
caccactgggtaccaagagagccactggctggc

SEQ ID NO: 149695 - DNA, 33 bp, Homo sapien
gctgctaatgggtcaaataaaatatagagtagt

SEQ ID NO: 149696 - DNA, 33 bp, Homo sapien
gctgctaatgggtcaactaaaatatagagtagt

SEQ ID NO: 149697 - DNA, 33 bp, Homo sapien
gtcttcagttcaaacccctctcctgagcttcgg

SEQ ID NO: 149698 - DNA, 33 bp, Homo sapien
gtcttcagttcaaacctctctcctgagcttcgg

SEQ ID NO: 149699 - DNA, 33 bp, Homo sapien
atttaaatctgttcaacaagtctggaaggcaat

SEQ ID NO: 149700 - DNA, 33 bp, Homo sapien
atttaaatctgttcaataagtctggaaggcaat

SEQ ID NO: 149701 - DNA, 33 bp, Homo sapien
tgaatgttgtttttagaatggctgctccatatc

SEQ ID NO: 149702 - DNA, 33 bp, Homo sapien
tgaatgttgtttttaggatggctgctccatatc

SEQ ID NO: 149703 - DNA, 33 bp, Homo sapien
attctgactttaattaccacctctaggctgctg

SEQ ID NO: 149704 - DNA, 33 bp, Homo sapien
attctgactttaattatcacctctaggctgctg

SEQ ID NO: 149705 - DNA, 33 bp, Homo sapien
ctcttactgtctccaacccatcctccacactgt

SEQ ID NO: 149706 - DNA, 33 bp, Homo sapien
ctcttactgtctccaatccatcctccacactgt

SEQ ID NO: 149707 - DNA, 33 bp, Homo sapien
aggggaggtagtcaacagcagtacaggctactg

SEQ ID NO: 149708 - DNA, 33 bp, Homo sapien
aggggaggtagtcaacggcagtacaggctactg

SEQ ID NO: 149709 - DNA, 33 bp, Homo sapien
aaatgtgttatcttcaccatatcccacatctca

SEQ ID NO: 149710 - DNA, 33 bp, Homo sapien
aaatgtgttatcttcatcatatcccacatctca

SEQ ID NO: 149711 - DNA, 33 bp, Homo sapien
ggccatttcaatactacgtggtcgttacaatgc

SEQ ID NO: 149712 - DNA, 33 bp, Homo sapien
ggccatttcaatactatgtggtcgttacaatgc

SEQ ID NO: 149713 - DNA, 33 bp, Homo sapien
catccacacaaacacacgtacctggtatgaagg

SEQ ID NO: 149714 - DNA, 33 bp, Homo sapien
catccacacaaacacatgtacctggtatgaagg

SEQ ID NO: 149715 - DNA, 33 bp, Homo sapien
tgggaggacctacggaaacccatgttgtaaggt

SEQ ID NO: 149716 - DNA, 33 bp, Homo sapien
tgggaggacctacggagacccatgttgtaaggt

SEQ ID NO: 149717 - DNA, 33 bp, Homo sapien
ttgcatgggtggtcccaaatgctaggcaagggt

SEQ ID NO: 149718 - DNA, 33 bp, Homo sapien
ttgcatgggtggtcccgaatgctaggcaagggt

SEQ ID NO: 149719 - DNA, 33 bp, Homo sapien
atattttgatcatctacgtcaaatgatcgcagg

SEQ ID NO: 149720 - DNA, 33 bp, Homo sapien
atattttgatcatctaggtcaaatgatcgcagg

SEQ ID NO: 149721 - DNA, 33 bp, Homo sapien
ctccagaagctgttaacgacctttgccctctga

SEQ ID NO: 149722 - DNA, 33 bp, Homo sapien
ctccagaagctgttaatgacctttgccctctga

SEQ ID NO: 149723 - DNA, 33 bp, Homo sapien
ctcatcttgggccacacggatctctgcctcagg

SEQ ID NO: 149724 - DNA, 33 bp, Homo sapien
ctcatcttgggccacatggatctctgcctcagg

SEQ ID NO: 149725 - DNA, 33 bp, Homo sapien
tgtgggcattcagacccgaaaaaataggatgca

SEQ ID NO: 149726 - DNA, 33 bp, Homo sapien
tgtgggcattcagacctgaaaaaataggatgca

SEQ ID NO: 149727 - DNA, 33 bp, Homo sapien
actttatcttgtagatcagaagttctataccta

SEQ ID NO: 149728 - DNA, 33 bp, Homo sapien
actttatcttgtagatgagaagttctataccta

SEQ ID NO: 149729 - DNA, 33 bp, Homo sapien
gagataacctctaaaaatcctctccacaaaatc

SEQ ID NO: 149730 - DNA, 33 bp, Homo sapien
gagataacctctaaaactcctctccacaaaatc

SEQ ID NO: 149731 - DNA, 33 bp, Homo sapien
gatgtctgtgagtcatcagcctatagatgttaa

SEQ ID NO: 149732 - DNA, 33 bp, Homo sapien
gatgtctgtgagtcattagcctatagatgttaa

SEQ ID NO: 149733 - DNA, 33 bp, Homo sapien
aggaaaggaaaaggaaactccctatgctctccc

SEQ ID NO: 149734 - DNA, 33 bp, Homo sapien
aggaaaggaaaaggaagctccctatgctctccc

SEQ ID NO: 149735 - DNA, 33 bp, Homo sapien
ctgtctgcacggcagggactgctttaacaaaag

SEQ ID NO: 149736 - DNA, 33 bp, Homo sapien
ctgtctgcacggcaggtactgctttaacaaaag

SEQ ID NO: 149737 - DNA, 33 bp, Homo sapien
gagatcatcaccagggaattaagatgatcagat

SEQ ID NO: 149738 - DNA, 33 bp, Homo sapien
gagatcatcaccaggggattaagatgatcagat

SEQ ID NO: 149739 - DNA, 33 bp, Homo sapien
ccctagtaagaaatccaagatacctctatcctg

SEQ ID NO: 149740 - DNA, 33 bp, Homo sapien
ccctagtaagaaatccgagatacctctatcctg

SEQ ID NO: 149741 - DNA, 33 bp, Homo sapien
ttacagtaaggtagacaaagtaatgatcactcc

SEQ ID NO: 149742 - DNA, 33 bp, Homo sapien
ttacagtaaggtagacgaagtaatgatcactcc

SEQ ID NO: 149743 - DNA, 33 bp, Homo sapien
ctgtgaggaaaacagaactttatcccagaatag

SEQ ID NO: 149744 - DNA, 33 bp, Homo sapien
ctgtgaggaaaacagagctttatcccagaatag

SEQ ID NO: 149745 - DNA, 33 bp, Homo sapien
atacttggctctttgaagttttgattagagaag

SEQ ID NO: 149746 - DNA, 33 bp, Homo sapien
atacttggctctttgatgttttgattagagaag

SEQ ID NO: 149747 - DNA, 33 bp, Homo sapien
ggcctaggacatcagacggaagtgaagataaga

SEQ ID NO: 149748 - DNA, 33 bp, Homo sapien
ggcctaggacatcagatggaagtgaagataaga

SEQ ID NO: 149749 - DNA, 33 bp, Homo sapien
ctttgtgtttcttgataacttcacctttactta

SEQ ID NO: 149750 - DNA, 33 bp, Homo sapien
ctttgtgtttcttgatgacttcacctttactta

SEQ ID NO: 149751 - DNA, 33 bp, Homo sapien
tactgagctatactggaattcaaatgtagttct

SEQ ID NO: 149752 - DNA, 33 bp, Homo sapien
tactgagctatactgggattcaaatgtagttct

SEQ ID NO: 149753 - DNA, 33 bp, Homo sapien
gggacctaaggataaacaggagtaggctagatg

SEQ ID NO: 149754 - DNA, 33 bp, Homo sapien
gggacctaaggataaataggagtaggctagatg

SEQ ID NO: 149755 - DNA, 33 bp, Homo sapien
ggacctaggggaatcaatagccagaactcactc

SEQ ID NO: 149756 - DNA, 33 bp, Homo sapien
ggacctaggggaatcagtagccagaactcactc

SEQ ID NO: 149757 - DNA, 33 bp, Homo sapien
gtttagcaattgtcagcagtcaaaagagatgaa

SEQ ID NO: 149758 - DNA, 33 bp, Homo sapien
gtttagcaattgtcaggagtcaaaagagatgaa

SEQ ID NO: 149759 - DNA, 33 bp, Homo sapien
tatgtttgcttctaccactttatttttatttat

SEQ ID NO: 149760 - DNA, 33 bp, Homo sapien
tatgtttgcttctaccgctttatttttatttat

SEQ ID NO: 149761 - DNA, 33 bp, Homo sapien
acatggataaatcttaaaaacgtaatgttgagt

SEQ ID NO: 149762 - DNA, 33 bp, Homo sapien
acatggataaatcttacaaacgtaatgttgagt

SEQ ID NO: 149763 - DNA, 33 bp, Homo sapien
aaaaatgccattattacggcttctccttagtct

SEQ ID NO: 149764 - DNA, 33 bp, Homo sapien
aaaaatgccattattagggcttctccttagtct

SEQ ID NO: 149765 - DNA, 33 bp, Homo sapien
ttggtagatattgctacgtcaagatagatttgg

SEQ ID NO: 149766 - DNA, 33 bp, Homo sapien
ttggtagatattgctatgtcaagatagatttgg

SEQ ID NO: 149767 - DNA, 33 bp, Homo sapien
tttccccaagagcagaaggtagaacagtgtgga

SEQ ID NO: 149768 - DNA, 33 bp, Homo sapien
tttccccaagagcagacggtagaacagtgtgga

SEQ ID NO: 149769 - DNA, 33 bp, Homo sapien
tactgaagtgatccccaactcccatgtctctgt

SEQ ID NO: 149770 - DNA, 33 bp, Homo sapien
tactgaagtgatcccccactcccatgtctctgt

SEQ ID NO: 149771 - DNA, 33 bp, Homo sapien
taaaggatgttaaaaacgtttaattcacacata

SEQ ID NO: 149772 - DNA, 33 bp, Homo sapien
taaaggatgttaaaaatgtttaattcacacata

SEQ ID NO: 149773 - DNA, 33 bp, Homo sapien
aaagcagagacttgaccaagatagggatgtcat

SEQ ID NO: 149774 - DNA, 33 bp, Homo sapien
aaagcagagacttgactaagatagggatgtcat

SEQ ID NO: 149775 - DNA, 33 bp, Homo sapien
agagcctctaagggaactcatggaaaacctgca

SEQ ID NO: 149776 - DNA, 33 bp, Homo sapien
agagcctctaagggaagtcatggaaaacctgca

SEQ ID NO: 149777 - DNA, 33 bp, Homo sapien
gctattaatgtaacagaaagatgatattaacta

SEQ ID NO: 149778 - DNA, 33 bp, Homo sapien
gctattaatgtaacaggaagatgatattaacta

SEQ ID NO: 149779 - DNA, 33 bp, Homo sapien
attggcctggaagtaaagtggtgccattcagca

SEQ ID NO: 149780 - DNA, 33 bp, Homo sapien
attggcctggaagtaaggtggtgccattcagca

SEQ ID NO: 149781 - DNA, 33 bp, Homo sapien
gactattatagcaatccgatagacatgatgaag

SEQ ID NO: 149782 - DNA, 33 bp, Homo sapien
gactattatagcaatctgatagacatgatgaag

SEQ ID NO: 149783 - DNA, 33 bp, Homo sapien
aatcacctctcaatacgaatcatctctcctgcc

SEQ ID NO: 149784 - DNA, 33 bp, Homo sapien
aatcacctctcaatactaatcatctctcctgcc

SEQ ID NO: 149785 - DNA, 33 bp, Homo sapien
gaggaagaagaaatgcacaagacaaaaatgact

SEQ ID NO: 149786 - DNA, 33 bp, Homo sapien
gaggaagaagaaatgcgcaagacaaaaatgact

SEQ ID NO: 149787 - DNA, 33 bp, Homo sapien
gaaacagagaagactacgaaggattacaatcaa

SEQ ID NO: 149788 - DNA, 33 bp, Homo sapien
gaaacagagaagactatgaaggattacaatcaa

SEQ ID NO: 149789 - DNA, 33 bp, Homo sapien
tagaaagcttgaagacagatctttaccctgctg

SEQ ID NO: 149790 - DNA, 33 bp, Homo sapien
tagaaagcttgaagacggatctttaccctgctg

SEQ ID NO: 149791 - DNA, 33 bp, Homo sapien
aaaaaagccacatttaaagaccgttttcagata

SEQ ID NO: 149792 - DNA, 33 bp, Homo sapien
aaaaaagccacatttatagaccgttttcagata

SEQ ID NO: 149793 - DNA, 33 bp, Homo sapien
acattatataaggcacaaatcatggagcctgcc

SEQ ID NO: 149794 - DNA, 33 bp, Homo sapien
acattatataaggcacgaatcatggagcctgcc

SEQ ID NO: 149795 - DNA, 33 bp, Homo sapien
catctcctggtacttccactatgagttaataag

SEQ ID NO: 149796 - DNA, 33 bp, Homo sapien
catctcctggtacttctactatgagttaataag

SEQ ID NO: 149797 - DNA, 33 bp, Homo sapien
ctagcctttgaaatcccatagccgttgaccacc

SEQ ID NO: 149798 - DNA, 33 bp, Homo sapien
ctagcctttgaaatcctatagccgttgaccacc

SEQ ID NO: 149799 - DNA, 33 bp, Homo sapien
aatgcaaattggttccggcctattctataagtt

SEQ ID NO: 149800 - DNA, 33 bp, Homo sapien
aatgcaaattggttcctgcctattctataagtt

SEQ ID NO: 149801 - DNA, 33 bp, Homo sapien
tttggcccatgagttaaggattttaccattacc

SEQ ID NO: 149802 - DNA, 33 bp, Homo sapien
tttggcccatgagttagggattttaccattacc

SEQ ID NO: 149803 - DNA, 33 bp, Homo sapien
cagccctgaatagcaaagttcctaaagtagggg

SEQ ID NO: 149804 - DNA, 33 bp, Homo sapien
cagccctgaatagcaaggttcctaaagtagggg

SEQ ID NO: 149805 - DNA, 33 bp, Homo sapien
taccaccggctcaccactgaaaaaataaaaaat

SEQ ID NO: 149806 - DNA, 33 bp, Homo sapien
taccaccggctcaccattgaaaaaataaaaaat

SEQ ID NO: 149807 - DNA, 33 bp, Homo sapien
attagtaagtgatcaacagacaacataaaactg

SEQ ID NO: 149808 - DNA, 33 bp, Homo sapien
attagtaagtgatcaatagacaacataaaactg

SEQ ID NO: 149809 - DNA, 33 bp, Homo sapien
gtggaaagaatgcgaacggtataatgggaatgt

SEQ ID NO: 149810 - DNA, 33 bp, Homo sapien
gtggaaagaatgcgaatggtataatgggaatgt

SEQ ID NO: 149811 - DNA, 33 bp, Homo sapien
ggaggtgatcaagagacggcatacaagcgttaa

SEQ ID NO: 149812 - DNA, 33 bp, Homo sapien
ggaggtgatcaagagatggcatacaagcgttaa

SEQ ID NO: 149813 - DNA, 33 bp, Homo sapien
gatgcaaggatggttcaacgtgtgcaaaacagt

SEQ ID NO: 149814 - DNA, 33 bp, Homo sapien
gatgcaaggatggttccacgtgtgcaaaacagt

SEQ ID NO: 149815 - DNA, 33 bp, Homo sapien
tgaatgtcctccttgcacttttgcccagtgaag

SEQ ID NO: 149816 - DNA, 33 bp, Homo sapien
tgaatgtcctccttgcgcttttgcccagtgaag

SEQ ID NO: 149817 - DNA, 33 bp, Homo sapien
ttgaccctgtttctcaagacttccagacttccc

SEQ ID NO: 149818 - DNA, 33 bp, Homo sapien
ttgaccctgtttctcaggacttccagacttccc

SEQ ID NO: 149819 - DNA, 33 bp, Homo sapien
agccaaagaaagaaaacttgcttcttctggcca

SEQ ID NO: 149820 - DNA, 33 bp, Homo sapien
agccaaagaaagaaaagttgcttcttctggcca

SEQ ID NO: 149821 - DNA, 33 bp, Homo sapien
gcaggatcctgcagaactgaggagctgaatctc

SEQ ID NO: 149822 - DNA, 33 bp, Homo sapien
gcaggatcctgcagaagtgaggagctgaatctc

SEQ ID NO: 149823 - DNA, 33 bp, Homo sapien
ggggtctgtttcaaaaatgagagagtcattagt

SEQ ID NO: 149824 - DNA, 33 bp, Homo sapien
ggggtctgtttcaaaagtgagagagtcattagt

SEQ ID NO: 149825 - DNA, 33 bp, Homo sapien
tgcaaaaatgcgttaccgggagccagcagagca

SEQ ID NO: 149826 - DNA, 33 bp, Homo sapien
tgcaaaaatgcgttactgggagccagcagagca

SEQ ID NO: 149827 - DNA, 33 bp, Homo sapien
aaaatctttaactgcacgttcacagttggcttt

SEQ ID NO: 149828 - DNA, 33 bp, Homo sapien
aaaatctttaactgcatgttcacagttggcttt

SEQ ID NO: 149829 - DNA, 33 bp, Homo sapien
taccctttccactgataactgactttgcctctc

SEQ ID NO: 149830 - DNA, 33 bp, Homo sapien
taccctttccactgattactgactttgcctctc

SEQ ID NO: 149831 - DNA, 33 bp, Homo sapien
gggccttgggagtgacaacagatgtgaacagga

SEQ ID NO: 149832 - DNA, 33 bp, Homo sapien
gggccttgggagtgacgacagatgtgaacagga

SEQ ID NO: 149833 - DNA, 33 bp, Homo sapien
gtatcagcacaggccaacttcagcaagtgtggg

SEQ ID NO: 149834 - DNA, 33 bp, Homo sapien
gtatcagcacaggccaccttcagcaagtgtggg

SEQ ID NO: 149835 - DNA, 33 bp, Homo sapien
tcatggctagcttccaaaattccttctcctgag

SEQ ID NO: 149836 - DNA, 33 bp, Homo sapien
tcatggctagcttccagaattccttctcctgag

SEQ ID NO: 149837 - DNA, 33 bp, Homo sapien
agagtatagcatttaacagaaaagtgaaggaat

SEQ ID NO: 149838 - DNA, 33 bp, Homo sapien
agagtatagcatttaatagaaaagtgaaggaat

SEQ ID NO: 149839 - DNA, 33 bp, Homo sapien
tctttattttcccaggaaggtatttagttaaat

SEQ ID NO: 149840 - DNA, 33 bp, Homo sapien
tctttattttcccaggtaggtatttagttaaat

SEQ ID NO: 149841 - DNA, 33 bp, Homo sapien
ctgagaatattgaaaacaaaagatgtgaacaaa

SEQ ID NO: 149842 - DNA, 33 bp, Homo sapien
ctgagaatattgaaaagaaaagatgtgaacaaa

SEQ ID NO: 149843 - DNA, 33 bp, Homo sapien
tttgaagattcgctaacgctttttaaatcaatt

SEQ ID NO: 149844 - DNA, 33 bp, Homo sapien
tttgaagattcgctaatgctttttaaatcaatt

SEQ ID NO: 149845 - DNA, 33 bp, Homo sapien
aaatacgtgtaggaatgatctctactcagcctt

SEQ ID NO: 149846 - DNA, 33 bp, Homo sapien
aaatacgtgtaggaattatctctactcagcctt

SEQ ID NO: 149847 - DNA, 33 bp, Homo sapien
cctaacctgtaaaaaaacttcaacaaatcaata

SEQ ID NO: 149848 - DNA, 33 bp, Homo sapien
cctaacctgtaaaaaaccttcaacaaatcaata

SEQ ID NO: 149849 - DNA, 33 bp, Homo sapien
ttacaggttaggaacacggagactttgttatat

SEQ ID NO: 149850 - DNA, 33 bp, Homo sapien
ttacaggttaggaacatggagactttgttatat

SEQ ID NO: 149851 - DNA, 33 bp, Homo sapien
tgaatatagtttggaaacatgtaggcaaggcat

SEQ ID NO: 149852 - DNA, 33 bp, Homo sapien
tgaatatagtttggaaccatgtaggcaaggcat

SEQ ID NO: 149853 - DNA, 33 bp, Homo sapien
caattaggaaccattccaccctccacaaaccca

SEQ ID NO: 149854 - DNA, 33 bp, Homo sapien
caattaggaaccattctaccctccacaaaccca

SEQ ID NO: 149855 - DNA, 33 bp, Homo sapien
aacttatttcctcaaaacagagtcatgatccaa

SEQ ID NO: 149856 - DNA, 33 bp, Homo sapien
aacttatttcctcaaatcagagtcatgatccaa

SEQ ID NO: 149857 - DNA, 33 bp, Homo sapien
ctactaatagctacaaatgtatgcctaaaaaaa

SEQ ID NO: 149858 - DNA, 33 bp, Homo sapien
ctactaatagctacaactgtatgcctaaaaaaa

SEQ ID NO: 149859 - DNA, 33 bp, Homo sapien
caagatacttagtacaacttccagcatcttgta

SEQ ID NO: 149860 - DNA, 33 bp, Homo sapien
caagatacttagtacagcttccagcatcttgta

SEQ ID NO: 149861 - DNA, 33 bp, Homo sapien
ctctcccaatgctataactgtacaggggaacag

SEQ ID NO: 149862 - DNA, 33 bp, Homo sapien
ctctcccaatgctatatctgtacaggggaacag

SEQ ID NO: 149863 - DNA, 33 bp, Homo sapien
atgtgctcacaaattaaaacaacctgctaataa

SEQ ID NO: 149864 - DNA, 33 bp, Homo sapien
atgtgctcacaaattacaacaacctgctaataa

SEQ ID NO: 149865 - DNA, 33 bp, Homo sapien
catgaaagtctatataacattttgcttgctaca

SEQ ID NO: 149866 - DNA, 33 bp, Homo sapien
catgaaagtctatatatcattttgcttgctaca

SEQ ID NO: 149867 - DNA, 33 bp, Homo sapien
actccatactccaccaataaggacgtgtggaac

SEQ ID NO: 149868 - DNA, 33 bp, Homo sapien
actccatactccaccattaaggacgtgtggaac

SEQ ID NO: 149869 - DNA, 33 bp, Homo sapien
ttccacaaatctactacgtctagaataaccttt

SEQ ID NO: 149870 - DNA, 33 bp, Homo sapien
ttccacaaatctactatgtctagaataaccttt

SEQ ID NO: 149871 - DNA, 33 bp, Homo sapien
gaacttggattagttaagtgtgggatgtgtgtt

SEQ ID NO: 149872 - DNA, 33 bp, Homo sapien
gaacttggattagttacgtgtgggatgtgtgtt

SEQ ID NO: 149873 - DNA, 33 bp, Homo sapien
tcaacttttggggaacactcaggaaacttacag

SEQ ID NO: 149874 - DNA, 33 bp, Homo sapien
tcaacttttggggaacgctcaggaaacttacag

SEQ ID NO: 149875 - DNA, 33 bp, Homo sapien
tctcagggagcttttcccataccctagaactat

SEQ ID NO: 149876 - DNA, 33 bp, Homo sapien
tctcagggagcttttctcataccctagaactat

SEQ ID NO: 149877 - DNA, 33 bp, Homo sapien
ctcataagcaggcaaacgaatggctggtataca

SEQ ID NO: 149878 - DNA, 33 bp, Homo sapien
ctcataagcaggcaaaggaatggctggtataca

SEQ ID NO: 149879 - DNA, 33 bp, Homo sapien
atgccacgggatgatgccagggctcaatctgat

SEQ ID NO: 149880 - DNA, 33 bp, Homo sapien
atgccacgggatgatgtcagggctcaatctgat

SEQ ID NO: 149881 - DNA, 33 bp, Homo sapien
ttgacaatttagagtccgaaaggtctagggtca

SEQ ID NO: 149882 - DNA, 33 bp, Homo sapien
ttgacaatttagagtctgaaaggtctagggtca

SEQ ID NO: 149883 - DNA, 33 bp, Homo sapien
gtatactaaaacccaacagtataacaatgagct

SEQ ID NO: 149884 - DNA, 33 bp, Homo sapien
gtatactaaaacccaagagtataacaatgagct

SEQ ID NO: 149885 - DNA, 33 bp, Homo sapien
atcaacatttggacaaaaaattatatctcatac

SEQ ID NO: 149886 - DNA, 33 bp, Homo sapien
atcaacatttggacaagaaattatatctcatac

SEQ ID NO: 149887 - DNA, 33 bp, Homo sapien
acattacttcttttcacgattctataccaggag

SEQ ID NO: 149888 - DNA, 33 bp, Homo sapien
acattacttcttttcatgattctataccaggag

SEQ ID NO: 149889 - DNA, 33 bp, Homo sapien
tagagaaatagccttacgacattgggtctggca

SEQ ID NO: 149890 - DNA, 33 bp, Homo sapien
tagagaaatagccttatgacattgggtctggca

SEQ ID NO: 149891 - DNA, 33 bp, Homo sapien
gggagataggaatgtaacaatttaaactaatgg

SEQ ID NO: 149892 - DNA, 33 bp, Homo sapien
gggagataggaatgtagcaatttaaactaatgg

SEQ ID NO: 149893 - DNA, 33 bp, Homo sapien
ggtcagaacctaagcactgaaatgagcaatagg

SEQ ID NO: 149894 - DNA, 33 bp, Homo sapien
ggtcagaacctaagcagtgaaatgagcaatagg

SEQ ID NO: 149895 - DNA, 33 bp, Homo sapien
tctgtgacaacaactcgcatcataggcccagag

SEQ ID NO: 149896 - DNA, 33 bp, Homo sapien
tctgtgacaacaactctcatcataggcccagag

SEQ ID NO: 149897 - DNA, 33 bp, Homo sapien
tgtactttcagaatgcaccaagttcttcctcgc

SEQ ID NO: 149898 - DNA, 33 bp, Homo sapien
tgtactttcagaatgcgccaagttcttcctcgc

SEQ ID NO: 149899 - DNA, 33 bp, Homo sapien
atcatatcatttcatccaagcccctcccaaatc

SEQ ID NO: 149900 - DNA, 33 bp, Homo sapien
atcatatcatttcatcgaagcccctcccaaatc

SEQ ID NO: 149901 - DNA, 33 bp, Homo sapien
ggcccatttgccatacaactgccaaagtaattt

SEQ ID NO: 149902 - DNA, 33 bp, Homo sapien
ggcccatttgccataccactgccaaagtaattt

SEQ ID NO: 149903 - DNA, 33 bp, Homo sapien
atgtggtccagaacagcagtgattttcctctga

SEQ ID NO: 149904 - DNA, 33 bp, Homo sapien
atgtggtccagaacagtagtgattttcctctga

SEQ ID NO: 149905 - DNA, 33 bp, Homo sapien
ttctcttggatgcttacggaaacggaatattgc

SEQ ID NO: 149906 - DNA, 33 bp, Homo sapien
ttctcttggatgcttatggaaacggaatattgc

SEQ ID NO: 149907 - DNA, 33 bp, Homo sapien
atacctgtgaggagtaaataacactttattgac

SEQ ID NO: 149908 - DNA, 33 bp, Homo sapien
atacctgtgaggagtagataacactttattgac

SEQ ID NO: 149909 - DNA, 33 bp, Homo sapien
gtagcttgatttagagaataaagagcttgcatt

SEQ ID NO: 149910 - DNA, 33 bp, Homo sapien
gtagcttgatttagaggataaagagcttgcatt

SEQ ID NO: 149911 - DNA, 33 bp, Homo sapien
aaatgcatagtccccaagttgtttctctagcct

SEQ ID NO: 149912 - DNA, 33 bp, Homo sapien
aaatgcatagtccccaggttgtttctctagcct

SEQ ID NO: 149913 - DNA, 33 bp, Homo sapien
agacaacaacaagctcccagacaaaattttctc

SEQ ID NO: 149914 - DNA, 33 bp, Homo sapien
agacaacaacaagctctcagacaaaattttctc

SEQ ID NO: 149915 - DNA, 33 bp, Homo sapien
agacatttttctttcacgatttagagaatggga

SEQ ID NO: 149916 - DNA, 33 bp, Homo sapien
agacatttttctttcatgatttagagaatggga

SEQ ID NO: 149917 - DNA, 33 bp, Homo sapien
gagtctagccagtggaacttctcagagaaactt

SEQ ID NO: 149918 - DNA, 33 bp, Homo sapien
gagtctagccagtggatcttctcagagaaactt

SEQ ID NO: 149919 - DNA, 33 bp, Homo sapien
ctgattcaaaacttgcagattttccgtagatta

SEQ ID NO: 149920 - DNA, 33 bp, Homo sapien
ctgattcaaaacttgcggattttccgtagatta

SEQ ID NO: 149921 - DNA, 33 bp, Homo sapien
acaatgaccagaatagaaccaaataacaacagc

SEQ ID NO: 149922 - DNA, 33 bp, Homo sapien
acaatgaccagaataggaccaaataacaacagc

SEQ ID NO: 149923 - DNA, 33 bp, Homo sapien
aaataggaaactgcacagaaagtgggacgcaga

SEQ ID NO: 149924 - DNA, 33 bp, Homo sapien
aaataggaaactgcacggaaagtgggacgcaga

SEQ ID NO: 149925 - DNA, 33 bp, Homo sapien
ggatggtagattcaaacaagaccaggtcccctg

SEQ ID NO: 149926 - DNA, 33 bp, Homo sapien
ggatggtagattcaaataagaccaggtcccctg

SEQ ID NO: 149927 - DNA, 33 bp, Homo sapien
ttcacaggacatatacccccttcaggtcttgat

SEQ ID NO: 149928 - DNA, 33 bp, Homo sapien
ttcacaggacatatactcccttcaggtcttgat

SEQ ID NO: 149929 - DNA, 33 bp, Homo sapien
ctcataaatgttccacggaggcaagtctttttt

SEQ ID NO: 149930 - DNA, 33 bp, Homo sapien
ctcataaatgttccactgaggcaagtctttttt

SEQ ID NO: 149931 - DNA, 33 bp, Homo sapien
catccctttgctaatcacctgactgtcccagga

SEQ ID NO: 149932 - DNA, 33 bp, Homo sapien
catccctttgctaatctcctgactgtcccagga

SEQ ID NO: 149933 - DNA, 33 bp, Homo sapien
gtgttagtgcattttacgcgtgaccaagaaatt

SEQ ID NO: 149934 - DNA, 33 bp, Homo sapien
gtgttagtgcattttatgcgtgaccaagaaatt

SEQ ID NO: 149935 - DNA, 33 bp, Homo sapien
cttgctgggatttccacagaacttctgaaaact

SEQ ID NO: 149936 - DNA, 33 bp, Homo sapien
cttgctgggatttccatagaacttctgaaaact

SEQ ID NO: 149937 - DNA, 33 bp, Homo sapien
ttgtgttcctatactcacattgctgctgccatc

SEQ ID NO: 149938 - DNA, 33 bp, Homo sapien
ttgtgttcctatactcgcattgctgctgccatc

SEQ ID NO: 149939 - DNA, 33 bp, Homo sapien
ccccactgtgattcctaaagaagcagaaatcac

SEQ ID NO: 149940 - DNA, 33 bp, Homo sapien
ccccactgtgattcctcaagaagcagaaatcac

SEQ ID NO: 149941 - DNA, 33 bp, Homo sapien
tttgaagtaaagcaaacaagaataacccaaaac

SEQ ID NO: 149942 - DNA, 33 bp, Homo sapien
tttgaagtaaagcaaataagaataacccaaaac

SEQ ID NO: 149943 - DNA, 33 bp, Homo sapien
taaagaaaaagttgtacatagtttcagggaaag

SEQ ID NO: 149944 - DNA, 33 bp, Homo sapien
taaagaaaaagttgtatatagtttcagggaaag

SEQ ID NO: 149945 - DNA, 33 bp, Homo sapien
ttgtttcagtccgtgtgaattgtatgatgctat

SEQ ID NO: 149946 - DNA, 33 bp, Homo sapien
ttgtttcagtccgtgttaattgtatgatgctat

SEQ ID NO: 149947 - DNA, 33 bp, Homo sapien
acacagacacaaagtaagtacagtgagccccat

SEQ ID NO: 149948 - DNA, 33 bp, Homo sapien
acacagacacaaagtaggtacagtgagccccat

SEQ ID NO: 149949 - DNA, 33 bp, Homo sapien
ttcccattctgaaaaaatgagtgcaagtgtcac

SEQ ID NO: 149950 - DNA, 33 bp, Homo sapien
ttcccattctgaaaaagtgagtgcaagtgtcac

SEQ ID NO: 149951 - DNA, 33 bp, Homo sapien
tgctgaaaaaactactaaacttatctgtgtctc

SEQ ID NO: 149952 - DNA, 33 bp, Homo sapien
tgctgaaaaaactactcaacttatctgtgtctc

SEQ ID NO: 149953 - DNA, 33 bp, Homo sapien
taacctgtcttccctaggatgagttttatgagg

SEQ ID NO: 149954 - DNA, 33 bp, Homo sapien
taacctgtcttccctatgatgagttttatgagg

SEQ ID NO: 149955 - DNA, 33 bp, Homo sapien
ttttggcaatgagctgaataagaagatttagaa

SEQ ID NO: 149956 - DNA, 33 bp, Homo sapien
ttttggcaatgagctggataagaagatttagaa

SEQ ID NO: 149957 - DNA, 33 bp, Homo sapien
gatcaagataagccacactgactatgttgtgtg

SEQ ID NO: 149958 - DNA, 33 bp, Homo sapien
gatcaagataagccaccctgactatgttgtgtg

SEQ ID NO: 149959 - DNA, 33 bp, Homo sapien
gaccagtttcctttcccgcacaaagtgtccttc

SEQ ID NO: 149960 - DNA, 33 bp, Homo sapien
gaccagtttcctttcctgcacaaagtgtccttc

SEQ ID NO: 149961 - DNA, 33 bp, Homo sapien
cttgtgaggtagatcactctgtgctttcagctg

SEQ ID NO: 149962 - DNA, 33 bp, Homo sapien
cttgtgaggtagatcattctgtgctttcagctg

SEQ ID NO: 149963 - DNA, 33 bp, Homo sapien
tggtcattcaggcttagcgttagttacagcttc

SEQ ID NO: 149964 - DNA, 33 bp, Homo sapien
tggtcattcaggcttatcgttagttacagcttc

SEQ ID NO: 149965 - DNA, 33 bp, Homo sapien
ttggataaagctcgtacctagcaattcgaatgt

SEQ ID NO: 149966 - DNA, 33 bp, Homo sapien
ttggataaagctcgtatctagcaattcgaatgt

SEQ ID NO: 149967 - DNA, 33 bp, Homo sapien
actcatctcttccttacattcccctctctgtct

SEQ ID NO: 149968 - DNA, 33 bp, Homo sapien
actcatctcttccttagattcccctctctgtct

SEQ ID NO: 149969 - DNA, 33 bp, Homo sapien
ctagtgcataatcccaaggtcagtgagaactcc

SEQ ID NO: 149970 - DNA, 33 bp, Homo sapien
ctagtgcataatcccagggtcagtgagaactcc

SEQ ID NO: 149971 - DNA, 33 bp, Homo sapien
atgaatcctaaattgcccagaaagaagagaggc

SEQ ID NO: 149972 - DNA, 33 bp, Homo sapien
atgaatcctaaattgctcagaaagaagagaggc

SEQ ID NO: 149973 - DNA, 33 bp, Homo sapien
gcccttgtcagacatacatgaaggaaaagtttc

SEQ ID NO: 149974 - DNA, 33 bp, Homo sapien
gcccttgtcagacatagatgaaggaaaagtttc

SEQ ID NO: 149975 - DNA, 33 bp, Homo sapien
caagtgtccactaatacggattaatagacactt

SEQ ID NO: 149976 - DNA, 33 bp, Homo sapien
caagtgtccactaatatggattaatagacactt

SEQ ID NO: 149977 - DNA, 33 bp, Homo sapien
gcaaataatgtatgagccaagttacaaaaccaa

SEQ ID NO: 149978 - DNA, 33 bp, Homo sapien
gcaaataatgtatgagtcaagttacaaaaccaa

SEQ ID NO: 149979 - DNA, 33 bp, Homo sapien
ttccattttgatgaggccaaagcaagttcttga

SEQ ID NO: 149980 - DNA, 33 bp, Homo sapien
ttccattttgatgaggtcaaagcaagttcttga

SEQ ID NO: 149981 - DNA, 33 bp, Homo sapien
gaggtcctgagaattacgtcaagagggcattcc

SEQ ID NO: 149982 - DNA, 33 bp, Homo sapien
gaggtcctgagaattatgtcaagagggcattcc

SEQ ID NO: 149983 - DNA, 33 bp, Homo sapien
agaaagaggaaaaggaatacagaaagagagatg

SEQ ID NO: 149984 - DNA, 33 bp, Homo sapien
agaaagaggaaaaggagtacagaaagagagatg

SEQ ID NO: 149985 - DNA, 33 bp, Homo sapien
ctgccttctctctacacctctgaattcctgact

SEQ ID NO: 149986 - DNA, 33 bp, Homo sapien
ctgccttctctctacatctctgaattcctgact

SEQ ID NO: 149987 - DNA, 33 bp, Homo sapien
tcttaacacacaataaaaacttagaattcaggt

SEQ ID NO: 149988 - DNA, 33 bp, Homo sapien
tcttaacacacaataacaacttagaattcaggt

SEQ ID NO: 149989 - DNA, 33 bp, Homo sapien
acttttagagctatggcaacattctttaaaaag

SEQ ID NO: 149990 - DNA, 33 bp, Homo sapien
acttttagagctatggtaacattctttaaaaag

SEQ ID NO: 149991 - DNA, 33 bp, Homo sapien
tcagagcctattctaacgtttgtatgctgaaga

SEQ ID NO: 149992 - DNA, 33 bp, Homo sapien
tcagagcctattctaaggtttgtatgctgaaga

SEQ ID NO: 149993 - DNA, 33 bp, Homo sapien
gttctagtattgaagaataatgacaattgctct

SEQ ID NO: 149994 - DNA, 33 bp, Homo sapien
gttctagtattgaagactaatgacaattgctct

SEQ ID NO: 149995 - DNA, 33 bp, Homo sapien
gggacttctacacagtcaatctgaggtctgtgg

SEQ ID NO: 149996 - DNA, 33 bp, Homo sapien
gggacttctacacagttaatctgaggtctgtgg

SEQ ID NO: 149997 - DNA, 33 bp, Homo sapien
atgtagtggtttcatgcagacagctttgtgaag

SEQ ID NO: 149998 - DNA, 33 bp, Homo sapien
atgtagtggtttcatgtagacagctttgtgaag

SEQ ID NO: 149999 - DNA, 33 bp, Homo sapien
caggttgtgtttgtcacaagacattttttttct

SEQ ID NO: 150000 - DNA, 33 bp, Homo sapien
caggttgtgtttgtcagaagacattttttttct

SEQ ID NO: 150001 - DNA, 33 bp, Homo sapien
cgcccgctgacgagaacgatacccgtgagcacc

SEQ ID NO: 150002 - DNA, 33 bp, Homo sapien
cgcccgctgacgagaatgatacccgtgagcacc

SEQ ID NO: 150003 - DNA, 33 bp, Homo sapien
atctttgaacttgtgccaaacatggttccatcc

SEQ ID NO: 150004 - DNA, 33 bp, Homo sapien
atctttgaacttgtgctaaacatggttccatcc

SEQ ID NO: 150005 - DNA, 33 bp, Homo sapien
acattgctctggattccactcttgaggcttaat

SEQ ID NO: 150006 - DNA, 33 bp, Homo sapien
acattgctctggattctactcttgaggcttaat

SEQ ID NO: 150007 - DNA, 33 bp, Homo sapien
gttacataaattttaaaaaagtgtggcagacac

SEQ ID NO: 150008 - DNA, 33 bp, Homo sapien
gttacataaattttaagaaagtgtggcagacac

SEQ ID NO: 150009 - DNA, 33 bp, Homo sapien
attgtccttcgtctcccatatcaaatctgtgct

SEQ ID NO: 150010 - DNA, 33 bp, Homo sapien
attgtccttcgtctccgatatcaaatctgtgct

SEQ ID NO: 150011 - DNA, 33 bp, Homo sapien
tttttaaatatgtggacccacctggattctgtc

SEQ ID NO: 150012 - DNA, 33 bp, Homo sapien
tttttaaatatgtggagccacctggattctgtc

SEQ ID NO: 150013 - DNA, 33 bp, Homo sapien
taagcccatgaaaatacagtcattcagaaaatg

SEQ ID NO: 150014 - DNA, 33 bp, Homo sapien
taagcccatgaaaatatagtcattcagaaaatg

SEQ ID NO: 150015 - DNA, 33 bp, Homo sapien
acacagagagcttaaactgtaattcagagcaat

SEQ ID NO: 150016 - DNA, 33 bp, Homo sapien
acacagagagcttaaagtgtaattcagagcaat

SEQ ID NO: 150017 - DNA, 33 bp, Homo sapien
ttcaaacattgaaaacggatttttctagagcac

SEQ ID NO: 150018 - DNA, 33 bp, Homo sapien
ttcaaacattgaaaactgatttttctagagcac

SEQ ID NO: 150019 - DNA, 33 bp, Homo sapien
aggatagccttaacaacggtgaagggaaatctt

SEQ ID NO: 150020 - DNA, 33 bp, Homo sapien
aggatagccttaacaatggtgaagggaaatctt

SEQ ID NO: 150021 - DNA, 33 bp, Homo sapien
agcataggagagctacagtaatactatttttaa

SEQ ID NO: 150022 - DNA, 33 bp, Homo sapien
agcataggagagctacggtaatactatttttaa

SEQ ID NO: 150023 - DNA, 33 bp, Homo sapien
aaatcctccatgataaaagatcatccagtcaat

SEQ ID NO: 150024 - DNA, 33 bp, Homo sapien
aaatcctccatgataagagatcatccagtcaat

SEQ ID NO: 150025 - DNA, 33 bp, Homo sapien
atccttgcattcctataataaactgtctgatca

SEQ ID NO: 150026 - DNA, 33 bp, Homo sapien
atccttgcattcctatcataaactgtctgatca

SEQ ID NO: 150027 - DNA, 33 bp, Homo sapien
tatttacagcatatgacaaatgatttatatgtt

SEQ ID NO: 150028 - DNA, 33 bp, Homo sapien
tatttacagcatatgagaaatgatttatatgtt

SEQ ID NO: 150029 - DNA, 33 bp, Homo sapien
tgaacctggtcccatagcctggtttcagctaca

SEQ ID NO: 150030 - DNA, 33 bp, Homo sapien
tgaacctggtcccatatcctggtttcagctaca

SEQ ID NO: 150031 - DNA, 33 bp, Homo sapien
aattttttagcttccaacattacaaaagagaag

SEQ ID NO: 150032 - DNA, 33 bp, Homo sapien
aattttttagcttccatcattacaaaagagaag

SEQ ID NO: 150033 - DNA, 33 bp, Homo sapien
atagactagtaggataaaggggcttcaatacat

SEQ ID NO: 150034 - DNA, 33 bp, Homo sapien
atagactagtaggatataggggcttcaatacat

SEQ ID NO: 150035 - DNA, 33 bp, Homo sapien
actcatttaccgcagaagattcagtgttcaata

SEQ ID NO: 150036 - DNA, 33 bp, Homo sapien
actcatttaccgcagaggattcagtgttcaata

SEQ ID NO: 150037 - DNA, 33 bp, Homo sapien
attttagggatatgaacattttcaagacaatat

SEQ ID NO: 150038 - DNA, 33 bp, Homo sapien
attttagggatatgaagattttcaagacaatat

SEQ ID NO: 150039 - DNA, 33 bp, Homo sapien
cttatgtcctggtaacaaatgtcctattccttg

SEQ ID NO: 150040 - DNA, 33 bp, Homo sapien
cttatgtcctggtaacgaatgtcctattccttg

SEQ ID NO: 150041 - DNA, 33 bp, Homo sapien
ggtgatagagtatagaagattgaagaagtttga

SEQ ID NO: 150042 - DNA, 33 bp, Homo sapien
ggtgatagagtatagaggattgaagaagtttga

SEQ ID NO: 150043 - DNA, 33 bp, Homo sapien
accagaaatgacatgacaagaagaggtagatgg

SEQ ID NO: 150044 - DNA, 33 bp, Homo sapien
accagaaatgacatgataagaagaggtagatgg

SEQ ID NO: 150045 - DNA, 33 bp, Homo sapien
tcaccgtcctgtatcaaaactttgaatgcctcc

SEQ ID NO: 150046 - DNA, 33 bp, Homo sapien
tcaccgtcctgtatcacaactttgaatgcctcc

SEQ ID NO: 150047 - DNA, 33 bp, Homo sapien
tttacttcacttttagacctatcatttttttct

SEQ ID NO: 150048 - DNA, 33 bp, Homo sapien
tttacttcacttttaggcctatcatttttttct

SEQ ID NO: 150049 - DNA, 33 bp, Homo sapien
gtaagtactctttgtacgtaatagaagcggcat

SEQ ID NO: 150050 - DNA, 33 bp, Homo sapien
gtaagtactctttgtatgtaatagaagcggcat

SEQ ID NO: 150051 - DNA, 33 bp, Homo sapien
ctacaacagagtactaggtatatgtgtaatgta

SEQ ID NO: 150052 - DNA, 33 bp, Homo sapien
ctacaacagagtactatgtatatgtgtaatgta

SEQ ID NO: 150053 - DNA, 33 bp, Homo sapien
taaaatgctgataacaaggaaataaatataaag

SEQ ID NO: 150054 - DNA, 33 bp, Homo sapien
taaaatgctgataacagggaaataaatataaag

SEQ ID NO: 150055 - DNA, 33 bp, Homo sapien
gagagaatagaagagaagcaacaacaaatatgg

SEQ ID NO: 150056 - DNA, 33 bp, Homo sapien
gagagaatagaagagacgcaacaacaaatatgg

SEQ ID NO: 150057 - DNA, 33 bp, Homo sapien
agtttcctggaatctacctcaaagtattatctt

SEQ ID NO: 150058 - DNA, 33 bp, Homo sapien
agtttcctggaatctatctcaaagtattatctt

SEQ ID NO: 150059 - DNA, 33 bp, Homo sapien
atgtataaatactaaaactcttcagatccgcta

SEQ ID NO: 150060 - DNA, 33 bp, Homo sapien
atgtataaatactaaacctcttcagatccgcta

SEQ ID NO: 150061 - DNA, 33 bp, Homo sapien
atctggtcacgtagagaacagtgtataaacaca

SEQ ID NO: 150062 - DNA, 33 bp, Homo sapien
atctggtcacgtagagtacagtgtataaacaca

SEQ ID NO: 150063 - DNA, 33 bp, Homo sapien
ctggagttcccacagaaacaattctccatagta

SEQ ID NO: 150064 - DNA, 33 bp, Homo sapien
ctggagttcccacagagacaattctccatagta

SEQ ID NO: 150065 - DNA, 33 bp, Homo sapien
atgaatacacttaacaatactaaactggctaag

SEQ ID NO: 150066 - DNA, 33 bp, Homo sapien
atgaatacacttaacactactaaactggctaag

SEQ ID NO: 150067 - DNA, 33 bp, Homo sapien
tgggcacagtccgagacagaaaggttttaaaaa

SEQ ID NO: 150068 - DNA, 33 bp, Homo sapien
tgggcacagtccgagatagaaaggttttaaaaa

SEQ ID NO: 150069 - DNA, 33 bp, Homo sapien
taatctctaaaattaactcactgaactccagtg

SEQ ID NO: 150070 - DNA, 33 bp, Homo sapien
taatctctaaaattaagtcactgaactccagtg

SEQ ID NO: 150071 - DNA, 33 bp, Homo sapien
aaagcaacattttaaccatgacaagcactatga

SEQ ID NO: 150072 - DNA, 33 bp, Homo sapien
aaagcaacattttaacgatgacaagcactatga

SEQ ID NO: 150073 - DNA, 33 bp, Homo sapien
gtattggctggattaacgccctgggagtaacta

SEQ ID NO: 150074 - DNA, 33 bp, Homo sapien
gtattggctggattaatgccctgggagtaacta

SEQ ID NO: 150075 - DNA, 33 bp, Homo sapien
ataatcaggtactgcaagttatgtacagttgaa

SEQ ID NO: 150076 - DNA, 33 bp, Homo sapien
ataatcaggtactgcacgttatgtacagttgaa

SEQ ID NO: 150077 - DNA, 33 bp, Homo sapien
gctacttagattgatagcataaaagagagatct

SEQ ID NO: 150078 - DNA, 33 bp, Homo sapien
gctacttagattgatatcataaaagagagatct

SEQ ID NO: 150079 - DNA, 33 bp, Homo sapien
tggaaagtttccacaacagactagaacaagtag

SEQ ID NO: 150080 - DNA, 33 bp, Homo sapien
tggaaagtttccacaatagactagaacaagtag

SEQ ID NO: 150081 - DNA, 33 bp, Homo sapien
gcaagaattttgtgtaccctgaaactgtctttc

SEQ ID NO: 150082 - DNA, 33 bp, Homo sapien
gcaagaattttgtgtatcctgaaactgtctttc

SEQ ID NO: 150083 - DNA, 33 bp, Homo sapien
atacaatacaatcaacagaaaactattcgaaat

SEQ ID NO: 150084 - DNA, 33 bp, Homo sapien
atacaatacaatcaactgaaaactattcgaaat

SEQ ID NO: 150085 - DNA, 33 bp, Homo sapien
agcactggttttatagccagacagatctaaatg

SEQ ID NO: 150086 - DNA, 33 bp, Homo sapien
agcactggttttataggcagacagatctaaatg

SEQ ID NO: 150087 - DNA, 33 bp, Homo sapien
ttttattgctgattagcattgcaaggtatagat

SEQ ID NO: 150088 - DNA, 33 bp, Homo sapien
ttttattgctgattagtattgcaaggtatagat

SEQ ID NO: 150089 - DNA, 33 bp, Homo sapien
ttcaataacaatttgccgagctcataactaatc

SEQ ID NO: 150090 - DNA, 33 bp, Homo sapien
ttcaataacaatttgctgagctcataactaatc

SEQ ID NO: 150091 - DNA, 33 bp, Homo sapien
aatatcatagttgtaacaaatgccacaaaggag

SEQ ID NO: 150092 - DNA, 33 bp, Homo sapien
aatatcatagttgtaagaaatgccacaaaggag

SEQ ID NO: 150093 - DNA, 33 bp, Homo sapien
tattcctaagataccacgcaattatcttgggtt

SEQ ID NO: 150094 - DNA, 33 bp, Homo sapien
tattcctaagataccaggcaattatcttgggtt

SEQ ID NO: 150095 - DNA, 33 bp, Homo sapien
tccatgacactgggaaggagtttttcaagaatg

SEQ ID NO: 150096 - DNA, 33 bp, Homo sapien
tccatgacactgggaatgagtttttcaagaatg

SEQ ID NO: 150097 - DNA, 33 bp, Homo sapien
tttgctccatcaggtaaaggctgcatttattct

SEQ ID NO: 150098 - DNA, 33 bp, Homo sapien
tttgctccatcaggtataggctgcatttattct

SEQ ID NO: 150099 - DNA, 33 bp, Homo sapien
gtcttgtccattacatcaaatgccttgaaccac

SEQ ID NO: 150100 - DNA, 33 bp, Homo sapien
gtcttgtccattacattaaatgccttgaaccac

SEQ ID NO: 150101 - DNA, 33 bp, Homo sapien
catttgtggcaacataagtaagcttaaaggaca

SEQ ID NO: 150102 - DNA, 33 bp, Homo sapien
catttgtggcaacataggtaagcttaaaggaca

SEQ ID NO: 150103 - DNA, 33 bp, Homo sapien
aaaagtcccatgagagcaagtctcagcttcaga

SEQ ID NO: 150104 - DNA, 33 bp, Homo sapien
aaaagtcccatgagaggaagtctcagcttcaga

SEQ ID NO: 150105 - DNA, 33 bp, Homo sapien
aaataaacgtgactgcaaaaggcctagttgctg

SEQ ID NO: 150106 - DNA, 33 bp, Homo sapien
aaataaacgtgactgcgaaaggcctagttgctg

SEQ ID NO: 150107 - DNA, 33 bp, Homo sapien
acaattgcaaccatcacgtgaaatggcctaaag

SEQ ID NO: 150108 - DNA, 33 bp, Homo sapien
acaattgcaaccatcatgtgaaatggcctaaag

SEQ ID NO: 150109 - DNA, 33 bp, Homo sapien
tgccaaactaatctgacggctaagctaaccttc

SEQ ID NO: 150110 - DNA, 33 bp, Homo sapien
tgccaaactaatctgatggctaagctaaccttc

SEQ ID NO: 150111 - DNA, 33 bp, Homo sapien
tctatgccaccataacacttacgttacactgta

SEQ ID NO: 150112 - DNA, 33 bp, Homo sapien
tctatgccaccataacgcttacgttacactgta

SEQ ID NO: 150113 - DNA, 33 bp, Homo sapien
caacaatctcgaaaaaggtactgactaaacaga

SEQ ID NO: 150114 - DNA, 33 bp, Homo sapien
caacaatctcgaaaaatgtactgactaaacaga

SEQ ID NO: 150115 - DNA, 33 bp, Homo sapien
tggaagtgaaaagcccggagaaatgcatgggaa

SEQ ID NO: 150116 - DNA, 33 bp, Homo sapien
tggaagtgaaaagccctgagaaatgcatgggaa

SEQ ID NO: 150117 - DNA, 33 bp, Homo sapien
caagaggtaacatagaaccagaagcaaagaaaa

SEQ ID NO: 150118 - DNA, 33 bp, Homo sapien
caagaggtaacatagacccagaagcaaagaaaa

SEQ ID NO: 150119 - DNA, 33 bp, Homo sapien
tgacctaacatgaaaacgcaaaaagttacatag

SEQ ID NO: 150120 - DNA, 33 bp, Homo sapien
tgacctaacatgaaaatgcaaaaagttacatag

SEQ ID NO: 150121 - DNA, 33 bp, Homo sapien
tcttgatgaagggctcaaagagggctctgcacc

SEQ ID NO: 150122 - DNA, 33 bp, Homo sapien
tcttgatgaagggctcgaagagggctctgcacc

SEQ ID NO: 150123 - DNA, 33 bp, Homo sapien
taacttcaacgttagactattagagcccaaaaa

SEQ ID NO: 150124 - DNA, 33 bp, Homo sapien
taacttcaacgttagattattagagcccaaaaa

SEQ ID NO: 150125 - DNA, 33 bp, Homo sapien
gtctattatttgatcacgtggccataagaaatt

SEQ ID NO: 150126 - DNA, 33 bp, Homo sapien
gtctattatttgatcatgtggccataagaaatt

SEQ ID NO: 150127 - DNA, 33 bp, Homo sapien
ttttcttcttttctcacggactactctctttct

SEQ ID NO: 150128 - DNA, 33 bp, Homo sapien
ttttcttcttttctcatggactactctctttct

SEQ ID NO: 150129 - DNA, 33 bp, Homo sapien
ctcacttaatctgctacatgaaacttcaaacac

SEQ ID NO: 150130 - DNA, 33 bp, Homo sapien
ctcacttaatctgctatatgaaacttcaaacac

SEQ ID NO: 150131 - DNA, 33 bp, Homo sapien
ccagtttatatgctgacgaaaaaagcctttggt

SEQ ID NO: 150132 - DNA, 33 bp, Homo sapien
ccagtttatatgctgatgaaaaaagcctttggt

SEQ ID NO: 150133 - DNA, 33 bp, Homo sapien
tatcaatgtttcccaaagtaaggttcacttgcc

SEQ ID NO: 150134 - DNA, 33 bp, Homo sapien
tatcaatgtttcccaaggtaaggttcacttgcc

SEQ ID NO: 150135 - DNA, 33 bp, Homo sapien
gtgattcttctctccacgtaaatattactctat

SEQ ID NO: 150136 - DNA, 33 bp, Homo sapien
gtgattcttctctccatgtaaatattactctat

SEQ ID NO: 150137 - DNA, 33 bp, Homo sapien
gactgtgatttaaaaccggtctagggtgcagcc

SEQ ID NO: 150138 - DNA, 33 bp, Homo sapien
gactgtgatttaaaactggtctagggtgcagcc

SEQ ID NO: 150139 - DNA, 33 bp, Homo sapien
ggcaaagaatgcatccacctaacccttctcagc

SEQ ID NO: 150140 - DNA, 33 bp, Homo sapien
ggcaaagaatgcatccgcctaacccttctcagc

SEQ ID NO: 150141 - DNA, 33 bp, Homo sapien
agctgttacttaaccacgttgaattgatcaatc

SEQ ID NO: 150142 - DNA, 33 bp, Homo sapien
agctgttacttaaccatgttgaattgatcaatc

SEQ ID NO: 150143 - DNA, 33 bp, Homo sapien
ccattagcaagttttaacagaagagagataaca

SEQ ID NO: 150144 - DNA, 33 bp, Homo sapien
ccattagcaagttttatcagaagagagataaca

SEQ ID NO: 150145 - DNA, 33 bp, Homo sapien
acagactataggaggggaaggttgaagttaggg

SEQ ID NO: 150146 - DNA, 33 bp, Homo sapien
acagactataggagggtaaggttgaagttaggg

SEQ ID NO: 150147 - DNA, 33 bp, Homo sapien
taaatgttgtcatctccaccttccagctaccca

SEQ ID NO: 150148 - DNA, 33 bp, Homo sapien
taaatgttgtcatctctaccttccagctaccca

SEQ ID NO: 150149 - DNA, 33 bp, Homo sapien
aacacaacaacagttacattcaactaaatcaag

SEQ ID NO: 150150 - DNA, 33 bp, Homo sapien
aacacaacaacagttatattcaactaaatcaag

SEQ ID NO: 150151 - DNA, 33 bp, Homo sapien
agcagtatagtagaagcagcattggttctggga

SEQ ID NO: 150152 - DNA, 33 bp, Homo sapien
agcagtatagtagaaggagcattggttctggga

SEQ ID NO: 150153 - DNA, 33 bp, Homo sapien
aaatttaatgagttacaaaattctaagctacat

SEQ ID NO: 150154 - DNA, 33 bp, Homo sapien
aaatttaatgagttacgaaattctaagctacat

SEQ ID NO: 150155 - DNA, 33 bp, Homo sapien
gagatgattaagtaataaaggtgaagccctcat

SEQ ID NO: 150156 - DNA, 33 bp, Homo sapien
gagatgattaagtaatgaaggtgaagccctcat

SEQ ID NO: 150157 - DNA, 33 bp, Homo sapien
cctataggaaacaccaatagtgacctacacagc

SEQ ID NO: 150158 - DNA, 33 bp, Homo sapien
cctataggaaacaccagtagtgacctacacagc

SEQ ID NO: 150159 - DNA, 33 bp, Homo sapien
atttgacttgagagaccgcatcttttttcactg

SEQ ID NO: 150160 - DNA, 33 bp, Homo sapien
atttgacttgagagactgcatcttttttcactg

SEQ ID NO: 150161 - DNA, 33 bp, Homo sapien
attttggaacatttaccaggtgccagacctgtg

SEQ ID NO: 150162 - DNA, 33 bp, Homo sapien
attttggaacatttactaggtgccagacctgtg

SEQ ID NO: 150163 - DNA, 33 bp, Homo sapien
aaacacacttttgtgcaacatctgagccttggg

SEQ ID NO: 150164 - DNA, 33 bp, Homo sapien
aaacacacttttgtgctacatctgagccttggg

SEQ ID NO: 150165 - DNA, 33 bp, Homo sapien
tttcttctaaatcaaacggcagacaactaccca

SEQ ID NO: 150166 - DNA, 33 bp, Homo sapien
tttcttctaaatcaaatggcagacaactaccca

SEQ ID NO: 150167 - DNA, 33 bp, Homo sapien
tttcaatggaaatttcaatggagactctatcta

SEQ ID NO: 150168 - DNA, 33 bp, Homo sapien
tttcaatggaaatttcgatggagactctatcta

SEQ ID NO: 150169 - DNA, 33 bp, Homo sapien
cccagatcaaatctagcaagatcacagtactac

SEQ ID NO: 150170 - DNA, 33 bp, Homo sapien
cccagatcaaatctagtaagatcacagtactac

SEQ ID NO: 150171 - DNA, 33 bp, Homo sapien
aaaatgtagacatagacgtatggtaccactaca

SEQ ID NO: 150172 - DNA, 33 bp, Homo sapien
aaaatgtagacatagatgtatggtaccactaca

SEQ ID NO: 150173 - DNA, 33 bp, Homo sapien
gtctcccaaatcccaactgacaaaatcaggaag

SEQ ID NO: 150174 - DNA, 33 bp, Homo sapien
gtctcccaaatcccaattgacaaaatcaggaag

SEQ ID NO: 150175 - DNA, 33 bp, Homo sapien
tccctaccatacctgaaatgagacttaagttca

SEQ ID NO: 150176 - DNA, 33 bp, Homo sapien
tccctaccatacctgagatgagacttaagttca

SEQ ID NO: 150177 - DNA, 33 bp, Homo sapien
atccatttgtcaaaaaatataaattgatgtctc

SEQ ID NO: 150178 - DNA, 33 bp, Homo sapien
atccatttgtcaaaaagtataaattgatgtctc

SEQ ID NO: 150179 - DNA, 33 bp, Homo sapien
agtcgttcccaccaggaatcatcagccttatcc

SEQ ID NO: 150180 - DNA, 33 bp, Homo sapien
agtcgttcccaccagggatcatcagccttatcc

SEQ ID NO: 150181 - DNA, 33 bp, Homo sapien
caggttccttctataacgtgggtgaagtctgga

SEQ ID NO: 150182 - DNA, 33 bp, Homo sapien
caggttccttctataatgtgggtgaagtctgga

SEQ ID NO: 150183 - DNA, 33 bp, Homo sapien
tactctggtgccctagcttgtcagccaaaccat

SEQ ID NO: 150184 - DNA, 33 bp, Homo sapien
tactctggtgccctagtttgtcagccaaaccat

SEQ ID NO: 150185 - DNA, 33 bp, Homo sapien
tgttcctattaccacaaggaatttgatatattt

SEQ ID NO: 150186 - DNA, 33 bp, Homo sapien
tgttcctattaccacatggaatttgatatattt

SEQ ID NO: 150187 - DNA, 33 bp, Homo sapien
ctgcttgtggagatgaagagacattatagttcc

SEQ ID NO: 150188 - DNA, 33 bp, Homo sapien
ctgcttgtggagatgatgagacattatagttcc

SEQ ID NO: 150189 - DNA, 33 bp, Homo sapien
aaagtccttcttaagcaatggatcctactaata

SEQ ID NO: 150190 - DNA, 33 bp, Homo sapien
aaagtccttcttaagcgatggatcctactaata

SEQ ID NO: 150191 - DNA, 33 bp, Homo sapien
ttcttgtgtgtgaagacagacaatgagcaaaat

SEQ ID NO: 150192 - DNA, 33 bp, Homo sapien
ttcttgtgtgtgaagatagacaatgagcaaaat

SEQ ID NO: 150193 - DNA, 33 bp, Homo sapien
aaatggtgctgaataactggatatctatttgca

SEQ ID NO: 150194 - DNA, 33 bp, Homo sapien
aaatggtgctgaataattggatatctatttgca

SEQ ID NO: 150195 - DNA, 33 bp, Homo sapien
atatgctgaaaactacaaacattgatgagagaa

SEQ ID NO: 150196 - DNA, 33 bp, Homo sapien
atatgctgaaaactaccaacattgatgagagaa

SEQ ID NO: 150197 - DNA, 33 bp, Homo sapien
tcatcttaacttccaacgcaatgcttacttatg

SEQ ID NO: 150198 - DNA, 33 bp, Homo sapien
tcatcttaacttccaatgcaatgcttacttatg

SEQ ID NO: 150199 - DNA, 33 bp, Homo sapien
gtctccttctattccaagtttgctggagcttct

SEQ ID NO: 150200 - DNA, 33 bp, Homo sapien
gtctccttctattccaggtttgctggagcttct

SEQ ID NO: 150201 - DNA, 33 bp, Homo sapien
attatatctgtgtccacgaggatactgatctac

SEQ ID NO: 150202 - DNA, 33 bp, Homo sapien
attatatctgtgtccatgaggatactgatctac

SEQ ID NO: 150203 - DNA, 33 bp, Homo sapien
ttgattttaatgggcagagactcaaatatcctt

SEQ ID NO: 150204 - DNA, 33 bp, Homo sapien
ttgattttaatgggcatagactcaaatatcctt

SEQ ID NO: 150205 - DNA, 33 bp, Homo sapien
aaagtccctggtataactggactgatatggcca

SEQ ID NO: 150206 - DNA, 33 bp, Homo sapien
aaagtccctggtataagtggactgatatggcca

SEQ ID NO: 150207 - DNA, 33 bp, Homo sapien
gcagccattattgcaaaaaactcatttcagatg

SEQ ID NO: 150208 - DNA, 33 bp, Homo sapien
gcagccattattgcaagaaactcatttcagatg

SEQ ID NO: 150209 - DNA, 33 bp, Homo sapien
caagtaccaacccaaaaccttaacacagaagca

SEQ ID NO: 150210 - DNA, 33 bp, Homo sapien
caagtaccaacccaaagccttaacacagaagca

SEQ ID NO: 150211 - DNA, 33 bp, Homo sapien
tgcttctcaggaaacaagaaatgagaaaggagt

SEQ ID NO: 150212 - DNA, 33 bp, Homo sapien
tgcttctcaggaaacaggaaatgagaaaggagt

SEQ ID NO: 150213 - DNA, 33 bp, Homo sapien
atactgccactcagggacccgtgtgcaacactc

SEQ ID NO: 150214 - DNA, 33 bp, Homo sapien
atactgccactcaggggcccgtgtgcaacactc

SEQ ID NO: 150215 - DNA, 33 bp, Homo sapien
cactctcctttgtgtaacacgtgcatatactgc

SEQ ID NO: 150216 - DNA, 33 bp, Homo sapien
cactctcctttgtgtagcacgtgcatatactgc

SEQ ID NO: 150217 - DNA, 33 bp, Homo sapien
tagttgttattatgtacgccccacattctgagg

SEQ ID NO: 150218 - DNA, 33 bp, Homo sapien
tagttgttattatgtatgccccacattctgagg

SEQ ID NO: 150219 - DNA, 33 bp, Homo sapien
agaagaaagagaatccaatcagaatatatagtc

SEQ ID NO: 150220 - DNA, 33 bp, Homo sapien
agaagaaagagaatccgatcagaatatatagtc

SEQ ID NO: 150221 - DNA, 33 bp, Homo sapien
ttgctatgttcatttacctagcccataagccac

SEQ ID NO: 150222 - DNA, 33 bp, Homo sapien
ttgctatgttcatttatctagcccataagccac

SEQ ID NO: 150223 - DNA, 33 bp, Homo sapien
taacctggaaaagaccaagaactactaattagc

SEQ ID NO: 150224 - DNA, 33 bp, Homo sapien
taacctggaaaagaccgagaactactaattagc

SEQ ID NO: 150225 - DNA, 33 bp, Homo sapien
tgaatctttcagaagacgcacttgtcaaatgct

SEQ ID NO: 150226 - DNA, 33 bp, Homo sapien
tgaatctttcagaagatgcacttgtcaaatgct

SEQ ID NO: 150227 - DNA, 33 bp, Homo sapien
tataggtaacctactaccctacccacctcaata

SEQ ID NO: 150228 - DNA, 33 bp, Homo sapien
tataggtaacctactatcctacccacctcaata

SEQ ID NO: 150229 - DNA, 33 bp, Homo sapien
ctgagatggtaggcaccgtgaataacatgttcc

SEQ ID NO: 150230 - DNA, 33 bp, Homo sapien
ctgagatggtaggcactgtgaataacatgttcc

SEQ ID NO: 150231 - DNA, 33 bp, Homo sapien
cccttgtggaagtctacatttgctcattgttct

SEQ ID NO: 150232 - DNA, 33 bp, Homo sapien
cccttgtggaagtctagatttgctcattgttct

SEQ ID NO: 150233 - DNA, 33 bp, Homo sapien
actattggactgtggcccttgaattatccttca

SEQ ID NO: 150234 - DNA, 33 bp, Homo sapien
actattggactgtggctcttgaattatccttca

SEQ ID NO: 150235 - DNA, 33 bp, Homo sapien
aaatattgttgagacaatctagtgactttgtga

SEQ ID NO: 150236 - DNA, 33 bp, Homo sapien
aaatattgttgagacagtctagtgactttgtga

SEQ ID NO: 150237 - DNA, 33 bp, Homo sapien
gggcattggttgcctcacaggggaattttacca

SEQ ID NO: 150238 - DNA, 33 bp, Homo sapien
gggcattggttgcctcgcaggggaattttacca

SEQ ID NO: 150239 - DNA, 33 bp, Homo sapien
ctttctctgatgggaaagaactcaggaattggc

SEQ ID NO: 150240 - DNA, 33 bp, Homo sapien
ctttctctgatgggaaggaactcaggaattggc

SEQ ID NO: 150241 - DNA, 33 bp, Homo sapien
taggaaactaaagggcaaccaaacagaatgcaa

SEQ ID NO: 150242 - DNA, 33 bp, Homo sapien
taggaaactaaagggccaccaaacagaatgcaa

SEQ ID NO: 150243 - DNA, 33 bp, Homo sapien
gcctgtctgggtcaaaatgcagctctgccatct

SEQ ID NO: 150244 - DNA, 33 bp, Homo sapien
gcctgtctgggtcaaagtgcagctctgccatct

SEQ ID NO: 150245 - DNA, 33 bp, Homo sapien
atttgcatcttggctgaacccaaaggttttaaa

SEQ ID NO: 150246 - DNA, 33 bp, Homo sapien
atttgcatcttggctggacccaaaggttttaaa

SEQ ID NO: 150247 - DNA, 33 bp, Homo sapien
gggaaagaatgaagagcatctgggtgtgcagaa

SEQ ID NO: 150248 - DNA, 33 bp, Homo sapien
gggaaagaatgaagaggatctgggtgtgcagaa

SEQ ID NO: 150249 - DNA, 33 bp, Homo sapien
atgatttagactgggacgagttgacagcacgag

SEQ ID NO: 150250 - DNA, 33 bp, Homo sapien
atgatttagactgggaggagttgacagcacgag

SEQ ID NO: 150251 - DNA, 33 bp, Homo sapien
ggcccttaaggttccaagcatagagatggcttc

SEQ ID NO: 150252 - DNA, 33 bp, Homo sapien
ggcccttaaggttccaggcatagagatggcttc

SEQ ID NO: 150253 - DNA, 33 bp, Homo sapien
aggtgaaacgagaattaaatgatgtgcaaacac

SEQ ID NO: 150254 - DNA, 33 bp, Homo sapien
aggtgaaacgagaattcaatgatgtgcaaacac

SEQ ID NO: 150255 - DNA, 33 bp, Homo sapien
gcctccaaaggaactacggttgcaggactcact

SEQ ID NO: 150256 - DNA, 33 bp, Homo sapien
gcctccaaaggaactatggttgcaggactcact

SEQ ID NO: 150257 - DNA, 33 bp, Homo sapien
taaagggtaggtttccccagatccaatgggcca

SEQ ID NO: 150258 - DNA, 33 bp, Homo sapien
taaagggtaggtttcctcagatccaatgggcca

SEQ ID NO: 150259 - DNA, 33 bp, Homo sapien
aatgtacccccttactcaaacagatagtagtaa

SEQ ID NO: 150260 - DNA, 33 bp, Homo sapien
aatgtacccccttactgaaacagatagtagtaa

SEQ ID NO: 150261 - DNA, 33 bp, Homo sapien
ttaaggatatcctggaactcgcctgacagggag

SEQ ID NO: 150262 - DNA, 33 bp, Homo sapien
ttaaggatatcctggacctcgcctgacagggag

SEQ ID NO: 150263 - DNA, 33 bp, Homo sapien
ttataaaattcaggtgaaaagagacacattgtg

SEQ ID NO: 150264 - DNA, 33 bp, Homo sapien
ttataaaattcaggtggaaagagacacattgtg

SEQ ID NO: 150265 - DNA, 33 bp, Homo sapien
ggcctgaagtgaaacacgattcaaggtgtatcc

SEQ ID NO: 150266 - DNA, 33 bp, Homo sapien
ggcctgaagtgaaacatgattcaaggtgtatcc

SEQ ID NO: 150267 - DNA, 33 bp, Homo sapien
ctacaaataaagcaaacggctaataaaaggtca

SEQ ID NO: 150268 - DNA, 33 bp, Homo sapien
ctacaaataaagcaaatggctaataaaaggtca

SEQ ID NO: 150269 - DNA, 33 bp, Homo sapien
gatggattggagttaaccataaaataaaaatca

SEQ ID NO: 150270 - DNA, 33 bp, Homo sapien
gatggattggagttaatcataaaataaaaatca

SEQ ID NO: 150271 - DNA, 33 bp, Homo sapien
atgcatcttgaaaaaaccaacaacaatgtcaac

SEQ ID NO: 150272 - DNA, 33 bp, Homo sapien
atgcatcttgaaaaaatcaacaacaatgtcaac

SEQ ID NO: 150273 - DNA, 33 bp, Homo sapien
ctagtggccatcttgcaactgttatgggatgtg

SEQ ID NO: 150274 - DNA, 33 bp, Homo sapien
ctagtggccatcttgcgactgttatgggatgtg

SEQ ID NO: 150275 - DNA, 33 bp, Homo sapien
acttttcctgtaaagcaccagatggcaaatatt

SEQ ID NO: 150276 - DNA, 33 bp, Homo sapien
acttttcctgtaaagcgccagatggcaaatatt

SEQ ID NO: 150277 - DNA, 33 bp, Homo sapien
tcagatgagcccctaaatatgttcgtcaaatat

SEQ ID NO: 150278 - DNA, 33 bp, Homo sapien
tcagatgagcccctaagtatgttcgtcaaatat

SEQ ID NO: 150279 - DNA, 33 bp, Homo sapien
ggacagtgaaggccacagtaaggcttttgggca

SEQ ID NO: 150280 - DNA, 33 bp, Homo sapien
ggacagtgaaggccacggtaaggcttttgggca

SEQ ID NO: 150281 - DNA, 33 bp, Homo sapien
tagcagttaatagcaaacatgttattgagtatt

SEQ ID NO: 150282 - DNA, 33 bp, Homo sapien
tagcagttaatagcaagcatgttattgagtatt

SEQ ID NO: 150283 - DNA, 33 bp, Homo sapien
aaacaggatgctgaaacacagttacattttgcg

SEQ ID NO: 150284 - DNA, 33 bp, Homo sapien
aaacaggatgctgaaatacagttacattttgcg

SEQ ID NO: 150285 - DNA, 33 bp, Homo sapien
ggtcaagccaatctaccatctttgtcacagtgt

SEQ ID NO: 150286 - DNA, 33 bp, Homo sapien
ggtcaagccaatctactatctttgtcacagtgt

SEQ ID NO: 150287 - DNA, 33 bp, Homo sapien
cttgccttgggatcctaaaaatgcatctgcctt

SEQ ID NO: 150288 - DNA, 33 bp, Homo sapien
cttgccttgggatcctcaaaatgcatctgcctt

SEQ ID NO: 150289 - DNA, 33 bp, Homo sapien
catgcttctaactgaacgttggtcttttagatt

SEQ ID NO: 150290 - DNA, 33 bp, Homo sapien
catgcttctaactgaatgttggtcttttagatt

SEQ ID NO: 150291 - DNA, 33 bp, Homo sapien
tcaaactgtcaagggtaaaatgatagcagtgtg

SEQ ID NO: 150292 - DNA, 33 bp, Homo sapien
tcaaactgtcaagggtcaaatgatagcagtgtg

SEQ ID NO: 150293 - DNA, 33 bp, Homo sapien
aggtcagtaaatgagcaaggtgtttctaaacct

SEQ ID NO: 150294 - DNA, 33 bp, Homo sapien
aggtcagtaaatgagcgaggtgtttctaaacct

SEQ ID NO: 150295 - DNA, 33 bp, Homo sapien
agtttctctcccctgcactgtgaggattaggat

SEQ ID NO: 150296 - DNA, 33 bp, Homo sapien
agtttctctcccctgccctgtgaggattaggat

SEQ ID NO: 150297 - DNA, 33 bp, Homo sapien
agatccttctttgaacaatctagctatgtgcca

SEQ ID NO: 150298 - DNA, 33 bp, Homo sapien
agatccttctttgaacgatctagctatgtgcca

SEQ ID NO: 150299 - DNA, 33 bp, Homo sapien
ttcttctccttgtgccaagaacatagcgtgggt

SEQ ID NO: 150300 - DNA, 33 bp, Homo sapien
ttcttctccttgtgcccagaacatagcgtgggt

SEQ ID NO: 150301 - DNA, 33 bp, Homo sapien
tatctttcagagacaacggtaggatcgcccttg

SEQ ID NO: 150302 - DNA, 33 bp, Homo sapien
tatctttcagagacaatggtaggatcgcccttg

SEQ ID NO: 150303 - DNA, 33 bp, Homo sapien
aatacttaaattaataaagtgcccctcaggctg

SEQ ID NO: 150304 - DNA, 33 bp, Homo sapien
aatacttaaattaatatagtgcccctcaggctg

SEQ ID NO: 150305 - DNA, 33 bp, Homo sapien
aggcttccctggagaaaatcagtcctaatggaa

SEQ ID NO: 150306 - DNA, 33 bp, Homo sapien
aggcttccctggagaagatcagtcctaatggaa

SEQ ID NO: 150307 - DNA, 33 bp, Homo sapien
accctctcaggcagaaatcagcaagcaatgaga

SEQ ID NO: 150308 - DNA, 33 bp, Homo sapien
accctctcaggcagaagtcagcaagcaatgaga

SEQ ID NO: 150309 - DNA, 33 bp, Homo sapien
cccttcaggtctctaaaatctttgaacactacc

SEQ ID NO: 150310 - DNA, 33 bp, Homo sapien
cccttcaggtctctaacatctttgaacactacc

SEQ ID NO: 150311 - DNA, 33 bp, Homo sapien
tcctaactgaggctgacagttaagtcggtatct

SEQ ID NO: 150312 - DNA, 33 bp, Homo sapien
tcctaactgaggctgatagttaagtcggtatct

SEQ ID NO: 150313 - DNA, 33 bp, Homo sapien
ctgtctccttgtaaaaagcagaggaattactaa

SEQ ID NO: 150314 - DNA, 33 bp, Homo sapien
ctgtctccttgtaaaaggcagaggaattactaa

SEQ ID NO: 150315 - DNA, 33 bp, Homo sapien
ggacccctgaaacatcaagcatgagcaaacaag

SEQ ID NO: 150316 - DNA, 33 bp, Homo sapien
ggacccctgaaacatcgagcatgagcaaacaag

SEQ ID NO: 150317 - DNA, 33 bp, Homo sapien
tactccatcattttccagctaactttgagacaa

SEQ ID NO: 150318 - DNA, 33 bp, Homo sapien
tactccatcattttccggctaactttgagacaa

SEQ ID NO: 150319 - DNA, 33 bp, Homo sapien
cggaggctgaacaggaaaagcgagagaaaatgg

SEQ ID NO: 150320 - DNA, 33 bp, Homo sapien
cggaggctgaacaggagaagcgagagaaaatgg

SEQ ID NO: 150321 - DNA, 33 bp, Homo sapien
ctggactcctggtcagaagactctagtttgccc

SEQ ID NO: 150322 - DNA, 33 bp, Homo sapien
ctggactcctggtcagcagactctagtttgccc

SEQ ID NO: 150323 - DNA, 33 bp, Homo sapien
cagagaatcagtggcacaacagttccatgcagg

SEQ ID NO: 150324 - DNA, 33 bp, Homo sapien
cagagaatcagtggcataacagttccatgcagg

SEQ ID NO: 150325 - DNA, 33 bp, Homo sapien
ccaaattcaagtgtcacctcttccatggaacct

SEQ ID NO: 150326 - DNA, 33 bp, Homo sapien
ccaaattcaagtgtcatctcttccatggaacct

SEQ ID NO: 150327 - DNA, 33 bp, Homo sapien
gagccgccgtctggatcagtggtggcgggccac

SEQ ID NO: 150328 - DNA, 33 bp, Homo sapien
gagccgccgtctggattagtggtggcgggccac

SEQ ID NO: 150329 - DNA, 33 bp, Homo sapien
gatactaagagctagacgcaagagaaagttttg

SEQ ID NO: 150330 - DNA, 33 bp, Homo sapien
gatactaagagctagaggcaagagaaagttttg

SEQ ID NO: 150331 - DNA, 33 bp, Homo sapien
gaagatggaacagagagatggatagaaaccaag

SEQ ID NO: 150332 - DNA, 33 bp, Homo sapien
gaagatggaacagagatatggatagaaaccaag

SEQ ID NO: 150333 - DNA, 33 bp, Homo sapien
caggtcctgttggcagaaagcctaaaagaatga

SEQ ID NO: 150334 - DNA, 33 bp, Homo sapien
caggtcctgttggcaggaagcctaaaagaatga

SEQ ID NO: 150335 - DNA, 33 bp, Homo sapien
acttgttgtaaactaccgtaactaaaacagtgt

SEQ ID NO: 150336 - DNA, 33 bp, Homo sapien
acttgttgtaaactactgtaactaaaacagtgt

SEQ ID NO: 150337 - DNA, 33 bp, Homo sapien
ttcaggtaaggcaaatcatgagctgtaaccaat

SEQ ID NO: 150338 - DNA, 33 bp, Homo sapien
ttcaggtaaggcaaatgatgagctgtaaccaat

SEQ ID NO: 150339 - DNA, 33 bp, Homo sapien
taaaaggtagcattcacaggttgtgggcatatc

SEQ ID NO: 150340 - DNA, 33 bp, Homo sapien
taaaaggtagcattcataggttgtgggcatatc

SEQ ID NO: 150341 - DNA, 33 bp, Homo sapien
ctctgagacaaaaacaatcattcatttattgta

SEQ ID NO: 150342 - DNA, 33 bp, Homo sapien
ctctgagacaaaaacagtcattcatttattgta

SEQ ID NO: 150343 - DNA, 33 bp, Homo sapien
ggattagaactgggaaccaaagagttggtaact

SEQ ID NO: 150344 - DNA, 33 bp, Homo sapien
ggattagaactgggaatcaaagagttggtaact

SEQ ID NO: 150345 - DNA, 33 bp, Homo sapien
tgctcatcagcttccaatcagatgaaaacggga

SEQ ID NO: 150346 - DNA, 33 bp, Homo sapien
tgctcatcagcttccattcagatgaaaacggga

SEQ ID NO: 150347 - DNA, 33 bp, Homo sapien
ggtatctgaaatatcacgtgaagtcagatgtta

SEQ ID NO: 150348 - DNA, 33 bp, Homo sapien
ggtatctgaaatatcaggtgaagtcagatgtta

SEQ ID NO: 150349 - DNA, 33 bp, Homo sapien
gtatctgcaagttccacgtcagcagattcaacc

SEQ ID NO: 150350 - DNA, 33 bp, Homo sapien
gtatctgcaagttccatgtcagcagattcaacc

SEQ ID NO: 150351 - DNA, 33 bp, Homo sapien
tcttttcacagtccacaattcttgacatttacg

SEQ ID NO: 150352 - DNA, 33 bp, Homo sapien
tcttttcacagtccacgattcttgacatttacg

SEQ ID NO: 150353 - DNA, 33 bp, Homo sapien
ttcaatacttggaggacattctggaattggaga

SEQ ID NO: 150354 - DNA, 33 bp, Homo sapien
ttcaatacttggaggatattctggaattggaga

SEQ ID NO: 150355 - DNA, 33 bp, Homo sapien
ttcatagtcataaagacgccctctgcaaagggg

SEQ ID NO: 150356 - DNA, 33 bp, Homo sapien
ttcatagtcataaagatgccctctgcaaagggg

SEQ ID NO: 150357 - DNA, 33 bp, Homo sapien
ctagtataattaatccaaaaagagggagaaagt

SEQ ID NO: 150358 - DNA, 33 bp, Homo sapien
ctagtataattaatccgaaaagagggagaaagt

SEQ ID NO: 150359 - DNA, 33 bp, Homo sapien
acactgatgaaggaaactgtaggtgacataaac

SEQ ID NO: 150360 - DNA, 33 bp, Homo sapien
acactgatgaaggaaattgtaggtgacataaac

SEQ ID NO: 150361 - DNA, 33 bp, Homo sapien
caataagtagatgctcaattactaaacttttgc

SEQ ID NO: 150362 - DNA, 33 bp, Homo sapien
caataagtagatgctccattactaaacttttgc

SEQ ID NO: 150363 - DNA, 33 bp, Homo sapien
gttttaaagttgagtacagttgccagcatggaa

SEQ ID NO: 150364 - DNA, 33 bp, Homo sapien
gttttaaagttgagtatagttgccagcatggaa

SEQ ID NO: 150365 - DNA, 33 bp, Homo sapien
catgagaatcatgacaacagtatggtctagtgg

SEQ ID NO: 150366 - DNA, 33 bp, Homo sapien
catgagaatcatgacagcagtatggtctagtgg

SEQ ID NO: 150367 - DNA, 33 bp, Homo sapien
aattaatcttcttttcaatatgacttcctacct

SEQ ID NO: 150368 - DNA, 33 bp, Homo sapien
aattaatcttcttttcgatatgacttcctacct

SEQ ID NO: 150369 - DNA, 33 bp, Homo sapien
gatctgaccaattagacatccaaatagatgtat

SEQ ID NO: 150370 - DNA, 33 bp, Homo sapien
gatctgaccaattagatatccaaatagatgtat

SEQ ID NO: 150371 - DNA, 33 bp, Homo sapien
tgcatgtcaggaaagacaaccaagagttctgtt

SEQ ID NO: 150372 - DNA, 33 bp, Homo sapien
tgcatgtcaggaaagataaccaagagttctgtt

SEQ ID NO: 150373 - DNA, 33 bp, Homo sapien
tacatatatatgagaaaacttaactgtaaaaca

SEQ ID NO: 150374 - DNA, 33 bp, Homo sapien
tacatatatatgagaacacttaactgtaaaaca

SEQ ID NO: 150375 - DNA, 33 bp, Homo sapien
ctgtcaactcctatgacacaatgaaggacctgc

SEQ ID NO: 150376 - DNA, 33 bp, Homo sapien
ctgtcaactcctatgatacaatgaaggacctgc

SEQ ID NO: 150377 - DNA, 33 bp, Homo sapien
tcataaacctccagagaaagaattaactggaag

SEQ ID NO: 150378 - DNA, 33 bp, Homo sapien
tcataaacctccagaggaagaattaactggaag

SEQ ID NO: 150379 - DNA, 33 bp, Homo sapien
gatgccatctgaatatgactaagtgatcctcat

SEQ ID NO: 150380 - DNA, 33 bp, Homo sapien
gatgccatctgaatattactaagtgatcctcat

SEQ ID NO: 150381 - DNA, 33 bp, Homo sapien
ccaaacatgatctaacccttttggtatacctct

SEQ ID NO: 150382 - DNA, 33 bp, Homo sapien
ccaaacatgatctaactcttttggtatacctct

SEQ ID NO: 150383 - DNA, 33 bp, Homo sapien
cctatatcacatttacccttaacagtcatatta

SEQ ID NO: 150384 - DNA, 33 bp, Homo sapien
cctatatcacatttactcttaacagtcatatta

SEQ ID NO: 150385 - DNA, 33 bp, Homo sapien
aattaatgtacagtaaacatgacccttttagtg

SEQ ID NO: 150386 - DNA, 33 bp, Homo sapien
aattaatgtacagtaaccatgacccttttagtg

SEQ ID NO: 150387 - DNA, 33 bp, Homo sapien
caagactaagaagctcactcaaaaccatactat

SEQ ID NO: 150388 - DNA, 33 bp, Homo sapien
caagactaagaagctcgctcaaaaccatactat

SEQ ID NO: 150389 - DNA, 33 bp, Homo sapien
tgaagtaggtggccaagaaagtggtgaatcccc

SEQ ID NO: 150390 - DNA, 33 bp, Homo sapien
tgaagtaggtggccaataaagtggtgaatcccc

SEQ ID NO: 150391 - DNA, 33 bp, Homo sapien
gcattatttgtaaaaacgaaaaatggtgcaggc

SEQ ID NO: 150392 - DNA, 33 bp, Homo sapien
gcattatttgtaaaaatgaaaaatggtgcaggc

SEQ ID NO: 150393 - DNA, 33 bp, Homo sapien
taacaagtgtttgtgaaggtatggagaaaaagg

SEQ ID NO: 150394 - DNA, 33 bp, Homo sapien
taacaagtgtttgtgagggtatggagaaaaagg

SEQ ID NO: 150395 - DNA, 33 bp, Homo sapien
ttttttgcctctcttacggtttgtggttcttgt

SEQ ID NO: 150396 - DNA, 33 bp, Homo sapien
ttttttgcctctcttatggtttgtggttcttgt

SEQ ID NO: 150397 - DNA, 33 bp, Homo sapien
agttattggccttaaacagggggtagagaaaca

SEQ ID NO: 150398 - DNA, 33 bp, Homo sapien
agttattggccttaaagagggggtagagaaaca

SEQ ID NO: 150399 - DNA, 33 bp, Homo sapien
accgagtgtttgtggtcaaaatttatctgtcca

SEQ ID NO: 150400 - DNA, 33 bp, Homo sapien
accgagtgtttgtggtgaaaatttatctgtcca

SEQ ID NO: 150401 - DNA, 33 bp, Homo sapien
tagtgtaatatcacaacgaggatactggcagtg

SEQ ID NO: 150402 - DNA, 33 bp, Homo sapien
tagtgtaatatcacaatgaggatactggcagtg

SEQ ID NO: 150403 - DNA, 33 bp, Homo sapien
aatcacatatgcaaagaccatttttaaagtaag

SEQ ID NO: 150404 - DNA, 33 bp, Homo sapien
aatcacatatgcaaaggccatttttaaagtaag

SEQ ID NO: 150405 - DNA, 33 bp, Homo sapien
aggtatatggaatgaacaaaatggtagaatagt

SEQ ID NO: 150406 - DNA, 33 bp, Homo sapien
aggtatatggaatgaataaaatggtagaatagt

SEQ ID NO: 150407 - DNA, 33 bp, Homo sapien
agggtccttgatcatacgtcctggcctcttctt

SEQ ID NO: 150408 - DNA, 33 bp, Homo sapien
agggtccttgatcataggtcctggcctcttctt

SEQ ID NO: 150409 - DNA, 33 bp, Homo sapien
aaaaatgaaagcaggacaaaatttcctgagaag

SEQ ID NO: 150410 - DNA, 33 bp, Homo sapien
aaaaatgaaagcaggagaaaatttcctgagaag

SEQ ID NO: 150411 - DNA, 33 bp, Homo sapien
atttaggcatattgtacgtgagccttcatttat

SEQ ID NO: 150412 - DNA, 33 bp, Homo sapien
atttaggcatattgtatgtgagccttcatttat

SEQ ID NO: 150413 - DNA, 33 bp, Homo sapien
acagagtaatcaaggaagcgtgttgagccaagt

SEQ ID NO: 150414 - DNA, 33 bp, Homo sapien
acagagtaatcaaggaggcgtgttgagccaagt

SEQ ID NO: 150415 - DNA, 33 bp, Homo sapien
actagcattattcgctcactatacatttagatt

SEQ ID NO: 150416 - DNA, 33 bp, Homo sapien
actagcattattcgcttactatacatttagatt

SEQ ID NO: 150417 - DNA, 33 bp, Homo sapien
tttgtcaaggagtacaatgtaataacttgatat

SEQ ID NO: 150418 - DNA, 33 bp, Homo sapien
tttgtcaaggagtacagtgtaataacttgatat

SEQ ID NO: 150419 - DNA, 33 bp, Homo sapien
atgggaaatatagtgaactggctgacctgttat

SEQ ID NO: 150420 - DNA, 33 bp, Homo sapien
atgggaaatatagtgacctggctgacctgttat

SEQ ID NO: 150421 - DNA, 33 bp, Homo sapien
tccccactgtcctcaccagtgaaaagcccagag

SEQ ID NO: 150422 - DNA, 33 bp, Homo sapien
tccccactgtcctcactagtgaaaagcccagag

SEQ ID NO: 150423 - DNA, 33 bp, Homo sapien
cctttgaaatcctcttcaacagaattgagcaag

SEQ ID NO: 150424 - DNA, 33 bp, Homo sapien
cctttgaaatcctcttgaacagaattgagcaag

SEQ ID NO: 150425 - DNA, 33 bp, Homo sapien
ttgtatcctggtgaaacgtaaacctgcaaatct

SEQ ID NO: 150426 - DNA, 33 bp, Homo sapien
ttgtatcctggtgaaaggtaaacctgcaaatct

SEQ ID NO: 150427 - DNA, 33 bp, Homo sapien
ttcagatacttgatacgaaactagggacctctc

SEQ ID NO: 150428 - DNA, 33 bp, Homo sapien
ttcagatacttgatactaaactagggacctctc

SEQ ID NO: 150429 - DNA, 33 bp, Homo sapien
atatgtatgcataaaacttgcagggactataaa

SEQ ID NO: 150430 - DNA, 33 bp, Homo sapien
atatgtatgcataaaatttgcagggactataaa

SEQ ID NO: 150431 - DNA, 33 bp, Homo sapien
attgcacaatttattgaaatatccacatatttt

SEQ ID NO: 150432 - DNA, 33 bp, Homo sapien
attgcacaatttattggaatatccacatatttt

SEQ ID NO: 150433 - DNA, 33 bp, Homo sapien
tgcccttcgctgatcaactctgctctgtgcccc

SEQ ID NO: 150434 - DNA, 33 bp, Homo sapien
tgcccttcgctgatcacctctgctctgtgcccc

SEQ ID NO: 150435 - DNA, 33 bp, Homo sapien
ctagtgcctctaccatcagtgctctaaccaggc

SEQ ID NO: 150436 - DNA, 33 bp, Homo sapien
ctagtgcctctaccattagtgctctaaccaggc

SEQ ID NO: 150437 - DNA, 33 bp, Homo sapien
gcaacagtttgtgatacaatgcaataggctttc

SEQ ID NO: 150438 - DNA, 33 bp, Homo sapien
gcaacagtttgtgatagaatgcaataggctttc

SEQ ID NO: 150439 - DNA, 33 bp, Homo sapien
tggggcttatagtagacggcaaaatacatacat

SEQ ID NO: 150440 - DNA, 33 bp, Homo sapien
tggggcttatagtagatggcaaaatacatacat

SEQ ID NO: 150441 - DNA, 33 bp, Homo sapien
cagctgttaaactctcgccaggcttttgtttca

SEQ ID NO: 150442 - DNA, 33 bp, Homo sapien
cagctgttaaactctctccaggcttttgtttca

SEQ ID NO: 150443 - DNA, 33 bp, Homo sapien
ttcagaaacccaaaagactccttatgtgaagaa

SEQ ID NO: 150444 - DNA, 33 bp, Homo sapien
ttcagaaacccaaaaggctccttatgtgaagaa

SEQ ID NO: 150445 - DNA, 33 bp, Homo sapien
tggaagaagtaaaacaagagatatatgtaatgc

SEQ ID NO: 150446 - DNA, 33 bp, Homo sapien
tggaagaagtaaaacaggagatatatgtaatgc

SEQ ID NO: 150447 - DNA, 33 bp, Homo sapien
cttgcggaaacaacctcaaattccttctcctaa

SEQ ID NO: 150448 - DNA, 33 bp, Homo sapien
cttgcggaaacaacctgaaattccttctcctaa

SEQ ID NO: 150449 - DNA, 33 bp, Homo sapien
tcattaaatctatatcaaaggagttgacaacac

SEQ ID NO: 150450 - DNA, 33 bp, Homo sapien
tcattaaatctatatcgaaggagttgacaacac

SEQ ID NO: 150451 - DNA, 33 bp, Homo sapien
ccaaaaagtctactgactcaatgtttcagctga

SEQ ID NO: 150452 - DNA, 33 bp, Homo sapien
ccaaaaagtctactgattcaatgtttcagctga

SEQ ID NO: 150453 - DNA, 33 bp, Homo sapien
acgtgaaatcacttcagagagaccttcctgtat

SEQ ID NO: 150454 - DNA, 33 bp, Homo sapien
acgtgaaatcacttcatagagaccttcctgtat

SEQ ID NO: 150455 - DNA, 33 bp, Homo sapien
gtgtgataactaacgaagcttaaacttggcccc

SEQ ID NO: 150456 - DNA, 33 bp, Homo sapien
gtgtgataactaacgaggcttaaacttggcccc

SEQ ID NO: 150457 - DNA, 33 bp, Homo sapien
ctttccctattgacaacgttcattcagcctctg

SEQ ID NO: 150458 - DNA, 33 bp, Homo sapien
ctttccctattgacaatgttcattcagcctctg

SEQ ID NO: 150459 - DNA, 33 bp, Homo sapien
agagaaagtaatagaaacagaaagttgagtgat

SEQ ID NO: 150460 - DNA, 33 bp, Homo sapien
agagaaagtaatagaaccagaaagttgagtgat

SEQ ID NO: 150461 - DNA, 33 bp, Homo sapien
tgctcaagccagtttaaactaaaccctgagtcc

SEQ ID NO: 150462 - DNA, 33 bp, Homo sapien
tgctcaagccagtttagactaaaccctgagtcc

SEQ ID NO: 150463 - DNA, 33 bp, Homo sapien
ctacagagggtgaaccggcacattaagacccaa

SEQ ID NO: 150464 - DNA, 33 bp, Homo sapien
ctacagagggtgaacctgcacattaagacccaa

SEQ ID NO: 150465 - DNA, 33 bp, Homo sapien
cccaggcaccatttccccaggatgcagggcatg

SEQ ID NO: 150466 - DNA, 33 bp, Homo sapien
cccaggcaccatttccgcaggatgcagggcatg

SEQ ID NO: 150467 - DNA, 33 bp, Homo sapien
caagtcctgtggagcacagcgtgacagcagctg

SEQ ID NO: 150468 - DNA, 33 bp, Homo sapien
caagtcctgtggagcagagcgtgacagcagctg

SEQ ID NO: 150469 - DNA, 33 bp, Homo sapien
agggaagattgacttcaagctgtttcaacaaaa

SEQ ID NO: 150470 - DNA, 33 bp, Homo sapien
agggaagattgacttcgagctgtttcaacaaaa

SEQ ID NO: 150471 - DNA, 33 bp, Homo sapien
gtatgcctccttagacagatggattaagaaaaa

SEQ ID NO: 150472 - DNA, 33 bp, Homo sapien
gtatgcctccttagacggatggattaagaaaaa

SEQ ID NO: 150473 - DNA, 33 bp, Homo sapien
catccaggtacattccgccctttcccatgttaa

SEQ ID NO: 150474 - DNA, 33 bp, Homo sapien
catccaggtacattcctccctttcccatgttaa

SEQ ID NO: 150475 - DNA, 33 bp, Homo sapien
aaaggccacctactgcaaaggcaccaggtctgg

SEQ ID NO: 150476 - DNA, 33 bp, Homo sapien
aaaggccacctactgcgaaggcaccaggtctgg

SEQ ID NO: 150477 - DNA, 33 bp, Homo sapien
ccaaagaagccaaataaaggaagaggagcatga

SEQ ID NO: 150478 - DNA, 33 bp, Homo sapien
ccaaagaagccaaatataggaagaggagcatga

SEQ ID NO: 150479 - DNA, 33 bp, Homo sapien
tggaacagcctctttgaaaaacaagtctgcatt

SEQ ID NO: 150480 - DNA, 33 bp, Homo sapien
tggaacagcctctttggaaaacaagtctgcatt

SEQ ID NO: 150481 - DNA, 33 bp, Homo sapien
tgatttctgacctccacatgttcgtttctacac

SEQ ID NO: 150482 - DNA, 33 bp, Homo sapien
tgatttctgacctccatatgttcgtttctacac

SEQ ID NO: 150483 - DNA, 33 bp, Homo sapien
ccttaccaccctggtccgaaagagcctccaggc

SEQ ID NO: 150484 - DNA, 33 bp, Homo sapien
ccttaccaccctggtctgaaagagcctccaggc

SEQ ID NO: 150485 - DNA, 33 bp, Homo sapien
tctcactccttttctacgtggaatttagcacaa

SEQ ID NO: 150486 - DNA, 33 bp, Homo sapien
tctcactccttttctatgtggaatttagcacaa

SEQ ID NO: 150487 - DNA, 33 bp, Homo sapien
agacactgagacgtcaggagcttcatctgtacc

SEQ ID NO: 150488 - DNA, 33 bp, Homo sapien
agacactgagacgtcatgagcttcatctgtacc

SEQ ID NO: 150489 - DNA, 33 bp, Homo sapien
cacagtttcatcaaccaatcagtacataaactt

SEQ ID NO: 150490 - DNA, 33 bp, Homo sapien
cacagtttcatcaacccatcagtacataaactt

SEQ ID NO: 150491 - DNA, 33 bp, Homo sapien
aaaacctggaaggaaaaatcccttgttgcagca

SEQ ID NO: 150492 - DNA, 33 bp, Homo sapien
aaaacctggaaggaaagatcccttgttgcagca

SEQ ID NO: 150493 - DNA, 33 bp, Homo sapien
ataccaccacctcctaggaatgatgcttaggga

SEQ ID NO: 150494 - DNA, 33 bp, Homo sapien
ataccaccacctcctatgaatgatgcttaggga

SEQ ID NO: 150495 - DNA, 33 bp, Homo sapien
aggagttgtcttcttgcagctaaatgatgagtt

SEQ ID NO: 150496 - DNA, 33 bp, Homo sapien
aggagttgtcttcttgtagctaaatgatgagtt

SEQ ID NO: 150497 - DNA, 33 bp, Homo sapien
gtttgattttgttgtaggtgctttgcattcatt

SEQ ID NO: 150498 - DNA, 33 bp, Homo sapien
gtttgattttgttgtatgtgctttgcattcatt

SEQ ID NO: 150499 - DNA, 33 bp, Homo sapien
atgcatagatatgccacaacagacattcgggct

SEQ ID NO: 150500 - DNA, 33 bp, Homo sapien
atgcatagatatgccagaacagacattcgggct

SEQ ID NO: 150501 - DNA, 33 bp, Homo sapien
tgccaggacacacatcaaggtgtatgcatagat

SEQ ID NO: 150502 - DNA, 33 bp, Homo sapien
tgccaggacacacatccaggtgtatgcatagat

SEQ ID NO: 150503 - DNA, 33 bp, Homo sapien
gaggagacatccagtcacagttagttacaccct

SEQ ID NO: 150504 - DNA, 33 bp, Homo sapien
gaggagacatccagtcgcagttagttacaccct

SEQ ID NO: 150505 - DNA, 33 bp, Homo sapien
gctttaaagagtcaaaatatcagagaacgttta

SEQ ID NO: 150506 - DNA, 33 bp, Homo sapien
gctttaaagagtcaaagtatcagagaacgttta

SEQ ID NO: 150507 - DNA, 33 bp, Homo sapien
tctgaagtggggataaaagttccaagacctatg

SEQ ID NO: 150508 - DNA, 33 bp, Homo sapien
tctgaagtggggataagagttccaagacctatg

SEQ ID NO: 150509 - DNA, 33 bp, Homo sapien
tgggaaaggtcttcaacgactgtactctgatga

SEQ ID NO: 150510 - DNA, 33 bp, Homo sapien
tgggaaaggtcttcaatgactgtactctgatga

SEQ ID NO: 150511 - DNA, 33 bp, Homo sapien
gaatgtaactagagagcccgtgagcctggatca

SEQ ID NO: 150512 - DNA, 33 bp, Homo sapien
gaatgtaactagagagtccgtgagcctggatca

SEQ ID NO: 150513 - DNA, 33 bp, Homo sapien
aactatcatccttttccactcttgggaaggctt

SEQ ID NO: 150514 - DNA, 33 bp, Homo sapien
aactatcatccttttctactcttgggaaggctt

SEQ ID NO: 150515 - DNA, 33 bp, Homo sapien
acaaggttatctggacggaaacaccaccacaca

SEQ ID NO: 150516 - DNA, 33 bp, Homo sapien
acaaggttatctggactgaaacaccaccacaca

SEQ ID NO: 150517 - DNA, 33 bp, Homo sapien
ccctcacatgcagaaaagcactcaagaatccag

SEQ ID NO: 150518 - DNA, 33 bp, Homo sapien
ccctcacatgcagaaaggcactcaagaatccag

SEQ ID NO: 150519 - DNA, 33 bp, Homo sapien
actccattctattaccagggaagggagctcatc

SEQ ID NO: 150520 - DNA, 33 bp, Homo sapien
actccattctattaccggggaagggagctcatc

SEQ ID NO: 150521 - DNA, 33 bp, Homo sapien
gaaggaagcccccataacacagactgcccacca

SEQ ID NO: 150522 - DNA, 33 bp, Homo sapien
gaaggaagcccccatatcacagactgcccacca

SEQ ID NO: 150523 - DNA, 33 bp, Homo sapien
gaaataccttccaaaacgactgcacgtcaatga

SEQ ID NO: 150524 - DNA, 33 bp, Homo sapien
gaaataccttccaaaatgactgcacgtcaatga

SEQ ID NO: 150525 - DNA, 33 bp, Homo sapien
ttgtggaaggaagccaaattctgtgagtagatg

SEQ ID NO: 150526 - DNA, 33 bp, Homo sapien
ttgtggaaggaagccagattctgtgagtagatg

SEQ ID NO: 150527 - DNA, 33 bp, Homo sapien
ttccacggaggatctaacccgtctcttggtatc

SEQ ID NO: 150528 - DNA, 33 bp, Homo sapien
ttccacggaggatctaccccgtctcttggtatc

SEQ ID NO: 150529 - DNA, 33 bp, Homo sapien
ctctgctggcctcttacgtccctctaccttgcc

SEQ ID NO: 150530 - DNA, 33 bp, Homo sapien
ctctgctggcctcttatgtccctctaccttgcc

SEQ ID NO: 150531 - DNA, 33 bp, Homo sapien
cacccaaaccacatgaaggaagaacaagtgaga

SEQ ID NO: 150532 - DNA, 33 bp, Homo sapien
cacccaaaccacatgagggaagaacaagtgaga

SEQ ID NO: 150533 - DNA, 33 bp, Homo sapien
gtgacatttgagatgagggaaactagatcgtct

SEQ ID NO: 150534 - DNA, 33 bp, Homo sapien
gtgacatttgagatgatggaaactagatcgtct

SEQ ID NO: 150535 - DNA, 33 bp, Homo sapien
ttattaccggtggctactacaaacctacagacc

SEQ ID NO: 150536 - DNA, 33 bp, Homo sapien
ttattaccggtggctattacaaacctacagacc

SEQ ID NO: 150537 - DNA, 33 bp, Homo sapien
ttcaccccaaatcctacggcaagctttgacaat

SEQ ID NO: 150538 - DNA, 33 bp, Homo sapien
ttcaccccaaatcctatggcaagctttgacaat

SEQ ID NO: 150539 - DNA, 33 bp, Homo sapien
cagtctaggcattgtgaaaactggctgtgttcc

SEQ ID NO: 150540 - DNA, 33 bp, Homo sapien
cagtctaggcattgtggaaactggctgtgttcc

SEQ ID NO: 150541 - DNA, 33 bp, Homo sapien
gttaagtcttataccacgtgtttttgcagtact

SEQ ID NO: 150542 - DNA, 33 bp, Homo sapien
gttaagtcttataccatgtgtttttgcagtact

SEQ ID NO: 150543 - DNA, 33 bp, Homo sapien
ctatttatccaaacaactgaaatggcttgcaag

SEQ ID NO: 150544 - DNA, 33 bp, Homo sapien
ctatttatccaaacaattgaaatggcttgcaag

SEQ ID NO: 150545 - DNA, 33 bp, Homo sapien
tttatatattatacctcaataatgaagctgatt

SEQ ID NO: 150546 - DNA, 33 bp, Homo sapien
tttatatattatacctgaataatgaagctgatt

SEQ ID NO: 150547 - DNA, 33 bp, Homo sapien
ctgatttctgtccttaagattttggtcctctct

SEQ ID NO: 150548 - DNA, 33 bp, Homo sapien
ctgatttctgtccttacgattttggtcctctct

SEQ ID NO: 150549 - DNA, 33 bp, Homo sapien
acaaatgccacagaaaatgaggttaaaggacac

SEQ ID NO: 150550 - DNA, 33 bp, Homo sapien
acaaatgccacagaaactgaggttaaaggacac

SEQ ID NO: 150551 - DNA, 33 bp, Homo sapien
ggggaggtgttacatcaattttcttgcattttt

SEQ ID NO: 150552 - DNA, 33 bp, Homo sapien
ggggaggtgttacatcgattttcttgcattttt

SEQ ID NO: 150553 - DNA, 33 bp, Homo sapien
tgaatggttcccaataacaaaaggctggaagaa

SEQ ID NO: 150554 - DNA, 33 bp, Homo sapien
tgaatggttcccaataccaaaaggctggaagaa

SEQ ID NO: 150555 - DNA, 33 bp, Homo sapien
aattaggatttagtcacgttcccttttacagaa

SEQ ID NO: 150556 - DNA, 33 bp, Homo sapien
aattaggatttagtcatgttcccttttacagaa

SEQ ID NO: 150557 - DNA, 33 bp, Homo sapien
agtcagttactggttaagattatggctgtgcct

SEQ ID NO: 150558 - DNA, 33 bp, Homo sapien
agtcagttactggttaggattatggctgtgcct

SEQ ID NO: 150559 - DNA, 33 bp, Homo sapien
tgcttctacttttctacctgtctcactttgttg

SEQ ID NO: 150560 - DNA, 33 bp, Homo sapien
tgcttctacttttctatctgtctcactttgttg

SEQ ID NO: 150561 - DNA, 33 bp, Homo sapien
gcacacagctaagaaacggtaagcagatacatt

SEQ ID NO: 150562 - DNA, 33 bp, Homo sapien
gcacacagctaagaaatggtaagcagatacatt

SEQ ID NO: 150563 - DNA, 33 bp, Homo sapien
catgtaataaccatacaacctagaaattccacg

SEQ ID NO: 150564 - DNA, 33 bp, Homo sapien
catgtaataaccatacgacctagaaattccacg

SEQ ID NO: 150565 - DNA, 33 bp, Homo sapien
gcactcagcctaaaaccgtatgttctctctaga

SEQ ID NO: 150566 - DNA, 33 bp, Homo sapien
gcactcagcctaaaactgtatgttctctctaga

SEQ ID NO: 150567 - DNA, 33 bp, Homo sapien
tggaacttcaaattcaactagtcaaaatctgaa

SEQ ID NO: 150568 - DNA, 33 bp, Homo sapien
tggaacttcaaattcagctagtcaaaatctgaa

SEQ ID NO: 150569 - DNA, 33 bp, Homo sapien
gcctggccaggagctacggtttttaaaggaaga

SEQ ID NO: 150570 - DNA, 33 bp, Homo sapien
gcctggccaggagctatggtttttaaaggaaga

SEQ ID NO: 150571 - DNA, 33 bp, Homo sapien
gtcagaaatggagtcaaagtaaaatatgaagtg

SEQ ID NO: 150572 - DNA, 33 bp, Homo sapien
gtcagaaatggagtcagagtaaaatatgaagtg

SEQ ID NO: 150573 - DNA, 33 bp, Homo sapien
aggggcagtgtgcaaactgatgaccttgggggc

SEQ ID NO: 150574 - DNA, 33 bp, Homo sapien
aggggcagtgtgcaaattgatgaccttgggggc

SEQ ID NO: 150575 - DNA, 33 bp, Homo sapien
ttggccaccatctaaagtccaagcccccaaggt

SEQ ID NO: 150576 - DNA, 33 bp, Homo sapien
ttggccaccatctaaattccaagcccccaaggt

SEQ ID NO: 150577 - DNA, 33 bp, Homo sapien
tcagctcagagaaaagaagatggagtgggttca

SEQ ID NO: 150578 - DNA, 33 bp, Homo sapien
tcagctcagagaaaaggagatggagtgggttca

SEQ ID NO: 150579 - DNA, 33 bp, Homo sapien
tcctttaccaagaaaacgaaggcaatgagaaat

SEQ ID NO: 150580 - DNA, 33 bp, Homo sapien
tcctttaccaagaaaatgaaggcaatgagaaat

SEQ ID NO: 150581 - DNA, 33 bp, Homo sapien
ttcctctttgctgtccaaaagaactggcagaca

SEQ ID NO: 150582 - DNA, 33 bp, Homo sapien
ttcctctttgctgtccgaaagaactggcagaca

SEQ ID NO: 150583 - DNA, 33 bp, Homo sapien
gaagacaggcccatgaagagctgaagaaagaag

SEQ ID NO: 150584 - DNA, 33 bp, Homo sapien
gaagacaggcccatgaggagctgaagaaagaag

SEQ ID NO: 150585 - DNA, 33 bp, Homo sapien
ggcggaaaccccaaacaggtgtctcggtgagtg

SEQ ID NO: 150586 - DNA, 33 bp, Homo sapien
ggcggaaaccccaaacgggtgtctcggtgagtg

SEQ ID NO: 150587 - DNA, 33 bp, Homo sapien
agaagctagagcctagaaaagaatcacaaaaaa

SEQ ID NO: 150588 - DNA, 33 bp, Homo sapien
agaagctagagcctaggaaagaatcacaaaaaa

SEQ ID NO: 150589 - DNA, 33 bp, Homo sapien
gtaacaaagttgtggccaaaccaacatgacttt

SEQ ID NO: 150590 - DNA, 33 bp, Homo sapien
gtaacaaagttgtggcgaaaccaacatgacttt

SEQ ID NO: 150591 - DNA, 33 bp, Homo sapien
cctgccatgtcttgaaactgactgggtcattca

SEQ ID NO: 150592 - DNA, 33 bp, Homo sapien
cctgccatgtcttgaacctgactgggtcattca

SEQ ID NO: 150593 - DNA, 33 bp, Homo sapien
atagatttttaggtcaaagaacatgtcttaata

SEQ ID NO: 150594 - DNA, 33 bp, Homo sapien
atagatttttaggtcagagaacatgtcttaata

SEQ ID NO: 150595 - DNA, 33 bp, Homo sapien
aagacttcatcttggcagagggaaaaggcttcc

SEQ ID NO: 150596 - DNA, 33 bp, Homo sapien
aagacttcatcttggcggagggaaaaggcttcc

SEQ ID NO: 150597 - DNA, 33 bp, Homo sapien
cttgcctttgcataaccggaagattcttggaag

SEQ ID NO: 150598 - DNA, 33 bp, Homo sapien
cttgcctttgcataactggaagattcttggaag

SEQ ID NO: 150599 - DNA, 33 bp, Homo sapien
ctctgtccagatgtaccgctgggccttgccttt

SEQ ID NO: 150600 - DNA, 33 bp, Homo sapien
ctctgtccagatgtactgctgggccttgccttt

SEQ ID NO: 150601 - DNA, 33 bp, Homo sapien
ctcagagaggtgaggaaattataaacttcagct

SEQ ID NO: 150602 - DNA, 33 bp, Homo sapien
ctcagagaggtgaggatattataaacttcagct

SEQ ID NO: 150603 - DNA, 33 bp, Homo sapien
acaggcaagcaaggaaagggataagctttagaa

SEQ ID NO: 150604 - DNA, 33 bp, Homo sapien
acaggcaagcaaggaaggggataagctttagaa

SEQ ID NO: 150605 - DNA, 33 bp, Homo sapien
agcagagcctattatacggtagacttcagcaaa

SEQ ID NO: 150606 - DNA, 33 bp, Homo sapien
agcagagcctattatatggtagacttcagcaaa

SEQ ID NO: 150607 - DNA, 33 bp, Homo sapien
ctttgtataacccagacgctgttatcttcattc

SEQ ID NO: 150608 - DNA, 33 bp, Homo sapien
ctttgtataacccagatgctgttatcttcattc

SEQ ID NO: 150609 - DNA, 33 bp, Homo sapien
gctaacccaaggtcaaaatatattcctatccct

SEQ ID NO: 150610 - DNA, 33 bp, Homo sapien
gctaacccaaggtcaagatatattcctatccct

SEQ ID NO: 150611 - DNA, 33 bp, Homo sapien
tgatcgtaaaacttgacaagacatgaaaactac

SEQ ID NO: 150612 - DNA, 33 bp, Homo sapien
tgatcgtaaaacttgataagacatgaaaactac

SEQ ID NO: 150613 - DNA, 33 bp, Homo sapien
ctgctgcatttattcccgacttgcttcttctca

SEQ ID NO: 150614 - DNA, 33 bp, Homo sapien
ctgctgcatttattcctgacttgcttcttctca

SEQ ID NO: 150615 - DNA, 33 bp, Homo sapien
acagaggtagatgtaaaggatcagtggaaggat

SEQ ID NO: 150616 - DNA, 33 bp, Homo sapien
acagaggtagatgtaatggatcagtggaaggat

SEQ ID NO: 150617 - DNA, 33 bp, Homo sapien
gattgctggtgactccaacagtccgcaccagtc

SEQ ID NO: 150618 - DNA, 33 bp, Homo sapien
gattgctggtgactccgacagtccgcaccagtc

SEQ ID NO: 150619 - DNA, 33 bp, Homo sapien
aaaccctggccatgaacggtctctgacagcttt

SEQ ID NO: 150620 - DNA, 33 bp, Homo sapien
aaaccctggccatgaatggtctctgacagcttt

SEQ ID NO: 150621 - DNA, 33 bp, Homo sapien
tgggctgtgcagtccagcttcaggccaaggagt

SEQ ID NO: 150622 - DNA, 33 bp, Homo sapien
tgggctgtgcagtccatcttcaggccaaggagt

SEQ ID NO: 150623 - DNA, 33 bp, Homo sapien
ctggttggaggaagggaagatttgtgcacagct

SEQ ID NO: 150624 - DNA, 33 bp, Homo sapien
ctggttggaggaaggggagatttgtgcacagct

SEQ ID NO: 150625 - DNA, 33 bp, Homo sapien
tgcacagctatggttcaatgccggcccacattc

SEQ ID NO: 150626 - DNA, 33 bp, Homo sapien
tgcacagctatggttcgatgccggcccacattc

SEQ ID NO: 150627 - DNA, 33 bp, Homo sapien
ggggcttgcaaaccccgcctgcctgagtttcac

SEQ ID NO: 150628 - DNA, 33 bp, Homo sapien
ggggcttgcaaacccctcctgcctgagtttcac

SEQ ID NO: 150629 - DNA, 33 bp, Homo sapien
gaattcattgttgtgcaacctagagtggtgaga

SEQ ID NO: 150630 - DNA, 33 bp, Homo sapien
gaattcattgttgtgcgacctagagtggtgaga

SEQ ID NO: 150631 - DNA, 33 bp, Homo sapien
actgaacttgggattcaaaggtgccattgagct

SEQ ID NO: 150632 - DNA, 33 bp, Homo sapien
actgaacttgggattcgaaggtgccattgagct

SEQ ID NO: 150633 - DNA, 33 bp, Homo sapien
tttcagcaataagcctaagaaatgtagtctcct

SEQ ID NO: 150634 - DNA, 33 bp, Homo sapien
tttcagcaataagcctgagaaatgtagtctcct

SEQ ID NO: 150635 - DNA, 33 bp, Homo sapien
agggcctacactaccccacctcttctcacaagc

SEQ ID NO: 150636 - DNA, 33 bp, Homo sapien
agggcctacactacccgacctcttctcacaagc

SEQ ID NO: 150637 - DNA, 33 bp, Homo sapien
tgggcatggtgctctcccccttcaaaggcagcc

SEQ ID NO: 150638 - DNA, 33 bp, Homo sapien
tgggcatggtgctctctcccttcaaaggcagcc

SEQ ID NO: 150639 - DNA, 33 bp, Homo sapien
aggcagcaagtctagacctatccagccacccat

SEQ ID NO: 150640 - DNA, 33 bp, Homo sapien
aggcagcaagtctagatctatccagccacccat

SEQ ID NO: 150641 - DNA, 33 bp, Homo sapien
gactgcgagctctggacgaaactgaagggaggc

SEQ ID NO: 150642 - DNA, 33 bp, Homo sapien
gactgcgagctctggaggaaactgaagggaggc

SEQ ID NO: 150643 - DNA, 33 bp, Homo sapien
ttctttttcagctttacagatggacctctcctc

SEQ ID NO: 150644 - DNA, 33 bp, Homo sapien
ttctttttcagctttatagatggacctctcctc

SEQ ID NO: 150645 - DNA, 33 bp, Homo sapien
agctgcacatacagccacttccccttcctgccc

SEQ ID NO: 150646 - DNA, 33 bp, Homo sapien
agctgcacatacagccgcttccccttcctgccc

SEQ ID NO: 150647 - DNA, 33 bp, Homo sapien
tccccagcctgtccagcctaaacaatatggtgc

SEQ ID NO: 150648 - DNA, 33 bp, Homo sapien
tccccagcctgtccagtctaaacaatatggtgc

SEQ ID NO: 150649 - DNA, 33 bp, Homo sapien
cagtctcttggaagaactcacagctctggctga

SEQ ID NO: 150650 - DNA, 33 bp, Homo sapien
cagtctcttggaagaagtcacagctctggctga

SEQ ID NO: 150651 - DNA, 33 bp, Homo sapien
tctacttgtctcttcacgctggcttagaagaaa

SEQ ID NO: 150652 - DNA, 33 bp, Homo sapien
tctacttgtctcttcatgctggcttagaagaaa

SEQ ID NO: 150653 - DNA, 33 bp, Homo sapien
aaaaatagaattaggcaacaaaacactattgga

SEQ ID NO: 150654 - DNA, 33 bp, Homo sapien
aaaaatagaattaggcgacaaaacactattgga

SEQ ID NO: 150655 - DNA, 33 bp, Homo sapien
tccttctgagctgttgaaggccactagccccac

SEQ ID NO: 150656 - DNA, 33 bp, Homo sapien
tccttctgagctgttggaggccactagccccac

SEQ ID NO: 150657 - DNA, 33 bp, Homo sapien
agatgcgagaaggtagccaggaaactaatgcaa

SEQ ID NO: 150658 - DNA, 33 bp, Homo sapien
agatgcgagaaggtaggcaggaaactaatgcaa

SEQ ID NO: 150659 - DNA, 33 bp, Homo sapien
tcctggctctcccccaaatatgccaagtatcct

SEQ ID NO: 150660 - DNA, 33 bp, Homo sapien
tcctggctctcccccagatatgccaagtatcct

SEQ ID NO: 150661 - DNA, 33 bp, Homo sapien
cctggaggtgcattcactcagatacagtctcca

SEQ ID NO: 150662 - DNA, 33 bp, Homo sapien
cctggaggtgcattcattcagatacagtctcca

SEQ ID NO: 150663 - DNA, 33 bp, Homo sapien
caacatgtcttcttaaatgggaatcggtgtcct

SEQ ID NO: 150664 - DNA, 33 bp, Homo sapien
caacatgtcttcttaactgggaatcggtgtcct

SEQ ID NO: 150665 - DNA, 33 bp, Homo sapien
gggaacaggtttgagacgggtgcatcacggttt

SEQ ID NO: 150666 - DNA, 33 bp, Homo sapien
gggaacaggtttgagatgggtgcatcacggttt

SEQ ID NO: 150667 - DNA, 33 bp, Homo sapien
aatatgcataggaataaccctcacccaatccac

SEQ ID NO: 150668 - DNA, 33 bp, Homo sapien
aatatgcataggaatagccctcacccaatccac

SEQ ID NO: 150669 - DNA, 33 bp, Homo sapien
cgtggacctgagaagacatagtcattgcaaacc

SEQ ID NO: 150670 - DNA, 33 bp, Homo sapien
cgtggacctgagaagatatagtcattgcaaacc

SEQ ID NO: 150671 - DNA, 33 bp, Homo sapien
cagctatatctaggaacgaagtcctctttagtt

SEQ ID NO: 150672 - DNA, 33 bp, Homo sapien
cagctatatctaggaatgaagtcctctttagtt

SEQ ID NO: 150673 - DNA, 33 bp, Homo sapien
acaaaggaagcgttaacagataataaaaatttg

SEQ ID NO: 150674 - DNA, 33 bp, Homo sapien
acaaaggaagcgttaagagataataaaaatttg

SEQ ID NO: 150675 - DNA, 33 bp, Homo sapien
actgtcacccagattaaaaaacagtacattttg

SEQ ID NO: 150676 - DNA, 33 bp, Homo sapien
actgtcacccagattagaaaacagtacattttg

SEQ ID NO: 150677 - DNA, 33 bp, Homo sapien
aaaggggtatacataaagtttctgagatcctgg

SEQ ID NO: 150678 - DNA, 33 bp, Homo sapien
aaaggggtatacataaggtttctgagatcctgg

SEQ ID NO: 150679 - DNA, 33 bp, Homo sapien
tatgttaatggaatcgcattttctatcctctgc

SEQ ID NO: 150680 - DNA, 33 bp, Homo sapien
tatgttaatggaatcgtattttctatcctctgc

SEQ ID NO: 150681 - DNA, 33 bp, Homo sapien
cactaatggctttggaaacattatgtggtttgt

SEQ ID NO: 150682 - DNA, 33 bp, Homo sapien
cactaatggctttggagacattatgtggtttgt

SEQ ID NO: 150683 - DNA, 33 bp, Homo sapien
tcatccaaagggttaaatgataaactgttggtg

SEQ ID NO: 150684 - DNA, 33 bp, Homo sapien
tcatccaaagggttaagtgataaactgttggtg

SEQ ID NO: 150685 - DNA, 33 bp, Homo sapien
gccacacattacactacctggaaaatgtgggtc

SEQ ID NO: 150686 - DNA, 33 bp, Homo sapien
gccacacattacactatctggaaaatgtgggtc

SEQ ID NO: 150687 - DNA, 33 bp, Homo sapien
catttaagcctgtcccggcacgaatccagagcc

SEQ ID NO: 150688 - DNA, 33 bp, Homo sapien
catttaagcctgtccctgcacgaatccagagcc

SEQ ID NO: 150689 - DNA, 33 bp, Homo sapien
aacttgggaagtgatacggagagagatgacctt

SEQ ID NO: 150690 - DNA, 33 bp, Homo sapien
aacttgggaagtgatatggagagagatgacctt

SEQ ID NO: 150691 - DNA, 33 bp, Homo sapien
atcctgaaggaagccaatgagtggggaagatga

SEQ ID NO: 150692 - DNA, 33 bp, Homo sapien
atcctgaaggaagccactgagtggggaagatga

SEQ ID NO: 150693 - DNA, 33 bp, Homo sapien
cctccccttcctttaacgaactgagtgactttc

SEQ ID NO: 150694 - DNA, 33 bp, Homo sapien
cctccccttcctttaatgaactgagtgactttc

SEQ ID NO: 150695 - DNA, 33 bp, Homo sapien
ggagccctataggaaacgatcgtatgtggttta

SEQ ID NO: 150696 - DNA, 33 bp, Homo sapien
ggagccctataggaaatgatcgtatgtggttta

SEQ ID NO: 150697 - DNA, 33 bp, Homo sapien
ggagctgatattcaaacgcagacagcctggttc

SEQ ID NO: 150698 - DNA, 33 bp, Homo sapien
ggagctgatattcaaatgcagacagcctggttc

SEQ ID NO: 150699 - DNA, 33 bp, Homo sapien
tgaaaccctccatagcactcgtttctctcggct

SEQ ID NO: 150700 - DNA, 33 bp, Homo sapien
tgaaaccctccatagcgctcgtttctctcggct

SEQ ID NO: 150701 - DNA, 33 bp, Homo sapien
agagaggcagactcaacgtgcagacttccaaaa

SEQ ID NO: 150702 - DNA, 33 bp, Homo sapien
agagaggcagactcaatgtgcagacttccaaaa

SEQ ID NO: 150703 - DNA, 33 bp, Homo sapien
aaatatcctatcctaaagtacagtcctaagggc

SEQ ID NO: 150704 - DNA, 33 bp, Homo sapien
aaatatcctatcctaaggtacagtcctaagggc

SEQ ID NO: 150705 - DNA, 33 bp, Homo sapien
atatctcatagtcagaacatgaatgtacaatga

SEQ ID NO: 150706 - DNA, 33 bp, Homo sapien
atatctcatagtcagagcatgaatgtacaatga

SEQ ID NO: 150707 - DNA, 33 bp, Homo sapien
cttcacagcaaccctacgaagtgggcactatca

SEQ ID NO: 150708 - DNA, 33 bp, Homo sapien
cttcacagcaaccctatgaagtgggcactatca

SEQ ID NO: 150709 - DNA, 33 bp, Homo sapien
cccagttcgaccttgaaggcacaggccaaggac

SEQ ID NO: 150710 - DNA, 33 bp, Homo sapien
cccagttcgaccttgatggcacaggccaaggac

SEQ ID NO: 150711 - DNA, 33 bp, Homo sapien
ctctcctggctaggaccccttgtattagtccat

SEQ ID NO: 150712 - DNA, 33 bp, Homo sapien
ctctcctggctaggactccttgtattagtccat

SEQ ID NO: 150713 - DNA, 33 bp, Homo sapien
ctttagcagtcactgaaagtccaccacaaggac

SEQ ID NO: 150714 - DNA, 33 bp, Homo sapien
ctttagcagtcactgagagtccaccacaaggac

SEQ ID NO: 150715 - DNA, 33 bp, Homo sapien
ctgataggaaaataacaatgcttcagggacaca

SEQ ID NO: 150716 - DNA, 33 bp, Homo sapien
ctgataggaaaataaccatgcttcagggacaca

SEQ ID NO: 150717 - DNA, 33 bp, Homo sapien
taacagggattcgtggacaatctagtttgagtt

SEQ ID NO: 150718 - DNA, 33 bp, Homo sapien
taacagggattcgtgggcaatctagtttgagtt

SEQ ID NO: 150719 - DNA, 33 bp, Homo sapien
ccaaaattgaagtcagacctccaagtgtggccc

SEQ ID NO: 150720 - DNA, 33 bp, Homo sapien
ccaaaattgaagtcaggcctccaagtgtggccc

SEQ ID NO: 150721 - DNA, 33 bp, Homo sapien
gcatttaagtttaccacctgtctttggctgcaa

SEQ ID NO: 150722 - DNA, 33 bp, Homo sapien
gcatttaagtttaccatctgtctttggctgcaa

SEQ ID NO: 150723 - DNA, 33 bp, Homo sapien
taataaacttgccatacgtattacagcagaagt

SEQ ID NO: 150724 - DNA, 33 bp, Homo sapien
taataaacttgccataggtattacagcagaagt

SEQ ID NO: 150725 - DNA, 33 bp, Homo sapien
atctttattcctgctcaatagaatattagttgt

SEQ ID NO: 150726 - DNA, 33 bp, Homo sapien
atctttattcctgctcgatagaatattagttgt

SEQ ID NO: 150727 - DNA, 33 bp, Homo sapien
cctttgtacagtcttacgggagctcatcacctt

SEQ ID NO: 150728 - DNA, 33 bp, Homo sapien
cctttgtacagtcttatgggagctcatcacctt

SEQ ID NO: 150729 - DNA, 33 bp, Homo sapien
acaatactataacaacgaggttttcagtcaagg

SEQ ID NO: 150730 - DNA, 33 bp, Homo sapien
acaatactataacaactaggttttcagtcaagg

SEQ ID NO: 150731 - DNA, 33 bp, Homo sapien
tggtttagaatacactaagtagaaggctcagct

SEQ ID NO: 150732 - DNA, 33 bp, Homo sapien
tggtttagaatacactgagtagaaggctcagct

SEQ ID NO: 150733 - DNA, 33 bp, Homo sapien
aagcatatttgaagcagaaagacatggaaatat

SEQ ID NO: 150734 - DNA, 33 bp, Homo sapien
aagcatatttgaagcataaagacatggaaatat

SEQ ID NO: 150735 - DNA, 33 bp, Homo sapien
acacacacacttttataactactaaaagcaaat

SEQ ID NO: 150736 - DNA, 33 bp, Homo sapien
acacacacacttttatgactactaaaagcaaat

SEQ ID NO: 150737 - DNA, 33 bp, Homo sapien
taaaaaagtagaacaaccagtatggattacagc

SEQ ID NO: 150738 - DNA, 33 bp, Homo sapien
taaaaaagtagaacaagcagtatggattacagc

SEQ ID NO: 150739 - DNA, 33 bp, Homo sapien
aatgagacaattgatacaaagcatctgtctcat

SEQ ID NO: 150740 - DNA, 33 bp, Homo sapien
aatgagacaattgatataaagcatctgtctcat

SEQ ID NO: 150741 - DNA, 33 bp, Homo sapien
ccaggcaggccaggaaataacagtgcagagccg

SEQ ID NO: 150742 - DNA, 33 bp, Homo sapien
ccaggcaggccaggaagtaacagtgcagagccg

SEQ ID NO: 150743 - DNA, 33 bp, Homo sapien
tttttcacaatgaacacattttgcttttataaa

SEQ ID NO: 150744 - DNA, 33 bp, Homo sapien
tttttcacaatgaacatattttgcttttataaa

SEQ ID NO: 150745 - DNA, 33 bp, Homo sapien
catgtttacaaagcctaaagaagggcccagtga

SEQ ID NO: 150746 - DNA, 33 bp, Homo sapien
catgtttacaaagcctgaagaagggcccagtga

SEQ ID NO: 150747 - DNA, 33 bp, Homo sapien
tggacataaatggcaacgtaaataggacatggt

SEQ ID NO: 150748 - DNA, 33 bp, Homo sapien
tggacataaatggcaatgtaaataggacatggt

SEQ ID NO: 150749 - DNA, 33 bp, Homo sapien
ggaccatattgtcaaaaccaagggcttctcctg

SEQ ID NO: 150750 - DNA, 33 bp, Homo sapien
ggaccatattgtcaaacccaagggcttctcctg

SEQ ID NO: 150751 - DNA, 33 bp, Homo sapien
catttattcctcagctatgacattctaaatgct

SEQ ID NO: 150752 - DNA, 33 bp, Homo sapien
catttattcctcagctgtgacattctaaatgct

SEQ ID NO: 150753 - DNA, 33 bp, Homo sapien
ggaaggaggtggtttcaatttgaaggcaagaaa

SEQ ID NO: 150754 - DNA, 33 bp, Homo sapien
ggaaggaggtggtttccatttgaaggcaagaaa

SEQ ID NO: 150755 - DNA, 33 bp, Homo sapien
aaaaagctgttgttgaagtgattatctggtggg

SEQ ID NO: 150756 - DNA, 33 bp, Homo sapien
aaaaagctgttgttgatgtgattatctggtggg

SEQ ID NO: 150757 - DNA, 33 bp, Homo sapien
tgtggagagcatcacacagtgtcctgaaatcga

SEQ ID NO: 150758 - DNA, 33 bp, Homo sapien
tgtggagagcatcacatagtgtcctgaaatcga

SEQ ID NO: 150759 - DNA, 33 bp, Homo sapien
ggaaatttactggtaagggaagaagagagggtc

SEQ ID NO: 150760 - DNA, 33 bp, Homo sapien
ggaaatttactggtaatggaagaagagagggtc

SEQ ID NO: 150761 - DNA, 33 bp, Homo sapien
atatttacaaactctccatccacaaggaattca

SEQ ID NO: 150762 - DNA, 33 bp, Homo sapien
atatttacaaactctctatccacaaggaattca

SEQ ID NO: 150763 - DNA, 33 bp, Homo sapien
tttcatccatatttcactatactcttagattct

SEQ ID NO: 150764 - DNA, 33 bp, Homo sapien
tttcatccatatttcattatactcttagattct

SEQ ID NO: 150765 - DNA, 33 bp, Homo sapien
gtacttccttagtacaaaataattgccatccag

SEQ ID NO: 150766 - DNA, 33 bp, Homo sapien
gtacttccttagtacagaataattgccatccag

SEQ ID NO: 150767 - DNA, 33 bp, Homo sapien
ctaggcaaagacctaaagaaaagtatgtatagt

SEQ ID NO: 150768 - DNA, 33 bp, Homo sapien
ctaggcaaagacctaaggaaaagtatgtatagt

SEQ ID NO: 150769 - DNA, 33 bp, Homo sapien
gcaaagtgtatgaaaaatcatctaggcttttga

SEQ ID NO: 150770 - DNA, 33 bp, Homo sapien
gcaaagtgtatgaaaagtcatctaggcttttga

SEQ ID NO: 150771 - DNA, 33 bp, Homo sapien
ttttcccgtctttttaagccagctccccactca

SEQ ID NO: 150772 - DNA, 33 bp, Homo sapien
ttttcccgtctttttaggccagctccccactca

SEQ ID NO: 150773 - DNA, 33 bp, Homo sapien
cagctccctttactcacgtgtaagcaaagcaga

SEQ ID NO: 150774 - DNA, 33 bp, Homo sapien
cagctccctttactcatgtgtaagcaaagcaga

SEQ ID NO: 150775 - DNA, 33 bp, Homo sapien
aatggtacagaacaaaactgtagatgtatatct

SEQ ID NO: 150776 - DNA, 33 bp, Homo sapien
aatggtacagaacaaagctgtagatgtatatct

SEQ ID NO: 150777 - DNA, 33 bp, Homo sapien
agtatttagaagtcaaagtccttagtgtatgta

SEQ ID NO: 150778 - DNA, 33 bp, Homo sapien
agtatttagaagtcaaggtccttagtgtatgta

SEQ ID NO: 150779 - DNA, 33 bp, Homo sapien
catttaacattgatacaataatctcatctactc

SEQ ID NO: 150780 - DNA, 33 bp, Homo sapien
catttaacattgatacgataatctcatctactc

SEQ ID NO: 150781 - DNA, 33 bp, Homo sapien
tatattcttaatttgacattttccctgaagtac

SEQ ID NO: 150782 - DNA, 33 bp, Homo sapien
tatattcttaatttgatattttccctgaagtac

SEQ ID NO: 150783 - DNA, 33 bp, Homo sapien
atctgaacctaaacaactctctacatctaccaa

SEQ ID NO: 150784 - DNA, 33 bp, Homo sapien
atctgaacctaaacaagtctctacatctaccaa

SEQ ID NO: 150785 - DNA, 33 bp, Homo sapien
gctttatttttgctaacagatgaagttcaagga

SEQ ID NO: 150786 - DNA, 33 bp, Homo sapien
gctttatttttgctaagagatgaagttcaagga

SEQ ID NO: 150787 - DNA, 33 bp, Homo sapien
tcacaatcacagtgtgcagtaaccagcaccaaa

SEQ ID NO: 150788 - DNA, 33 bp, Homo sapien
tcacaatcacagtgtggagtaaccagcaccaaa

SEQ ID NO: 150789 - DNA, 33 bp, Homo sapien
gggagttatcagggtcaacatctttagttcata

SEQ ID NO: 150790 - DNA, 33 bp, Homo sapien
gggagttatcagggtccacatctttagttcata

SEQ ID NO: 150791 - DNA, 33 bp, Homo sapien
aagaggatctggagtaacaattcagctggggat

SEQ ID NO: 150792 - DNA, 33 bp, Homo sapien
aagaggatctggagtagcaattcagctggggat

SEQ ID NO: 150793 - DNA, 33 bp, Homo sapien
attatattctgtaggaaatcataaactcatatg

SEQ ID NO: 150794 - DNA, 33 bp, Homo sapien
attatattctgtaggagatcataaactcatatg

SEQ ID NO: 150795 - DNA, 33 bp, Homo sapien
gccaacttgcagccacacaaaagggcagcaccc

SEQ ID NO: 150796 - DNA, 33 bp, Homo sapien
gccaacttgcagccacgcaaaagggcagcaccc

SEQ ID NO: 150797 - DNA, 33 bp, Homo sapien
gaaatgaataaatgtccacatctcttgggcata

SEQ ID NO: 150798 - DNA, 33 bp, Homo sapien
gaaatgaataaatgtctacatctcttgggcata

SEQ ID NO: 150799 - DNA, 33 bp, Homo sapien
acaccaggccgtcagacgtagtgcctgtgaaga

SEQ ID NO: 150800 - DNA, 33 bp, Homo sapien
acaccaggccgtcagatgtagtgcctgtgaaga

SEQ ID NO: 150801 - DNA, 33 bp, Homo sapien
agaataggttacactccaaactggtggaggaat

SEQ ID NO: 150802 - DNA, 33 bp, Homo sapien
agaataggttacactctaaactggtggaggaat

SEQ ID NO: 150803 - DNA, 33 bp, Homo sapien
tgtataagctcactcaagtagaatctaaaaaaa

SEQ ID NO: 150804 - DNA, 33 bp, Homo sapien
tgtataagctcactcacgtagaatctaaaaaaa

SEQ ID NO: 150805 - DNA, 33 bp, Homo sapien
gatgtaaagtgttctcaccaccaaaatgataac

SEQ ID NO: 150806 - DNA, 33 bp, Homo sapien
gatgtaaagtgttctccccaccaaaatgataac

SEQ ID NO: 150807 - DNA, 33 bp, Homo sapien
gacccagcctctctaacactgtttcctcagcct

SEQ ID NO: 150808 - DNA, 33 bp, Homo sapien
gacccagcctctctaagactgtttcctcagcct

SEQ ID NO: 150809 - DNA, 33 bp, Homo sapien
tagtaacataaaatgaatcacaaaaatgttcat

SEQ ID NO: 150810 - DNA, 33 bp, Homo sapien
tagtaacataaaatgagtcacaaaaatgttcat

SEQ ID NO: 150811 - DNA, 33 bp, Homo sapien
tcagtccttcagatagcagcaacatcctgaatg

SEQ ID NO: 150812 - DNA, 33 bp, Homo sapien
tcagtccttcagataggagcaacatcctgaatg

SEQ ID NO: 150813 - DNA, 33 bp, Homo sapien
ggtcataaggagctaccgaactttttgatcaag

SEQ ID NO: 150814 - DNA, 33 bp, Homo sapien
ggtcataaggagctactgaactttttgatcaag

SEQ ID NO: 150815 - DNA, 33 bp, Homo sapien
cgtgcagtacagcacacctagccccgattcttc

SEQ ID NO: 150816 - DNA, 33 bp, Homo sapien
cgtgcagtacagcacatctagccccgattcttc

SEQ ID NO: 150817 - DNA, 33 bp, Homo sapien
ttcaggttccatattaaaagtcctctatgggcc

SEQ ID NO: 150818 - DNA, 33 bp, Homo sapien
ttcaggttccatattacaagtcctctatgggcc

SEQ ID NO: 150819 - DNA, 33 bp, Homo sapien
tagatgttcagcaagaaggaaggggctgggaga

SEQ ID NO: 150820 - DNA, 33 bp, Homo sapien
tagatgttcagcaagatggaaggggctgggaga

SEQ ID NO: 150821 - DNA, 33 bp, Homo sapien
gttgggaattcccttacagagcattgggccagc

SEQ ID NO: 150822 - DNA, 33 bp, Homo sapien
gttgggaattcccttagagagcattgggccagc

SEQ ID NO: 150823 - DNA, 33 bp, Homo sapien
ctcagagtctaagcaaatgaaggagttctaact

SEQ ID NO: 150824 - DNA, 33 bp, Homo sapien
ctcagagtctaagcaagtgaaggagttctaact

SEQ ID NO: 150825 - DNA, 33 bp, Homo sapien
tgctctgctccctccccactcggacttgccagg

SEQ ID NO: 150826 - DNA, 33 bp, Homo sapien
tgctctgctccctcccgactcggacttgccagg

SEQ ID NO: 150827 - DNA, 33 bp, Homo sapien
gtatttttaacctgcaaacaatgcttgggtata

SEQ ID NO: 150828 - DNA, 33 bp, Homo sapien
gtatttttaacctgcagacaatgcttgggtata

SEQ ID NO: 150829 - DNA, 33 bp, Homo sapien
tactgccagcaaaaaacgaaagcagaggctaaa

SEQ ID NO: 150830 - DNA, 33 bp, Homo sapien
tactgccagcaaaaaatgaaagcagaggctaaa

SEQ ID NO: 150831 - DNA, 33 bp, Homo sapien
gtcccatagctcaggaagacccccgcaaaattc

SEQ ID NO: 150832 - DNA, 33 bp, Homo sapien
gtcccatagctcaggaggacccccgcaaaattc

SEQ ID NO: 150833 - DNA, 33 bp, Homo sapien
tcgggagcagaggtccagaagactggttccatc

SEQ ID NO: 150834 - DNA, 33 bp, Homo sapien
tcgggagcagaggtccggaagactggttccatc

SEQ ID NO: 150835 - DNA, 33 bp, Homo sapien
ctcccgagccaatcctaaaaggtttctgacagc

SEQ ID NO: 150836 - DNA, 33 bp, Homo sapien
ctcccgagccaatcctgaaaggtttctgacagc

SEQ ID NO: 150837 - DNA, 33 bp, Homo sapien
ttgaatacgaggctgacaagaaccccaagagta

SEQ ID NO: 150838 - DNA, 33 bp, Homo sapien
ttgaatacgaggctgagaagaaccccaagagta

SEQ ID NO: 150839 - DNA, 33 bp, Homo sapien
cctccctatgtaaaacagcaactcatctctact

SEQ ID NO: 150840 - DNA, 33 bp, Homo sapien
cctccctatgtaaaacggcaactcatctctact

SEQ ID NO: 150841 - DNA, 33 bp, Homo sapien
aacagatacttcaccacagaggatacccaaaca

SEQ ID NO: 150842 - DNA, 33 bp, Homo sapien
aacagatacttcaccagagaggatacccaaaca

SEQ ID NO: 150843 - DNA, 33 bp, Homo sapien
ggtattttcgtgcagaacttcacccagaaagcc

SEQ ID NO: 150844 - DNA, 33 bp, Homo sapien
ggtattttcgtgcagatcttcacccagaaagcc

SEQ ID NO: 150845 - DNA, 33 bp, Homo sapien
aggctgttccaactccaaaaagccctgggagag

SEQ ID NO: 150846 - DNA, 33 bp, Homo sapien
aggctgttccaactccgaaaagccctgggagag

SEQ ID NO: 150847 - DNA, 33 bp, Homo sapien
ctctgggttgagcttacaagtctgtcttaggat

SEQ ID NO: 150848 - DNA, 33 bp, Homo sapien
ctctgggttgagcttagaagtctgtcttaggat

SEQ ID NO: 150849 - DNA, 33 bp, Homo sapien
caccagcaactagctcaaaagagtctgcctaat

SEQ ID NO: 150850 - DNA, 33 bp, Homo sapien
caccagcaactagctcgaaagagtctgcctaat

SEQ ID NO: 150851 - DNA, 33 bp, Homo sapien
ggaacttggaagattaccagtagcagaaaaact

SEQ ID NO: 150852 - DNA, 33 bp, Homo sapien
ggaacttggaagattatcagtagcagaaaaact

SEQ ID NO: 150853 - DNA, 33 bp, Homo sapien
aaggggggcagtatgaaattgtaactatggttc

SEQ ID NO: 150854 - DNA, 33 bp, Homo sapien
aaggggggcagtatgatattgtaactatggttc

SEQ ID NO: 150855 - DNA, 33 bp, Homo sapien
atttcacgcaaaaagaaaataaggacaatctgg

SEQ ID NO: 150856 - DNA, 33 bp, Homo sapien
atttcacgcaaaaagagaataaggacaatctgg

SEQ ID NO: 150857 - DNA, 33 bp, Homo sapien
aaagctctaccgaaacaaagagccaggaggaag

SEQ ID NO: 150858 - DNA, 33 bp, Homo sapien
aaagctctaccgaaacgaagagccaggaggaag

SEQ ID NO: 150859 - DNA, 33 bp, Homo sapien
agtcatacagctagtaaaaggaggagccacaat

SEQ ID NO: 150860 - DNA, 33 bp, Homo sapien
agtcatacagctagtacaaggaggagccacaat

SEQ ID NO: 150861 - DNA, 33 bp, Homo sapien
ggcacatgccatcatgacaggccagaactggca

SEQ ID NO: 150862 - DNA, 33 bp, Homo sapien
ggcacatgccatcatgccaggccagaactggca

SEQ ID NO: 150863 - DNA, 33 bp, Homo sapien
caaggacaacaaacacaaccaactgggacttcc

SEQ ID NO: 150864 - DNA, 33 bp, Homo sapien
caaggacaacaaacacgaccaactgggacttcc

SEQ ID NO: 150865 - DNA, 33 bp, Homo sapien
gcatcttctataaacccatgccccagaaaaata

SEQ ID NO: 150866 - DNA, 33 bp, Homo sapien
gcatcttctataaaccgatgccccagaaaaata

SEQ ID NO: 150867 - DNA, 33 bp, Homo sapien
gcatctgtttaaagacaagcacatacctggaaa

SEQ ID NO: 150868 - DNA, 33 bp, Homo sapien
gcatctgtttaaagacgagcacatacctggaaa

SEQ ID NO: 150869 - DNA, 33 bp, Homo sapien
agccaataaaataggcaagtttcctcccactcc

SEQ ID NO: 150870 - DNA, 33 bp, Homo sapien
agccaataaaataggcgagtttcctcccactcc

SEQ ID NO: 150871 - DNA, 33 bp, Homo sapien
tacaaatcatattcaaatgtgtttccttcctgc

SEQ ID NO: 150872 - DNA, 33 bp, Homo sapien
tacaaatcatattcaattgtgtttccttcctgc

SEQ ID NO: 150873 - DNA, 33 bp, Homo sapien
tgacttaccaaagaaactcctctgttttctagc

SEQ ID NO: 150874 - DNA, 33 bp, Homo sapien
tgacttaccaaagaaattcctctgttttctagc

SEQ ID NO: 150875 - DNA, 33 bp, Homo sapien
cctaccttcttacttactaaaggctgaggcctc

SEQ ID NO: 150876 - DNA, 33 bp, Homo sapien
cctaccttcttacttattaaaggctgaggcctc

SEQ ID NO: 150877 - DNA, 33 bp, Homo sapien
ctagggttcagtctccccttccagaaagtagaa

SEQ ID NO: 150878 - DNA, 33 bp, Homo sapien
ctagggttcagtctcctcttccagaaagtagaa

SEQ ID NO: 150879 - DNA, 33 bp, Homo sapien
ctggggctgtgggtgacgcgctctagtatgcca

SEQ ID NO: 150880 - DNA, 33 bp, Homo sapien
ctggggctgtgggtgaggcgctctagtatgcca

SEQ ID NO: 150881 - DNA, 33 bp, Homo sapien
attaggaaatggcctgaaagaggactaaggctc

SEQ ID NO: 150882 - DNA, 33 bp, Homo sapien
attaggaaatggcctggaagaggactaaggctc

SEQ ID NO: 150883 - DNA, 33 bp, Homo sapien
tctacctgggtgctatgagggccttcagatcaa

SEQ ID NO: 150884 - DNA, 33 bp, Homo sapien
tctacctgggtgctattagggccttcagatcaa

SEQ ID NO: 150885 - DNA, 33 bp, Homo sapien
gaggaatgtggagggaacggggagagtagaaag

SEQ ID NO: 150886 - DNA, 33 bp, Homo sapien
gaggaatgtggagggagcggggagagtagaaag

SEQ ID NO: 150887 - DNA, 33 bp, Homo sapien
tttagaatatggcagaaagtacgtctttactac

SEQ ID NO: 150888 - DNA, 33 bp, Homo sapien
tttagaatatggcagacagtacgtctttactac

SEQ ID NO: 150889 - DNA, 33 bp, Homo sapien
aatgataacagaagagcaattgggataggaatg

SEQ ID NO: 150890 - DNA, 33 bp, Homo sapien
aatgataacagaagagtaattgggataggaatg

SEQ ID NO: 150891 - DNA, 33 bp, Homo sapien
aaggtaatatttgccacatagcctgggcccagt

SEQ ID NO: 150892 - DNA, 33 bp, Homo sapien
aaggtaatatttgccagatagcctgggcccagt

SEQ ID NO: 150893 - DNA, 33 bp, Homo sapien
aaggaattgcctaagccatgaaaatgagaaacc

SEQ ID NO: 150894 - DNA, 33 bp, Homo sapien
aaggaattgcctaagctatgaaaatgagaaacc

SEQ ID NO: 150895 - DNA, 33 bp, Homo sapien
tgattccatcaatccacagagacagaagataaa

SEQ ID NO: 150896 - DNA, 33 bp, Homo sapien
tgattccatcaatccatagagacagaagataaa

SEQ ID NO: 150897 - DNA, 33 bp, Homo sapien
atgtatcttcattcccccatctcctgtctcaga

SEQ ID NO: 150898 - DNA, 33 bp, Homo sapien
atgtatcttcattcccgcatctcctgtctcaga

SEQ ID NO: 150899 - DNA, 33 bp, Homo sapien
caaggatcatggcaagcaacaggtcagagacaa

SEQ ID NO: 150900 - DNA, 33 bp, Homo sapien
caaggatcatggcaaggaacaggtcagagacaa

SEQ ID NO: 150901 - DNA, 33 bp, Homo sapien
cacttgtgaaatgagaagttagaaaaaaatgaa

SEQ ID NO: 150902 - DNA, 33 bp, Homo sapien
cacttgtgaaatgagatgttagaaaaaaatgaa

SEQ ID NO: 150903 - DNA, 33 bp, Homo sapien
gttgaggtggctcaaactgttatctgaggtgcc

SEQ ID NO: 150904 - DNA, 33 bp, Homo sapien
gttgaggtggctcaaattgttatctgaggtgcc

SEQ ID NO: 150905 - DNA, 33 bp, Homo sapien
actccaggaagctctaacaagtagagtaggtag

SEQ ID NO: 150906 - DNA, 33 bp, Homo sapien
actccaggaagctctagcaagtagagtaggtag

SEQ ID NO: 150907 - DNA, 33 bp, Homo sapien
ttgagaaagaattccaactctaaaagatagaca

SEQ ID NO: 150908 - DNA, 33 bp, Homo sapien
ttgagaaagaattccacctctaaaagatagaca

SEQ ID NO: 150909 - DNA, 33 bp, Homo sapien
cctccttaaaaccatggaggactcaccaagtgt

SEQ ID NO: 150910 - DNA, 33 bp, Homo sapien
cctccttaaaaccatgtaggactcaccaagtgt

SEQ ID NO: 150911 - DNA, 33 bp, Homo sapien
gtttgctatctttgagaacaagtagggtaggtt

SEQ ID NO: 150912 - DNA, 33 bp, Homo sapien
gtttgctatctttgagtacaagtagggtaggtt

SEQ ID NO: 150913 - DNA, 33 bp, Homo sapien
cttctttggtctgtcaaccattttggggtgtta

SEQ ID NO: 150914 - DNA, 33 bp, Homo sapien
cttctttggtctgtcagccattttggggtgtta

SEQ ID NO: 150915 - DNA, 33 bp, Homo sapien
cttctctttacaatccaaaagtgaaagcttggg

SEQ ID NO: 150916 - DNA, 33 bp, Homo sapien
cttctctttacaatccgaaagtgaaagcttggg

SEQ ID NO: 150917 - DNA, 33 bp, Homo sapien
gcacaaatcagtgttccacttgtctcttcagag

SEQ ID NO: 150918 - DNA, 33 bp, Homo sapien
gcacaaatcagtgttctacttgtctcttcagag

SEQ ID NO: 150919 - DNA, 33 bp, Homo sapien
agtacggaactgcttacgcactgggtttcacca

SEQ ID NO: 150920 - DNA, 33 bp, Homo sapien
agtacggaactgcttatgcactgggtttcacca

SEQ ID NO: 150921 - DNA, 33 bp, Homo sapien
atgttgtattctttcacgcctgtccagttactg

SEQ ID NO: 150922 - DNA, 33 bp, Homo sapien
atgttgtattctttcatgcctgtccagttactg

SEQ ID NO: 150923 - DNA, 33 bp, Homo sapien
aggacaaagtcacaaaccagaagagagcctgta

SEQ ID NO: 150924 - DNA, 33 bp, Homo sapien
aggacaaagtcacaaatcagaagagagcctgta

SEQ ID NO: 150925 - DNA, 33 bp, Homo sapien
gaaataaggaaaggctgagacctaccaaaatga

SEQ ID NO: 150926 - DNA, 33 bp, Homo sapien
gaaataaggaaaggcttagacctaccaaaatga

SEQ ID NO: 150927 - DNA, 33 bp, Homo sapien
ttatggaacccatgaacttaatcacaggcttct

SEQ ID NO: 150928 - DNA, 33 bp, Homo sapien
ttatggaacccatgaatttaatcacaggcttct

SEQ ID NO: 150929 - DNA, 33 bp, Homo sapien
cctcctgtgaacaagacggtgtggagaatgatc

SEQ ID NO: 150930 - DNA, 33 bp, Homo sapien
cctcctgtgaacaagatggtgtggagaatgatc

SEQ ID NO: 150931 - DNA, 33 bp, Homo sapien
ggctttatcccatgatcaggacgtggaagctac

SEQ ID NO: 150932 - DNA, 33 bp, Homo sapien
ggctttatcccatgattaggacgtggaagctac

SEQ ID NO: 150933 - DNA, 33 bp, Homo sapien
tttgtggagaagaacccagacatagagaagagg

SEQ ID NO: 150934 - DNA, 33 bp, Homo sapien
tttgtggagaagaaccgagacatagagaagagg

SEQ ID NO: 150935 - DNA, 33 bp, Homo sapien
ggttgaccgcattagccaggatggcctcaatct

SEQ ID NO: 150936 - DNA, 33 bp, Homo sapien
ggttgaccgcattagctaggatggcctcaatct

SEQ ID NO: 150937 - DNA, 33 bp, Homo sapien
tttgtaaactactttcactttagccccaagaca

SEQ ID NO: 150938 - DNA, 33 bp, Homo sapien
tttgtaaactactttcgctttagccccaagaca

SEQ ID NO: 150939 - DNA, 33 bp, Homo sapien
cagaacctagtgtcccaacttccaaatcaaaac

SEQ ID NO: 150940 - DNA, 33 bp, Homo sapien
cagaacctagtgtcccgacttccaaatcaaaac

SEQ ID NO: 150941 - DNA, 33 bp, Homo sapien
cattatttcaaactaccaattattccccatata

SEQ ID NO: 150942 - DNA, 33 bp, Homo sapien
cattatttcaaactactaattattccccatata

SEQ ID NO: 150943 - DNA, 33 bp, Homo sapien
aaaattgaacacaaagcagagctaattctcata

SEQ ID NO: 150944 - DNA, 33 bp, Homo sapien
aaaattgaacacaaagtagagctaattctcata

SEQ ID NO: 150945 - DNA, 33 bp, Homo sapien
ctaaccccttgcaaccactgatatttctgtctc

SEQ ID NO: 150946 - DNA, 33 bp, Homo sapien
ctaaccccttgcaaccgctgatatttctgtctc

SEQ ID NO: 150947 - DNA, 33 bp, Homo sapien
caagttggaaagaaccaccatctaaacaatatt

SEQ ID NO: 150948 - DNA, 33 bp, Homo sapien
caagttggaaagaaccgccatctaaacaatatt

SEQ ID NO: 150949 - DNA, 33 bp, Homo sapien
gaggacaactgcaaaaatgattaaataaaccaa

SEQ ID NO: 150950 - DNA, 33 bp, Homo sapien
gaggacaactgcaaaactgattaaataaaccaa

SEQ ID NO: 150951 - DNA, 33 bp, Homo sapien
gactagtgaccgagtaaggctggaaatgggaat

SEQ ID NO: 150952 - DNA, 33 bp, Homo sapien
gactagtgaccgagtagggctggaaatgggaat

SEQ ID NO: 150953 - DNA, 33 bp, Homo sapien
atcctattttggtgcaatccacaagctaaggat

SEQ ID NO: 150954 - DNA, 33 bp, Homo sapien
atcctattttggtgcagtccacaagctaaggat

SEQ ID NO: 150955 - DNA, 33 bp, Homo sapien
aatatttttggcatagcaggtcatagtctcttt

SEQ ID NO: 150956 - DNA, 33 bp, Homo sapien
aatatttttggcataggaggtcatagtctcttt

SEQ ID NO: 150957 - DNA, 33 bp, Homo sapien
gacaaagaatatgagacaaaagatggcagcatc

SEQ ID NO: 150958 - DNA, 33 bp, Homo sapien
gacaaagaatatgagagaaaagatggcagcatc

SEQ ID NO: 150959 - DNA, 33 bp, Homo sapien
tcttcttctaattgtcactcttttccattcctg

SEQ ID NO: 150960 - DNA, 33 bp, Homo sapien
tcttcttctaattgtccctcttttccattcctg

SEQ ID NO: 150961 - DNA, 33 bp, Homo sapien
tttctctatggtatacaggaacaattggagaat

SEQ ID NO: 150962 - DNA, 33 bp, Homo sapien
tttctctatggtatacgggaacaattggagaat

SEQ ID NO: 150963 - DNA, 33 bp, Homo sapien
tgtaaatctgatgaaaactttgttccttcttcc

SEQ ID NO: 150964 - DNA, 33 bp, Homo sapien
tgtaaatctgatgaaagctttgttccttcttcc

SEQ ID NO: 150965 - DNA, 33 bp, Homo sapien
cagagcaggtaccataaaccaatttgcagtagg

SEQ ID NO: 150966 - DNA, 33 bp, Homo sapien
cagagcaggtaccatacaccaatttgcagtagg

SEQ ID NO: 150967 - DNA, 33 bp, Homo sapien
tcattctgcttcttaacattaggcatcctggca

SEQ ID NO: 150968 - DNA, 33 bp, Homo sapien
tcattctgcttcttaatattaggcatcctggca

SEQ ID NO: 150969 - DNA, 33 bp, Homo sapien
gctttctgtgccccaccgtcatggagttgattt

SEQ ID NO: 150970 - DNA, 33 bp, Homo sapien
gctttctgtgccccactgtcatggagttgattt

SEQ ID NO: 150971 - DNA, 33 bp, Homo sapien
tttcagcaacacttgacatgggcaaattccagt

SEQ ID NO: 150972 - DNA, 33 bp, Homo sapien
tttcagcaacacttgatatgggcaaattccagt

SEQ ID NO: 150973 - DNA, 33 bp, Homo sapien
agattcccagttccagccgggcaccatttattt

SEQ ID NO: 150974 - DNA, 33 bp, Homo sapien
agattcccagttccagtcgggcaccatttattt

SEQ ID NO: 150975 - DNA, 33 bp, Homo sapien
ttcgaacagctatccaaatgtgtgccaggatct

SEQ ID NO: 150976 - DNA, 33 bp, Homo sapien
ttcgaacagctatccagatgtgtgccaggatct

SEQ ID NO: 150977 - DNA, 33 bp, Homo sapien
ggtactgggtgagtgacgctgtttgagtcatcc

SEQ ID NO: 150978 - DNA, 33 bp, Homo sapien
ggtactgggtgagtgatgctgtttgagtcatcc

SEQ ID NO: 150979 - DNA, 33 bp, Homo sapien
tgcctggccctatcaaacctcttatacttggca

SEQ ID NO: 150980 - DNA, 33 bp, Homo sapien
tgcctggccctatcaagcctcttatacttggca

SEQ ID NO: 150981 - DNA, 33 bp, Homo sapien
tatagcagaacatttgcattgagtggcacgtgg

SEQ ID NO: 150982 - DNA, 33 bp, Homo sapien
tatagcagaacatttgtattgagtggcacgtgg

SEQ ID NO: 150983 - DNA, 33 bp, Homo sapien
aagccaaacacattataagaacatcattgaaat

SEQ ID NO: 150984 - DNA, 33 bp, Homo sapien
aagccaaacacattatgagaacatcattgaaat

SEQ ID NO: 150985 - DNA, 33 bp, Homo sapien
accttaaaagagtcaccgtagcctcgtggagtt

SEQ ID NO: 150986 - DNA, 33 bp, Homo sapien
accttaaaagagtcactgtagcctcgtggagtt

SEQ ID NO: 150987 - DNA, 33 bp, Homo sapien
gccgtgggagcagcacaaggggtcttcactctg

SEQ ID NO: 150988 - DNA, 33 bp, Homo sapien
gccgtgggagcagcacgaggggtcttcactctg

SEQ ID NO: 150989 - DNA, 33 bp, Homo sapien
gcagtttcaacacttacgctcttctgctagtgt

SEQ ID NO: 150990 - DNA, 33 bp, Homo sapien
gcagtttcaacacttatgctcttctgctagtgt

SEQ ID NO: 150991 - DNA, 33 bp, Homo sapien
tagaggcatgggctgcccatccattttaacagg

SEQ ID NO: 150992 - DNA, 33 bp, Homo sapien
tagaggcatgggctgcgcatccattttaacagg

SEQ ID NO: 150993 - DNA, 33 bp, Homo sapien
ctccctacaccaaccacctgattccatacctgg

SEQ ID NO: 150994 - DNA, 33 bp, Homo sapien
ctccctacaccaaccatctgattccatacctgg

SEQ ID NO: 150995 - DNA, 33 bp, Homo sapien
gaaacaccaaagatccggcaaagtatctcctgt

SEQ ID NO: 150996 - DNA, 33 bp, Homo sapien
gaaacaccaaagatcctgcaaagtatctcctgt

SEQ ID NO: 150997 - DNA, 33 bp, Homo sapien
aggcagttaaaggaagcattcatttgcaggaga

SEQ ID NO: 150998 - DNA, 33 bp, Homo sapien
aggcagttaaaggaaggattcatttgcaggaga

SEQ ID NO: 150999 - DNA, 33 bp, Homo sapien
gtcctctcgctctacaagagaagcaaaagagca

SEQ ID NO: 151000 - DNA, 33 bp, Homo sapien
gtcctctcgctctacaggagaagcaaaagagca

SEQ ID NO: 151001 - DNA, 33 bp, Homo sapien
gggctctggaagtacaaggataagaggtgatct

SEQ ID NO: 151002 - DNA, 33 bp, Homo sapien
gggctctggaagtacagggataagaggtgatct

SEQ ID NO: 151003 - DNA, 33 bp, Homo sapien
catgtttaaggaattaaagaaatgcaaaattac

SEQ ID NO: 151004 - DNA, 33 bp, Homo sapien
catgtttaaggaattagagaaatgcaaaattac

SEQ ID NO: 151005 - DNA, 33 bp, Homo sapien
gtttgcctccttcatcaagaaggtgcggtccct

SEQ ID NO: 151006 - DNA, 33 bp, Homo sapien
gtttgcctccttcatcgagaaggtgcggtccct

SEQ ID NO: 151007 - DNA, 33 bp, Homo sapien
gaagacagctcagagcaacatggacagcatatt

SEQ ID NO: 151008 - DNA, 33 bp, Homo sapien
gaagacagctcagagcgacatggacagcatatt

SEQ ID NO: 151009 - DNA, 33 bp, Homo sapien
aggcgcagtacaaggaaatcgccaatggcagct

SEQ ID NO: 151010 - DNA, 33 bp, Homo sapien
aggcgcagtacaaggagatcgccaatggcagct

SEQ ID NO: 151011 - DNA, 33 bp, Homo sapien
aactagataatgaacaaattgtgggatatttgt

SEQ ID NO: 151012 - DNA, 33 bp, Homo sapien
aactagataatgaacatattgtgggatatttgt

SEQ ID NO: 151013 - DNA, 33 bp, Homo sapien
acttcctacgaaaatacggctcttttcaatcta

SEQ ID NO: 151014 - DNA, 33 bp, Homo sapien
acttcctacgaaaatagggctcttttcaatcta

SEQ ID NO: 151015 - DNA, 33 bp, Homo sapien
tctttctggtcacagacattggtctaaaggcag

SEQ ID NO: 151016 - DNA, 33 bp, Homo sapien
tctttctggtcacagatattggtctaaaggcag

SEQ ID NO: 151017 - DNA, 33 bp, Homo sapien
gtctgggtccatgagcaacttcaaagggcaggg

SEQ ID NO: 151018 - DNA, 33 bp, Homo sapien
gtctgggtccatgagcgacttcaaagggcaggg

SEQ ID NO: 151019 - DNA, 33 bp, Homo sapien
aaatgtatgtacactcacacaaaaaactctcaa

SEQ ID NO: 151020 - DNA, 33 bp, Homo sapien
aaatgtatgtacactcgcacaaaaaactctcaa

SEQ ID NO: 151021 - DNA, 33 bp, Homo sapien
aaagtttctggttcaacaggtctagggtagaac

SEQ ID NO: 151022 - DNA, 33 bp, Homo sapien
aaagtttctggttcaataggtctagggtagaac

SEQ ID NO: 151023 - DNA, 33 bp, Homo sapien
aagcagactacaaaatcatgtgcatattaattc

SEQ ID NO: 151024 - DNA, 33 bp, Homo sapien
aagcagactacaaaatgatgtgcatattaattc

SEQ ID NO: 151025 - DNA, 33 bp, Homo sapien
tgagatggcagaaatacgggctacaaacataaa

SEQ ID NO: 151026 - DNA, 33 bp, Homo sapien
tgagatggcagaaatatgggctacaaacataaa

SEQ ID NO: 151027 - DNA, 33 bp, Homo sapien
ctccctcacaaaatccacttcttccagcaataa

SEQ ID NO: 151028 - DNA, 33 bp, Homo sapien
ctccctcacaaaatccgcttcttccagcaataa

SEQ ID NO: 151029 - DNA, 33 bp, Homo sapien
ccattatgatttccaccatgcccatggaatctg

SEQ ID NO: 151030 - DNA, 33 bp, Homo sapien
ccattatgatttccactatgcccatggaatctg

SEQ ID NO: 151031 - DNA, 33 bp, Homo sapien
ctatgctgaagcattaaactgtacatagcaagc

SEQ ID NO: 151032 - DNA, 33 bp, Homo sapien
ctatgctgaagcattacactgtacatagcaagc

SEQ ID NO: 151033 - DNA, 33 bp, Homo sapien
ctgagcccagaatgaaatctcccactggtatct

SEQ ID NO: 151034 - DNA, 33 bp, Homo sapien
ctgagcccagaatgaagtctcccactggtatct

SEQ ID NO: 151035 - DNA, 33 bp, Homo sapien
agcaaatgacctatcaccctctaaatggtctgc

SEQ ID NO: 151036 - DNA, 33 bp, Homo sapien
agcaaatgacctatcatcctctaaatggtctgc

SEQ ID NO: 151037 - DNA, 33 bp, Homo sapien
tgctctttggtctttccagttcaagagacatgg

SEQ ID NO: 151038 - DNA, 33 bp, Homo sapien
tgctctttggtctttctagttcaagagacatgg

SEQ ID NO: 151039 - DNA, 33 bp, Homo sapien
agtaactgaaaacaggaagacaatttgctcagc

SEQ ID NO: 151040 - DNA, 33 bp, Homo sapien
agtaactgaaaacagggagacaatttgctcagc

SEQ ID NO: 151041 - DNA, 33 bp, Homo sapien
atggaagattatcatacgctggaaacaagttta

SEQ ID NO: 151042 - DNA, 33 bp, Homo sapien
atggaagattatcatatgctggaaacaagttta

SEQ ID NO: 151043 - DNA, 33 bp, Homo sapien
attttacagctaaggaaatagaatcagaaaggt

SEQ ID NO: 151044 - DNA, 33 bp, Homo sapien
attttacagctaaggagatagaatcagaaaggt

SEQ ID NO: 151045 - DNA, 33 bp, Homo sapien
acagattaaaacacgacgacagcaaaaaatgaa

SEQ ID NO: 151046 - DNA, 33 bp, Homo sapien
acagattaaaacacgatgacagcaaaaaatgaa

SEQ ID NO: 151047 - DNA, 33 bp, Homo sapien
ctttcaatgactgcaaatatcagtgtagataac

SEQ ID NO: 151048 - DNA, 33 bp, Homo sapien
ctttcaatgactgcaagtatcagtgtagataac

SEQ ID NO: 151049 - DNA, 33 bp, Homo sapien
gcaaaccaacgtggcaaacatatacgtatgtaa

SEQ ID NO: 151050 - DNA, 33 bp, Homo sapien
gcaaaccaacgtggcacacatatacgtatgtaa

SEQ ID NO: 151051 - DNA, 33 bp, Homo sapien
agtcgcggcactcgaggcacccggctgcgactc

SEQ ID NO: 151052 - DNA, 33 bp, Homo sapien
agtcgcggcactcgagtcacccggctgcgactc

SEQ ID NO: 151053 - DNA, 33 bp, Homo sapien
cacactgaaaatacaaggttgaagcaccaacct

SEQ ID NO: 151054 - DNA, 33 bp, Homo sapien
cacactgaaaatacaatgttgaagcaccaacct

SEQ ID NO: 151055 - DNA, 33 bp, Homo sapien
gtgccccaggtttcataaggtacaagagaggcg

SEQ ID NO: 151056 - DNA, 33 bp, Homo sapien
gtgccccaggtttcatgaggtacaagagaggcg

SEQ ID NO: 151057 - DNA, 33 bp, Homo sapien
aagagaattacttgtcacagtgcccaaagtcag

SEQ ID NO: 151058 - DNA, 33 bp, Homo sapien
aagagaattacttgtctcagtgcccaaagtcag

SEQ ID NO: 151059 - DNA, 33 bp, Homo sapien
atttttcgtttttgaacagaaagacttgtctgt

SEQ ID NO: 151060 - DNA, 33 bp, Homo sapien
atttttcgtttttgaatagaaagacttgtctgt

SEQ ID NO: 151061 - DNA, 33 bp, Homo sapien
aattccaattgggctaataagtaaaatttcaag

SEQ ID NO: 151062 - DNA, 33 bp, Homo sapien
aattccaattgggctagtaagtaaaatttcaag

SEQ ID NO: 151063 - DNA, 33 bp, Homo sapien
taggagaaacaggcataagacccatctacaaat

SEQ ID NO: 151064 - DNA, 33 bp, Homo sapien
taggagaaacaggcattagacccatctacaaat

SEQ ID NO: 151065 - DNA, 33 bp, Homo sapien
tagtcaaggccacgacaattgtagcttaatcaa

SEQ ID NO: 151066 - DNA, 33 bp, Homo sapien
tagtcaaggccacgactattgtagcttaatcaa

SEQ ID NO: 151067 - DNA, 33 bp, Homo sapien
aatttgaacataaagagatcctgagaccaaaaa

SEQ ID NO: 151068 - DNA, 33 bp, Homo sapien
aatttgaacataaagatatcctgagaccaaaaa

SEQ ID NO: 151069 - DNA, 33 bp, Homo sapien
tagcaagatctgaatgaaaaacacagacagaca

SEQ ID NO: 151070 - DNA, 33 bp, Homo sapien
tagcaagatctgaatgcaaaacacagacagaca

SEQ ID NO: 151071 - DNA, 33 bp, Homo sapien
aagtctttcagcaagacggctttgattacttta

SEQ ID NO: 151072 - DNA, 33 bp, Homo sapien
aagtctttcagcaagatggctttgattacttta

SEQ ID NO: 151073 - DNA, 33 bp, Homo sapien
aataacatacaacaaacaggtatacacgtaaga

SEQ ID NO: 151074 - DNA, 33 bp, Homo sapien
aataacatacaacaaagaggtatacacgtaaga

SEQ ID NO: 151075 - DNA, 33 bp, Homo sapien
taagatggttgggttacctttattcctgaagtc

SEQ ID NO: 151076 - DNA, 33 bp, Homo sapien
taagatggttgggttagctttattcctgaagtc

SEQ ID NO: 151077 - DNA, 33 bp, Homo sapien
tggaaatactataaaccgtaccttcattagacc

SEQ ID NO: 151078 - DNA, 33 bp, Homo sapien
tggaaatactataaactgtaccttcattagacc

SEQ ID NO: 151079 - DNA, 33 bp, Homo sapien
ggcagcagaacatccaatatgcttgaggaaaat

SEQ ID NO: 151080 - DNA, 33 bp, Homo sapien
ggcagcagaacatccagtatgcttgaggaaaat

SEQ ID NO: 151081 - DNA, 33 bp, Homo sapien
ttgtgatgacatatcacattgctgtttctttga

SEQ ID NO: 151082 - DNA, 33 bp, Homo sapien
ttgtgatgacatatcagattgctgtttctttga

SEQ ID NO: 151083 - DNA, 33 bp, Homo sapien
ccattcctgttgctaagttagatccttattttt

SEQ ID NO: 151084 - DNA, 33 bp, Homo sapien
ccattcctgttgctaatttagatccttattttt

SEQ ID NO: 151085 - DNA, 33 bp, Homo sapien
tgagggtacagaagggcaacaggtaattacttt

SEQ ID NO: 151086 - DNA, 33 bp, Homo sapien
tgagggtacagaaggggaacaggtaattacttt

SEQ ID NO: 151087 - DNA, 33 bp, Homo sapien
gaagcagtggcttgtacctgcagtcctagcttc

SEQ ID NO: 151088 - DNA, 33 bp, Homo sapien
gaagcagtggcttgtatctgcagtcctagcttc

SEQ ID NO: 151089 - DNA, 33 bp, Homo sapien
agatctcaactgattcaaagtttattttgccaa

SEQ ID NO: 151090 - DNA, 33 bp, Homo sapien
agatctcaactgattcgaagtttattttgccaa

SEQ ID NO: 151091 - DNA, 33 bp, Homo sapien
agggagtagaaggaagcccaaggatgagttgcc

SEQ ID NO: 151092 - DNA, 33 bp, Homo sapien
agggagtagaaggaagtccaaggatgagttgcc

SEQ ID NO: 151093 - DNA, 33 bp, Homo sapien
ggaagggtctgtcaagactgtacaattcaagac

SEQ ID NO: 151094 - DNA, 33 bp, Homo sapien
ggaagggtctgtcaaggctgtacaattcaagac

SEQ ID NO: 151095 - DNA, 33 bp, Homo sapien
agatcaaatcagaacacagtatctatgtaataa

SEQ ID NO: 151096 - DNA, 33 bp, Homo sapien
agatcaaatcagaacagagtatctatgtaataa

SEQ ID NO: 151097 - DNA, 33 bp, Homo sapien
taatatggatgggctcaagtttatgcacaacca

SEQ ID NO: 151098 - DNA, 33 bp, Homo sapien
taatatggatgggctcgagtttatgcacaacca

SEQ ID NO: 151099 - DNA, 33 bp, Homo sapien
agaaatctaatttatacctgggaagtcaaacag

SEQ ID NO: 151100 - DNA, 33 bp, Homo sapien
agaaatctaatttatagctgggaagtcaaacag

SEQ ID NO: 151101 - DNA, 33 bp, Homo sapien
taaaagacaaataatacgcttaaagagttcaac

SEQ ID NO: 151102 - DNA, 33 bp, Homo sapien
taaaagacaaataatatgcttaaagagttcaac

SEQ ID NO: 151103 - DNA, 33 bp, Homo sapien
ccattggcataatgaactagtaagcataaattg

SEQ ID NO: 151104 - DNA, 33 bp, Homo sapien
ccattggcataatgaattagtaagcataaattg

SEQ ID NO: 151105 - DNA, 33 bp, Homo sapien
gtgcaagtccttaaaggaaatgttgctgcacat

SEQ ID NO: 151106 - DNA, 33 bp, Homo sapien
gtgcaagtccttaaagtaaatgttgctgcacat

SEQ ID NO: 151107 - DNA, 33 bp, Homo sapien
gtacaatggagaaggaagaaggattatcttgtt

SEQ ID NO: 151108 - DNA, 33 bp, Homo sapien
gtacaatggagaaggaggaaggattatcttgtt

SEQ ID NO: 151109 - DNA, 33 bp, Homo sapien
gttattagggtggcaaaagcatagtgtgtttca

SEQ ID NO: 151110 - DNA, 33 bp, Homo sapien
gttattagggtggcaagagcatagtgtgtttca

SEQ ID NO: 151111 - DNA, 33 bp, Homo sapien
ggctccgaagaggacaacattgcaatggtgaca

SEQ ID NO: 151112 - DNA, 33 bp, Homo sapien
ggctccgaagaggacagcattgcaatggtgaca

SEQ ID NO: 151113 - DNA, 33 bp, Homo sapien
agggcagcatcatcccaagagtgtaggagaggc

SEQ ID NO: 151114 - DNA, 33 bp, Homo sapien
agggcagcatcatcccgagagtgtaggagaggc

SEQ ID NO: 151115 - DNA, 33 bp, Homo sapien
cgtggaccacggatgactatggaggggaagatc

SEQ ID NO: 151116 - DNA, 33 bp, Homo sapien
cgtggaccacggatgagtatggaggggaagatc

SEQ ID NO: 151117 - DNA, 33 bp, Homo sapien
tctacaacttctagtacaattgatgttcacttt

SEQ ID NO: 151118 - DNA, 33 bp, Homo sapien
tctacaacttctagtataattgatgttcacttt

SEQ ID NO: 151119 - DNA, 33 bp, Homo sapien
gaggaggggggaattgcagcgtgactgtttaag

SEQ ID NO: 151120 - DNA, 33 bp, Homo sapien
gaggaggggggaattggagcgtgactgtttaag

SEQ ID NO: 151121 - DNA, 33 bp, Homo sapien
tagatacataacagaaaaacaactcataaatat

SEQ ID NO: 151122 - DNA, 33 bp, Homo sapien
tagatacataacagaataacaactcataaatat

SEQ ID NO: 151123 - DNA, 33 bp, Homo sapien
gaatctggcataaacccagaggtggagaaatca

SEQ ID NO: 151124 - DNA, 33 bp, Homo sapien
gaatctggcataaacctagaggtggagaaatca

SEQ ID NO: 151125 - DNA, 33 bp, Homo sapien
ctactcagaagaacggcattactgtacaaaaat

SEQ ID NO: 151126 - DNA, 33 bp, Homo sapien
ctactcagaagaacgggattactgtacaaaaat

SEQ ID NO: 151127 - DNA, 33 bp, Homo sapien
aaactctattaaaatgaaatattggccaggcac

SEQ ID NO: 151128 - DNA, 33 bp, Homo sapien
aaactctattaaaatggaatattggccaggcac

SEQ ID NO: 151129 - DNA, 33 bp, Homo sapien
cttgccagtgttcgtagaattgaaaatatttaa

SEQ ID NO: 151130 - DNA, 33 bp, Homo sapien
cttgccagtgttcgtataattgaaaatatttaa

SEQ ID NO: 151131 - DNA, 33 bp, Homo sapien
ccccaaaatctcatacacatttagcaatcactc

SEQ ID NO: 151132 - DNA, 33 bp, Homo sapien
ccccaaaatctcatacccatttagcaatcactc

SEQ ID NO: 151133 - DNA, 33 bp, Homo sapien
atggtatatccgtaacagaatgttattcagcca

SEQ ID NO: 151134 - DNA, 33 bp, Homo sapien
atggtatatccgtaacggaatgttattcagcca

SEQ ID NO: 151135 - DNA, 33 bp, Homo sapien
tataagaccaaatcacaaagggcttcataattt

SEQ ID NO: 151136 - DNA, 33 bp, Homo sapien
tataagaccaaatcaccaagggcttcataattt

SEQ ID NO: 151137 - DNA, 33 bp, Homo sapien
tggtttgccaactacaaattaaagttagagatc

SEQ ID NO: 151138 - DNA, 33 bp, Homo sapien
tggtttgccaactacagattaaagttagagatc

SEQ ID NO: 151139 - DNA, 33 bp, Homo sapien
ggtattccaggtagaacagaatgtgagaaagcc

SEQ ID NO: 151140 - DNA, 33 bp, Homo sapien
ggtattccaggtagaagagaatgtgagaaagcc

SEQ ID NO: 151141 - DNA, 33 bp, Homo sapien
ctaccaatcctagcaccgacctctcaaatagtt

SEQ ID NO: 151142 - DNA, 33 bp, Homo sapien
ctaccaatcctagcactgacctctcaaatagtt

SEQ ID NO: 151143 - DNA, 33 bp, Homo sapien
tctaaggcaagtaaaacagaaagacaaagcctc

SEQ ID NO: 151144 - DNA, 33 bp, Homo sapien
tctaaggcaagtaaaatagaaagacaaagcctc

SEQ ID NO: 151145 - DNA, 33 bp, Homo sapien
catttagagaagaagaaacccactttccctgta

SEQ ID NO: 151146 - DNA, 33 bp, Homo sapien
catttagagaagaagagacccactttccctgta

SEQ ID NO: 151147 - DNA, 33 bp, Homo sapien
agtgaatctatcctcacgtccaaagagtattct

SEQ ID NO: 151148 - DNA, 33 bp, Homo sapien
agtgaatctatcctcatgtccaaagagtattct

SEQ ID NO: 151149 - DNA, 33 bp, Homo sapien
tggaaagtcatcaccccggactttgaaacaaga

SEQ ID NO: 151150 - DNA, 33 bp, Homo sapien
tggaaagtcatcaccctggactttgaaacaaga

SEQ ID NO: 151151 - DNA, 33 bp, Homo sapien
tagggaaaataacaaaacaagcattctctttct

SEQ ID NO: 151152 - DNA, 33 bp, Homo sapien
tagggaaaataacaaagcaagcattctctttct

SEQ ID NO: 151153 - DNA, 33 bp, Homo sapien
aaagattaatatacacaattaaaatcagctgta

SEQ ID NO: 151154 - DNA, 33 bp, Homo sapien
aaagattaatatacacgattaaaatcagctgta

SEQ ID NO: 151155 - DNA, 33 bp, Homo sapien
gtgcactagctgcaacagagtcttggaaaggat

SEQ ID NO: 151156 - DNA, 33 bp, Homo sapien
gtgcactagctgcaacggagtcttggaaaggat

SEQ ID NO: 151157 - DNA, 33 bp, Homo sapien
gtgaatagatgaaatacggagacatgggaggtg

SEQ ID NO: 151158 - DNA, 33 bp, Homo sapien
gtgaatagatgaaatatggagacatgggaggtg

SEQ ID NO: 151159 - DNA, 33 bp, Homo sapien
acagaaaactgaatcaaaagcaaacattaactt

SEQ ID NO: 151160 - DNA, 33 bp, Homo sapien
acagaaaactgaatcagaagcaaacattaactt

SEQ ID NO: 151161 - DNA, 33 bp, Homo sapien
tgccaggacatggtcaatcggctctaccatctt

SEQ ID NO: 151162 - DNA, 33 bp, Homo sapien
tgccaggacatggtcattcggctctaccatctt

SEQ ID NO: 151163 - DNA, 33 bp, Homo sapien
tcttcgtgcagtagaaataataggtaaatttag

SEQ ID NO: 151164 - DNA, 33 bp, Homo sapien
tcttcgtgcagtagaagtaataggtaaatttag

SEQ ID NO: 151165 - DNA, 33 bp, Homo sapien
agaagggaagcaacatcagtggagtacctacta

SEQ ID NO: 151166 - DNA, 33 bp, Homo sapien
agaagggaagcaacattagtggagtacctacta

SEQ ID NO: 151167 - DNA, 33 bp, Homo sapien
gaaaaactggactgaaagatggtttgtactaaa

SEQ ID NO: 151168 - DNA, 33 bp, Homo sapien
gaaaaactggactgaacgatggtttgtactaaa

SEQ ID NO: 151169 - DNA, 33 bp, Homo sapien
atcttcaagagacccaagatccaggttgtctta

SEQ ID NO: 151170 - DNA, 33 bp, Homo sapien
atcttcaagagacccaggatccaggttgtctta

SEQ ID NO: 151171 - DNA, 33 bp, Homo sapien
tctgttgtgtacatcaaactccaagagacatct

SEQ ID NO: 151172 - DNA, 33 bp, Homo sapien
tctgttgtgtacatcacactccaagagacatct

SEQ ID NO: 151173 - DNA, 33 bp, Homo sapien
gatgagttctcccatccactaccctagttccac

SEQ ID NO: 151174 - DNA, 33 bp, Homo sapien
gatgagttctcccatctactaccctagttccac

SEQ ID NO: 151175 - DNA, 33 bp, Homo sapien
acctctcatctgaacaagattctgcttatcaac

SEQ ID NO: 151176 - DNA, 33 bp, Homo sapien
acctctcatctgaacaggattctgcttatcaac

SEQ ID NO: 151177 - DNA, 33 bp, Homo sapien
ctggcctcattagaaacgcagaatgtcaagccc

SEQ ID NO: 151178 - DNA, 33 bp, Homo sapien
ctggcctcattagaaatgcagaatgtcaagccc

SEQ ID NO: 151179 - DNA, 33 bp, Homo sapien
aatctatgaccttgaaccagtcccttaactttg

SEQ ID NO: 151180 - DNA, 33 bp, Homo sapien
aatctatgaccttgaatcagtcccttaactttg

SEQ ID NO: 151181 - DNA, 33 bp, Homo sapien
agattacattagaagaaagccagcactagaagc

SEQ ID NO: 151182 - DNA, 33 bp, Homo sapien
agattacattagaagagagccagcactagaagc

SEQ ID NO: 151183 - DNA, 33 bp, Homo sapien
ttcataactgcccttcacaacacctgagtttat

SEQ ID NO: 151184 - DNA, 33 bp, Homo sapien
ttcataactgcccttcgcaacacctgagtttat

SEQ ID NO: 151185 - DNA, 33 bp, Homo sapien
cctgaagagattagctaagagtctagtaccttt

SEQ ID NO: 151186 - DNA, 33 bp, Homo sapien
cctgaagagattagctcagagtctagtaccttt

SEQ ID NO: 151187 - DNA, 33 bp, Homo sapien
atgactctagagaccacaaaagtaaaggcaata

SEQ ID NO: 151188 - DNA, 33 bp, Homo sapien
atgactctagagaccagaaaagtaaaggcaata

SEQ ID NO: 151189 - DNA, 33 bp, Homo sapien
catgagggcaaaggaaccaggctaagtaacttc

SEQ ID NO: 151190 - DNA, 33 bp, Homo sapien
catgagggcaaaggaatcaggctaagtaacttc

SEQ ID NO: 151191 - DNA, 33 bp, Homo sapien
gtctgataagcagttccaccattacttagggcc

SEQ ID NO: 151192 - DNA, 33 bp, Homo sapien
gtctgataagcagttctaccattacttagggcc

SEQ ID NO: 151193 - DNA, 33 bp, Homo sapien
cacacgccctggaatgcaacagactggtctgat

SEQ ID NO: 151194 - DNA, 33 bp, Homo sapien
cacacgccctggaatggaacagactggtctgat

SEQ ID NO: 151195 - DNA, 33 bp, Homo sapien
ttgggcttggctccgaatatctctgcttcctac

SEQ ID NO: 151196 - DNA, 33 bp, Homo sapien
ttgggcttggctccgagtatctctgcttcctac

SEQ ID NO: 151197 - DNA, 33 bp, Homo sapien
gtctaatccatgcctcaaggcgccaaatggagc

SEQ ID NO: 151198 - DNA, 33 bp, Homo sapien
gtctaatccatgcctcgaggcgccaaatggagc

SEQ ID NO: 151199 - DNA, 33 bp, Homo sapien
ttcaattcaaaagccaataagaaaatgtagaaa

SEQ ID NO: 151200 - DNA, 33 bp, Homo sapien
ttcaattcaaaagccagtaagaaaatgtagaaa

SEQ ID NO: 151201 - DNA, 33 bp, Homo sapien
aaattttagcttgtaactaatgtaaaataaaat

SEQ ID NO: 151202 - DNA, 33 bp, Homo sapien
aaattttagcttgtaagtaatgtaaaataaaat

SEQ ID NO: 151203 - DNA, 33 bp, Homo sapien
aggcaagtgtgcttcaaataaatttagccttat

SEQ ID NO: 151204 - DNA, 33 bp, Homo sapien
aggcaagtgtgcttcacataaatttagccttat

SEQ ID NO: 151205 - DNA, 33 bp, Homo sapien
acccttccacatatccaatttgaatataactgg

SEQ ID NO: 151206 - DNA, 33 bp, Homo sapien
acccttccacatatccgatttgaatataactgg

SEQ ID NO: 151207 - DNA, 33 bp, Homo sapien
aatataactaaggtcagcttatctcattgagac

SEQ ID NO: 151208 - DNA, 33 bp, Homo sapien
aatataactaaggtcatcttatctcattgagac

SEQ ID NO: 151209 - DNA, 33 bp, Homo sapien
ctgattcgtataataaatcacagcaaaataacc

SEQ ID NO: 151210 - DNA, 33 bp, Homo sapien
ctgattcgtataataagtcacagcaaaataacc

SEQ ID NO: 151211 - DNA, 33 bp, Homo sapien
actcttacaagtcatacgcacacacaagacagc

SEQ ID NO: 151212 - DNA, 33 bp, Homo sapien
actcttacaagtcatatgcacacacaagacagc

SEQ ID NO: 151213 - DNA, 33 bp, Homo sapien
ggtagattggggattacagaaaatttgaggttc

SEQ ID NO: 151214 - DNA, 33 bp, Homo sapien
ggtagattggggattatagaaaatttgaggttc

SEQ ID NO: 151215 - DNA, 33 bp, Homo sapien
cacaactagcacaggaagcagtagaagggatcc

SEQ ID NO: 151216 - DNA, 33 bp, Homo sapien
cacaactagcacaggaggcagtagaagggatcc

SEQ ID NO: 151217 - DNA, 33 bp, Homo sapien
ctattcctttccaatacagaaggctgtactgaa

SEQ ID NO: 151218 - DNA, 33 bp, Homo sapien
ctattcctttccaatatagaaggctgtactgaa

SEQ ID NO: 151219 - DNA, 33 bp, Homo sapien
tgtaagactgtgaaccaaactgttaaaggcaat

SEQ ID NO: 151220 - DNA, 33 bp, Homo sapien
tgtaagactgtgaacccaactgttaaaggcaat

SEQ ID NO: 151221 - DNA, 33 bp, Homo sapien
ttgtttctgtaaggaacacctttagtcactctc

SEQ ID NO: 151222 - DNA, 33 bp, Homo sapien
ttgtttctgtaaggaatacctttagtcactctc

SEQ ID NO: 151223 - DNA, 33 bp, Homo sapien
atattcatatagataaactccaaaaaactgagc

SEQ ID NO: 151224 - DNA, 33 bp, Homo sapien
atattcatatagataagctccaaaaaactgagc

SEQ ID NO: 151225 - DNA, 33 bp, Homo sapien
ctatatcatggaggcaacctacaatttgagtct

SEQ ID NO: 151226 - DNA, 33 bp, Homo sapien
ctatatcatggaggcatcctacaatttgagtct

SEQ ID NO: 151227 - DNA, 33 bp, Homo sapien
tcaaaggctattaagacacagactatatgtaca

SEQ ID NO: 151228 - DNA, 33 bp, Homo sapien
tcaaaggctattaagagacagactatatgtaca

SEQ ID NO: 151229 - DNA, 33 bp, Homo sapien
gggtcactttcagagggagttttaagtgttggg

SEQ ID NO: 151230 - DNA, 33 bp, Homo sapien
gggtcactttcagaggtagttttaagtgttggg

SEQ ID NO: 151231 - DNA, 33 bp, Homo sapien
gcctcatcctgagatccgaaacaaatgtttaac

SEQ ID NO: 151232 - DNA, 33 bp, Homo sapien
gcctcatcctgagatctgaaacaaatgtttaac

SEQ ID NO: 151233 - DNA, 33 bp, Homo sapien
gaaagctcttggcacaacagtgatacctaagga

SEQ ID NO: 151234 - DNA, 33 bp, Homo sapien
gaaagctcttggcacagcagtgatacctaagga

SEQ ID NO: 151235 - DNA, 33 bp, Homo sapien
cgaattgcatgtttaacaacttgactcattatg

SEQ ID NO: 151236 - DNA, 33 bp, Homo sapien
cgaattgcatgtttaataacttgactcattatg

SEQ ID NO: 151237 - DNA, 33 bp, Homo sapien
attgttaatggtgacaaaatatcctaaatcaca

SEQ ID NO: 151238 - DNA, 33 bp, Homo sapien
attgttaatggtgacacaatatcctaaatcaca

SEQ ID NO: 151239 - DNA, 33 bp, Homo sapien
gcaggtgggaatgagacaaagagtgggtgaagt

SEQ ID NO: 151240 - DNA, 33 bp, Homo sapien
gcaggtgggaatgagataaagagtgggtgaagt

SEQ ID NO: 151241 - DNA, 33 bp, Homo sapien
gatgaccaagatgtaccactaagtgaaagaatc

SEQ ID NO: 151242 - DNA, 33 bp, Homo sapien
gatgaccaagatgtactactaagtgaaagaatc

SEQ ID NO: 151243 - DNA, 33 bp, Homo sapien
tgactgattcatccctaaaccaaaataacccaa

SEQ ID NO: 151244 - DNA, 33 bp, Homo sapien
tgactgattcatcccttaaccaaaataacccaa

SEQ ID NO: 151245 - DNA, 33 bp, Homo sapien
tctcagaaatgttaaaatgtgcaaaaaaatgta

SEQ ID NO: 151246 - DNA, 33 bp, Homo sapien
tctcagaaatgttaaagtgtgcaaaaaaatgta

SEQ ID NO: 151247 - DNA, 33 bp, Homo sapien
ttaaaatcatttcatgcaaacttataacggatg

SEQ ID NO: 151248 - DNA, 33 bp, Homo sapien
ttaaaatcatttcatggaaacttataacggatg

SEQ ID NO: 151249 - DNA, 33 bp, Homo sapien
ggggctaaggacagaaacttgggaaagatatgt

SEQ ID NO: 151250 - DNA, 33 bp, Homo sapien
ggggctaaggacagaagcttgggaaagatatgt

SEQ ID NO: 151251 - DNA, 33 bp, Homo sapien
ggtgagaatggtatcacagatgttaagaggaaa

SEQ ID NO: 151252 - DNA, 33 bp, Homo sapien
ggtgagaatggtatcatagatgttaagaggaaa

SEQ ID NO: 151253 - DNA, 33 bp, Homo sapien
taatcaaatacttataaaatcaactatcacaaa

SEQ ID NO: 151254 - DNA, 33 bp, Homo sapien
taatcaaatacttatataatcaactatcacaaa

SEQ ID NO: 151255 - DNA, 33 bp, Homo sapien
gggagctctgtagtacaaatcagattgcttctc

SEQ ID NO: 151256 - DNA, 33 bp, Homo sapien
gggagctctgtagtacgaatcagattgcttctc

SEQ ID NO: 151257 - DNA, 33 bp, Homo sapien
ttcctcatggcaaaaacgtgttgtctccccttt

SEQ ID NO: 151258 - DNA, 33 bp, Homo sapien
ttcctcatggcaaaaatgtgttgtctccccttt

SEQ ID NO: 151259 - DNA, 33 bp, Homo sapien
aacttagctccaatacaagccaaggagtatttg

SEQ ID NO: 151260 - DNA, 33 bp, Homo sapien
aacttagctccaataccagccaaggagtatttg

SEQ ID NO: 151261 - DNA, 33 bp, Homo sapien
aactgatttcaatcataaaaataattgcacatt

SEQ ID NO: 151262 - DNA, 33 bp, Homo sapien
aactgatttcaatcatgaaaataattgcacatt

SEQ ID NO: 151263 - DNA, 33 bp, Homo sapien
aagagtttttgtcataataggtgtcagttttat

SEQ ID NO: 151264 - DNA, 33 bp, Homo sapien
aagagtttttgtcatactaggtgtcagttttat

SEQ ID NO: 151265 - DNA, 33 bp, Homo sapien
agaaactcagtataggcactaaaattctaacca

SEQ ID NO: 151266 - DNA, 33 bp, Homo sapien
agaaactcagtatagggactaaaattctaacca

SEQ ID NO: 151267 - DNA, 33 bp, Homo sapien
tactctatttgttccacacatttgtttgatatt

SEQ ID NO: 151268 - DNA, 33 bp, Homo sapien
tactctatttgttccatacatttgtttgatatt

SEQ ID NO: 151269 - DNA, 33 bp, Homo sapien
aagtactagagccaccaaaattctactcaggta

SEQ ID NO: 151270 - DNA, 33 bp, Homo sapien
aagtactagagccaccgaaattctactcaggta

SEQ ID NO: 151271 - DNA, 33 bp, Homo sapien; identical to SEQ ID NO: 151269

SEQ ID NO: 151272 - DNA, 33 bp, Homo sapien; identical to SEQ ID NO: 151270

SEQ ID NO: 151273 - DNA, 33 bp, Homo sapien
atgtacacctgcttgacgcctctgtttaagtgg

SEQ ID NO: 151274 - DNA, 33 bp, Homo sapien
atgtacacctgcttgatgcctctgtttaagtgg

SEQ ID NO: 151275 - DNA, 33 bp, Homo sapien
taatcaaatttatgaaagaaacaaggcctaaat

SEQ ID NO: 151276 - DNA, 33 bp, Homo sapien
taatcaaatttatgaatgaaacaaggcctaaat

SEQ ID NO: 151277 - DNA, 33 bp, Homo sapien
agttcttgagcctaccacagctaataggatgaa

SEQ ID NO: 151278 - DNA, 33 bp, Homo sapien
agttcttgagcctaccgcagctaataggatgaa

SEQ ID NO: 151279 - DNA, 33 bp, Homo sapien
ctgcaaagacaactcaaccgatctaaatttaaa

SEQ ID NO: 151280 - DNA, 33 bp, Homo sapien
ctgcaaagacaactcagccgatctaaatttaaa

SEQ ID NO: 151281 - DNA, 33 bp, Homo sapien
gttatttcacactttaccacatccgagtccttt

SEQ ID NO: 151282 - DNA, 33 bp, Homo sapien
gttatttcacactttatcacatccgagtccttt

SEQ ID NO: 151283 - DNA, 33 bp, Homo sapien
agttcaattttctgatcataagcacctaaaagg

SEQ ID NO: 151284 - DNA, 33 bp, Homo sapien
agttcaattttctgatgataagcacctaaaagg

SEQ ID NO: 151285 - DNA, 33 bp, Homo sapien
cacaatggctctcctacacaagaggttcatgag

SEQ ID NO: 151286 - DNA, 33 bp, Homo sapien
cacaatggctctcctagacaagaggttcatgag

SEQ ID NO: 151287 - DNA, 33 bp, Homo sapien
ttgtaaccagcatttaccgtcaaggaccaggga

SEQ ID NO: 151288 - DNA, 33 bp, Homo sapien
ttgtaaccagcatttagcgtcaaggaccaggga

SEQ ID NO: 151289 - DNA, 33 bp, Homo sapien
cctttcattggtctggaaaataatgaatgcata

SEQ ID NO: 151290 - DNA, 33 bp, Homo sapien
cctttcattggtctgggaaataatgaatgcata

SEQ ID NO: 151291 - DNA, 33 bp, Homo sapien
gctaaagatcaacagaaaaacgaaaggccaata

SEQ ID NO: 151292 - DNA, 33 bp, Homo sapien
gctaaagatcaacagagaaacgaaaggccaata

SEQ ID NO: 151293 - DNA, 33 bp, Homo sapien
ataaacatataacatccagaaaaagaatgtgag

SEQ ID NO: 151294 - DNA, 33 bp, Homo sapien
ataaacatataacatcgagaaaaagaatgtgag

SEQ ID NO: 151295 - DNA, 33 bp, Homo sapien
gaaaaaataccctgcaaactaattataagttta

SEQ ID NO: 151296 - DNA, 33 bp, Homo sapien
gaaaaaataccctgcagactaattataagttta

SEQ ID NO: 151297 - DNA, 33 bp, Homo sapien
tcacaactgtgacacacaaaaataattacctag

SEQ ID NO: 151298 - DNA, 33 bp, Homo sapien
tcacaactgtgacacagaaaaataattacctag

SEQ ID NO: 151299 - DNA, 33 bp, Homo sapien
agggctagaccttggagtcaaacagaaaagcac

SEQ ID NO: 151300 - DNA, 33 bp, Homo sapien
agggctagaccttggattcaaacagaaaagcac

SEQ ID NO: 151301 - DNA, 33 bp, Homo sapien
gtagacaggtataatacagcgggaaagaaagag

SEQ ID NO: 151302 - DNA, 33 bp, Homo sapien
gtagacaggtataatagagcgggaaagaaagag

SEQ ID NO: 151303 - DNA, 33 bp, Homo sapien
tatagactagggagaacagagaaaattgaaaat

SEQ ID NO: 151304 - DNA, 33 bp, Homo sapien
tatagactagggagaatagagaaaattgaaaat

SEQ ID NO: 151305 - DNA, 33 bp, Homo sapien
cccaaatcttatgttgaatcgtgatcccaagtg

SEQ ID NO: 151306 - DNA, 33 bp, Homo sapien
cccaaatcttatgttgtatcgtgatcccaagtg

SEQ ID NO: 151307 - DNA, 33 bp, Homo sapien
ccaaaaggagcaattcacacttgaggaaatgag

SEQ ID NO: 151308 - DNA, 33 bp, Homo sapien
ccaaaaggagcaattcgcacttgaggaaatgag

SEQ ID NO: 151309 - DNA, 33 bp, Homo sapien
gtaatatgtgattaaaatcagtacgtgtgatta

SEQ ID NO: 151310 - DNA, 33 bp, Homo sapien
gtaatatgtgattaaactcagtacgtgtgatta

SEQ ID NO: 151311 - DNA, 33 bp, Homo sapien
tcacataccttgattacattatgaagcacaaaa

SEQ ID NO: 151312 - DNA, 33 bp, Homo sapien
tcacataccttgattatattatgaagcacaaaa

SEQ ID NO: 151313 - DNA, 33 bp, Homo sapien
ggaaacatagggttcacctcacaaatacttgca

SEQ ID NO: 151314 - DNA, 33 bp, Homo sapien
ggaaacatagggttcagctcacaaatacttgca

SEQ ID NO: 151315 - DNA, 33 bp, Homo sapien
ttctttaggaccttgaagtttagtactgtagtt

SEQ ID NO: 151316 - DNA, 33 bp, Homo sapien
ttctttaggaccttgaggtttagtactgtagtt

SEQ ID NO: 151317 - DNA, 33 bp, Homo sapien
atcagaaatgaaatgaaatatcactagagaccc

SEQ ID NO: 151318 - DNA, 33 bp, Homo sapien
atcagaaatgaaatgagatatcactagagaccc

SEQ ID NO: 151319 - DNA, 33 bp, Homo sapien
gtctttcactatgtgactcaatgacattttgtc

SEQ ID NO: 151320 - DNA, 33 bp, Homo sapien
gtctttcactatgtgattcaatgacattttgtc

SEQ ID NO: 151321 - DNA, 33 bp, Homo sapien
tattacggattttcagacctctgtgcctttgat

SEQ ID NO: 151322 - DNA, 33 bp, Homo sapien
tattacggattttcaggcctctgtgcctttgat

SEQ ID NO: 151323 - DNA, 33 bp, Homo sapien
aatagacaccagtacaataatagctggagactt

SEQ ID NO: 151324 - DNA, 33 bp, Homo sapien
aatagacaccagtacagtaatagctggagactt

SEQ ID NO: 151325 - DNA, 33 bp, Homo sapien
accatttgggcttatcacttccacaactgaatt

SEQ ID NO: 151326 - DNA, 33 bp, Homo sapien
accatttgggcttatctcttccacaactgaatt

SEQ ID NO: 151327 - DNA, 33 bp, Homo sapien
atagctaaatgggaaaaataagttctcgtgttc

SEQ ID NO: 151328 - DNA, 33 bp, Homo sapien
atagctaaatgggaaatataagttctcgtgttc

SEQ ID NO: 151329 - DNA, 33 bp, Homo sapien
aaagcttggtataaaccgtgtgtggaaggactc

SEQ ID NO: 151330 - DNA, 33 bp, Homo sapien
aaagcttggtataaacggtgtgtggaaggactc

SEQ ID NO: 151331 - DNA, 33 bp, Homo sapien
ttcagtcttctgtaaacgtagattgaggagaag

SEQ ID NO: 151332 - DNA, 33 bp, Homo sapien
ttcagtcttctgtaaatgtagattgaggagaag

SEQ ID NO: 151333 - DNA, 33 bp, Homo sapien
tttgtaatatgtctacaaagtttggttctccag

SEQ ID NO: 151334 - DNA, 33 bp, Homo sapien
tttgtaatatgtctacgaagtttggttctccag

SEQ ID NO: 151335 - DNA, 33 bp, Homo sapien
aagtcatcaactaacccaatttcaatactggcg

SEQ ID NO: 151336 - DNA, 33 bp, Homo sapien
aagtcatcaactaacctaatttcaatactggcg

SEQ ID NO: 151337 - DNA, 33 bp, Homo sapien
ctacacaaccaagagaaactgaggtgtccagct

SEQ ID NO: 151338 - DNA, 33 bp, Homo sapien
ctacacaaccaagagatactgaggtgtccagct

SEQ ID NO: 151339 - DNA, 33 bp, Homo sapien
aaggacagaagaaagcagcacaacatttttcaa

SEQ ID NO: 151340 - DNA, 33 bp, Homo sapien
aaggacagaagaaagcggcacaacatttttcaa

SEQ ID NO: 151341 - DNA, 33 bp, Homo sapien
catgctaattgataggacattgtgatagagaac

SEQ ID NO: 151342 - DNA, 33 bp, Homo sapien
catgctaattgatagggcattgtgatagagaac

SEQ ID NO: 151343 - DNA, 33 bp, Homo sapien
aaaggttcagcctgctaactctggttttaccta

SEQ ID NO: 151344 - DNA, 33 bp, Homo sapien
aaaggttcagcctgctgactctggttttaccta

SEQ ID NO: 151345 - DNA, 33 bp, Homo sapien
acacttgaaaacagatcaataaattaccgaatt

SEQ ID NO: 151346 - DNA, 33 bp, Homo sapien
acacttgaaaacagatgaataaattaccgaatt

SEQ ID NO: 151347 - DNA, 33 bp, Homo sapien
ccttacaaagtagttaccttgtcatttctatca

SEQ ID NO: 151348 - DNA, 33 bp, Homo sapien
ccttacaaagtagttatcttgtcatttctatca

SEQ ID NO: 151349 - DNA, 33 bp, Homo sapien
acaaataccttccttacggtacttataaagatt

SEQ ID NO: 151350 - DNA, 33 bp, Homo sapien
acaaataccttccttagggtacttataaagatt

SEQ ID NO: 151351 - DNA, 33 bp, Homo sapien
atatgaactatagaaacgtttgaaggattgttg

SEQ ID NO: 151352 - DNA, 33 bp, Homo sapien
atatgaactatagaaatgtttgaaggattgttg

SEQ ID NO: 151353 - DNA, 33 bp, Homo sapien
ttgaccattgttgtgacgtcacggtcttttgta

SEQ ID NO: 151354 - DNA, 33 bp, Homo sapien
ttgaccattgttgtgatgtcacggtcttttgta

SEQ ID NO: 151355 - DNA, 33 bp, Homo sapien
aaaacaaggaaatttgcaatcttcttttataag

SEQ ID NO: 151356 - DNA, 33 bp, Homo sapien
aaaacaaggaaatttgtaatcttcttttataag

SEQ ID NO: 151357 - DNA, 33 bp, Homo sapien
ttgtgaccagtcaatcaccatgctacctcatac

SEQ ID NO: 151358 - DNA, 33 bp, Homo sapien
ttgtgaccagtcaatcgccatgctacctcatac

SEQ ID NO: 151359 - DNA, 33 bp, Homo sapien
gacccaggctagatacaggtaaatgcagatttc

SEQ ID NO: 151360 - DNA, 33 bp, Homo sapien
gacccaggctagatacgggtaaatgcagatttc

SEQ ID NO: 151361 - DNA, 33 bp, Homo sapien
cttcaacttaattgcacaagttaaatcagccca

SEQ ID NO: 151362 - DNA, 33 bp, Homo sapien
cttcaacttaattgcagaagttaaatcagccca

SEQ ID NO: 151363 - DNA, 33 bp, Homo sapien
atgaatgttatgaccacgtttctaggtaacatc

SEQ ID NO: 151364 - DNA, 33 bp, Homo sapien
atgaatgttatgaccatgtttctaggtaacatc

SEQ ID NO: 151365 - DNA, 33 bp, Homo sapien
cctcagcaaataaaaggatgaatgatttggcag

SEQ ID NO: 151366 - DNA, 33 bp, Homo sapien
cctcagcaaataaaagtatgaatgatttggcag

SEQ ID NO: 151367 - DNA, 33 bp, Homo sapien
gagctttgagttcaagccaatccttcccataca

SEQ ID NO: 151368 - DNA, 33 bp, Homo sapien
gagctttgagttcaagtcaatccttcccataca

SEQ ID NO: 151369 - DNA, 33 bp, Homo sapien
atcgctatctgccacacctgacactaagaaata

SEQ ID NO: 151370 - DNA, 33 bp, Homo sapien
atcgctatctgccacatctgacactaagaaata

SEQ ID NO: 151371 - DNA, 33 bp, Homo sapien
tcttcatatttgacaaccagctggctactgaca

SEQ ID NO: 151372 - DNA, 33 bp, Homo sapien
tcttcatatttgacaatcagctggctactgaca

SEQ ID NO: 151373 - DNA, 33 bp, Homo sapien
catcataggtagttaaagaagatacatggaatg

SEQ ID NO: 151374 - DNA, 33 bp, Homo sapien
catcataggtagttaaggaagatacatggaatg

SEQ ID NO: 151375 - DNA, 33 bp, Homo sapien
acacctcgctgagacactcacgtcttaaaatag

SEQ ID NO: 151376 - DNA, 33 bp, Homo sapien
acacctcgctgagacattcacgtcttaaaatag

SEQ ID NO: 151377 - DNA, 33 bp, Homo sapien
ctgttgcttgctgtggaaatgataccatacatt

SEQ ID NO: 151378 - DNA, 33 bp, Homo sapien
ctgttgcttgctgtgggaatgataccatacatt

SEQ ID NO: 151379 - DNA, 33 bp, Homo sapien
cttatgactatattaacgctccagtgctcttta

SEQ ID NO: 151380 - DNA, 33 bp, Homo sapien
cttatgactatattaatgctccagtgctcttta

SEQ ID NO: 151381 - DNA, 33 bp, Homo sapien
cataaatctagtgtcccgataagagggtggcag

SEQ ID NO: 151382 - DNA, 33 bp, Homo sapien
cataaatctagtgtcctgataagagggtggcag

SEQ ID NO: 151383 - DNA, 33 bp, Homo sapien
gttgaaattggcacataataacatttccagcag

SEQ ID NO: 151384 - DNA, 33 bp, Homo sapien
gttgaaattggcacatcataacatttccagcag

SEQ ID NO: 151385 - DNA, 33 bp, Homo sapien
gaggtgattgtgagaaagtctgttcccagaaaa

SEQ ID NO: 151386 - DNA, 33 bp, Homo sapien
gaggtgattgtgagaaggtctgttcccagaaaa

SEQ ID NO: 151387 - DNA, 33 bp, Homo sapien
agtaagtagagactgaaaaagaactgtcatttg

SEQ ID NO: 151388 - DNA, 33 bp, Homo sapien
agtaagtagagactgataaagaactgtcatttg

SEQ ID NO: 151389 - DNA, 33 bp, Homo sapien
gtaagtgttccccagcagaattggataaaatcc

SEQ ID NO: 151390 - DNA, 33 bp, Homo sapien
gtaagtgttccccagcggaattggataaaatcc

SEQ ID NO: 151391 - DNA, 33 bp, Homo sapien
gtataattcctccttcccccactagagcctctc

SEQ ID NO: 151392 - DNA, 33 bp, Homo sapien
gtataattcctccttctcccactagagcctctc

SEQ ID NO: 151393 - DNA, 33 bp, Homo sapien
gtgaatgagcagactcactttctgtgaaacccc

SEQ ID NO: 151394 - DNA, 33 bp, Homo sapien
gtgaatgagcagactccctttctgtgaaacccc

SEQ ID NO: 151395 - DNA, 33 bp, Homo sapien
gaggggactagattgcaaaaaccttgagttcta

SEQ ID NO: 151396 - DNA, 33 bp, Homo sapien
gaggggactagattgcgaaaaccttgagttcta

SEQ ID NO: 151397 - DNA, 33 bp, Homo sapien
ctcatgaatagaggtaacagattaaaaccaatg

SEQ ID NO: 151398 - DNA, 33 bp, Homo sapien
ctcatgaatagaggtagcagattaaaaccaatg

SEQ ID NO: 151399 - DNA, 33 bp, Homo sapien
tggaggtggctataagacaacgcatggtagcgg

SEQ ID NO: 151400 - DNA, 33 bp, Homo sapien
tggaggtggctataaggcaacgcatggtagcgg

SEQ ID NO: 151401 - DNA, 33 bp, Homo sapien
aagctcaactcctaagaatctcaagttttcacc

SEQ ID NO: 151402 - DNA, 33 bp, Homo sapien
aagctcaactcctaagcatctcaagttttcacc

SEQ ID NO: 151403 - DNA, 33 bp, Homo sapien
aagaggggagtttagaagccctgaggatagaac

SEQ ID NO: 151404 - DNA, 33 bp, Homo sapien
aagaggggagtttagaggccctgaggatagaac

SEQ ID NO: 151405 - DNA, 33 bp, Homo sapien
aagcagcaataaataactaatacggggcaggta

SEQ ID NO: 151406 - DNA, 33 bp, Homo sapien
aagcagcaataaataagtaatacggggcaggta

SEQ ID NO: 151407 - DNA, 33 bp, Homo sapien
aagagaagagaggctgcatcttcccattagaca

SEQ ID NO: 151408 - DNA, 33 bp, Homo sapien
aagagaagagaggctggatcttcccattagaca

SEQ ID NO: 151409 - DNA, 33 bp, Homo sapien
caagcaagaatccagacaccacagattaagaca

SEQ ID NO: 151410 - DNA, 33 bp, Homo sapien
caagcaagaatccagagaccacagattaagaca

SEQ ID NO: 151411 - DNA, 33 bp, Homo sapien
aaaaaatgcctttttaaaactcagccagtgtaa

SEQ ID NO: 151412 - DNA, 33 bp, Homo sapien
aaaaaatgcctttttagaactcagccagtgtaa

SEQ ID NO: 151413 - DNA, 33 bp, Homo sapien
gatcaagtgttgagaacctgagaaaagagacct

SEQ ID NO: 151414 - DNA, 33 bp, Homo sapien
gatcaagtgttgagaatctgagaaaagagacct

SEQ ID NO: 151415 - DNA, 33 bp, Homo sapien
tcacacaacagagacagacttgataataatagc

SEQ ID NO: 151416 - DNA, 33 bp, Homo sapien
tcacacaacagagacatacttgataataatagc

SEQ ID NO: 151417 - DNA, 33 bp, Homo sapien
aaccttagaggtacaacatccttgagaaatact

SEQ ID NO: 151418 - DNA, 33 bp, Homo sapien
aaccttagaggtacaatatccttgagaaatact

SEQ ID NO: 151419 - DNA, 33 bp, Homo sapien
actattgttctttttcaaaatgttcttggctag

SEQ ID NO: 151420 - DNA, 33 bp, Homo sapien
actattgttctttttccaaatgttcttggctag

SEQ ID NO: 151421 - DNA, 33 bp, Homo sapien
atcaggaccagcggaaaagagtgtggaaagagc

SEQ ID NO: 151422 - DNA, 33 bp, Homo sapien
atcaggaccagcggaacagagtgtggaaagagc

SEQ ID NO: 151423 - DNA, 33 bp, Homo sapien
tgctcccgaggggaaaccacataggcacagtcc

SEQ ID NO: 151424 - DNA, 33 bp, Homo sapien
tgctcccgaggggaaatcacataggcacagtcc

SEQ ID NO: 151425 - DNA, 33 bp, Homo sapien
gccactgatgaagggaaccctgggcatggtgat

SEQ ID NO: 151426 - DNA, 33 bp, Homo sapien
gccactgatgaagggagccctgggcatggtgat

SEQ ID NO: 151427 - DNA, 33 bp, Homo sapien
agcaagaattctatagacccaagttcagagaaa

SEQ ID NO: 151428 - DNA, 33 bp, Homo sapien
agcaagaattctatagtcccaagttcagagaaa

SEQ ID NO: 151429 - DNA, 33 bp, Homo sapien
cagtgctgtcccatcaaattaagccacccatca

SEQ ID NO: 151430 - DNA, 33 bp, Homo sapien
cagtgctgtcccatcagattaagccacccatca

SEQ ID NO: 151431 - DNA, 33 bp, Homo sapien
cctcagtaagatccaaagttcttctcatggact

SEQ ID NO: 151432 - DNA, 33 bp, Homo sapien
cctcagtaagatccaacgttcttctcatggact

SEQ ID NO: 151433 - DNA, 33 bp, Homo sapien
tgctgtctctaaattaaagctctgtttcctggg

SEQ ID NO: 151434 - DNA, 33 bp, Homo sapien
tgctgtctctaaattacagctctgtttcctggg

SEQ ID NO: 151435 - DNA, 33 bp, Homo sapien
ttggatgtgttgggaaagtatcctgttccatca

SEQ ID NO: 151436 - DNA, 33 bp, Homo sapien
ttggatgtgttgggaatgtatcctgttccatca

SEQ ID NO: 151437 - DNA, 33 bp, Homo sapien
atttttccatagatgtaaagtctgagattgaag

SEQ ID NO: 151438 - DNA, 33 bp, Homo sapien
atttttccatagatgtgaagtctgagattgaag

SEQ ID NO: 151439 - DNA, 33 bp, Homo sapien
cagagcagagcagaggcacagctagactgggca

SEQ ID NO: 151440 - DNA, 33 bp, Homo sapien
cagagcagagcagaggtacagctagactgggca

SEQ ID NO: 151441 - DNA, 33 bp, Homo sapien
gacacataaccgatgacaaaattcgtcttcaga

SEQ ID NO: 151442 - DNA, 33 bp, Homo sapien
gacacataaccgatgataaaattcgtcttcaga

SEQ ID NO: 151443 - DNA, 33 bp, Homo sapien
gagctcaattgttgataactgccatcttgtgtg

SEQ ID NO: 151444 - DNA, 33 bp, Homo sapien
gagctcaattgttgatgactgccatcttgtgtg

SEQ ID NO: 151445 - DNA, 33 bp, Homo sapien
atgaggtatgaacagaacctgtccacctggaca

SEQ ID NO: 151446 - DNA, 33 bp, Homo sapien
atgaggtatgaacagagcctgtccacctggaca

SEQ ID NO: 151447 - DNA, 33 bp, Homo sapien
tggacatcagagggacacaggatttctctcgcc

SEQ ID NO: 151448 - DNA, 33 bp, Homo sapien
tggacatcagagggacgcaggatttctctcgcc

SEQ ID NO: 151449 - DNA, 33 bp, Homo sapien
caatgatgattaagtcaatgatgggctacatat

SEQ ID NO: 151450 - DNA, 33 bp, Homo sapien
caatgatgattaagtcgatgatgggctacatat

SEQ ID NO: 151451 - DNA, 33 bp, Homo sapien
tcgtagccctcataaaatcatagtgcaatgcat

SEQ ID NO: 151452 - DNA, 33 bp, Homo sapien
tcgtagccctcataaagtcatagtgcaatgcat

SEQ ID NO: 151453 - DNA, 33 bp, Homo sapien
tgcactgccagttgcacaaaagtatagcacata

SEQ ID NO: 151454 - DNA, 33 bp, Homo sapien
tgcactgccagttgcataaaagtatagcacata

SEQ ID NO: 151455 - DNA, 33 bp, Homo sapien
actctatttcttggcaataatgaagagaataaa

SEQ ID NO: 151456 - DNA, 33 bp, Homo sapien
actctatttcttggcagtaatgaagagaataaa

SEQ ID NO: 151457 - DNA, 33 bp, Homo sapien
gggaaagggaagtctgaagctcagttggccacc

SEQ ID NO: 151458 - DNA, 33 bp, Homo sapien
gggaaagggaagtctgcagctcagttggccacc

SEQ ID NO: 151459 - DNA, 33 bp, Homo sapien
aactatcctggtaggccatagataatttcatct

SEQ ID NO: 151460 - DNA, 33 bp, Homo sapien
aactatcctggtaggcgatagataatttcatct

SEQ ID NO: 151461 - DNA, 33 bp, Homo sapien
aagagatttggcaacacggaaatggtggtgtcc

SEQ ID NO: 151462 - DNA, 33 bp, Homo sapien
aagagatttggcaacatggaaatggtggtgtcc

SEQ ID NO: 151463 - DNA, 33 bp, Homo sapien
ctcccaagtaactaagacaacaggcatacccca

SEQ ID NO: 151464 - DNA, 33 bp, Homo sapien
ctcccaagtaactaagtcaacaggcatacccca

SEQ ID NO: 151465 - DNA, 33 bp, Homo sapien
tcaccattgcacttgacggagctggctgaccac

SEQ ID NO: 151466 - DNA, 33 bp, Homo sapien
tcaccattgcacttgatggagctggctgaccac

SEQ ID NO: 151467 - DNA, 33 bp, Homo sapien
tgccatactgtctgcactgaaatgatttgcttg

SEQ ID NO: 151468 - DNA, 33 bp, Homo sapien
tgccatactgtctgcattgaaatgatttgcttg

SEQ ID NO: 151469 - DNA, 33 bp, Homo sapien
atcacctgacagctccacacactgtgttctggc

SEQ ID NO: 151470 - DNA, 33 bp, Homo sapien
atcacctgacagctccgcacactgtgttctggc

SEQ ID NO: 151471 - DNA, 33 bp, Homo sapien
ggtgttatttccaggacagaaaacggcacaaag

SEQ ID NO: 151472 - DNA, 33 bp, Homo sapien
ggtgttatttccaggatagaaaacggcacaaag

SEQ ID NO: 151473 - DNA, 33 bp, Homo sapien
accattcttgtcttcacggaggtcatcagctag

SEQ ID NO: 151474 - DNA, 33 bp, Homo sapien
accattcttgtcttcatggaggtcatcagctag

SEQ ID NO: 151475 - DNA, 33 bp, Homo sapien
tattggcttccaaaaacgctcaaataaccccat

SEQ ID NO: 151476 - DNA, 33 bp, Homo sapien
tattggcttccaaaaatgctcaaataaccccat

SEQ ID NO: 151477 - DNA, 33 bp, Homo sapien
ttttagtttctcttctcactagaggtgccttta

SEQ ID NO: 151478 - DNA, 33 bp, Homo sapien
ttttagtttctcttcttactagaggtgccttta

SEQ ID NO: 151479 - DNA, 33 bp, Homo sapien
tttcaaatttctcacacgtttaaagaaataaat

SEQ ID NO: 151480 - DNA, 33 bp, Homo sapien
tttcaaatttctcacaggtttaaagaaataaat

SEQ ID NO: 151481 - DNA, 33 bp, Homo sapien
tatggtttatgttggacacctgctttccttctg

SEQ ID NO: 151482 - DNA, 33 bp, Homo sapien
tatggtttatgttggatacctgctttccttctg

SEQ ID NO: 151483 - DNA, 33 bp, Homo sapien
agagatgtgaaagacagtccttgttcttgggag

SEQ ID NO: 151484 - DNA, 33 bp, Homo sapien
agagatgtgaaagacattccttgttcttgggag

SEQ ID NO: 151485 - DNA, 33 bp, Homo sapien
gtcgtgaggattaaacaggagaatgcatgtgaa

SEQ ID NO: 151486 - DNA, 33 bp, Homo sapien
gtcgtgaggattaaaccggagaatgcatgtgaa

SEQ ID NO: 151487 - DNA, 33 bp, Homo sapien
aggctgtagcttcacccgggccttgaactgcct

SEQ ID NO: 151488 - DNA, 33 bp, Homo sapien
aggctgtagcttcacctgggccttgaactgcct

SEQ ID NO: 151489 - DNA, 33 bp, Homo sapien
ggtctgttccttccaaacacagatggaggatgc

SEQ ID NO: 151490 - DNA, 33 bp, Homo sapien
ggtctgttccttccaagcacagatggaggatgc

SEQ ID NO: 151491 - DNA, 33 bp, Homo sapien
ggaaaggagaaaccgcactctttctgggatgct

SEQ ID NO: 151492 - DNA, 33 bp, Homo sapien
ggaaaggagaaaccgcgctctttctgggatgct

SEQ ID NO: 151493 - DNA, 33 bp, Homo sapien
ttgtgatgccagtctccaaagtagcatagtgag

SEQ ID NO: 151494 - DNA, 33 bp, Homo sapien
ttgtgatgccagtctcgaaagtagcatagtgag

SEQ ID NO: 151495 - DNA, 33 bp, Homo sapien
ctgttcttaggcaccacagtcagtccataaaca

SEQ ID NO: 151496 - DNA, 33 bp, Homo sapien
ctgttcttaggcaccatagtcagtccataaaca

SEQ ID NO: 151497 - DNA, 33 bp, Homo sapien
tccagaatctgggagaaaatcaggtttgggctg

SEQ ID NO: 151498 - DNA, 33 bp, Homo sapien
tccagaatctgggagacaatcaggtttgggctg

SEQ ID NO: 151499 - DNA, 33 bp, Homo sapien
gtcccgatcactctaacgtttgtgtgtctacgc

SEQ ID NO: 151500 - DNA, 33 bp, Homo sapien
gtcccgatcactctaatgtttgtgtgtctacgc

SEQ ID NO: 151501 - DNA, 33 bp, Homo sapien
ggtggaatgcgcagcaaggctgaaagggaggga

SEQ ID NO: 151502 - DNA, 33 bp, Homo sapien
ggtggaatgcgcagcagggctgaaagggaggga

SEQ ID NO: 151503 - DNA, 33 bp, Homo sapien
ttcaggctgcagagacacgaaagccaggccagg

SEQ ID NO: 151504 - DNA, 33 bp, Homo sapien
ttcaggctgcagagactcgaaagccaggccagg

SEQ ID NO: 151505 - DNA, 33 bp, Homo sapien
ccctggggatttagatcagtgcttccagcctgg

SEQ ID NO: 151506 - DNA, 33 bp, Homo sapien
ccctggggatttagatgagtgcttccagcctgg

SEQ ID NO: 151507 - DNA, 33 bp, Homo sapien
tgtccccatcaaacacccagaatcaagtcagat

SEQ ID NO: 151508 - DNA, 33 bp, Homo sapien
tgtccccatcaaacacgcagaatcaagtcagat

SEQ ID NO: 151509 - DNA, 33 bp, Homo sapien
tacaacagtaagggacaaggcaggaaccaaatt

SEQ ID NO: 151510 - DNA, 33 bp, Homo sapien
tacaacagtaagggacgaggcaggaaccaaatt

SEQ ID NO: 151511 - DNA, 33 bp, Homo sapien
aaagaaagggctcctgcatggcacaattttccc

SEQ ID NO: 151512 - DNA, 33 bp, Homo sapien
aaagaaagggctcctggatggcacaattttccc

SEQ ID NO: 151513 - DNA, 33 bp, Homo sapien
ttcttctgtaaaatcacgggttatcaaagagag

SEQ ID NO: 151514 - DNA, 33 bp, Homo sapien
ttcttctgtaaaatcatgggttatcaaagagag

SEQ ID NO: 151515 - DNA, 33 bp, Homo sapien
ctggcacatagcaggcgctcaatatttcttgaa

SEQ ID NO: 151516 - DNA, 33 bp, Homo sapien
ctggcacatagcaggctctcaatatttcttgaa

SEQ ID NO: 151517 - DNA, 33 bp, Homo sapien
ttatatctaagtaaaaagattccagaatactcc

SEQ ID NO: 151518 - DNA, 33 bp, Homo sapien
ttatatctaagtaaaaggattccagaatactcc

SEQ ID NO: 151519 - DNA, 33 bp, Homo sapien
attatcttgtaaaatacctctgaagaactagaa

SEQ ID NO: 151520 - DNA, 33 bp, Homo sapien
attatcttgtaaaatatctctgaagaactagaa

SEQ ID NO: 151521 - DNA, 33 bp, Homo sapien
ccttacccatcaacagcataatgcctaattaat

SEQ ID NO: 151522 - DNA, 33 bp, Homo sapien
ccttacccatcaacaggataatgcctaattaat

SEQ ID NO: 151523 - DNA, 33 bp, Homo sapien
cagtggggatatcacactcaactaacagctaaa

SEQ ID NO: 151524 - DNA, 33 bp, Homo sapien
cagtggggatatcacattcaactaacagctaaa

SEQ ID NO: 151525 - DNA, 33 bp, Homo sapien
ttaagaggtgactccacaggttctaattatact

SEQ ID NO: 151526 - DNA, 33 bp, Homo sapien
ttaagaggtgactccataggttctaattatact

SEQ ID NO: 151527 - DNA, 33 bp, Homo sapien
gctcagctactctcccaagaaattcttcataag

SEQ ID NO: 151528 - DNA, 33 bp, Homo sapien
gctcagctactctcccgagaaattcttcataag

SEQ ID NO: 151529 - DNA, 33 bp, Homo sapien
aactgcctcggtagtacggtaagacttcattag

SEQ ID NO: 151530 - DNA, 33 bp, Homo sapien
aactgcctcggtagtatggtaagacttcattag

SEQ ID NO: 151531 - DNA, 33 bp, Homo sapien
atgttctttaacttgacggtatatctttgatac

SEQ ID NO: 151532 - DNA, 33 bp, Homo sapien
atgttctttaacttgatggtatatctttgatac

SEQ ID NO: 151533 - DNA, 33 bp, Homo sapien
tcctttgagcaaagacactctatcctgagaagg

SEQ ID NO: 151534 - DNA, 33 bp, Homo sapien
tcctttgagcaaagaccctctatcctgagaagg

SEQ ID NO: 151535 - DNA, 33 bp, Homo sapien
aaaagattgggctgaaaggaaagagatgagatg

SEQ ID NO: 151536 - DNA, 33 bp, Homo sapien
aaaagattgggctgaagggaaagagatgagatg

SEQ ID NO: 151537 - DNA, 33 bp, Homo sapien
cttggtcttcactttaagttggaaatacttggg

SEQ ID NO: 151538 - DNA, 33 bp, Homo sapien
cttggtcttcactttaggttggaaatacttggg

SEQ ID NO: 151539 - DNA, 33 bp, Homo sapien
tcagctcagtggcaaaagtgagtctccagcagg

SEQ ID NO: 151540 - DNA, 33 bp, Homo sapien
tcagctcagtggcaaaggtgagtctccagcagg

SEQ ID NO: 151541 - DNA, 33 bp, Homo sapien
ggatcatttctacctacattcaaatgtgcatcc

SEQ ID NO: 151542 - DNA, 33 bp, Homo sapien
ggatcatttctacctatattcaaatgtgcatcc

SEQ ID NO: 151543 - DNA, 33 bp, Homo sapien
ggaaatttccagaatacaatctgagtgataggc

SEQ ID NO: 151544 - DNA, 33 bp, Homo sapien
ggaaatttccagaatagaatctgagtgataggc

SEQ ID NO: 151545 - DNA, 33 bp, Homo sapien
gtttagaagttctatacgaattgctataggagc

SEQ ID NO: 151546 - DNA, 33 bp, Homo sapien
gtttagaagttctatatgaattgctataggagc

SEQ ID NO: 151547 - DNA, 33 bp, Homo sapien
agggcagtctggaaccaggaaacatgagccttt

SEQ ID NO: 151548 - DNA, 33 bp, Homo sapien
agggcagtctggaacccggaaacatgagccttt

SEQ ID NO: 151549 - DNA, 33 bp, Homo sapien
tatcctgtctcccagacgaagatgcagagtctc

SEQ ID NO: 151550 - DNA, 33 bp, Homo sapien
tatcctgtctcccagatgaagatgcagagtctc

SEQ ID NO: 151551 - DNA, 33 bp, Homo sapien
gtggatttaatgagacaaagcaggttttcctaa

SEQ ID NO: 151552 - DNA, 33 bp, Homo sapien
gtggatttaatgagacgaagcaggttttcctaa

SEQ ID NO: 151553 - DNA, 33 bp, Homo sapien
accaagcctagactcaactctcatgaaagcagc

SEQ ID NO: 151554 - DNA, 33 bp, Homo sapien
accaagcctagactcagctctcatgaaagcagc

SEQ ID NO: 151555 - DNA, 33 bp, Homo sapien
aataaatgtttcatgccaaaattgcagcctgca

SEQ ID NO: 151556 - DNA, 33 bp, Homo sapien
aataaatgtttcatgctaaaattgcagcctgca

SEQ ID NO: 151557 - DNA, 33 bp, Homo sapien
agatcttagcacaggaagactttggtaaatgtc

SEQ ID NO: 151558 - DNA, 33 bp, Homo sapien
agatcttagcacaggaggactttggtaaatgtc

SEQ ID NO: 151559 - DNA, 33 bp, Homo sapien
aacctggtagctttccaatctgctcaatcattt

SEQ ID NO: 151560 - DNA, 33 bp, Homo sapien
aacctggtagctttccgatctgctcaatcattt

SEQ ID NO: 151561 - DNA, 33 bp, Homo sapien
accattgtagtgactaaatgttcttatcttccg

SEQ ID NO: 151562 - DNA, 33 bp, Homo sapien
accattgtagtgactacatgttcttatcttccg

SEQ ID NO: 151563 - DNA, 33 bp, Homo sapien
ctgtgctgtttgatccactagttagttgggtct

SEQ ID NO: 151564 - DNA, 33 bp, Homo sapien
ctgtgctgtttgatccgctagttagttgggtct

SEQ ID NO: 151565 - DNA, 33 bp, Homo sapien
gtctttctgactaggaagagttttgtgtgtaaa

SEQ ID NO: 151566 - DNA, 33 bp, Homo sapien
gtctttctgactaggaggagttttgtgtgtaaa

SEQ ID NO: 151567 - DNA, 33 bp, Homo sapien
cactatcctattcagaaaccttcatgatgctct

SEQ ID NO: 151568 - DNA, 33 bp, Homo sapien
cactatcctattcagataccttcatgatgctct

SEQ ID NO: 151569 - DNA, 33 bp, Homo sapien
gggccagggagcacaaatcactgaagaaagcca

SEQ ID NO: 151570 - DNA, 33 bp, Homo sapien
gggccagggagcacaagtcactgaagaaagcca

SEQ ID NO: 151571 - DNA, 33 bp, Homo sapien
cctggaaggttcttcacacttgccttctaatgt

SEQ ID NO: 151572 - DNA, 33 bp, Homo sapien
cctggaaggttcttcatacttgccttctaatgt

SEQ ID NO: 151573 - DNA, 33 bp, Homo sapien
agcccctaagccagtaagttgtctggccaacgc

SEQ ID NO: 151574 - DNA, 33 bp, Homo sapien
agcccctaagccagtaggttgtctggccaacgc

SEQ ID NO: 151575 - DNA, 33 bp, Homo sapien
tcaggctcagaagccacactaccttatggtata

SEQ ID NO: 151576 - DNA, 33 bp, Homo sapien
tcaggctcagaagccatactaccttatggtata

SEQ ID NO: 151577 - DNA, 33 bp, Homo sapien
gaagatgaaagtgaagaccatgagcatggggta

SEQ ID NO: 151578 - DNA, 33 bp, Homo sapien
gaagatgaaagtgaaggccatgagcatggggta

SEQ ID NO: 151579 - DNA, 33 bp, Homo sapien
caggatctaaacccccaatgcctgcctgagctg

SEQ ID NO: 151580 - DNA, 33 bp, Homo sapien
caggatctaaaccccccatgcctgcctgagctg

SEQ ID NO: 151581 - DNA, 33 bp, Homo sapien
tacaacaggataaaagaactctctgggccgggc

SEQ ID NO: 151582 - DNA, 33 bp, Homo sapien
tacaacaggataaaaggactctctgggccgggc

SEQ ID NO: 151583 - DNA, 33 bp, Homo sapien
aggagacttgttctgcactgtctatgggaatat

SEQ ID NO: 151584 - DNA, 33 bp, Homo sapien
aggagacttgttctgcgctgtctatgggaatat

SEQ ID NO: 151585 - DNA, 33 bp, Homo sapien
gaaaggctcatagaaacgtaaggtataagcagc

SEQ ID NO: 151586 - DNA, 33 bp, Homo sapien
gaaaggctcatagaaatgtaaggtataagcagc

SEQ ID NO: 151587 - DNA, 33 bp, Homo sapien
ggtacaaagaggctcacgttagctgtaagagcc

SEQ ID NO: 151588 - DNA, 33 bp, Homo sapien
ggtacaaagaggctcatgttagctgtaagagcc

SEQ ID NO: 151589 - DNA, 33 bp, Homo sapien
gactgaagaaactagaaaaaaagagactctgag

SEQ ID NO: 151590 - DNA, 33 bp, Homo sapien
gactgaagaaactagagaaaaagagactctgag

SEQ ID NO: 151591 - DNA, 33 bp, Homo sapien
agctctgtcctggtcaagctggaatctgcctcc

SEQ ID NO: 151592 - DNA, 33 bp, Homo sapien
agctctgtcctggtcaggctggaatctgcctcc

SEQ ID NO: 151593 - DNA, 33 bp, Homo sapien
gaggggaccacagaatcacagactgccagtgct

SEQ ID NO: 151594 - DNA, 33 bp, Homo sapien
gaggggaccacagaatgacagactgccagtgct

SEQ ID NO: 151595 - DNA, 33 bp, Homo sapien
agcataatctcatccacctcccacagtgactgg

SEQ ID NO: 151596 - DNA, 33 bp, Homo sapien
agcataatctcatccatctcccacagtgactgg

SEQ ID NO: 151597 - DNA, 33 bp, Homo sapien
cccctagagtcagggcactggagaaaaggcctg

SEQ ID NO: 151598 - DNA, 33 bp, Homo sapien
cccctagagtcagggcgctggagaaaaggcctg

SEQ ID NO: 151599 - DNA, 33 bp, Homo sapien
attaaagttagacccacgttacagatgaggaaa

SEQ ID NO: 151600 - DNA, 33 bp, Homo sapien
attaaagttagacccatgttacagatgaggaaa

SEQ ID NO: 151601 - DNA, 33 bp, Homo sapien
ctatcttggggtgatactaaagtcatctgtgtt

SEQ ID NO: 151602 - DNA, 33 bp, Homo sapien
ctatcttggggtgatattaaagtcatctgtgtt

SEQ ID NO: 151603 - DNA, 33 bp, Homo sapien
cttttcccaagtggaccatgaatcccttatcct

SEQ ID NO: 151604 - DNA, 33 bp, Homo sapien
cttttcccaagtggactatgaatcccttatcct

SEQ ID NO: 151605 - DNA, 33 bp, Homo sapien
ccacctctccatggtgaaaaaatgactcccctg

SEQ ID NO: 151606 - DNA, 33 bp, Homo sapien
ccacctctccatggtggaaaaatgactcccctg

SEQ ID NO: 151607 - DNA, 33 bp, Homo sapien
acagccctgcatggtacgattattcccatctta

SEQ ID NO: 151608 - DNA, 33 bp, Homo sapien
acagccctgcatggtatgattattcccatctta

SEQ ID NO: 151609 - DNA, 33 bp, Homo sapien
gcatagagtttatccaacgggttaagctgagtc

SEQ ID NO: 151610 - DNA, 33 bp, Homo sapien
gcatagagtttatccagcgggttaagctgagtc

SEQ ID NO: 151611 - DNA, 33 bp, Homo sapien
tgaaaggtgtcacccccatttgtgcccatactt

SEQ ID NO: 151612 - DNA, 33 bp, Homo sapien
tgaaaggtgtcaccccgatttgtgcccatactt

SEQ ID NO: 151613 - DNA, 33 bp, Homo sapien
cattgattcaggagaaagagacattgactcagt

SEQ ID NO: 151614 - DNA, 33 bp, Homo sapien
cattgattcaggagaaggagacattgactcagt

SEQ ID NO: 151615 - DNA, 33 bp, Homo sapien
gtataaattactctcaagtcataaacaccaaga

SEQ ID NO: 151616 - DNA, 33 bp, Homo sapien
gtataaattactctcacgtcataaacaccaaga

SEQ ID NO: 151617 - DNA, 33 bp, Homo sapien
aacaggtgttcaaacaaaagttgtatcacagtg

SEQ ID NO: 151618 - DNA, 33 bp, Homo sapien
aacaggtgttcaaacagaagttgtatcacagtg

SEQ ID NO: 151619 - DNA, 33 bp, Homo sapien
tagggaaagcaggaaaattgttgacactttaaa

SEQ ID NO: 151620 - DNA, 33 bp, Homo sapien
tagggaaagcaggaaagttgttgacactttaaa

SEQ ID NO: 151621 - DNA, 33 bp, Homo sapien
gattaaattgttgcacagctaaaatgactctat

SEQ ID NO: 151622 - DNA, 33 bp, Homo sapien
gattaaattgttgcacggctaaaatgactctat

SEQ ID NO: 151623 - DNA, 33 bp, Homo sapien
agcatcagctgtgcagcctctctgtgctaaagt

SEQ ID NO: 151624 - DNA, 33 bp, Homo sapien
agcatcagctgtgcagtctctctgtgctaaagt

SEQ ID NO: 151625 - DNA, 33 bp, Homo sapien
cattaggtcaaaaatcacaagacacaattggag

SEQ ID NO: 151626 - DNA, 33 bp, Homo sapien
cattaggtcaaaaatcgcaagacacaattggag

SEQ ID NO: 151627 - DNA, 33 bp, Homo sapien
gtcttaacatcgtggaacctcagtctcctcatc

SEQ ID NO: 151628 - DNA, 33 bp, Homo sapien
gtcttaacatcgtggagcctcagtctcctcatc

SEQ ID NO: 151629 - DNA, 33 bp, Homo sapien
tatctaggaagtaactaacttgtttctgatttt

SEQ ID NO: 151630 - DNA, 33 bp, Homo sapien
tatctaggaagtaactcacttgtttctgatttt

SEQ ID NO: 151631 - DNA, 33 bp, Homo sapien
ggtctctactcaaacactgattcccaaagaggt

SEQ ID NO: 151632 - DNA, 33 bp, Homo sapien
ggtctctactcaaacattgattcccaaagaggt

SEQ ID NO: 151633 - DNA, 33 bp, Homo sapien
ttggcctgtgctttcacgggatttacagacctc

SEQ ID NO: 151634 - DNA, 33 bp, Homo sapien
ttggcctgtgctttcatgggatttacagacctc

SEQ ID NO: 151635 - DNA, 33 bp, Homo sapien
tggcctgattcttttcaattatgagttagatca

SEQ ID NO: 151636 - DNA, 33 bp, Homo sapien
tggcctgattcttttccattatgagttagatca

SEQ ID NO: 151637 - DNA, 33 bp, Homo sapien
ccccctctgccagagaacataagcaacagagtc

SEQ ID NO: 151638 - DNA, 33 bp, Homo sapien
ccccctctgccagagaccataagcaacagagtc

SEQ ID NO: 151639 - DNA, 33 bp, Homo sapien
ccacaccctgaaagtcaaaacttaaagctgccc

SEQ ID NO: 151640 - DNA, 33 bp, Homo sapien
ccacaccctgaaagtcgaaacttaaagctgccc

SEQ ID NO: 151641 - DNA, 33 bp, Homo sapien
gaatgctgaggtgccccatctttgttgggatgt

SEQ ID NO: 151642 - DNA, 33 bp, Homo sapien
gaatgctgaggtgccctatctttgttgggatgt

SEQ ID NO: 151643 - DNA, 33 bp, Homo sapien
ttgttgcttaccagtacatcactgcatatacca

SEQ ID NO: 151644 - DNA, 33 bp, Homo sapien
ttgttgcttaccagtagatcactgcatatacca

SEQ ID NO: 151645 - DNA, 33 bp, Homo sapien
cagtccaggagagagacgaggcgaacattaaga

SEQ ID NO: 151646 - DNA, 33 bp, Homo sapien
cagtccaggagagagatgaggcgaacattaaga

SEQ ID NO: 151647 - DNA, 33 bp, Homo sapien
cgtgtctacttctcaccaggtcaaggatctgtc

SEQ ID NO: 151648 - DNA, 33 bp, Homo sapien
cgtgtctacttctcactaggtcaaggatctgtc

SEQ ID NO: 151649 - DNA, 33 bp, Homo sapien
tggcacacagcaggccgccatattcatgtgctg

SEQ ID NO: 151650 - DNA, 33 bp, Homo sapien
tggcacacagcaggcctccatattcatgtgctg

SEQ ID NO: 151651 - DNA, 33 bp, Homo sapien
aaagcacacacctccacgtcagagcttgtcaga

SEQ ID NO: 151652 - DNA, 33 bp, Homo sapien
aaagcacacacctccatgtcagagcttgtcaga

SEQ ID NO: 151653 - DNA, 33 bp, Homo sapien
tcaaagcacacagatacctttcatcaaattctt

SEQ ID NO: 151654 - DNA, 33 bp, Homo sapien
tcaaagcacacagatagctttcatcaaattctt

SEQ ID NO: 151655 - DNA, 33 bp, Homo sapien
gcaccctaaaaagtgaacattgctttccccatt

SEQ ID NO: 151656 - DNA, 33 bp, Homo sapien
gcaccctaaaaagtgagcattgctttccccatt

SEQ ID NO: 151657 - DNA, 33 bp, Homo sapien
gtacaagagctggaggaagaaaacagcttggca

SEQ ID NO: 151658 - DNA, 33 bp, Homo sapien
gtacaagagctggaggcagaaaacagcttggca

SEQ ID NO: 151659 - DNA, 33 bp, Homo sapien
cctgcctcatctctgtaaagctggttacttcct

SEQ ID NO: 151660 - DNA, 33 bp, Homo sapien
cctgcctcatctctgtgaagctggttacttcct

SEQ ID NO: 151661 - DNA, 33 bp, Homo sapien
cttgttgactaggtgacaggtaggctgacgttt

SEQ ID NO: 151662 - DNA, 33 bp, Homo sapien
cttgttgactaggtgagaggtaggctgacgttt

SEQ ID NO: 151663 - DNA, 33 bp, Homo sapien
gcattaaacaaaagtacacatagtggtgattgt

SEQ ID NO: 151664 - DNA, 33 bp, Homo sapien
gcattaaacaaaagtagacatagtggtgattgt

SEQ ID NO: 151665 - DNA, 33 bp, Homo sapien
aagcagaagcggaacacgatgagcattactata

SEQ ID NO: 151666 - DNA, 33 bp, Homo sapien
aagcagaagcggaacatgatgagcattactata

SEQ ID NO: 151667 - DNA, 33 bp, Homo sapien
acgccatttccgttaccacgtcatataatctcg

SEQ ID NO: 151668 - DNA, 33 bp, Homo sapien
acgccatttccgttactacgtcatataatctcg

SEQ ID NO: 151669 - DNA, 33 bp, Homo sapien
caactaaaaccaattgcaccgtatttcaatgac

SEQ ID NO: 151670 - DNA, 33 bp, Homo sapien
caactaaaaccaattggaccgtatttcaatgac

SEQ ID NO: 151671 - DNA, 33 bp, Homo sapien
agagagacagtaaatcaacaaacgtacagtgcc

SEQ ID NO: 151672 - DNA, 33 bp, Homo sapien
agagagacagtaaatccacaaacgtacagtgcc

SEQ ID NO: 151673 - DNA, 33 bp, Homo sapien
tcccctagggctacaacttcattcaataagaaa

SEQ ID NO: 151674 - DNA, 33 bp, Homo sapien
tcccctagggctacaagttcattcaataagaaa

SEQ ID NO: 151675 - DNA, 33 bp, Homo sapien
tcctacgcttcttttccagtacatgaaacatta

SEQ ID NO: 151676 - DNA, 33 bp, Homo sapien
tcctacgcttcttttctagtacatgaaacatta

SEQ ID NO: 151677 - DNA, 33 bp, Homo sapien
ttactaaaagatgggaagtgtggattagctgtg

SEQ ID NO: 151678 - DNA, 33 bp, Homo sapien
ttactaaaagatgggaggtgtggattagctgtg

SEQ ID NO: 151679 - DNA, 33 bp, Homo sapien
tcttaacaatggagcaaaatttgagtaccatag

SEQ ID NO: 151680 - DNA, 33 bp, Homo sapien
tcttaacaatggagcagaatttgagtaccatag

SEQ ID NO: 151681 - DNA, 33 bp, Homo sapien
cctctttcaccccacacataaagtgcttactat

SEQ ID NO: 151682 - DNA, 33 bp, Homo sapien
cctctttcaccccacatataaagtgcttactat

SEQ ID NO: 151683 - DNA, 33 bp, Homo sapien
tatttaaataaaaagccactcctttgccatcat

SEQ ID NO: 151684 - DNA, 33 bp, Homo sapien
tatttaaataaaaagctactcctttgccatcat

SEQ ID NO: 151685 - DNA, 33 bp, Homo sapien
ctccaaacaggttgcaccattagcctggaaaag

SEQ ID NO: 151686 - DNA, 33 bp, Homo sapien
ctccaaacaggttgcatcattagcctggaaaag

SEQ ID NO: 151687 - DNA, 33 bp, Homo sapien
tgtcctatatattgacacagttgcacctcagat

SEQ ID NO: 151688 - DNA, 33 bp, Homo sapien
tgtcctatatattgacgcagttgcacctcagat

SEQ ID NO: 151689 - DNA, 33 bp, Homo sapien
gattgatgcagaaataagaaaagttgtaagcaa

SEQ ID NO: 151690 - DNA, 33 bp, Homo sapien
gattgatgcagaaatatgaaaagttgtaagcaa

SEQ ID NO: 151691 - DNA, 33 bp, Homo sapien
ctacagagatctttgacggttgctaattgatca

SEQ ID NO: 151692 - DNA, 33 bp, Homo sapien
ctacagagatctttgatggttgctaattgatca

SEQ ID NO: 151693 - DNA, 33 bp, Homo sapien
tagattgttaccatttaaaaaaattatgcgagg

SEQ ID NO: 151694 - DNA, 33 bp, Homo sapien
tagattgttaccattttaaaaaattatgcgagg

SEQ ID NO: 151695 - DNA, 33 bp, Homo sapien
ctctacaaaaagttgacaattagctgagcatcg

SEQ ID NO: 151696 - DNA, 33 bp, Homo sapien
ctctacaaaaagttgataattagctgagcatcg

SEQ ID NO: 151697 - DNA, 33 bp, Homo sapien
taagtgacttgaacaacggtccagactagaaag

SEQ ID NO: 151698 - DNA, 33 bp, Homo sapien
taagtgacttgaacaatggtccagactagaaag

SEQ ID NO: 151699 - DNA, 33 bp, Homo sapien
acttggaaatgctacactaactttgtccagatt

SEQ ID NO: 151700 - DNA, 33 bp, Homo sapien
acttggaaatgctacattaactttgtccagatt

SEQ ID NO: 151701 - DNA, 33 bp, Homo sapien
attgctgagttcgagcccttcattagattattt

SEQ ID NO: 151702 - DNA, 33 bp, Homo sapien
attgctgagttcgagctcttcattagattattt

SEQ ID NO: 151703 - DNA, 33 bp, Homo sapien
gtgtgaaacagcatcaaaataggaagatacaga

SEQ ID NO: 151704 - DNA, 33 bp, Homo sapien
gtgtgaaacagcatcagaataggaagatacaga

SEQ ID NO: 151705 - DNA, 33 bp, Homo sapien
aaattttcagtctacaaacaagctcttcttcaa

SEQ ID NO: 151706 - DNA, 33 bp, Homo sapien
aaattttcagtctacagacaagctcttcttcaa

SEQ ID NO: 151707 - DNA, 33 bp, Homo sapien
actaatacatctaatgacagtaggcatcaaaag

SEQ ID NO: 151708 - DNA, 33 bp, Homo sapien
actaatacatctaatggcagtaggcatcaaaag

SEQ ID NO: 151709 - DNA, 33 bp, Homo sapien
cgcgcttgaagagcaaaggattttgtcattgcg

SEQ ID NO: 151710 - DNA, 33 bp, Homo sapien
cgcgcttgaagagcaagggattttgtcattgcg

SEQ ID NO: 151711 - DNA, 33 bp, Homo sapien
tgagagcaggtttagcagagaaaatgaaagcat

SEQ ID NO: 151712 - DNA, 33 bp, Homo sapien
tgagagcaggtttagcggagaaaatgaaagcat

SEQ ID NO: 151713 - DNA, 33 bp, Homo sapien
gtcaaaacaaccttgacgatgcattttttaaat

SEQ ID NO: 151714 - DNA, 33 bp, Homo sapien
gtcaaaacaaccttgatgatgcattttttaaat

SEQ ID NO: 151715 - DNA, 33 bp, Homo sapien
cactacttctgggtaacggaaagaaatgctgag

SEQ ID NO: 151716 - DNA, 33 bp, Homo sapien
cactacttctgggtaatggaaagaaatgctgag

SEQ ID NO: 151717 - DNA, 33 bp, Homo sapien
atgtttatttttcaaccgatgtcatgtttttca

SEQ ID NO: 151718 - DNA, 33 bp, Homo sapien
atgtttatttttcaactgatgtcatgtttttca

SEQ ID NO: 151719 - DNA, 33 bp, Homo sapien
tgttattgtcttggccgcttatgaagacgttca

SEQ ID NO: 151720 - DNA, 33 bp, Homo sapien
tgttattgtcttggcctcttatgaagacgttca

SEQ ID NO: 151721 - DNA, 33 bp, Homo sapien
agagatacatacagaactgtgcctgtactatgt

SEQ ID NO: 151722 - DNA, 33 bp, Homo sapien
agagatacatacagaattgtgcctgtactatgt

SEQ ID NO: 151723 - DNA, 33 bp, Homo sapien
tgactggggcgtttcaccttctgcctagatgcg

SEQ ID NO: 151724 - DNA, 33 bp, Homo sapien
tgactggggcgtttcatcttctgcctagatgcg

SEQ ID NO: 151725 - DNA, 33 bp, Homo sapien
taaaacagaatgaaacaggaaaagttaaacata

SEQ ID NO: 151726 - DNA, 33 bp, Homo sapien
taaaacagaatgaaactggaaaagttaaacata

SEQ ID NO: 151727 - DNA, 33 bp, Homo sapien
cagagaaacagatttgaagaaactatacggctg

SEQ ID NO: 151728 - DNA, 33 bp, Homo sapien
cagagaaacagatttgtagaaactatacggctg

SEQ ID NO: 151729 - DNA, 33 bp, Homo sapien
ctggactaactgaaccagaatcactcgggtatg

SEQ ID NO: 151730 - DNA, 33 bp, Homo sapien
ctggactaactgaaccggaatcactcgggtatg

SEQ ID NO: 151731 - DNA, 33 bp, Homo sapien
ccccatctcctccaccgctacctctgagttcta

SEQ ID NO: 151732 - DNA, 33 bp, Homo sapien
ccccatctcctccacctctacctctgagttcta

SEQ ID NO: 151733 - DNA, 33 bp, Homo sapien
atcctcctagcctctacaaccgtgggacaataa

SEQ ID NO: 151734 - DNA, 33 bp, Homo sapien
atcctcctagcctctagaaccgtgggacaataa

SEQ ID NO: 151735 - DNA, 33 bp, Homo sapien
tttgtggtgaacattgcattcttcctcaatgtc

SEQ ID NO: 151736 - DNA, 33 bp, Homo sapien
tttgtggtgaacattgtattcttcctcaatgtc

SEQ ID NO: 151737 - DNA, 33 bp, Homo sapien
gtatataaatatctcaataaagctactttttaa

SEQ ID NO: 151738 - DNA, 33 bp, Homo sapien
gtatataaatatctcagtaaagctactttttaa

SEQ ID NO: 151739 - DNA, 33 bp, Homo sapien
gctgatctggagctcaagtagaagagggagcca

SEQ ID NO: 151740 - DNA, 33 bp, Homo sapien
gctgatctggagctcaggtagaagagggagcca

SEQ ID NO: 151741 - DNA, 33 bp, Homo sapien
ctgaaccaaaagccaccattgagactgagctgc

SEQ ID NO: 151742 - DNA, 33 bp, Homo sapien
ctgaaccaaaagccactattgagactgagctgc

SEQ ID NO: 151743 - DNA, 33 bp, Homo sapien
aaagtgtcagcattcaaactcgatggagactgg

SEQ ID NO: 151744 - DNA, 33 bp, Homo sapien
aaagtgtcagcattcatactcgatggagactgg

SEQ ID NO: 151745 - DNA, 33 bp, Homo sapien
gctcccacagacaacacatggatctctatggca

SEQ ID NO: 151746 - DNA, 33 bp, Homo sapien
gctcccacagacaacagatggatctctatggca

SEQ ID NO: 151747 - DNA, 33 bp, Homo sapien
agtgggtagaatttaaactacatacttctctag

SEQ ID NO: 151748 - DNA, 33 bp, Homo sapien
agtgggtagaatttaagctacatacttctctag

SEQ ID NO: 151749 - DNA, 33 bp, Homo sapien
gacctctcactatggaaattgaggatttagctc

SEQ ID NO: 151750 - DNA, 33 bp, Homo sapien
gacctctcactatggagattgaggatttagctc

SEQ ID NO: 151751 - DNA, 33 bp, Homo sapien
tttggtcaaattaaaaaacagtagaggctgaag

SEQ ID NO: 151752 - DNA, 33 bp, Homo sapien
tttggtcaaattaaaatacagtagaggctgaag

SEQ ID NO: 151753 - DNA, 33 bp, Homo sapien
catctccatgggattcccaggccaagaagggct

SEQ ID NO: 151754 - DNA, 33 bp, Homo sapien
catctccatgggattcgcaggccaagaagggct

SEQ ID NO: 151755 - DNA, 33 bp, Homo sapien
tgacctgagtaagaaccagctcagcacctgtgt

SEQ ID NO: 151756 - DNA, 33 bp, Homo sapien
tgacctgagtaagaacgagctcagcacctgtgt

SEQ ID NO: 151757 - DNA, 33 bp, Homo sapien
aggctgttggttcttgaagccacagggcctctt

SEQ ID NO: 151758 - DNA, 33 bp, Homo sapien
aggctgttggttcttgcagccacagggcctctt

SEQ ID NO: 151759 - DNA, 33 bp, Homo sapien
atgaggaaattgagtcacaaaaggttaaacact

SEQ ID NO: 151760 - DNA, 33 bp, Homo sapien
atgaggaaattgagtcgcaaaaggttaaacact

SEQ ID NO: 151761 - DNA, 33 bp, Homo sapien
ataagtggcaaagtaaagatttggagccaggga

SEQ ID NO: 151762 - DNA, 33 bp, Homo sapien
ataagtggcaaagtaaggatttggagccaggga

SEQ ID NO: 151763 - DNA, 33 bp, Homo sapien
ccccgggcaaggcaaagacagacaacaggacac

SEQ ID NO: 151764 - DNA, 33 bp, Homo sapien
ccccgggcaaggcaaatacagacaacaggacac

SEQ ID NO: 151765 - DNA, 33 bp, Homo sapien
ctctttcagtgatgcaagctactcacccctaca

SEQ ID NO: 151766 - DNA, 33 bp, Homo sapien
ctctttcagtgatgcaggctactcacccctaca

SEQ ID NO: 151767 - DNA, 33 bp, Homo sapien
ctgagcctgatcaatactatgtggggttagact

SEQ ID NO: 151768 - DNA, 33 bp, Homo sapien
ctgagcctgatcaatattatgtggggttagact

SEQ ID NO: 151769 - DNA, 33 bp, Homo sapien
ggagtcagaggtagacagaagtagccagcctcc

SEQ ID NO: 151770 - DNA, 33 bp, Homo sapien
ggagtcagaggtagacggaagtagccagcctcc

SEQ ID NO: 151771 - DNA, 33 bp, Homo sapien
tttcattattattaagccacaaagtcagtaaaa

SEQ ID NO: 151772 - DNA, 33 bp, Homo sapien
tttcattattattaagtcacaaagtcagtaaaa

SEQ ID NO: 151773 - DNA, 33 bp, Homo sapien
ctacaacaactattcactaagctcttattactc

SEQ ID NO: 151774 - DNA, 33 bp, Homo sapien
ctacaacaactattcattaagctcttattactc

SEQ ID NO: 151775 - DNA, 33 bp, Homo sapien
tcctgcgacaaccttacgagataatcaacaatt

SEQ ID NO: 151776 - DNA, 33 bp, Homo sapien
tcctgcgacaaccttatgagataatcaacaatt

SEQ ID NO: 151777 - DNA, 33 bp, Homo sapien
gccagcctctgatgctcaccaaaacacctctga

SEQ ID NO: 151778 - DNA, 33 bp, Homo sapien
gccagcctctgatgcttaccaaaacacctctga

SEQ ID NO: 151779 - DNA, 33 bp, Homo sapien
gtcccaaacacattccccgtttcttgcttctgt

SEQ ID NO: 151780 - DNA, 33 bp, Homo sapien
gtcccaaacacattcctcgtttcttgcttctgt

SEQ ID NO: 151781 - DNA, 33 bp, Homo sapien
agcctacatcttccctaaattcctaagctatac

SEQ ID NO: 151782 - DNA, 33 bp, Homo sapien
agcctacatcttccctgaattcctaagctatac

SEQ ID NO: 151783 - DNA, 33 bp, Homo sapien
ttttataagaataccccacatattggattgggt

SEQ ID NO: 151784 - DNA, 33 bp, Homo sapien
ttttataagaatacccgacatattggattgggt

SEQ ID NO: 151785 - DNA, 33 bp, Homo sapien
gtatgcatttatcaaaatttcactctgtatcct

SEQ ID NO: 151786 - DNA, 33 bp, Homo sapien
gtatgcatttatcaaactttcactctgtatcct

SEQ ID NO: 151787 - DNA, 33 bp, Homo sapien
tcacaggacgaatgggaactcattgacagatgt

SEQ ID NO: 151788 - DNA, 33 bp, Homo sapien
tcacaggacgaatggggactcattgacagatgt

SEQ ID NO: 151789 - DNA, 33 bp, Homo sapien
gaagctgcctcaaaaacatgataacttcctcca

SEQ ID NO: 151790 - DNA, 33 bp, Homo sapien
gaagctgcctcaaaaatatgataacttcctcca

SEQ ID NO: 151791 - DNA, 33 bp, Homo sapien
tcagctcccttactgcactgcgttcgcctctca

SEQ ID NO: 151792 - DNA, 33 bp, Homo sapien
tcagctcccttactgcgctgcgttcgcctctca

SEQ ID NO: 151793 - DNA, 33 bp, Homo sapien
ttctgtgataacgaccaggaaatagtgtgggac

SEQ ID NO: 151794 - DNA, 33 bp, Homo sapien
ttctgtgataacgaccgggaaatagtgtgggac

SEQ ID NO: 151795 - DNA, 33 bp, Homo sapien
atttatacagtcctcacctaaaaacgcttttac

SEQ ID NO: 151796 - DNA, 33 bp, Homo sapien
atttatacagtcctcatctaaaaacgcttttac

SEQ ID NO: 151797 - DNA, 33 bp, Homo sapien
ccaggatgacaccaaaatgaaagggtccagatg

SEQ ID NO: 151798 - DNA, 33 bp, Homo sapien
ccaggatgacaccaaagtgaaagggtccagatg

SEQ ID NO: 151799 - DNA, 33 bp, Homo sapien
cctgacttcagggtaaacacctcgactagtctg

SEQ ID NO: 151800 - DNA, 33 bp, Homo sapien
cctgacttcagggtaatcacctcgactagtctg

SEQ ID NO: 151801 - DNA, 33 bp, Homo sapien
aatgctgaaatgatcaatagtgttaaacaggag

SEQ ID NO: 151802 - DNA, 33 bp, Homo sapien
aatgctgaaatgatcagtagtgttaaacaggag

SEQ ID NO: 151803 - DNA, 33 bp, Homo sapien
ataaaattatttgtcaccattgttttcttctaa

SEQ ID NO: 151804 - DNA, 33 bp, Homo sapien
ataaaattatttgtcagcattgttttcttctaa

SEQ ID NO: 151805 - DNA, 33 bp, Homo sapien
gcgttctgctcttcaactattattctgtatctg

SEQ ID NO: 151806 - DNA, 33 bp, Homo sapien
gcgttctgctcttcaagtattattctgtatctg

SEQ ID NO: 151807 - DNA, 33 bp, Homo sapien
gggtcttttggagtaaagaaggaacactgacca

SEQ ID NO: 151808 - DNA, 33 bp, Homo sapien
gggtcttttggagtaaggaaggaacactgacca

SEQ ID NO: 151809 - DNA, 33 bp, Homo sapien
tttagaatacagtgaaatgtgaaggaatgattt

SEQ ID NO: 151810 - DNA, 33 bp, Homo sapien
tttagaatacagtgaagtgtgaaggaatgattt

SEQ ID NO: 151811 - DNA, 33 bp, Homo sapien
acaggcctgagttttaacttaatcttgccacat

SEQ ID NO: 151812 - DNA, 33 bp, Homo sapien
acaggcctgagttttaccttaatcttgccacat

SEQ ID NO: 151813 - DNA, 33 bp, Homo sapien
tgttattatgatccatctttatgaataagaaaa

SEQ ID NO: 151814 - DNA, 33 bp, Homo sapien
tgttattatgatccatgtttatgaataagaaaa

SEQ ID NO: 151815 - DNA, 33 bp, Homo sapien
ttagtcctctcaataacgctatgaaataggtgt

SEQ ID NO: 151816 - DNA, 33 bp, Homo sapien
ttagtcctctcaataatgctatgaaataggtgt

SEQ ID NO: 151817 - DNA, 33 bp, Homo sapien
aacaccccaactttagcccagtgaaattggttt

SEQ ID NO: 151818 - DNA, 33 bp, Homo sapien
aacaccccaactttagtccagtgaaattggttt

SEQ ID NO: 151819 - DNA, 33 bp, Homo sapien
tggagagatatgagaaataaatgcaatgctgga

SEQ ID NO: 151820 - DNA, 33 bp, Homo sapien
tggagagatatgagaactaaatgcaatgctgga

SEQ ID NO: 151821 - DNA, 33 bp, Homo sapien
gaggattataaacaagcaggcctgacatacggg

SEQ ID NO: 151822 - DNA, 33 bp, Homo sapien
gaggattataaacaaggaggcctgacatacggg

SEQ ID NO: 151823 - DNA, 33 bp, Homo sapien
tggcttgaccattgtcacctggtaaaatgagaa

SEQ ID NO: 151824 - DNA, 33 bp, Homo sapien
tggcttgaccattgtcccctggtaaaatgagaa

SEQ ID NO: 151825 - DNA, 33 bp, Homo sapien
tgtagtgagtgacctacggagtttggagattgg

SEQ ID NO: 151826 - DNA, 33 bp, Homo sapien
tgtagtgagtgacctatggagtttggagattgg

SEQ ID NO: 151827 - DNA, 33 bp, Homo sapien
aatagctcataaagggaaacttctctccataga

SEQ ID NO: 151828 - DNA, 33 bp, Homo sapien
aatagctcataaaggggaacttctctccataga

SEQ ID NO: 151829 - DNA, 33 bp, Homo sapien
tcttcccactgcaccagagagaatctgaacttg

SEQ ID NO: 151830 - DNA, 33 bp, Homo sapien
tcttcccactgcaccatagagaatctgaacttg

SEQ ID NO: 151831 - DNA, 33 bp, Homo sapien
aggagatgaagacaaaaacctggatcttcccat

SEQ ID NO: 151832 - DNA, 33 bp, Homo sapien
aggagatgaagacaaagacctggatcttcccat

SEQ ID NO: 151833 - DNA, 33 bp, Homo sapien
accctgatagttgggaaatgaggatttattgca

SEQ ID NO: 151834 - DNA, 33 bp, Homo sapien
accctgatagttgggagatgaggatttattgca

SEQ ID NO: 151835 - DNA, 33 bp, Homo sapien
ttgtttaccatactcaccttgaatccagttgaa

SEQ ID NO: 151836 - DNA, 33 bp, Homo sapien
ttgtttaccatactcagcttgaatccagttgaa

SEQ ID NO: 151837 - DNA, 33 bp, Homo sapien
tctgccaactgccccccgactttaatttgaact

SEQ ID NO: 151838 - DNA, 33 bp, Homo sapien
tctgccaactgcccccggactttaatttgaact

SEQ ID NO: 151839 - DNA, 33 bp, Homo sapien
ggatggtgggagaacccaaaactagtcctattg

SEQ ID NO: 151840 - DNA, 33 bp, Homo sapien
ggatggtgggagaacctaaaactagtcctattg

SEQ ID NO: 151841 - DNA, 33 bp, Homo sapien
cctgagcctatggaaaatgcacacagaatgctc

SEQ ID NO: 151842 - DNA, 33 bp, Homo sapien
cctgagcctatggaaagtgcacacagaatgctc

SEQ ID NO: 151843 - DNA, 33 bp, Homo sapien
acatttggaatcgtgacagcatgaccttctcag

SEQ ID NO: 151844 - DNA, 33 bp, Homo sapien
acatttggaatcgtgatagcatgaccttctcag

SEQ ID NO: 151845 - DNA, 33 bp, Homo sapien
cttttcacagttctcaactttcctggtttggat

SEQ ID NO: 151846 - DNA, 33 bp, Homo sapien
cttttcacagttctcagctttcctggtttggat

SEQ ID NO: 151847 - DNA, 33 bp, Homo sapien
ctcccctttctggctccagcccagtggttctga

SEQ ID NO: 151848 - DNA, 33 bp, Homo sapien
ctcccctttctggctctagcccagtggttctga

SEQ ID NO: 151849 - DNA, 33 bp, Homo sapien
gttccagagtaaatcaagaaaatcagtaaatgt

SEQ ID NO: 151850 - DNA, 33 bp, Homo sapien
gttccagagtaaatcatgaaaatcagtaaatgt

SEQ ID NO: 151851 - DNA, 33 bp, Homo sapien
aaatcaaggcctgagacgaaagaaagctgaaga

SEQ ID NO: 151852 - DNA, 33 bp, Homo sapien
aaatcaaggcctgagatgaaagaaagctgaaga

SEQ ID NO: 151853 - DNA, 33 bp, Homo sapien
caaccagagtcacaggaatgcctgaaatcaagg

SEQ ID NO: 151854 - DNA, 33 bp, Homo sapien
caaccagagtcacagggatgcctgaaatcaagg

SEQ ID NO: 151855 - DNA, 33 bp, Homo sapien
gtgttttgaacataaacaagagtttccccagca

SEQ ID NO: 151856 - DNA, 33 bp, Homo sapien
gtgttttgaacataaataagagtttccccagca

SEQ ID NO: 151857 - DNA, 33 bp, Homo sapien
aacagatcaaactttccactttttttatgtttg

SEQ ID NO: 151858 - DNA, 33 bp, Homo sapien
aacagatcaaactttctactttttttatgtttg

SEQ ID NO: 151859 - DNA, 33 bp, Homo sapien
aatattttcatttccaacttgaatgaggacaca

SEQ ID NO: 151860 - DNA, 33 bp, Homo sapien
aatattttcatttccagcttgaatgaggacaca

SEQ ID NO: 151861 - DNA, 33 bp, Homo sapien
cctgtagctgaccctacccctttctgttggcca

SEQ ID NO: 151862 - DNA, 33 bp, Homo sapien
cctgtagctgaccctatccctttctgttggcca

SEQ ID NO: 151863 - DNA, 33 bp, Homo sapien
tagatcaatcataatcaaaaagcatcatctaat

SEQ ID NO: 151864 - DNA, 33 bp, Homo sapien
tagatcaatcataatccaaaagcatcatctaat

SEQ ID NO: 151865 - DNA, 33 bp, Homo sapien
ttctcatagaggagagaagcaaagtaaccccac

SEQ ID NO: 151866 - DNA, 33 bp, Homo sapien
ttctcatagaggagaggagcaaagtaaccccac

SEQ ID NO: 151867 - DNA, 33 bp, Homo sapien
tcttcagaaagtccgcgcttaaatctgggggag

SEQ ID NO: 151868 - DNA, 33 bp, Homo sapien
tcttcagaaagtccgctcttaaatctgggggag

SEQ ID NO: 151869 - DNA, 33 bp, Homo sapien
gtgccatccaataatccgaactctcagatatgt

SEQ ID NO: 151870 - DNA, 33 bp, Homo sapien
gtgccatccaataatcggaactctcagatatgt

SEQ ID NO: 151871 - DNA, 33 bp, Homo sapien
ataactgtcctgttcccaaaatctaaaccatca

SEQ ID NO: 151872 - DNA, 33 bp, Homo sapien
ataactgtcctgttcctaaaatctaaaccatca

SEQ ID NO: 151873 - DNA, 33 bp, Homo sapien
ggaggtgtttccctttcaaagcttggctcaggt

SEQ ID NO: 151874 - DNA, 33 bp, Homo sapien
ggaggtgtttcccttttaaagcttggctcaggt

SEQ ID NO: 151875 - DNA, 33 bp, Homo sapien
caacagggaaatgaacactaggaatgcgagaag

SEQ ID NO: 151876 - DNA, 33 bp, Homo sapien
caacagggaaatgaactctaggaatgcgagaag

SEQ ID NO: 151877 - DNA, 33 bp, Homo sapien
tgaaactttattatgcaaatgcactgtgctaag

SEQ ID NO: 151878 - DNA, 33 bp, Homo sapien
tgaaactttattatgcgaatgcactgtgctaag

SEQ ID NO: 151879 - DNA, 33 bp, Homo sapien
tagacactatataaacacagacatgaacacgtg

SEQ ID NO: 151880 - DNA, 33 bp, Homo sapien
tagacactatataaacccagacatgaacacgtg

SEQ ID NO: 151881 - DNA, 33 bp, Homo sapien
tgttccacctggaaaacagactaaattagaagc

SEQ ID NO: 151882 - DNA, 33 bp, Homo sapien
tgttccacctggaaaagagactaaattagaagc

SEQ ID NO: 151883 - DNA, 33 bp, Homo sapien
aaatactgccaacacaacatttgcagtttccag

SEQ ID NO: 151884 - DNA, 33 bp, Homo sapien
aaatactgccaacacagcatttgcagtttccag

SEQ ID NO: 151885 - DNA, 33 bp, Homo sapien
agcagacaaatctccacgaaaggcagcttttta

SEQ ID NO: 151886 - DNA, 33 bp, Homo sapien
agcagacaaatctccatgaaaggcagcttttta

SEQ ID NO: 151887 - DNA, 33 bp, Homo sapien
agaaacagacataccaccagagatttacttttt

SEQ ID NO: 151888 - DNA, 33 bp, Homo sapien
agaaacagacataccagcagagatttacttttt

SEQ ID NO: 151889 - DNA, 33 bp, Homo sapien
ttcaaacttacctgcaactgcatttatctcttc

SEQ ID NO: 151890 - DNA, 33 bp, Homo sapien
ttcaaacttacctgcatctgcatttatctcttc

SEQ ID NO: 151891 - DNA, 33 bp, Homo sapien
ctgaccttactgactccatcttgcctttaactt

SEQ ID NO: 151892 - DNA, 33 bp, Homo sapien
ctgaccttactgactctatcttgcctttaactt

SEQ ID NO: 151893 - DNA, 33 bp, Homo sapien
ttctcccttattgcagaaaggttgctatgggac

SEQ ID NO: 151894 - DNA, 33 bp, Homo sapien
ttctcccttattgcaggaaggttgctatgggac

SEQ ID NO: 151895 - DNA, 33 bp, Homo sapien
caagaagctcctctacaaactaggatcagaaat

SEQ ID NO: 151896 - DNA, 33 bp, Homo sapien
caagaagctcctctacgaactaggatcagaaat

SEQ ID NO: 151897 - DNA, 33 bp, Homo sapien
ccttaccaacatgaagaaaacctacttaagaac

SEQ ID NO: 151898 - DNA, 33 bp, Homo sapien
ccttaccaacatgaaggaaacctacttaagaac

SEQ ID NO: 151899 - DNA, 33 bp, Homo sapien
ctctactacttggtaaatctgcatatatatact

SEQ ID NO: 151900 - DNA, 33 bp, Homo sapien
ctctactacttggtaagtctgcatatatatact

SEQ ID NO: 151901 - DNA, 33 bp, Homo sapien
atcataaaaattctacaagacaacattggaaaa

SEQ ID NO: 151902 - DNA, 33 bp, Homo sapien
atcataaaaattctacgagacaacattggaaaa

SEQ ID NO: 151903 - DNA, 33 bp, Homo sapien
atttcacagttactgaatcaggtggaactcagt

SEQ ID NO: 151904 - DNA, 33 bp, Homo sapien
atttcacagttactgactcaggtggaactcagt

SEQ ID NO: 151905 - DNA, 33 bp, Homo sapien
tattaagacttcacaaaaattccttaggttcta

SEQ ID NO: 151906 - DNA, 33 bp, Homo sapien
tattaagacttcacaataattccttaggttcta

SEQ ID NO: 151907 - DNA, 33 bp, Homo sapien
actgggaagatagagcgcaggaataaacatgaa

SEQ ID NO: 151908 - DNA, 33 bp, Homo sapien
actgggaagatagagctcaggaataaacatgaa

SEQ ID NO: 151909 - DNA, 33 bp, Homo sapien
acgatttatatggaaaagagttgtcagaatctt

SEQ ID NO: 151910 - DNA, 33 bp, Homo sapien
acgatttatatggaaaggagttgtcagaatctt

SEQ ID NO: 151911 - DNA, 33 bp, Homo sapien
cagggagtaaaatagaactctcttaagtaccac

SEQ ID NO: 151912 - DNA, 33 bp, Homo sapien
cagggagtaaaatagagctctcttaagtaccac

SEQ ID NO: 151913 - DNA, 33 bp, Homo sapien
agtacttatctcccctcaaaaaccttagtttcc

SEQ ID NO: 151914 - DNA, 33 bp, Homo sapien
agtacttatctcccctgaaaaaccttagtttcc

SEQ ID NO: 151915 - DNA, 33 bp, Homo sapien
gaggagtaagctatgcacattcaagccaagagc

SEQ ID NO: 151916 - DNA, 33 bp, Homo sapien
gaggagtaagctatgcgcattcaagccaagagc

SEQ ID NO: 151917 - DNA, 33 bp, Homo sapien
gtgcatatgtgcgtgacagaaaaagagagagaa

SEQ ID NO: 151918 - DNA, 33 bp, Homo sapien
gtgcatatgtgcgtgagagaaaaagagagagaa

SEQ ID NO: 151919 - DNA, 33 bp, Homo sapien
agtatgggctaagtaccacttctaagaacctta

SEQ ID NO: 151920 - DNA, 33 bp, Homo sapien
agtatgggctaagtactacttctaagaacctta

SEQ ID NO: 151921 - DNA, 33 bp, Homo sapien
gtgtctggtagaggaaagttgcctttatgcacc

SEQ ID NO: 151922 - DNA, 33 bp, Homo sapien
gtgtctggtagaggaaggttgcctttatgcacc

SEQ ID NO: 151923 - DNA, 33 bp, Homo sapien
cactctcacattcctacactcaccatgttatct

SEQ ID NO: 151924 - DNA, 33 bp, Homo sapien
cactctcacattcctatactcaccatgttatct

SEQ ID NO: 151925 - DNA, 33 bp, Homo sapien
catatgagcggttgtccagggaatgcaggtgta

SEQ ID NO: 151926 - DNA, 33 bp, Homo sapien
catatgagcggttgtctagggaatgcaggtgta

SEQ ID NO: 151927 - DNA, 33 bp, Homo sapien
ctccctgatgtggaaacgggattcacattgacc

SEQ ID NO: 151928 - DNA, 33 bp, Homo sapien
ctccctgatgtggaaaggggattcacattgacc

SEQ ID NO: 151929 - DNA, 33 bp, Homo sapien
ataatagccacacaggccagaaagcacagctgt

SEQ ID NO: 151930 - DNA, 33 bp, Homo sapien
ataatagccacacaggtcagaaagcacagctgt

SEQ ID NO: 151931 - DNA, 33 bp, Homo sapien
ccagggctattacaaaatcagagctgtctgcag

SEQ ID NO: 151932 - DNA, 33 bp, Homo sapien
ccagggctattacaaagtcagagctgtctgcag

SEQ ID NO: 151933 - DNA, 33 bp, Homo sapien
ttttagcttaggcatcgccttctccgggaagct

SEQ ID NO: 151934 - DNA, 33 bp, Homo sapien
ttttagcttaggcatctccttctccgggaagct

SEQ ID NO: 151935 - DNA, 33 bp, Homo sapien
aacaaacaccacaacaaataattgccacctggg

SEQ ID NO: 151936 - DNA, 33 bp, Homo sapien
aacaaacaccacaacagataattgccacctggg

SEQ ID NO: 151937 - DNA, 33 bp, Homo sapien
tgttgtagacaaagacagtcttgtttttttggt

SEQ ID NO: 151938 - DNA, 33 bp, Homo sapien
tgttgtagacaaagacggtcttgtttttttggt

SEQ ID NO: 151939 - DNA, 33 bp, Homo sapien
gttatatacccaatagaaatgcactgaagtaat

SEQ ID NO: 151940 - DNA, 33 bp, Homo sapien
gttatatacccaataggaatgcactgaagtaat

SEQ ID NO: 151941 - DNA, 33 bp, Homo sapien
agctcactagtgtccccaacatacagtcagggt

SEQ ID NO: 151942 - DNA, 33 bp, Homo sapien
agctcactagtgtccctaacatacagtcagggt

SEQ ID NO: 151943 - DNA, 33 bp, Homo sapien
atttcatctaaatgtaagtcagctggttgtagg

SEQ ID NO: 151944 - DNA, 33 bp, Homo sapien
atttcatctaaatgtatgtcagctggttgtagg

SEQ ID NO: 151945 - DNA, 33 bp, Homo sapien
ttattactaggcctcaataagaaagtggcccag

SEQ ID NO: 151946 - DNA, 33 bp, Homo sapien
ttattactaggcctcagtaagaaagtggcccag

SEQ ID NO: 151947 - DNA, 33 bp, Homo sapien
tttccttcaaatatggaacccagtgtaaccata

SEQ ID NO: 151948 - DNA, 33 bp, Homo sapien
tttccttcaaatatggcacccagtgtaaccata

SEQ ID NO: 151949 - DNA, 33 bp, Homo sapien
tttagatacacagagacgagcaggtatggttac

SEQ ID NO: 151950 - DNA, 33 bp, Homo sapien
tttagatacacagagatgagcaggtatggttac

SEQ ID NO: 151951 - DNA, 33 bp, Homo sapien
aaagtccagttacagacgctataacaggttttt

SEQ ID NO: 151952 - DNA, 33 bp, Homo sapien
aaagtccagttacagatgctataacaggttttt

SEQ ID NO: 151953 - DNA, 33 bp, Homo sapien
tcgattcctaggctcaacatgaaagcctctcct

SEQ ID NO: 151954 - DNA, 33 bp, Homo sapien
tcgattcctaggctcagcatgaaagcctctcct

SEQ ID NO: 151955 - DNA, 33 bp, Homo sapien
gtgatatgtgctggtccaaaccagaaatccaag

SEQ ID NO: 151956 - DNA, 33 bp, Homo sapien
gtgatatgtgctggtcgaaaccagaaatccaag

SEQ ID NO: 151957 - DNA, 33 bp, Homo sapien
tgctcatttgctcacccggagttgactctcctc

SEQ ID NO: 151958 - DNA, 33 bp, Homo sapien
tgctcatttgctcacctggagttgactctcctc

SEQ ID NO: 151959 - DNA, 33 bp, Homo sapien
ggcttctttactgaagcctgttttatcagcaag

SEQ ID NO: 151960 - DNA, 33 bp, Homo sapien
ggcttctttactgaagtctgttttatcagcaag

SEQ ID NO: 151961 - DNA, 33 bp, Homo sapien
tgcataggtcatcaaacagctggaagccaagca

SEQ ID NO: 151962 - DNA, 33 bp, Homo sapien
tgcataggtcatcaaagagctggaagccaagca

SEQ ID NO: 151963 - DNA, 33 bp, Homo sapien
tttggggtgcactgcaaaatttcacttgctaaa

SEQ ID NO: 151964 - DNA, 33 bp, Homo sapien
tttggggtgcactgcagaatttcacttgctaaa

SEQ ID NO: 151965 - DNA, 33 bp, Homo sapien
ttcctaaatacaataggaaatgaactgcgtaaa

SEQ ID NO: 151966 - DNA, 33 bp, Homo sapien
ttcctaaatacaatagtaaatgaactgcgtaaa

SEQ ID NO: 151967 - DNA, 33 bp, Homo sapien
ccttcattccttaactcagatgctccactggga

SEQ ID NO: 151968 - DNA, 33 bp, Homo sapien
ccttcattccttaacttagatgctccactggga

SEQ ID NO: 151969 - DNA, 33 bp, Homo sapien
attcaaaataaatggaacatcaacctttgggaa

SEQ ID NO: 151970 - DNA, 33 bp, Homo sapien
attcaaaataaatggatcatcaacctttgggaa

SEQ ID NO: 151971 - DNA, 33 bp, Homo sapien
actgcctgctttgccaaggcataaatgtctgtg

SEQ ID NO: 151972 - DNA, 33 bp, Homo sapien
actgcctgctttgccagggcataaatgtctgtg

SEQ ID NO: 151973 - DNA, 33 bp, Homo sapien
taaccagataactcccagaggcctgaattagtg

SEQ ID NO: 151974 - DNA, 33 bp, Homo sapien
taaccagataactcccggaggcctgaattagtg

SEQ ID NO: 151975 - DNA, 33 bp, Homo sapien
gctttccaaacttaaacatgcatgtgaatcacc

SEQ ID NO: 151976 - DNA, 33 bp, Homo sapien
gctttccaaacttaaatatgcatgtgaatcacc

SEQ ID NO: 151977 - DNA, 33 bp, Homo sapien
ttcagggccaaaggaaacctccataccagatgc

SEQ ID NO: 151978 - DNA, 33 bp, Homo sapien
ttcagggccaaaggaagcctccataccagatgc

SEQ ID NO: 151979 - DNA, 33 bp, Homo sapien
acagaagggaggtacaccggccattagtagtag

SEQ ID NO: 151980 - DNA, 33 bp, Homo sapien
acagaagggaggtacatcggccattagtagtag

SEQ ID NO: 151981 - DNA, 33 bp, Homo sapien
atcctttctcctcttagctctcattaccagcta

SEQ ID NO: 151982 - DNA, 33 bp, Homo sapien
atcctttctcctcttatctctcattaccagcta

SEQ ID NO: 151983 - DNA, 33 bp, Homo sapien
tcagttagttatagccagaatttggtgactaca

SEQ ID NO: 151984 - DNA, 33 bp, Homo sapien
tcagttagttatagccggaatttggtgactaca

SEQ ID NO: 151985 - DNA, 33 bp, Homo sapien
tagaatcattgctagtgaaagttgagagaagga

SEQ ID NO: 151986 - DNA, 33 bp, Homo sapien
tagaatcattgctagttaaagttgagagaagga

SEQ ID NO: 151987 - DNA, 33 bp, Homo sapien
ccacagatgaggaccccacagatatggagagct

SEQ ID NO: 151988 - DNA, 33 bp, Homo sapien
ccacagatgaggaccctacagatatggagagct

SEQ ID NO: 151989 - DNA, 33 bp, Homo sapien
tagataactttattctcaagcatgacaccccag

SEQ ID NO: 151990 - DNA, 33 bp, Homo sapien
tagataactttattcttaagcatgacaccccag

SEQ ID NO: 151991 - DNA, 33 bp, Homo sapien
atgggagatagaaaatgatacaagtgtcagctc

SEQ ID NO: 151992 - DNA, 33 bp, Homo sapien
atgggagatagaaaattatacaagtgtcagctc

SEQ ID NO: 151993 - DNA, 33 bp, Homo sapien
taggatgacggctaacagagctgagcccaggaa

SEQ ID NO: 151994 - DNA, 33 bp, Homo sapien
taggatgacggctaacggagctgagcccaggaa

SEQ ID NO: 151995 - DNA, 33 bp, Homo sapien
gtctggagtgtgcacaaggcaggcgattaataa

SEQ ID NO: 151996 - DNA, 33 bp, Homo sapien
gtctggagtgtgcacatggcaggcgattaataa

SEQ ID NO: 151997 - DNA, 33 bp, Homo sapien
gagtaaccctgacttgcagagttccagacatgg

SEQ ID NO: 151998 - DNA, 33 bp, Homo sapien
gagtaaccctgacttggagagttccagacatgg

SEQ ID NO: 151999 - DNA, 33 bp, Homo sapien
cagggcatagcacttaagagtaggtgacccctt

SEQ ID NO: 152000 - DNA, 33 bp, Homo sapien
cagggcatagcacttacgagtaggtgacccctt

SEQ ID NO: 152001 - DNA, 33 bp, Homo sapien
gcaacagaggtacacacgtttcaccatctatgt

SEQ ID NO: 152002 - DNA, 33 bp, Homo sapien
gcaacagaggtacacatgtttcaccatctatgt

SEQ ID NO: 152003 - DNA, 33 bp, Homo sapien
agaagagatttggaaacagagacatgcatagaa

SEQ ID NO: 152004 - DNA, 33 bp, Homo sapien
agaagagatttggaaatagagacatgcatagaa

SEQ ID NO: 152005 - DNA, 33 bp, Homo sapien
ctgtttcggaggcatcactgccataatatactg

SEQ ID NO: 152006 - DNA, 33 bp, Homo sapien
ctgtttcggaggcatcgctgccataatatactg

SEQ ID NO: 152007 - DNA, 33 bp, Homo sapien
gcccagtggcctaagacacagtaaccaggaggc

SEQ ID NO: 152008 - DNA, 33 bp, Homo sapien
gcccagtggcctaagagacagtaaccaggaggc

SEQ ID NO: 152009 - DNA, 33 bp, Homo sapien
ctgcctgcttgggaggccaaagtctagttgagc

SEQ ID NO: 152010 - DNA, 33 bp, Homo sapien
ctgcctgcttgggaggtcaaagtctagttgagc

SEQ ID NO: 152011 - DNA, 33 bp, Homo sapien
gtgccattaagctacaaggggtccaattataag

SEQ ID NO: 152012 - DNA, 33 bp, Homo sapien
gtgccattaagctacagggggtccaattataag

SEQ ID NO: 152013 - DNA, 33 bp, Homo sapien
ggccctggaatccccacgctgaaagagaccttg

SEQ ID NO: 152014 - DNA, 33 bp, Homo sapien
ggccctggaatccccatgctgaaagagaccttg

SEQ ID NO: 152015 - DNA, 33 bp, Homo sapien
tccaggaatcaggacagaaatgaccatttgggc

SEQ ID NO: 152016 - DNA, 33 bp, Homo sapien
tccaggaatcaggacataaatgaccatttgggc

SEQ ID NO: 152017 - DNA, 33 bp, Homo sapien
gcccaggtctctgcacaaagccccagcctagag

SEQ ID NO: 152018 - DNA, 33 bp, Homo sapien
gcccaggtctctgcacgaagccccagcctagag

SEQ ID NO: 152019 - DNA, 33 bp, Homo sapien
tgtggtacacagacacgcattatgtaggatact

SEQ ID NO: 152020 - DNA, 33 bp, Homo sapien
tgtggtacacagacactcattatgtaggatact

SEQ ID NO: 152021 - DNA, 33 bp, Homo sapien
accctgttgtcttcaacctacaagcctactttg

SEQ ID NO: 152022 - DNA, 33 bp, Homo sapien
accctgttgtcttcaatctacaagcctactttg

SEQ ID NO: 152023 - DNA, 33 bp, Homo sapien
tggcagaggaaagtgacgaaggcttctgctagg

SEQ ID NO: 152024 - DNA, 33 bp, Homo sapien
tggcagaggaaagtgatgaaggcttctgctagg

SEQ ID NO: 152025 - DNA, 33 bp, Homo sapien
tcactgaagctatgtcagaagtggccacgtggg

SEQ ID NO: 152026 - DNA, 33 bp, Homo sapien
tcactgaagctatgtcggaagtggccacgtggg

SEQ ID NO: 152027 - DNA, 33 bp, Homo sapien
tgctgtcctttgaaaggcttgcttatgaggttg

SEQ ID NO: 152028 - DNA, 33 bp, Homo sapien
tgctgtcctttgaaagtcttgcttatgaggttg

SEQ ID NO: 152029 - DNA, 33 bp, Homo sapien
tccagagtctgggaaaatcataatggggcagac

SEQ ID NO: 152030 - DNA, 33 bp, Homo sapien
tccagagtctgggaaagtcataatggggcagac

SEQ ID NO: 152031 - DNA, 33 bp, Homo sapien
atgtgaggacttgagaaaatcctctttgccgaa

SEQ ID NO: 152032 - DNA, 33 bp, Homo sapien
atgtgaggacttgagagaatcctctttgccgaa

SEQ ID NO: 152033 - DNA, 33 bp, Homo sapien
attatcccttaccttacagacgagaaagctgag

SEQ ID NO: 152034 - DNA, 33 bp, Homo sapien
attatcccttaccttatagacgagaaagctgag

SEQ ID NO: 152035 - DNA, 33 bp, Homo sapien
cataagcaatgtttccaaagtcgcacggttggt

SEQ ID NO: 152036 - DNA, 33 bp, Homo sapien
cataagcaatgtttccgaagtcgcacggttggt

SEQ ID NO: 152037 - DNA, 33 bp, Homo sapien
gggaggtgagtggtcgcacatatggctctggag

SEQ ID NO: 152038 - DNA, 33 bp, Homo sapien
gggaggtgagtggtcgtacatatggctctggag

SEQ ID NO: 152039 - DNA, 33 bp, Homo sapien
agctcaccccagcctcagaccagagttacagga

SEQ ID NO: 152040 - DNA, 33 bp, Homo sapien
agctcaccccagcctcggaccagagttacagga

SEQ ID NO: 152041 - DNA, 33 bp, Homo sapien
agctgtgtagagctgactagagaatgagccaaa

SEQ ID NO: 152042 - DNA, 33 bp, Homo sapien
agctgtgtagagctgagtagagaatgagccaaa

SEQ ID NO: 152043 - DNA, 33 bp, Homo sapien
gcaagaatcaaaatgaaatgctggagatctggt

SEQ ID NO: 152044 - DNA, 33 bp, Homo sapien
gcaagaatcaaaatgagatgctggagatctggt

SEQ ID NO: 152045 - DNA, 33 bp, Homo sapien
gggtgtttgttgaattaaatgggatcgactcct

SEQ ID NO: 152046 - DNA, 33 bp, Homo sapien
gggtgtttgttgaattgaatgggatcgactcct

SEQ ID NO: 152047 - DNA, 33 bp, Homo sapien
aattagcccaagaagcaagaaggatgtgttatt

SEQ ID NO: 152048 - DNA, 33 bp, Homo sapien
aattagcccaagaagcgagaaggatgtgttatt

SEQ ID NO: 152049 - DNA, 33 bp, Homo sapien
tcactctccatatagcacagtggattaatgact

SEQ ID NO: 152050 - DNA, 33 bp, Homo sapien
tcactctccatatagcccagtggattaatgact

SEQ ID NO: 152051 - DNA, 33 bp, Homo sapien
ctgcttaatgctgtgcagaataactgttgtatg

SEQ ID NO: 152052 - DNA, 33 bp, Homo sapien
ctgcttaatgctgtgcggaataactgttgtatg

SEQ ID NO: 152053 - DNA, 33 bp, Homo sapien
cctggttgaggttaaaaatcatgagtttgtggt

SEQ ID NO: 152054 - DNA, 33 bp, Homo sapien
cctggttgaggttaaagatcatgagtttgtggt

SEQ ID NO: 152055 - DNA, 33 bp, Homo sapien
cagacattccacaaccaaggcacgcattatgag

SEQ ID NO: 152056 - DNA, 33 bp, Homo sapien
cagacattccacaaccgaggcacgcattatgag

SEQ ID NO: 152057 - DNA, 33 bp, Homo sapien
agcccagttctgtgcccgatttggtgctaggca

SEQ ID NO: 152058 - DNA, 33 bp, Homo sapien
agcccagttctgtgcctgatttggtgctaggca

SEQ ID NO: 152059 - DNA, 33 bp, Homo sapien
gaagcaagactgtccaaagaacggtgggtggag

SEQ ID NO: 152060 - DNA, 33 bp, Homo sapien
gaagcaagactgtccagagaacggtgggtggag

SEQ ID NO: 152061 - DNA, 33 bp, Homo sapien
ctctcttttgcaactaacaaaagagaaatggaa

SEQ ID NO: 152062 - DNA, 33 bp, Homo sapien
ctctcttttgcaactaccaaaagagaaatggaa

SEQ ID NO: 152063 - DNA, 33 bp, Homo sapien
cagcagccctttgagaatccatgaagacccatg

SEQ ID NO: 152064 - DNA, 33 bp, Homo sapien
cagcagccctttgagagtccatgaagacccatg

SEQ ID NO: 152065 - DNA, 33 bp, Homo sapien
agagcaaactctacacaggtgaagaaaggggac

SEQ ID NO: 152066 - DNA, 33 bp, Homo sapien
agagcaaactctacacgggtgaagaaaggggac

SEQ ID NO: 152067 - DNA, 33 bp, Homo sapien
gaccaagccagggtaacggtatttctgacctct

SEQ ID NO: 152068 - DNA, 33 bp, Homo sapien
gaccaagccagggtaatggtatttctgacctct

SEQ ID NO: 152069 - DNA, 33 bp, Homo sapien
gatgttggcctgagcaaaggctgccagttctct

SEQ ID NO: 152070 - DNA, 33 bp, Homo sapien
gatgttggcctgagcagaggctgccagttctct

SEQ ID NO: 152071 - DNA, 33 bp, Homo sapien
gtggtggccactagaactgtaaggctgtttaaa

SEQ ID NO: 152072 - DNA, 33 bp, Homo sapien
gtggtggccactagaattgtaaggctgtttaaa

SEQ ID NO: 152073 - DNA, 33 bp, Homo sapien
gtgatcaaggatatgacgatgcacgaggcagac

SEQ ID NO: 152074 - DNA, 33 bp, Homo sapien
gtgatcaaggatatgatgatgcacgaggcagac

SEQ ID NO: 152075 - DNA, 33 bp, Homo sapien
ctttgttcttgtcctacagcccatgaagaggtg

SEQ ID NO: 152076 - DNA, 33 bp, Homo sapien
ctttgttcttgtcctatagcccatgaagaggtg

SEQ ID NO: 152077 - DNA, 33 bp, Homo sapien
ttgcaacagcagttagcagattttcctagtggg

SEQ ID NO: 152078 - DNA, 33 bp, Homo sapien
ttgcaacagcagttaggagattttcctagtggg

SEQ ID NO: 152079 - DNA, 33 bp, Homo sapien
aggattagctatattacctccatgtcacaggtg

SEQ ID NO: 152080 - DNA, 33 bp, Homo sapien
aggattagctatattatctccatgtcacaggtg

SEQ ID NO: 152081 - DNA, 33 bp, Homo sapien
aactctgctctacaagaaatatgaggaaggggg

SEQ ID NO: 152082 - DNA, 33 bp, Homo sapien
aactctgctctacaagcaatatgaggaaggggg

SEQ ID NO: 152083 - DNA, 33 bp, Homo sapien
atttagtcacataaagacaattataacatgaag

SEQ ID NO: 152084 - DNA, 33 bp, Homo sapien
atttagtcacataaaggcaattataacatgaag

SEQ ID NO: 152085 - DNA, 33 bp, Homo sapien
caagagttaacacttacctagcgctgtgtgcca

SEQ ID NO: 152086 - DNA, 33 bp, Homo sapien
caagagttaacacttatctagcgctgtgtgcca

SEQ ID NO: 152087 - DNA, 33 bp, Homo sapien
cttcaaatctatcctccacaatacccaaagtta

SEQ ID NO: 152088 - DNA, 33 bp, Homo sapien
cttcaaatctatcctctacaatacccaaagtta

SEQ ID NO: 152089 - DNA, 33 bp, Homo sapien
actaacacagggaaaacaagctaaatccaaatc

SEQ ID NO: 152090 - DNA, 33 bp, Homo sapien
actaacacagggaaaataagctaaatccaaatc

SEQ ID NO: 152091 - DNA, 33 bp, Homo sapien
agagggaaggaggtgactaaacaagcaattgca

SEQ ID NO: 152092 - DNA, 33 bp, Homo sapien
agagggaaggaggtgattaaacaagcaattgca

SEQ ID NO: 152093 - DNA, 33 bp, Homo sapien
tgctgatgtgccgtcaagtatgcccagtgcctg

SEQ ID NO: 152094 - DNA, 33 bp, Homo sapien
tgctgatgtgccgtcaggtatgcccagtgcctg

SEQ ID NO: 152095 - DNA, 33 bp, Homo sapien
caaaggcacagagagaagaaagaacttagtgta

SEQ ID NO: 152096 - DNA, 33 bp, Homo sapien
caaaggcacagagagaggaaagaacttagtgta

SEQ ID NO: 152097 - DNA, 33 bp, Homo sapien
atttatcccccacttacgacccagctcaaatac

SEQ ID NO: 152098 - DNA, 33 bp, Homo sapien
atttatcccccacttatgacccagctcaaatac

SEQ ID NO: 152099 - DNA, 33 bp, Homo sapien
tttgaatgagtgaatccaggaatctgagagtcc

SEQ ID NO: 152100 - DNA, 33 bp, Homo sapien
tttgaatgagtgaatctaggaatctgagagtcc

SEQ ID NO: 152101 - DNA, 33 bp, Homo sapien
ggagcctttctctccaatgagttcatggttcca

SEQ ID NO: 152102 - DNA, 33 bp, Homo sapien
ggagcctttctctccagtgagttcatggttcca

SEQ ID NO: 152103 - DNA, 33 bp, Homo sapien
tggtgctcctcggaacacgcttgtatgtgtctc

SEQ ID NO: 152104 - DNA, 33 bp, Homo sapien
tggtgctcctcggaacgcgcttgtatgtgtctc

SEQ ID NO: 152105 - DNA, 33 bp, Homo sapien
ctgatcataattgtcacgtccatggaaaaatgg

SEQ ID NO: 152106 - DNA, 33 bp, Homo sapien
ctgatcataattgtcatgtccatggaaaaatgg

SEQ ID NO: 152107 - DNA, 33 bp, Homo sapien
ccagcatacaacccaaactccacatatccaaac

SEQ ID NO: 152108 - DNA, 33 bp, Homo sapien
ccagcatacaacccaatctccacatatccaaac

SEQ ID NO: 152109 - DNA, 33 bp, Homo sapien
cagctaactgggctcacctatttactcagcata

SEQ ID NO: 152110 - DNA, 33 bp, Homo sapien
cagctaactgggctcatctatttactcagcata

SEQ ID NO: 152111 - DNA, 33 bp, Homo sapien
cagttcttctgaggaaatgattctggccttgct

SEQ ID NO: 152112 - DNA, 33 bp, Homo sapien
cagttcttctgaggaactgattctggccttgct

SEQ ID NO: 152113 - DNA, 33 bp, Homo sapien
tggtgatttccatatacaaggacatttcggtac

SEQ ID NO: 152114 - DNA, 33 bp, Homo sapien
tggtgatttccatatataaggacatttcggtac

SEQ ID NO: 152115 - DNA, 33 bp, Homo sapien
tcttgattcaagcaaacaaattgtatatcaaaa

SEQ ID NO: 152116 - DNA, 33 bp, Homo sapien
tcttgattcaagcaaagaaattgtatatcaaaa

SEQ ID NO: 152117 - DNA, 33 bp, Homo sapien
ctgaaggcaagccagagagtattatcctaatag

SEQ ID NO: 152118 - DNA, 33 bp, Homo sapien
ctgaaggcaagccagatagtattatcctaatag

SEQ ID NO: 152119 - DNA, 33 bp, Homo sapien
aacagtcccaagtcataaaaaaaggcctccatt

SEQ ID NO: 152120 - DNA, 33 bp, Homo sapien
aacagtcccaagtcattaaaaaaggcctccatt

SEQ ID NO: 152121 - DNA, 33 bp, Homo sapien
atttttcccagagagactacctcgaaggcctgg

SEQ ID NO: 152122 - DNA, 33 bp, Homo sapien
atttttcccagagagattacctcgaaggcctgg

SEQ ID NO: 152123 - DNA, 33 bp, Homo sapien
tagaagatcctctcttgaaatacgtgatgattc

SEQ ID NO: 152124 - DNA, 33 bp, Homo sapien
tagaagatcctctctttaaatacgtgatgattc

SEQ ID NO: 152125 - DNA, 33 bp, Homo sapien
ggtgtaaatcgataaccctttcatgctgataga

SEQ ID NO: 152126 - DNA, 33 bp, Homo sapien
ggtgtaaatcgataactctttcatgctgataga

SEQ ID NO: 152127 - DNA, 33 bp, Homo sapien
acacagccattttttacagttgaagtccctgct

SEQ ID NO: 152128 - DNA, 33 bp, Homo sapien
acacagccattttttatagttgaagtccctgct

SEQ ID NO: 152129 - DNA, 33 bp, Homo sapien
cagacttctagcctccagaagtatgaaacaatg

SEQ ID NO: 152130 - DNA, 33 bp, Homo sapien
cagacttctagcctccggaagtatgaaacaatg

SEQ ID NO: 152131 - DNA, 33 bp, Homo sapien
atcaggctaggtgtaaatacatgtgtgaagccc

SEQ ID NO: 152132 - DNA, 33 bp, Homo sapien
atcaggctaggtgtaagtacatgtgtgaagccc

SEQ ID NO: 152133 - DNA, 33 bp, Homo sapien
aaataaaatttaaaaaaatggctgtaatgctgt

SEQ ID NO: 152134 - DNA, 33 bp, Homo sapien
aaataaaatttaaaaagatggctgtaatgctgt

SEQ ID NO: 152135 - DNA, 33 bp, Homo sapien
gaggaatccaaacaaagcttccttatgacttcc

SEQ ID NO: 152136 - DNA, 33 bp, Homo sapien
gaggaatccaaacaaatcttccttatgacttcc

SEQ ID NO: 152137 - DNA, 33 bp, Homo sapien
aattaagaaattgatgaaaagttcttcctgaca

SEQ ID NO: 152138 - DNA, 33 bp, Homo sapien
aattaagaaattgatggaaagttcttcctgaca

SEQ ID NO: 152139 - DNA, 33 bp, Homo sapien
ctaagctccacgcctcaatcatggcctcactag

SEQ ID NO: 152140 - DNA, 33 bp, Homo sapien
ctaagctccacgcctctatcatggcctcactag

SEQ ID NO: 152141 - DNA, 33 bp, Homo sapien
atttaatctctaagcaaactctctcttcctcac

SEQ ID NO: 152142 - DNA, 33 bp, Homo sapien
atttaatctctaagcagactctctcttcctcac

SEQ ID NO: 152143 - DNA, 33 bp, Homo sapien
cagttggcttcctccacagtgagtgatccaaga

SEQ ID NO: 152144 - DNA, 33 bp, Homo sapien
cagttggcttcctccatagtgagtgatccaaga

SEQ ID NO: 152145 - DNA, 33 bp, Homo sapien
tgctaactgctgtgccaactctccccctggcca

SEQ ID NO: 152146 - DNA, 33 bp, Homo sapien
tgctaactgctgtgccgactctccccctggcca

SEQ ID NO: 152147 - DNA, 33 bp, Homo sapien
agctttactgcccgcaaccatattctcattcaa

SEQ ID NO: 152148 - DNA, 33 bp, Homo sapien
agctttactgcccgcagccatattctcattcaa

SEQ ID NO: 152149 - DNA, 33 bp, Homo sapien
ctgtttgggactctccaatctctctgctatgaa

SEQ ID NO: 152150 - DNA, 33 bp, Homo sapien
ctgtttgggactctccgatctctctgctatgaa

SEQ ID NO: 152151 - DNA, 33 bp, Homo sapien
ggtaagtatcacaaaacgctgatatttccagcc

SEQ ID NO: 152152 - DNA, 33 bp, Homo sapien
ggtaagtatcacaaaatgctgatatttccagcc

SEQ ID NO: 152153 - DNA, 33 bp, Homo sapien
ttatgtactatttcagccatgttgaaaggaagg

SEQ ID NO: 152154 - DNA, 33 bp, Homo sapien
ttatgtactatttcagtcatgttgaaaggaagg

SEQ ID NO: 152155 - DNA, 33 bp, Homo sapien
tattattattcagaaacagcactgcggagtgtt

SEQ ID NO: 152156 - DNA, 33 bp, Homo sapien
tattattattcagaaatagcactgcggagtgtt

SEQ ID NO: 152157 - DNA, 33 bp, Homo sapien
ctcaaataataaagacagcaaatgaattaaagg

SEQ ID NO: 152158 - DNA, 33 bp, Homo sapien
ctcaaataataaagacggcaaatgaattaaagg

SEQ ID NO: 152159 - DNA, 33 bp, Homo sapien
gctagaaattaacacccccagaaagcaactctc

SEQ ID NO: 152160 - DNA, 33 bp, Homo sapien
gctagaaattaacacctccagaaagcaactctc

SEQ ID NO: 152161 - DNA, 33 bp, Homo sapien
atggagctcatgtaaactctgagcccctactta

SEQ ID NO: 152162 - DNA, 33 bp, Homo sapien
atggagctcatgtaaattctgagcccctactta

SEQ ID NO: 152163 - DNA, 33 bp, Homo sapien
ttcaacagacattcacagagtgcattctcaagt

SEQ ID NO: 152164 - DNA, 33 bp, Homo sapien
ttcaacagacattcactgagtgcattctcaagt

SEQ ID NO: 152165 - DNA, 33 bp, Homo sapien
gccctctttggttggcaacaaatcaagtctcta

SEQ ID NO: 152166 - DNA, 33 bp, Homo sapien
gccctctttggttggctacaaatcaagtctcta

SEQ ID NO: 152167 - DNA, 33 bp, Homo sapien
atgagagaaatcctgagaatcatattgacacaa

SEQ ID NO: 152168 - DNA, 33 bp, Homo sapien
atgagagaaatcctgataatcatattgacacaa

SEQ ID NO: 152169 - DNA, 33 bp, Homo sapien
aaatgagggctggaacacctgtctacttgcctg

SEQ ID NO: 152170 - DNA, 33 bp, Homo sapien
aaatgagggctggaacgcctgtctacttgcctg

SEQ ID NO: 152171 - DNA, 33 bp, Homo sapien
atttaatgtcagtaggaagcatttgatttgttg

SEQ ID NO: 152172 - DNA, 33 bp, Homo sapien
atttaatgtcagtagggagcatttgatttgttg

SEQ ID NO: 152173 - DNA, 33 bp, Homo sapien
aaatcaggtgcagacaatagttacagctgaaca

SEQ ID NO: 152174 - DNA, 33 bp, Homo sapien
aaatcaggtgcagacagtagttacagctgaaca

SEQ ID NO: 152175 - DNA, 33 bp, Homo sapien
ggtaaagggtgtagacgctgaaaccaaacagtc

SEQ ID NO: 152176 - DNA, 33 bp, Homo sapien
ggtaaagggtgtagactctgaaaccaaacagtc

SEQ ID NO: 152177 - DNA, 33 bp, Homo sapien
ggacagccgccacatgaactaaaatggcaggtc

SEQ ID NO: 152178 - DNA, 33 bp, Homo sapien
ggacagccgccacatgcactaaaatggcaggtc

SEQ ID NO: 152179 - DNA, 33 bp, Homo sapien
ttgtcaacaaaattgacagaatgactacgatga

SEQ ID NO: 152180 - DNA, 33 bp, Homo sapien
ttgtcaacaaaattgatagaatgactacgatga

SEQ ID NO: 152181 - DNA, 33 bp, Homo sapien
tcctgcttgtctgcacaatctgtgggcatggtg

SEQ ID NO: 152182 - DNA, 33 bp, Homo sapien
tcctgcttgtctgcactatctgtgggcatggtg

SEQ ID NO: 152183 - DNA, 33 bp, Homo sapien
taaatgagtgagcacaatatgtcagaaggcagt

SEQ ID NO: 152184 - DNA, 33 bp, Homo sapien
taaatgagtgagcacagtatgtcagaaggcagt

SEQ ID NO: 152185 - DNA, 33 bp, Homo sapien
tattcctgaaactaaaccttctctaacagagct

SEQ ID NO: 152186 - DNA, 33 bp, Homo sapien
tattcctgaaactaaagcttctctaacagagct

SEQ ID NO: 152187 - DNA, 33 bp, Homo sapien
agtcagggagaagttacaggcctgagaggtatt

SEQ ID NO: 152188 - DNA, 33 bp, Homo sapien
agtcagggagaagttataggcctgagaggtatt

SEQ ID NO: 152189 - DNA, 33 bp, Homo sapien
ctggaaatttggataccgaggctctgggaacgc

SEQ ID NO: 152190 - DNA, 33 bp, Homo sapien
ctggaaatttggatactgaggctctgggaacgc

SEQ ID NO: 152191 - DNA, 33 bp, Homo sapien
tgtctgcccctctctactagaatgaagccccct

SEQ ID NO: 152192 - DNA, 33 bp, Homo sapien
tgtctgcccctctctagtagaatgaagccccct

SEQ ID NO: 152193 - DNA, 33 bp, Homo sapien
ggacaggatagtagcaaaggaagaatatagccc

SEQ ID NO: 152194 - DNA, 33 bp, Homo sapien
ggacaggatagtagcagaggaagaatatagccc

SEQ ID NO: 152195 - DNA, 33 bp, Homo sapien
ttgtggagaaggaggacggcgcagggttgaagt

SEQ ID NO: 152196 - DNA, 33 bp, Homo sapien
ttgtggagaaggaggatggcgcagggttgaagt

SEQ ID NO: 152197 - DNA, 33 bp, Homo sapien
ttttccaacatgtagacgccgaccttcctccct

SEQ ID NO: 152198 - DNA, 33 bp, Homo sapien
ttttccaacatgtagatgccgaccttcctccct

SEQ ID NO: 152199 - DNA, 33 bp, Homo sapien
cctcttctgtaagatgaaggctaatcataggac

SEQ ID NO: 152200 - DNA, 33 bp, Homo sapien
cctcttctgtaagatggaggctaatcataggac

SEQ ID NO: 152201 - DNA, 33 bp, Homo sapien
gactgtgctatggtcacgtagccaggacgtggt

SEQ ID NO: 152202 - DNA, 33 bp, Homo sapien
gactgtgctatggtcatgtagccaggacgtggt

SEQ ID NO: 152203 - DNA, 33 bp, Homo sapien
gagaaattggacagaactggcaagcccactgga

SEQ ID NO: 152204 - DNA, 33 bp, Homo sapien
gagaaattggacagaattggcaagcccactgga

SEQ ID NO: 152205 - DNA, 33 bp, Homo sapien
acagattaggatataccgaagaataaaatgcaa

SEQ ID NO: 152206 - DNA, 33 bp, Homo sapien
acagattaggatatactgaagaataaaatgcaa

SEQ ID NO: 152207 - DNA, 33 bp, Homo sapien
tcctagcggtggcaaacagctgccgcctaaaat

SEQ ID NO: 152208 - DNA, 33 bp, Homo sapien
tcctagcggtggcaaatagctgccgcctaaaat

SEQ ID NO: 152209 - DNA, 33 bp, Homo sapien
gcccagcacctgaccactaacaataatagtaac

SEQ ID NO: 152210 - DNA, 33 bp, Homo sapien
gcccagcacctgaccagtaacaataatagtaac

SEQ ID NO: 152211 - DNA, 33 bp, Homo sapien
cacaaatgaaaacaaacagaaacaatggccatt

SEQ ID NO: 152212 - DNA, 33 bp, Homo sapien
cacaaatgaaaacaaatagaaacaatggccatt

SEQ ID NO: 152213 - DNA, 33 bp, Homo sapien
ccggctgcatatgctacgtgtgcccacggcagg

SEQ ID NO: 152214 - DNA, 33 bp, Homo sapien
ccggctgcatatgctatgtgtgcccacggcagg

SEQ ID NO: 152215 - DNA, 33 bp, Homo sapien
acctggagagttgagaaaacaatgaaaggaaat

SEQ ID NO: 152216 - DNA, 33 bp, Homo sapien
acctggagagttgagacaacaatgaaaggaaat

SEQ ID NO: 152217 - DNA, 33 bp, Homo sapien
gctttcttgcctctgtgaatgtctcagacagtg

SEQ ID NO: 152218 - DNA, 33 bp, Homo sapien
gctttcttgcctctgttaatgtctcagacagtg

SEQ ID NO: 152219 - DNA, 33 bp, Homo sapien
aagcaaacaggacttcaattcattcaaagaaca

SEQ ID NO: 152220 - DNA, 33 bp, Homo sapien
aagcaaacaggacttcgattcattcaaagaaca

SEQ ID NO: 152221 - DNA, 33 bp, Homo sapien
caggactgtgcattcacaacatggcgtcgggct

SEQ ID NO: 152222 - DNA, 33 bp, Homo sapien
caggactgtgcattcagaacatggcgtcgggct

SEQ ID NO: 152223 - DNA, 33 bp, Homo sapien
tgagttctttctggccacaagtcttttatactt

SEQ ID NO: 152224 - DNA, 33 bp, Homo sapien
tgagttctttctggccgcaagtcttttatactt

SEQ ID NO: 152225 - DNA, 33 bp, Homo sapien
gaacagaatccgattaacataattgaaagttca

SEQ ID NO: 152226 - DNA, 33 bp, Homo sapien
gaacagaatccgattaccataattgaaagttca

SEQ ID NO: 152227 - DNA, 33 bp, Homo sapien
cagtgcaaacagggacacctcaaattcaccata

SEQ ID NO: 152228 - DNA, 33 bp, Homo sapien
cagtgcaaacagggacgcctcaaattcaccata

SEQ ID NO: 152229 - DNA, 33 bp, Homo sapien
ccgggagacatgatgacgaggggtcacttctct

SEQ ID NO: 152230 - DNA, 33 bp, Homo sapien
ccgggagacatgatgatgaggggtcacttctct

SEQ ID NO: 152231 - DNA, 33 bp, Homo sapien
ttcacctgagaaatcacattccccagctctggg

SEQ ID NO: 152232 - DNA, 33 bp, Homo sapien
ttcacctgagaaatcatattccccagctctggg

SEQ ID NO: 152233 - DNA, 33 bp, Homo sapien
tgaatgtgtccaactaactctgttcacctgaga

SEQ ID NO: 152234 - DNA, 33 bp, Homo sapien
tgaatgtgtccaactagctctgttcacctgaga

SEQ ID NO: 152235 - DNA, 33 bp, Homo sapien
ggcaatgctttatgagccaataaagaaagcacc

SEQ ID NO: 152236 - DNA, 33 bp, Homo sapien
ggcaatgctttatgagtcaataaagaaagcacc

SEQ ID NO: 152237 - DNA, 33 bp, Homo sapien
gcaagttctcagacaaatcagtgcatgacactt

SEQ ID NO: 152238 - DNA, 33 bp, Homo sapien
gcaagttctcagacaagtcagtgcatgacactt

SEQ ID NO: 152239 - DNA, 33 bp, Homo sapien
actcacacaatcacaagagaagagtcatcttaa

SEQ ID NO: 152240 - DNA, 33 bp, Homo sapien
actcacacaatcacaatagaagagtcatcttaa

SEQ ID NO: 152241 - DNA, 33 bp, Homo sapien
actacagatcctctagcagaattaacagcgagt

SEQ ID NO: 152242 - DNA, 33 bp, Homo sapien
actacagatcctctagtagaattaacagcgagt

SEQ ID NO: 152243 - DNA, 33 bp, Homo sapien
gttgaaaacaagtttccctggaattttgaaggt

SEQ ID NO: 152244 - DNA, 33 bp, Homo sapien
gttgaaaacaagtttctctggaattttgaaggt

SEQ ID NO: 152245 - DNA, 33 bp, Homo sapien
attaatcatccctgtcgaagtccctacatccct

SEQ ID NO: 152246 - DNA, 33 bp, Homo sapien
attaatcatccctgtctaagtccctacatccct

SEQ ID NO: 152247 - DNA, 33 bp, Homo sapien
tctagccacactgaatcatgattgccgtcatcc

SEQ ID NO: 152248 - DNA, 33 bp, Homo sapien
tctagccacactgaattatgattgccgtcatcc

SEQ ID NO: 152249 - DNA, 33 bp, Homo sapien
ttgtgatattatgaaacgcatagttggtcttca

SEQ ID NO: 152250 - DNA, 33 bp, Homo sapien
ttgtgatattatgaaatgcatagttggtcttca

SEQ ID NO: 152251 - DNA, 33 bp, Homo sapien
tgactgtgaagacagacgaagaggaccccgagt

SEQ ID NO: 152252 - DNA, 33 bp, Homo sapien
tgactgtgaagacagatgaagaggaccccgagt

SEQ ID NO: 152253 - DNA, 33 bp, Homo sapien
tcttattccttgtagcaacccaataaggtaggt

SEQ ID NO: 152254 - DNA, 33 bp, Homo sapien
tcttattccttgtagcgacccaataaggtaggt

SEQ ID NO: 152255 - DNA, 33 bp, Homo sapien
cccagaaggtccagaaggtgtgctcagaaggtc

SEQ ID NO: 152256 - DNA, 33 bp, Homo sapien
cccagaaggtccagaatgtgtgctcagaaggtc

SEQ ID NO: 152257 - DNA, 33 bp, Homo sapien
tctgtcctggcagatgcaaccaagaagccctgt

SEQ ID NO: 152258 - DNA, 33 bp, Homo sapien
tctgtcctggcagatgtaaccaagaagccctgt

SEQ ID NO: 152259 - DNA, 33 bp, Homo sapien
attagttgtaggcaggacagctgataaagatta

SEQ ID NO: 152260 - DNA, 33 bp, Homo sapien
attagttgtaggcagggcagctgataaagatta

SEQ ID NO: 152261 - DNA, 33 bp, Homo sapien
caatctccctggtcaaatcattgccagcagtgc

SEQ ID NO: 152262 - DNA, 33 bp, Homo sapien
caatctccctggtcaagtcattgccagcagtgc

SEQ ID NO: 152263 - DNA, 33 bp, Homo sapien
ttcagtctccgacatcccaatgaaagcattctc

SEQ ID NO: 152264 - DNA, 33 bp, Homo sapien
ttcagtctccgacatctcaatgaaagcattctc

SEQ ID NO: 152265 - DNA, 33 bp, Homo sapien
tgtgaaaagtggcacaatagctggataactcct

SEQ ID NO: 152266 - DNA, 33 bp, Homo sapien
tgtgaaaagtggcacagtagctggataactcct

SEQ ID NO: 152267 - DNA, 33 bp, Homo sapien
ttttctagagaagatcacagcctagaagaaaag

SEQ ID NO: 152268 - DNA, 33 bp, Homo sapien
ttttctagagaagatcgcagcctagaagaaaag

SEQ ID NO: 152269 - DNA, 33 bp, Homo sapien
tctttattctgagtgcagcaaagaattaggaac

SEQ ID NO: 152270 - DNA, 33 bp, Homo sapien
tctttattctgagtgcggcaaagaattaggaac

SEQ ID NO: 152271 - DNA, 33 bp, Homo sapien
atttctgctattccaaatggggagcctctgcct

SEQ ID NO: 152272 - DNA, 33 bp, Homo sapien
atttctgctattccaagtggggagcctctgcct

SEQ ID NO: 152273 - DNA, 33 bp, Homo sapien
agaggaaatgatgtgcaaatgagaaaattttaa

SEQ ID NO: 152274 - DNA, 33 bp, Homo sapien
agaggaaatgatgtgcgaatgagaaaattttaa

SEQ ID NO: 152275 - DNA, 33 bp, Homo sapien
aaacaaaaccataatcaaacttgtcagaagtga

SEQ ID NO: 152276 - DNA, 33 bp, Homo sapien
aaacaaaaccataatcgaacttgtcagaagtga

SEQ ID NO: 152277 - DNA, 33 bp, Homo sapien
attcttgaaaacacacagacatagaaaaagaca

SEQ ID NO: 152278 - DNA, 33 bp, Homo sapien
attcttgaaaacacacggacatagaaaaagaca

SEQ ID NO: 152279 - DNA, 33 bp, Homo sapien
tggcatctccattgccagagaagatctgggttt

SEQ ID NO: 152280 - DNA, 33 bp, Homo sapien
tggcatctccattgccggagaagatctgggttt

SEQ ID NO: 152281 - DNA, 33 bp, Homo sapien
ttacaaaggcagacagcattaaggaaagtcaac

SEQ ID NO: 152282 - DNA, 33 bp, Homo sapien
ttacaaaggcagacagtattaaggaaagtcaac

SEQ ID NO: 152283 - DNA, 33 bp, Homo sapien
gggaaggaggggatgaaagtgtcccttgatttt

SEQ ID NO: 152284 - DNA, 33 bp, Homo sapien
gggaaggaggggatgagagtgtcccttgatttt

SEQ ID NO: 152285 - DNA, 33 bp, Homo sapien
cagatttgaataggaaactagtctaacccatgc

SEQ ID NO: 152286 - DNA, 33 bp, Homo sapien
cagatttgaataggaagctagtctaacccatgc

SEQ ID NO: 152287 - DNA, 33 bp, Homo sapien
ctactttcttggcaagcagtttgtaagggagag

SEQ ID NO: 152288 - DNA, 33 bp, Homo sapien
ctactttcttggcaaggagtttgtaagggagag

SEQ ID NO: 152289 - DNA, 33 bp, Homo sapien
cctttgtgatataagccaccggtatttggggtg

SEQ ID NO: 152290 - DNA, 33 bp, Homo sapien
cctttgtgatataagctaccggtatttggggtg

SEQ ID NO: 152291 - DNA, 33 bp, Homo sapien
aggtgatcctgatggacgtgtagcctgagatgt

SEQ ID NO: 152292 - DNA, 33 bp, Homo sapien
aggtgatcctgatggatgtgtagcctgagatgt

SEQ ID NO: 152293 - DNA, 33 bp, Homo sapien
cattgtcacccttacactgggaaaagagctgct

SEQ ID NO: 152294 - DNA, 33 bp, Homo sapien
cattgtcacccttacattgggaaaagagctgct

SEQ ID NO: 152295 - DNA, 33 bp, Homo sapien
tgtgtgtttgtggaaacgtatagactaggaagg

SEQ ID NO: 152296 - DNA, 33 bp, Homo sapien
tgtgtgtttgtggaaatgtatagactaggaagg

SEQ ID NO: 152297 - DNA, 33 bp, Homo sapien
gaccctttagtcattcaaccatggagctagcaa

SEQ ID NO: 152298 - DNA, 33 bp, Homo sapien
gaccctttagtcattcgaccatggagctagcaa

SEQ ID NO: 152299 - DNA, 33 bp, Homo sapien
tctgagtctgaagacccgagaataaggagagca

SEQ ID NO: 152300 - DNA, 33 bp, Homo sapien
tctgagtctgaagacctgagaataaggagagca

SEQ ID NO: 152301 - DNA, 33 bp, Homo sapien
gaagccccaagatctgaaattggtaagctggag

SEQ ID NO: 152302 - DNA, 33 bp, Homo sapien
gaagccccaagatctgcaattggtaagctggag

SEQ ID NO: 152303 - DNA, 33 bp, Homo sapien
tgtcttagagattgaccacatatgtatgagtgt

SEQ ID NO: 152304 - DNA, 33 bp, Homo sapien
tgtcttagagattgactacatatgtatgagtgt

SEQ ID NO: 152305 - DNA, 33 bp, Homo sapien
tctatttgtctgctaaatagaatgaagtaagtg

SEQ ID NO: 152306 - DNA, 33 bp, Homo sapien
tctatttgtctgctaattagaatgaagtaagtg

SEQ ID NO: 152307 - DNA, 33 bp, Homo sapien
catgaattactgtgtacgtgtttggatgggaaa

SEQ ID NO: 152308 - DNA, 33 bp, Homo sapien
catgaattactgtgtatgtgtttggatgggaaa

SEQ ID NO: 152309 - DNA, 33 bp, Homo sapien
aggtgataccttgccaataggagacacggctgt

SEQ ID NO: 152310 - DNA, 33 bp, Homo sapien
aggtgataccttgccagtaggagacacggctgt

SEQ ID NO: 152311 - DNA, 33 bp, Homo sapien
ttgcactagaccacacaacttgtaaggggcaca

SEQ ID NO: 152312 - DNA, 33 bp, Homo sapien
ttgcactagaccacacgacttgtaaggggcaca

SEQ ID NO: 152313 - DNA, 33 bp, Homo sapien
ctctacctggttccgaggcaaagctcttaatta

SEQ ID NO: 152314 - DNA, 33 bp, Homo sapien
ctctacctggttccgatgcaaagctcttaatta

SEQ ID NO: 152315 - DNA, 33 bp, Homo sapien
aaggcttcgaaggcacagtcaagattttgtgtt

SEQ ID NO: 152316 - DNA, 33 bp, Homo sapien
aaggcttcgaaggcacggtcaagattttgtgtt

SEQ ID NO: 152317 - DNA, 33 bp, Homo sapien
tccctaaggcagccccagaaaatttgccacaga

SEQ ID NO: 152318 - DNA, 33 bp, Homo sapien
tccctaaggcagccccggaaaatttgccacaga

SEQ ID NO: 152319 - DNA, 33 bp, Homo sapien
agcactggagcgtggactaagctggggttgggg

SEQ ID NO: 152320 - DNA, 33 bp, Homo sapien
agcactggagcgtggattaagctggggttgggg

SEQ ID NO: 152321 - DNA, 33 bp, Homo sapien
ctgcctgataccttgcacaaatgtgaagcacac

SEQ ID NO: 152322 - DNA, 33 bp, Homo sapien
ctgcctgataccttgcgcaaatgtgaagcacac

SEQ ID NO: 152323 - DNA, 33 bp, Homo sapien
gggtggtaactgttaacgaatgcattgtaccag

SEQ ID NO: 152324 - DNA, 33 bp, Homo sapien
gggtggtaactgttaatgaatgcattgtaccag

SEQ ID NO: 152325 - DNA, 33 bp, Homo sapien
ctgtggttctgctccacatactttctcgttttg

SEQ ID NO: 152326 - DNA, 33 bp, Homo sapien
ctgtggttctgctccatatactttctcgttttg

SEQ ID NO: 152327 - DNA, 33 bp, Homo sapien
tgggtgataggagccacaggacataggtgcaaa

SEQ ID NO: 152328 - DNA, 33 bp, Homo sapien
tgggtgataggagccataggacataggtgcaaa

SEQ ID NO: 152329 - DNA, 33 bp, Homo sapien
tttaatgtttcagcaacgccactggagatctca

SEQ ID NO: 152330 - DNA, 33 bp, Homo sapien
tttaatgtttcagcaatgccactggagatctca

SEQ ID NO: 152331 - DNA, 33 bp, Homo sapien
accacggagtctctaagggcctgggtgacctag

SEQ ID NO: 152332 - DNA, 33 bp, Homo sapien
accacggagtctctaatggcctgggtgacctag

SEQ ID NO: 152333 - DNA, 33 bp, Homo sapien
ccttgccattgtagtcaaggatttactaacacc

SEQ ID NO: 152334 - DNA, 33 bp, Homo sapien
ccttgccattgtagtccaggatttactaacacc

SEQ ID NO: 152335 - DNA, 33 bp, Homo sapien
aaggaagtgagctcaaagttttagctttctact

SEQ ID NO: 152336 - DNA, 33 bp, Homo sapien
aaggaagtgagctcaatgttttagctttctact

SEQ ID NO: 152337 - DNA, 33 bp, Homo sapien
aggcagaagataaaccacaagtagaaagctaaa

SEQ ID NO: 152338 - DNA, 33 bp, Homo sapien
aggcagaagataaaccgcaagtagaaagctaaa

SEQ ID NO: 152339 - DNA, 33 bp, Homo sapien
ttcccagaggatgtgagaaacatgagatggttt

SEQ ID NO: 152340 - DNA, 33 bp, Homo sapien
ttcccagaggatgtgataaacatgagatggttt

SEQ ID NO: 152341 - DNA, 33 bp, Homo sapien
cattttttgccttgaccgcacttcttgcaatgt

SEQ ID NO: 152342 - DNA, 33 bp, Homo sapien
cattttttgccttgactgcacttcttgcaatgt

SEQ ID NO: 152343 - DNA, 33 bp, Homo sapien
tactctccaaattatccccacatcttccctctt

SEQ ID NO: 152344 - DNA, 33 bp, Homo sapien
tactctccaaattatctccacatcttccctctt

SEQ ID NO: 152345 - DNA, 33 bp, Homo sapien
accaatgagtctgcaacaggtgtctcagcaggc

SEQ ID NO: 152346 - DNA, 33 bp, Homo sapien
accaatgagtctgcaataggtgtctcagcaggc

SEQ ID NO: 152347 - DNA, 33 bp, Homo sapien
tctgaattcacattgaactggttccaaaaccct

SEQ ID NO: 152348 - DNA, 33 bp, Homo sapien
tctgaattcacattgatctggttccaaaaccct

SEQ ID NO: 152349 - DNA, 33 bp, Homo sapien
ttcctaatctgtggaacgggataatcatctttc

SEQ ID NO: 152350 - DNA, 33 bp, Homo sapien
ttcctaatctgtggaatgggataatcatctttc

SEQ ID NO: 152351 - DNA, 33 bp, Homo sapien
gaaatttgttctgtgcaagggcaaaaacaaaaa

SEQ ID NO: 152352 - DNA, 33 bp, Homo sapien
gaaatttgttctgtgcgagggcaaaaacaaaaa

SEQ ID NO: 152353 - DNA, 33 bp, Homo sapien
gcaggaaaaagagttaaacaactgctgaagtct

SEQ ID NO: 152354 - DNA, 33 bp, Homo sapien
gcaggaaaaagagttagacaactgctgaagtct

SEQ ID NO: 152355 - DNA, 33 bp, Homo sapien
cagacaattgtataaaccaatgtgctaagccct

SEQ ID NO: 152356 - DNA, 33 bp, Homo sapien
cagacaattgtataaatcaatgtgctaagccct

SEQ ID NO: 152357 - DNA, 33 bp, Homo sapien
cagccatgtagcagccgctgactgcaagggaag

SEQ ID NO: 152358 - DNA, 33 bp, Homo sapien
cagccatgtagcagcctctgactgcaagggaag

SEQ ID NO: 152359 - DNA, 33 bp, Homo sapien
tcatccagtaaagtcaaccatgagccaaggacc

SEQ ID NO: 152360 - DNA, 33 bp, Homo sapien
tcatccagtaaagtcagccatgagccaaggacc

SEQ ID NO: 152361 - DNA, 33 bp, Homo sapien
tcaccagcataaacagaaagagagattagttca

SEQ ID NO: 152362 - DNA, 33 bp, Homo sapien
tcaccagcataaacaggaagagagattagttca

SEQ ID NO: 152363 - DNA, 33 bp, Homo sapien
taagtgttcatataacaaggaatcctcttgctt

SEQ ID NO: 152364 - DNA, 33 bp, Homo sapien
taagtgttcatataaccaggaatcctcttgctt

SEQ ID NO: 152365 - DNA, 33 bp, Homo sapien
ttctcagcacctgaacagaattcctttaaacaa

SEQ ID NO: 152366 - DNA, 33 bp, Homo sapien
ttctcagcacctgaacggaattcctttaaacaa

SEQ ID NO: 152367 - DNA, 33 bp, Homo sapien
ttgctccagataggtaaatccagtctgagtttc

SEQ ID NO: 152368 - DNA, 33 bp, Homo sapien
ttgctccagataggtagatccagtctgagtttc

SEQ ID NO: 152369 - DNA, 33 bp, Homo sapien
gccacttttgctctgccaccaaatcctgtcttt

SEQ ID NO: 152370 - DNA, 33 bp, Homo sapien
gccacttttgctctgctaccaaatcctgtcttt

SEQ ID NO: 152371 - DNA, 33 bp, Homo sapien
ctctttcactgaacacagaaataatacaaagcc

SEQ ID NO: 152372 - DNA, 33 bp, Homo sapien
ctctttcactgaacacggaaataatacaaagcc

SEQ ID NO: 152373 - DNA, 33 bp, Homo sapien
gaaataatacaaagcccgatggacaggacactg

SEQ ID NO: 152374 - DNA, 33 bp, Homo sapien
gaaataatacaaagcctgatggacaggacactg

SEQ ID NO: 152375 - DNA, 33 bp, Homo sapien
ggcctatattcaacctaacagtgtatctcccag

SEQ ID NO: 152376 - DNA, 33 bp, Homo sapien
ggcctatattcaacctgacagtgtatctcccag

SEQ ID NO: 152377 - DNA, 33 bp, Homo sapien
tatagaaagcctggtacgactgactccaggcat

SEQ ID NO: 152378 - DNA, 33 bp, Homo sapien
tatagaaagcctggtatgactgactccaggcat

SEQ ID NO: 152379 - DNA, 33 bp, Homo sapien
ggaaatacaccagacaataagaaagtcaggggc

SEQ ID NO: 152380 - DNA, 33 bp, Homo sapien
ggaaatacaccagacagtaagaaagtcaggggc

SEQ ID NO: 152381 - DNA, 33 bp, Homo sapien
acctgttctggtttgcaccggtttcttttgggt

SEQ ID NO: 152382 - DNA, 33 bp, Homo sapien
acctgttctggtttgcgccggtttcttttgggt

SEQ ID NO: 152383 - DNA, 33 bp, Homo sapien
agggtggaactccagacgcacaggcacagtccc

SEQ ID NO: 152384 - DNA, 33 bp, Homo sapien
agggtggaactccagatgcacaggcacagtccc

SEQ ID NO: 152385 - DNA, 33 bp, Homo sapien
ttagagatgatgcgtcaataggcctggctcaga

SEQ ID NO: 152386 - DNA, 33 bp, Homo sapien
ttagagatgatgcgtccataggcctggctcaga

SEQ ID NO: 152387 - DNA, 33 bp, Homo sapien
catcatccaaatataacgatccaccactacccg

SEQ ID NO: 152388 - DNA, 33 bp, Homo sapien
catcatccaaatataatgatccaccactacccg

SEQ ID NO: 152389 - DNA, 33 bp, Homo sapien
acatctttggaaattcaatgttggaggtggggg

SEQ ID NO: 152390 - DNA, 33 bp, Homo sapien
acatctttggaaattcgatgttggaggtggggg

SEQ ID NO: 152391 - DNA, 33 bp, Homo sapien
aaaagatcaacggaaccgtctaaaagagataga

SEQ ID NO: 152392 - DNA, 33 bp, Homo sapien
aaaagatcaacggaactgtctaaaagagataga

SEQ ID NO: 152393 - DNA, 33 bp, Homo sapien
ttgtagtagttttccactgaatctttttggagc

SEQ ID NO: 152394 - DNA, 33 bp, Homo sapien
ttgtagtagttttccattgaatctttttggagc

SEQ ID NO: 152395 - DNA, 33 bp, Homo sapien
aaagacaaagcaagcagcacttggtgcatctgg

SEQ ID NO: 152396 - DNA, 33 bp, Homo sapien
aaagacaaagcaagcatcacttggtgcatctgg

SEQ ID NO: 152397 - DNA, 33 bp, Homo sapien
ggctaagatgtcctgacctgaatctatagcagc

SEQ ID NO: 152398 - DNA, 33 bp, Homo sapien
ggctaagatgtcctgatctgaatctatagcagc

SEQ ID NO: 152399 - DNA, 33 bp, Homo sapien
ccactgtcccagggaggaatcacagtggcacag

SEQ ID NO: 152400 - DNA, 33 bp, Homo sapien
ccactgtcccagggagtaatcacagtggcacag

SEQ ID NO: 152401 - DNA, 33 bp, Homo sapien
taaatgtttaatctggaagaggccataaaagac

SEQ ID NO: 152402 - DNA, 33 bp, Homo sapien
taaatgtttaatctggcagaggccataaaagac

SEQ ID NO: 152403 - DNA, 33 bp, Homo sapien
gaccatatatctaccaagtgaccatatctatct

SEQ ID NO: 152404 - DNA, 33 bp, Homo sapien
gaccatatatctaccacgtgaccatatctatct

SEQ ID NO: 152405 - DNA, 33 bp, Homo sapien
gctgatgtctcctaaccactcagtctcttttgg

SEQ ID NO: 152406 - DNA, 33 bp, Homo sapien
gctgatgtctcctaactactcagtctcttttgg

SEQ ID NO: 152407 - DNA, 33 bp, Homo sapien
aagtagagaatgcatacatctttgcccttggga

SEQ ID NO: 152408 - DNA, 33 bp, Homo sapien
aagtagagaatgcatatatctttgcccttggga

SEQ ID NO: 152409 - DNA, 33 bp, Homo sapien
caatggcaagtctcccacaggaacctccagaag

SEQ ID NO: 152410 - DNA, 33 bp, Homo sapien
caatggcaagtctcccgcaggaacctccagaag

SEQ ID NO: 152411 - DNA, 33 bp, Homo sapien
ctgacaaatctggccaccaggatccaccttgca

SEQ ID NO: 152412 - DNA, 33 bp, Homo sapien
ctgacaaatctggccatcaggatccaccttgca

SEQ ID NO: 152413 - DNA, 33 bp, Homo sapien
tgacggagatttgccaatagagatagctggcct

SEQ ID NO: 152414 - DNA, 33 bp, Homo sapien
tgacggagatttgccagtagagatagctggcct

SEQ ID NO: 152415 - DNA, 33 bp, Homo sapien
ttttgaatgaatcacaatataccaataccaaca

SEQ ID NO: 152416 - DNA, 33 bp, Homo sapien
ttttgaatgaatcacagtataccaataccaaca

SEQ ID NO: 152417 - DNA, 33 bp, Homo sapien
ttactctcatgagccacaagttaccagatctca

SEQ ID NO: 152418 - DNA, 33 bp, Homo sapien
ttactctcatgagccataagttaccagatctca

SEQ ID NO: 152419 - DNA, 33 bp, Homo sapien
agaagttgctgtctgactactgtatctctgatg

SEQ ID NO: 152420 - DNA, 33 bp, Homo sapien
agaagttgctgtctgattactgtatctctgatg

SEQ ID NO: 152421 - DNA, 33 bp, Homo sapien
atggagggaaacagtaccacgccattgctggat

SEQ ID NO: 152422 - DNA, 33 bp, Homo sapien
atggagggaaacagtatcacgccattgctggat

SEQ ID NO: 152423 - DNA, 33 bp, Homo sapien
cattttctgatttcacacctcccaccttgtatc

SEQ ID NO: 152424 - DNA, 33 bp, Homo sapien
cattttctgatttcacgcctcccaccttgtatc

SEQ ID NO: 152425 - DNA, 33 bp, Homo sapien
atgcatgagcgtcagacactctgcttggttcag

SEQ ID NO: 152426 - DNA, 33 bp, Homo sapien
atgcatgagcgtcagatactctgcttggttcag

SEQ ID NO: 152427 - DNA, 33 bp, Homo sapien
aaccaaacaggttgaaacagcctattgtatatg

SEQ ID NO: 152428 - DNA, 33 bp, Homo sapien
aaccaaacaggttgaaccagcctattgtatatg

SEQ ID NO: 152429 - DNA, 33 bp, Homo sapien
gagactgagcatatggcatcaagaagcaggttt

SEQ ID NO: 152430 - DNA, 33 bp, Homo sapien
gagactgagcatatggtatcaagaagcaggttt

SEQ ID NO: 152431 - DNA, 33 bp, Homo sapien
aacaaaaccagtgggacgtagctaaaactgtag

SEQ ID NO: 152432 - DNA, 33 bp, Homo sapien
aacaaaaccagtgggatgtagctaaaactgtag

SEQ ID NO: 152433 - DNA, 33 bp, Homo sapien
tccccatcaagctatcaccctggaatagtagtt

SEQ ID NO: 152434 - DNA, 33 bp, Homo sapien
tccccatcaagctatctccctggaatagtagtt

SEQ ID NO: 152435 - DNA, 33 bp, Homo sapien
ggcagaagaatgatcaaccaatctattgaaagc

SEQ ID NO: 152436 - DNA, 33 bp, Homo sapien
ggcagaagaatgatcagccaatctattgaaagc

SEQ ID NO: 152437 - DNA, 33 bp, Homo sapien
tgccatacaagataaacggatttggaaaactga

SEQ ID NO: 152438 - DNA, 33 bp, Homo sapien
tgccatacaagataaatggatttggaaaactga

SEQ ID NO: 152439 - DNA, 33 bp, Homo sapien
acgtctgggttcatgacggtttttcagagactg

SEQ ID NO: 152440 - DNA, 33 bp, Homo sapien
acgtctgggttcatgatggtttttcagagactg

SEQ ID NO: 152441 - DNA, 33 bp, Homo sapien
acaattaaagaacctgcaccaatgcatgggacc

SEQ ID NO: 152442 - DNA, 33 bp, Homo sapien
acaattaaagaacctgtaccaatgcatgggacc

SEQ ID NO: 152443 - DNA, 33 bp, Homo sapien
tagggtaatcaggctcagaccggcctgcagaga

SEQ ID NO: 152444 - DNA, 33 bp, Homo sapien
tagggtaatcaggctccgaccggcctgcagaga

SEQ ID NO: 152445 - DNA, 33 bp, Homo sapien
taaccgaaaaagcatacgtaatcctctctgtca

SEQ ID NO: 152446 - DNA, 33 bp, Homo sapien
taaccgaaaaagcatatgtaatcctctctgtca

SEQ ID NO: 152447 - DNA, 33 bp, Homo sapien
gcacatacttctgttcaagacagctcctgccag

SEQ ID NO: 152448 - DNA, 33 bp, Homo sapien
gcacatacttctgttcgagacagctcctgccag

SEQ ID NO: 152449 - DNA, 33 bp, Homo sapien
cataacaagtctatgaggtaggaactattattt

SEQ ID NO: 152450 - DNA, 33 bp, Homo sapien
cataacaagtctatgatgtaggaactattattt

SEQ ID NO: 152451 - DNA, 33 bp, Homo sapien
agccaacaatcacttacgtagtccccctaaacc

SEQ ID NO: 152452 - DNA, 33 bp, Homo sapien
agccaacaatcacttatgtagtccccctaaacc

SEQ ID NO: 152453 - DNA, 33 bp, Homo sapien
acactgttcattgttacggcattctgcacctcc

SEQ ID NO: 152454 - DNA, 33 bp, Homo sapien
acactgttcattgttatggcattctgcacctcc

SEQ ID NO: 152455 - DNA, 33 bp, Homo sapien
tggttccaactagccaatgacaggatcgttctt

SEQ ID NO: 152456 - DNA, 33 bp, Homo sapien
tggttccaactagccagtgacaggatcgttctt

SEQ ID NO: 152457 - DNA, 33 bp, Homo sapien
taaattagatccaccaacaaagttcaaaatttc

SEQ ID NO: 152458 - DNA, 33 bp, Homo sapien
taaattagatccaccagcaaagttcaaaatttc

SEQ ID NO: 152459 - DNA, 33 bp, Homo sapien
ggaatgatggtcggcccctcacatttatcacaa

SEQ ID NO: 152460 - DNA, 33 bp, Homo sapien
ggaatgatggtcggcctctcacatttatcacaa

SEQ ID NO: 152461 - DNA, 33 bp, Homo sapien
cattgctccataatagaatcaatcttctctcaa

SEQ ID NO: 152462 - DNA, 33 bp, Homo sapien
cattgctccataataggatcaatcttctctcaa

SEQ ID NO: 152463 - DNA, 33 bp, Homo sapien
aggggatgccctgatactaatgggagacaatct

SEQ ID NO: 152464 - DNA, 33 bp, Homo sapien
aggggatgccctgatagtaatgggagacaatct

SEQ ID NO: 152465 - DNA, 33 bp, Homo sapien
actaagaacttgacagaaaggcctgctcttgct

SEQ ID NO: 152466 - DNA, 33 bp, Homo sapien
actaagaacttgacaggaaggcctgctcttgct

SEQ ID NO: 152467 - DNA, 33 bp, Homo sapien
tacaaagctatgattgaagaaaacaataggact

SEQ ID NO: 152468 - DNA, 33 bp, Homo sapien
tacaaagctatgattgtagaaaacaataggact

SEQ ID NO: 152469 - DNA, 33 bp, Homo sapien
taagtcttttacatcaaatcagtcaaaattgtt

SEQ ID NO: 152470 - DNA, 33 bp, Homo sapien
taagtcttttacatcatatcagtcaaaattgtt

SEQ ID NO: 152471 - DNA, 33 bp, Homo sapien
ttttgccaagcatggaaatgtcttattgttgat

SEQ ID NO: 152472 - DNA, 33 bp, Homo sapien
ttttgccaagcatggatatgtcttattgttgat

SEQ ID NO: 152473 - DNA, 33 bp, Homo sapien
taggatcaagaaaacaatgaatctgcttgttaa

SEQ ID NO: 152474 - DNA, 33 bp, Homo sapien
taggatcaagaaaacagtgaatctgcttgttaa

SEQ ID NO: 152475 - DNA, 33 bp, Homo sapien
tgcagaaaagtccaccggctgcaatccagacaa

SEQ ID NO: 152476 - DNA, 33 bp, Homo sapien
tgcagaaaagtccacctgctgcaatccagacaa

SEQ ID NO: 152477 - DNA, 33 bp, Homo sapien
gctcctaatccaatatgacccgtatctttacaa

SEQ ID NO: 152478 - DNA, 33 bp, Homo sapien
gctcctaatccaatattacccgtatctttacaa

SEQ ID NO: 152479 - DNA, 33 bp, Homo sapien
cataacctgatgagaaaagtgttttaggagaat

SEQ ID NO: 152480 - DNA, 33 bp, Homo sapien
cataacctgatgagaagagtgttttaggagaat

SEQ ID NO: 152481 - DNA, 33 bp, Homo sapien
caagtagatccctaacactccttgcagtgataa

SEQ ID NO: 152482 - DNA, 33 bp, Homo sapien
caagtagatccctaaccctccttgcagtgataa

SEQ ID NO: 152483 - DNA, 33 bp, Homo sapien
tcttgggaatggaaatcaagacttcggagtttt

SEQ ID NO: 152484 - DNA, 33 bp, Homo sapien
tcttgggaatggaaattaagacttcggagtttt

SEQ ID NO: 152485 - DNA, 33 bp, Homo sapien
atagttggcatttaaaatcagaacaccagctga

SEQ ID NO: 152486 - DNA, 33 bp, Homo sapien
atagttggcatttaaagtcagaacaccagctga

SEQ ID NO: 152487 - DNA, 33 bp, Homo sapien
ccaactgtgtcaaataccactaaaagttcaagt

SEQ ID NO: 152488 - DNA, 33 bp, Homo sapien
ccaactgtgtcaaatatcactaaaagttcaagt

SEQ ID NO: 152489 - DNA, 33 bp, Homo sapien
cattggtaatttgataagaatcacactgaatct

SEQ ID NO: 152490 - DNA, 33 bp, Homo sapien
cattggtaatttgataggaatcacactgaatct

SEQ ID NO: 152491 - DNA, 33 bp, Homo sapien
tatccaagctctatacagaacccaaccaactca

SEQ ID NO: 152492 - DNA, 33 bp, Homo sapien
tatccaagctctatacggaacccaaccaactca

SEQ ID NO: 152493 - DNA, 33 bp, Homo sapien
tgtggactctttcaagcctgtatcttattcatt

SEQ ID NO: 152494 - DNA, 33 bp, Homo sapien
tgtggactctttcaaggctgtatcttattcatt

SEQ ID NO: 152495 - DNA, 33 bp, Homo sapien
ggtccttcaggaaaacaaactattgaagtttag

SEQ ID NO: 152496 - DNA, 33 bp, Homo sapien
ggtccttcaggaaaacgaactattgaagtttag

SEQ ID NO: 152497 - DNA, 33 bp, Homo sapien
cactaaggtaccacagactaatggccaaagaga

SEQ ID NO: 152498 - DNA, 33 bp, Homo sapien
cactaaggtaccacagtctaatggccaaagaga

SEQ ID NO: 152499 - DNA, 33 bp, Homo sapien
acagtcagatgtcaggaaaactgggtctgctgc

SEQ ID NO: 152500 - DNA, 33 bp, Homo sapien
acagtcagatgtcaggcaaactgggtctgctgc

SEQ ID NO: 152501 - DNA, 33 bp, Homo sapien
cccgccaatgctgtgagagtgataaatacggca

SEQ ID NO: 152502 - DNA, 33 bp, Homo sapien
cccgccaatgctgtgatagtgataaatacggca

SEQ ID NO: 152503 - DNA, 33 bp, Homo sapien
attgggcaagtatgaacttaacatctactgtgg

SEQ ID NO: 152504 - DNA, 33 bp, Homo sapien
attgggcaagtatgaatttaacatctactgtgg

SEQ ID NO: 152505 - DNA, 33 bp, Homo sapien
tttaccatgtgttacaactacctacaatatcca

SEQ ID NO: 152506 - DNA, 33 bp, Homo sapien
tttaccatgtgttacagctacctacaatatcca

SEQ ID NO: 152507 - DNA, 33 bp, Homo sapien
agtcaacacttgatcaatatggatttgaaccac

SEQ ID NO: 152508 - DNA, 33 bp, Homo sapien
agtcaacacttgatcagtatggatttgaaccac

SEQ ID NO: 152509 - DNA, 33 bp, Homo sapien
cacagcttgaacaatcacacacagaagccctag

SEQ ID NO: 152510 - DNA, 33 bp, Homo sapien
cacagcttgaacaatctcacacagaagccctag

SEQ ID NO: 152511 - DNA, 33 bp, Homo sapien
aatgtactctgaaattaaattcaacagatattt

SEQ ID NO: 152512 - DNA, 33 bp, Homo sapien
aatgtactctgaaattcaattcaacagatattt

SEQ ID NO: 152513 - DNA, 33 bp, Homo sapien
cataggcttttaaacccaattatcatcaccatt

SEQ ID NO: 152514 - DNA, 33 bp, Homo sapien
cataggcttttaaacctaattatcatcaccatt

SEQ ID NO: 152515 - DNA, 33 bp, Homo sapien
ttgtcaatatcctcaaaataacttgccagaatt

SEQ ID NO: 152516 - DNA, 33 bp, Homo sapien
ttgtcaatatcctcaagataacttgccagaatt

SEQ ID NO: 152517 - DNA, 33 bp, Homo sapien
tattagaatggtcaaaatcaaaactctgatgat

SEQ ID NO: 152518 - DNA, 33 bp, Homo sapien
tattagaatggtcaaagtcaaaactctgatgat

SEQ ID NO: 152519 - DNA, 33 bp, Homo sapien
agctccaagggacctacagtgcatccccctaga

SEQ ID NO: 152520 - DNA, 33 bp, Homo sapien
agctccaagggacctatagtgcatccccctaga

SEQ ID NO: 152521 - DNA, 33 bp, Homo sapien
tagaaagactatacagaaccagttacccctgtc

SEQ ID NO: 152522 - DNA, 33 bp, Homo sapien
tagaaagactatacaggaccagttacccctgtc

SEQ ID NO: 152523 - DNA, 33 bp, Homo sapien
aagcataataccagaaaccaaaaaaagaaacta

SEQ ID NO: 152524 - DNA, 33 bp, Homo sapien
aagcataataccagaagccaaaaaaagaaacta

SEQ ID NO: 152525 - DNA, 33 bp, Homo sapien
cctgcaaatacttctacagatcgaattcccaga

SEQ ID NO: 152526 - DNA, 33 bp, Homo sapien
cctgcaaatacttctatagatcgaattcccaga

SEQ ID NO: 152527 - DNA, 33 bp, Homo sapien
ctgtatcagaaccaaacagctgtcctcttacat

SEQ ID NO: 152528 - DNA, 33 bp, Homo sapien
ctgtatcagaaccaaatagctgtcctcttacat

SEQ ID NO: 152529 - DNA, 33 bp, Homo sapien
ggactgacttgctatcacacaaaagaggcagac

SEQ ID NO: 152530 - DNA, 33 bp, Homo sapien
ggactgacttgctatcgcacaaaagaggcagac

SEQ ID NO: 152531 - DNA, 33 bp, Homo sapien
agggaaggtactttaaaattctgggaagatgcg

SEQ ID NO: 152532 - DNA, 33 bp, Homo sapien
agggaaggtactttaagattctgggaagatgcg

SEQ ID NO: 152533 - DNA, 33 bp, Homo sapien
tgttcgcagtcgcataatacaaccatgtttcac

SEQ ID NO: 152534 - DNA, 33 bp, Homo sapien
tgttcgcagtcgcatattacaaccatgtttcac

SEQ ID NO: 152535 - DNA, 33 bp, Homo sapien
actgctgttgcacctcccagccaaccccactcg

SEQ ID NO: 152536 - DNA, 33 bp, Homo sapien
actgctgttgcacctcgcagccaaccccactcg

SEQ ID NO: 152537 - DNA, 33 bp, Homo sapien
ctctctcctctgatcaactctaaactggaaaat

SEQ ID NO: 152538 - DNA, 33 bp, Homo sapien
ctctctcctctgatcagctctaaactggaaaat

SEQ ID NO: 152539 - DNA, 33 bp, Homo sapien
tttaacagtattaagacgtgagacctttaaggg

SEQ ID NO: 152540 - DNA, 33 bp, Homo sapien
tttaacagtattaagaggtgagacctttaaggg

SEQ ID NO: 152541 - DNA, 33 bp, Homo sapien
ggggaacaggttcaccaacgcaaggaaaggcat

SEQ ID NO: 152542 - DNA, 33 bp, Homo sapien
ggggaacaggttcaccgacgcaaggaaaggcat

SEQ ID NO: 152543 - DNA, 33 bp, Homo sapien
gcccccaagacctgcaatgaaatcactggcctc

SEQ ID NO: 152544 - DNA, 33 bp, Homo sapien
gcccccaagacctgcactgaaatcactggcctc

SEQ ID NO: 152545 - DNA, 33 bp, Homo sapien
tctgtttctggaagcactcccttggtcgaagaa

SEQ ID NO: 152546 - DNA, 33 bp, Homo sapien
tctgtttctggaagcagtcccttggtcgaagaa

SEQ ID NO: 152547 - DNA, 33 bp, Homo sapien
ctgccctttgaaccaaaccaccatattgtgagg

SEQ ID NO: 152548 - DNA, 33 bp, Homo sapien
ctgccctttgaaccaagccaccatattgtgagg

SEQ ID NO: 152549 - DNA, 33 bp, Homo sapien
aggcagagggatatgaaacaggccttttttctc

SEQ ID NO: 152550 - DNA, 33 bp, Homo sapien
aggcagagggatatgagacaggccttttttctc

SEQ ID NO: 152551 - DNA, 33 bp, Homo sapien
tggcggacctctcagaactgacatctgccccag

SEQ ID NO: 152552 - DNA, 33 bp, Homo sapien
tggcggacctctcagagctgacatctgccccag

SEQ ID NO: 152553 - DNA, 33 bp, Homo sapien
gcgctgctaccctccacggctgaacactattag

SEQ ID NO: 152554 - DNA, 33 bp, Homo sapien
gcgctgctaccctccatggctgaacactattag

SEQ ID NO: 152555 - DNA, 33 bp, Homo sapien
ccctgaattatgagaccatggaaaattcaggct

SEQ ID NO: 152556 - DNA, 33 bp, Homo sapien
ccctgaattatgagactatggaaaattcaggct

SEQ ID NO: 152557 - DNA, 33 bp, Homo sapien
gatttaatgactgcccaaggagggtattttaca

SEQ ID NO: 152558 - DNA, 33 bp, Homo sapien
gatttaatgactgcccgaggagggtattttaca

SEQ ID NO: 152559 - DNA, 33 bp, Homo sapien
actatgggaaaaatgacggatggagattgagtc

SEQ ID NO: 152560 - DNA, 33 bp, Homo sapien
actatgggaaaaatgatggatggagattgagtc

SEQ ID NO: 152561 - DNA, 33 bp, Homo sapien
cagaagatgaaggtgcacaggcatcacattgtg

SEQ ID NO: 152562 - DNA, 33 bp, Homo sapien
cagaagatgaaggtgcgcaggcatcacattgtg

SEQ ID NO: 152563 - DNA, 33 bp, Homo sapien
cgtagcaggtactcaaagaatgtgcaaataaat

SEQ ID NO: 152564 - DNA, 33 bp, Homo sapien
cgtagcaggtactcaaggaatgtgcaaataaat

SEQ ID NO: 152565 - DNA, 33 bp, Homo sapien
ctaattgggccagactcttcctatgtggggaca

SEQ ID NO: 152566 - DNA, 33 bp, Homo sapien
ctaattgggccagacttttcctatgtggggaca

SEQ ID NO: 152567 - DNA, 33 bp, Homo sapien
caatatgctcatatcccgagggtctgagcaggc

SEQ ID NO: 152568 - DNA, 33 bp, Homo sapien
caatatgctcatatcctgagggtctgagcaggc

SEQ ID NO: 152569 - DNA, 33 bp, Homo sapien
ctccttagtcatcctccactttagacacacgtg

SEQ ID NO: 152570 - DNA, 33 bp, Homo sapien
ctccttagtcatcctctactttagacacacgtg

SEQ ID NO: 152571 - DNA, 33 bp, Homo sapien
taattgatgttattaggcaacttcagaggaaga

SEQ ID NO: 152572 - DNA, 33 bp, Homo sapien
taattgatgttattagtcaacttcagaggaaga

SEQ ID NO: 152573 - DNA, 33 bp, Homo sapien
ctgtcctccttttatacatgagaaaaatgaaac

SEQ ID NO: 152574 - DNA, 33 bp, Homo sapien
ctgtcctccttttatagatgagaaaaatgaaac

SEQ ID NO: 152575 - DNA, 33 bp, Homo sapien
gaaccatttcttgtaaaactcataacagtccca

SEQ ID NO: 152576 - DNA, 33 bp, Homo sapien
gaaccatttcttgtaagactcataacagtccca

SEQ ID NO: 152577 - DNA, 33 bp, Homo sapien
aaatggagcatgacaacgatagaggaatcaaaa

SEQ ID NO: 152578 - DNA, 33 bp, Homo sapien
aaatggagcatgacaatgatagaggaatcaaaa

SEQ ID NO: 152579 - DNA, 33 bp, Homo sapien
ggatggtgtctgataacggtctggtatccagaa

SEQ ID NO: 152580 - DNA, 33 bp, Homo sapien
ggatggtgtctgataatggtctggtatccagaa

SEQ ID NO: 152581 - DNA, 33 bp, Homo sapien
gtatctgttggaaaaaaaattctaagtggcaaa

SEQ ID NO: 152582 - DNA, 33 bp, Homo sapien
gtatctgttggaaaaacaattctaagtggcaaa

SEQ ID NO: 152583 - DNA, 33 bp, Homo sapien; identical to SEQ ID NO: 152581

SEQ ID NO: 152584 - DNA, 33 bp, Homo sapien; identical to SEQ ID NO: 152582

SEQ ID NO: 152585 - DNA, 33 bp, Homo sapien
cttcaccttaccattccataatgttatctttgt

SEQ ID NO: 152586 - DNA, 33 bp, Homo sapien
cttcaccttaccattctataatgttatctttgt

SEQ ID NO: 152587 - DNA, 33 bp, Homo sapien
cagtgacacctatgtgaagtgctaattggggaa

SEQ ID NO: 152588 - DNA, 33 bp, Homo sapien
cagtgacacctatgtggagtgctaattggggaa

SEQ ID NO: 152589 - DNA, 33 bp, Homo sapien
cagtaaatcattttcacattactggacatttca

SEQ ID NO: 152590 - DNA, 33 bp, Homo sapien
cagtaaatcattttcatattactggacatttca

SEQ ID NO: 152591 - DNA, 33 bp, Homo sapien
ccagcacatttttctacgtcaatgtcagatcag

SEQ ID NO: 152592 - DNA, 33 bp, Homo sapien
ccagcacatttttctaggtcaatgtcagatcag

SEQ ID NO: 152593 - DNA, 33 bp, Homo sapien
ttctgatctcatttcaccctcagagaggccata

SEQ ID NO: 152594 - DNA, 33 bp, Homo sapien
ttctgatctcatttcatcctcagagaggccata

SEQ ID NO: 152595 - DNA, 33 bp, Homo sapien
cccaccgtggtttcccaaaggtctgagattata

SEQ ID NO: 152596 - DNA, 33 bp, Homo sapien
cccaccgtggtttcccgaaggtctgagattata

SEQ ID NO: 152597 - DNA, 33 bp, Homo sapien
ttgccacgtaacatcaaatagtcaggattgcag

SEQ ID NO: 152598 - DNA, 33 bp, Homo sapien
ttgccacgtaacatcacatagtcaggattgcag

SEQ ID NO: 152599 - DNA, 33 bp, Homo sapien
tcaagagacctctatcacaagacagccacaggt

SEQ ID NO: 152600 - DNA, 33 bp, Homo sapien
tcaagagacctctatcgcaagacagccacaggt

SEQ ID NO: 152601 - DNA, 33 bp, Homo sapien
gcaaccaaggaatccacgaagtcaaatcatacg

SEQ ID NO: 152602 - DNA, 33 bp, Homo sapien
gcaaccaaggaatccatgaagtcaaatcatacg

SEQ ID NO: 152603 - DNA, 33 bp, Homo sapien
caccagggagagggttaaacactgcggacgcag

SEQ ID NO: 152604 - DNA, 33 bp, Homo sapien
caccagggagagggttcaacactgcggacgcag

SEQ ID NO: 152605 - DNA, 33 bp, Homo sapien
gctaatccttgtgcaagtacccatgttagaagt

SEQ ID NO: 152606 - DNA, 33 bp, Homo sapien
gctaatccttgtgcaattacccatgttagaagt

SEQ ID NO: 152607 - DNA, 33 bp, Homo sapien
gcttacaccacagggaaatggattgtttcacat

SEQ ID NO: 152608 - DNA, 33 bp, Homo sapien
gcttacaccacagggacatggattgtttcacat

SEQ ID NO: 152609 - DNA, 33 bp, Homo sapien
caagccacccagtgcacggtactttgttacaca

SEQ ID NO: 152610 - DNA, 33 bp, Homo sapien
caagccacccagtgcatggtactttgttacaca

SEQ ID NO: 152611 - DNA, 33 bp, Homo sapien
gatggtttgtgtgtataagggggtgcttggtag

SEQ ID NO: 152612 - DNA, 33 bp, Homo sapien
gatggtttgtgtgtatgagggggtgcttggtag

SEQ ID NO: 152613 - DNA, 33 bp, Homo sapien
gaggaggacaggaagaaagttcaggatctgaat

SEQ ID NO: 152614 - DNA, 33 bp, Homo sapien
gaggaggacaggaagagagttcaggatctgaat

SEQ ID NO: 152615 - DNA, 33 bp, Homo sapien
atattttgttacaagcacatagattctcctttt

SEQ ID NO: 152616 - DNA, 33 bp, Homo sapien
atattttgttacaagcgcatagattctcctttt

SEQ ID NO: 152617 - DNA, 33 bp, Homo sapien
atgagtttgcttctgacagtggaggtctccgga

SEQ ID NO: 152618 - DNA, 33 bp, Homo sapien
atgagtttgcttctgagagtggaggtctccgga

SEQ ID NO: 152619 - DNA, 33 bp, Homo sapien
ttgccccttaagaagaacctagagcaagttatc

SEQ ID NO: 152620 - DNA, 33 bp, Homo sapien
ttgccccttaagaagagcctagagcaagttatc

SEQ ID NO: 152621 - DNA, 33 bp, Homo sapien
actagctgtgcaaacaaaacctcggacttccct

SEQ ID NO: 152622 - DNA, 33 bp, Homo sapien
actagctgtgcaaacagaacctcggacttccct

SEQ ID NO: 152623 - DNA, 33 bp, Homo sapien
ggctatttatagctccccctaagtcctttccag

SEQ ID NO: 152624 - DNA, 33 bp, Homo sapien
ggctatttatagctcctcctaagtcctttccag

SEQ ID NO: 152625 - DNA, 33 bp, Homo sapien
gtctgtggttctggggaccaagccttgtcagga

SEQ ID NO: 152626 - DNA, 33 bp, Homo sapien
gtctgtggttctgggggccaagccttgtcagga

SEQ ID NO: 152627 - DNA, 33 bp, Homo sapien
gcagtgctgcaaggaaaatggagacctggaaaa

SEQ ID NO: 152628 - DNA, 33 bp, Homo sapien
gcagtgctgcaaggaagatggagacctggaaaa

SEQ ID NO: 152629 - DNA, 33 bp, Homo sapien
taaccattctgctgacaaacttataagcacaat

SEQ ID NO: 152630 - DNA, 33 bp, Homo sapien
taaccattctgctgaccaacttataagcacaat

SEQ ID NO: 152631 - DNA, 33 bp, Homo sapien
ttttggagaagtgaaaccactggcccagagtct

SEQ ID NO: 152632 - DNA, 33 bp, Homo sapien
ttttggagaagtgaaatcactggcccagagtct

SEQ ID NO: 152633 - DNA, 33 bp, Homo sapien
tttgtaatatttttgacagaggactgcaataca

SEQ ID NO: 152634 - DNA, 33 bp, Homo sapien
tttgtaatatttttgagagaggactgcaataca

SEQ ID NO: 152635 - DNA, 33 bp, Homo sapien
gccaggatgagaactacaccatcccatgaggcc

SEQ ID NO: 152636 - DNA, 33 bp, Homo sapien
gccaggatgagaactagaccatcccatgaggcc

SEQ ID NO: 152637 - DNA, 33 bp, Homo sapien
gccttagactgatcaaagaccacagcctggtgg

SEQ ID NO: 152638 - DNA, 33 bp, Homo sapien
gccttagactgatcaaggaccacagcctggtgg

SEQ ID NO: 152639 - DNA, 33 bp, Homo sapien
agttggctgcgtgtaccgaaggacagagcctca

SEQ ID NO: 152640 - DNA, 33 bp, Homo sapien
agttggctgcgtgtactgaaggacagagcctca

SEQ ID NO: 152641 - DNA, 33 bp, Homo sapien
gtgacagggtgagtcactgaaaccttctctaac

SEQ ID NO: 152642 - DNA, 33 bp, Homo sapien
gtgacagggtgagtcagtgaaaccttctctaac

SEQ ID NO: 152643 - DNA, 33 bp, Homo sapien
ttcatcctcttgaaaacgtgcctgaaatggtaa

SEQ ID NO: 152644 - DNA, 33 bp, Homo sapien
ttcatcctcttgaaaatgtgcctgaaatggtaa

SEQ ID NO: 152645 - DNA, 33 bp, Homo sapien
atgtagaatacttagactagcacctgacatata

SEQ ID NO: 152646 - DNA, 33 bp, Homo sapien
atgtagaatacttagattagcacctgacatata

SEQ ID NO: 152647 - DNA, 33 bp, Homo sapien
cctcaatctcaaatgaaaaaatgagactcagag

SEQ ID NO: 152648 - DNA, 33 bp, Homo sapien
cctcaatctcaaatgagaaaatgagactcagag

SEQ ID NO: 152649 - DNA, 33 bp, Homo sapien
cccccatgactggggcaaccactctctgaagct

SEQ ID NO: 152650 - DNA, 33 bp, Homo sapien
cccccatgactggggcgaccactctctgaagct

SEQ ID NO: 152651 - DNA, 33 bp, Homo sapien
atgtcattccagatcacagttcccagtttaatt

SEQ ID NO: 152652 - DNA, 33 bp, Homo sapien
atgtcattccagatcatagttcccagtttaatt

SEQ ID NO: 152653 - DNA, 33 bp, Homo sapien
attgtatgatcttgtccaaccttcaatgaaaca

SEQ ID NO: 152654 - DNA, 33 bp, Homo sapien
attgtatgatcttgtctaaccttcaatgaaaca

SEQ ID NO: 152655 - DNA, 33 bp, Homo sapien
tgccgttacccacccactctgatgcagacaata

SEQ ID NO: 152656 - DNA, 33 bp, Homo sapien
tgccgttacccacccattctgatgcagacaata

SEQ ID NO: 152657 - DNA, 33 bp, Homo sapien
aagttcttaactgcctcactgggtagcctgcac

SEQ ID NO: 152658 - DNA, 33 bp, Homo sapien
aagttcttaactgccttactgggtagcctgcac

SEQ ID NO: 152659 - DNA, 33 bp, Homo sapien
ccctctgtaatgataccgtactacctgtcttac

SEQ ID NO: 152660 - DNA, 33 bp, Homo sapien
ccctctgtaatgatactgtactacctgtcttac

SEQ ID NO: 152661 - DNA, 33 bp, Homo sapien
ccctcatccataaaataaggagcttgatacaat

SEQ ID NO: 152662 - DNA, 33 bp, Homo sapien
ccctcatccataaaatgaggagcttgatacaat

SEQ ID NO: 152663 - DNA, 33 bp, Homo sapien
cccaggagctactccaaggtaaacaagatccac

SEQ ID NO: 152664 - DNA, 33 bp, Homo sapien
cccaggagctactccacggtaaacaagatccac

SEQ ID NO: 152665 - DNA, 33 bp, Homo sapien
cctgaactaggtgcacaagcattgaggtttgaa

SEQ ID NO: 152666 - DNA, 33 bp, Homo sapien
cctgaactaggtgcacgagcattgaggtttgaa

SEQ ID NO: 152667 - DNA, 33 bp, Homo sapien
ttcaatttactgagaacctatattgtgactggg

SEQ ID NO: 152668 - DNA, 33 bp, Homo sapien
ttcaatttactgagaatctatattgtgactggg

SEQ ID NO: 152669 - DNA, 33 bp, Homo sapien
tcctgggcctgttcccaaatagaatccctgcag

SEQ ID NO: 152670 - DNA, 33 bp, Homo sapien
tcctgggcctgttcccgaatagaatccctgcag

SEQ ID NO: 152671 - DNA, 33 bp, Homo sapien
ggggaagtttgtatgacggttttgcacataccc

SEQ ID NO: 152672 - DNA, 33 bp, Homo sapien
ggggaagtttgtatgatggttttgcacataccc

SEQ ID NO: 152673 - DNA, 33 bp, Homo sapien
cttcaggatgaaacacagtgacgcctggctggg

SEQ ID NO: 152674 - DNA, 33 bp, Homo sapien
cttcaggatgaaacacggtgacgcctggctggg

SEQ ID NO: 152675 - DNA, 33 bp, Homo sapien
tttcttcatccataaaatgggtataataacagt

SEQ ID NO: 152676 - DNA, 33 bp, Homo sapien
tttcttcatccataaagtgggtataataacagt

SEQ ID NO: 152677 - DNA, 33 bp, Homo sapien
ttcaacagctccctgaaaatctgcagggtgaag

SEQ ID NO: 152678 - DNA, 33 bp, Homo sapien
ttcaacagctccctgacaatctgcagggtgaag

SEQ ID NO: 152679 - DNA, 33 bp, Homo sapien
gttaacaggtcagggccaagtcccccaaggctg

SEQ ID NO: 152680 - DNA, 33 bp, Homo sapien
gttaacaggtcagggctaagtcccccaaggctg

SEQ ID NO: 152681 - DNA, 33 bp, Homo sapien
ttaaaggactgcctgagacttgtttggttgtac

SEQ ID NO: 152682 - DNA, 33 bp, Homo sapien
ttaaaggactgcctgatacttgtttggttgtac

SEQ ID NO: 152683 - DNA, 33 bp, Homo sapien
atatacagaaatagtacggtcttccttttctga

SEQ ID NO: 152684 - DNA, 33 bp, Homo sapien
atatacagaaatagtatggtcttccttttctga

SEQ ID NO: 152685 - DNA, 33 bp, Homo sapien
catctgtccaagtttgcatccgagcattccttc

SEQ ID NO: 152686 - DNA, 33 bp, Homo sapien
catctgtccaagtttgtatccgagcattccttc

SEQ ID NO: 152687 - DNA, 33 bp, Homo sapien
attcagctgcaggtaactgagatgctgaccaga

SEQ ID NO: 152688 - DNA, 33 bp, Homo sapien
attcagctgcaggtaattgagatgctgaccaga

SEQ ID NO: 152689 - DNA, 33 bp, Homo sapien
acatctctttatcacgcaggcaaaagtgttccc

SEQ ID NO: 152690 - DNA, 33 bp, Homo sapien
acatctctttatcacgtaggcaaaagtgttccc

SEQ ID NO: 152691 - DNA, 33 bp, Homo sapien
catgtgacaagaacccggcttttacctgaactg

SEQ ID NO: 152692 - DNA, 33 bp, Homo sapien
catgtgacaagaaccctgcttttacctgaactg

SEQ ID NO: 152693 - DNA, 33 bp, Homo sapien
cctgctatcggtcttacagtcttaagagatgta

SEQ ID NO: 152694 - DNA, 33 bp, Homo sapien
cctgctatcggtcttatagtcttaagagatgta

SEQ ID NO: 152695 - DNA, 33 bp, Homo sapien
gaaagggtcctgagaacaaaatctttccactgc

SEQ ID NO: 152696 - DNA, 33 bp, Homo sapien
gaaagggtcctgagaataaaatctttccactgc

SEQ ID NO: 152697 - DNA, 33 bp, Homo sapien
agacaaacctcagacaccaaatatgtactacag

SEQ ID NO: 152698 - DNA, 33 bp, Homo sapien
agacaaacctcagacatcaaatatgtactacag

SEQ ID NO: 152699 - DNA, 33 bp, Homo sapien
tatcagattacttcaacggggtcatggggctca

SEQ ID NO: 152700 - DNA, 33 bp, Homo sapien
tatcagattacttcaatggggtcatggggctca

SEQ ID NO: 152701 - DNA, 33 bp, Homo sapien
atgatgaagctgccataaagacccaaaaggact

SEQ ID NO: 152702 - DNA, 33 bp, Homo sapien
atgatgaagctgccattaagacccaaaaggact

SEQ ID NO: 152703 - DNA, 33 bp, Homo sapien
ggcgctaaaatgatggaatgctttctttgttca

SEQ ID NO: 152704 - DNA, 33 bp, Homo sapien
ggcgctaaaatgatgggatgctttctttgttca

SEQ ID NO: 152705 - DNA, 33 bp, Homo sapien
tatgtggggtgggggaaatggcttaatgccttc

SEQ ID NO: 152706 - DNA, 33 bp, Homo sapien
tatgtggggtgggggagatggcttaatgccttc

SEQ ID NO: 152707 - DNA, 33 bp, Homo sapien
ccgctgcctgggaccactcagtaacaagtgaca

SEQ ID NO: 152708 - DNA, 33 bp, Homo sapien
ccgctgcctgggaccattcagtaacaagtgaca

SEQ ID NO: 152709 - DNA, 33 bp, Homo sapien
gtcaacaagggagagactacttatctgagttga

SEQ ID NO: 152710 - DNA, 33 bp, Homo sapien
gtcaacaagggagagattacttatctgagttga

SEQ ID NO: 152711 - DNA, 33 bp, Homo sapien
tatattcactcatttaacccttgcaggaactcc

SEQ ID NO: 152712 - DNA, 33 bp, Homo sapien
tatattcactcatttagcccttgcaggaactcc

SEQ ID NO: 152713 - DNA, 33 bp, Homo sapien
tgattttaaccattgcaccatagagatgacagc

SEQ ID NO: 152714 - DNA, 33 bp, Homo sapien
tgattttaaccattgcgccatagagatgacagc

SEQ ID NO: 152715 - DNA, 33 bp, Homo sapien
tgtattcacaacaacgaacatccatcatccatg

SEQ ID NO: 152716 - DNA, 33 bp, Homo sapien
tgtattcacaacaacgcacatccatcatccatg

SEQ ID NO: 152717 - DNA, 33 bp, Homo sapien
agatagaccatgaatgaagaattgaggctgaag

SEQ ID NO: 152718 - DNA, 33 bp, Homo sapien
agatagaccatgaatggagaattgaggctgaag

SEQ ID NO: 152719 - DNA, 33 bp, Homo sapien
tgctgtattgcacaaaatcacccgggaaccttt

SEQ ID NO: 152720 - DNA, 33 bp, Homo sapien
tgctgtattgcacaaactcacccgggaaccttt

SEQ ID NO: 152721 - DNA, 33 bp, Homo sapien
ctgggtaaccataggaacacctttattacggtt

SEQ ID NO: 152722 - DNA, 33 bp, Homo sapien
ctgggtaaccataggagcacctttattacggtt

SEQ ID NO: 152723 - DNA, 33 bp, Homo sapien
agtcagaaaagacatacaaaaaccaggaccaag

SEQ ID NO: 152724 - DNA, 33 bp, Homo sapien
agtcagaaaagacatataaaaaccaggaccaag

SEQ ID NO: 152725 - DNA, 33 bp, Homo sapien
tcccatccatttgttaaaatcagcttaatgcaa

SEQ ID NO: 152726 - DNA, 33 bp, Homo sapien
tcccatccatttgttacaatcagcttaatgcaa

SEQ ID NO: 152727 - DNA, 33 bp, Homo sapien
ccatgcaggaaacaacaggaaaataagaacaag

SEQ ID NO: 152728 - DNA, 33 bp, Homo sapien
ccatgcaggaaacaacgggaaaataagaacaag

SEQ ID NO: 152729 - DNA, 33 bp, Homo sapien
gctctggacacaggacaagtgctcaacacaggg

SEQ ID NO: 152730 - DNA, 33 bp, Homo sapien
gctctggacacaggaccagtgctcaacacaggg

SEQ ID NO: 152731 - DNA, 33 bp, Homo sapien
tctcaacttatagcacccttaatgtctctgtaa

SEQ ID NO: 152732 - DNA, 33 bp, Homo sapien
tctcaacttatagcactcttaatgtctctgtaa

SEQ ID NO: 152733 - DNA, 33 bp, Homo sapien
atgggaaatgttgaggccaaagagcattgccat

SEQ ID NO: 152734 - DNA, 33 bp, Homo sapien
atgggaaatgttgaggtcaaagagcattgccat

SEQ ID NO: 152735 - DNA, 33 bp, Homo sapien
atgtaggtgacacctgaacatataaccagggcg

SEQ ID NO: 152736 - DNA, 33 bp, Homo sapien
atgtaggtgacacctggacatataaccagggcg

SEQ ID NO: 152737 - DNA, 33 bp, Homo sapien
cctggactgagattgcactgaggaaaggagaga

SEQ ID NO: 152738 - DNA, 33 bp, Homo sapien
cctggactgagattgcgctgaggaaaggagaga

SEQ ID NO: 152739 - DNA, 33 bp, Homo sapien
ttttcagacaagcaaaagagatttctgagaggc

SEQ ID NO: 152740 - DNA, 33 bp, Homo sapien
ttttcagacaagcaaaggagatttctgagaggc

SEQ ID NO: 152741 - DNA, 33 bp, Homo sapien
ctaagagctaggctaacacaaaaaggttaagaa

SEQ ID NO: 152742 - DNA, 33 bp, Homo sapien
ctaagagctaggctaagacaaaaaggttaagaa

SEQ ID NO: 152743 - DNA, 33 bp, Homo sapien
cctccaacggaaagcacctgcatcctcatctct

SEQ ID NO: 152744 - DNA, 33 bp, Homo sapien
cctccaacggaaagcatctgcatcctcatctct

SEQ ID NO: 152745 - DNA, 33 bp, Homo sapien
cactctgagtgttggacgaacacaaaccgaaga

SEQ ID NO: 152746 - DNA, 33 bp, Homo sapien
cactctgagtgttggatgaacacaaaccgaaga

SEQ ID NO: 152747 - DNA, 33 bp, Homo sapien
cttctcagccagatgacgtatttttgaaaacca

SEQ ID NO: 152748 - DNA, 33 bp, Homo sapien
cttctcagccagatgatgtatttttgaaaacca

SEQ ID NO: 152749 - DNA, 33 bp, Homo sapien
gaatcctaaaaatgaacgaagtgtaaagcatcc

SEQ ID NO: 152750 - DNA, 33 bp, Homo sapien
gaatcctaaaaatgaatgaagtgtaaagcatcc

SEQ ID NO: 152751 - DNA, 33 bp, Homo sapien
cagctgctacttcataacaagctccagggtgag

SEQ ID NO: 152752 - DNA, 33 bp, Homo sapien
cagctgctacttcataccaagctccagggtgag

SEQ ID NO: 152753 - DNA, 33 bp, Homo sapien
acaggcctttagagagcagtttattctgcacag

SEQ ID NO: 152754 - DNA, 33 bp, Homo sapien
acaggcctttagagagtagtttattctgcacag

SEQ ID NO: 152755 - DNA, 33 bp, Homo sapien
agctaactttggttaaatagttaatgaaatgca

SEQ ID NO: 152756 - DNA, 33 bp, Homo sapien
agctaactttggttaagtagttaatgaaatgca

SEQ ID NO: 152757 - DNA, 33 bp, Homo sapien
catgaggtaggcttcacgcccatttctagattc

SEQ ID NO: 152758 - DNA, 33 bp, Homo sapien
catgaggtaggcttcatgcccatttctagattc

SEQ ID NO: 152759 - DNA, 33 bp, Homo sapien
catcaccacaccaaataacagtaacttgtgtgt

SEQ ID NO: 152760 - DNA, 33 bp, Homo sapien
catcaccacaccaaatgacagtaacttgtgtgt

SEQ ID NO: 152761 - DNA, 33 bp, Homo sapien
atgtcctttggatcagcccataaatagcttcca

SEQ ID NO: 152762 - DNA, 33 bp, Homo sapien
atgtcctttggatcagtccataaatagcttcca

SEQ ID NO: 152763 - DNA, 33 bp, Homo sapien
atcacgagaaggcaccagagttgaaaataaggc

SEQ ID NO: 152764 - DNA, 33 bp, Homo sapien
atcacgagaaggcaccggagttgaaaataaggc

SEQ ID NO: 152765 - DNA, 33 bp, Homo sapien
gctcatacataccagcaccttcttaaattggct

SEQ ID NO: 152766 - DNA, 33 bp, Homo sapien
gctcatacataccagcgccttcttaaattggct

SEQ ID NO: 152767 - DNA, 33 bp, Homo sapien
aacaatctttacattacagccaatttaagaagg

SEQ ID NO: 152768 - DNA, 33 bp, Homo sapien
aacaatctttacattagagccaatttaagaagg

SEQ ID NO: 152769 - DNA, 33 bp, Homo sapien
gtcctaggcaacactcacggtctcaggctgcgg

SEQ ID NO: 152770 - DNA, 33 bp, Homo sapien
gtcctaggcaacactcgcggtctcaggctgcgg

SEQ ID NO: 152771 - DNA, 33 bp, Homo sapien
tgctgggctgccttccaagaaacttagagttct

SEQ ID NO: 152772 - DNA, 33 bp, Homo sapien
tgctgggctgccttccgagaaacttagagttct

SEQ ID NO: 152773 - DNA, 33 bp, Homo sapien
tctctgcagagagaacagtggacagtggccaga

SEQ ID NO: 152774 - DNA, 33 bp, Homo sapien
tctctgcagagagaaccgtggacagtggccaga

SEQ ID NO: 152775 - DNA, 33 bp, Homo sapien
ttggaggagttatcacacttgaccaatgtcaca

SEQ ID NO: 152776 - DNA, 33 bp, Homo sapien
ttggaggagttatcacgcttgaccaatgtcaca

SEQ ID NO: 152777 - DNA, 33 bp, Homo sapien
agccagcctcagggagacagcaagagggctggt

SEQ ID NO: 152778 - DNA, 33 bp, Homo sapien
agccagcctcagggagtcagcaagagggctggt

SEQ ID NO: 152779 - DNA, 33 bp, Homo sapien
gtattagcatcctcacaggatgagtggaaaaga

SEQ ID NO: 152780 - DNA, 33 bp, Homo sapien
gtattagcatcctcactggatgagtggaaaaga

SEQ ID NO: 152781 - DNA, 33 bp, Homo sapien
aacagccctaagagaacggtattagcatcctca

SEQ ID NO: 152782 - DNA, 33 bp, Homo sapien
aacagccctaagagaatggtattagcatcctca

SEQ ID NO: 152783 - DNA, 33 bp, Homo sapien
aaaagaacttgtcgcaggtggccactacccctt

SEQ ID NO: 152784 - DNA, 33 bp, Homo sapien
aaaagaacttgtcgcatgtggccactacccctt

SEQ ID NO: 152785 - DNA, 33 bp, Homo sapien
aactgggggcactttcaagccaaaactcccagc

SEQ ID NO: 152786 - DNA, 33 bp, Homo sapien
aactgggggcactttccagccaaaactcccagc

SEQ ID NO: 152787 - DNA, 33 bp, Homo sapien
cttgcatctccgtctaagtgtctaacagacaca

SEQ ID NO: 152788 - DNA, 33 bp, Homo sapien
cttgcatctccgtctacgtgtctaacagacaca

SEQ ID NO: 152789 - DNA, 33 bp, Homo sapien
aaaccagccccaaagcaagtgacttaaaccagc

SEQ ID NO: 152790 - DNA, 33 bp, Homo sapien
aaaccagccccaaagcgagtgacttaaaccagc

SEQ ID NO: 152791 - DNA, 33 bp, Homo sapien
tattcagactttaaaaagaagggactctgacat

SEQ ID NO: 152792 - DNA, 33 bp, Homo sapien
tattcagactttaaaaggaagggactctgacat

SEQ ID NO: 152793 - DNA, 33 bp, Homo sapien
gggccacctcaggaaacaagcctgacagaaaca

SEQ ID NO: 152794 - DNA, 33 bp, Homo sapien
gggccacctcaggaaataagcctgacagaaaca

SEQ ID NO: 152795 - DNA, 33 bp, Homo sapien
cttcagattttcatccacttcttagcgcaacac

SEQ ID NO: 152796 - DNA, 33 bp, Homo sapien
cttcagattttcatccgcttcttagcgcaacac

SEQ ID NO: 152797 - DNA, 33 bp, Homo sapien
atccaaaactttgcccacacaggcctgcactcg

SEQ ID NO: 152798 - DNA, 33 bp, Homo sapien
atccaaaactttgcccgcacaggcctgcactcg

SEQ ID NO: 152799 - DNA, 33 bp, Homo sapien
ttggttttccgaaggccgaatgagcgagtgcag

SEQ ID NO: 152800 - DNA, 33 bp, Homo sapien
ttggttttccgaaggctgaatgagcgagtgcag

SEQ ID NO: 152801 - DNA, 33 bp, Homo sapien
tactgtattgcaaagacgttaattctccccaaa

SEQ ID NO: 152802 - DNA, 33 bp, Homo sapien
tactgtattgcaaagatgttaattctccccaaa

SEQ ID NO: 152803 - DNA, 33 bp, Homo sapien
ataactgaaactgaggaaagtgaaactgtgaac

SEQ ID NO: 152804 - DNA, 33 bp, Homo sapien
ataactgaaactgaggcaagtgaaactgtgaac

SEQ ID NO: 152805 - DNA, 33 bp, Homo sapien
ttaaaacaagtggtaccgaagcaattagatacc

SEQ ID NO: 152806 - DNA, 33 bp, Homo sapien
ttaaaacaagtggtactgaagcaattagatacc

SEQ ID NO: 152807 - DNA, 33 bp, Homo sapien
gattgaaagaccaaacaggtgtcagtttatccc

SEQ ID NO: 152808 - DNA, 33 bp, Homo sapien
gattgaaagaccaaacgggtgtcagtttatccc

SEQ ID NO: 152809 - DNA, 33 bp, Homo sapien
aattttaaatatgtgcacacttgattaaattaa

SEQ ID NO: 152810 - DNA, 33 bp, Homo sapien
aattttaaatatgtgcgcacttgattaaattaa

SEQ ID NO: 152811 - DNA, 33 bp, Homo sapien
ggccctgtgttgttgaaccatccctatcttaaa

SEQ ID NO: 152812 - DNA, 33 bp, Homo sapien
ggccctgtgttgttgagccatccctatcttaaa

SEQ ID NO: 152813 - DNA, 33 bp, Homo sapien
tccccagccaggtggcacggagaccatgacagc

SEQ ID NO: 152814 - DNA, 33 bp, Homo sapien
tccccagccaggtggcgcggagaccatgacagc

SEQ ID NO: 152815 - DNA, 33 bp, Homo sapien
ccattatactaacctacgtaataaatcctctca

SEQ ID NO: 152816 - DNA, 33 bp, Homo sapien
ccattatactaacctatgtaataaatcctctca

SEQ ID NO: 152817 - DNA, 33 bp, Homo sapien
acacacacccagtgacagtaatgctataattgt

SEQ ID NO: 152818 - DNA, 33 bp, Homo sapien
acacacacccagtgacggtaatgctataattgt

SEQ ID NO: 152819 - DNA, 33 bp, Homo sapien
gtgtccttttctgacaatatcccattatattat

SEQ ID NO: 152820 - DNA, 33 bp, Homo sapien
gtgtccttttctgacagtatcccattatattat

SEQ ID NO: 152821 - DNA, 33 bp, Homo sapien
aattgatttgtttgtacggtacgaaacaagact

SEQ ID NO: 152822 - DNA, 33 bp, Homo sapien
aattgatttgtttgtatggtacgaaacaagact

SEQ ID NO: 152823 - DNA, 33 bp, Homo sapien
agcacagggaactctccaacaggccagatttta

SEQ ID NO: 152824 - DNA, 33 bp, Homo sapien
agcacagggaactctctaacaggccagatttta

SEQ ID NO: 152825 - DNA, 33 bp, Homo sapien
ctgtatgcacaaggagaaaaagtcccgagactt

SEQ ID NO: 152826 - DNA, 33 bp, Homo sapien
ctgtatgcacaaggagtaaaagtcccgagactt

SEQ ID NO: 152827 - DNA, 33 bp, Homo sapien
tccttgtgcatacagaatagtgattgaggcaaa

SEQ ID NO: 152828 - DNA, 33 bp, Homo sapien
tccttgtgcatacagagtagtgattgaggcaaa

SEQ ID NO: 152829 - DNA, 33 bp, Homo sapien
cacccagcacaacttacggcacttcaattgata

SEQ ID NO: 152830 - DNA, 33 bp, Homo sapien
cacccagcacaacttatggcacttcaattgata

SEQ ID NO: 152831 - DNA, 33 bp, Homo sapien
actgagattcagggcaactaagtaatttgtcca

SEQ ID NO: 152832 - DNA, 33 bp, Homo sapien
actgagattcagggcacctaagtaatttgtcca

SEQ ID NO: 152833 - DNA, 33 bp, Homo sapien
tatgctgggttctgtgaaaataaagatggataa

SEQ ID NO: 152834 - DNA, 33 bp, Homo sapien
tatgctgggttctgtggaaataaagatggataa

SEQ ID NO: 152835 - DNA, 33 bp, Homo sapien
ttgtctagttcacatgccaaagttttcctattc

SEQ ID NO: 152836 - DNA, 33 bp, Homo sapien
ttgtctagttcacatgtcaaagttttcctattc

SEQ ID NO: 152837 - DNA, 33 bp, Homo sapien
ttgaatcaagataccaataagacatttctccat

SEQ ID NO: 152838 - DNA, 33 bp, Homo sapien
ttgaatcaagataccagtaagacatttctccat

SEQ ID NO: 152839 - DNA, 33 bp, Homo sapien
tcattatgcttctcccagaaagttctcttaaag

SEQ ID NO: 152840 - DNA, 33 bp, Homo sapien
tcattatgcttctcccggaaagttctcttaaag

SEQ ID NO: 152841 - DNA, 33 bp, Homo sapien
agaagttcagggttgaaaacaagaagcagggac

SEQ ID NO: 152842 - DNA, 33 bp, Homo sapien
agaagttcagggttgataacaagaagcagggac

SEQ ID NO: 152843 - DNA, 33 bp, Homo sapien
tataggtgctggggtcactttgttatacccggt

SEQ ID NO: 152844 - DNA, 33 bp, Homo sapien
tataggtgctggggtcgctttgttatacccggt

SEQ ID NO: 152845 - DNA, 33 bp, Homo sapien
cccagggtgactggcaagtaatgggaaaaggca

SEQ ID NO: 152846 - DNA, 33 bp, Homo sapien
cccagggtgactggcaggtaatgggaaaaggca

SEQ ID NO: 152847 - DNA, 33 bp, Homo sapien
ttatacatagggatgccctttaagctggcttct

SEQ ID NO: 152848 - DNA, 33 bp, Homo sapien
ttatacatagggatgctctttaagctggcttct

SEQ ID NO: 152849 - DNA, 33 bp, Homo sapien
gcccatccaccaatgaaatatgacattacctgt

SEQ ID NO: 152850 - DNA, 33 bp, Homo sapien
gcccatccaccaatgagatatgacattacctgt

SEQ ID NO: 152851 - DNA, 33 bp, Homo sapien
aaaggacagagtaggaaacaagtagtaatgagc

SEQ ID NO: 152852 - DNA, 33 bp, Homo sapien
aaaggacagagtaggagacaagtagtaatgagc

SEQ ID NO: 152853 - DNA, 33 bp, Homo sapien
gttcagtttcagtagcagcaccaacctcaccaa

SEQ ID NO: 152854 - DNA, 33 bp, Homo sapien
gttcagtttcagtagcggcaccaacctcaccaa

SEQ ID NO: 152855 - DNA, 33 bp, Homo sapien
tcttttacaagctactcagcagtgaggttagaa

SEQ ID NO: 152856 - DNA, 33 bp, Homo sapien
tcttttacaagctactgagcagtgaggttagaa

SEQ ID NO: 152857 - DNA, 33 bp, Homo sapien
tcttcgcttctcctcccattcaaatccaatttg

SEQ ID NO: 152858 - DNA, 33 bp, Homo sapien
tcttcgcttctcctcctattcaaatccaatttg

SEQ ID NO: 152859 - DNA, 33 bp, Homo sapien
cctgaaggctcagagacggtgagttgcagcaat

SEQ ID NO: 152860 - DNA, 33 bp, Homo sapien
cctgaaggctcagagatggtgagttgcagcaat

SEQ ID NO: 152861 - DNA, 33 bp, Homo sapien
gaagatgacaggacccagataggaaagctgctg

SEQ ID NO: 152862 - DNA, 33 bp, Homo sapien
gaagatgacaggacccggataggaaagctgctg

SEQ ID NO: 152863 - DNA, 33 bp, Homo sapien
ggttttccaagtttaacgaacataacaattact

SEQ ID NO: 152864 - DNA, 33 bp, Homo sapien
ggttttccaagtttaatgaacataacaattact

SEQ ID NO: 152865 - DNA, 33 bp, Homo sapien
gtgagaagccaaaatagaagtgtgttttgatta

SEQ ID NO: 152866 - DNA, 33 bp, Homo sapien
gtgagaagccaaaatataagtgtgttttgatta

SEQ ID NO: 152867 - DNA, 33 bp, Homo sapien
ttctgctgttaagtaaaaggcaccaactaaagc

SEQ ID NO: 152868 - DNA, 33 bp, Homo sapien
ttctgctgttaagtaagaggcaccaactaaagc

SEQ ID NO: 152869 - DNA, 33 bp, Homo sapien
ttcctatttggagaaaatctcctgatactggtt

SEQ ID NO: 152870 - DNA, 33 bp, Homo sapien
ttcctatttggagaaagtctcctgatactggtt

SEQ ID NO: 152871 - DNA, 33 bp, Homo sapien
ggtgcaaaaaggcctccaatcacaaaacacttc

SEQ ID NO: 152872 - DNA, 33 bp, Homo sapien
ggtgcaaaaaggcctctaatcacaaaacacttc

SEQ ID NO: 152873 - DNA, 33 bp, Homo sapien
ttgttcaggaacctgcaatgagtccccatcctt

SEQ ID NO: 152874 - DNA, 33 bp, Homo sapien
ttgttcaggaacctgcgatgagtccccatcctt

SEQ ID NO: 152875 - DNA, 33 bp, Homo sapien
cttatagaattcaaaaaaaaagccctgagattt

SEQ ID NO: 152876 - DNA, 33 bp, Homo sapien
cttatagaattcaaaagaaaagccctgagattt

SEQ ID NO: 152877 - DNA, 33 bp, Homo sapien
atgtataggcattacaagtacatccatcattaa

SEQ ID NO: 152878 - DNA, 33 bp, Homo sapien
atgtataggcattacaggtacatccatcattaa

SEQ ID NO: 152879 - DNA, 33 bp, Homo sapien
tcaaactttctgcccccaataaggcaagcatag

SEQ ID NO: 152880 - DNA, 33 bp, Homo sapien
tcaaactttctgcccctaataaggcaagcatag

SEQ ID NO: 152881 - DNA, 33 bp, Homo sapien
taaaactgtgctagtcaatcagtttcaccaagg

SEQ ID NO: 152882 - DNA, 33 bp, Homo sapien
taaaactgtgctagtccatcagtttcaccaagg

SEQ ID NO: 152883 - DNA, 33 bp, Homo sapien
actaaaaacactacaaatagagcattgctggtg

SEQ ID NO: 152884 - DNA, 33 bp, Homo sapien
actaaaaacactacaactagagcattgctggtg

SEQ ID NO: 152885 - DNA, 33 bp, Homo sapien
tcaaatcccttcctagcacagaaaaatgaaaat

SEQ ID NO: 152886 - DNA, 33 bp, Homo sapien
tcaaatcccttcctaggacagaaaaatgaaaat

SEQ ID NO: 152887 - DNA, 33 bp, Homo sapien
cagcagggttgaataaagtcagaatgaagttat

SEQ ID NO: 152888 - DNA, 33 bp, Homo sapien
cagcagggttgaataaggtcagaatgaagttat

SEQ ID NO: 152889 - DNA, 33 bp, Homo sapien
tgtgcaggctaccttcaaattctgattttccaa

SEQ ID NO: 152890 - DNA, 33 bp, Homo sapien
tgtgcaggctaccttcgaattctgattttccaa

SEQ ID NO: 152891 - DNA, 33 bp, Homo sapien
tgatgctgttgagcccaagtcagcctcaggtca

SEQ ID NO: 152892 - DNA, 33 bp, Homo sapien
tgatgctgttgagcccgagtcagcctcaggtca

SEQ ID NO: 152893 - DNA, 33 bp, Homo sapien
agctgggaagagataaaagacagagagaaggga

SEQ ID NO: 152894 - DNA, 33 bp, Homo sapien
agctgggaagagataacagacagagagaaggga

SEQ ID NO: 152895 - DNA, 33 bp, Homo sapien
catcctccagaggtgactagcaatgtgttatat

SEQ ID NO: 152896 - DNA, 33 bp, Homo sapien
catcctccagaggtgagtagcaatgtgttatat

SEQ ID NO: 152897 - DNA, 33 bp, Homo sapien
gacaggactgacatcccgatcatctcagcagca

SEQ ID NO: 152898 - DNA, 33 bp, Homo sapien
gacaggactgacatcctgatcatctcagcagca

SEQ ID NO: 152899 - DNA, 33 bp, Homo sapien
tgtgagagggggggacactgcatcccgcaaact

SEQ ID NO: 152900 - DNA, 33 bp, Homo sapien
tgtgagagggggggacgctgcatcccgcaaact

SEQ ID NO: 152901 - DNA, 33 bp, Homo sapien
ggtcttctaacttacaggtctgcaaggataata

SEQ ID NO: 152902 - DNA, 33 bp, Homo sapien
ggtcttctaacttacatgtctgcaaggataata

SEQ ID NO: 152903 - DNA, 33 bp, Homo sapien
tatttctcttttgttcactattagatcccccat

SEQ ID NO: 152904 - DNA, 33 bp, Homo sapien
tatttctcttttgttccctattagatcccccat

SEQ ID NO: 152905 - DNA, 33 bp, Homo sapien
gttttgtaaggactggaactatttctcttttgt

SEQ ID NO: 152906 - DNA, 33 bp, Homo sapien
gttttgtaaggactggcactatttctcttttgt

SEQ ID NO: 152907 - DNA, 33 bp, Homo sapien
gggagagagttaacagacatataagtttttatt

SEQ ID NO: 152908 - DNA, 33 bp, Homo sapien
gggagagagttaacagccatataagtttttatt

SEQ ID NO: 152909 - DNA, 33 bp, Homo sapien
tttattggcagcaacaccaacagcgcagagaag

SEQ ID NO: 152910 - DNA, 33 bp, Homo sapien
tttattggcagcaacatcaacagcgcagagaag

SEQ ID NO: 152911 - DNA, 33 bp, Homo sapien
ttacatatgcactcaaccaatttcaataagact

SEQ ID NO: 152912 - DNA, 33 bp, Homo sapien
ttacatatgcactcaatcaatttcaataagact

SEQ ID NO: 152913 - DNA, 33 bp, Homo sapien
aacctgactttaaggacgttaaaatgtgaaaaa

SEQ ID NO: 152914 - DNA, 33 bp, Homo sapien
aacctgactttaaggatgttaaaatgtgaaaaa

SEQ ID NO: 152915 - DNA, 33 bp, Homo sapien
ttccaattaaaacagagtctacccactgttgaa

SEQ ID NO: 152916 - DNA, 33 bp, Homo sapien
ttccaattaaaacagattctacccactgttgaa

SEQ ID NO: 152917 - DNA, 33 bp, Homo sapien
gaggtttaaactggccagcatctgcctggcttc

SEQ ID NO: 152918 - DNA, 33 bp, Homo sapien
gaggtttaaactggccggcatctgcctggcttc

SEQ ID NO: 152919 - DNA, 33 bp, Homo sapien
ggagtcgaattggtgcacggaaatactgagaca

SEQ ID NO: 152920 - DNA, 33 bp, Homo sapien
ggagtcgaattggtgcgcggaaatactgagaca

SEQ ID NO: 152921 - DNA, 33 bp, Homo sapien
aactggcctggtctgacagggcaaagtctacca

SEQ ID NO: 152922 - DNA, 33 bp, Homo sapien
aactggcctggtctgatagggcaaagtctacca

SEQ ID NO: 152923 - DNA, 33 bp, Homo sapien
ctcttgtctgaattccgagttggcctcagttcc

SEQ ID NO: 152924 - DNA, 33 bp, Homo sapien
ctcttgtctgaattcctagttggcctcagttcc

SEQ ID NO: 152925 - DNA, 33 bp, Homo sapien
tgtacctgccattgacccagggtaggttttctc

SEQ ID NO: 152926 - DNA, 33 bp, Homo sapien
tgtacctgccattgactcagggtaggttttctc

SEQ ID NO: 152927 - DNA, 33 bp, Homo sapien
tgtggagcacaagagccgatccctggcagggaa

SEQ ID NO: 152928 - DNA, 33 bp, Homo sapien
tgtggagcacaagagctgatccctggcagggaa

SEQ ID NO: 152929 - DNA, 33 bp, Homo sapien
ggactcttttgcctaacctggttcccaaatcat

SEQ ID NO: 152930 - DNA, 33 bp, Homo sapien
ggactcttttgcctaagctggttcccaaatcat

SEQ ID NO: 152931 - DNA, 33 bp, Homo sapien
ctaaacaaaatccttcccaaatgtcaccctgaa

SEQ ID NO: 152932 - DNA, 33 bp, Homo sapien
ctaaacaaaatccttctcaaatgtcaccctgaa

SEQ ID NO: 152933 - DNA, 33 bp, Homo sapien
atattttactttagaacctggaatctcctactt

SEQ ID NO: 152934 - DNA, 33 bp, Homo sapien
atattttactttagaatctggaatctcctactt

SEQ ID NO: 152935 - DNA, 33 bp, Homo sapien
tacgcatttggatttacgaagtgctcagattgt

SEQ ID NO: 152936 - DNA, 33 bp, Homo sapien
tacgcatttggatttatgaagtgctcagattgt

SEQ ID NO: 152937 - DNA, 33 bp, Homo sapien
gggtcttaccaaaagaaaagtcagtatgagtta

SEQ ID NO: 152938 - DNA, 33 bp, Homo sapien
gggtcttaccaaaagacaagtcagtatgagtta

SEQ ID NO: 152939 - DNA, 33 bp, Homo sapien
cttgtattggcatcctaagctataaaatttgta

SEQ ID NO: 152940 - DNA, 33 bp, Homo sapien
cttgtattggcatcctgagctataaaatttgta

SEQ ID NO: 152941 - DNA, 33 bp, Homo sapien
cactgtctcctaaggacgtttgttccaactgtg

SEQ ID NO: 152942 - DNA, 33 bp, Homo sapien
cactgtctcctaaggatgtttgttccaactgtg

SEQ ID NO: 152943 - DNA, 33 bp, Homo sapien
gtgaatcgggtactgaagaaagagcctggatgc

SEQ ID NO: 152944 - DNA, 33 bp, Homo sapien
gtgaatcgggtactgaggaaagagcctggatgc

SEQ ID NO: 152945 - DNA, 33 bp, Homo sapien
ctaatatggtccccaaaccctgaacaggtggga

SEQ ID NO: 152946 - DNA, 33 bp, Homo sapien
ctaatatggtccccaagccctgaacaggtggga

SEQ ID NO: 152947 - DNA, 33 bp, Homo sapien
acaattcccaggatagccattttgagggcaagg

SEQ ID NO: 152948 - DNA, 33 bp, Homo sapien
acaattcccaggataggcattttgagggcaagg

SEQ ID NO: 152949 - DNA, 33 bp, Homo sapien
atggaatctccaggatcaagctcaggatttctg

SEQ ID NO: 152950 - DNA, 33 bp, Homo sapien
atggaatctccaggatgaagctcaggatttctg

SEQ ID NO: 152951 - DNA, 33 bp, Homo sapien
agagagagacatcacacagggccagacagaggc

SEQ ID NO: 152952 - DNA, 33 bp, Homo sapien
agagagagacatcacatagggccagacagaggc

SEQ ID NO: 152953 - DNA, 33 bp, Homo sapien
gcattagaagaattaaagagactggtcattgat

SEQ ID NO: 152954 - DNA, 33 bp, Homo sapien
gcattagaagaattaaggagactggtcattgat

SEQ ID NO: 152955 - DNA, 33 bp, Homo sapien
gattagaaagtctatgaataaaacacagattta

SEQ ID NO: 152956 - DNA, 33 bp, Homo sapien
gattagaaagtctatggataaaacacagattta

SEQ ID NO: 152957 - DNA, 33 bp, Homo sapien
aatttttaagcatatgaaagccagtacacataa

SEQ ID NO: 152958 - DNA, 33 bp, Homo sapien
aatttttaagcatatgcaagccagtacacataa

SEQ ID NO: 152959 - DNA, 33 bp, Homo sapien
cctatttaaatccagcccagtctgttacaccct

SEQ ID NO: 152960 - DNA, 33 bp, Homo sapien
cctatttaaatccagctcagtctgttacaccct

SEQ ID NO: 152961 - DNA, 33 bp, Homo sapien
cagttctgtcccttaaatgatgctgcctccctt

SEQ ID NO: 152962 - DNA, 33 bp, Homo sapien
cagttctgtcccttaagtgatgctgcctccctt

SEQ ID NO: 152963 - DNA, 33 bp, Homo sapien
caggcagttctggacaatgacatctcagagagg

SEQ ID NO: 152964 - DNA, 33 bp, Homo sapien
caggcagttctggacagtgacatctcagagagg

SEQ ID NO: 152965 - DNA, 33 bp, Homo sapien
acataataatcttaaaagcaaaacctgaaaaga

SEQ ID NO: 152966 - DNA, 33 bp, Homo sapien
acataataatcttaaacgcaaaacctgaaaaga

SEQ ID NO: 152967 - DNA, 33 bp, Homo sapien
tcattgaaagttactaaaactatatgccacaca

SEQ ID NO: 152968 - DNA, 33 bp, Homo sapien
tcattgaaagttactacaactatatgccacaca

SEQ ID NO: 152969 - DNA, 33 bp, Homo sapien
ccctagaaaaatgaaacggaattcacagtctag

SEQ ID NO: 152970 - DNA, 33 bp, Homo sapien
ccctagaaaaatgaaatggaattcacagtctag

SEQ ID NO: 152971 - DNA, 33 bp, Homo sapien
gtcaacctttgtaccaatactctactgagtttc

SEQ ID NO: 152972 - DNA, 33 bp, Homo sapien
gtcaacctttgtaccagtactctactgagtttc

SEQ ID NO: 152973 - DNA, 33 bp, Homo sapien
tctcctcagccctgatcagtcaagaaggataat

SEQ ID NO: 152974 - DNA, 33 bp, Homo sapien
tctcctcagccctgatgagtcaagaaggataat

SEQ ID NO: 152975 - DNA, 33 bp, Homo sapien
ctgacaacattatttgaacacctgattcctccc

SEQ ID NO: 152976 - DNA, 33 bp, Homo sapien
ctgacaacattatttgcacacctgattcctccc

SEQ ID NO: 152977 - DNA, 33 bp, Homo sapien
tcagggaacaactcaaagaagtggtaaagcatt

SEQ ID NO: 152978 - DNA, 33 bp, Homo sapien
tcagggaacaactcaaggaagtggtaaagcatt

SEQ ID NO: 152979 - DNA, 33 bp, Homo sapien
taaaatattaagtctaaacagtcatgaaaatgg

SEQ ID NO: 152980 - DNA, 33 bp, Homo sapien
taaaatattaagtctatacagtcatgaaaatgg

SEQ ID NO: 152981 - DNA, 33 bp, Homo sapien
ccacaggaatgtgcccagaaaattgaaagagtt

SEQ ID NO: 152982 - DNA, 33 bp, Homo sapien
ccacaggaatgtgcccggaaaattgaaagagtt

SEQ ID NO: 152983 - DNA, 33 bp, Homo sapien
ttgtaaaaatttcaaccaagcacaaattttctt

SEQ ID NO: 152984 - DNA, 33 bp, Homo sapien
ttgtaaaaatttcaacgaagcacaaattttctt

SEQ ID NO: 152985 - DNA, 33 bp, Homo sapien
agacaaactcagagaaatataaaatacactaga

SEQ ID NO: 152986 - DNA, 33 bp, Homo sapien
agacaaactcagagaagtataaaatacactaga

SEQ ID NO: 152987 - DNA, 33 bp, Homo sapien
gccctaagtggacataaatgctgcacatgtgta

SEQ ID NO: 152988 - DNA, 33 bp, Homo sapien
gccctaagtggacatacatgctgcacatgtgta

SEQ ID NO: 152989 - DNA, 33 bp, Homo sapien
agcccatgcattttagaattagatcccagagaa

SEQ ID NO: 152990 - DNA, 33 bp, Homo sapien
agcccatgcattttaggattagatcccagagaa

SEQ ID NO: 152991 - DNA, 33 bp, Homo sapien
agtggcatagccaggagagtcataaaccaaatt

SEQ ID NO: 152992 - DNA, 33 bp, Homo sapien
agtggcatagccaggatagtcataaaccaaatt

SEQ ID NO: 152993 - DNA, 33 bp, Homo sapien
tgttagattttgtcaacgctttctctgcatcta

SEQ ID NO: 152994 - DNA, 33 bp, Homo sapien
tgttagattttgtcaatgctttctctgcatcta

SEQ ID NO: 152995 - DNA, 33 bp, Homo sapien
tctcaggtatctccataaaggaacatccagggg

SEQ ID NO: 152996 - DNA, 33 bp, Homo sapien
tctcaggtatctccatgaaggaacatccagggg

SEQ ID NO: 152997 - DNA, 33 bp, Homo sapien
gtttggctccagttaactactttctcctgaggg

SEQ ID NO: 152998 - DNA, 33 bp, Homo sapien
gtttggctccagttaattactttctcctgaggg

SEQ ID NO: 152999 - DNA, 33 bp, Homo sapien
ttcacgtggaaggctacaaccagctgtaataga

SEQ ID NO: 153000 - DNA, 33 bp, Homo sapien
ttcacgtggaaggctagaaccagctgtaataga

SEQ ID NO: 153001 - DNA, 33 bp, Homo sapien
tttctcaaccctctccaattgggcttctgcacc

SEQ ID NO: 153002 - DNA, 33 bp, Homo sapien
tttctcaaccctctccgattgggcttctgcacc

SEQ ID NO: 153003 - DNA, 33 bp, Homo sapien
ctgggcaccacctgtggaggcttaggtgcgttg

SEQ ID NO: 153004 - DNA, 33 bp, Homo sapien
ctgggcaccacctgtgtaggcttaggtgcgttg

SEQ ID NO: 153005 - DNA, 33 bp, Homo sapien
acgtgtggttcaaagcaattaatggtcaagggc

SEQ ID NO: 153006 - DNA, 33 bp, Homo sapien
acgtgtggttcaaagcgattaatggtcaagggc

SEQ ID NO: 153007 - DNA, 33 bp, Homo sapien
aagacttgcctattcaaaaattactggagaaaa

SEQ ID NO: 153008 - DNA, 33 bp, Homo sapien
aagacttgcctattcagaaattactggagaaaa

SEQ ID NO: 153009 - DNA, 33 bp, Homo sapien
gagcatttttcagttacagtcatgccagccttt

SEQ ID NO: 153010 - DNA, 33 bp, Homo sapien
gagcatttttcagttagagtcatgccagccttt

SEQ ID NO: 153011 - DNA, 33 bp, Homo sapien
agtatttcttcatggaatcacccttgtcctcaa

SEQ ID NO: 153012 - DNA, 33 bp, Homo sapien
agtatttcttcatggagtcacccttgtcctcaa

SEQ ID NO: 153013 - DNA, 33 bp, Homo sapien
ggatgagccataaacaatcaagtctggccatgg

SEQ ID NO: 153014 - DNA, 33 bp, Homo sapien
ggatgagccataaacagtcaagtctggccatgg

SEQ ID NO: 153015 - DNA, 33 bp, Homo sapien
ttatagtctatgatcagtataactacattcatt

SEQ ID NO: 153016 - DNA, 33 bp, Homo sapien
ttatagtctatgatcattataactacattcatt

SEQ ID NO: 153017 - DNA, 33 bp, Homo sapien
tatgtgcttggagaccacagatactaggctctg

SEQ ID NO: 153018 - DNA, 33 bp, Homo sapien
tatgtgcttggagaccgcagatactaggctctg

SEQ ID NO: 153019 - DNA, 33 bp, Homo sapien
caacccaatcccttaaatctctcatatgatctt

SEQ ID NO: 153020 - DNA, 33 bp, Homo sapien
caacccaatcccttaagtctctcatatgatctt

SEQ ID NO: 153021 - DNA, 33 bp, Homo sapien
tcagctcagaaggtacagggcagtaattgattt

SEQ ID NO: 153022 - DNA, 33 bp, Homo sapien
tcagctcagaaggtacggggcagtaattgattt

SEQ ID NO: 153023 - DNA, 33 bp, Homo sapien
gagaagatggttggaaagatacaaggggtgact

SEQ ID NO: 153024 - DNA, 33 bp, Homo sapien
gagaagatggttggaaggatacaaggggtgact

SEQ ID NO: 153025 - DNA, 33 bp, Homo sapien
aatgtaggcacaggtaataagtggaggaatcaa

SEQ ID NO: 153026 - DNA, 33 bp, Homo sapien
aatgtaggcacaggtagtaagtggaggaatcaa

SEQ ID NO: 153027 - DNA, 33 bp, Homo sapien
tctccaccagcttctacgactttggatgcttct

SEQ ID NO: 153028 - DNA, 33 bp, Homo sapien
tctccaccagcttctatgactttggatgcttct

SEQ ID NO: 153029 - DNA, 33 bp, Homo sapien
ttagggctgatggagcagagaattaatcaggga

SEQ ID NO: 153030 - DNA, 33 bp, Homo sapien
ttagggctgatggagcggagaattaatcaggga

SEQ ID NO: 153031 - DNA, 33 bp, Homo sapien
caaatggtaaagcaaacttgagtgagcaggtga

SEQ ID NO: 153032 - DNA, 33 bp, Homo sapien
caaatggtaaagcaaatttgagtgagcaggtga

SEQ ID NO: 153033 - DNA, 33 bp, Homo sapien
gaaccaacaaccagaaaacacaaatattctttg

SEQ ID NO: 153034 - DNA, 33 bp, Homo sapien
gaaccaacaaccagaagacacaaatattctttg

SEQ ID NO: 153035 - DNA, 33 bp, Homo sapien
ctgacttctgctcctacgaagtaaagaaagatg

SEQ ID NO: 153036 - DNA, 33 bp, Homo sapien
ctgacttctgctcctatgaagtaaagaaagatg

SEQ ID NO: 153037 - DNA, 33 bp, Homo sapien
agtcaaagctggcctacgctccatgtgtgatct

SEQ ID NO: 153038 - DNA, 33 bp, Homo sapien
agtcaaagctggcctatgctccatgtgtgatct

SEQ ID NO: 153039 - DNA, 33 bp, Homo sapien
gtttggctggtgcctagaatgaccatatcattt

SEQ ID NO: 153040 - DNA, 33 bp, Homo sapien
gtttggctggtgcctataatgaccatatcattt

SEQ ID NO: 153041 - DNA, 33 bp, Homo sapien
tttaatgttcagactaagacacttcagagaata

SEQ ID NO: 153042 - DNA, 33 bp, Homo sapien
tttaatgttcagactacgacacttcagagaata

SEQ ID NO: 153043 - DNA, 33 bp, Homo sapien
tgggcccaggtctctcaccgtatcctcaggggt

SEQ ID NO: 153044 - DNA, 33 bp, Homo sapien
tgggcccaggtctctcgccgtatcctcaggggt

SEQ ID NO: 153045 - DNA, 33 bp, Homo sapien
tgtgtgctaaaatgcaactatatgtgtataatt

SEQ ID NO: 153046 - DNA, 33 bp, Homo sapien
tgtgtgctaaaatgcatctatatgtgtataatt

SEQ ID NO: 153047 - DNA, 33 bp, Homo sapien
aaggacaggtagcaggaactgtaggtagcacgg

SEQ ID NO: 153048 - DNA, 33 bp, Homo sapien
aaggacaggtagcaggcactgtaggtagcacgg

SEQ ID NO: 153049 - DNA, 33 bp, Homo sapien
aacaactggagtcagaccacaatgagaaagtga

SEQ ID NO: 153050 - DNA, 33 bp, Homo sapien
aacaactggagtcagatcacaatgagaaagtga

SEQ ID NO: 153051 - DNA, 33 bp, Homo sapien
atagagatgaacatgacatagaccagacctggt

SEQ ID NO: 153052 - DNA, 33 bp, Homo sapien
atagagatgaacatgatatagaccagacctggt

SEQ ID NO: 153053 - DNA, 33 bp, Homo sapien
tccttgtcagaggtaccagggataagcgccagg

SEQ ID NO: 153054 - DNA, 33 bp, Homo sapien
tccttgtcagaggtactagggataagcgccagg

SEQ ID NO: 153055 - DNA, 33 bp, Homo sapien
ggtacaaaagcacaaacgtcaagaagtccagga

SEQ ID NO: 153056 - DNA, 33 bp, Homo sapien
ggtacaaaagcacaaatgtcaagaagtccagga

SEQ ID NO: 153057 - DNA, 33 bp, Homo sapien
gttccaacttccttcacgcatttacttgaccac

SEQ ID NO: 153058 - DNA, 33 bp, Homo sapien
gttccaacttccttcatgcatttacttgaccac

SEQ ID NO: 153059 - DNA, 33 bp, Homo sapien
tctttttcctagcacaaggctagtctcatagat

SEQ ID NO: 153060 - DNA, 33 bp, Homo sapien
tctttttcctagcacagggctagtctcatagat

SEQ ID NO: 153061 - DNA, 33 bp, Homo sapien
aaggagagattgaaacaagaagagtgagatgtc

SEQ ID NO: 153062 - DNA, 33 bp, Homo sapien
aaggagagattgaaacgagaagagtgagatgtc

SEQ ID NO: 153063 - DNA, 33 bp, Homo sapien
caccttgtaccttccaaagaattgatctgttta

SEQ ID NO: 153064 - DNA, 33 bp, Homo sapien
caccttgtaccttccatagaattgatctgttta

SEQ ID NO: 153065 - DNA, 33 bp, Homo sapien
tccctagcactggagagtcacacaaaagatgtg

SEQ ID NO: 153066 - DNA, 33 bp, Homo sapien
tccctagcactggagattcacacaaaagatgtg

SEQ ID NO: 153067 - DNA, 33 bp, Homo sapien
atgaacaaaaatattcccccacagtgctttcca

SEQ ID NO: 153068 - DNA, 33 bp, Homo sapien
atgaacaaaaatattctcccacagtgctttcca

SEQ ID NO: 153069 - DNA, 33 bp, Homo sapien
cctgtgagctgcatgactagggaaagctctctg

SEQ ID NO: 153070 - DNA, 33 bp, Homo sapien
cctgtgagctgcatgagtagggaaagctctctg

SEQ ID NO: 153071 - DNA, 33 bp, Homo sapien
ctacaagagcccagaaagtggtaatatttttga

SEQ ID NO: 153072 - DNA, 33 bp, Homo sapien
ctacaagagcccagaaggtggtaatatttttga

SEQ ID NO: 153073 - DNA, 33 bp, Homo sapien
atctctgcccccatccactgattctcttccctt

SEQ ID NO: 153074 - DNA, 33 bp, Homo sapien
atctctgcccccatccgctgattctcttccctt

SEQ ID NO: 153075 - DNA, 33 bp, Homo sapien
agaatgcttgagaaacaacagagaaatctctta

SEQ ID NO: 153076 - DNA, 33 bp, Homo sapien
agaatgcttgagaaacgacagagaaatctctta

SEQ ID NO: 153077 - DNA, 33 bp, Homo sapien
aaccaaccattgaccacgaagcctaatattaaa

SEQ ID NO: 153078 - DNA, 33 bp, Homo sapien
aaccaaccattgaccatgaagcctaatattaaa

SEQ ID NO: 153079 - DNA, 33 bp, Homo sapien
ctgaggaaactggactaatgagctgtgtgaact

SEQ ID NO: 153080 - DNA, 33 bp, Homo sapien
ctgaggaaactggacttatgagctgtgtgaact

SEQ ID NO: 153081 - DNA, 33 bp, Homo sapien
caagtcacttagtatacgaggggaatgatggct

SEQ ID NO: 153082 - DNA, 33 bp, Homo sapien
caagtcacttagtatatgaggggaatgatggct

SEQ ID NO: 153083 - DNA, 33 bp, Homo sapien
ctaggtctttttcatacgggctcgtcttctgat

SEQ ID NO: 153084 - DNA, 33 bp, Homo sapien
ctaggtctttttcataggggctcgtcttctgat

SEQ ID NO: 153085 - DNA, 33 bp, Homo sapien
aaggaaactaggttacaagaatcccagcaccag

SEQ ID NO: 153086 - DNA, 33 bp, Homo sapien
aaggaaactaggttacgagaatcccagcaccag

SEQ ID NO: 153087 - DNA, 33 bp, Homo sapien
cccagtagagcagaaaaagacctgagcccctct

SEQ ID NO: 153088 - DNA, 33 bp, Homo sapien
cccagtagagcagaaagagacctgagcccctct

SEQ ID NO: 153089 - DNA, 33 bp, Homo sapien
gaagcagtcctgaacaaaagtgtttttatcttt

SEQ ID NO: 153090 - DNA, 33 bp, Homo sapien
gaagcagtcctgaacagaagtgtttttatcttt

SEQ ID NO: 153091 - DNA, 33 bp, Homo sapien
cctaaactggctccagactcaagttaagctcca

SEQ ID NO: 153092 - DNA, 33 bp, Homo sapien
cctaaactggctccaggctcaagttaagctcca

SEQ ID NO: 153093 - DNA, 33 bp, Homo sapien
atctctaatttgcttaccattagaaaaggcagg

SEQ ID NO: 153094 - DNA, 33 bp, Homo sapien
atctctaatttgcttatcattagaaaaggcagg

SEQ ID NO: 153095 - DNA, 33 bp, Homo sapien
ccataaaaaggaggcaatcagcagaacagagag

SEQ ID NO: 153096 - DNA, 33 bp, Homo sapien
ccataaaaaggaggcagtcagcagaacagagag

SEQ ID NO: 153097 - DNA, 33 bp, Homo sapien
cctaacagtttttcagcatcaaacaatgtgctc

SEQ ID NO: 153098 - DNA, 33 bp, Homo sapien
cctaacagtttttcaggatcaaacaatgtgctc

SEQ ID NO: 153099 - DNA, 33 bp, Homo sapien
ggatcatagtggaatgcatagtgatgtcaagaa

SEQ ID NO: 153100 - DNA, 33 bp, Homo sapien
ggatcatagtggaatggatagtgatgtcaagaa

SEQ ID NO: 153101 - DNA, 33 bp, Homo sapien
gataaatcagtcagttaaaatattggtgagccc

SEQ ID NO: 153102 - DNA, 33 bp, Homo sapien
gataaatcagtcagttcaaatattggtgagccc

SEQ ID NO: 153103 - DNA, 33 bp, Homo sapien
gataaaagaaaggaaaccttgcctatatgctgt

SEQ ID NO: 153104 - DNA, 33 bp, Homo sapien
gataaaagaaaggaaatcttgcctatatgctgt

SEQ ID NO: 153105 - DNA, 33 bp, Homo sapien
gcacaaaaggcttgacactgggaacagagagat

SEQ ID NO: 153106 - DNA, 33 bp, Homo sapien
gcacaaaaggcttgacgctgggaacagagagat

SEQ ID NO: 153107 - DNA, 33 bp, Homo sapien
tataccttgattgtaacagcacgttgtgtttgt

SEQ ID NO: 153108 - DNA, 33 bp, Homo sapien
tataccttgattgtaatagcacgttgtgtttgt

SEQ ID NO: 153109 - DNA, 33 bp, Homo sapien
gctatagttttgttccaacaacagaaacattaa

SEQ ID NO: 153110 - DNA, 33 bp, Homo sapien
gctatagttttgttccgacaacagaaacattaa

SEQ ID NO: 153111 - DNA, 33 bp, Homo sapien
gtctgtcttaagtggacataacaggatcgctgc

SEQ ID NO: 153112 - DNA, 33 bp, Homo sapien
gtctgtcttaagtggatataacaggatcgctgc

SEQ ID NO: 153113 - DNA, 33 bp, Homo sapien
tcagactcattaaggcaattctgttctgatgtt

SEQ ID NO: 153114 - DNA, 33 bp, Homo sapien
tcagactcattaaggcgattctgttctgatgtt

SEQ ID NO: 153115 - DNA, 33 bp, Homo sapien
actttggacgaaataaggtgaaatcaatacggt

SEQ ID NO: 153116 - DNA, 33 bp, Homo sapien
actttggacgaaataatgtgaaatcaatacggt

SEQ ID NO: 153117 - DNA, 33 bp, Homo sapien
tagctacaccaattcaccctcaaagtttcgagg

SEQ ID NO: 153118 - DNA, 33 bp, Homo sapien
tagctacaccaattcatcctcaaagtttcgagg

SEQ ID NO: 153119 - DNA, 33 bp, Homo sapien
ataccaatggggaccacgaaggtacagctgaaa

SEQ ID NO: 153120 - DNA, 33 bp, Homo sapien
ataccaatggggaccatgaaggtacagctgaaa

SEQ ID NO: 153121 - DNA, 33 bp, Homo sapien
caaacagaaggcagagaatagactggacaggtg

SEQ ID NO: 153122 - DNA, 33 bp, Homo sapien
caaacagaaggcagagcatagactggacaggtg

SEQ ID NO: 153123 - DNA, 33 bp, Homo sapien
aaagctaccctgttaccatataactgatctcca

SEQ ID NO: 153124 - DNA, 33 bp, Homo sapien
aaagctaccctgttacgatataactgatctcca

SEQ ID NO: 153125 - DNA, 33 bp, Homo sapien
aattacaaagagagaaaaggtgattttgcagga

SEQ ID NO: 153126 - DNA, 33 bp, Homo sapien
aattacaaagagagaagaggtgattttgcagga

SEQ ID NO: 153127 - DNA, 33 bp, Homo sapien
aggtttacacaaagagcatggattctggagtct

SEQ ID NO: 153128 - DNA, 33 bp, Homo sapien
aggtttacacaaagagtatggattctggagtct

SEQ ID NO: 153129 - DNA, 33 bp, Homo sapien
aatccttaattggtcactctgtttcccctgccc

SEQ ID NO: 153130 - DNA, 33 bp, Homo sapien
aatccttaattggtcattctgtttcccctgccc

SEQ ID NO: 153131 - DNA, 33 bp, Homo sapien
tttcgtaagaaaaatacctggagcttgtgagca

SEQ ID NO: 153132 - DNA, 33 bp, Homo sapien
tttcgtaagaaaaatatctggagcttgtgagca

SEQ ID NO: 153133 - DNA, 33 bp, Homo sapien
cttagaaaggcctacaaagaagtttggcatcca

SEQ ID NO: 153134 - DNA, 33 bp, Homo sapien
cttagaaaggcctacagagaagtttggcatcca

SEQ ID NO: 153135 - DNA, 33 bp, Homo sapien
ctcaagagactcacttaaaagcttttctgggcc

SEQ ID NO: 153136 - DNA, 33 bp, Homo sapien
ctcaagagactcacttgaaagcttttctgggcc

SEQ ID NO: 153137 - DNA, 33 bp, Homo sapien
agatgtgggtggaaacactggtcacaggggcat

SEQ ID NO: 153138 - DNA, 33 bp, Homo sapien
agatgtgggtggaaaccctggtcacaggggcat

SEQ ID NO: 153139 - DNA, 33 bp, Homo sapien
atttgaaatgcaaattcaactgggcaacctgat

SEQ ID NO: 153140 - DNA, 33 bp, Homo sapien
atttgaaatgcaaatttaactgggcaacctgat

SEQ ID NO: 153141 - DNA, 33 bp, Homo sapien
gacgggcagcctttcaaccagtgcatagcataa

SEQ ID NO: 153142 - DNA, 33 bp, Homo sapien
gacgggcagcctttcagccagtgcatagcataa

SEQ ID NO: 153143 - DNA, 33 bp, Homo sapien
gcaattttactaacataatgatgaataatacca

SEQ ID NO: 153144 - DNA, 33 bp, Homo sapien
gcaattttactaacatcatgatgaataatacca

SEQ ID NO: 153145 - DNA, 33 bp, Homo sapien
tccccttttcaccttacgtgccaagaaattcaa

SEQ ID NO: 153146 - DNA, 33 bp, Homo sapien
tccccttttcaccttatgtgccaagaaattcaa

SEQ ID NO: 153147 - DNA, 33 bp, Homo sapien
aaaaaagtgccaaaccgcacaaaatataaaatc

SEQ ID NO: 153148 - DNA, 33 bp, Homo sapien
aaaaaagtgccaaacctcacaaaatataaaatc

SEQ ID NO: 153149 - DNA, 33 bp, Homo sapien
ggacacgagcacaaacagtgaggagtgggcccc

SEQ ID NO: 153150 - DNA, 33 bp, Homo sapien
ggacacgagcacaaacggtgaggagtgggcccc

SEQ ID NO: 153151 - DNA, 33 bp, Homo sapien
agagctgcggataaaaaaagcaaaagctgagcc

SEQ ID NO: 153152 - DNA, 33 bp, Homo sapien
agagctgcggataaaacaagcaaaagctgagcc

SEQ ID NO: 153153 - DNA, 33 bp, Homo sapien
tttctctctgaagcacagtgctaatcataccac

SEQ ID NO: 153154 - DNA, 33 bp, Homo sapien
tttctctctgaagcacggtgctaatcataccac

SEQ ID NO: 153155 - DNA, 33 bp, Homo sapien
actatacccttgcaataaaagatccacaaggtc

SEQ ID NO: 153156 - DNA, 33 bp, Homo sapien
actatacccttgcaatgaaagatccacaaggtc

SEQ ID NO: 153157 - DNA, 33 bp, Homo sapien
cctcattgttaagcaactcatcactgtatatca

SEQ ID NO: 153158 - DNA, 33 bp, Homo sapien
cctcattgttaagcaagtcatcactgtatatca

SEQ ID NO: 153159 - DNA, 33 bp, Homo sapien
ttttgaaattaatctaacctgctaagttatctg

SEQ ID NO: 153160 - DNA, 33 bp, Homo sapien
ttttgaaattaatctaccctgctaagttatctg

SEQ ID NO: 153161 - DNA, 33 bp, Homo sapien
ttatccatcgaggcaacatccctgagaatccct

SEQ ID NO: 153162 - DNA, 33 bp, Homo sapien
ttatccatcgaggcaatatccctgagaatccct

SEQ ID NO: 153163 - DNA, 33 bp, Homo sapien
tgtaaatttattgaaaactctggaacatttcac

SEQ ID NO: 153164 - DNA, 33 bp, Homo sapien
tgtaaatttattgaaacctctggaacatttcac

SEQ ID NO: 153165 - DNA, 33 bp, Homo sapien
ttcaggtagtgtaccacagcatatacaaaatta

SEQ ID NO: 153166 - DNA, 33 bp, Homo sapien
ttcaggtagtgtaccagagcatatacaaaatta

SEQ ID NO: 153167 - DNA, 33 bp, Homo sapien
tgcagcacaggtgcctaacaaaactttggattc

SEQ ID NO: 153168 - DNA, 33 bp, Homo sapien
tgcagcacaggtgcctgacaaaactttggattc

SEQ ID NO: 153169 - DNA, 33 bp, Homo sapien
atacattgtaccaacacacttggcacagtgccc

SEQ ID NO: 153170 - DNA, 33 bp, Homo sapien
atacattgtaccaacatacttggcacagtgccc

SEQ ID NO: 153171 - DNA, 33 bp, Homo sapien
ctggtccaataaagtgaaagatatccttaccag

SEQ ID NO: 153172 - DNA, 33 bp, Homo sapien
ctggtccaataaagtggaagatatccttaccag

SEQ ID NO: 153173 - DNA, 33 bp, Homo sapien
tctctccatgtctgcacaggttttctccaggca

SEQ ID NO: 153174 - DNA, 33 bp, Homo sapien
tctctccatgtctgcataggttttctccaggca

SEQ ID NO: 153175 - DNA, 33 bp, Homo sapien
ttatttcagacaagaacttcaccctacaaagta

SEQ ID NO: 153176 - DNA, 33 bp, Homo sapien
ttatttcagacaagaatttcaccctacaaagta

SEQ ID NO: 153177 - DNA, 33 bp, Homo sapien
gaagaaaaggtatatacggaatgccacttactc

SEQ ID NO: 153178 - DNA, 33 bp, Homo sapien
gaagaaaaggtatatatggaatgccacttactc

SEQ ID NO: 153179 - DNA, 33 bp, Homo sapien
aacttgaatgtttgatcagttctagtcagtctc

SEQ ID NO: 153180 - DNA, 33 bp, Homo sapien
aacttgaatgtttgattagttctagtcagtctc

SEQ ID NO: 153181 - DNA, 33 bp, Homo sapien
catcttgtttggaggtaaatgatcaatgtttca

SEQ ID NO: 153182 - DNA, 33 bp, Homo sapien
catcttgtttggaggttaatgatcaatgtttca

SEQ ID NO: 153183 - DNA, 33 bp, Homo sapien
gaaaccctgtctctacagtaaatacgaaaattc

SEQ ID NO: 153184 - DNA, 33 bp, Homo sapien
gaaaccctgtctctactgtaaatacgaaaattc

SEQ ID NO: 153185 - DNA, 33 bp, Homo sapien
cctgtctaatttgtcaagatactctgcaaagtc

SEQ ID NO: 153186 - DNA, 33 bp, Homo sapien
cctgtctaatttgtcaggatactctgcaaagtc

SEQ ID NO: 153187 - DNA, 33 bp, Homo sapien
acagtctaaggcaataaagacaaaacccaattt

SEQ ID NO: 153188 - DNA, 33 bp, Homo sapien
acagtctaaggcaatacagacaaaacccaattt

SEQ ID NO: 153189 - DNA, 33 bp, Homo sapien
tataagtatgttattacgtcaataagtgagagg

SEQ ID NO: 153190 - DNA, 33 bp, Homo sapien
tataagtatgttattatgtcaataagtgagagg

SEQ ID NO: 153191 - DNA, 33 bp, Homo sapien
atacagacctggtttacatcaaatagctccaca

SEQ ID NO: 153192 - DNA, 33 bp, Homo sapien
atacagacctggtttagatcaaatagctccaca

SEQ ID NO: 153193 - DNA, 33 bp, Homo sapien
tatcaggctcaaatgaagtgatgtatgtaaaaa

SEQ ID NO: 153194 - DNA, 33 bp, Homo sapien
tatcaggctcaaatgaggtgatgtatgtaaaaa

SEQ ID NO: 153195 - DNA, 33 bp, Homo sapien
tcaagttgacatctcaaattaagtcaataaatc

SEQ ID NO: 153196 - DNA, 33 bp, Homo sapien
tcaagttgacatctcagattaagtcaataaatc

SEQ ID NO: 153197 - DNA, 33 bp, Homo sapien
ataaacagtgctcagaagtttggtttcctgaaa

SEQ ID NO: 153198 - DNA, 33 bp, Homo sapien
ataaacagtgctcagaggtttggtttcctgaaa

SEQ ID NO: 153199 - DNA, 33 bp, Homo sapien
ggagatgtaagcaaataagagttcaattgtgtt

SEQ ID NO: 153200 - DNA, 33 bp, Homo sapien
ggagatgtaagcaaatcagagttcaattgtgtt

SEQ ID NO: 153201 - DNA, 33 bp, Homo sapien
ctatgcttccaccaaaaatatgagattctaaag

SEQ ID NO: 153202 - DNA, 33 bp, Homo sapien
ctatgcttccaccaaagatatgagattctaaag

SEQ ID NO: 153203 - DNA, 33 bp, Homo sapien
gggttaatcattgcaaagatctgattcagacag

SEQ ID NO: 153204 - DNA, 33 bp, Homo sapien
gggttaatcattgcaaggatctgattcagacag

SEQ ID NO: 153205 - DNA, 33 bp, Homo sapien
aagcacatactttgaaccagatgtcccactaga

SEQ ID NO: 153206 - DNA, 33 bp, Homo sapien
aagcacatactttgaatcagatgtcccactaga

SEQ ID NO: 153207 - DNA, 33 bp, Homo sapien
aacagagatttgcaaactttaccctagggcttg

SEQ ID NO: 153208 - DNA, 33 bp, Homo sapien
aacagagatttgcaaagtttaccctagggcttg

SEQ ID NO: 153209 - DNA, 33 bp, Homo sapien
acccctggaaaacctacggagtgattttatgca

SEQ ID NO: 153210 - DNA, 33 bp, Homo sapien
acccctggaaaacctatggagtgattttatgca

SEQ ID NO: 153211 - DNA, 33 bp, Homo sapien
tggattctgaagataagggactcatcaaacata

SEQ ID NO: 153212 - DNA, 33 bp, Homo sapien
tggattctgaagataatggactcatcaaacata

SEQ ID NO: 153213 - DNA, 33 bp, Homo sapien
gataaccctaggaggacgtatggaagcaagagt

SEQ ID NO: 153214 - DNA, 33 bp, Homo sapien
gataaccctaggaggatgtatggaagcaagagt

SEQ ID NO: 153215 - DNA, 33 bp, Homo sapien
tgggttttatcaaagaggtaagaaaggcagaga

SEQ ID NO: 153216 - DNA, 33 bp, Homo sapien
tgggttttatcaaagatgtaagaaaggcagaga

SEQ ID NO: 153217 - DNA, 33 bp, Homo sapien
tttctacttgcttagaacctaaaggtctgtcag

SEQ ID NO: 153218 - DNA, 33 bp, Homo sapien
tttctacttgcttagagcctaaaggtctgtcag

SEQ ID NO: 153219 - DNA, 33 bp, Homo sapien
aacttaaaggcagaaaacctaagatgagccaat

SEQ ID NO: 153220 - DNA, 33 bp, Homo sapien
aacttaaaggcagaaaccctaagatgagccaat

SEQ ID NO: 153221 - DNA, 33 bp, Homo sapien
actgttgcccaagtcacgcaagcaggcaaattg

SEQ ID NO: 153222 - DNA, 33 bp, Homo sapien
actgttgcccaagtcatgcaagcaggcaaattg

SEQ ID NO: 153223 - DNA, 33 bp, Homo sapien
tgactctgaaggaccacgtcttagtaaacttga

SEQ ID NO: 153224 - DNA, 33 bp, Homo sapien
tgactctgaaggaccatgtcttagtaaacttga

SEQ ID NO: 153225 - DNA, 33 bp, Homo sapien
cttgcatttcaatgacagggagattgagaaatg

SEQ ID NO: 153226 - DNA, 33 bp, Homo sapien
cttgcatttcaatgacggggagattgagaaatg

SEQ ID NO: 153227 - DNA, 33 bp, Homo sapien
tgattccaaagaaaaaaaatcaagcactgaagc

SEQ ID NO: 153228 - DNA, 33 bp, Homo sapien
tgattccaaagaaaaagaatcaagcactgaagc

SEQ ID NO: 153229 - DNA, 33 bp, Homo sapien
gcgttttaggtagaaacgatttatgtcttcaga

SEQ ID NO: 153230 - DNA, 33 bp, Homo sapien
gcgttttaggtagaaatgatttatgtcttcaga

SEQ ID NO: 153231 - DNA, 33 bp, Homo sapien
ttgacagggaaaggaacggaagctgagagaggt

SEQ ID NO: 153232 - DNA, 33 bp, Homo sapien
ttgacagggaaaggaatggaagctgagagaggt

SEQ ID NO: 153233 - DNA, 33 bp, Homo sapien
cgtgacaagaagggaggcccattgtgtctcaat

SEQ ID NO: 153234 - DNA, 33 bp, Homo sapien
cgtgacaagaagggagtcccattgtgtctcaat

SEQ ID NO: 153235 - DNA, 33 bp, Homo sapien
aagcacacttcctttacagtgccagaaggaaag

SEQ ID NO: 153236 - DNA, 33 bp, Homo sapien
aagcacacttcctttatagtgccagaaggaaag

SEQ ID NO: 153237 - DNA, 33 bp, Homo sapien
aaagttacaggatccacaatccaagtgatacca

SEQ ID NO: 153238 - DNA, 33 bp, Homo sapien
aaagttacaggatccagaatccaagtgatacca

SEQ ID NO: 153239 - DNA, 33 bp, Homo sapien
atcaggaagcatgaagaccatttgtgaccttgg

SEQ ID NO: 153240 - DNA, 33 bp, Homo sapien
atcaggaagcatgaaggccatttgtgaccttgg

SEQ ID NO: 153241 - DNA, 33 bp, Homo sapien
attttccagctatagcccttcctgcacatttat

SEQ ID NO: 153242 - DNA, 33 bp, Homo sapien
attttccagctatagctcttcctgcacatttat

SEQ ID NO: 153243 - DNA, 33 bp, Homo sapien
ctcttgcttacagtcaactgccaaggaccagct

SEQ ID NO: 153244 - DNA, 33 bp, Homo sapien
ctcttgcttacagtcagctgccaaggaccagct

SEQ ID NO: 153245 - DNA, 33 bp, Homo sapien
tgtagaaaacacaggaagaaattcaaagagcga

SEQ ID NO: 153246 - DNA, 33 bp, Homo sapien
tgtagaaaacacaggaggaaattcaaagagcga

SEQ ID NO: 153247 - DNA, 33 bp, Homo sapien
gtgctaggcgtgagaaatactatgaacataaat

SEQ ID NO: 153248 - DNA, 33 bp, Homo sapien
gtgctaggcgtgagaagtactatgaacataaat

SEQ ID NO: 153249 - DNA, 33 bp, Homo sapien
tttctcttgccaaaacaacagacactgcccagt

SEQ ID NO: 153250 - DNA, 33 bp, Homo sapien
tttctcttgccaaaacgacagacactgcccagt

SEQ ID NO: 153251 - DNA, 33 bp, Homo sapien
gatgaagtcatcaaagaaggctttctatatttc

SEQ ID NO: 153252 - DNA, 33 bp, Homo sapien
gatgaagtcatcaaagtaggctttctatatttc

SEQ ID NO: 153253 - DNA, 33 bp, Homo sapien
agcctggggacttccaatagccagtttgtgctg

SEQ ID NO: 153254 - DNA, 33 bp, Homo sapien
agcctggggacttccagtagccagtttgtgctg

SEQ ID NO: 153255 - DNA, 33 bp, Homo sapien
aactttaagggtagaaatggctggatttggtca

SEQ ID NO: 153256 - DNA, 33 bp, Homo sapien
aactttaagggtagaattggctggatttggtca

SEQ ID NO: 153257 - DNA, 33 bp, Homo sapien
tgtgccctgtgccaagacttacttcaccttctg

SEQ ID NO: 153258 - DNA, 33 bp, Homo sapien
tgtgccctgtgccaagccttacttcaccttctg

SEQ ID NO: 153259 - DNA, 33 bp, Homo sapien
gttatttagtatttcaccactctgagtcctcat

SEQ ID NO: 153260 - DNA, 33 bp, Homo sapien
gttatttagtatttcatcactctgagtcctcat

SEQ ID NO: 153261 - DNA, 33 bp, Homo sapien
ggagtggaaaagccaccggttctatggatagac

SEQ ID NO: 153262 - DNA, 33 bp, Homo sapien
ggagtggaaaagccacgggttctatggatagac

SEQ ID NO: 153263 - DNA, 33 bp, Homo sapien
caaaggagagattaggaattgaagagagtataa

SEQ ID NO: 153264 - DNA, 33 bp, Homo sapien
caaaggagagattaggtattgaagagagtataa

SEQ ID NO: 153265 - DNA, 33 bp, Homo sapien
tcagtgtatggctttgaatagacaggaaatcat

SEQ ID NO: 153266 - DNA, 33 bp, Homo sapien
tcagtgtatggctttgtatagacaggaaatcat

SEQ ID NO: 153267 - DNA, 33 bp, Homo sapien
agccaggagaagcaagaccacattacattttgg

SEQ ID NO: 153268 - DNA, 33 bp, Homo sapien
agccaggagaagcaagtccacattacattttgg

SEQ ID NO: 153269 - DNA, 33 bp, Homo sapien
tggactcactcatgtaactattttgagctttga

SEQ ID NO: 153270 - DNA, 33 bp, Homo sapien
tggactcactcatgtacctattttgagctttga

SEQ ID NO: 153271 - DNA, 33 bp, Homo sapien
cctagaatcctttcaccaactgctctgaaatct

SEQ ID NO: 153272 - DNA, 33 bp, Homo sapien
cctagaatcctttcactaactgctctgaaatct

SEQ ID NO: 153273 - DNA, 33 bp, Homo sapien
gtgtcacactgggcacaactctgaccaaaaatg

SEQ ID NO: 153274 - DNA, 33 bp, Homo sapien
gtgtcacactgggcaccactctgaccaaaaatg

SEQ ID NO: 153275 - DNA, 33 bp, Homo sapien
ggatcaccatgagctccgaatgtgtatctgcag

SEQ ID NO: 153276 - DNA, 33 bp, Homo sapien
ggatcaccatgagctctgaatgtgtatctgcag

SEQ ID NO: 153277 - DNA, 33 bp, Homo sapien
gtttaaatccacaaaagtgcccaggaagccatg

SEQ ID NO: 153278 - DNA, 33 bp, Homo sapien
gtttaaatccacaaaattgcccaggaagccatg

SEQ ID NO: 153279 - DNA, 33 bp, Homo sapien
gactgacgctacttcagacttctgatctgaaaa

SEQ ID NO: 153280 - DNA, 33 bp, Homo sapien
gactgacgctacttcatacttctgatctgaaaa

SEQ ID NO: 153281 - DNA, 33 bp, Homo sapien
ctgcttggatgcataactggaacttgaggtcaa

SEQ ID NO: 153282 - DNA, 33 bp, Homo sapien
ctgcttggatgcataattggaacttgaggtcaa

SEQ ID NO: 153283 - DNA, 33 bp, Homo sapien
gttttcctcaggatgaaggcgagtgctgtgctt

SEQ ID NO: 153284 - DNA, 33 bp, Homo sapien
gttttcctcaggatgagggcgagtgctgtgctt

SEQ ID NO: 153285 - DNA, 33 bp, Homo sapien
ctcttggtcactaaaaatgcagatgctgctcag

SEQ ID NO: 153286 - DNA, 33 bp, Homo sapien
ctcttggtcactaaaagtgcagatgctgctcag

SEQ ID NO: 153287 - DNA, 33 bp, Homo sapien
tgtgtcatagggtatgcaggatacacagatgcc

SEQ ID NO: 153288 - DNA, 33 bp, Homo sapien
tgtgtcatagggtatggaggatacacagatgcc

SEQ ID NO: 153289 - DNA, 33 bp, Homo sapien
tcaaaggccacaaacccatcaactgcaaaagaa

SEQ ID NO: 153290 - DNA, 33 bp, Homo sapien
tcaaaggccacaaacctatcaactgcaaaagaa

SEQ ID NO: 153291 - DNA, 33 bp, Homo sapien
tggtcctggtcattctaaaaaacatcaatgtta

SEQ ID NO: 153292 - DNA, 33 bp, Homo sapien
tggtcctggtcattctcaaaaacatcaatgtta

SEQ ID NO: 153293 - DNA, 33 bp, Homo sapien
gaagtttgcttctaaaactctggtaggggctcc

SEQ ID NO: 153294 - DNA, 33 bp, Homo sapien
gaagtttgcttctaaatctctggtaggggctcc

SEQ ID NO: 153295 - DNA, 33 bp, Homo sapien
ggttcagcctctactcaaatccccagtgcactt

SEQ ID NO: 153296 - DNA, 33 bp, Homo sapien
ggttcagcctctactcgaatccccagtgcactt

SEQ ID NO: 153297 - DNA, 33 bp, Homo sapien
aaccaacttcaaaaagaaagtgacccttgccaa

SEQ ID NO: 153298 - DNA, 33 bp, Homo sapien
aaccaacttcaaaaaggaagtgacccttgccaa

SEQ ID NO: 153299 - DNA, 33 bp, Homo sapien
ccttacatttttgtgcacactaggcaattcctc

SEQ ID NO: 153300 - DNA, 33 bp, Homo sapien
ccttacatttttgtgcgcactaggcaattcctc

SEQ ID NO: 153301 - DNA, 33 bp, Homo sapien
gtgccagatctttaaggattttccttccctctc

SEQ ID NO: 153302 - DNA, 33 bp, Homo sapien
gtgccagatctttaagtattttccttccctctc

SEQ ID NO: 153303 - DNA, 33 bp, Homo sapien
aggaattgttggatggaaaacggagagtctcca

SEQ ID NO: 153304 - DNA, 33 bp, Homo sapien
aggaattgttggatgggaaacggagagtctcca

SEQ ID NO: 153305 - DNA, 33 bp, Homo sapien
ttcttgggtcaaatgtgaaaaagatgtgattcc

SEQ ID NO: 153306 - DNA, 33 bp, Homo sapien
ttcttgggtcaaatgttaaaaagatgtgattcc

SEQ ID NO: 153307 - DNA, 33 bp, Homo sapien
gctgtgcccctgcagaatcacaatggagccagt

SEQ ID NO: 153308 - DNA, 33 bp, Homo sapien
gctgtgcccctgcagattcacaatggagccagt

SEQ ID NO: 153309 - DNA, 33 bp, Homo sapien
attctaggttccacaactcaagtgtcagaggaa

SEQ ID NO: 153310 - DNA, 33 bp, Homo sapien
attctaggttccacaagtcaagtgtcagaggaa

SEQ ID NO: 153311 - DNA, 33 bp, Homo sapien
ggagtttgttatatgaccttgttgcattagaat

SEQ ID NO: 153312 - DNA, 33 bp, Homo sapien
ggagtttgttatatgatcttgttgcattagaat

SEQ ID NO: 153313 - DNA, 33 bp, Homo sapien
ttaccactgttgggaaccgggaaatgtggagaa

SEQ ID NO: 153314 - DNA, 33 bp, Homo sapien
ttaccactgttgggaatcgggaaatgtggagaa

SEQ ID NO: 153315 - DNA, 33 bp, Homo sapien
ctgacctgctgatgaccggcttggattctccac

SEQ ID NO: 153316 - DNA, 33 bp, Homo sapien
ctgacctgctgatgactggcttggattctccac

SEQ ID NO: 153317 - DNA, 33 bp, Homo sapien
atttctcaaaatttctcaactttctatttctct

SEQ ID NO: 153318 - DNA, 33 bp, Homo sapien
atttctcaaaatttcttaactttctatttctct

SEQ ID NO: 153319 - DNA, 33 bp, Homo sapien
tttccaatatgaggaccagcggtgaatatggcc

SEQ ID NO: 153320 - DNA, 33 bp, Homo sapien
tttccaatatgaggactagcggtgaatatggcc

SEQ ID NO: 153321 - DNA, 33 bp, Homo sapien
gaaaataaattccataaatattgagcaagtaca

SEQ ID NO: 153322 - DNA, 33 bp, Homo sapien
gaaaataaattccatacatattgagcaagtaca

SEQ ID NO: 153323 - DNA, 33 bp, Homo sapien
tgcctgctgttatgagaattgcctgctgttatt

SEQ ID NO: 153324 - DNA, 33 bp, Homo sapien
tgcctgctgttatgagcattgcctgctgttatt

SEQ ID NO: 153325 - DNA, 33 bp, Homo sapien
agattgcacgagctaacataaggcagttagaac

SEQ ID NO: 153326 - DNA, 33 bp, Homo sapien
agattgcacgagctaatataaggcagttagaac

SEQ ID NO: 153327 - DNA, 33 bp, Homo sapien
tggaggccctcacaacagaaaagtgtgcataag

SEQ ID NO: 153328 - DNA, 33 bp, Homo sapien
tggaggccctcacaaccgaaaagtgtgcataag

SEQ ID NO: 153329 - DNA, 33 bp, Homo sapien
gaacctgtcaaggattaaaaaagtgctaccaga

SEQ ID NO: 153330 - DNA, 33 bp, Homo sapien
gaacctgtcaaggatttaaaaagtgctaccaga

SEQ ID NO: 153331 - DNA, 33 bp, Homo sapien
attggagccaggctaggctaagttcacatttct

SEQ ID NO: 153332 - DNA, 33 bp, Homo sapien
attggagccaggctagtctaagttcacatttct

SEQ ID NO: 153333 - DNA, 33 bp, Homo sapien
tcgaaatgcttaccaccacctgctggccccatg

SEQ ID NO: 153334 - DNA, 33 bp, Homo sapien
tcgaaatgcttaccacgacctgctggccccatg

SEQ ID NO: 153335 - DNA, 33 bp, Homo sapien
tgcaggataccactgccagtacccatttatctt

SEQ ID NO: 153336 - DNA, 33 bp, Homo sapien
tgcaggataccactgcgagtacccatttatctt

SEQ ID NO: 153337 - DNA, 33 bp, Homo sapien
tgcaatcttaccgatcaacaatcaccacacttc

SEQ ID NO: 153338 - DNA, 33 bp, Homo sapien
tgcaatcttaccgatcgacaatcaccacacttc

SEQ ID NO: 153339 - DNA, 33 bp, Homo sapien
tgaagacacacactgactagaagcgttgttctg

SEQ ID NO: 153340 - DNA, 33 bp, Homo sapien
tgaagacacacactgagtagaagcgttgttctg

SEQ ID NO: 153341 - DNA, 33 bp, Homo sapien
ttgagctgcaacaacagtaccaacatgctgatt

SEQ ID NO: 153342 - DNA, 33 bp, Homo sapien
ttgagctgcaacaacattaccaacatgctgatt

SEQ ID NO: 153343 - DNA, 33 bp, Homo sapien
actctgcctcccatcaagacacaaaagctccta

SEQ ID NO: 153344 - DNA, 33 bp, Homo sapien
actctgcctcccatcaggacacaaaagctccta

SEQ ID NO: 153345 - DNA, 33 bp, Homo sapien
aggacaaactagccataaagtactcccccgtag

SEQ ID NO: 153346 - DNA, 33 bp, Homo sapien
aggacaaactagccatgaagtactcccccgtag

SEQ ID NO: 153347 - DNA, 33 bp, Homo sapien
acccatcttacagtgccgattttgttttttctg

SEQ ID NO: 153348 - DNA, 33 bp, Homo sapien
acccatcttacagtgctgattttgttttttctg

SEQ ID NO: 153349 - DNA, 33 bp, Homo sapien
ccaagagaggagagagaaaaggctttcctggca

SEQ ID NO: 153350 - DNA, 33 bp, Homo sapien
ccaagagaggagagagtaaaggctttcctggca

SEQ ID NO: 153351 - DNA, 33 bp, Homo sapien
aatggagcaagataaacaggtttaagtacatta

SEQ ID NO: 153352 - DNA, 33 bp, Homo sapien
aatggagcaagataaagaggtttaagtacatta

SEQ ID NO: 153353 - DNA, 33 bp, Homo sapien
taggaaccctctaatgcagtcatactttgctta

SEQ ID NO: 153354 - DNA, 33 bp, Homo sapien
taggaaccctctaatgtagtcatactttgctta

SEQ ID NO: 153355 - DNA, 33 bp, Homo sapien
acaagacagccaagacaaagttttcaaagtaca

SEQ ID NO: 153356 - DNA, 33 bp, Homo sapien
acaagacagccaagacgaagttttcaaagtaca

SEQ ID NO: 153357 - DNA, 33 bp, Homo sapien
gataaaagtgactctaggtgtttattagcatca

SEQ ID NO: 153358 - DNA, 33 bp, Homo sapien
gataaaagtgactctatgtgtttattagcatca

SEQ ID NO: 153359 - DNA, 33 bp, Homo sapien
ttcaatgccttgaggaacctattctgactcctt

SEQ ID NO: 153360 - DNA, 33 bp, Homo sapien
ttcaatgccttgaggatcctattctgactcctt

SEQ ID NO: 153361 - DNA, 33 bp, Homo sapien
ttacctatgtagcaaacttgcatgtcctgccca

SEQ ID NO: 153362 - DNA, 33 bp, Homo sapien
ttacctatgtagcaaatttgcatgtcctgccca

SEQ ID NO: 153363 - DNA, 33 bp, Homo sapien
ataacttgcctatgaacgtttgatgaaggatgg

SEQ ID NO: 153364 - DNA, 33 bp, Homo sapien
ataacttgcctatgaatgtttgatgaaggatgg

SEQ ID NO: 153365 - DNA, 33 bp, Homo sapien
aggtgctcatgggtgaccgcgcggaggcagaca

SEQ ID NO: 153366 - DNA, 33 bp, Homo sapien
aggtgctcatgggtgatcgcgcggaggcagaca

SEQ ID NO: 153367 - DNA, 33 bp, Homo sapien
cagtggaccttgttgcaatttccaatggacttt

SEQ ID NO: 153368 - DNA, 33 bp, Homo sapien
cagtggaccttgttgcgatttccaatggacttt

SEQ ID NO: 153369 - DNA, 33 bp, Homo sapien
aggggtacagaggtgccctgaatttcttaggac

SEQ ID NO: 153370 - DNA, 33 bp, Homo sapien
aggggtacagaggtgctctgaatttcttaggac

SEQ ID NO: 153371 - DNA, 33 bp, Homo sapien
tatctataaaatcagaatatgtggtggatcagt

SEQ ID NO: 153372 - DNA, 33 bp, Homo sapien
tatctataaaatcagagtatgtggtggatcagt

SEQ ID NO: 153373 - DNA, 33 bp, Homo sapien
cacactggcctgaagcagcaaattcatcccttg

SEQ ID NO: 153374 - DNA, 33 bp, Homo sapien
cacactggcctgaagcggcaaattcatcccttg

SEQ ID NO: 153375 - DNA, 33 bp, Homo sapien
aagtcgctacccagaaactctggctggacacac

SEQ ID NO: 153376 - DNA, 33 bp, Homo sapien
aagtcgctacccagaagctctggctggacacac

SEQ ID NO: 153377 - DNA, 33 bp, Homo sapien
gagttgtttgcaactacgggcagattttttgga

SEQ ID NO: 153378 - DNA, 33 bp, Homo sapien
gagttgtttgcaactatgggcagattttttgga

SEQ ID NO: 153379 - DNA, 33 bp, Homo sapien
cagtaacaccagaagcactcatcatgggagagg

SEQ ID NO: 153380 - DNA, 33 bp, Homo sapien
cagtaacaccagaagcgctcatcatgggagagg

SEQ ID NO: 153381 - DNA, 33 bp, Homo sapien
acataggatgcacacaacaaaaatttgtaacat

SEQ ID NO: 153382 - DNA, 33 bp, Homo sapien
acataggatgcacacagcaaaaatttgtaacat

SEQ ID NO: 153383 - DNA, 33 bp, Homo sapien
aattctacacgtaaaagtaagatctcaaaaact

SEQ ID NO: 153384 - DNA, 33 bp, Homo sapien
aattctacacgtaaaattaagatctcaaaaact

SEQ ID NO: 153385 - DNA, 33 bp, Homo sapien
actatctgaaatcacactgtctacctcactccc

SEQ ID NO: 153386 - DNA, 33 bp, Homo sapien
actatctgaaatcacattgtctacctcactccc

SEQ ID NO: 153387 - DNA, 33 bp, Homo sapien
gacattttgaaaaccacagtataatgtcacaag

SEQ ID NO: 153388 - DNA, 33 bp, Homo sapien
gacattttgaaaaccatagtataatgtcacaag

SEQ ID NO: 153389 - DNA, 33 bp, Homo sapien
aattttatatttgttggatctagccataaatat

SEQ ID NO: 153390 - DNA, 33 bp, Homo sapien
aattttatatttgttgtatctagccataaatat

SEQ ID NO: 153391 - DNA, 33 bp, Homo sapien
gagtgattctgaaaaactgaagatcaaacacat

SEQ ID NO: 153392 - DNA, 33 bp, Homo sapien
gagtgattctgaaaaagtgaagatcaaacacat

SEQ ID NO: 153393 - DNA, 33 bp, Homo sapien
tccaccacgattgtaacctcctgaagacctcac

SEQ ID NO: 153394 - DNA, 33 bp, Homo sapien
tccaccacgattgtaagctcctgaagacctcac

SEQ ID NO: 153395 - DNA, 33 bp, Homo sapien
gaaactggctttcttgaagtggatgtgttaatc

SEQ ID NO: 153396 - DNA, 33 bp, Homo sapien
gaaactggctttcttgtagtggatgtgttaatc

SEQ ID NO: 153397 - DNA, 33 bp, Homo sapien
attaattcctaccacacgtcatgtacaaaaaaa

SEQ ID NO: 153398 - DNA, 33 bp, Homo sapien
attaattcctaccacatgtcatgtacaaaaaaa

SEQ ID NO: 153399 - DNA, 33 bp, Homo sapien
tccatgaaatgaaagcagagatagaagtcttaa

SEQ ID NO: 153400 - DNA, 33 bp, Homo sapien
tccatgaaatgaaagcggagatagaagtcttaa

SEQ ID NO: 153401 - DNA, 33 bp, Homo sapien
atgtagtccattatacagccagatatactacat

SEQ ID NO: 153402 - DNA, 33 bp, Homo sapien
atgtagtccattatacggccagatatactacat

SEQ ID NO: 153403 - DNA, 33 bp, Homo sapien
caaccatgttgatacaagtagcaggaatttggt

SEQ ID NO: 153404 - DNA, 33 bp, Homo sapien
caaccatgttgatacaggtagcaggaatttggt

SEQ ID NO: 153405 - DNA, 33 bp, Homo sapien
tattcagttgtgggccaaaaggttagtaaatta

SEQ ID NO: 153406 - DNA, 33 bp, Homo sapien
tattcagttgtgggccgaaaggttagtaaatta

SEQ ID NO: 153407 - DNA, 33 bp, Homo sapien
tgctctgcctcacttgaaaatgacgaggcctct

SEQ ID NO: 153408 - DNA, 33 bp, Homo sapien
tgctctgcctcacttgcaaatgacgaggcctct

SEQ ID NO: 153409 - DNA, 33 bp, Homo sapien
ttgtgttgatctattaaagtccctctttaatag

SEQ ID NO: 153410 - DNA, 33 bp, Homo sapien
ttgtgttgatctattatagtccctctttaatag

SEQ ID NO: 153411 - DNA, 33 bp, Homo sapien
gatgggaaccagcagaactttggagaggagatg

SEQ ID NO: 153412 - DNA, 33 bp, Homo sapien
gatgggaaccagcagagctttggagaggagatg

SEQ ID NO: 153413 - DNA, 33 bp, Homo sapien
attgtttctgtaaccactgaggatcatgctgtt

SEQ ID NO: 153414 - DNA, 33 bp, Homo sapien
attgtttctgtaaccattgaggatcatgctgtt

SEQ ID NO: 153415 - DNA, 33 bp, Homo sapien
gataaaatgtgtaaacactcctcaatgcatatt

SEQ ID NO: 153416 - DNA, 33 bp, Homo sapien
gataaaatgtgtaaacgctcctcaatgcatatt

SEQ ID NO: 153417 - DNA, 33 bp, Homo sapien
ttctgcctgggagtacacccactagcttctccc

SEQ ID NO: 153418 - DNA, 33 bp, Homo sapien
ttctgcctgggagtacgcccactagcttctccc

SEQ ID NO: 153419 - DNA, 33 bp, Homo sapien
gctcagataccaatccaaagctaaactaccagc

SEQ ID NO: 153420 - DNA, 33 bp, Homo sapien
gctcagataccaatccgaagctaaactaccagc

SEQ ID NO: 153421 - DNA, 33 bp, Homo sapien
tgggaacataaattgcaaggcagtaagggccat

SEQ ID NO: 153422 - DNA, 33 bp, Homo sapien
tgggaacataaattgcgaggcagtaagggccat

SEQ ID NO: 153423 - DNA, 33 bp, Homo sapien
aagcatcaaaccctaacgcaagaagcaacagaa

SEQ ID NO: 153424 - DNA, 33 bp, Homo sapien
aagcatcaaaccctaatgcaagaagcaacagaa

SEQ ID NO: 153425 - DNA, 33 bp, Homo sapien
tctaactttgtgcccacgttcataatactaggc

SEQ ID NO: 153426 - DNA, 33 bp, Homo sapien
tctaactttgtgcccatgttcataatactaggc

SEQ ID NO: 153427 - DNA, 33 bp, Homo sapien
gatcacccagctagtacgtttcaggactggaat

SEQ ID NO: 153428 - DNA, 33 bp, Homo sapien
gatcacccagctagtaggtttcaggactggaat

SEQ ID NO: 153429 - DNA, 33 bp, Homo sapien
gtcgcagaaatgtagacgtaaagacagaggtag

SEQ ID NO: 153430 - DNA, 33 bp, Homo sapien
gtcgcagaaatgtagatgtaaagacagaggtag

SEQ ID NO: 153431 - DNA, 33 bp, Homo sapien
ctagctacattcattacgcaactcctatgtgcc

SEQ ID NO: 153432 - DNA, 33 bp, Homo sapien
ctagctacattcattatgcaactcctatgtgcc

SEQ ID NO: 153433 - DNA, 33 bp, Homo sapien
actgggtgaatggtaacattttcaaatgaataa

SEQ ID NO: 153434 - DNA, 33 bp, Homo sapien
actgggtgaatggtaatattttcaaatgaataa

SEQ ID NO: 153435 - DNA, 33 bp, Homo sapien
cccagactgttccagaataaaggttaagtatgg

SEQ ID NO: 153436 - DNA, 33 bp, Homo sapien
cccagactgttccagagtaaaggttaagtatgg

SEQ ID NO: 153437 - DNA, 33 bp, Homo sapien
gagctagtaactgacaaatatcccctgttgccc

SEQ ID NO: 153438 - DNA, 33 bp, Homo sapien
gagctagtaactgacagatatcccctgttgccc

SEQ ID NO: 153439 - DNA, 33 bp, Homo sapien
tgccttcctgagttccacccagctttttcctga

SEQ ID NO: 153440 - DNA, 33 bp, Homo sapien
tgccttcctgagttccgcccagctttttcctga

SEQ ID NO: 153441 - DNA, 33 bp, Homo sapien
tctatgaagttccaaaatataattctgcaaaga

SEQ ID NO: 153442 - DNA, 33 bp, Homo sapien
tctatgaagttccaaagtataattctgcaaaga

SEQ ID NO: 153443 - DNA, 33 bp, Homo sapien
ttagtaatcgtagttaccatgtttattaccagc

SEQ ID NO: 153444 - DNA, 33 bp, Homo sapien
ttagtaatcgtagttatcatgtttattaccagc

SEQ ID NO: 153445 - DNA, 33 bp, Homo sapien
gtgtgtgtcagctaagactctcttcttcttaca

SEQ ID NO: 153446 - DNA, 33 bp, Homo sapien
gtgtgtgtcagctaagtctctcttcttcttaca

SEQ ID NO: 153447 - DNA, 33 bp, Homo sapien
aagagaataccaggcaaagggaatggcatatgc

SEQ ID NO: 153448 - DNA, 33 bp, Homo sapien
aagagaataccaggcagagggaatggcatatgc

SEQ ID NO: 153449 - DNA, 33 bp, Homo sapien
attcattccttctgagaatacagcatgcaccaa

SEQ ID NO: 153450 - DNA, 33 bp, Homo sapien
attcattccttctgaggatacagcatgcaccaa

SEQ ID NO: 153451 - DNA, 33 bp, Homo sapien
catgggagaatcctaggaggtagctgggaaagg

SEQ ID NO: 153452 - DNA, 33 bp, Homo sapien
catgggagaatcctagtaggtagctgggaaagg

SEQ ID NO: 153453 - DNA, 33 bp, Homo sapien
atttgtattcctactccagtatgtagatcctca

SEQ ID NO: 153454 - DNA, 33 bp, Homo sapien
atttgtattcctactctagtatgtagatcctca

SEQ ID NO: 153455 - DNA, 33 bp, Homo sapien
gtctgggcccaagctacgtaactgcacactaat

SEQ ID NO: 153456 - DNA, 33 bp, Homo sapien
gtctgggcccaagctatgtaactgcacactaat

SEQ ID NO: 153457 - DNA, 33 bp, Homo sapien
accagagaagggcaagaaaatataatcaagtga

SEQ ID NO: 153458 - DNA, 33 bp, Homo sapien
accagagaagggcaaggaaatataatcaagtga

SEQ ID NO: 153459 - DNA, 33 bp, Homo sapien
tgactcctgtgctgcaggtacattttcttttat

SEQ ID NO: 153460 - DNA, 33 bp, Homo sapien
tgactcctgtgctgcatgtacattttcttttat

SEQ ID NO: 153461 - DNA, 33 bp, Homo sapien
tatgctaaaagatggacaagcaccatagaaaga

SEQ ID NO: 153462 - DNA, 33 bp, Homo sapien
tatgctaaaagatggagaagcaccatagaaaga

SEQ ID NO: 153463 - DNA, 33 bp, Homo sapien
atctgggaagattgaaaggagttgagcagagca

SEQ ID NO: 153464 - DNA, 33 bp, Homo sapien
atctgggaagattgaacggagttgagcagagca

SEQ ID NO: 153465 - DNA, 33 bp, Homo sapien
gtgaggtacctctgataacatttgttccctttg

SEQ ID NO: 153466 - DNA, 33 bp, Homo sapien
gtgaggtacctctgatgacatttgttccctttg

SEQ ID NO: 153467 - DNA, 33 bp, Homo sapien
aggaggtgacatttgaacttagcttcagaaaga

SEQ ID NO: 153468 - DNA, 33 bp, Homo sapien
aggaggtgacatttgagcttagcttcagaaaga

SEQ ID NO: 153469 - DNA, 33 bp, Homo sapien
cagcgccagattccctaaacatgccctggaggt

SEQ ID NO: 153470 - DNA, 33 bp, Homo sapien
cagcgccagattccctgaacatgccctggaggt

SEQ ID NO: 153471 - DNA, 33 bp, Homo sapien
tctcagtccagtgcccagctgcataactgctat

SEQ ID NO: 153472 - DNA, 33 bp, Homo sapien
tctcagtccagtgcccggctgcataactgctat

SEQ ID NO: 153473 - DNA, 33 bp, Homo sapien
agggaatgtgaattacccagaagacattaggtt

SEQ ID NO: 153474 - DNA, 33 bp, Homo sapien
agggaatgtgaattactcagaagacattaggtt

SEQ ID NO: 153475 - DNA, 33 bp, Homo sapien
gaaaggtcctgtgagcactggtaatcaagagtt

SEQ ID NO: 153476 - DNA, 33 bp, Homo sapien
gaaaggtcctgtgagcgctggtaatcaagagtt

SEQ ID NO: 153477 - DNA, 33 bp, Homo sapien
ctcccacccacagaccaattttaaccagagagt

SEQ ID NO: 153478 - DNA, 33 bp, Homo sapien
ctcccacccacagaccgattttaaccagagagt

SEQ ID NO: 153479 - DNA, 33 bp, Homo sapien
cttgtcctctggcctcaagctgattaacaatag

SEQ ID NO: 153480 - DNA, 33 bp, Homo sapien
cttgtcctctggcctcgagctgattaacaatag

SEQ ID NO: 153481 - DNA, 33 bp, Homo sapien
gcagcttctcttaaggcaatgacctcaggctct

SEQ ID NO: 153482 - DNA, 33 bp, Homo sapien
gcagcttctcttaaggtaatgacctcaggctct

SEQ ID NO: 153483 - DNA, 33 bp, Homo sapien
taagagttgtcaagaactgcaatgtttgaaatg

SEQ ID NO: 153484 - DNA, 33 bp, Homo sapien
taagagttgtcaagaattgcaatgtttgaaatg

SEQ ID NO: 153485 - DNA, 33 bp, Homo sapien
agcctccatcatgaaacagtgttaactttatta

SEQ ID NO: 153486 - DNA, 33 bp, Homo sapien
agcctccatcatgaaatagtgttaactttatta

SEQ ID NO: 153487 - DNA, 33 bp, Homo sapien
gctgaagaacactaaaacctttgcctgagagga

SEQ ID NO: 153488 - DNA, 33 bp, Homo sapien
gctgaagaacactaaagcctttgcctgagagga

SEQ ID NO: 153489 - DNA, 33 bp, Homo sapien
gccccacagggttcataaaatggtagctttaga

SEQ ID NO: 153490 - DNA, 33 bp, Homo sapien
gccccacagggttcatgaaatggtagctttaga

SEQ ID NO: 153491 - DNA, 33 bp, Homo sapien
agctgagttaggagacagctacaacagtccggg

SEQ ID NO: 153492 - DNA, 33 bp, Homo sapien
agctgagttaggagacggctacaacagtccggg

SEQ ID NO: 153493 - DNA, 33 bp, Homo sapien
aatatttgttgagagactaataagtgatcgtgg

SEQ ID NO: 153494 - DNA, 33 bp, Homo sapien
aatatttgttgagagattaataagtgatcgtgg

SEQ ID NO: 153495 - DNA, 33 bp, Homo sapien
tgagggcagaagtgacagccacaactttctaaa

SEQ ID NO: 153496 - DNA, 33 bp, Homo sapien
tgagggcagaagtgacggccacaactttctaaa

SEQ ID NO: 153497 - DNA, 33 bp, Homo sapien
tgagcttccctgaacaacaatatgaaaaacgat

SEQ ID NO: 153498 - DNA, 33 bp, Homo sapien
tgagcttccctgaacagcaatatgaaaaacgat

SEQ ID NO: 153499 - DNA, 33 bp, Homo sapien
ctccctatgtgtagggaagttgggagcagagga

SEQ ID NO: 153500 - DNA, 33 bp, Homo sapien
ctccctatgtgtagggcagttgggagcagagga

SEQ ID NO: 153501 - DNA, 33 bp, Homo sapien
atgtctgaggtgaatgaacaggatctggtggag

SEQ ID NO: 153502 - DNA, 33 bp, Homo sapien
atgtctgaggtgaatggacaggatctggtggag

SEQ ID NO: 153503 - DNA, 33 bp, Homo sapien
tttcgtgactgtcactaactcctgtggttggca

SEQ ID NO: 153504 - DNA, 33 bp, Homo sapien
tttcgtgactgtcactgactcctgtggttggca

SEQ ID NO: 153505 - DNA, 33 bp, Homo sapien
ggcacctgatctagaacgcagtccctagagtca

SEQ ID NO: 153506 - DNA, 33 bp, Homo sapien
ggcacctgatctagaatgcagtccctagagtca

SEQ ID NO: 153507 - DNA, 33 bp, Homo sapien
aaatggctctggagataactgaactggtaagat

SEQ ID NO: 153508 - DNA, 33 bp, Homo sapien
aaatggctctggagattactgaactggtaagat

SEQ ID NO: 153509 - DNA, 33 bp, Homo sapien; identical to SEQ ID NO: 153507

SEQ ID NO: 153510 - DNA, 33 bp, Homo sapien; identical to SEQ ID NO: 153508

SEQ ID NO: 153511 - DNA, 33 bp, Homo sapien
tatcttgggcttatctaaatgatcaggatgaga

SEQ ID NO: 153512 - DNA, 33 bp, Homo sapien
tatcttgggcttatctgaatgatcaggatgaga

SEQ ID NO: 153513 - DNA, 33 bp, Homo sapien; identical to SEQ ID NO: 153511

SEQ ID NO: 153514 - DNA, 33 bp, Homo sapien; identical to SEQ ID NO: 153512

SEQ ID NO: 153515 - DNA, 33 bp, Homo sapien
tgttgggggaatgtaaacagaaagattttgtag

SEQ ID NO: 153516 - DNA, 33 bp, Homo sapien
tgttgggggaatgtaatcagaaagattttgtag

SEQ ID NO: 153517 - DNA, 33 bp, Homo sapien
cctgctatgtgaaaaacaatgttatagatcagt

SEQ ID NO: 153518 - DNA, 33 bp, Homo sapien
cctgctatgtgaaaaagaatgttatagatcagt

SEQ ID NO: 153519 - DNA, 33 bp, Homo sapien
atctacaggcacaactaaagcctgttagcaatc

SEQ ID NO: 153520 - DNA, 33 bp, Homo sapien
atctacaggcacaactgaagcctgttagcaatc

SEQ ID NO: 153521 - DNA, 33 bp, Homo sapien
attctgatttttggcaatatctcaaatttaata

SEQ ID NO: 153522 - DNA, 33 bp, Homo sapien
attctgatttttggcattatctcaaatttaata

SEQ ID NO: 153523 - DNA, 33 bp, Homo sapien
catctcatgaaagaacagagtctcagctcactc

SEQ ID NO: 153524 - DNA, 33 bp, Homo sapien
catctcatgaaagaacggagtctcagctcactc

SEQ ID NO: 153525 - DNA, 33 bp, Homo sapien
tctttttttgtgttgggaatattcagtaaaagg

SEQ ID NO: 153526 - DNA, 33 bp, Homo sapien
tctttttttgtgttggtaatattcagtaaaagg

SEQ ID NO: 153527 - DNA, 33 bp, Homo sapien
tacttcaaagatgataaaactccactaatattc

SEQ ID NO: 153528 - DNA, 33 bp, Homo sapien
tacttcaaagatgatacaactccactaatattc

SEQ ID NO: 153529 - DNA, 33 bp, Homo sapien
taattacatagggttaaaagtctatctgaaagc

SEQ ID NO: 153530 - DNA, 33 bp, Homo sapien
taattacatagggttagaagtctatctgaaagc

SEQ ID NO: 153531 - DNA, 33 bp, Homo sapien
cctggtaatgtcaaaaaagatgaaagtgtatga

SEQ ID NO: 153532 - DNA, 33 bp, Homo sapien
cctggtaatgtcaaaagagatgaaagtgtatga

SEQ ID NO: 153533 - DNA, 33 bp, Homo sapien
ttttctgaccttgcgacggtttgttcagaatga

SEQ ID NO: 153534 - DNA, 33 bp, Homo sapien
ttttctgaccttgcgatggtttgttcagaatga

SEQ ID NO: 153535 - DNA, 33 bp, Homo sapien
gtcagtgaacatctaaccctgcatgagttttca

SEQ ID NO: 153536 - DNA, 33 bp, Homo sapien
gtcagtgaacatctaatcctgcatgagttttca

SEQ ID NO: 153537 - DNA, 33 bp, Homo sapien
atattgcactctctggaagataaactacaactg

SEQ ID NO: 153538 - DNA, 33 bp, Homo sapien
atattgcactctctgggagataaactacaactg

SEQ ID NO: 153539 - DNA, 33 bp, Homo sapien
gaggagcctaaggcaacgagacaactaagtgta

SEQ ID NO: 153540 - DNA, 33 bp, Homo sapien
gaggagcctaaggcaatgagacaactaagtgta

SEQ ID NO: 153541 - DNA, 33 bp, Homo sapien
aacaatggcaaaaaaaatccctatcaataaatg

SEQ ID NO: 153542 - DNA, 33 bp, Homo sapien
aacaatggcaaaaaaattccctatcaataaatg

SEQ ID NO: 153543 - DNA, 33 bp, Homo sapien
ggtttactttctgtcccatacaatcacatagac

SEQ ID NO: 153544 - DNA, 33 bp, Homo sapien
ggtttactttctgtcctatacaatcacatagac

SEQ ID NO: 153545 - DNA, 33 bp, Homo sapien
cagtctcctttatatcactttgtcctgatctgc

SEQ ID NO: 153546 - DNA, 33 bp, Homo sapien
cagtctcctttatatccctttgtcctgatctgc

SEQ ID NO: 153547 - DNA, 33 bp, Homo sapien
cagctcatcttagcaaatattttttgagtggcc

SEQ ID NO: 153548 - DNA, 33 bp, Homo sapien
cagctcatcttagcaagtattttttgagtggcc

SEQ ID NO: 153549 - DNA, 33 bp, Homo sapien
acttgcctcacactcaaggaaccaagttttcct

SEQ ID NO: 153550 - DNA, 33 bp, Homo sapien
acttgcctcacactcagggaaccaagttttcct

SEQ ID NO: 153551 - DNA, 33 bp, Homo sapien
atgaagagtcagagaaaacgagaatatataggc

SEQ ID NO: 153552 - DNA, 33 bp, Homo sapien
atgaagagtcagagaagacgagaatatataggc

SEQ ID NO: 153553 - DNA, 33 bp, Homo sapien
actgagacagctaagaatcattggataactttg

SEQ ID NO: 153554 - DNA, 33 bp, Homo sapien
actgagacagctaagagtcattggataactttg

SEQ ID NO: 153555 - DNA, 33 bp, Homo sapien
cctttttgtgcctgtccacctgttggttcatgt

SEQ ID NO: 153556 - DNA, 33 bp, Homo sapien
cctttttgtgcctgtctacctgttggttcatgt

SEQ ID NO: 153557 - DNA, 33 bp, Homo sapien
ggaaggcaagttatgcactaaaagctgggtcag

SEQ ID NO: 153558 - DNA, 33 bp, Homo sapien
ggaaggcaagttatgccctaaaagctgggtcag

SEQ ID NO: 153559 - DNA, 33 bp, Homo sapien
tgtgtgtgtgtgtagcccatagacatacacagt

SEQ ID NO: 153560 - DNA, 33 bp, Homo sapien
tgtgtgtgtgtgtagctcatagacatacacagt

SEQ ID NO: 153561 - DNA, 33 bp, Homo sapien
atcaggcttatcactaccattggtctcatattt

SEQ ID NO: 153562 - DNA, 33 bp, Homo sapien
atcaggcttatcactatcattggtctcatattt

SEQ ID NO: 153563 - DNA, 33 bp, Homo sapien
ttctggagcttcttcaggttccggatgaataag

SEQ ID NO: 153564 - DNA, 33 bp, Homo sapien
ttctggagcttcttcatgttccggatgaataag

SEQ ID NO: 153565 - DNA, 33 bp, Homo sapien
tcaataaataggtgggaagaactctgctggtgg

SEQ ID NO: 153566 - DNA, 33 bp, Homo sapien
tcaataaataggtgggtagaactctgctggtgg

SEQ ID NO: 153567 - DNA, 33 bp, Homo sapien
acaggaggaaaaattacagtaagctccactggt

SEQ ID NO: 153568 - DNA, 33 bp, Homo sapien
acaggaggaaaaattatagtaagctccactggt

SEQ ID NO: 153569 - DNA, 33 bp, Homo sapien
acgaagaaatatgaccagaaggatttttcacta

SEQ ID NO: 153570 - DNA, 33 bp, Homo sapien
acgaagaaatatgaccggaaggatttttcacta

SEQ ID NO: 153571 - DNA, 33 bp, Homo sapien
tagcaagtgattaataagtgctagctgtttatt

SEQ ID NO: 153572 - DNA, 33 bp, Homo sapien
tagcaagtgattaatacgtgctagctgtttatt

SEQ ID NO: 153573 - DNA, 33 bp, Homo sapien
taaaagattatacactcagaagtcttaacactc

SEQ ID NO: 153574 - DNA, 33 bp, Homo sapien
taaaagattatacactgagaagtcttaacactc

SEQ ID NO: 153575 - DNA, 33 bp, Homo sapien
aggtcaaagacgtagaagggttattcctgaaag

SEQ ID NO: 153576 - DNA, 33 bp, Homo sapien
aggtcaaagacgtagaggggttattcctgaaag

SEQ ID NO: 153577 - DNA, 33 bp, Homo sapien
ttatccccagagtatacgctttaggatgttaag

SEQ ID NO: 153578 - DNA, 33 bp, Homo sapien
ttatccccagagtatatgctttaggatgttaag

SEQ ID NO: 153579 - DNA, 33 bp, Homo sapien
tatttgatggactcacaggtattctctttttct

SEQ ID NO: 153580 - DNA, 33 bp, Homo sapien
tatttgatggactcacgggtattctctttttct

SEQ ID NO: 153581 - DNA, 33 bp, Homo sapien
gatctctggttgtctactacctggctctgggtg

SEQ ID NO: 153582 - DNA, 33 bp, Homo sapien
gatctctggttgtctagtacctggctctgggtg

SEQ ID NO: 153583 - DNA, 33 bp, Homo sapien
ctagaagtgaaccaaacaccatgtgtaagccaa

SEQ ID NO: 153584 - DNA, 33 bp, Homo sapien
ctagaagtgaaccaaataccatgtgtaagccaa

SEQ ID NO: 153585 - DNA, 33 bp, Homo sapien
ggcttcctattccctacgaggctcttggcaagt

SEQ ID NO: 153586 - DNA, 33 bp, Homo sapien
ggcttcctattccctatgaggctcttggcaagt

SEQ ID NO: 153587 - DNA, 33 bp, Homo sapien
gagaacatagggtaacagcataaatatacaggg

SEQ ID NO: 153588 - DNA, 33 bp, Homo sapien
gagaacatagggtaacggcataaatatacaggg

SEQ ID NO: 153589 - DNA, 33 bp, Homo sapien
gctttagagtgaagaacaggtgagaatggctcc

SEQ ID NO: 153590 - DNA, 33 bp, Homo sapien
gctttagagtgaagaagaggtgagaatggctcc

SEQ ID NO: 153591 - DNA, 33 bp, Homo sapien
ataaattccaagtaaactgtaggtataatgtgg

SEQ ID NO: 153592 - DNA, 33 bp, Homo sapien
ataaattccaagtaaattgtaggtataatgtgg

SEQ ID NO: 153593 - DNA, 33 bp, Homo sapien
caaagggatctgttaaacgtgttgaataaggat

SEQ ID NO: 153594 - DNA, 33 bp, Homo sapien
caaagggatctgttaaccgtgttgaataaggat

SEQ ID NO: 153595 - DNA, 33 bp, Homo sapien
tttatattttcagagagaacttaatttgtactt

SEQ ID NO: 153596 - DNA, 33 bp, Homo sapien
tttatattttcagagataacttaatttgtactt

SEQ ID NO: 153597 - DNA, 33 bp, Homo sapien
aaaaccccaaatcataccaaccacattctcaaa

SEQ ID NO: 153598 - DNA, 33 bp, Homo sapien
aaaaccccaaatcatagcaaccacattctcaaa

SEQ ID NO: 153599 - DNA, 33 bp, Homo sapien
tgtataacattgaagaacttcagcagatgggtc

SEQ ID NO: 153600 - DNA, 33 bp, Homo sapien
tgtataacattgaagagcttcagcagatgggtc

SEQ ID NO: 153601 - DNA, 33 bp, Homo sapien
agagaaagaagtctagaaggtcaaaaatttaag

SEQ ID NO: 153602 - DNA, 33 bp, Homo sapien
agagaaagaagtctaggaggtcaaaaatttaag

SEQ ID NO: 153603 - DNA, 33 bp, Homo sapien
aataaagtgggactgaggaaaaagcagcatttg

SEQ ID NO: 153604 - DNA, 33 bp, Homo sapien
aataaagtgggactgatgaaaaagcagcatttg

SEQ ID NO: 153605 - DNA, 33 bp, Homo sapien
tctgcaatactaagctcaatgttatggttgtga

SEQ ID NO: 153606 - DNA, 33 bp, Homo sapien
tctgcaatactaagcttaatgttatggttgtga

SEQ ID NO: 153607 - DNA, 33 bp, Homo sapien
tgagcgtggatagggccgagaacatgtcaagta

SEQ ID NO: 153608 - DNA, 33 bp, Homo sapien
tgagcgtggatagggctgagaacatgtcaagta

SEQ ID NO: 153609 - DNA, 33 bp, Homo sapien
aacacttgtgtgtctaaattttacagatgcttg

SEQ ID NO: 153610 - DNA, 33 bp, Homo sapien
aacacttgtgtgtctagattttacagatgcttg

SEQ ID NO: 153611 - DNA, 33 bp, Homo sapien
caatattttttttcaacctggagtagatacaga

SEQ ID NO: 153612 - DNA, 33 bp, Homo sapien
caatattttttttcaatctggagtagatacaga

SEQ ID NO: 153613 - DNA, 33 bp, Homo sapien
ctttattagcagcatgaaaacaggttaatacaa

SEQ ID NO: 153614 - DNA, 33 bp, Homo sapien
ctttattagcagcatggaaacaggttaatacaa

SEQ ID NO: 153615 - DNA, 33 bp, Homo sapien
ggtttgtgaagagttacagagtcaaggacagaa

SEQ ID NO: 153616 - DNA, 33 bp, Homo sapien
ggtttgtgaagagttatagagtcaaggacagaa

SEQ ID NO: 153617 - DNA, 33 bp, Homo sapien
gactcttaagtgggaactgacattattttagaa

SEQ ID NO: 153618 - DNA, 33 bp, Homo sapien
gactcttaagtgggaagtgacattattttagaa

SEQ ID NO: 153619 - DNA, 33 bp, Homo sapien
atgttcactgacctagcccttgtcattacattg

SEQ ID NO: 153620 - DNA, 33 bp, Homo sapien
atgttcactgacctagtccttgtcattacattg

SEQ ID NO: 153621 - DNA, 33 bp, Homo sapien
agccattctgcacccaagtgagtaacatctagt

SEQ ID NO: 153622 - DNA, 33 bp, Homo sapien
agccattctgcacccacgtgagtaacatctagt

SEQ ID NO: 153623 - DNA, 33 bp, Homo sapien
gggtttgtgtcaaagaaacttatgggtatggct

SEQ ID NO: 153624 - DNA, 33 bp, Homo sapien
gggtttgtgtcaaagagacttatgggtatggct

SEQ ID NO: 153625 - DNA, 33 bp, Homo sapien
tggaatttggaggaaacgtaaaatgtcagccag

SEQ ID NO: 153626 - DNA, 33 bp, Homo sapien
tggaatttggaggaaatgtaaaatgtcagccag

SEQ ID NO: 153627 - DNA, 33 bp, Homo sapien
aaatgttcttgggagccaagttacacaattaga

SEQ ID NO: 153628 - DNA, 33 bp, Homo sapien
aaatgttcttgggagctaagttacacaattaga

SEQ ID NO: 153629 - DNA, 33 bp, Homo sapien
tgcagtaaatccagaaatgaggggtgacaatga

SEQ ID NO: 153630 - DNA, 33 bp, Homo sapien
tgcagtaaatccagaagtgaggggtgacaatga

SEQ ID NO: 153631 - DNA, 33 bp, Homo sapien
tgtagggaagatgtagaagtggaatgaggtcag

SEQ ID NO: 153632 - DNA, 33 bp, Homo sapien
tgtagggaagatgtaggagtggaatgaggtcag

SEQ ID NO: 153633 - DNA, 33 bp, Homo sapien
ggatgattaactgtgcactttagaaagattctt

SEQ ID NO: 153634 - DNA, 33 bp, Homo sapien
ggatgattaactgtgcgctttagaaagattctt

SEQ ID NO: 153635 - DNA, 33 bp, Homo sapien
gaaaagttgaagggatcacatacagatagggca

SEQ ID NO: 153636 - DNA, 33 bp, Homo sapien
gaaaagttgaagggatgacatacagatagggca

SEQ ID NO: 153637 - DNA, 33 bp, Homo sapien
acacacttaagaaatgcaaaaccctctggaaag

SEQ ID NO: 153638 - DNA, 33 bp, Homo sapien
acacacttaagaaatgtaaaaccctctggaaag

SEQ ID NO: 153639 - DNA, 33 bp, Homo sapien
ctctggaaagttgcaaaaacataattgaaaaag

SEQ ID NO: 153640 - DNA, 33 bp, Homo sapien
ctctggaaagttgcaacaacataattgaaaaag

SEQ ID NO: 153641 - DNA, 33 bp, Homo sapien
gaggatactctgttcacgaacgcatctgtgctg

SEQ ID NO: 153642 - DNA, 33 bp, Homo sapien
gaggatactctgttcaggaacgcatctgtgctg

SEQ ID NO: 153643 - DNA, 33 bp, Homo sapien
tgccacaatgtaatcccgatctacacagaggaa

SEQ ID NO: 153644 - DNA, 33 bp, Homo sapien
tgccacaatgtaatcctgatctacacagaggaa

SEQ ID NO: 153645 - DNA, 33 bp, Homo sapien
ctgctatggttatttaagtggcagagacgtcac

SEQ ID NO: 153646 - DNA, 33 bp, Homo sapien
ctgctatggttatttaggtggcagagacgtcac

SEQ ID NO: 153647 - DNA, 33 bp, Homo sapien
tgagtcatgaaaataaagaaaaaaactgcacag

SEQ ID NO: 153648 - DNA, 33 bp, Homo sapien
tgagtcatgaaaataaggaaaaaaactgcacag

SEQ ID NO: 153649 - DNA, 33 bp, Homo sapien
ggagacaattaagcaacagaagcagaagatgct

SEQ ID NO: 153650 - DNA, 33 bp, Homo sapien
ggagacaattaagcaagagaagcagaagatgct

SEQ ID NO: 153651 - DNA, 33 bp, Homo sapien
cacctcccaaaaggccccacgtcctaataccat

SEQ ID NO: 153652 - DNA, 33 bp, Homo sapien
cacctcccaaaaggccgcacgtcctaataccat

SEQ ID NO: 153653 - DNA, 33 bp, Homo sapien
agtgcagaaaatccacaagggtcaatttgctaa

SEQ ID NO: 153654 - DNA, 33 bp, Homo sapien
agtgcagaaaatccacgagggtcaatttgctaa

SEQ ID NO: 153655 - DNA, 33 bp, Homo sapien
ttatacagtagccaaactccacgtagcttttag

SEQ ID NO: 153656 - DNA, 33 bp, Homo sapien
ttatacagtagccaaattccacgtagcttttag

SEQ ID NO: 153657 - DNA, 33 bp, Homo sapien
tgtcaacccttttcacaagctacatttcccttt

SEQ ID NO: 153658 - DNA, 33 bp, Homo sapien
tgtcaacccttttcacgagctacatttcccttt

SEQ ID NO: 153659 - DNA, 33 bp, Homo sapien
agactaaaaaaccaataatctgagaatccaact

SEQ ID NO: 153660 - DNA, 33 bp, Homo sapien
agactaaaaaaccaatgatctgagaatccaact

SEQ ID NO: 153661 - DNA, 33 bp, Homo sapien
gtcaataatgtcttaactgcagctttataagtt

SEQ ID NO: 153662 - DNA, 33 bp, Homo sapien
gtcaataatgtcttaattgcagctttataagtt

SEQ ID NO: 153663 - DNA, 33 bp, Homo sapien
gttcattccagggaaacgtgttttgtcaagtat

SEQ ID NO: 153664 - DNA, 33 bp, Homo sapien
gttcattccagggaaatgtgttttgtcaagtat

SEQ ID NO: 153665 - DNA, 33 bp, Homo sapien
gtctctctctctctaccggatccttcctatcac

SEQ ID NO: 153666 - DNA, 33 bp, Homo sapien
gtctctctctctctactggatccttcctatcac

SEQ ID NO: 153667 - DNA, 33 bp, Homo sapien
caacagctgtgcaactaaagaagctatcttgga

SEQ ID NO: 153668 - DNA, 33 bp, Homo sapien
caacagctgtgcaactgaagaagctatcttgga

SEQ ID NO: 153669 - DNA, 33 bp, Homo sapien
catgtgaagacatggaagaagttagcagtcagc

SEQ ID NO: 153670 - DNA, 33 bp, Homo sapien
catgtgaagacatggatgaagttagcagtcagc

SEQ ID NO: 153671 - DNA, 33 bp, Homo sapien
agcaatttgtattaaaactctctccttgatctt

SEQ ID NO: 153672 - DNA, 33 bp, Homo sapien
agcaatttgtattaaatctctctccttgatctt

SEQ ID NO: 153673 - DNA, 33 bp, Homo sapien
aagtagcaaagagcaaagtataattatgtactc

SEQ ID NO: 153674 - DNA, 33 bp, Homo sapien
aagtagcaaagagcaacgtataattatgtactc

SEQ ID NO: 153675 - DNA, 33 bp, Homo sapien
ccttcatgggttccaaacaagatgactgaagtc

SEQ ID NO: 153676 - DNA, 33 bp, Homo sapien
ccttcatgggttccaaccaagatgactgaagtc

SEQ ID NO: 153677 - DNA, 33 bp, Homo sapien
tctaagaaagaacagagtcaaatgctgagtgga

SEQ ID NO: 153678 - DNA, 33 bp, Homo sapien
tctaagaaagaacagattcaaatgctgagtgga

SEQ ID NO: 153679 - DNA, 33 bp, Homo sapien
agaccctgaagttaaagaaacagtgtctaattc

SEQ ID NO: 153680 - DNA, 33 bp, Homo sapien
agaccctgaagttaaataaacagtgtctaattc

SEQ ID NO: 153681 - DNA, 33 bp, Homo sapien
gaagaactcagagaatgaaagatgaaggttgac

SEQ ID NO: 153682 - DNA, 33 bp, Homo sapien
gaagaactcagagaattaaagatgaaggttgac

SEQ ID NO: 153683 - DNA, 33 bp, Homo sapien
gcattaacctaacatcaacaccagataaagaca

SEQ ID NO: 153684 - DNA, 33 bp, Homo sapien
gcattaacctaacatcgacaccagataaagaca

SEQ ID NO: 153685 - DNA, 33 bp, Homo sapien; identical to SEQ ID NO: 153683

SEQ ID NO: 153686 - DNA, 33 bp, Homo sapien; identical to SEQ ID NO: 153684

SEQ ID NO: 153687 - DNA, 33 bp, Homo sapien
gagataacatggcaaacaaagaaagaaaaaggc

SEQ ID NO: 153688 - DNA, 33 bp, Homo sapien
gagataacatggcaaagaaagaaagaaaaaggc

SEQ ID NO: 153689 - DNA, 33 bp, Homo sapien
gaggaagagctcttcaaatggtgaaagagctgt

SEQ ID NO: 153690 - DNA, 33 bp, Homo sapien
gaggaagagctcttcagatggtgaaagagctgt

SEQ ID NO: 153691 - DNA, 33 bp, Homo sapien
atattttgggcatataagtaatacatgtatacc

SEQ ID NO: 153692 - DNA, 33 bp, Homo sapien
atattttgggcatatacgtaatacatgtatacc

SEQ ID NO: 153693 - DNA, 33 bp, Homo sapien
cttcatagcctttgtcccagcttgtggtcactt

SEQ ID NO: 153694 - DNA, 33 bp, Homo sapien
cttcatagcctttgtctcagcttgtggtcactt

SEQ ID NO: 153695 - DNA, 33 bp, Homo sapien
ttccaacaacacagaacgctgccaggtagagtt

SEQ ID NO: 153696 - DNA, 33 bp, Homo sapien
ttccaacaacacagaatgctgccaggtagagtt

SEQ ID NO: 153697 - DNA, 33 bp, Homo sapien
tgccccctgctctttgaaagaacatccgcttcc

SEQ ID NO: 153698 - DNA, 33 bp, Homo sapien
tgccccctgctctttgtaagaacatccgcttcc

SEQ ID NO: 153699 - DNA, 33 bp, Homo sapien
gtattttgtgagacaccggtatctgcatcgagt

SEQ ID NO: 153700 - DNA, 33 bp, Homo sapien
gtattttgtgagacactggtatctgcatcgagt

SEQ ID NO: 153701 - DNA, 33 bp, Homo sapien
gtcaccagcttatgaaacagcctcagtggcaca

SEQ ID NO: 153702 - DNA, 33 bp, Homo sapien
gtcaccagcttatgaagcagcctcagtggcaca

SEQ ID NO: 153703 - DNA, 33 bp, Homo sapien
gaatcagacggggagacagaaagggaggtaact

SEQ ID NO: 153704 - DNA, 33 bp, Homo sapien
gaatcagacggggagagagaaagggaggtaact

SEQ ID NO: 153705 - DNA, 33 bp, Homo sapien
ttcgatatggtcagaacgttggctcatgcctgc

SEQ ID NO: 153706 - DNA, 33 bp, Homo sapien
ttcgatatggtcagaatgttggctcatgcctgc

SEQ ID NO: 153707 - DNA, 33 bp, Homo sapien
acctgaccaagatgctcactcataagctagcct

SEQ ID NO: 153708 - DNA, 33 bp, Homo sapien
acctgaccaagatgctgactcataagctagcct

SEQ ID NO: 153709 - DNA, 33 bp, Homo sapien
tgcaaagcaggttctaaaaattatgaactcttc

SEQ ID NO: 153710 - DNA, 33 bp, Homo sapien
tgcaaagcaggttctagaaattatgaactcttc

SEQ ID NO: 153711 - DNA, 33 bp, Homo sapien
taaagaatttgcttaaaagaagagttcataatt

SEQ ID NO: 153712 - DNA, 33 bp, Homo sapien
taaagaatttgcttaagagaagagttcataatt

SEQ ID NO: 153713 - DNA, 33 bp, Homo sapien
ccaagatacctgaaacccatagaccttcctgcc

SEQ ID NO: 153714 - DNA, 33 bp, Homo sapien
ccaagatacctgaaactcatagaccttcctgcc

SEQ ID NO: 153715 - DNA, 33 bp, Homo sapien
ttctggtcaaaaaagaatcatcattaatttctc

SEQ ID NO: 153716 - DNA, 33 bp, Homo sapien
ttctggtcaaaaaagagtcatcattaatttctc

SEQ ID NO: 153717 - DNA, 33 bp, Homo sapien
ccaccatcatcttaaacacccagaatggctccc

SEQ ID NO: 153718 - DNA, 33 bp, Homo sapien
ccaccatcatcttaaagacccagaatggctccc

SEQ ID NO: 153719 - DNA, 33 bp, Homo sapien
atttgcttgtttcccaaagaacttaggaggtga

SEQ ID NO: 153720 - DNA, 33 bp, Homo sapien
atttgcttgtttcccagagaacttaggaggtga

SEQ ID NO: 153721 - DNA, 33 bp, Homo sapien
gggagctgggttctcacaaatccccttttcaaa

SEQ ID NO: 153722 - DNA, 33 bp, Homo sapien
gggagctgggttctcataaatccccttttcaaa

SEQ ID NO: 153723 - DNA, 33 bp, Homo sapien
cctcgaaacaaactgacgctgccgaaacccatc

SEQ ID NO: 153724 - DNA, 33 bp, Homo sapien
cctcgaaacaaactgatgctgccgaaacccatc

SEQ ID NO: 153725 - DNA, 33 bp, Homo sapien
caagtaaagaggattcactccagacaagcgttc

SEQ ID NO: 153726 - DNA, 33 bp, Homo sapien
caagtaaagaggattcgctccagacaagcgttc

SEQ ID NO: 153727 - DNA, 33 bp, Homo sapien
gttataagtagtgaaaaacacagccttaactac

SEQ ID NO: 153728 - DNA, 33 bp, Homo sapien
gttataagtagtgaaagacacagccttaactac

SEQ ID NO: 153729 - DNA, 33 bp, Homo sapien
aatgcttggtgggtaacaatgataacaagaatg

SEQ ID NO: 153730 - DNA, 33 bp, Homo sapien
aatgcttggtgggtaagaatgataacaagaatg

SEQ ID NO: 153731 - DNA, 33 bp, Homo sapien
atcaatagtagtacacaagtggcaaaacctaaa

SEQ ID NO: 153732 - DNA, 33 bp, Homo sapien
atcaatagtagtacacgagtggcaaaacctaaa

SEQ ID NO: 153733 - DNA, 33 bp, Homo sapien
ctcccaccgttctaacaaaactactctctattc

SEQ ID NO: 153734 - DNA, 33 bp, Homo sapien
ctcccaccgttctaacgaaactactctctattc

SEQ ID NO: 153735 - DNA, 33 bp, Homo sapien
gtctgggttattcaaaagtcagttgaactaatg

SEQ ID NO: 153736 - DNA, 33 bp, Homo sapien
gtctgggttattcaaaggtcagttgaactaatg

SEQ ID NO: 153737 - DNA, 33 bp, Homo sapien
tgatatgtgctttttaacacaatattcttaaag

SEQ ID NO: 153738 - DNA, 33 bp, Homo sapien
tgatatgtgctttttaccacaatattcttaaag

SEQ ID NO: 153739 - DNA, 33 bp, Homo sapien
atcagtaaacaatgtcaccaataaacacttccc

SEQ ID NO: 153740 - DNA, 33 bp, Homo sapien
atcagtaaacaatgtcgccaataaacacttccc

SEQ ID NO: 153741 - DNA, 33 bp, Homo sapien
cttactggggggaccacggtttagtgtgagtgt

SEQ ID NO: 153742 - DNA, 33 bp, Homo sapien
cttactggggggaccagggtttagtgtgagtgt

SEQ ID NO: 153743 - DNA, 33 bp, Homo sapien
atttagtcttcatgacagattgagtcctctcgc

SEQ ID NO: 153744 - DNA, 33 bp, Homo sapien
atttagtcttcatgactgattgagtcctctcgc

SEQ ID NO: 153745 - DNA, 33 bp, Homo sapien
acattatccatatgcaagtctaattcatctttt

SEQ ID NO: 153746 - DNA, 33 bp, Homo sapien
acattatccatatgcacgtctaattcatctttt

SEQ ID NO: 153747 - DNA, 33 bp, Homo sapien
aatatcacaaatgcaaagtattgtgctattatt

SEQ ID NO: 153748 - DNA, 33 bp, Homo sapien
aatatcacaaatgcaaggtattgtgctattatt

SEQ ID NO: 153749 - DNA, 33 bp, Homo sapien
ccaaacctaataacgcagaggcgagatcagttt

SEQ ID NO: 153750 - DNA, 33 bp, Homo sapien
ccaaacctaataacgcggaggcgagatcagttt

SEQ ID NO: 153751 - DNA, 33 bp, Homo sapien
gttgctgagatgccacgctacctaaaactgccc

SEQ ID NO: 153752 - DNA, 33 bp, Homo sapien
gttgctgagatgccactctacctaaaactgccc

SEQ ID NO: 153753 - DNA, 33 bp, Homo sapien
tgctgatgtgttttaacgagtatgctcttagtt

SEQ ID NO: 153754 - DNA, 33 bp, Homo sapien
tgctgatgtgttttaatgagtatgctcttagtt

SEQ ID NO: 153755 - DNA, 33 bp, Homo sapien
aaaattatgtcaaaacacctcacaacccaaatt

SEQ ID NO: 153756 - DNA, 33 bp, Homo sapien
aaaattatgtcaaaacccctcacaacccaaatt

SEQ ID NO: 153757 - DNA, 33 bp, Homo sapien
tcttcccagtgaggaacggtctatgtgtcaaag

SEQ ID NO: 153758 - DNA, 33 bp, Homo sapien
tcttcccagtgaggaatggtctatgtgtcaaag

SEQ ID NO: 153759 - DNA, 33 bp, Homo sapien
ttacaagctaggaagaggctatgaaaggaaaat

SEQ ID NO: 153760 - DNA, 33 bp, Homo sapien
ttacaagctaggaagatgctatgaaaggaaaat

SEQ ID NO: 153761 - DNA, 33 bp, Homo sapien
tttatagaagattgccaaaggattccaacactg

SEQ ID NO: 153762 - DNA, 33 bp, Homo sapien
tttatagaagattgccgaaggattccaacactg

SEQ ID NO: 153763 - DNA, 33 bp, Homo sapien
ctaattagtgcttgggaagaatggggagtctgg

SEQ ID NO: 153764 - DNA, 33 bp, Homo sapien
ctaattagtgcttgggcagaatggggagtctgg

SEQ ID NO: 153765 - DNA, 33 bp, Homo sapien
gtaagtctccaaattaaaagctcaacactggtg

SEQ ID NO: 153766 - DNA, 33 bp, Homo sapien
gtaagtctccaaattagaagctcaacactggtg

SEQ ID NO: 153767 - DNA, 33 bp, Homo sapien
acttgaatcaatttgaatatggaccagatgagt

SEQ ID NO: 153768 - DNA, 33 bp, Homo sapien
acttgaatcaatttgagtatggaccagatgagt

SEQ ID NO: 153769 - DNA, 33 bp, Homo sapien
agctccaggatttcagcctacagaggaaaacag

SEQ ID NO: 153770 - DNA, 33 bp, Homo sapien
agctccaggatttcagtctacagaggaaaacag

SEQ ID NO: 153771 - DNA, 33 bp, Homo sapien
aataatttaaaagaagaagcagcttgtgaaagc

SEQ ID NO: 153772 - DNA, 33 bp, Homo sapien
aataatttaaaagaagcagcagcttgtgaaagc

SEQ ID NO: 153773 - DNA, 33 bp, Homo sapien
tcagatcctaacttacaaggtgtgtgagctagc

SEQ ID NO: 153774 - DNA, 33 bp, Homo sapien
tcagatcctaacttacgaggtgtgtgagctagc

SEQ ID NO: 153775 - DNA, 33 bp, Homo sapien
caggtagttgggagaacagtaaatagtaccatg

SEQ ID NO: 153776 - DNA, 33 bp, Homo sapien
caggtagttgggagaatagtaaatagtaccatg

SEQ ID NO: 153777 - DNA, 33 bp, Homo sapien
gctattggctgggccacgtattttcagaaggat

SEQ ID NO: 153778 - DNA, 33 bp, Homo sapien
gctattggctgggccatgtattttcagaaggat

SEQ ID NO: 153779 - DNA, 33 bp, Homo sapien
agctccaattagtatacctcaatgcaaatgaat

SEQ ID NO: 153780 - DNA, 33 bp, Homo sapien
agctccaattagtatagctcaatgcaaatgaat

SEQ ID NO: 153781 - DNA, 33 bp, Homo sapien
gttctttttaagactcaatctcaaatctgcaac

SEQ ID NO: 153782 - DNA, 33 bp, Homo sapien
gttctttttaagactcgatctcaaatctgcaac

SEQ ID NO: 153783 - DNA, 33 bp, Homo sapien
cagtaccaggagcacccgagatgtacagaaacc

SEQ ID NO: 153784 - DNA, 33 bp, Homo sapien
cagtaccaggagcacctgagatgtacagaaacc

SEQ ID NO: 153785 - DNA, 33 bp, Homo sapien
agaaagataaaggacaagggcataattggatgc

SEQ ID NO: 153786 - DNA, 33 bp, Homo sapien
agaaagataaaggacaggggcataattggatgc

SEQ ID NO: 153787 - DNA, 33 bp, Homo sapien
cacatagaacccagacgcagtctacattcccct

SEQ ID NO: 153788 - DNA, 33 bp, Homo sapien
cacatagaacccagactcagtctacattcccct

SEQ ID NO: 153789 - DNA, 33 bp, Homo sapien
agtggttgctaaaaaaatatgttatgagatgat

SEQ ID NO: 153790 - DNA, 33 bp, Homo sapien
agtggttgctaaaaaattatgttatgagatgat

SEQ ID NO: 153791 - DNA, 33 bp, Homo sapien
caccaaagtctgcctaccatgtaactttcacac

SEQ ID NO: 153792 - DNA, 33 bp, Homo sapien
caccaaagtctgcctatcatgtaactttcacac

SEQ ID NO: 153793 - DNA, 33 bp, Homo sapien
gggtcgggatttgaggacaggctctagtgtgaa

SEQ ID NO: 153794 - DNA, 33 bp, Homo sapien
gggtcgggatttgaggccaggctctagtgtgaa

SEQ ID NO: 153795 - DNA, 33 bp, Homo sapien
tgatgtggcttttaggacaaagctgtaattcaa

SEQ ID NO: 153796 - DNA, 33 bp, Homo sapien
tgatgtggcttttagggcaaagctgtaattcaa

SEQ ID NO: 153797 - DNA, 33 bp, Homo sapien
tttaagcacactgagcagatgtacaaaagttgg

SEQ ID NO: 153798 - DNA, 33 bp, Homo sapien
tttaagcacactgagctgatgtacaaaagttgg

SEQ ID NO: 153799 - DNA, 33 bp, Homo sapien
gcagtgctgaacaaagcaatacccttgtggagt

SEQ ID NO: 153800 - DNA, 33 bp, Homo sapien
gcagtgctgaacaaagtaatacccttgtggagt

SEQ ID NO: 153801 - DNA, 33 bp, Homo sapien
gggtctctgctgctacacgatccttccatccat

SEQ ID NO: 153802 - DNA, 33 bp, Homo sapien
gggtctctgctgctacgcgatccttccatccat

SEQ ID NO: 153803 - DNA, 33 bp, Homo sapien
ttttcttttcccaaataaacatggacatttagg

SEQ ID NO: 153804 - DNA, 33 bp, Homo sapien
ttttcttttcccaaatgaacatggacatttagg

SEQ ID NO: 153805 - DNA, 33 bp, Homo sapien
acttccaatttgatgacagtcagaagcttcaga

SEQ ID NO: 153806 - DNA, 33 bp, Homo sapien
acttccaatttgatgatagtcagaagcttcaga

SEQ ID NO: 153807 - DNA, 33 bp, Homo sapien
taacagtttatctggaaaaggaatcctacattt

SEQ ID NO: 153808 - DNA, 33 bp, Homo sapien
taacagtttatctggagaaggaatcctacattt

SEQ ID NO: 153809 - DNA, 33 bp, Homo sapien
agagatccctcctagaatccgtggcaacatgaa

SEQ ID NO: 153810 - DNA, 33 bp, Homo sapien
agagatccctcctagagtccgtggcaacatgaa

SEQ ID NO: 153811 - DNA, 33 bp, Homo sapien
agtgtcttgaaaaatacgtgcattctgataatg

SEQ ID NO: 153812 - DNA, 33 bp, Homo sapien
agtgtcttgaaaaatatgtgcattctgataatg

SEQ ID NO: 153813 - DNA, 33 bp, Homo sapien
tatacatagaagagaaagactctccaactctcc

SEQ ID NO: 153814 - DNA, 33 bp, Homo sapien
tatacatagaagagaaggactctccaactctcc

SEQ ID NO: 153815 - DNA, 33 bp, Homo sapien
tgtcatctcatccaggcagccatttgtccacac

SEQ ID NO: 153816 - DNA, 33 bp, Homo sapien
tgtcatctcatccaggtagccatttgtccacac

SEQ ID NO: 153817 - DNA, 33 bp, Homo sapien
cagagagaagtccagacgagtctcctcaaggga

SEQ ID NO: 153818 - DNA, 33 bp, Homo sapien
cagagagaagtccagatgagtctcctcaaggga

SEQ ID NO: 153819 - DNA, 33 bp, Homo sapien
ttcatttcttacaacgccagtgcctcccggcag

SEQ ID NO: 153820 - DNA, 33 bp, Homo sapien
ttcatttcttacaacgtcagtgcctcccggcag

SEQ ID NO: 153821 - DNA, 33 bp, Homo sapien
aggaacagttttcttcaactgacctcactagat

SEQ ID NO: 153822 - DNA, 33 bp, Homo sapien
aggaacagttttcttcgactgacctcactagat

SEQ ID NO: 153823 - DNA, 33 bp, Homo sapien
ttcagggatggacaaacgaatgtctcttataca

SEQ ID NO: 153824 - DNA, 33 bp, Homo sapien
ttcagggatggacaaatgaatgtctcttataca

SEQ ID NO: 153825 - DNA, 33 bp, Homo sapien
aaatcaaaactacaacaaggcaccacctaacag

SEQ ID NO: 153826 - DNA, 33 bp, Homo sapien
aaatcaaaactacaacgaggcaccacctaacag

SEQ ID NO: 153827 - DNA, 33 bp, Homo sapien
tagaaatataaacgaaggaatcatctatacaga

SEQ ID NO: 153828 - DNA, 33 bp, Homo sapien
tagaaatataaacgaatgaatcatctatacaga

SEQ ID NO: 153829 - DNA, 33 bp, Homo sapien
acaggagagggtttacaactgaaccttgagcaa

SEQ ID NO: 153830 - DNA, 33 bp, Homo sapien
acaggagagggtttacgactgaaccttgagcaa

SEQ ID NO: 153831 - DNA, 33 bp, Homo sapien
ggccaccctgtcctaccagagataattatatta

SEQ ID NO: 153832 - DNA, 33 bp, Homo sapien
ggccaccctgtcctactagagataattatatta

SEQ ID NO: 153833 - DNA, 33 bp, Homo sapien
aggtgctgtatgttccaagaaaagaaaaagtgt

SEQ ID NO: 153834 - DNA, 33 bp, Homo sapien
aggtgctgtatgttccgagaaaagaaaaagtgt

SEQ ID NO: 153835 - DNA, 33 bp, Homo sapien
gaaaaaaccccacagaatctctgaagcatctgt

SEQ ID NO: 153836 - DNA, 33 bp, Homo sapien
gaaaaaaccccacagagtctctgaagcatctgt

SEQ ID NO: 153837 - DNA, 33 bp, Homo sapien
atgatgaatatcctgaaacttgcctattgagca

SEQ ID NO: 153838 - DNA, 33 bp, Homo sapien
atgatgaatatcctgatacttgcctattgagca

SEQ ID NO: 153839 - DNA, 33 bp, Homo sapien
aagacagattattaaaaaatggacaagaatatg

SEQ ID NO: 153840 - DNA, 33 bp, Homo sapien
aagacagattattaaacaatggacaagaatatg

SEQ ID NO: 153841 - DNA, 33 bp, Homo sapien
tggctctttttttatcactgctctacattcatt

SEQ ID NO: 153842 - DNA, 33 bp, Homo sapien
tggctctttttttatcgctgctctacattcatt

SEQ ID NO: 153843 - DNA, 33 bp, Homo sapien
agaacaggagtcagtaaactttttctataaagg

SEQ ID NO: 153844 - DNA, 33 bp, Homo sapien
agaacaggagtcagtatactttttctataaagg

SEQ ID NO: 153845 - DNA, 33 bp, Homo sapien
catcctctcagcacaactctgactccaaccact

SEQ ID NO: 153846 - DNA, 33 bp, Homo sapien
catcctctcagcacaattctgactccaaccact

SEQ ID NO: 153847 - DNA, 33 bp, Homo sapien
tgacatttagtttcctcacttggggaacaatat

SEQ ID NO: 153848 - DNA, 33 bp, Homo sapien
tgacatttagtttccttacttggggaacaatat

SEQ ID NO: 153849 - DNA, 33 bp, Homo sapien
ccatccataggaaggacagtaatgactccaaac

SEQ ID NO: 153850 - DNA, 33 bp, Homo sapien
ccatccataggaaggagagtaatgactccaaac

SEQ ID NO: 153851 - DNA, 33 bp, Homo sapien
acttctccttcaaagaatacccctgtacaagtc

SEQ ID NO: 153852 - DNA, 33 bp, Homo sapien
acttctccttcaaagattacccctgtacaagtc

SEQ ID NO: 153853 - DNA, 33 bp, Homo sapien
ttgctttacatttgcaataaaacaaagatcatc

SEQ ID NO: 153854 - DNA, 33 bp, Homo sapien
ttgctttacatttgcagtaaaacaaagatcatc

SEQ ID NO: 153855 - DNA, 33 bp, Homo sapien
tgcccagccgatgttacattttaatgttgattt

SEQ ID NO: 153856 - DNA, 33 bp, Homo sapien
tgcccagccgatgttatattttaatgttgattt

SEQ ID NO: 153857 - DNA, 33 bp, Homo sapien
gcaggcatgaaaatcaaggcttctactttagac

SEQ ID NO: 153858 - DNA, 33 bp, Homo sapien
gcaggcatgaaaatcatggcttctactttagac

SEQ ID NO: 153859 - DNA, 33 bp, Homo sapien
cagaacaccggagaaacccaagagcaacacttc

SEQ ID NO: 153860 - DNA, 33 bp, Homo sapien
cagaacaccggagaaatccaagagcaacacttc

SEQ ID NO: 153861 - DNA, 33 bp, Homo sapien
tcagctgttggaaaacacttcaactcatatgaa

SEQ ID NO: 153862 - DNA, 33 bp, Homo sapien
tcagctgttggaaaactcttcaactcatatgaa

SEQ ID NO: 153863 - DNA, 33 bp, Homo sapien
ggacttagagatacaaagatgaataagctattg

SEQ ID NO: 153864 - DNA, 33 bp, Homo sapien
ggacttagagatacaacgatgaataagctattg

SEQ ID NO: 153865 - DNA, 33 bp, Homo sapien
tcaacttcatcatataacttgtcaataccatta

SEQ ID NO: 153866 - DNA, 33 bp, Homo sapien
tcaacttcatcatataccttgtcaataccatta

SEQ ID NO: 153867 - DNA, 33 bp, Homo sapien
tatatgatgaagttgaacaatatgagagaaaat

SEQ ID NO: 153868 - DNA, 33 bp, Homo sapien
tatatgatgaagttgaccaatatgagagaaaat

SEQ ID NO: 153869 - DNA, 33 bp, Homo sapien
agtgctacaactcagcagagggtggccatttct

SEQ ID NO: 153870 - DNA, 33 bp, Homo sapien
agtgctacaactcagcggagggtggccatttct

SEQ ID NO: 153871 - DNA, 33 bp, Homo sapien
gcttgagtctgggtacaaaatggtgcaataagg

SEQ ID NO: 153872 - DNA, 33 bp, Homo sapien
gcttgagtctgggtaccaaatggtgcaataagg

SEQ ID NO: 153873 - DNA, 33 bp, Homo sapien
ttcatcaggacttataacatattggatctaagg

SEQ ID NO: 153874 - DNA, 33 bp, Homo sapien
ttcatcaggacttatagcatattggatctaagg

SEQ ID NO: 153875 - DNA, 33 bp, Homo sapien
aaggtcagaactgagaaaggggcatgggaaata

SEQ ID NO: 153876 - DNA, 33 bp, Homo sapien
aaggtcagaactgagagaggggcatgggaaata

SEQ ID NO: 153877 - DNA, 33 bp, Homo sapien
ggtcgttagacataggccattgtaactctggaa

SEQ ID NO: 153878 - DNA, 33 bp, Homo sapien
ggtcgttagacatagggcattgtaactctggaa

SEQ ID NO: 153879 - DNA, 33 bp, Homo sapien
gcatctttcttcattgaaaaaagcaatacagaa

SEQ ID NO: 153880 - DNA, 33 bp, Homo sapien
gcatctttcttcattggaaaaagcaatacagaa

SEQ ID NO: 153881 - DNA, 33 bp, Homo sapien
ctgggtatagaagtagccaggaaaaacttaaga

SEQ ID NO: 153882 - DNA, 33 bp, Homo sapien
ctgggtatagaagtagtcaggaaaaacttaaga

SEQ ID NO: 153883 - DNA, 33 bp, Homo sapien
acgtcacttcttatcacgctttcagagacttca

SEQ ID NO: 153884 - DNA, 33 bp, Homo sapien
acgtcacttcttatcatgctttcagagacttca

SEQ ID NO: 153885 - DNA, 33 bp, Homo sapien
aatgctatgcaaagaaactgaaagcatacccat

SEQ ID NO: 153886 - DNA, 33 bp, Homo sapien
aatgctatgcaaagaagctgaaagcatacccat

SEQ ID NO: 153887 - DNA, 33 bp, Homo sapien
ttttaaaaatattcccaaagtcatgctgcttat

SEQ ID NO: 153888 - DNA, 33 bp, Homo sapien
ttttaaaaatattcccgaagtcatgctgcttat

SEQ ID NO: 153889 - DNA, 33 bp, Homo sapien
atagcggcaaaagggaactgctcttgactctat

SEQ ID NO: 153890 - DNA, 33 bp, Homo sapien
atagcggcaaaagggacctgctcttgactctat

SEQ ID NO: 153891 - DNA, 33 bp, Homo sapien
gtggcagtgaaaaatacatcagcgactaacatg

SEQ ID NO: 153892 - DNA, 33 bp, Homo sapien
gtggcagtgaaaaatatatcagcgactaacatg

SEQ ID NO: 153893 - DNA, 33 bp, Homo sapien
ataaaattctatagtaataactgactttactgt

SEQ ID NO: 153894 - DNA, 33 bp, Homo sapien
ataaaattctatagtagtaactgactttactgt

SEQ ID NO: 153895 - DNA, 33 bp, Homo sapien
aaactattaggaaaaaacatagaggtacaataa

SEQ ID NO: 153896 - DNA, 33 bp, Homo sapien
aaactattaggaaaaagcatagaggtacaataa

SEQ ID NO: 153897 - DNA, 33 bp, Homo sapien
gctgtagcaccttgcaaaagacactgacttaca

SEQ ID NO: 153898 - DNA, 33 bp, Homo sapien
gctgtagcaccttgcagaagacactgacttaca

SEQ ID NO: 153899 - DNA, 33 bp, Homo sapien
gcaggcaggccagaaagcccctggtgttaggcg

SEQ ID NO: 153900 - DNA, 33 bp, Homo sapien
gcaggcaggccagaaatcccctggtgttaggcg

SEQ ID NO: 153901 - DNA, 33 bp, Homo sapien
cagacagattaaatgactcacccagggccaccc

SEQ ID NO: 153902 - DNA, 33 bp, Homo sapien
cagacagattaaatgagtcacccagggccaccc

SEQ ID NO: 153903 - DNA, 33 bp, Homo sapien
attcttgtgctataaaaaaccctgaccacagtg

SEQ ID NO: 153904 - DNA, 33 bp, Homo sapien
attcttgtgctataaataaccctgaccacagtg

SEQ ID NO: 153905 - DNA, 33 bp, Homo sapien
aagtcatgcagggctccatattggtgctagtct

SEQ ID NO: 153906 - DNA, 33 bp, Homo sapien
aagtcatgcagggctctatattggtgctagtct

SEQ ID NO: 153907 - DNA, 33 bp, Homo sapien
actgtttgtctgaaacactagccagctgggata

SEQ ID NO: 153908 - DNA, 33 bp, Homo sapien
actgtttgtctgaaacgctagccagctgggata

SEQ ID NO: 153909 - DNA, 33 bp, Homo sapien
tttttcccaaagttgaccataagcaattaaggg

SEQ ID NO: 153910 - DNA, 33 bp, Homo sapien
tttttcccaaagttgatcataagcaattaaggg

SEQ ID NO: 153911 - DNA, 33 bp, Homo sapien
tataacctagaacaaaacttcttccaagcacat

SEQ ID NO: 153912 - DNA, 33 bp, Homo sapien
tataacctagaacaaagcttcttccaagcacat

SEQ ID NO: 153913 - DNA, 33 bp, Homo sapien
gtagacttaataaacactgtacacttaggctac

SEQ ID NO: 153914 - DNA, 33 bp, Homo sapien
gtagacttaataaacattgtacacttaggctac

SEQ ID NO: 153915 - DNA, 33 bp, Homo sapien
tttgaatgttctcaacacaaagaaacaataaat

SEQ ID NO: 153916 - DNA, 33 bp, Homo sapien
tttgaatgttctcaacgcaaagaaacaataaat

SEQ ID NO: 153917 - DNA, 33 bp, Homo sapien
tgaggtagaatctgaaaaggcagcagactatct

SEQ ID NO: 153918 - DNA, 33 bp, Homo sapien
tgaggtagaatctgaagaggcagcagactatct

SEQ ID NO: 153919 - DNA, 33 bp, Homo sapien
acttaaagaagagatactagtttcacctgcaac

SEQ ID NO: 153920 - DNA, 33 bp, Homo sapien
acttaaagaagagatattagtttcacctgcaac

SEQ ID NO: 153921 - DNA, 33 bp, Homo sapien
gagacacaaatcagaaagatgcaagagaaagac

SEQ ID NO: 153922 - DNA, 33 bp, Homo sapien
gagacacaaatcagaatgatgcaagagaaagac

SEQ ID NO: 153923 - DNA, 33 bp, Homo sapien
aaggcactcacattgaaggaagtcacacttgat

SEQ ID NO: 153924 - DNA, 33 bp, Homo sapien
aaggcactcacattgagggaagtcacacttgat

SEQ ID NO: 153925 - DNA, 33 bp, Homo sapien
agccgcaatttggaaacgaccaaagtgtccatc

SEQ ID NO: 153926 - DNA, 33 bp, Homo sapien
agccgcaatttggaaatgaccaaagtgtccatc

SEQ ID NO: 153927 - DNA, 33 bp, Homo sapien
tctaaagattcaatgacattcatgtaaagtgtt

SEQ ID NO: 153928 - DNA, 33 bp, Homo sapien
tctaaagattcaatgagattcatgtaaagtgtt

SEQ ID NO: 153929 - DNA, 33 bp, Homo sapien
atacttggcattttaacagtttttccagaagtc

SEQ ID NO: 153930 - DNA, 33 bp, Homo sapien
atacttggcattttaatagtttttccagaagtc

SEQ ID NO: 153931 - DNA, 33 bp, Homo sapien
tactataaggtaaataacgagtccgaggatgag

SEQ ID NO: 153932 - DNA, 33 bp, Homo sapien
tactataaggtaaataccgagtccgaggatgag

SEQ ID NO: 153933 - DNA, 33 bp, Homo sapien
aatgggagctaaaatcaagtccccattctgcat

SEQ ID NO: 153934 - DNA, 33 bp, Homo sapien
aatgggagctaaaatcgagtccccattctgcat

SEQ ID NO: 153935 - DNA, 33 bp, Homo sapien
gtaaagcttgttgcctaaaagggatgccttttt

SEQ ID NO: 153936 - DNA, 33 bp, Homo sapien
gtaaagcttgttgcctgaaagggatgccttttt

SEQ ID NO: 153937 - DNA, 33 bp, Homo sapien
gagacactagcttggacggcaactaattgctgg

SEQ ID NO: 153938 - DNA, 33 bp, Homo sapien
gagacactagcttggatggcaactaattgctgg

SEQ ID NO: 153939 - DNA, 33 bp, Homo sapien
agtggtgccaatgcaacgcacatgcttttgcta

SEQ ID NO: 153940 - DNA, 33 bp, Homo sapien
agtggtgccaatgcaatgcacatgcttttgcta

SEQ ID NO: 153941 - DNA, 33 bp, Homo sapien
agacattggaggaatacggttacttccctcaaa

SEQ ID NO: 153942 - DNA, 33 bp, Homo sapien
agacattggaggaatatggttacttccctcaaa

SEQ ID NO: 153943 - DNA, 33 bp, Homo sapien
ttgcccagagtctccaaatagatacacacagga

SEQ ID NO: 153944 - DNA, 33 bp, Homo sapien
ttgcccagagtctccagatagatacacacagga

SEQ ID NO: 153945 - DNA, 33 bp, Homo sapien
aacaacaaaaataagacgcttagaatgtatgca

SEQ ID NO: 153946 - DNA, 33 bp, Homo sapien
aacaacaaaaataagatgcttagaatgtatgca

SEQ ID NO: 153947 - DNA, 33 bp, Homo sapien
ctgtattacctacacaactcctgggtggataac

SEQ ID NO: 153948 - DNA, 33 bp, Homo sapien
ctgtattacctacacagctcctgggtggataac

SEQ ID NO: 153949 - DNA, 33 bp, Homo sapien
cattccttagacagaaatcagctccagcacatc

SEQ ID NO: 153950 - DNA, 33 bp, Homo sapien
cattccttagacagaagtcagctccagcacatc

SEQ ID NO: 153951 - DNA, 33 bp, Homo sapien
gcttagagaagctaaactcagtcccattcatgc

SEQ ID NO: 153952 - DNA, 33 bp, Homo sapien
gcttagagaagctaaattcagtcccattcatgc

SEQ ID NO: 153953 - DNA, 33 bp, Homo sapien
ataagggtgaaagactaagggagatatgaggcc

SEQ ID NO: 153954 - DNA, 33 bp, Homo sapien
ataagggtgaaagactgagggagatatgaggcc

SEQ ID NO: 153955 - DNA, 33 bp, Homo sapien
ctaatcaaaaaggcaaacagggcccataggaat

SEQ ID NO: 153956 - DNA, 33 bp, Homo sapien
ctaatcaaaaaggcaagcagggcccataggaat

SEQ ID NO: 153957 - DNA, 33 bp, Homo sapien
agtagttaggagaggccgaacaataaagaatgc

SEQ ID NO: 153958 - DNA, 33 bp, Homo sapien
agtagttaggagaggctgaacaataaagaatgc

SEQ ID NO: 153959 - DNA, 33 bp, Homo sapien
acagcagaaggtattcaaacatcacgtaggtga

SEQ ID NO: 153960 - DNA, 33 bp, Homo sapien
acagcagaaggtattcgaacatcacgtaggtga

SEQ ID NO: 153961 - DNA, 33 bp, Homo sapien
ggcttcagatactttcccttgctctaaaatagt

SEQ ID NO: 153962 - DNA, 33 bp, Homo sapien
ggcttcagatactttctcttgctctaaaatagt

SEQ ID NO: 153963 - DNA, 33 bp, Homo sapien
tttaaagatgcttacaaccccgttatcacctca

SEQ ID NO: 153964 - DNA, 33 bp, Homo sapien
tttaaagatgcttacagccccgttatcacctca

SEQ ID NO: 153965 - DNA, 33 bp, Homo sapien
tttgagaaggggctaggataagacaggccaggc

SEQ ID NO: 153966 - DNA, 33 bp, Homo sapien
tttgagaaggggctagtataagacaggccaggc

SEQ ID NO: 153967 - DNA, 33 bp, Homo sapien
catatttgttcagtcgacccactggacacctag

SEQ ID NO: 153968 - DNA, 33 bp, Homo sapien
catatttgttcagtcggcccactggacacctag

SEQ ID NO: 153969 - DNA, 33 bp, Homo sapien
catcccagctaggaaacggctgagccaggttgg

SEQ ID NO: 153970 - DNA, 33 bp, Homo sapien
catcccagctaggaaatggctgagccaggttgg

SEQ ID NO: 153971 - DNA, 33 bp, Homo sapien
tcagttcttttatcccacctgtggaagctcagg

SEQ ID NO: 153972 - DNA, 33 bp, Homo sapien
tcagttcttttatcccgcctgtggaagctcagg

SEQ ID NO: 153973 - DNA, 33 bp, Homo sapien
agcaagtggtgctttacggtttatcgagatcca

SEQ ID NO: 153974 - DNA, 33 bp, Homo sapien
agcaagtggtgctttatggtttatcgagatcca

SEQ ID NO: 153975 - DNA, 33 bp, Homo sapien
gatttgcaaacttgaaagtctagatgtgtgtag

SEQ ID NO: 153976 - DNA, 33 bp, Homo sapien
gatttgcaaacttgaacgtctagatgtgtgtag

SEQ ID NO: 153977 - DNA, 33 bp, Homo sapien
gtttttcacaggtggcgcttttgacttcctctg

SEQ ID NO: 153978 - DNA, 33 bp, Homo sapien
gtttttcacaggtggctcttttgacttcctctg

SEQ ID NO: 153979 - DNA, 33 bp, Homo sapien
tgtcaaaaggccacacaaattaagtgtgatgtt

SEQ ID NO: 153980 - DNA, 33 bp, Homo sapien
tgtcaaaaggccacaccaattaagtgtgatgtt

SEQ ID NO: 153981 - DNA, 33 bp, Homo sapien
ttaccatattaattcactgaaacctcacagtcc

SEQ ID NO: 153982 - DNA, 33 bp, Homo sapien
ttaccatattaattcattgaaacctcacagtcc

SEQ ID NO: 153983 - DNA, 33 bp, Homo sapien
ttttgggttccatgtacgaaggtgaaaaatcat

SEQ ID NO: 153984 - DNA, 33 bp, Homo sapien
ttttgggttccatgtatgaaggtgaaaaatcat

SEQ ID NO: 153985 - DNA, 33 bp, Homo sapien
gagttcataatctaagaaaagagaccaggagag

SEQ ID NO: 153986 - DNA, 33 bp, Homo sapien
gagttcataatctaaggaaagagaccaggagag

SEQ ID NO: 153987 - DNA, 33 bp, Homo sapien
gaagtagccagaagaactgtagaatttccaggg

SEQ ID NO: 153988 - DNA, 33 bp, Homo sapien
gaagtagccagaagaattgtagaatttccaggg

SEQ ID NO: 153989 - DNA, 33 bp, Homo sapien
tagaaaatataagggaatcaatcctagtctcca

SEQ ID NO: 153990 - DNA, 33 bp, Homo sapien
tagaaaatataagggagtcaatcctagtctcca

SEQ ID NO: 153991 - DNA, 33 bp, Homo sapien
aagggaacagtgttagaagttggatatatattc

SEQ ID NO: 153992 - DNA, 33 bp, Homo sapien
aagggaacagtgttagcagttggatatatattc

SEQ ID NO: 153993 - DNA, 33 bp, Homo sapien
tgaaaactgtggagcacgaattgcattccctct

SEQ ID NO: 153994 - DNA, 33 bp, Homo sapien
tgaaaactgtggagcatgaattgcattccctct

SEQ ID NO: 153995 - DNA, 33 bp, Homo sapien
ggctataagagttccaatcatcatacaaaatca

SEQ ID NO: 153996 - DNA, 33 bp, Homo sapien
ggctataagagttccagtcatcatacaaaatca

SEQ ID NO: 153997 - DNA, 33 bp, Homo sapien
gagaatttccaatgaccgcaaaaactcagatcc

SEQ ID NO: 153998 - DNA, 33 bp, Homo sapien
gagaatttccaatgactgcaaaaactcagatcc

SEQ ID NO: 153999 - DNA, 33 bp, Homo sapien
aactattggatttgtcacacttgggtttagctt

SEQ ID NO: 154000 - DNA, 33 bp, Homo sapien
aactattggatttgtcgcacttgggtttagctt

SEQ ID NO: 154001 - DNA, 33 bp, Homo sapien
tgggtgttagttgttacgcttacttgatgactc

SEQ ID NO: 154002 - DNA, 33 bp, Homo sapien
tgggtgttagttgttaggcttacttgatgactc

SEQ ID NO: 154003 - DNA, 33 bp, Homo sapien
tctctgatgatgtgaacgtgtaagtgggtgtta

SEQ ID NO: 154004 - DNA, 33 bp, Homo sapien
tctctgatgatgtgaatgtgtaagtgggtgtta

SEQ ID NO: 154005 - DNA, 33 bp, Homo sapien
cctttgtccagtcctacagtcagaaaatatcac

SEQ ID NO: 154006 - DNA, 33 bp, Homo sapien
cctttgtccagtcctagagtcagaaaatatcac

SEQ ID NO: 154007 - DNA, 33 bp, Homo sapien
tggccctgggtttgtaacctctttgaagtcctc

SEQ ID NO: 154008 - DNA, 33 bp, Homo sapien
tggccctgggtttgtatcctctttgaagtcctc

SEQ ID NO: 154009 - DNA, 33 bp, Homo sapien
cagctttctcctcatcacacggcagcatcttgg

SEQ ID NO: 154010 - DNA, 33 bp, Homo sapien
cagctttctcctcatcgcacggcagcatcttgg

SEQ ID NO: 154011 - DNA, 33 bp, Homo sapien
tagtgtcaaaggctaaaaagaggccaagtaagc

SEQ ID NO: 154012 - DNA, 33 bp, Homo sapien
tagtgtcaaaggctaagaagaggccaagtaagc

SEQ ID NO: 154013 - DNA, 33 bp, Homo sapien
gtgtatggaaggttgaagctaagactaagaaga

SEQ ID NO: 154014 - DNA, 33 bp, Homo sapien
gtgtatggaaggttgaggctaagactaagaaga

SEQ ID NO: 154015 - DNA, 33 bp, Homo sapien
gcctcatcacttttcaagtcattcaggaagtta

SEQ ID NO: 154016 - DNA, 33 bp, Homo sapien
gcctcatcacttttcatgtcattcaggaagtta

SEQ ID NO: 154017 - DNA, 33 bp, Homo sapien
cagatatacaagtggacgatgttcccataggag

SEQ ID NO: 154018 - DNA, 33 bp, Homo sapien
cagatatacaagtggatgatgttcccataggag

SEQ ID NO: 154019 - DNA, 33 bp, Homo sapien
tatggtatataaaccaacctgtaacacactgga

SEQ ID NO: 154020 - DNA, 33 bp, Homo sapien
tatggtatataaaccatcctgtaacacactgga

SEQ ID NO: 154021 - DNA, 33 bp, Homo sapien
agaaaggctgggtgaaaaatatataagaatgtt

SEQ ID NO: 154022 - DNA, 33 bp, Homo sapien
agaaaggctgggtgaagaatatataagaatgtt

SEQ ID NO: 154023 - DNA, 33 bp, Homo sapien
ccagcaaagaaccatgaaggtgagccccagtca

SEQ ID NO: 154024 - DNA, 33 bp, Homo sapien
ccagcaaagaaccatgtaggtgagccccagtca

SEQ ID NO: 154025 - DNA, 33 bp, Homo sapien
tccaccagactttgaactccatgagggcgctaa

SEQ ID NO: 154026 - DNA, 33 bp, Homo sapien
tccaccagactttgaattccatgagggcgctaa

SEQ ID NO: 154027 - DNA, 33 bp, Homo sapien
cattcattacagccaacgctttgtgttggatct

SEQ ID NO: 154028 - DNA, 33 bp, Homo sapien
cattcattacagccaatgctttgtgttggatct

SEQ ID NO: 154029 - DNA, 33 bp, Homo sapien
agcatcattgtcagtaccttggcagggctggag

SEQ ID NO: 154030 - DNA, 33 bp, Homo sapien
agcatcattgtcagtagcttggcagggctggag

SEQ ID NO: 154031 - DNA, 33 bp, Homo sapien
ttgaaacccaccaaaggctgccgttcttccacc

SEQ ID NO: 154032 - DNA, 33 bp, Homo sapien
ttgaaacccaccaaagtctgccgttcttccacc

SEQ ID NO: 154033 - DNA, 33 bp, Homo sapien
tttagcaaaattgttacgtacataggtattgag

SEQ ID NO: 154034 - DNA, 33 bp, Homo sapien
tttagcaaaattgttatgtacataggtattgag

SEQ ID NO: 154035 - DNA, 33 bp, Homo sapien
atgacataggtgtagacactcactagactgaaa

SEQ ID NO: 154036 - DNA, 33 bp, Homo sapien
atgacataggtgtagatactcactagactgaaa

SEQ ID NO: 154037 - DNA, 33 bp, Homo sapien
atccagacctatgttggatgttggtctactagg

SEQ ID NO: 154038 - DNA, 33 bp, Homo sapien
atccagacctatgttgtatgttggtctactagg

SEQ ID NO: 154039 - DNA, 33 bp, Homo sapien
ctggtttataaatgacaattcctttagatgctt

SEQ ID NO: 154040 - DNA, 33 bp, Homo sapien
ctggtttataaatgaccattcctttagatgctt

SEQ ID NO: 154041 - DNA, 33 bp, Homo sapien
aaactttgaaaaacagaatgaacttaactcatt

SEQ ID NO: 154042 - DNA, 33 bp, Homo sapien
aaactttgaaaaacagtatgaacttaactcatt

SEQ ID NO: 154043 - DNA, 33 bp, Homo sapien
taggtttggaatacgccgcctccagaacccaaa

SEQ ID NO: 154044 - DNA, 33 bp, Homo sapien
taggtttggaatacgctgcctccagaacccaaa

SEQ ID NO: 154045 - DNA, 33 bp, Homo sapien
gaattccagggccctacgttgttattctcccaa

SEQ ID NO: 154046 - DNA, 33 bp, Homo sapien
gaattccagggccctatgttgttattctcccaa

SEQ ID NO: 154047 - DNA, 33 bp, Homo sapien
aatgttgtgaggattaataacctgtaagttctt

SEQ ID NO: 154048 - DNA, 33 bp, Homo sapien
aatgttgtgaggattagtaacctgtaagttctt

SEQ ID NO: 154049 - DNA, 33 bp, Homo sapien
ttttttaaatcacttcacaggacatttttttcc

SEQ ID NO: 154050 - DNA, 33 bp, Homo sapien
ttttttaaatcacttcgcaggacatttttttcc

SEQ ID NO: 154051 - DNA, 33 bp, Homo sapien
accaaagggaagctcacagtagtaggccattgc

SEQ ID NO: 154052 - DNA, 33 bp, Homo sapien
accaaagggaagctcatagtagtaggccattgc

SEQ ID NO: 154053 - DNA, 33 bp, Homo sapien
aataacatcactggcacagtataaactttagtg

SEQ ID NO: 154054 - DNA, 33 bp, Homo sapien
aataacatcactggcatagtataaactttagtg

SEQ ID NO: 154055 - DNA, 33 bp, Homo sapien
tttataattcagtagacggacagaaagatgaag

SEQ ID NO: 154056 - DNA, 33 bp, Homo sapien
tttataattcagtagatggacagaaagatgaag

SEQ ID NO: 154057 - DNA, 33 bp, Homo sapien
tatacagatttccaccaaataaatttcaacttt

SEQ ID NO: 154058 - DNA, 33 bp, Homo sapien
tatacagatttccaccgaataaatttcaacttt

SEQ ID NO: 154059 - DNA, 33 bp, Homo sapien
gtaataatggcaaaagacctcaccaagaatttg

SEQ ID NO: 154060 - DNA, 33 bp, Homo sapien
gtaataatggcaaaaggcctcaccaagaatttg

SEQ ID NO: 154061 - DNA, 33 bp, Homo sapien
gcaggaaaatgtcatccgatatcctcccactta

SEQ ID NO: 154062 - DNA, 33 bp, Homo sapien
gcaggaaaatgtcatctgatatcctcccactta

SEQ ID NO: 154063 - DNA, 33 bp, Homo sapien
tgggagtatagaaaaaagaatggactatgggaa

SEQ ID NO: 154064 - DNA, 33 bp, Homo sapien
tgggagtatagaaaaaggaatggactatgggaa

SEQ ID NO: 154065 - DNA, 33 bp, Homo sapien
gattcaaagatgaaaaagatgaaatcactgctc

SEQ ID NO: 154066 - DNA, 33 bp, Homo sapien
gattcaaagatgaaaacgatgaaatcactgctc

SEQ ID NO: 154067 - DNA, 33 bp, Homo sapien
acaaattaaatgatacgaattgaacattcccta

SEQ ID NO: 154068 - DNA, 33 bp, Homo sapien
acaaattaaatgatactaattgaacattcccta

SEQ ID NO: 154069 - DNA, 33 bp, Homo sapien
ctcctgttgatatatacctgggttacgtccagt

SEQ ID NO: 154070 - DNA, 33 bp, Homo sapien
ctcctgttgatatatatctgggttacgtccagt

SEQ ID NO: 154071 - DNA, 33 bp, Homo sapien
cccaaaccagtaatcaatgaaatagacagaaag

SEQ ID NO: 154072 - DNA, 33 bp, Homo sapien
cccaaaccagtaatcactgaaatagacagaaag

SEQ ID NO: 154073 - DNA, 33 bp, Homo sapien
acctttaggaagccaacgctcttctgtgtataa

SEQ ID NO: 154074 - DNA, 33 bp, Homo sapien
acctttaggaagccaatgctcttctgtgtataa

SEQ ID NO: 154075 - DNA, 33 bp, Homo sapien
caagtctgtaaggagccaagagttcatacactc

SEQ ID NO: 154076 - DNA, 33 bp, Homo sapien
caagtctgtaaggagcgaagagttcatacactc

SEQ ID NO: 154077 - DNA, 33 bp, Homo sapien
cttcttccgcatatcaccccgtctagaaattgc

SEQ ID NO: 154078 - DNA, 33 bp, Homo sapien
cttcttccgcatatcatcccgtctagaaattgc

SEQ ID NO: 154079 - DNA, 33 bp, Homo sapien
cccagggcctatcttcacagctggattcagctg

SEQ ID NO: 154080 - DNA, 33 bp, Homo sapien
cccagggcctatcttctcagctggattcagctg

SEQ ID NO: 154081 - DNA, 33 bp, Homo sapien
actcattggcctcaagaatatgtgcatggaaaa

SEQ ID NO: 154082 - DNA, 33 bp, Homo sapien
actcattggcctcaaggatatgtgcatggaaaa

SEQ ID NO: 154083 - DNA, 33 bp, Homo sapien
aagtcatcatacgcaaatgtcatcagaaataag

SEQ ID NO: 154084 - DNA, 33 bp, Homo sapien
aagtcatcatacgcaagtgtcatcagaaataag

SEQ ID NO: 154085 - DNA, 33 bp, Homo sapien
tggccttggttgggcccacagctcaactgtgaa

SEQ ID NO: 154086 - DNA, 33 bp, Homo sapien
tggccttggttgggcctacagctcaactgtgaa

SEQ ID NO: 154087 - DNA, 33 bp, Homo sapien
cctagagctgagaaaccctcccctgagaaacta

SEQ ID NO: 154088 - DNA, 33 bp, Homo sapien
cctagagctgagaaactctcccctgagaaacta

SEQ ID NO: 154089 - DNA, 33 bp, Homo sapien
gctcatctgattcccaaaagtgatcaaataatt

SEQ ID NO: 154090 - DNA, 33 bp, Homo sapien
gctcatctgattcccagaagtgatcaaataatt

SEQ ID NO: 154091 - DNA, 33 bp, Homo sapien
gacttatcttttgtaacccagtctttactcaga

SEQ ID NO: 154092 - DNA, 33 bp, Homo sapien
gacttatcttttgtaatccagtctttactcaga

SEQ ID NO: 154093 - DNA, 33 bp, Homo sapien
aaatgctacaaatcagcccttttctttccagag

SEQ ID NO: 154094 - DNA, 33 bp, Homo sapien
aaatgctacaaatcaggccttttctttccagag

SEQ ID NO: 154095 - DNA, 33 bp, Homo sapien
ttaatccataacatccccaaatactatgaatca

SEQ ID NO: 154096 - DNA, 33 bp, Homo sapien
ttaatccataacatccgcaaatactatgaatca

SEQ ID NO: 154097 - DNA, 33 bp, Homo sapien
atcagaccaagaaatacagatcctgtttattta

SEQ ID NO: 154098 - DNA, 33 bp, Homo sapien
atcagaccaagaaatatagatcctgtttattta

SEQ ID NO: 154099 - DNA, 33 bp, Homo sapien
gaccaagctcaagcagcaagaacaggggtccta

SEQ ID NO: 154100 - DNA, 33 bp, Homo sapien
gaccaagctcaagcaggaagaacaggggtccta

SEQ ID NO: 154101 - DNA, 33 bp, Homo sapien
cacagtgcctggcacacggatggaacttagttg

SEQ ID NO: 154102 - DNA, 33 bp, Homo sapien
cacagtgcctggcacatggatggaacttagttg

SEQ ID NO: 154103 - DNA, 33 bp, Homo sapien
ttgagatgggatgagacaggagttagtagaaac

SEQ ID NO: 154104 - DNA, 33 bp, Homo sapien
ttgagatgggatgagataggagttagtagaaac

SEQ ID NO: 154105 - DNA, 33 bp, Homo sapien
tacagtgatcttcaaacaattttgctcactaac

SEQ ID NO: 154106 - DNA, 33 bp, Homo sapien
tacagtgatcttcaaataattttgctcactaac

SEQ ID NO: 154107 - DNA, 33 bp, Homo sapien
aagaggtaatttaactcaataagcatcaaaaat

SEQ ID NO: 154108 - DNA, 33 bp, Homo sapien
aagaggtaatttaacttaataagcatcaaaaat

SEQ ID NO: 154109 - DNA, 33 bp, Homo sapien
catgagtgtcctggaaagatttatgcctttcaa

SEQ ID NO: 154110 - DNA, 33 bp, Homo sapien
catgagtgtcctggaaggatttatgcctttcaa

SEQ ID NO: 154111 - DNA, 33 bp, Homo sapien
cgccatcttggagacgaagagcagccctcaaca

SEQ ID NO: 154112 - DNA, 33 bp, Homo sapien
cgccatcttggagacggagagcagccctcaaca

SEQ ID NO: 154113 - DNA, 33 bp, Homo sapien
taccccacttgtacacccttgactatttttttc

SEQ ID NO: 154114 - DNA, 33 bp, Homo sapien
taccccacttgtacactcttgactatttttttc

SEQ ID NO: 154115 - DNA, 33 bp, Homo sapien
aagtgtgtgctcaacaagaaataggtaattcaa

SEQ ID NO: 154116 - DNA, 33 bp, Homo sapien
aagtgtgtgctcaacacgaaataggtaattcaa

SEQ ID NO: 154117 - DNA, 33 bp, Homo sapien
ttactgatcctccctaaaaatagtcaggaataa

SEQ ID NO: 154118 - DNA, 33 bp, Homo sapien
ttactgatcctccctagaaatagtcaggaataa

SEQ ID NO: 154119 - DNA, 33 bp, Homo sapien
ctcttgaacacgtgaaatataactatcgtaatt

SEQ ID NO: 154120 - DNA, 33 bp, Homo sapien
ctcttgaacacgtgaagtataactatcgtaatt

SEQ ID NO: 154121 - DNA, 33 bp, Homo sapien
tcaacagtgacactggaaatagaagacagcaga

SEQ ID NO: 154122 - DNA, 33 bp, Homo sapien
tcaacagtgacactgggaatagaagacagcaga

SEQ ID NO: 154123 - DNA, 33 bp, Homo sapien
tttatcactggacataactaaattaaagaaaca

SEQ ID NO: 154124 - DNA, 33 bp, Homo sapien
tttatcactggacatagctaaattaaagaaaca

SEQ ID NO: 154125 - DNA, 33 bp, Homo sapien
gctaacaacactgcctcagatccggaccggaat

SEQ ID NO: 154126 - DNA, 33 bp, Homo sapien
gctaacaacactgccttagatccggaccggaat

SEQ ID NO: 154127 - DNA, 33 bp, Homo sapien
tagtgtagtgacaaagcgaaagaaaagggtagt

SEQ ID NO: 154128 - DNA, 33 bp, Homo sapien
tagtgtagtgacaaagtgaaagaaaagggtagt

SEQ ID NO: 154129 - DNA, 33 bp, Homo sapien
atcaaatttatggtgaaacttggatggaagaaa

SEQ ID NO: 154130 - DNA, 33 bp, Homo sapien
atcaaatttatggtgatacttggatggaagaaa

SEQ ID NO: 154131 - DNA, 33 bp, Homo sapien
actctctaagtccccaaagacactgcttcattt

SEQ ID NO: 154132 - DNA, 33 bp, Homo sapien
actctctaagtccccacagacactgcttcattt

SEQ ID NO: 154133 - DNA, 33 bp, Homo sapien
tgtgagccaaatagatcacttcttatcagcatt

SEQ ID NO: 154134 - DNA, 33 bp, Homo sapien
tgtgagccaaatagattacttcttatcagcatt

SEQ ID NO: 154135 - DNA, 33 bp, Homo sapien
ctagggaatactggggaaacaatttggagctga

SEQ ID NO: 154136 - DNA, 33 bp, Homo sapien
ctagggaatactgggggaacaatttggagctga

SEQ ID NO: 154137 - DNA, 33 bp, Homo sapien
gcaattgatacctatgaagttctcgtatatgca

SEQ ID NO: 154138 - DNA, 33 bp, Homo sapien
gcaattgatacctatggagttctcgtatatgca

SEQ ID NO: 154139 - DNA, 33 bp, Homo sapien
cttaagatcaataggaagcaactaatgtacttt

SEQ ID NO: 154140 - DNA, 33 bp, Homo sapien
cttaagatcaataggaggcaactaatgtacttt

SEQ ID NO: 154141 - DNA, 33 bp, Homo sapien
aatgttcactataccactcatattaaaagccaa

SEQ ID NO: 154142 - DNA, 33 bp, Homo sapien
aatgttcactataccattcatattaaaagccaa

SEQ ID NO: 154143 - DNA, 33 bp, Homo sapien
cagccctctggacaaagaagtaaactcgtgcac

SEQ ID NO: 154144 - DNA, 33 bp, Homo sapien
cagccctctggacaaataagtaaactcgtgcac

SEQ ID NO: 154145 - DNA, 33 bp, Homo sapien
ttgataaccacagcaaaggaaaaagtgcaagcg

SEQ ID NO: 154146 - DNA, 33 bp, Homo sapien
ttgataaccacagcaagggaaaaagtgcaagcg

SEQ ID NO: 154147 - DNA, 33 bp, Homo sapien
tattgtggaaagtagtcaagctttggcggcagc

SEQ ID NO: 154148 - DNA, 33 bp, Homo sapien
tattgtggaaagtagttaagctttggcggcagc

SEQ ID NO: 154149 - DNA, 33 bp, Homo sapien
tggccatattcttccacgttcctaatctcatgt

SEQ ID NO: 154150 - DNA, 33 bp, Homo sapien
tggccatattcttccatgttcctaatctcatgt

SEQ ID NO: 154151 - DNA, 33 bp, Homo sapien
caatctgaagcagcataataggcagatagtagc

SEQ ID NO: 154152 - DNA, 33 bp, Homo sapien
caatctgaagcagcatgataggcagatagtagc

SEQ ID NO: 154153 - DNA, 33 bp, Homo sapien
taggataattcacagacgtaatgtgcccattac

SEQ ID NO: 154154 - DNA, 33 bp, Homo sapien
taggataattcacagatgtaatgtgcccattac

SEQ ID NO: 154155 - DNA, 33 bp, Homo sapien
tgtttaaatgtaattaagttccatacatataca

SEQ ID NO: 154156 - DNA, 33 bp, Homo sapien
tgtttaaatgtaattaggttccatacatataca

SEQ ID NO: 154157 - DNA, 33 bp, Homo sapien
ccttcagaagagagatcaaggtcaagacctcaa

SEQ ID NO: 154158 - DNA, 33 bp, Homo sapien
ccttcagaagagagattaaggtcaagacctcaa

SEQ ID NO: 154159 - DNA, 33 bp, Homo sapien
agatagcccaacttcactctcatcccatcatga

SEQ ID NO: 154160 - DNA, 33 bp, Homo sapien
agatagcccaacttcagtctcatcccatcatga

SEQ ID NO: 154161 - DNA, 33 bp, Homo sapien
acatgacaccaggaacaaacatagaatattctc

SEQ ID NO: 154162 - DNA, 33 bp, Homo sapien
acatgacaccaggaaccaacatagaatattctc

SEQ ID NO: 154163 - DNA, 33 bp, Homo sapien
ttgcaaaaatgccttgaatgagaagtttctctg

SEQ ID NO: 154164 - DNA, 33 bp, Homo sapien
ttgcaaaaatgccttgtatgagaagtttctctg

SEQ ID NO: 154165 - DNA, 33 bp, Homo sapien
caggagttgcctttcacggtaacagtcctagaa

SEQ ID NO: 154166 - DNA, 33 bp, Homo sapien
caggagttgcctttcatggtaacagtcctagaa

SEQ ID NO: 154167 - DNA, 33 bp, Homo sapien
ctcttcttggaattcccagcagatccttactct

SEQ ID NO: 154168 - DNA, 33 bp, Homo sapien
ctcttcttggaattcctagcagatccttactct

SEQ ID NO: 154169 - DNA, 33 bp, Homo sapien
ggagaaacactgctaaacatataataggtgctt

SEQ ID NO: 154170 - DNA, 33 bp, Homo sapien
ggagaaacactgctaagcatataataggtgctt

SEQ ID NO: 154171 - DNA, 33 bp, Homo sapien
agggggatcaggttccaatttactcctgtggcc

SEQ ID NO: 154172 - DNA, 33 bp, Homo sapien
agggggatcaggttccgatttactcctgtggcc

SEQ ID NO: 154173 - DNA, 33 bp, Homo sapien
tgttcacagtttacccaatgggtccttactatc

SEQ ID NO: 154174 - DNA, 33 bp, Homo sapien
tgttcacagtttacccgatgggtccttactatc

SEQ ID NO: 154175 - DNA, 33 bp, Homo sapien
atcctgaaagaattgaagcacctgcagggaata

SEQ ID NO: 154176 - DNA, 33 bp, Homo sapien
atcctgaaagaattgaggcacctgcagggaata

SEQ ID NO: 154177 - DNA, 33 bp, Homo sapien
tgggtattatcacccccgaccccaacaacagga

SEQ ID NO: 154178 - DNA, 33 bp, Homo sapien
tgggtattatcacccctgaccccaacaacagga

SEQ ID NO: 154179 - DNA, 33 bp, Homo sapien
tctgtcaatctgaaaaagagtaactgcaaccta

SEQ ID NO: 154180 - DNA, 33 bp, Homo sapien
tctgtcaatctgaaaacgagtaactgcaaccta

SEQ ID NO: 154181 - DNA, 33 bp, Homo sapien
tgtgtcagtttgaggccgatactaaggtaggag

SEQ ID NO: 154182 - DNA, 33 bp, Homo sapien
tgtgtcagtttgaggctgatactaaggtaggag

SEQ ID NO: 154183 - DNA, 33 bp, Homo sapien
ataaaatatcttcagaacccatgtgccattcag

SEQ ID NO: 154184 - DNA, 33 bp, Homo sapien
ataaaatatcttcagaccccatgtgccattcag

SEQ ID NO: 154185 - DNA, 33 bp, Homo sapien
tctatgatgatggtgaaaaactccatcccttcc

SEQ ID NO: 154186 - DNA, 33 bp, Homo sapien
tctatgatgatggtgacaaactccatcccttcc

SEQ ID NO: 154187 - DNA, 33 bp, Homo sapien
cagacaatgaagaaacagtgccaacgaacacgc

SEQ ID NO: 154188 - DNA, 33 bp, Homo sapien
cagacaatgaagaaaccgtgccaacgaacacgc

SEQ ID NO: 154189 - DNA, 33 bp, Homo sapien
cacgggttcaccaaaacagctcaattccagatc

SEQ ID NO: 154190 - DNA, 33 bp, Homo sapien
cacgggttcaccaaaatagctcaattccagatc

SEQ ID NO: 154191 - DNA, 33 bp, Homo sapien
catgcccatttgtctccacttttccaggctggt

SEQ ID NO: 154192 - DNA, 33 bp, Homo sapien
catgcccatttgtctctacttttccaggctggt

SEQ ID NO: 154193 - DNA, 33 bp, Homo sapien
ctctgaagaaactggcagatgttcaccagaaga

SEQ ID NO: 154194 - DNA, 33 bp, Homo sapien
ctctgaagaaactggcggatgttcaccagaaga

SEQ ID NO: 154195 - DNA, 33 bp, Homo sapien
cctcagaggtttattgaaggtatccactgttag

SEQ ID NO: 154196 - DNA, 33 bp, Homo sapien
cctcagaggtttattgcaggtatccactgttag

SEQ ID NO: 154197 - DNA, 33 bp, Homo sapien
acaagggaagcaagacaatgggcaattggcaat

SEQ ID NO: 154198 - DNA, 33 bp, Homo sapien
acaagggaagcaagacgatgggcaattggcaat

SEQ ID NO: 154199 - DNA, 33 bp, Homo sapien
atagcttcttagcaaccagcttgatctgtgctg

SEQ ID NO: 154200 - DNA, 33 bp, Homo sapien
atagcttcttagcaacgagcttgatctgtgctg

SEQ ID NO: 154201 - DNA, 33 bp, Homo sapien
taacacaaccacctaaatgccttttaattttgc

SEQ ID NO: 154202 - DNA, 33 bp, Homo sapien
taacacaaccacctaagtgccttttaattttgc

SEQ ID NO: 154203 - DNA, 33 bp, Homo sapien
atagccaaccagggggccaccactttatctgtt

SEQ ID NO: 154204 - DNA, 33 bp, Homo sapien
atagccaaccagggggtcaccactttatctgtt

SEQ ID NO: 154205 - DNA, 33 bp, Homo sapien
agtcggtaccttttcacgttactccactgtctg

SEQ ID NO: 154206 - DNA, 33 bp, Homo sapien
agtcggtaccttttcatgttactccactgtctg

SEQ ID NO: 154207 - DNA, 33 bp, Homo sapien
agacaggacagaaggtgaagccatcctgaggac

SEQ ID NO: 154208 - DNA, 33 bp, Homo sapien
agacaggacagaaggttaagccatcctgaggac

SEQ ID NO: 154209 - DNA, 33 bp, Homo sapien
attgtccctgcttgacagataggccagaagttc

SEQ ID NO: 154210 - DNA, 33 bp, Homo sapien
attgtccctgcttgacggataggccagaagttc

SEQ ID NO: 154211 - DNA, 33 bp, Homo sapien
ctcacatctcaaaatccctctatagtttataaa

SEQ ID NO: 154212 - DNA, 33 bp, Homo sapien
ctcacatctcaaaatctctctatagtttataaa

SEQ ID NO: 154213 - DNA, 33 bp, Homo sapien
gagcaggtcagggcaacctgaatgtcttgagcc

SEQ ID NO: 154214 - DNA, 33 bp, Homo sapien
gagcaggtcagggcaatctgaatgtcttgagcc

SEQ ID NO: 154215 - DNA, 33 bp, Homo sapien
atgtattaggtaccatgacaattccattttgaa

SEQ ID NO: 154216 - DNA, 33 bp, Homo sapien
atgtattaggtaccattacaattccattttgaa

SEQ ID NO: 154217 - DNA, 33 bp, Homo sapien
agtcactgttctggccaactttcacctctctag

SEQ ID NO: 154218 - DNA, 33 bp, Homo sapien
agtcactgttctggcccactttcacctctctag

SEQ ID NO: 154219 - DNA, 33 bp, Homo sapien
attttattttagccacagtatattttctgattg

SEQ ID NO: 154220 - DNA, 33 bp, Homo sapien
attttattttagccacggtatattttctgattg

SEQ ID NO: 154221 - DNA, 33 bp, Homo sapien
tccctctgttctaccactacaattttaggaacc

SEQ ID NO: 154222 - DNA, 33 bp, Homo sapien
tccctctgttctaccagtacaattttaggaacc

SEQ ID NO: 154223 - DNA, 33 bp, Homo sapien
gaataaagtgagaaaaacctccacttgtcccta

SEQ ID NO: 154224 - DNA, 33 bp, Homo sapien
gaataaagtgagaaaagcctccacttgtcccta

SEQ ID NO: 154225 - DNA, 33 bp, Homo sapien
gaaagagaaggaacataacaagacagagtggac

SEQ ID NO: 154226 - DNA, 33 bp, Homo sapien
gaaagagaaggaacatgacaagacagagtggac

SEQ ID NO: 154227 - DNA, 33 bp, Homo sapien
ccagagagaaaatgcacgcttcgtctatatatt

SEQ ID NO: 154228 - DNA, 33 bp, Homo sapien
ccagagagaaaatgcatgcttcgtctatatatt

SEQ ID NO: 154229 - DNA, 33 bp, Homo sapien
tctgagttaattttcccaatgacagtttataat

SEQ ID NO: 154230 - DNA, 33 bp, Homo sapien
tctgagttaattttcctaatgacagtttataat

SEQ ID NO: 154231 - DNA, 33 bp, Homo sapien
gtagagcattgggctgaagattaagaatatgag

SEQ ID NO: 154232 - DNA, 33 bp, Homo sapien
gtagagcattgggctgcagattaagaatatgag

SEQ ID NO: 154233 - DNA, 33 bp, Homo sapien
ctccagaactgcatgaaaatgaatttctgttac

SEQ ID NO: 154234 - DNA, 33 bp, Homo sapien
ctccagaactgcatgacaatgaatttctgttac

SEQ ID NO: 154235 - DNA, 33 bp, Homo sapien
ggaacttcagtcttacagctgcaaggaataatt

SEQ ID NO: 154236 - DNA, 33 bp, Homo sapien
ggaacttcagtcttactgctgcaaggaataatt

SEQ ID NO: 154237 - DNA, 33 bp, Homo sapien
agatccctatgaaggcaaatgcagttcctaaga

SEQ ID NO: 154238 - DNA, 33 bp, Homo sapien
agatccctatgaaggccaatgcagttcctaaga

SEQ ID NO: 154239 - DNA, 33 bp, Homo sapien
aaagttttctcatgaaggtagtaaagaaaagcc

SEQ ID NO: 154240 - DNA, 33 bp, Homo sapien
aaagttttctcatgaatgtagtaaagaaaagcc

SEQ ID NO: 154241 - DNA, 33 bp, Homo sapien
caacccaggtctcaaaccatctgtttttgttgc

SEQ ID NO: 154242 - DNA, 33 bp, Homo sapien
caacccaggtctcaaatcatctgtttttgttgc

SEQ ID NO: 154243 - DNA, 33 bp, Homo sapien
agtgtggtattcagaaaaaaatcttgggagcct

SEQ ID NO: 154244 - DNA, 33 bp, Homo sapien
agtgtggtattcagaacaaaatcttgggagcct

SEQ ID NO: 154245 - DNA, 33 bp, Homo sapien
taacgatgcaaaacaggccagagtcagcaaggc

SEQ ID NO: 154246 - DNA, 33 bp, Homo sapien
taacgatgcaaaacagtccagagtcagcaaggc

SEQ ID NO: 154247 - DNA, 33 bp, Homo sapien
ctgacttgtgttaatacgttctaatcttgcaaa

SEQ ID NO: 154248 - DNA, 33 bp, Homo sapien
ctgacttgtgttaatatgttctaatcttgcaaa

SEQ ID NO: 154249 - DNA, 33 bp, Homo sapien
aggcagtgaactggacactttactcacttattg

SEQ ID NO: 154250 - DNA, 33 bp, Homo sapien
aggcagtgaactggacgctttactcacttattg

SEQ ID NO: 154251 - DNA, 33 bp, Homo sapien
ctcatttcttcttcaccctctttcactgacatt

SEQ ID NO: 154252 - DNA, 33 bp, Homo sapien
ctcatttcttcttcactctctttcactgacatt

SEQ ID NO: 154253 - DNA, 33 bp, Homo sapien
atcctgatatgaatacacctttataatgaaact

SEQ ID NO: 154254 - DNA, 33 bp, Homo sapien
atcctgatatgaatacccctttataatgaaact

SEQ ID NO: 154255 - DNA, 33 bp, Homo sapien
tgtcccagaaaaggaaagactgatgctgcccat

SEQ ID NO: 154256 - DNA, 33 bp, Homo sapien
tgtcccagaaaaggaaggactgatgctgcccat

SEQ ID NO: 154257 - DNA, 33 bp, Homo sapien
tggttctgaattaggcaactctgaggccaagtt

SEQ ID NO: 154258 - DNA, 33 bp, Homo sapien
tggttctgaattaggcgactctgaggccaagtt

SEQ ID NO: 154259 - DNA, 33 bp, Homo sapien
attcttcatactggatcataaaggccaacttcc

SEQ ID NO: 154260 - DNA, 33 bp, Homo sapien
attcttcatactggattataaaggccaacttcc

SEQ ID NO: 154261 - DNA, 33 bp, Homo sapien
tgctctctcatttccacatgtttgaatctgctg

SEQ ID NO: 154262 - DNA, 33 bp, Homo sapien
tgctctctcatttccatatgtttgaatctgctg

SEQ ID NO: 154263 - DNA, 33 bp, Homo sapien
ataaagaaaatgccaactaaattctgaacatga

SEQ ID NO: 154264 - DNA, 33 bp, Homo sapien
ataaagaaaatgccaagtaaattctgaacatga

SEQ ID NO: 154265 - DNA, 33 bp, Homo sapien
ccctaagcacctggcaaagaaattggcacataa

SEQ ID NO: 154266 - DNA, 33 bp, Homo sapien
ccctaagcacctggcacagaaattggcacataa

SEQ ID NO: 154267 - DNA, 33 bp, Homo sapien
cttatctgtaagacaaggacaataatacctttg

SEQ ID NO: 154268 - DNA, 33 bp, Homo sapien
cttatctgtaagacaatgacaataatacctttg

SEQ ID NO: 154269 - DNA, 33 bp, Homo sapien
aaagcaatgtgtaagcaaaagtagatctcttaa

SEQ ID NO: 154270 - DNA, 33 bp, Homo sapien
aaagcaatgtgtaagccaaagtagatctcttaa

SEQ ID NO: 154271 - DNA, 33 bp, Homo sapien
atggaaggggaagaaactgtggttatctggctt

SEQ ID NO: 154272 - DNA, 33 bp, Homo sapien
atggaaggggaagaaattgtggttatctggctt

SEQ ID NO: 154273 - DNA, 33 bp, Homo sapien
tgaaacagagtaactgcatgggtggtttctact

SEQ ID NO: 154274 - DNA, 33 bp, Homo sapien
tgaaacagagtaactggatgggtggtttctact

SEQ ID NO: 154275 - DNA, 33 bp, Homo sapien
tgttggattgttttcaaagcatttgtcactctc

SEQ ID NO: 154276 - DNA, 33 bp, Homo sapien
tgttggattgttttcacagcatttgtcactctc

SEQ ID NO: 154277 - DNA, 33 bp, Homo sapien
attgctttgttacaaaaggattatattctgctc

SEQ ID NO: 154278 - DNA, 33 bp, Homo sapien
attgctttgttacaaacggattatattctgctc

SEQ ID NO: 154279 - DNA, 33 bp, Homo sapien
tatattctgctcctagaacgtgacttattcttt

SEQ ID NO: 154280 - DNA, 33 bp, Homo sapien
tatattctgctcctagtacgtgacttattcttt

SEQ ID NO: 154281 - DNA, 33 bp, Homo sapien
ttttaaaagtgttagacggttcacgttattctg

SEQ ID NO: 154282 - DNA, 33 bp, Homo sapien
ttttaaaagtgttagatggttcacgttattctg

SEQ ID NO: 154283 - DNA, 33 bp, Homo sapien
ataaataaataatagacggtgcctgagacttcc

SEQ ID NO: 154284 - DNA, 33 bp, Homo sapien
ataaataaataatagatggtgcctgagacttcc

SEQ ID NO: 154285 - DNA, 33 bp, Homo sapien
ttttttgtttttcagggatggcaattttgaagg

SEQ ID NO: 154286 - DNA, 33 bp, Homo sapien
ttttttgtttttcaggtatggcaattttgaagg

SEQ ID NO: 154287 - DNA, 33 bp, Homo sapien
gttctggagcatcaacaccaggaaaaggaattt

SEQ ID NO: 154288 - DNA, 33 bp, Homo sapien
gttctggagcatcaacgccaggaaaaggaattt

SEQ ID NO: 154289 - DNA, 33 bp, Homo sapien
gattctgagggaaggacactttctctgggccat

SEQ ID NO: 154290 - DNA, 33 bp, Homo sapien
gattctgagggaaggatactttctctgggccat

SEQ ID NO: 154291 - DNA, 33 bp, Homo sapien
ccccaaattcctgcagccaatcgcctgctccat

SEQ ID NO: 154292 - DNA, 33 bp, Homo sapien
ccccaaattcctgcagtcaatcgcctgctccat

SEQ ID NO: 154293 - DNA, 33 bp, Homo sapien
caggaattctatatccagctaaattgtcattca

SEQ ID NO: 154294 - DNA, 33 bp, Homo sapien
caggaattctatatcccgctaaattgtcattca

SEQ ID NO: 154295 - DNA, 33 bp, Homo sapien
agaagaaagaggaaaagaatgcacatttcttat

SEQ ID NO: 154296 - DNA, 33 bp, Homo sapien
agaagaaagaggaaaataatgcacatttcttat

SEQ ID NO: 154297 - DNA, 33 bp, Homo sapien
aagcagatacaaaataagcaaagagagagattt

SEQ ID NO: 154298 - DNA, 33 bp, Homo sapien
aagcagatacaaaatacgcaaagagagagattt

SEQ ID NO: 154299 - DNA, 33 bp, Homo sapien
ttagataagagcttacaggagttacgtgtcaaa

SEQ ID NO: 154300 - DNA, 33 bp, Homo sapien
ttagataagagcttacgggagttacgtgtcaaa

SEQ ID NO: 154301 - DNA, 33 bp, Homo sapien
tgaggcaagaaaaaaacggagtcatctggtctt

SEQ ID NO: 154302 - DNA, 33 bp, Homo sapien
tgaggcaagaaaaaaatggagtcatctggtctt

SEQ ID NO: 154303 - DNA, 33 bp, Homo sapien
cgtgtgaatcagagaaaggaatatgactatagt

SEQ ID NO: 154304 - DNA, 33 bp, Homo sapien
cgtgtgaatcagagaagggaatatgactatagt

SEQ ID NO: 154305 - DNA, 33 bp, Homo sapien
gctgttccctgatccactgatggtagaaataac

SEQ ID NO: 154306 - DNA, 33 bp, Homo sapien
gctgttccctgatccattgatggtagaaataac

SEQ ID NO: 154307 - DNA, 33 bp, Homo sapien
cccacattaagttccactaacctaattaaccag

SEQ ID NO: 154308 - DNA, 33 bp, Homo sapien
cccacattaagttccattaacctaattaaccag

SEQ ID NO: 154309 - DNA, 33 bp, Homo sapien
tcaccagggagataacactcttcaagcaattaa

SEQ ID NO: 154310 - DNA, 33 bp, Homo sapien
tcaccagggagataacgctcttcaagcaattaa

SEQ ID NO: 154311 - DNA, 33 bp, Homo sapien
agactgggtgagagaaagaggaaatattctgat

SEQ ID NO: 154312 - DNA, 33 bp, Homo sapien
agactgggtgagagaacgaggaaatattctgat

SEQ ID NO: 154313 - DNA, 33 bp, Homo sapien
cttaaaaggtctggctaagagatgcttatagat

SEQ ID NO: 154314 - DNA, 33 bp, Homo sapien
cttaaaaggtctggcttagagatgcttatagat

SEQ ID NO: 154315 - DNA, 33 bp, Homo sapien
gaatgagtttgtttacaagaaatgtgtggacat

SEQ ID NO: 154316 - DNA, 33 bp, Homo sapien
gaatgagtttgtttacgagaaatgtgtggacat

SEQ ID NO: 154317 - DNA, 33 bp, Homo sapien
tgggttctgcttttaagtctacatctggggaag

SEQ ID NO: 154318 - DNA, 33 bp, Homo sapien
tgggttctgcttttaattctacatctggggaag

SEQ ID NO: 154319 - DNA, 33 bp, Homo sapien
tattggtcacatcaaacggtgtcagtctgaaaa

SEQ ID NO: 154320 - DNA, 33 bp, Homo sapien
tattggtcacatcaaatggtgtcagtctgaaaa

SEQ ID NO: 154321 - DNA, 33 bp, Homo sapien
ctccagaatgtctcccaagtgtggatttcgcca

SEQ ID NO: 154322 - DNA, 33 bp, Homo sapien
ctccagaatgtctcccgagtgtggatttcgcca

SEQ ID NO: 154323 - DNA, 33 bp, Homo sapien
aagttgcttgtgattacaattctttgccctgcc

SEQ ID NO: 154324 - DNA, 33 bp, Homo sapien
aagttgcttgtgattataattctttgccctgcc

SEQ ID NO: 154325 - DNA, 33 bp, Homo sapien
gagacaaggttggagaactagaaagcagtgctt

SEQ ID NO: 154326 - DNA, 33 bp, Homo sapien
gagacaaggttggagatctagaaagcagtgctt

SEQ ID NO: 154327 - DNA, 33 bp, Homo sapien
tttacaggataaaacacctcagtttcttgtcgt

SEQ ID NO: 154328 - DNA, 33 bp, Homo sapien
tttacaggataaaacatctcagtttcttgtcgt

SEQ ID NO: 154329 - DNA, 33 bp, Homo sapien
gtcctgcactaaaaccagataaatgagaatgat

SEQ ID NO: 154330 - DNA, 33 bp, Homo sapien
gtcctgcactaaaacccgataaatgagaatgat

SEQ ID NO: 154331 - DNA, 33 bp, Homo sapien
tacaaacattctagagaagcacaaatgtgttct

SEQ ID NO: 154332 - DNA, 33 bp, Homo sapien
tacaaacattctagaggagcacaaatgtgttct

SEQ ID NO: 154333 - DNA, 33 bp, Homo sapien
agaaacgagcagataaaataaagagtatatgag

SEQ ID NO: 154334 - DNA, 33 bp, Homo sapien
agaaacgagcagataacataaagagtatatgag

SEQ ID NO: 154335 - DNA, 33 bp, Homo sapien
aaatgaccaaatgaccaaatgactgaaaggtcg

SEQ ID NO: 154336 - DNA, 33 bp, Homo sapien
aaatgaccaaatgaccgaatgactgaaaggtcg

SEQ ID NO: 154337 - DNA, 33 bp, Homo sapien
aaggtctgtaatttcacgtcctgattacacaaa

SEQ ID NO: 154338 - DNA, 33 bp, Homo sapien
aaggtctgtaatttcatgtcctgattacacaaa

SEQ ID NO: 154339 - DNA, 33 bp, Homo sapien
ccagtaagggtccaaggcagctcttggtaagta

SEQ ID NO: 154340 - DNA, 33 bp, Homo sapien
ccagtaagggtccaagtcagctcttggtaagta

SEQ ID NO: 154341 - DNA, 33 bp, Homo sapien
ggattagacagggatgaaaccaccatgggcata

SEQ ID NO: 154342 - DNA, 33 bp, Homo sapien
ggattagacagggatggaaccaccatgggcata

SEQ ID NO: 154343 - DNA, 33 bp, Homo sapien
ccaagatgtgggtgctaaaatgggctagggctt

SEQ ID NO: 154344 - DNA, 33 bp, Homo sapien
ccaagatgtgggtgctgaaatgggctagggctt

SEQ ID NO: 154345 - DNA, 33 bp, Homo sapien
gtaaacagcaagaacgaatcaaatataatcaaa

SEQ ID NO: 154346 - DNA, 33 bp, Homo sapien
gtaaacagcaagaacggatcaaatataatcaaa

SEQ ID NO: 154347 - DNA, 33 bp, Homo sapien
tttttcaagcacatataaaaccgtcaccaagat

SEQ ID NO: 154348 - DNA, 33 bp, Homo sapien
tttttcaagcacatatgaaaccgtcaccaagat

SEQ ID NO: 154349 - DNA, 33 bp, Homo sapien
ttttctgacaagatagaacaaggaaaaaaatga

SEQ ID NO: 154350 - DNA, 33 bp, Homo sapien
ttttctgacaagataggacaaggaaaaaaatga

SEQ ID NO: 154351 - DNA, 33 bp, Homo sapien
tggaaagagccctgaaatagaagcccagaggca

SEQ ID NO: 154352 - DNA, 33 bp, Homo sapien
tggaaagagccctgaagtagaagcccagaggca

SEQ ID NO: 154353 - DNA, 33 bp, Homo sapien
gttctccagcacttctgacccaatgagcacatg

SEQ ID NO: 154354 - DNA, 33 bp, Homo sapien
gttctccagcacttcttacccaatgagcacatg

SEQ ID NO: 154355 - DNA, 33 bp, Homo sapien
gaagagcagtaatagacagaggagtattattag

SEQ ID NO: 154356 - DNA, 33 bp, Homo sapien
gaagagcagtaatagagagaggagtattattag

SEQ ID NO: 154357 - DNA, 33 bp, Homo sapien
gcatatgtgacagcagaaggtatacaggaacta

SEQ ID NO: 154358 - DNA, 33 bp, Homo sapien
gcatatgtgacagcaggaggtatacaggaacta

SEQ ID NO: 154359 - DNA, 33 bp, Homo sapien
catttggggttcttaaatatgtgtaatcatttc

SEQ ID NO: 154360 - DNA, 33 bp, Homo sapien
catttggggttcttaagtatgtgtaatcatttc

SEQ ID NO: 154361 - DNA, 33 bp, Homo sapien
ccagtatggtgcttgacaaatggtaagcacaca

SEQ ID NO: 154362 - DNA, 33 bp, Homo sapien
ccagtatggtgcttgataaatggtaagcacaca

SEQ ID NO: 154363 - DNA, 33 bp, Homo sapien
ggttaatccacattgcggaatgattgagtggcc

SEQ ID NO: 154364 - DNA, 33 bp, Homo sapien
ggttaatccacattgctgaatgattgagtggcc

SEQ ID NO: 154365 - DNA, 33 bp, Homo sapien
cagttttatagaaggacgaggtactcaaaagtc

SEQ ID NO: 154366 - DNA, 33 bp, Homo sapien
cagttttatagaaggatgaggtactcaaaagtc

SEQ ID NO: 154367 - DNA, 33 bp, Homo sapien
cataatgccttcaacaatcatcatgagcctaag

SEQ ID NO: 154368 - DNA, 33 bp, Homo sapien
cataatgccttcaacactcatcatgagcctaag

SEQ ID NO: 154369 - DNA, 33 bp, Homo sapien
gccacagaagagtcagacggagatgcttaatct

SEQ ID NO: 154370 - DNA, 33 bp, Homo sapien
gccacagaagagtcaggcggagatgcttaatct

SEQ ID NO: 154371 - DNA, 33 bp, Homo sapien
aggaaaaccagttaacaaggacctggagaagct

SEQ ID NO: 154372 - DNA, 33 bp, Homo sapien
aggaaaaccagttaacgaggacctggagaagct

SEQ ID NO: 154373 - DNA, 33 bp, Homo sapien
tggggcctaaaatgacaaaatgagggcagagaa

SEQ ID NO: 154374 - DNA, 33 bp, Homo sapien
tggggcctaaaatgacgaaatgagggcagagaa

SEQ ID NO: 154375 - DNA, 33 bp, Homo sapien
tccctccttctgcacaacatatttgcagcaact

SEQ ID NO: 154376 - DNA, 33 bp, Homo sapien
tccctccttctgcacagcatatttgcagcaact

SEQ ID NO: 154377 - DNA, 33 bp, Homo sapien
cagtcagccctggagaccatttccagtgaaggc

SEQ ID NO: 154378 - DNA, 33 bp, Homo sapien
cagtcagccctggagatcatttccagtgaaggc

SEQ ID NO: 154379 - DNA, 33 bp, Homo sapien
tccaggtgctaaccctcaattctcaactgcggg

SEQ ID NO: 154380 - DNA, 33 bp, Homo sapien
tccaggtgctaacccttaattctcaactgcggg

SEQ ID NO: 154381 - DNA, 33 bp, Homo sapien
agaaatgctgcgataaagagtgactacttggtt

SEQ ID NO: 154382 - DNA, 33 bp, Homo sapien
agaaatgctgcgataaggagtgactacttggtt

SEQ ID NO: 154383 - DNA, 33 bp, Homo sapien
actgctctgagtttcaacctgcaccttctgtgg

SEQ ID NO: 154384 - DNA, 33 bp, Homo sapien
actgctctgagtttcagcctgcaccttctgtgg

SEQ ID NO: 154385 - DNA, 33 bp, Homo sapien
atccctcctccaaaaacgtccacgtctgaattc

SEQ ID NO: 154386 - DNA, 33 bp, Homo sapien
atccctcctccaaaaatgtccacgtctgaattc

SEQ ID NO: 154387 - DNA, 33 bp, Homo sapien
aatgattttctctctcccgttcactgctctatc

SEQ ID NO: 154388 - DNA, 33 bp, Homo sapien
aatgattttctctctctcgttcactgctctatc

SEQ ID NO: 154389 - DNA, 33 bp, Homo sapien
cgctggtaaaaggaatgaagtcagtcattcagg

SEQ ID NO: 154390 - DNA, 33 bp, Homo sapien
cgctggtaaaaggaattaagtcagtcattcagg

SEQ ID NO: 154391 - DNA, 33 bp, Homo sapien
ataagtaaatgaatgacgcaaacaaaattggag

SEQ ID NO: 154392 - DNA, 33 bp, Homo sapien
ataagtaaatgaatgatgcaaacaaaattggag

SEQ ID NO: 154393 - DNA, 33 bp, Homo sapien
gcagatactagagccaatgcttactgctctgcg

SEQ ID NO: 154394 - DNA, 33 bp, Homo sapien
gcagatactagagccagtgcttactgctctgcg

SEQ ID NO: 154395 - DNA, 33 bp, Homo sapien
tggttgttggtttaagccactaaagtttgagat

SEQ ID NO: 154396 - DNA, 33 bp, Homo sapien
tggttgttggtttaagtcactaaagtttgagat

SEQ ID NO: 154397 - DNA, 33 bp, Homo sapien
ccaaattagcaaccctaagagtcatcagctaaa

SEQ ID NO: 154398 - DNA, 33 bp, Homo sapien
ccaaattagcaaccctcagagtcatcagctaaa

SEQ ID NO: 154399 - DNA, 33 bp, Homo sapien
tatatttatgcatttaacaacaagtgagcactt

SEQ ID NO: 154400 - DNA, 33 bp, Homo sapien
tatatttatgcatttagcaacaagtgagcactt

SEQ ID NO: 154401 - DNA, 33 bp, Homo sapien
agtttacaatatcaaacgtcaaaaccagtgtga

SEQ ID NO: 154402 - DNA, 33 bp, Homo sapien
agtttacaatatcaaaggtcaaaaccagtgtga

SEQ ID NO: 154403 - DNA, 33 bp, Homo sapien
atccctgtctcagccaggcctcggggtataaat

SEQ ID NO: 154404 - DNA, 33 bp, Homo sapien
atccctgtctcagccatgcctcggggtataaat

SEQ ID NO: 154405 - DNA, 33 bp, Homo sapien
caaccaggcatgtccaactaaatactggtagac

SEQ ID NO: 154406 - DNA, 33 bp, Homo sapien
caaccaggcatgtccagctaaatactggtagac

SEQ ID NO: 154407 - DNA, 33 bp, Homo sapien
agcactgacagggacacggctaggcctcagaca

SEQ ID NO: 154408 - DNA, 33 bp, Homo sapien
agcactgacagggacagggctaggcctcagaca

SEQ ID NO: 154409 - DNA, 33 bp, Homo sapien
tgtaggggagtagagccattgagtcactgggta

SEQ ID NO: 154410 - DNA, 33 bp, Homo sapien
tgtaggggagtagagctattgagtcactgggta

SEQ ID NO: 154411 - DNA, 33 bp, Homo sapien
tccatgactgctgaggccacctgccagaatatc

SEQ ID NO: 154412 - DNA, 33 bp, Homo sapien
tccatgactgctgaggtcacctgccagaatatc

SEQ ID NO: 154413 - DNA, 33 bp, Homo sapien
ggctggaaggttgagactaaggtgacagtagga

SEQ ID NO: 154414 - DNA, 33 bp, Homo sapien
ggctggaaggttgagattaaggtgacagtagga

SEQ ID NO: 154415 - DNA, 33 bp, Homo sapien
gcaacatattctaggacagcagctgatttagta

SEQ ID NO: 154416 - DNA, 33 bp, Homo sapien
gcaacatattctaggatagcagctgatttagta

SEQ ID NO: 154417 - DNA, 33 bp, Homo sapien
ggagaatgtgtcatgcactgcttcctccttgga

SEQ ID NO: 154418 - DNA, 33 bp, Homo sapien
ggagaatgtgtcatgcgctgcttcctccttgga

SEQ ID NO: 154419 - DNA, 33 bp, Homo sapien
ggggaatatggttggcagcaaagagaagctggt

SEQ ID NO: 154420 - DNA, 33 bp, Homo sapien
ggggaatatggttggccgcaaagagaagctggt

SEQ ID NO: 154421 - DNA, 33 bp, Homo sapien
aaaactcatccttctcaaatatgccaaccttta

SEQ ID NO: 154422 - DNA, 33 bp, Homo sapien
aaaactcatccttctcgaatatgccaaccttta

SEQ ID NO: 154423 - DNA, 33 bp, Homo sapien
aaacagaattctaacaagctgatatttttatta

SEQ ID NO: 154424 - DNA, 33 bp, Homo sapien
aaacagaattctaacatgctgatatttttatta

SEQ ID NO: 154425 - DNA, 33 bp, Homo sapien
ttcatacctttgatgaggatcccaggctgcaac

SEQ ID NO: 154426 - DNA, 33 bp, Homo sapien
ttcatacctttgatgatgatcccaggctgcaac

SEQ ID NO: 154427 - DNA, 33 bp, Homo sapien
cttgggttcaagtttacagaaaattcgcttctt

SEQ ID NO: 154428 - DNA, 33 bp, Homo sapien
cttgggttcaagtttatagaaaattcgcttctt

SEQ ID NO: 154429 - DNA, 33 bp, Homo sapien
cccagtttatgcctcaaggaataaattgataga

SEQ ID NO: 154430 - DNA, 33 bp, Homo sapien
cccagtttatgcctcagggaataaattgataga

SEQ ID NO: 154431 - DNA, 33 bp, Homo sapien
agattaaccttgactccctcagctctgtttatc

SEQ ID NO: 154432 - DNA, 33 bp, Homo sapien
agattaaccttgactcgctcagctctgtttatc

SEQ ID NO: 154433 - DNA, 33 bp, Homo sapien
ggaacagaaacaagggaagaggtcattttagta

SEQ ID NO: 154434 - DNA, 33 bp, Homo sapien
ggaacagaaacaaggggagaggtcattttagta

SEQ ID NO: 154435 - DNA, 33 bp, Homo sapien
tgaatgagtgaacaaactctgctacctagttgt

SEQ ID NO: 154436 - DNA, 33 bp, Homo sapien
tgaatgagtgaacaaattctgctacctagttgt

SEQ ID NO: 154437 - DNA, 33 bp, Homo sapien
ttggctgtggatttgacaacccctccttacttc

SEQ ID NO: 154438 - DNA, 33 bp, Homo sapien
ttggctgtggatttgagaacccctccttacttc

SEQ ID NO: 154439 - DNA, 33 bp, Homo sapien
cccagcgatattcacaaggcattgactagttca

SEQ ID NO: 154440 - DNA, 33 bp, Homo sapien
cccagcgatattcacacggcattgactagttca

SEQ ID NO: 154441 - DNA, 33 bp, Homo sapien
gtggctggaaggaacaagacattagagaaagaa

SEQ ID NO: 154442 - DNA, 33 bp, Homo sapien
gtggctggaaggaacacgacattagagaaagaa

SEQ ID NO: 154443 - DNA, 33 bp, Homo sapien
gacttaatcctgttacaatcaatgggatttaca

SEQ ID NO: 154444 - DNA, 33 bp, Homo sapien
gacttaatcctgttactatcaatgggatttaca

SEQ ID NO: 154445 - DNA, 33 bp, Homo sapien
tgaccagtgaatggtacgagatttcaattcatt

SEQ ID NO: 154446 - DNA, 33 bp, Homo sapien
tgaccagtgaatggtatgagatttcaattcatt

SEQ ID NO: 154447 - DNA, 33 bp, Homo sapien
ggagagaactgaagagcagttacttaccctaag

SEQ ID NO: 154448 - DNA, 33 bp, Homo sapien
ggagagaactgaagagtagttacttaccctaag

SEQ ID NO: 154449 - DNA, 33 bp, Homo sapien
tgaacattgagtagacaaagaagacaattccag

SEQ ID NO: 154450 - DNA, 33 bp, Homo sapien
tgaacattgagtagacgaagaagacaattccag

SEQ ID NO: 154451 - DNA, 33 bp, Homo sapien
aaagtccctactctcaaagagctgaatatttag

SEQ ID NO: 154452 - DNA, 33 bp, Homo sapien
aaagtccctactctcagagagctgaatatttag

SEQ ID NO: 154453 - DNA, 33 bp, Homo sapien
gacaaatttaatatcaaagtagtatttggtttg

SEQ ID NO: 154454 - DNA, 33 bp, Homo sapien
gacaaatttaatatcagagtagtatttggtttg

SEQ ID NO: 154455 - DNA, 33 bp, Homo sapien
ctctcagaaaggagtacaccaagcctatgatgg

SEQ ID NO: 154456 - DNA, 33 bp, Homo sapien
ctctcagaaaggagtataccaagcctatgatgg

SEQ ID NO: 154457 - DNA, 33 bp, Homo sapien
atggtggaaatgtttacaagtcaagcctccttt

SEQ ID NO: 154458 - DNA, 33 bp, Homo sapien
atggtggaaatgtttagaagtcaagcctccttt

SEQ ID NO: 154459 - DNA, 33 bp, Homo sapien
gggtccaaatatctcaagcatgaatgagctgaa

SEQ ID NO: 154460 - DNA, 33 bp, Homo sapien
gggtccaaatatctcaggcatgaatgagctgaa

SEQ ID NO: 154461 - DNA, 33 bp, Homo sapien
atctttccctttctgaagctgacacctggttct

SEQ ID NO: 154462 - DNA, 33 bp, Homo sapien
atctttccctttctgaggctgacacctggttct

SEQ ID NO: 154463 - DNA, 33 bp, Homo sapien
cttgttcaaagatgacagaactacaaaaaagaa

SEQ ID NO: 154464 - DNA, 33 bp, Homo sapien
cttgttcaaagatgactgaactacaaaaaagaa

SEQ ID NO: 154465 - DNA, 33 bp, Homo sapien
aaggatctgagagtcacgagaacttggttgcca

SEQ ID NO: 154466 - DNA, 33 bp, Homo sapien
aaggatctgagagtcatgagaacttggttgcca

SEQ ID NO: 154467 - DNA, 33 bp, Homo sapien
cactagagaagcaaacagttgtccacaaaatca

SEQ ID NO: 154468 - DNA, 33 bp, Homo sapien
cactagagaagcaaactgttgtccacaaaatca

SEQ ID NO: 154469 - DNA, 33 bp, Homo sapien
ccccatgtccacataacgcacatactgagacaa

SEQ ID NO: 154470 - DNA, 33 bp, Homo sapien
ccccatgtccacataatgcacatactgagacaa

SEQ ID NO: 154471 - DNA, 33 bp, Homo sapien
tagaacaaagatgtagaaagaaactgaatattg

SEQ ID NO: 154472 - DNA, 33 bp, Homo sapien
tagaacaaagatgtaggaagaaactgaatattg

SEQ ID NO: 154473 - DNA, 33 bp, Homo sapien
ctttacaggagccaaaatactgccttgttgcta

SEQ ID NO: 154474 - DNA, 33 bp, Homo sapien
ctttacaggagccaaagtactgccttgttgcta

SEQ ID NO: 154475 - DNA, 33 bp, Homo sapien
gggctgaaatctttaacgtgtatccaaagcatc

SEQ ID NO: 154476 - DNA, 33 bp, Homo sapien
gggctgaaatctttaaggtgtatccaaagcatc

SEQ ID NO: 154477 - DNA, 33 bp, Homo sapien
aaatactttatgctaacgaaatctccaggccaa

SEQ ID NO: 154478 - DNA, 33 bp, Homo sapien
aaatactttatgctaatgaaatctccaggccaa

SEQ ID NO: 154479 - DNA, 33 bp, Homo sapien
ttctacataacctgcacgaagaaacaagctagt

SEQ ID NO: 154480 - DNA, 33 bp, Homo sapien
ttctacataacctgcatgaagaaacaagctagt

SEQ ID NO: 154481 - DNA, 33 bp, Homo sapien
gtgcttaatataaacacactgaatctcattcag

SEQ ID NO: 154482 - DNA, 33 bp, Homo sapien
gtgcttaatataaacatactgaatctcattcag

SEQ ID NO: 154483 - DNA, 33 bp, Homo sapien
aaaggatacaggtgaactcaagaagctctcaag

SEQ ID NO: 154484 - DNA, 33 bp, Homo sapien
aaaggatacaggtgaattcaagaagctctcaag

SEQ ID NO: 154485 - DNA, 33 bp, Homo sapien
tagtgatagtcctatccaagagttcaaatggtc

SEQ ID NO: 154486 - DNA, 33 bp, Homo sapien
tagtgatagtcctatcgaagagttcaaatggtc

SEQ ID NO: 154487 - DNA, 33 bp, Homo sapien
gactagtggcagcagaaggtgtatattattcca

SEQ ID NO: 154488 - DNA, 33 bp, Homo sapien
gactagtggcagcagagggtgtatattattcca

SEQ ID NO: 154489 - DNA, 33 bp, Homo sapien
tcttaccttcatttaccctttctctgatatcct

SEQ ID NO: 154490 - DNA, 33 bp, Homo sapien
tcttaccttcatttactctttctctgatatcct

SEQ ID NO: 154491 - DNA, 33 bp, Homo sapien
aaagagagtagaattaataattacagtgttaaa

SEQ ID NO: 154492 - DNA, 33 bp, Homo sapien
aaagagagtagaattagtaattacagtgttaaa

SEQ ID NO: 154493 - DNA, 33 bp, Homo sapien
agaaaccatgcaagtacaaagagagtagaatta

SEQ ID NO: 154494 - DNA, 33 bp, Homo sapien
agaaaccatgcaagtagaaagagagtagaatta

SEQ ID NO: 154495 - DNA, 33 bp, Homo sapien
aaaaccaagaatgtgaaccctttgtcgtctggt

SEQ ID NO: 154496 - DNA, 33 bp, Homo sapien
aaaaccaagaatgtgatccctttgtcgtctggt

SEQ ID NO: 154497 - DNA, 33 bp, Homo sapien
agaatatgtgatcaagcagaaccagtttttcca

SEQ ID NO: 154498 - DNA, 33 bp, Homo sapien
agaatatgtgatcaagtagaaccagtttttcca

SEQ ID NO: 154499 - DNA, 33 bp, Homo sapien
tgtattgagcttaaacccaaagcaacttagaaa

SEQ ID NO: 154500 - DNA, 33 bp, Homo sapien
tgtattgagcttaaacgcaaagcaacttagaaa

SEQ ID NO: 154501 - DNA, 33 bp, Homo sapien
ccattcacttcaagcacgtcacctctaattccc

SEQ ID NO: 154502 - DNA, 33 bp, Homo sapien
ccattcacttcaagcatgtcacctctaattccc

SEQ ID NO: 154503 - DNA, 33 bp, Homo sapien
acagcagaggttactacgatagaccgaaaaata

SEQ ID NO: 154504 - DNA, 33 bp, Homo sapien
acagcagaggttactatgatagaccgaaaaata

SEQ ID NO: 154505 - DNA, 33 bp, Homo sapien
ccttcaaacacattggacagaacaaaaccattc

SEQ ID NO: 154506 - DNA, 33 bp, Homo sapien
ccttcaaacacattgggcagaacaaaaccattc

SEQ ID NO: 154507 - DNA, 33 bp, Homo sapien
cattctgccttccttacgtagtctctcaggaac

SEQ ID NO: 154508 - DNA, 33 bp, Homo sapien
cattctgccttccttatgtagtctctcaggaac

SEQ ID NO: 154509 - DNA, 33 bp, Homo sapien
aaaccagtaattatcaagattggaggcaacagg

SEQ ID NO: 154510 - DNA, 33 bp, Homo sapien
aaaccagtaattatcaggattggaggcaacagg

SEQ ID NO: 154511 - DNA, 33 bp, Homo sapien
ccttgaagatttcactaaacaggtaaggccttt

SEQ ID NO: 154512 - DNA, 33 bp, Homo sapien
ccttgaagatttcactgaacaggtaaggccttt

SEQ ID NO: 154513 - DNA, 33 bp, Homo sapien
tcctaaaccctcaccaactaaaactcctcttca

SEQ ID NO: 154514 - DNA, 33 bp, Homo sapien
tcctaaaccctcaccagctaaaactcctcttca

SEQ ID NO: 154515 - DNA, 33 bp, Homo sapien
cccagcgctcaaggagaagatattttctaatat

SEQ ID NO: 154516 - DNA, 33 bp, Homo sapien
cccagcgctcaaggaggagatattttctaatat

SEQ ID NO: 154517 - DNA, 33 bp, Homo sapien
ctgaattgtgagactacggctgttaaacacaga

SEQ ID NO: 154518 - DNA, 33 bp, Homo sapien
ctgaattgtgagactatggctgttaaacacaga

SEQ ID NO: 154519 - DNA, 33 bp, Homo sapien
acccagctctttgaaagataactgataactagt

SEQ ID NO: 154520 - DNA, 33 bp, Homo sapien
acccagctctttgaaatataactgataactagt

SEQ ID NO: 154521 - DNA, 33 bp, Homo sapien
aaaagtcattctgcacaccacatgcaattctga

SEQ ID NO: 154522 - DNA, 33 bp, Homo sapien
aaaagtcattctgcacgccacatgcaattctga

SEQ ID NO: 154523 - DNA, 33 bp, Homo sapien
aaccctgctcttgtcacggttagtttggcactc

SEQ ID NO: 154524 - DNA, 33 bp, Homo sapien
aaccctgctcttgtcatggttagtttggcactc

SEQ ID NO: 154525 - DNA, 33 bp, Homo sapien
tgggagactatgtacacggagttagatgtgaat

SEQ ID NO: 154526 - DNA, 33 bp, Homo sapien
tgggagactatgtacatggagttagatgtgaat

SEQ ID NO: 154527 - DNA, 33 bp, Homo sapien
gaatagactcttctcaacactccttcttatgtg

SEQ ID NO: 154528 - DNA, 33 bp, Homo sapien
gaatagactcttctcatcactccttcttatgtg

SEQ ID NO: 154529 - DNA, 33 bp, Homo sapien
gtgatggttccatttaaccttactccaggaaaa

SEQ ID NO: 154530 - DNA, 33 bp, Homo sapien
gtgatggttccatttacccttactccaggaaaa

SEQ ID NO: 154531 - DNA, 33 bp, Homo sapien
aggaaagcagtagttaggaggaagccaacccct

SEQ ID NO: 154532 - DNA, 33 bp, Homo sapien
aggaaagcagtagttatgaggaagccaacccct

SEQ ID NO: 154533 - DNA, 33 bp, Homo sapien
aagacagagctctgagaagcacatttgatgaat

SEQ ID NO: 154534 - DNA, 33 bp, Homo sapien
aagacagagctctgagtagcacatttgatgaat

SEQ ID NO: 154535 - DNA, 33 bp, Homo sapien
tggatactaaaagttacattcctgcctcctcaa

SEQ ID NO: 154536 - DNA, 33 bp, Homo sapien
tggatactaaaagttagattcctgcctcctcaa

SEQ ID NO: 154537 - DNA, 33 bp, Homo sapien
cagtcagaattctcacaaccaaactctgcttgg

SEQ ID NO: 154538 - DNA, 33 bp, Homo sapien
cagtcagaattctcaccaccaaactctgcttgg

SEQ ID NO: 154539 - DNA, 33 bp, Homo sapien
cagacaccacctcttccactccgtactctcctg

SEQ ID NO: 154540 - DNA, 33 bp, Homo sapien
cagacaccacctcttctactccgtactctcctg

SEQ ID NO: 154541 - DNA, 33 bp, Homo sapien
tcaaagatgaagggccgatgatctcaagttcat

SEQ ID NO: 154542 - DNA, 33 bp, Homo sapien
tcaaagatgaagggcctatgatctcaagttcat

SEQ ID NO: 154543 - DNA, 33 bp, Homo sapien
ataagattctcaaaatcactgaaagtacttact

SEQ ID NO: 154544 - DNA, 33 bp, Homo sapien
ataagattctcaaaatgactgaaagtacttact

SEQ ID NO: 154545 - DNA, 33 bp, Homo sapien
taaaatacattttaaagatcttttcacctacat

SEQ ID NO: 154546 - DNA, 33 bp, Homo sapien
taaaatacattttaaatatcttttcacctacat

SEQ ID NO: 154547 - DNA, 33 bp, Homo sapien
gtggctcagaggctgactcacgcgattgttacg

SEQ ID NO: 154548 - DNA, 33 bp, Homo sapien
gtggctcagaggctgattcacgcgattgttacg

SEQ ID NO: 154549 - DNA, 33 bp, Homo sapien
catcatggcttttgaaatgtaagatggagtctt

SEQ ID NO: 154550 - DNA, 33 bp, Homo sapien
catcatggcttttgaattgtaagatggagtctt

SEQ ID NO: 154551 - DNA, 33 bp, Homo sapien
taaaagcattgaaaaacgatctttagcaatcaa

SEQ ID NO: 154552 - DNA, 33 bp, Homo sapien
taaaagcattgaaaaatgatctttagcaatcaa

SEQ ID NO: 154553 - DNA, 33 bp, Homo sapien
agtttcccattcaaagacaatataggcataaaa

SEQ ID NO: 154554 - DNA, 33 bp, Homo sapien
agtttcccattcaaaggcaatataggcataaaa

SEQ ID NO: 154555 - DNA, 33 bp, Homo sapien
gaatcctcgattctagacctgtttttctcacta

SEQ ID NO: 154556 - DNA, 33 bp, Homo sapien
gaatcctcgattctagtcctgtttttctcacta

SEQ ID NO: 154557 - DNA, 33 bp, Homo sapien
gtttctagcacatggaagtttttctgcaaaagt

SEQ ID NO: 154558 - DNA, 33 bp, Homo sapien
gtttctagcacatggaggtttttctgcaaaagt

SEQ ID NO: 154559 - DNA, 33 bp, Homo sapien
tgatccaatgaagttacgtttaaatttgttgac

SEQ ID NO: 154560 - DNA, 33 bp, Homo sapien
tgatccaatgaagttaggtttaaatttgttgac

SEQ ID NO: 154561 - DNA, 33 bp, Homo sapien
ctcatcttgtagactccgagccacactttgtag

SEQ ID NO: 154562 - DNA, 33 bp, Homo sapien
ctcatcttgtagactctgagccacactttgtag

SEQ ID NO: 154563 - DNA, 33 bp, Homo sapien
catctaacgcctaatgcattgttttcttccctg

SEQ ID NO: 154564 - DNA, 33 bp, Homo sapien
catctaacgcctaatgtattgttttcttccctg

SEQ ID NO: 154565 - DNA, 33 bp, Homo sapien
gtgatggagtttcaggcaatgttgcaaggtaat

SEQ ID NO: 154566 - DNA, 33 bp, Homo sapien
gtgatggagtttcaggtaatgttgcaaggtaat

SEQ ID NO: 154567 - DNA, 33 bp, Homo sapien
cagcccctctctattcccttgctctgatgcatt

SEQ ID NO: 154568 - DNA, 33 bp, Homo sapien
cagcccctctctattctcttgctctgatgcatt

SEQ ID NO: 154569 - DNA, 33 bp, Homo sapien
gcccttccctctttatcagccacgtgaacacat

SEQ ID NO: 154570 - DNA, 33 bp, Homo sapien
gcccttccctctttattagccacgtgaacacat

SEQ ID NO: 154571 - DNA, 33 bp, Homo sapien
accagctcaggtacacacaagtgacagctcaag

SEQ ID NO: 154572 - DNA, 33 bp, Homo sapien
accagctcaggtacacgcaagtgacagctcaag

SEQ ID NO: 154573 - DNA, 33 bp, Homo sapien
gaatgtgtcttcaacaatatgtgggtttcttaa

SEQ ID NO: 154574 - DNA, 33 bp, Homo sapien
gaatgtgtcttcaacagtatgtgggtttcttaa

SEQ ID NO: 154575 - DNA, 33 bp, Homo sapien
ctgtggtattcaggcacccttgcctttcggctg

SEQ ID NO: 154576 - DNA, 33 bp, Homo sapien
ctgtggtattcaggcatccttgcctttcggctg

SEQ ID NO: 154577 - DNA, 33 bp, Homo sapien
tgctgaataaatggcccactggcgcatgtcacc

SEQ ID NO: 154578 - DNA, 33 bp, Homo sapien
tgctgaataaatggcctactggcgcatgtcacc

SEQ ID NO: 154579 - DNA, 33 bp, Homo sapien
tggataatctataaaactcaagcaatgtataaa

SEQ ID NO: 154580 - DNA, 33 bp, Homo sapien
tggataatctataaaattcaagcaatgtataaa

SEQ ID NO: 154581 - DNA, 33 bp, Homo sapien
ctagttttaggaattccaggagtcactttgttc

SEQ ID NO: 154582 - DNA, 33 bp, Homo sapien
ctagttttaggaattctaggagtcactttgttc

SEQ ID NO: 154583 - DNA, 33 bp, Homo sapien
agcaaaacctgcccaaagtagctgctatttctg

SEQ ID NO: 154584 - DNA, 33 bp, Homo sapien
agcaaaacctgcccaaggtagctgctatttctg

SEQ ID NO: 154585 - DNA, 33 bp, Homo sapien
tgagaaaaggcagaaggagatttaacagacacg

SEQ ID NO: 154586 - DNA, 33 bp, Homo sapien
tgagaaaaggcagaagtagatttaacagacacg

SEQ ID NO: 154587 - DNA, 33 bp, Homo sapien
agatggtcctgaagacaaaggagcagaaggtag

SEQ ID NO: 154588 - DNA, 33 bp, Homo sapien
agatggtcctgaagacgaaggagcagaaggtag

SEQ ID NO: 154589 - DNA, 33 bp, Homo sapien
ctggcagtaaggcgcccataaactctgaaaagc

SEQ ID NO: 154590 - DNA, 33 bp, Homo sapien
ctggcagtaaggcgccgataaactctgaaaagc

SEQ ID NO: 154591 - DNA, 33 bp, Homo sapien
agggatcaccagaaaggagcaatagctagttgg

SEQ ID NO: 154592 - DNA, 33 bp, Homo sapien
agggatcaccagaaagtagcaatagctagttgg

SEQ ID NO: 154593 - DNA, 33 bp, Homo sapien
gcttcctcgttagcaaactgagaaaaacaatgc

SEQ ID NO: 154594 - DNA, 33 bp, Homo sapien
gcttcctcgttagcaacctgagaaaaacaatgc

SEQ ID NO: 154595 - DNA, 33 bp, Homo sapien
aattaaatatattctaactcaagtgtcaatcag

SEQ ID NO: 154596 - DNA, 33 bp, Homo sapien
aattaaatatattctacctcaagtgtcaatcag

SEQ ID NO: 154597 - DNA, 33 bp, Homo sapien
ctgtgtttagaattagaaaacacaagtgcatgt

SEQ ID NO: 154598 - DNA, 33 bp, Homo sapien
ctgtgtttagaattaggaaacacaagtgcatgt

SEQ ID NO: 154599 - DNA, 33 bp, Homo sapien
agcagttgagactccaagaactgtcatctacgt

SEQ ID NO: 154600 - DNA, 33 bp, Homo sapien
agcagttgagactccatgaactgtcatctacgt

SEQ ID NO: 154601 - DNA, 33 bp, Homo sapien
cttcctctttggtccacgtaatgactccttctc

SEQ ID NO: 154602 - DNA, 33 bp, Homo sapien
cttcctctttggtccaggtaatgactccttctc

SEQ ID NO: 154603 - DNA, 33 bp, Homo sapien
aaaactcagtgacataccttgctcagtagtttc

SEQ ID NO: 154604 - DNA, 33 bp, Homo sapien
aaaactcagtgacatatcttgctcagtagtttc

SEQ ID NO: 154605 - DNA, 33 bp, Homo sapien
tggaatgaacatctacagagatagcaaagacat

SEQ ID NO: 154606 - DNA, 33 bp, Homo sapien
tggaatgaacatctacggagatagcaaagacat

SEQ ID NO: 154607 - DNA, 33 bp, Homo sapien
catagctggtttcaaagaggcccttaccaattc

SEQ ID NO: 154608 - DNA, 33 bp, Homo sapien
catagctggtttcaaataggcccttaccaattc

SEQ ID NO: 154609 - DNA, 33 bp, Homo sapien
tgtatgattgttgagaagatccaatgaggcaac

SEQ ID NO: 154610 - DNA, 33 bp, Homo sapien
tgtatgattgttgagaggatccaatgaggcaac

SEQ ID NO: 154611 - DNA, 33 bp, Homo sapien
cactagctgaccattccatctggtgcttttttg

SEQ ID NO: 154612 - DNA, 33 bp, Homo sapien
cactagctgaccattctatctggtgcttttttg

SEQ ID NO: 154613 - DNA, 33 bp, Homo sapien
acagactgagaacttccataattaaaggtaaag

SEQ ID NO: 154614 - DNA, 33 bp, Homo sapien
acagactgagaacttctataattaaaggtaaag

SEQ ID NO: 154615 - DNA, 33 bp, Homo sapien
ctgttcctcagaaaaaagtagaaactggtaaag

SEQ ID NO: 154616 - DNA, 33 bp, Homo sapien
ctgttcctcagaaaaaggtagaaactggtaaag

SEQ ID NO: 154617 - DNA, 33 bp, Homo sapien
tctctgtccactccaactgtgttagtagcttat

SEQ ID NO: 154618 - DNA, 33 bp, Homo sapien
tctctgtccactccaattgtgttagtagcttat

SEQ ID NO: 154619 - DNA, 33 bp, Homo sapien
atgaagataatgtaatcagtgaaagcactttgt

SEQ ID NO: 154620 - DNA, 33 bp, Homo sapien
atgaagataatgtaattagtgaaagcactttgt

SEQ ID NO: 154621 - DNA, 33 bp, Homo sapien
agctgggatgaaaacaatgctaaattaatgcat

SEQ ID NO: 154622 - DNA, 33 bp, Homo sapien
agctgggatgaaaacagtgctaaattaatgcat

SEQ ID NO: 154623 - DNA, 33 bp, Homo sapien
tgaaagtatttgaaaactgcctaatatttctgt

SEQ ID NO: 154624 - DNA, 33 bp, Homo sapien
tgaaagtatttgaaaagtgcctaatatttctgt

SEQ ID NO: 154625 - DNA, 33 bp, Homo sapien
aatccaacaaaggcaaacaatttagtcagctca

SEQ ID NO: 154626 - DNA, 33 bp, Homo sapien
aatccaacaaaggcaaccaatttagtcagctca

SEQ ID NO: 154627 - DNA, 33 bp, Homo sapien
tatgaggaaagtctataaagggaacacatatga

SEQ ID NO: 154628 - DNA, 33 bp, Homo sapien
tatgaggaaagtctatgaagggaacacatatga

SEQ ID NO: 154629 - DNA, 33 bp, Homo sapien
aaaatatatttcaaaaggttctctacgatatag

SEQ ID NO: 154630 - DNA, 33 bp, Homo sapien
aaaatatatttcaaaatgttctctacgatatag

SEQ ID NO: 154631 - DNA, 33 bp, Homo sapien
tgacaaaattgccaaaagattcatttctcagaa

SEQ ID NO: 154632 - DNA, 33 bp, Homo sapien
tgacaaaattgccaaaggattcatttctcagaa

SEQ ID NO: 154633 - DNA, 33 bp, Homo sapien
catgaagaaaaggaaacggccaattgatcaaag

SEQ ID NO: 154634 - DNA, 33 bp, Homo sapien
catgaagaaaaggaaagggccaattgatcaaag

SEQ ID NO: 154635 - DNA, 33 bp, Homo sapien
atagtctgaagaaaacggctagcaataaatgat

SEQ ID NO: 154636 - DNA, 33 bp, Homo sapien
atagtctgaagaaaactgctagcaataaatgat

SEQ ID NO: 154637 - DNA, 33 bp, Homo sapien
ttatatgagcatagaaattatttactgtcttat

SEQ ID NO: 154638 - DNA, 33 bp, Homo sapien
ttatatgagcatagaatttatttactgtcttat

SEQ ID NO: 154639 - DNA, 33 bp, Homo sapien
cacaaatggaaatcaaactttcataaaaattga

SEQ ID NO: 154640 - DNA, 33 bp, Homo sapien
cacaaatggaaatcaagctttcataaaaattga

SEQ ID NO: 154641 - DNA, 33 bp, Homo sapien
ttgatttatgtggctaaattagttatgtggcct

SEQ ID NO: 154642 - DNA, 33 bp, Homo sapien
ttgatttatgtggctagattagttatgtggcct

SEQ ID NO: 154643 - DNA, 33 bp, Homo sapien
tatggtggccacggaacttcagaagtagccaac

SEQ ID NO: 154644 - DNA, 33 bp, Homo sapien
tatggtggccacggaatttcagaagtagccaac

SEQ ID NO: 154645 - DNA, 33 bp, Homo sapien
ttgttatgatgattcaataaagtacaatcatcc

SEQ ID NO: 154646 - DNA, 33 bp, Homo sapien
ttgttatgatgattcagtaaagtacaatcatcc

SEQ ID NO: 154647 - DNA, 33 bp, Homo sapien
ccacaagaaaagtgcaaatcaagtgttaaggat

SEQ ID NO: 154648 - DNA, 33 bp, Homo sapien
ccacaagaaaagtgcagatcaagtgttaaggat

SEQ ID NO: 154649 - DNA, 33 bp, Homo sapien
ggggccagatcatgtacgtcttatataccatga

SEQ ID NO: 154650 - DNA, 33 bp, Homo sapien
ggggccagatcatgtaggtcttatataccatga

SEQ ID NO: 154651 - DNA, 33 bp, Homo sapien
taaacttctgcttcacagactacaatggcaagc

SEQ ID NO: 154652 - DNA, 33 bp, Homo sapien
taaacttctgcttcactgactacaatggcaagc

SEQ ID NO: 154653 - DNA, 33 bp, Homo sapien
atattatcatatcataactagtgagtaaatgga

SEQ ID NO: 154654 - DNA, 33 bp, Homo sapien
atattatcatatcatagctagtgagtaaatgga

SEQ ID NO: 154655 - DNA, 33 bp, Homo sapien
tggagcaagtaattcacgatcacttgactagca

SEQ ID NO: 154656 - DNA, 33 bp, Homo sapien
tggagcaagtaattcatgatcacttgactagca

SEQ ID NO: 154657 - DNA, 33 bp, Homo sapien
cagaggtgtcaactgtcaaccaatgcagaaatg

SEQ ID NO: 154658 - DNA, 33 bp, Homo sapien
cagaggtgtcaactgtgaaccaatgcagaaatg

SEQ ID NO: 154659 - DNA, 33 bp, Homo sapien
gtaaagtgacggtacaactcccagctgctttta

SEQ ID NO: 154660 - DNA, 33 bp, Homo sapien
gtaaagtgacggtacatctcccagctgctttta

SEQ ID NO: 154661 - DNA, 33 bp, Homo sapien
acagctcttttaactaagcaagggaaatggtct

SEQ ID NO: 154662 - DNA, 33 bp, Homo sapien
acagctcttttaactaggcaagggaaatggtct

SEQ ID NO: 154663 - DNA, 33 bp, Homo sapien
taaaacacataatttcaactgtctttaaaaagc

SEQ ID NO: 154664 - DNA, 33 bp, Homo sapien
taaaacacataatttcgactgtctttaaaaagc

SEQ ID NO: 154665 - DNA, 33 bp, Homo sapien
ggttagcttctatttacggcaggtgattttaat

SEQ ID NO: 154666 - DNA, 33 bp, Homo sapien
ggttagcttctatttatggcaggtgattttaat

SEQ ID NO: 154667 - DNA, 33 bp, Homo sapien
acatacaaagaggatacatgattgacccaaaat

SEQ ID NO: 154668 - DNA, 33 bp, Homo sapien
acatacaaagaggatatatgattgacccaaaat

SEQ ID NO: 154669 - DNA, 33 bp, Homo sapien
atctggcaagaaaagagctaagaccagggagaa

SEQ ID NO: 154670 - DNA, 33 bp, Homo sapien
atctggcaagaaaagatctaagaccagggagaa

SEQ ID NO: 154671 - DNA, 33 bp, Homo sapien
acactggtgatgtcgaccgaacaaaatggatgt

SEQ ID NO: 154672 - DNA, 33 bp, Homo sapien
acactggtgatgtcgatcgaacaaaatggatgt

SEQ ID NO: 154673 - DNA, 33 bp, Homo sapien
tggtgacatgaactacactgtaaacttgacatt

SEQ ID NO: 154674 - DNA, 33 bp, Homo sapien
tggtgacatgaactacgctgtaaacttgacatt

SEQ ID NO: 154675 - DNA, 33 bp, Homo sapien
caggttagcaagttgacagtaaaataggttaaa

SEQ ID NO: 154676 - DNA, 33 bp, Homo sapien
caggttagcaagttgagagtaaaataggttaaa

SEQ ID NO: 154677 - DNA, 33 bp, Homo sapien
aaaaacatctgttgtgacaatcttttttacaag

SEQ ID NO: 154678 - DNA, 33 bp, Homo sapien
aaaaacatctgttgtgtcaatcttttttacaag

SEQ ID NO: 154679 - DNA, 33 bp, Homo sapien
tccgtaaggattgacaaagttgatgcgtgatca

SEQ ID NO: 154680 - DNA, 33 bp, Homo sapien
tccgtaaggattgacagagttgatgcgtgatca

SEQ ID NO: 154681 - DNA, 33 bp, Homo sapien
cttttggatcaaaaaagatcagtaatataactc

SEQ ID NO: 154682 - DNA, 33 bp, Homo sapien
cttttggatcaaaaaatatcagtaatataactc

SEQ ID NO: 154683 - DNA, 33 bp, Homo sapien
tgtggcacatctgaagacctcctgggcaataag

SEQ ID NO: 154684 - DNA, 33 bp, Homo sapien
tgtggcacatctgaaggcctcctgggcaataag

SEQ ID NO: 154685 - DNA, 33 bp, Homo sapien
atagagcctgcctgcaataagagtgaatgaagc

SEQ ID NO: 154686 - DNA, 33 bp, Homo sapien
atagagcctgcctgcagtaagagtgaatgaagc

SEQ ID NO: 154687 - DNA, 33 bp, Homo sapien
caaactccacatacaagggtagtcttgcataag

SEQ ID NO: 154688 - DNA, 33 bp, Homo sapien
caaactccacatacaatggtagtcttgcataag

SEQ ID NO: 154689 - DNA, 33 bp, Homo sapien
tttacactgggttgtgaagtcgtctctcaaata

SEQ ID NO: 154690 - DNA, 33 bp, Homo sapien
tttacactgggttgtgtagtcgtctctcaaata

SEQ ID NO: 154691 - DNA, 33 bp, Homo sapien
cattgttgcagccttacaataagttttgaaatc

SEQ ID NO: 154692 - DNA, 33 bp, Homo sapien
cattgttgcagccttataataagttttgaaatc

SEQ ID NO: 154693 - DNA, 33 bp, Homo sapien
ttatctgttgcaacaaatctaccactctgttat

SEQ ID NO: 154694 - DNA, 33 bp, Homo sapien
ttatctgttgcaacaattctaccactctgttat

SEQ ID NO: 154695 - DNA, 33 bp, Homo sapien
caactgcaatgacatacgacttcacatctgcta

SEQ ID NO: 154696 - DNA, 33 bp, Homo sapien
caactgcaatgacatatgacttcacatctgcta

SEQ ID NO: 154697 - DNA, 33 bp, Homo sapien
cataataataaggtgagaatttgttacacaaag

SEQ ID NO: 154698 - DNA, 33 bp, Homo sapien
cataataataaggtgataatttgttacacaaag

SEQ ID NO: 154699 - DNA, 33 bp, Homo sapien
tctgagggtagtaaccaaaacaagtacagtgaa

SEQ ID NO: 154700 - DNA, 33 bp, Homo sapien
tctgagggtagtaaccgaaacaagtacagtgaa

SEQ ID NO: 154701 - DNA, 33 bp, Homo sapien
gcacaataagagcactaaaaaatctgatgaaaa

SEQ ID NO: 154702 - DNA, 33 bp, Homo sapien
gcacaataagagcactgaaaaatctgatgaaaa

SEQ ID NO: 154703 - DNA, 33 bp, Homo sapien
aacacagcattttatagcttcttctactattgt

SEQ ID NO: 154704 - DNA, 33 bp, Homo sapien
aacacagcattttatatcttcttctactattgt

SEQ ID NO: 154705 - DNA, 33 bp, Homo sapien
tttttaggactatgtacattgggcacataagac

SEQ ID NO: 154706 - DNA, 33 bp, Homo sapien
tttttaggactatgtatattgggcacataagac

SEQ ID NO: 154707 - DNA, 33 bp, Homo sapien
tttttctttgatttcaagtagaagaggtagaca

SEQ ID NO: 154708 - DNA, 33 bp, Homo sapien
tttttctttgatttcaggtagaagaggtagaca

SEQ ID NO: 154709 - DNA, 33 bp, Homo sapien
tacagctactcagttacacttaaactcaagaca

SEQ ID NO: 154710 - DNA, 33 bp, Homo sapien
tacagctactcagttatacttaaactcaagaca

SEQ ID NO: 154711 - DNA, 33 bp, Homo sapien
tgttctaaactaaaggacagtgttttttatgat

SEQ ID NO: 154712 - DNA, 33 bp, Homo sapien
tgttctaaactaaagggcagtgttttttatgat

SEQ ID NO: 154713 - DNA, 33 bp, Homo sapien
tttacgcattgttatggacttgttggactatgt

SEQ ID NO: 154714 - DNA, 33 bp, Homo sapien
tttacgcattgttatgtacttgttggactatgt

SEQ ID NO: 154715 - DNA, 33 bp, Homo sapien
tgtgaatcaaaatggcacaatggctaaaatttc

SEQ ID NO: 154716 - DNA, 33 bp, Homo sapien
tgtgaatcaaaatggcgcaatggctaaaatttc

SEQ ID NO: 154717 - DNA, 33 bp, Homo sapien
aaagtcgcggcttccacgaacctattgatgatg

SEQ ID NO: 154718 - DNA, 33 bp, Homo sapien
aaagtcgcggcttccatgaacctattgatgatg

SEQ ID NO: 154719 - DNA, 33 bp, Homo sapien
aggcatagcaaaaagagcattgaacacaataaa

SEQ ID NO: 154720 - DNA, 33 bp, Homo sapien
aggcatagcaaaaagatcattgaacacaataaa

SEQ ID NO: 154721 - DNA, 33 bp, Homo sapien
acacacatacaatagacgttctaatcaaagtct

SEQ ID NO: 154722 - DNA, 33 bp, Homo sapien
acacacatacaatagatgttctaatcaaagtct

SEQ ID NO: 154723 - DNA, 33 bp, Homo sapien
ctgtgagggatgtttacgtgaagactaatttta

SEQ ID NO: 154724 - DNA, 33 bp, Homo sapien
ctgtgagggatgtttatgtgaagactaatttta

SEQ ID NO: 154725 - DNA, 33 bp, Homo sapien
gaaatgattactaaaacgaactaagtccaaacc

SEQ ID NO: 154726 - DNA, 33 bp, Homo sapien
gaaatgattactaaaatgaactaagtccaaacc

SEQ ID NO: 154727 - DNA, 33 bp, Homo sapien
acagtttgaatgaagcaagaggtcttatttaca

SEQ ID NO: 154728 - DNA, 33 bp, Homo sapien
acagtttgaatgaagcgagaggtcttatttaca

SEQ ID NO: 154729 - DNA, 33 bp, Homo sapien
gaagagtttctgtgtaacaatgtaacaatattc

SEQ ID NO: 154730 - DNA, 33 bp, Homo sapien
gaagagtttctgtgtatcaatgtaacaatattc

SEQ ID NO: 154731 - DNA, 33 bp, Homo sapien
ttactatcagtcattacgtagaatttccccttt

SEQ ID NO: 154732 - DNA, 33 bp, Homo sapien
ttactatcagtcattatgtagaatttccccttt

SEQ ID NO: 154733 - DNA, 33 bp, Homo sapien
agtatgacattttagaagattccactaccttct

SEQ ID NO: 154734 - DNA, 33 bp, Homo sapien
agtatgacattttagaggattccactaccttct

SEQ ID NO: 154735 - DNA, 33 bp, Homo sapien
aatactttaaatgtcaactagtaattggatggg

SEQ ID NO: 154736 - DNA, 33 bp, Homo sapien
aatactttaaatgtcagctagtaattggatggg

SEQ ID NO: 154737 - DNA, 33 bp, Homo sapien
acgtatgtaacaaacacgtacacttgaatgtaa

SEQ ID NO: 154738 - DNA, 33 bp, Homo sapien
acgtatgtaacaaacatgtacacttgaatgtaa

SEQ ID NO: 154739 - DNA, 33 bp, Homo sapien
aagcctgtataatgagcaaatttgatgtatgaa

SEQ ID NO: 154740 - DNA, 33 bp, Homo sapien
aagcctgtataatgagtaaatttgatgtatgaa

SEQ ID NO: 154741 - DNA, 33 bp, Homo sapien
gctaccttttatagggaattatctggagaggac

SEQ ID NO: 154742 - DNA, 33 bp, Homo sapien
gctaccttttatagggtattatctggagaggac

SEQ ID NO: 154743 - DNA, 33 bp, Homo sapien
agtgctaggtccttgacaaaatctccacaaatt

SEQ ID NO: 154744 - DNA, 33 bp, Homo sapien
agtgctaggtccttgataaaatctccacaaatt

SEQ ID NO: 154745 - DNA, 33 bp, Homo sapien
ttctaaaataccatcaacaactgtacaatactg

SEQ ID NO: 154746 - DNA, 33 bp, Homo sapien
ttctaaaataccatcatcaactgtacaatactg

SEQ ID NO: 154747 - DNA, 33 bp, Homo sapien
attgtgactcaggccacgtaatttgatcagagt

SEQ ID NO: 154748 - DNA, 33 bp, Homo sapien
attgtgactcaggccaggtaatttgatcagagt

SEQ ID NO: 154749 - DNA, 33 bp, Homo sapien
tgttggagcactgttaagtactattgtgggaga

SEQ ID NO: 154750 - DNA, 33 bp, Homo sapien
tgttggagcactgttaggtactattgtgggaga

SEQ ID NO: 154751 - DNA, 33 bp, Homo sapien
atggccagctgtgaagcaatttgaaatatctag

SEQ ID NO: 154752 - DNA, 33 bp, Homo sapien
atggccagctgtgaagtaatttgaaatatctag

SEQ ID NO: 154753 - DNA, 33 bp, Homo sapien
gtgtatgctcattggacagctggcagttttaag

SEQ ID NO: 154754 - DNA, 33 bp, Homo sapien
gtgtatgctcattggatagctggcagttttaag

SEQ ID NO: 154755 - DNA, 33 bp, Homo sapien
acttagttttaattacagccactagtattctga

SEQ ID NO: 154756 - DNA, 33 bp, Homo sapien
acttagttttaattacggccactagtattctga

SEQ ID NO: 154757 - DNA, 33 bp, Homo sapien
tctttctttccttaaaactaaggcaggctggtg

SEQ ID NO: 154758 - DNA, 33 bp, Homo sapien
tctttctttccttaaagctaaggcaggctggtg

SEQ ID NO: 154759 - DNA, 33 bp, Homo sapien
agacgcttctaccactgacttcatttcctcagg

SEQ ID NO: 154760 - DNA, 33 bp, Homo sapien
agacgcttctaccacttacttcatttcctcagg

SEQ ID NO: 154761 - DNA, 33 bp, Homo sapien
acaccttactaagaaaccttcccatggccatga

SEQ ID NO: 154762 - DNA, 33 bp, Homo sapien
acaccttactaagaaatcttcccatggccatga

SEQ ID NO: 154763 - DNA, 33 bp, Homo sapien
tcatttgttgtggaaactgttcaaccacttaga

SEQ ID NO: 154764 - DNA, 33 bp, Homo sapien
tcatttgttgtggaaattgttcaaccacttaga

SEQ ID NO: 154765 - DNA, 33 bp, Homo sapien
acacatgggcacagtcaagatggcagtacctga

SEQ ID NO: 154766 - DNA, 33 bp, Homo sapien
acacatgggcacagtcgagatggcagtacctga

SEQ ID NO: 154767 - DNA, 33 bp, Homo sapien
gtatagagcagacgtacagaaaaaactaaggca

SEQ ID NO: 154768 - DNA, 33 bp, Homo sapien
gtatagagcagacgtatagaaaaaactaaggca

SEQ ID NO: 154769 - DNA, 33 bp, Homo sapien
cagttttcttttgggccgacctacttttagtga

SEQ ID NO: 154770 - DNA, 33 bp, Homo sapien
cagttttcttttgggctgacctacttttagtga

SEQ ID NO: 154771 - DNA, 33 bp, Homo sapien
aagatgaagctgtgaaagaaaatttggccacat

SEQ ID NO: 154772 - DNA, 33 bp, Homo sapien
aagatgaagctgtgaaggaaaatttggccacat

SEQ ID NO: 154773 - DNA, 33 bp, Homo sapien
tgttgatttgtgtaaactcgtcatagattctgg

SEQ ID NO: 154774 - DNA, 33 bp, Homo sapien
tgttgatttgtgtaaattcgtcatagattctgg

SEQ ID NO: 154775 - DNA, 33 bp, Homo sapien
catcttggctcggcccaaggtttactttaagaa

SEQ ID NO: 154776 - DNA, 33 bp, Homo sapien
catcttggctcggcccgaggtttactttaagaa

SEQ ID NO: 154777 - DNA, 33 bp, Homo sapien
agaggccaagaatacaacactatgcaggtgcat

SEQ ID NO: 154778 - DNA, 33 bp, Homo sapien
agaggccaagaatacagcactatgcaggtgcat

SEQ ID NO: 154779 - DNA, 33 bp, Homo sapien
acatagcaatagaaatgattgaagttgaagcag

SEQ ID NO: 154780 - DNA, 33 bp, Homo sapien
acatagcaatagaaattattgaagttgaagcag

SEQ ID NO: 154781 - DNA, 33 bp, Homo sapien
atgccttttctgtgtcgattgagatgtgggttc

SEQ ID NO: 154782 - DNA, 33 bp, Homo sapien
atgccttttctgtgtctattgagatgtgggttc

SEQ ID NO: 154783 - DNA, 33 bp, Homo sapien
ctgaagctataaaaccactaggagaaaatacag

SEQ ID NO: 154784 - DNA, 33 bp, Homo sapien
ctgaagctataaaaccgctaggagaaaatacag

SEQ ID NO: 154785 - DNA, 33 bp, Homo sapien
ctaaaaatggaaaacaactcaatctcaatcaca

SEQ ID NO: 154786 - DNA, 33 bp, Homo sapien
ctaaaaatggaaaacatctcaatctcaatcaca

SEQ ID NO: 154787 - DNA, 33 bp, Homo sapien
caaagatagtaagtaaccaggatcccgatatca

SEQ ID NO: 154788 - DNA, 33 bp, Homo sapien
caaagatagtaagtaagcaggatcccgatatca

SEQ ID NO: 154789 - DNA, 33 bp, Homo sapien
agtgttagttttggccaccttaagcaataaagc

SEQ ID NO: 154790 - DNA, 33 bp, Homo sapien
agtgttagttttggccgccttaagcaataaagc

SEQ ID NO: 154791 - DNA, 33 bp, Homo sapien
gtgaaaagataacacaatatctcagaaggatat

SEQ ID NO: 154792 - DNA, 33 bp, Homo sapien
gtgaaaagataacacagtatctcagaaggatat

SEQ ID NO: 154793 - DNA, 33 bp, Homo sapien
atatgattgtaatgttaaaaaaaatacgcacac

SEQ ID NO: 154794 - DNA, 33 bp, Homo sapien
atatgattgtaatgtttaaaaaaatacgcacac

SEQ ID NO: 154795 - DNA, 33 bp, Homo sapien
ggtcaccatcattccaacaagcagggaaaggta

SEQ ID NO: 154796 - DNA, 33 bp, Homo sapien
ggtcaccatcattccagcaagcagggaaaggta

SEQ ID NO: 154797 - DNA, 33 bp, Homo sapien
gtagactatttcaggacgttataggcagtggaa

SEQ ID NO: 154798 - DNA, 33 bp, Homo sapien
gtagactatttcaggatgttataggcagtggaa

SEQ ID NO: 154799 - DNA, 33 bp, Homo sapien
cctggactggagagaaggaaaaggagctgaaga

SEQ ID NO: 154800 - DNA, 33 bp, Homo sapien
cctggactggagagaatgaaaaggagctgaaga

SEQ ID NO: 154801 - DNA, 33 bp, Homo sapien
ttccccgcaaatccccaaagtccatcatatcat

SEQ ID NO: 154802 - DNA, 33 bp, Homo sapien
ttccccgcaaatccccgaagtccatcatatcat

SEQ ID NO: 154803 - DNA, 33 bp, Homo sapien
attgatggaaaatacacgtgatataacaattta

SEQ ID NO: 154804 - DNA, 33 bp, Homo sapien
attgatggaaaatacatgtgatataacaattta

SEQ ID NO: 154805 - DNA, 33 bp, Homo sapien
agtgtgttttctgaaaatgaaaattctgcttaa

SEQ ID NO: 154806 - DNA, 33 bp, Homo sapien
agtgtgttttctgaaagtgaaaattctgcttaa

SEQ ID NO: 154807 - DNA, 33 bp, Homo sapien
tcttaagtaaaaatcaatcttcactttctactt

SEQ ID NO: 154808 - DNA, 33 bp, Homo sapien
tcttaagtaaaaatcagtcttcactttctactt

SEQ ID NO: 154809 - DNA, 33 bp, Homo sapien
tcctcttccttatttcccttatcatgattcaaa

SEQ ID NO: 154810 - DNA, 33 bp, Homo sapien
tcctcttccttatttctcttatcatgattcaaa

SEQ ID NO: 154811 - DNA, 33 bp, Homo sapien
cttgcaagttcgctcacgtgattgtggcaggtc

SEQ ID NO: 154812 - DNA, 33 bp, Homo sapien
cttgcaagttcgctcaggtgattgtggcaggtc

SEQ ID NO: 154813 - DNA, 33 bp, Homo sapien
tacactagtctgggcacgtctacttcatatgga

SEQ ID NO: 154814 - DNA, 33 bp, Homo sapien
tacactagtctgggcatgtctacttcatatgga

SEQ ID NO: 154815 - DNA, 33 bp, Homo sapien
ctagatatccggggctcaacctggacctgcgtt

SEQ ID NO: 154816 - DNA, 33 bp, Homo sapien
ctagatatccggggcttaacctggacctgcgtt

SEQ ID NO: 154817 - DNA, 33 bp, Homo sapien
cctggaagggaagttgaaatcacggggccacat

SEQ ID NO: 154818 - DNA, 33 bp, Homo sapien
cctggaagggaagttggaatcacggggccacat

SEQ ID NO: 154819 - DNA, 33 bp, Homo sapien
acccctcctccctgacagcacaatctaaaaaga

SEQ ID NO: 154820 - DNA, 33 bp, Homo sapien
acccctcctccctgacggcacaatctaaaaaga

SEQ ID NO: 154821 - DNA, 33 bp, Homo sapien
ctcttgtcagaaagaaaaaagcagtttgctatc

SEQ ID NO: 154822 - DNA, 33 bp, Homo sapien
ctcttgtcagaaagaagaaagcagtttgctatc

SEQ ID NO: 154823 - DNA, 33 bp, Homo sapien
actgggaacacctcttcaaatctcactttctcc

SEQ ID NO: 154824 - DNA, 33 bp, Homo sapien
actgggaacacctctttaaatctcactttctcc

SEQ ID NO: 154825 - DNA, 33 bp, Homo sapien
gccctcgcttgctcaaatgttggcaggtcaccc

SEQ ID NO: 154826 - DNA, 33 bp, Homo sapien
gccctcgcttgctcaagtgttggcaggtcaccc

SEQ ID NO: 154827 - DNA, 33 bp, Homo sapien
tacaggaattaaaaccaaacaacctcagtcttg

SEQ ID NO: 154828 - DNA, 33 bp, Homo sapien
tacaggaattaaaaccgaacaacctcagtcttg

SEQ ID NO: 154829 - DNA, 33 bp, Homo sapien
cagaggctcctcctcagcttggtcatctgtggc

SEQ ID NO: 154830 - DNA, 33 bp, Homo sapien
cagaggctcctcctcatcttggtcatctgtggc

SEQ ID NO: 154831 - DNA, 33 bp, Homo sapien
ggggttaagggactacagccatctcttgacggg

SEQ ID NO: 154832 - DNA, 33 bp, Homo sapien
ggggttaagggactacggccatctcttgacggg

SEQ ID NO: 154833 - DNA, 33 bp, Homo sapien
atcatttgaggcccaacgccagagattttgatg

SEQ ID NO: 154834 - DNA, 33 bp, Homo sapien
atcatttgaggcccaatgccagagattttgatg

SEQ ID NO: 154835 - DNA, 33 bp, Homo sapien
gctggcgcatccgctgcaatccctggggagctc

SEQ ID NO: 154836 - DNA, 33 bp, Homo sapien
gctggcgcatccgctgtaatccctggggagctc

SEQ ID NO: 154837 - DNA, 33 bp, Homo sapien
aactagattagtgtaaactgaaccaacagtcct

SEQ ID NO: 154838 - DNA, 33 bp, Homo sapien
aactagattagtgtaacctgaaccaacagtcct

SEQ ID NO: 154839 - DNA, 33 bp, Homo sapien
aaaataacagctggcaaaggttttagaaccagc

SEQ ID NO: 154840 - DNA, 33 bp, Homo sapien
aaaataacagctggcacaggttttagaaccagc

SEQ ID NO: 154841 - DNA, 33 bp, Homo sapien
gagctaagcactttaccacctcttcttatcatc

SEQ ID NO: 154842 - DNA, 33 bp, Homo sapien
gagctaagcactttacgacctcttcttatcatc

SEQ ID NO: 154843 - DNA, 33 bp, Homo sapien
cctatggaagttaatacagctgatagggagcac

SEQ ID NO: 154844 - DNA, 33 bp, Homo sapien
cctatggaagttaatatagctgatagggagcac

SEQ ID NO: 154845 - DNA, 33 bp, Homo sapien
aggttaaaatccagtaagaaagagccagagtct

SEQ ID NO: 154846 - DNA, 33 bp, Homo sapien
aggttaaaatccagtaggaaagagccagagtct

SEQ ID NO: 154847 - DNA, 33 bp, Homo sapien
gcaaggaacaatctcaccaaatctacataagaa

SEQ ID NO: 154848 - DNA, 33 bp, Homo sapien
gcaaggaacaatctcagcaaatctacataagaa

SEQ ID NO: 154849 - DNA, 33 bp, Homo sapien
acatttgttgaaagaaagaagagttagagccca

SEQ ID NO: 154850 - DNA, 33 bp, Homo sapien
acatttgttgaaagaacgaagagttagagccca

SEQ ID NO: 154851 - DNA, 33 bp, Homo sapien
ttggccagatgaaaagaaaactccctgtacttt

SEQ ID NO: 154852 - DNA, 33 bp, Homo sapien
ttggccagatgaaaaggaaactccctgtacttt

SEQ ID NO: 154853 - DNA, 33 bp, Homo sapien
cttgatccctgaggaactgacattgcagctgcc

SEQ ID NO: 154854 - DNA, 33 bp, Homo sapien
cttgatccctgaggaattgacattgcagctgcc

SEQ ID NO: 154855 - DNA, 33 bp, Homo sapien
aaatgtgtggtctagcaatgcaggtgtttgttt

SEQ ID NO: 154856 - DNA, 33 bp, Homo sapien
aaatgtgtggtctagcgatgcaggtgtttgttt

SEQ ID NO: 154857 - DNA, 33 bp, Homo sapien
agcctattaccctgccaaagtgttcagttttac

SEQ ID NO: 154858 - DNA, 33 bp, Homo sapien
agcctattaccctgccgaagtgttcagttttac

SEQ ID NO: 154859 - DNA, 33 bp, Homo sapien
acagccatctctaaaactaaaagatgctctggg

SEQ ID NO: 154860 - DNA, 33 bp, Homo sapien
acagccatctctaaaattaaaagatgctctggg

SEQ ID NO: 154861 - DNA, 33 bp, Homo sapien
aagtgggcacaagagacggtggtaccaggagtg

SEQ ID NO: 154862 - DNA, 33 bp, Homo sapien
aagtgggcacaagagagggtggtaccaggagtg

SEQ ID NO: 154863 - DNA, 33 bp, Homo sapien
aggcagagagagccgacggtcctcctaacatac

SEQ ID NO: 154864 - DNA, 33 bp, Homo sapien
aggcagagagagccgatggtcctcctaacatac

SEQ ID NO: 154865 - DNA, 33 bp, Homo sapien
tccagtgagtaaaagccgagctatagagtagga

SEQ ID NO: 154866 - DNA, 33 bp, Homo sapien
tccagtgagtaaaagctgagctatagagtagga

SEQ ID NO: 154867 - DNA, 33 bp, Homo sapien
aataggcaacagaatccaggtcattggagacca

SEQ ID NO: 154868 - DNA, 33 bp, Homo sapien
aataggcaacagaatctaggtcattggagacca

SEQ ID NO: 154869 - DNA, 33 bp, Homo sapien
ttggagaccaagcagaccacagaaaactgaggc

SEQ ID NO: 154870 - DNA, 33 bp, Homo sapien
ttggagaccaagcagatcacagaaaactgaggc

SEQ ID NO: 154871 - DNA, 33 bp, Homo sapien
gtcacatttcctaataagctttctatgggtgtg

SEQ ID NO: 154872 - DNA, 33 bp, Homo sapien
gtcacatttcctaataggctttctatgggtgtg

SEQ ID NO: 154873 - DNA, 33 bp, Homo sapien
gaaatgaacaaaagaacttaggactagacaaaa

SEQ ID NO: 154874 - DNA, 33 bp, Homo sapien
gaaatgaacaaaagaatttaggactagacaaaa

SEQ ID NO: 154875 - DNA, 33 bp, Homo sapien
cttcaggacaggtacacaaagtcaagcaagcag

SEQ ID NO: 154876 - DNA, 33 bp, Homo sapien
cttcaggacaggtacataaagtcaagcaagcag

SEQ ID NO: 154877 - DNA, 33 bp, Homo sapien
ccagggagccactgacaaatgcctctgcagctc

SEQ ID NO: 154878 - DNA, 33 bp, Homo sapien
ccagggagccactgacgaatgcctctgcagctc

SEQ ID NO: 154879 - DNA, 33 bp, Homo sapien
gggaagatttagataaaggaagataagtgtgta

SEQ ID NO: 154880 - DNA, 33 bp, Homo sapien
gggaagatttagataagggaagataagtgtgta

SEQ ID NO: 154881 - DNA, 33 bp, Homo sapien
gaacactcagaactcacgtcccctggaaccatc

SEQ ID NO: 154882 - DNA, 33 bp, Homo sapien
gaacactcagaactcatgtcccctggaaccatc

SEQ ID NO: 154883 - DNA, 33 bp, Homo sapien
accaagctgacagacacaaagtgtgtaggtgtt

SEQ ID NO: 154884 - DNA, 33 bp, Homo sapien
accaagctgacagacataaagtgtgtaggtgtt

SEQ ID NO: 154885 - DNA, 33 bp, Homo sapien
atctggactcaagtaacagagacaagaacctaa

SEQ ID NO: 154886 - DNA, 33 bp, Homo sapien
atctggactcaagtaagagagacaagaacctaa

SEQ ID NO: 154887 - DNA, 33 bp, Homo sapien
taaaatatacaaaggggagagagccatatgaag

SEQ ID NO: 154888 - DNA, 33 bp, Homo sapien
taaaatatacaaagggtagagagccatatgaag

SEQ ID NO: 154889 - DNA, 33 bp, Homo sapien
gtaagagtaagcgctaaatgtcaggatttatgt

SEQ ID NO: 154890 - DNA, 33 bp, Homo sapien
gtaagagtaagcgctacatgtcaggatttatgt

SEQ ID NO: 154891 - DNA, 33 bp, Homo sapien
cacagtcctggtttacagagtaagagtaagcgc

SEQ ID NO: 154892 - DNA, 33 bp, Homo sapien
cacagtcctggtttacggagtaagagtaagcgc

SEQ ID NO: 154893 - DNA, 33 bp, Homo sapien
aaggaacaatctgccactgcagggaaaaaagca

SEQ ID NO: 154894 - DNA, 33 bp, Homo sapien
aaggaacaatctgccattgcagggaaaaaagca

SEQ ID NO: 154895 - DNA, 33 bp, Homo sapien
taatctatatattcaacgtgaaaccaatcaaga

SEQ ID NO: 154896 - DNA, 33 bp, Homo sapien
taatctatatattcaatgtgaaaccaatcaaga

SEQ ID NO: 154897 - DNA, 33 bp, Homo sapien
ttttctaggacagaaaatctctaactacctcaa

SEQ ID NO: 154898 - DNA, 33 bp, Homo sapien
ttttctaggacagaaattctctaactacctcaa

SEQ ID NO: 154899 - DNA, 33 bp, Homo sapien
agcattctctacaatccataatccctgagtgtt

SEQ ID NO: 154900 - DNA, 33 bp, Homo sapien
agcattctctacaatctataatccctgagtgtt

SEQ ID NO: 154901 - DNA, 33 bp, Homo sapien
aacaaatgttttaagccaatgaaggcctgtcaa

SEQ ID NO: 154902 - DNA, 33 bp, Homo sapien
aacaaatgttttaagctaatgaaggcctgtcaa

SEQ ID NO: 154903 - DNA, 33 bp, Homo sapien
aacccaaactgtatatcaggcaatttctcttta

SEQ ID NO: 154904 - DNA, 33 bp, Homo sapien
aacccaaactgtatattaggcaatttctcttta

SEQ ID NO: 154905 - DNA, 33 bp, Homo sapien
acactgtacgagacacggaaggagggaatagca

SEQ ID NO: 154906 - DNA, 33 bp, Homo sapien
acactgtacgagacactgaaggagggaatagca

SEQ ID NO: 154907 - DNA, 33 bp, Homo sapien
aggagggaatagcaaactgtaaaacaaggcatc

SEQ ID NO: 154908 - DNA, 33 bp, Homo sapien
aggagggaatagcaaagtgtaaaacaaggcatc

SEQ ID NO: 154909 - DNA, 33 bp, Homo sapien
attcccagaaagcaaaccggtgacactcaatct

SEQ ID NO: 154910 - DNA, 33 bp, Homo sapien
attcccagaaagcaaatcggtgacactcaatct

SEQ ID NO: 154911 - DNA, 33 bp, Homo sapien
ctggagctgtaggttacagagagaagaatgact

SEQ ID NO: 154912 - DNA, 33 bp, Homo sapien
ctggagctgtaggttatagagagaagaatgact

SEQ ID NO: 154913 - DNA, 33 bp, Homo sapien
ctgagcctaacagtcagctctagaccaaacatt

SEQ ID NO: 154914 - DNA, 33 bp, Homo sapien
ctgagcctaacagtcatctctagaccaaacatt

SEQ ID NO: 154915 - DNA, 33 bp, Homo sapien
gtccctacttaacaaacaggcaaagaaactgag

SEQ ID NO: 154916 - DNA, 33 bp, Homo sapien
gtccctacttaacaaataggcaaagaaactgag

SEQ ID NO: 154917 - DNA, 33 bp, Homo sapien
caagacacatggggaacttccaagctagcccta

SEQ ID NO: 154918 - DNA, 33 bp, Homo sapien
caagacacatggggaatttccaagctagcccta

SEQ ID NO: 154919 - DNA, 33 bp, Homo sapien
taaagtagattaaaaaatgagggatgcaccctt

SEQ ID NO: 154920 - DNA, 33 bp, Homo sapien
taaagtagattaaaaactgagggatgcaccctt

SEQ ID NO: 154921 - DNA, 33 bp, Homo sapien
aggagtcttctaacaacccctggtaaattgcgg

SEQ ID NO: 154922 - DNA, 33 bp, Homo sapien
aggagtcttctaacaatccctggtaaattgcgg

SEQ ID NO: 154923 - DNA, 33 bp, Homo sapien
cttgacaaagctgagacgttacccagtgagtgg

SEQ ID NO: 154924 - DNA, 33 bp, Homo sapien
cttgacaaagctgagatgttacccagtgagtgg

SEQ ID NO: 154925 - DNA, 33 bp, Homo sapien
ttgaacccaggagctacagattacaatgagcta

SEQ ID NO: 154926 - DNA, 33 bp, Homo sapien
ttgaacccaggagctagagattacaatgagcta

SEQ ID NO: 154927 - DNA, 33 bp, Homo sapien
caataggcaaaaccaccaggacaggatctaaag

SEQ ID NO: 154928 - DNA, 33 bp, Homo sapien
caataggcaaaaccacgaggacaggatctaaag

SEQ ID NO: 154929 - DNA, 33 bp, Homo sapien
tgacaagtcttatttgcaagaagtaacacagtt

SEQ ID NO: 154930 - DNA, 33 bp, Homo sapien
tgacaagtcttatttggaagaagtaacacagtt

SEQ ID NO: 154931 - DNA, 33 bp, Homo sapien
tctcaagggaccaaagaaaaagtggtatttttg

SEQ ID NO: 154932 - DNA, 33 bp, Homo sapien
tctcaagggaccaaaggaaaagtggtatttttg

SEQ ID NO: 154933 - DNA, 33 bp, Homo sapien
agcataaatattgctaactgaatgaatccagtg

SEQ ID NO: 154934 - DNA, 33 bp, Homo sapien
agcataaatattgctacctgaatgaatccagtg

SEQ ID NO: 154935 - DNA, 33 bp, Homo sapien
cctctataccattttcaataatggctgtacgaa

SEQ ID NO: 154936 - DNA, 33 bp, Homo sapien
cctctataccattttccataatggctgtacgaa

SEQ ID NO: 154937 - DNA, 33 bp, Homo sapien
taactaaaattatgtaaccttcaagcaacatct

SEQ ID NO: 154938 - DNA, 33 bp, Homo sapien
taactaaaattatgtatccttcaagcaacatct

SEQ ID NO: 154939 - DNA, 33 bp, Homo sapien
ttcctattggattacaatctcagagaccagtct

SEQ ID NO: 154940 - DNA, 33 bp, Homo sapien
ttcctattggattacagtctcagagaccagtct

SEQ ID NO: 154941 - DNA, 33 bp, Homo sapien
gtccctgtggaaagtacaaaaagaacatatttc

SEQ ID NO: 154942 - DNA, 33 bp, Homo sapien
gtccctgtggaaagtagaaaaagaacatatttc

SEQ ID NO: 154943 - DNA, 33 bp, Homo sapien
ataaaagacatctcagccagctttattctggtg

SEQ ID NO: 154944 - DNA, 33 bp, Homo sapien
ataaaagacatctcagtcagctttattctggtg

SEQ ID NO: 154945 - DNA, 33 bp, Homo sapien
gaggatcaattgagcccggaatgctaaagctgc

SEQ ID NO: 154946 - DNA, 33 bp, Homo sapien
gaggatcaattgagcctggaatgctaaagctgc

SEQ ID NO: 154947 - DNA, 33 bp, Homo sapien
ataatgcatattagaccgtagaaaatttgggaa

SEQ ID NO: 154948 - DNA, 33 bp, Homo sapien
ataatgcatattagactgtagaaaatttgggaa

SEQ ID NO: 154949 - DNA, 33 bp, Homo sapien
ctctgacaatcctgcaaccttacctgggctcct

SEQ ID NO: 154950 - DNA, 33 bp, Homo sapien
ctctgacaatcctgcagccttacctgggctcct

SEQ ID NO: 154951 - DNA, 33 bp, Homo sapien
gcagggttggagaaacaggtagttaattctttt

SEQ ID NO: 154952 - DNA, 33 bp, Homo sapien
gcagggttggagaaactggtagttaattctttt

SEQ ID NO: 154953 - DNA, 33 bp, Homo sapien
ccttaaacataaaagcaatgagaggtggctggg

SEQ ID NO: 154954 - DNA, 33 bp, Homo sapien
ccttaaacataaaagcgatgagaggtggctggg

SEQ ID NO: 154955 - DNA, 33 bp, Homo sapien
aagccaattaccaaagaacaaattctatgattc

SEQ ID NO: 154956 - DNA, 33 bp, Homo sapien
aagccaattaccaaaggacaaattctatgattc

SEQ ID NO: 154957 - DNA, 33 bp, Homo sapien
tttgctgttaccccaaagcccctcaggaagttc

SEQ ID NO: 154958 - DNA, 33 bp, Homo sapien
tttgctgttaccccaaggcccctcaggaagttc

SEQ ID NO: 154959 - DNA, 33 bp, Homo sapien
ccttttctcttttccaaagcaaactctgcagga

SEQ ID NO: 154960 - DNA, 33 bp, Homo sapien
ccttttctcttttccagagcaaactctgcagga

SEQ ID NO: 154961 - DNA, 33 bp, Homo sapien
gatattgaggaaaagacagatgatgatcccatg

SEQ ID NO: 154962 - DNA, 33 bp, Homo sapien
gatattgaggaaaagatagatgatgatcccatg

SEQ ID NO: 154963 - DNA, 33 bp, Homo sapien
catttggttgaagtcactcattcttacctaaag

SEQ ID NO: 154964 - DNA, 33 bp, Homo sapien
catttggttgaagtcattcattcttacctaaag

SEQ ID NO: 154965 - DNA, 33 bp, Homo sapien
tcttatgtcctggtcaccgatattccattcctt

SEQ ID NO: 154966 - DNA, 33 bp, Homo sapien
tcttatgtcctggtcatcgatattccattcctt

SEQ ID NO: 154967 - DNA, 33 bp, Homo sapien
gcactcagcacagtatcaagtaacaagcacagt

SEQ ID NO: 154968 - DNA, 33 bp, Homo sapien
gcactcagcacagtattaagtaacaagcacagt

SEQ ID NO: 154969 - DNA, 33 bp, Homo sapien
ccctgaagttgactgcacctgttaataaccagt

SEQ ID NO: 154970 - DNA, 33 bp, Homo sapien
ccctgaagttgactgcgcctgttaataaccagt

SEQ ID NO: 154971 - DNA, 33 bp, Homo sapien
tcagtggctcttcacaatgactctgccagcaag

SEQ ID NO: 154972 - DNA, 33 bp, Homo sapien
tcagtggctcttcacagtgactctgccagcaag

SEQ ID NO: 154973 - DNA, 33 bp, Homo sapien
ctcctcgcagctttgcacagtgcacagaagtcc

SEQ ID NO: 154974 - DNA, 33 bp, Homo sapien
ctcctcgcagctttgcgcagtgcacagaagtcc

SEQ ID NO: 154975 - DNA, 33 bp, Homo sapien
tttatttccatgaacaacagatattttgtcttt

SEQ ID NO: 154976 - DNA, 33 bp, Homo sapien
tttatttccatgaacagcagatattttgtcttt

SEQ ID NO: 154977 - DNA, 33 bp, Homo sapien
acctggcagagttccacagccatgaagtctggc

SEQ ID NO: 154978 - DNA, 33 bp, Homo sapien
acctggcagagttccatagccatgaagtctggc

SEQ ID NO: 154979 - DNA, 33 bp, Homo sapien
agtcttcaggaaagcactagagtgaggttttca

SEQ ID NO: 154980 - DNA, 33 bp, Homo sapien
agtcttcaggaaagcattagagtgaggttttca

SEQ ID NO: 154981 - DNA, 33 bp, Homo sapien
ggaagctgggcagtaaatgattggtgccaaatg

SEQ ID NO: 154982 - DNA, 33 bp, Homo sapien
ggaagctgggcagtaagtgattggtgccaaatg

SEQ ID NO: 154983 - DNA, 33 bp, Homo sapien
aattaaactgctcctccaataagctgcccacca

SEQ ID NO: 154984 - DNA, 33 bp, Homo sapien
aattaaactgctcctctaataagctgcccacca

SEQ ID NO: 154985 - DNA, 33 bp, Homo sapien
tttgaaaggaagatataagaaaggattacataa

SEQ ID NO: 154986 - DNA, 33 bp, Homo sapien
tttgaaaggaagatatgagaaaggattacataa

SEQ ID NO: 154987 - DNA, 33 bp, Homo sapien
tggttctgtccaaaaactcattgacagactaaa

SEQ ID NO: 154988 - DNA, 33 bp, Homo sapien
tggttctgtccaaaaattcattgacagactaaa

SEQ ID NO: 154989 - DNA, 33 bp, Homo sapien
cctaatccttcctttcactttctaaacaacact

SEQ ID NO: 154990 - DNA, 33 bp, Homo sapien
cctaatccttcctttcgctttctaaacaacact

SEQ ID NO: 154991 - DNA, 33 bp, Homo sapien
caaccaggaagtgaaacataaagcatgggattc

SEQ ID NO: 154992 - DNA, 33 bp, Homo sapien
caaccaggaagtgaaatataaagcatgggattc

SEQ ID NO: 154993 - DNA, 33 bp, Homo sapien
atgacctcacccaaccaacagtcttctgggcca

SEQ ID NO: 154994 - DNA, 33 bp, Homo sapien
atgacctcacccaaccgacagtcttctgggcca

SEQ ID NO: 154995 - DNA, 33 bp, Homo sapien
gtgcatttacctcatacgctaggagttgccacc

SEQ ID NO: 154996 - DNA, 33 bp, Homo sapien
gtgcatttacctcatatgctaggagttgccacc

SEQ ID NO: 154997 - DNA, 33 bp, Homo sapien
tacagaccattctatagcagtacgtagggatct

SEQ ID NO: 154998 - DNA, 33 bp, Homo sapien
tacagaccattctatatcagtacgtagggatct

SEQ ID NO: 154999 - DNA, 33 bp, Homo sapien
aactgtgataataggcactttttgtacagaggc

SEQ ID NO: 155000 - DNA, 33 bp, Homo sapien
aactgtgataataggcgctttttgtacagaggc

SEQ ID NO: 155001 - DNA, 33 bp, Homo sapien
atctctcccttattacccaggacagaaagtgag

SEQ ID NO: 155002 - DNA, 33 bp, Homo sapien
atctctcccttattacgcaggacagaaagtgag

SEQ ID NO: 155003 - DNA, 33 bp, Homo sapien
tgtcacagggggtatacgccttatgatactatt

SEQ ID NO: 155004 - DNA, 33 bp, Homo sapien
tgtcacagggggtatatgccttatgatactatt

SEQ ID NO: 155005 - DNA, 33 bp, Homo sapien
cctgtgacattaggaggaacattcacctaggat

SEQ ID NO: 155006 - DNA, 33 bp, Homo sapien
cctgtgacattaggagtaacattcacctaggat

SEQ ID NO: 155007 - DNA, 33 bp, Homo sapien
cctgtgaagttattcaaaatagtattgggggct

SEQ ID NO: 155008 - DNA, 33 bp, Homo sapien
cctgtgaagttattcataatagtattgggggct

SEQ ID NO: 155009 - DNA, 33 bp, Homo sapien
accttactgctctccaatcaagatgtggtgtct

SEQ ID NO: 155010 - DNA, 33 bp, Homo sapien
accttactgctctccagtcaagatgtggtgtct

SEQ ID NO: 155011 - DNA, 33 bp, Homo sapien
atattactatttctgacgctacaagtggttaac

SEQ ID NO: 155012 - DNA, 33 bp, Homo sapien
atattactatttctgatgctacaagtggttaac

SEQ ID NO: 155013 - DNA, 33 bp, Homo sapien
ttgaaggtctggattgcaaccactttgctacag

SEQ ID NO: 155014 - DNA, 33 bp, Homo sapien
ttgaaggtctggattgtaaccactttgctacag

SEQ ID NO: 155015 - DNA, 33 bp, Homo sapien
atgcttccaaagctcaaacattcactagtttac

SEQ ID NO: 155016 - DNA, 33 bp, Homo sapien
atgcttccaaagctcagacattcactagtttac

SEQ ID NO: 155017 - DNA, 33 bp, Homo sapien
ccacaaacatgatggacagaagatttttgcttt

SEQ ID NO: 155018 - DNA, 33 bp, Homo sapien
ccacaaacatgatggatagaagatttttgcttt

SEQ ID NO: 155019 - DNA, 33 bp, Homo sapien
caaagactattcttaaacttcctatttctagaa

SEQ ID NO: 155020 - DNA, 33 bp, Homo sapien
caaagactattcttaaccttcctatttctagaa

SEQ ID NO: 155021 - DNA, 33 bp, Homo sapien
cgatatctagaagataacatagtccatgcattc

SEQ ID NO: 155022 - DNA, 33 bp, Homo sapien
cgatatctagaagatagcatagtccatgcattc

SEQ ID NO: 155023 - DNA, 33 bp, Homo sapien
acttcattttagcaaactgaattaacatcctat

SEQ ID NO: 155024 - DNA, 33 bp, Homo sapien
acttcattttagcaaattgaattaacatcctat

SEQ ID NO: 155025 - DNA, 33 bp, Homo sapien
atacatttcacattcaatctaattctggtcagc

SEQ ID NO: 155026 - DNA, 33 bp, Homo sapien
atacatttcacattcagtctaattctggtcagc

SEQ ID NO: 155027 - DNA, 33 bp, Homo sapien
tagctcttgaaatatacgcactttgttctcact

SEQ ID NO: 155028 - DNA, 33 bp, Homo sapien
tagctcttgaaatatatgcactttgttctcact

SEQ ID NO: 155029 - DNA, 33 bp, Homo sapien
gtcaaaggacagtatgaaatttcagggggaaga

SEQ ID NO: 155030 - DNA, 33 bp, Homo sapien
gtcaaaggacagtatggaatttcagggggaaga

SEQ ID NO: 155031 - DNA, 33 bp, Homo sapien
tgcaaagaaaactgcaagaaacacgcatataaa

SEQ ID NO: 155032 - DNA, 33 bp, Homo sapien
tgcaaagaaaactgcaggaaacacgcatataaa

SEQ ID NO: 155033 - DNA, 33 bp, Homo sapien
gttttttcttatcaaaatgtcttgctatttgtg

SEQ ID NO: 155034 - DNA, 33 bp, Homo sapien
gttttttcttatcaaagtgtcttgctatttgtg

SEQ ID NO: 155035 - DNA, 33 bp, Homo sapien
ttgtaaaacgctatggaatcgttcctctcccct

SEQ ID NO: 155036 - DNA, 33 bp, Homo sapien
ttgtaaaacgctatggcatcgttcctctcccct

SEQ ID NO: 155037 - DNA, 33 bp, Homo sapien
caggcaaagcaaaggacgtgtgcaaagatacag

SEQ ID NO: 155038 - DNA, 33 bp, Homo sapien
caggcaaagcaaaggatgtgtgcaaagatacag

SEQ ID NO: 155039 - DNA, 33 bp, Homo sapien
tattgaaagttccacaatgtgctgtgtgataat

SEQ ID NO: 155040 - DNA, 33 bp, Homo sapien
tattgaaagttccacattgtgctgtgtgataat

SEQ ID NO: 155041 - DNA, 33 bp, Homo sapien
actgtatttctctagaaaccttaatgcaatcca

SEQ ID NO: 155042 - DNA, 33 bp, Homo sapien
actgtatttctctagataccttaatgcaatcca

SEQ ID NO: 155043 - DNA, 33 bp, Homo sapien
tacattgggcatcccccaaaactagacactggg

SEQ ID NO: 155044 - DNA, 33 bp, Homo sapien
tacattgggcatcccctaaaactagacactggg

SEQ ID NO: 155045 - DNA, 33 bp, Homo sapien
ccactctccttagtacaccatttcactccttct

SEQ ID NO: 155046 - DNA, 33 bp, Homo sapien
ccactctccttagtacgccatttcactccttct

SEQ ID NO: 155047 - DNA, 33 bp, Homo sapien
tacaatgatggtcccaagatttaaaaatggagc

SEQ ID NO: 155048 - DNA, 33 bp, Homo sapien
tacaatgatggtcccatgatttaaaaatggagc

SEQ ID NO: 155049 - DNA, 33 bp, Homo sapien
ccttaccacaactataggaagcttgaactattg

SEQ ID NO: 155050 - DNA, 33 bp, Homo sapien
ccttaccacaactatatgaagcttgaactattg

SEQ ID NO: 155051 - DNA, 33 bp, Homo sapien
ggtatcttcctgtctaaagtcaggtaaagcact

SEQ ID NO: 155052 - DNA, 33 bp, Homo sapien
ggtatcttcctgtctagagtcaggtaaagcact

SEQ ID NO: 155053 - DNA, 33 bp, Homo sapien
gatttccaacaacttcaacaatgtacccatttt

SEQ ID NO: 155054 - DNA, 33 bp, Homo sapien
gatttccaacaacttcgacaatgtacccatttt

SEQ ID NO: 155055 - DNA, 33 bp, Homo sapien
agatggaaggagactaaaaagacattacaactg

SEQ ID NO: 155056 - DNA, 33 bp, Homo sapien
agatggaaggagactagaaagacattacaactg

SEQ ID NO: 155057 - DNA, 33 bp, Homo sapien
ttagtaataaatttcactaagtcagctaaacca

SEQ ID NO: 155058 - DNA, 33 bp, Homo sapien
ttagtaataaatttcagtaagtcagctaaacca

SEQ ID NO: 155059 - DNA, 33 bp, Homo sapien
tcttagcgcagaaaaaatttatagtaggataac

SEQ ID NO: 155060 - DNA, 33 bp, Homo sapien
tcttagcgcagaaaaattttatagtaggataac

SEQ ID NO: 155061 - DNA, 33 bp, Homo sapien
ccggaccaccgttataacaggtagagatatgca

SEQ ID NO: 155062 - DNA, 33 bp, Homo sapien
ccggaccaccgttataccaggtagagatatgca

SEQ ID NO: 155063 - DNA, 33 bp, Homo sapien
gaacagagtgcatacagaaagagctcagaagtg

SEQ ID NO: 155064 - DNA, 33 bp, Homo sapien
gaacagagtgcatacataaagagctcagaagtg

SEQ ID NO: 155065 - DNA, 33 bp, Homo sapien
cttgctcatctgtaaactcccactccaacagtg

SEQ ID NO: 155066 - DNA, 33 bp, Homo sapien
cttgctcatctgtaaattcccactccaacagtg

SEQ ID NO: 155067 - DNA, 33 bp, Homo sapien
ggaattgccaaaaagcactgtactctagtagat

SEQ ID NO: 155068 - DNA, 33 bp, Homo sapien
ggaattgccaaaaagcgctgtactctagtagat

SEQ ID NO: 155069 - DNA, 33 bp, Homo sapien
actctgaagaaagagcacctcatattcttttgc

SEQ ID NO: 155070 - DNA, 33 bp, Homo sapien
actctgaagaaagagcgcctcatattcttttgc

SEQ ID NO: 155071 - DNA, 33 bp, Homo sapien
tggcattatgaaaaaaattggaattgatcaaat

SEQ ID NO: 155072 - DNA, 33 bp, Homo sapien
tggcattatgaaaaaatttggaattgatcaaat

SEQ ID NO: 155073 - DNA, 33 bp, Homo sapien
tgcagccctactaaaaactggagcttaggtcac

SEQ ID NO: 155074 - DNA, 33 bp, Homo sapien
tgcagccctactaaaagctggagcttaggtcac

SEQ ID NO: 155075 - DNA, 33 bp, Homo sapien
tccctgaaaaagcacccggctaagggctgggcc

SEQ ID NO: 155076 - DNA, 33 bp, Homo sapien
tccctgaaaaagcacctggctaagggctgggcc

SEQ ID NO: 155077 - DNA, 33 bp, Homo sapien
ggtgtgggcactttgacggtgttgccaaacttg

SEQ ID NO: 155078 - DNA, 33 bp, Homo sapien
ggtgtgggcactttgatggtgttgccaaacttg

SEQ ID NO: 155079 - DNA, 33 bp, Homo sapien
atactgaacttgtcaagtcgctttcttgctcaa

SEQ ID NO: 155080 - DNA, 33 bp, Homo sapien
atactgaacttgtcaattcgctttcttgctcaa

SEQ ID NO: 155081 - DNA, 33 bp, Homo sapien
caaaatttgagttaaacattgtgggggataggg

SEQ ID NO: 155082 - DNA, 33 bp, Homo sapien
caaaatttgagttaaatattgtgggggataggg

SEQ ID NO: 155083 - DNA, 33 bp, Homo sapien
tgttttcaccccaagacccattttctctaggtc

SEQ ID NO: 155084 - DNA, 33 bp, Homo sapien
tgttttcaccccaagatccattttctctaggtc

SEQ ID NO: 155085 - DNA, 33 bp, Homo sapien
tccagagttccctgtgaagagagattccatcaa

SEQ ID NO: 155086 - DNA, 33 bp, Homo sapien
tccagagttccctgtgcagagagattccatcaa

SEQ ID NO: 155087 - DNA, 33 bp, Homo sapien
ccaaggagagtgatgacggcagcccaggttgat

SEQ ID NO: 155088 - DNA, 33 bp, Homo sapien
ccaaggagagtgatgatggcagcccaggttgat

SEQ ID NO: 155089 - DNA, 33 bp, Homo sapien
aactcaaagcgttcaaccccgtcttccgcttac

SEQ ID NO: 155090 - DNA, 33 bp, Homo sapien
aactcaaagcgttcaatcccgtcttccgcttac

SEQ ID NO: 155091 - DNA, 33 bp, Homo sapien
gcgtctgcacatccaactaaagattgttttctc

SEQ ID NO: 155092 - DNA, 33 bp, Homo sapien
gcgtctgcacatccaagtaaagattgttttctc

SEQ ID NO: 155093 - DNA, 33 bp, Homo sapien
accagcctgaagctcaaagagggcctcaatttt

SEQ ID NO: 155094 - DNA, 33 bp, Homo sapien
accagcctgaagctcagagagggcctcaatttt

SEQ ID NO: 155095 - DNA, 33 bp, Homo sapien
ctccacaagcttagacaaacaggattctcctgt

SEQ ID NO: 155096 - DNA, 33 bp, Homo sapien
ctccacaagcttagacgaacaggattctcctgt

SEQ ID NO: 155097 - DNA, 33 bp, Homo sapien
gcttcaaggaactgtgacaaccttgggatttgc

SEQ ID NO: 155098 - DNA, 33 bp, Homo sapien
gcttcaaggaactgtgtcaaccttgggatttgc

SEQ ID NO: 155099 - DNA, 33 bp, Homo sapien
aatgcttgccaggtcaaaggctgttttgctttt

SEQ ID NO: 155100 - DNA, 33 bp, Homo sapien
aatgcttgccaggtcagaggctgttttgctttt

SEQ ID NO: 155101 - DNA, 33 bp, Homo sapien
ctcagttctgtactcaagcttatgaaaaacctg

SEQ ID NO: 155102 - DNA, 33 bp, Homo sapien
ctcagttctgtactcatgcttatgaaaaacctg

SEQ ID NO: 155103 - DNA, 33 bp, Homo sapien
ttctgttctggatttcccatcacttctacaata

SEQ ID NO: 155104 - DNA, 33 bp, Homo sapien
ttctgttctggatttctcatcacttctacaata

SEQ ID NO: 155105 - DNA, 33 bp, Homo sapien
ttgattaaaagcctcacgggcagagaaattcgc

SEQ ID NO: 155106 - DNA, 33 bp, Homo sapien
ttgattaaaagcctcatgggcagagaaattcgc

SEQ ID NO: 155107 - DNA, 33 bp, Homo sapien
ttcctccttaactttcaagatctgagcactata

SEQ ID NO: 155108 - DNA, 33 bp, Homo sapien
ttcctccttaactttcgagatctgagcactata

SEQ ID NO: 155109 - DNA, 33 bp, Homo sapien
aaatgaatggaagaaacgaaagacccagagtca

SEQ ID NO: 155110 - DNA, 33 bp, Homo sapien
aaatgaatggaagaaatgaaagacccagagtca

SEQ ID NO: 155111 - DNA, 33 bp, Homo sapien
cttttgatgctgtttacataagaaaacatgtcc

SEQ ID NO: 155112 - DNA, 33 bp, Homo sapien
cttttgatgctgtttatataagaaaacatgtcc

SEQ ID NO: 155113 - DNA, 33 bp, Homo sapien
tctctatctcagcaaccacaagcctgctctacc

SEQ ID NO: 155114 - DNA, 33 bp, Homo sapien
tctctatctcagcaacgacaagcctgctctacc

SEQ ID NO: 155115 - DNA, 33 bp, Homo sapien
catttaaagcatacaaatcagtgggttttagtg

SEQ ID NO: 155116 - DNA, 33 bp, Homo sapien
catttaaagcatacaactcagtgggttttagtg

SEQ ID NO: 155117 - DNA, 33 bp, Homo sapien
agggctcttgtttcataatctttttttggtcac

SEQ ID NO: 155118 - DNA, 33 bp, Homo sapien
agggctcttgtttcatcatctttttttggtcac

SEQ ID NO: 155119 - DNA, 33 bp, Homo sapien
cagattcacacatgaaaaagaattggaaaatca

SEQ ID NO: 155120 - DNA, 33 bp, Homo sapien
cagattcacacatgaagaagaattggaaaatca

SEQ ID NO: 155121 - DNA, 33 bp, Homo sapien
gtgtcttcatgggttacagaataaccacgcttt

SEQ ID NO: 155122 - DNA, 33 bp, Homo sapien
gtgtcttcatgggttagagaataaccacgcttt

SEQ ID NO: 155123 - DNA, 33 bp, Homo sapien
cagtctgggtttgatcaaagggctaaagcttca

SEQ ID NO: 155124 - DNA, 33 bp, Homo sapien
cagtctgggtttgatcgaagggctaaagcttca

SEQ ID NO: 155125 - DNA, 33 bp, Homo sapien
ctgttgggataaaggcaaacatctgtggtatga

SEQ ID NO: 155126 - DNA, 33 bp, Homo sapien
ctgttgggataaaggccaacatctgtggtatga

SEQ ID NO: 155127 - DNA, 33 bp, Homo sapien
gagatgtcaaagaaagaatgatctctgtcataa

SEQ ID NO: 155128 - DNA, 33 bp, Homo sapien
gagatgtcaaagaaaggatgatctctgtcataa

SEQ ID NO: 155129 - DNA, 33 bp, Homo sapien
atggggaatgaggccaaagataggtggggctga

SEQ ID NO: 155130 - DNA, 33 bp, Homo sapien
atggggaatgaggccagagataggtggggctga

SEQ ID NO: 155131 - DNA, 33 bp, Homo sapien
ttctattgactacacaaactcagctagcaccgt

SEQ ID NO: 155132 - DNA, 33 bp, Homo sapien
ttctattgactacacagactcagctagcaccgt

SEQ ID NO: 155133 - DNA, 33 bp, Homo sapien
tgagcaagggtaccccactctgagaattcccag

SEQ ID NO: 155134 - DNA, 33 bp, Homo sapien
tgagcaagggtaccccgctctgagaattcccag

SEQ ID NO: 155135 - DNA, 33 bp, Homo sapien
ccagtcagtaagggtcacccgaacttaggctct

SEQ ID NO: 155136 - DNA, 33 bp, Homo sapien
ccagtcagtaagggtcgcccgaacttaggctct

SEQ ID NO: 155137 - DNA, 33 bp, Homo sapien
gatagatgaagaaggcaaaaacgggagtggaag

SEQ ID NO: 155138 - DNA, 33 bp, Homo sapien
gatagatgaagaaggcgaaaacgggagtggaag

SEQ ID NO: 155139 - DNA, 33 bp, Homo sapien
tggtcacatttcttaactctcattttggtttct

SEQ ID NO: 155140 - DNA, 33 bp, Homo sapien
tggtcacatttcttaattctcattttggtttct

SEQ ID NO: 155141 - DNA, 33 bp, Homo sapien
gggttccacataccaaaagaatgaacccctggt

SEQ ID NO: 155142 - DNA, 33 bp, Homo sapien
gggttccacataccaagagaatgaacccctggt

SEQ ID NO: 155143 - DNA, 33 bp, Homo sapien
attggaaattcacctgcagcaggagtgaatgag

SEQ ID NO: 155144 - DNA, 33 bp, Homo sapien
attggaaattcacctgtagcaggagtgaatgag

SEQ ID NO: 155145 - DNA, 33 bp, Homo sapien
actttctgatgtcctcaatgaagacaaagccac

SEQ ID NO: 155146 - DNA, 33 bp, Homo sapien
actttctgatgtcctcgatgaagacaaagccac

SEQ ID NO: 155147 - DNA, 33 bp, Homo sapien
gggagaggggctcagaccaaaatgcagcgacta

SEQ ID NO: 155148 - DNA, 33 bp, Homo sapien
gggagaggggctcagatcaaaatgcagcgacta

SEQ ID NO: 155149 - DNA, 33 bp, Homo sapien
gtaataaaacagacagactctcaacacctccca

SEQ ID NO: 155150 - DNA, 33 bp, Homo sapien
gtaataaaacagacaggctctcaacacctccca

SEQ ID NO: 155151 - DNA, 33 bp, Homo sapien
cacagtggatgcagaccaagctggatcccgaga

SEQ ID NO: 155152 - DNA, 33 bp, Homo sapien
cacagtggatgcagactaagctggatcccgaga

SEQ ID NO: 155153 - DNA, 33 bp, Homo sapien
tacttgccttttgcaaaggactcttgcccctgt

SEQ ID NO: 155154 - DNA, 33 bp, Homo sapien
tacttgccttttgcaagggactcttgcccctgt

SEQ ID NO: 155155 - DNA, 33 bp, Homo sapien
cctttcagtgatggtaagagccgaacgtttggc

SEQ ID NO: 155156 - DNA, 33 bp, Homo sapien
cctttcagtgatggtaggagccgaacgtttggc

SEQ ID NO: 155157 - DNA, 33 bp, Homo sapien
ttcctggaaatcagccacaagatggtggaggga

SEQ ID NO: 155158 - DNA, 33 bp, Homo sapien
ttcctggaaatcagccgcaagatggtggaggga

SEQ ID NO: 155159 - DNA, 33 bp, Homo sapien
ggagcacatggagaacaaccacattgtgtccca

SEQ ID NO: 155160 - DNA, 33 bp, Homo sapien
ggagcacatggagaacgaccacattgtgtccca

SEQ ID NO: 155161 - DNA, 33 bp, Homo sapien
tcgacactatttctaacctttgtcatataaaca

SEQ ID NO: 155162 - DNA, 33 bp, Homo sapien
tcgacactatttctaatctttgtcatataaaca

SEQ ID NO: 155163 - DNA, 33 bp, Homo sapien
tgttcaatgtcagacaacttgtaactgatagta

SEQ ID NO: 155164 - DNA, 33 bp, Homo sapien
tgttcaatgtcagacatcttgtaactgatagta

SEQ ID NO: 155165 - DNA, 33 bp, Homo sapien
ggggtttcctccttgccccagaaattgcccagg

SEQ ID NO: 155166 - DNA, 33 bp, Homo sapien
ggggtttcctccttgcgccagaaattgcccagg

SEQ ID NO: 155167 - DNA, 33 bp, Homo sapien
agcaatttcccaagagaagccagaaacactgcc

SEQ ID NO: 155168 - DNA, 33 bp, Homo sapien
agcaatttcccaagaggagccagaaacactgcc

SEQ ID NO: 155169 - DNA, 33 bp, Homo sapien
cagtctggaccaaaagaaatattgtaactgaca

SEQ ID NO: 155170 - DNA, 33 bp, Homo sapien
cagtctggaccaaaaggaatattgtaactgaca

SEQ ID NO: 155171 - DNA, 33 bp, Homo sapien
tagataaaggcattaacctctgtcaggaaaaat

SEQ ID NO: 155172 - DNA, 33 bp, Homo sapien
tagataaaggcattaagctctgtcaggaaaaat

SEQ ID NO: 155173 - DNA, 33 bp, Homo sapien
acattccttgtcctatcaacactaaatggtgtg

SEQ ID NO: 155174 - DNA, 33 bp, Homo sapien
acattccttgtcctatgaacactaaatggtgtg

SEQ ID NO: 155175 - DNA, 33 bp, Homo sapien
gctgccaaggttgaaaacactgtatgcaccagc

SEQ ID NO: 155176 - DNA, 33 bp, Homo sapien
gctgccaaggttgaaagcactgtatgcaccagc

SEQ ID NO: 155177 - DNA, 33 bp, Homo sapien
ggagaacagaccctccagccttgtgcttatcac

SEQ ID NO: 155178 - DNA, 33 bp, Homo sapien
ggagaacagaccctcctgccttgtgcttatcac

SEQ ID NO: 155179 - DNA, 33 bp, Homo sapien
gacctgaattttgacacaatgtggagagaagag

SEQ ID NO: 155180 - DNA, 33 bp, Homo sapien
gacctgaattttgacataatgtggagagaagag

SEQ ID NO: 155181 - DNA, 33 bp, Homo sapien
acacaccctctcaggaacaatagaaaataaaaa

SEQ ID NO: 155182 - DNA, 33 bp, Homo sapien
acacaccctctcaggagcaatagaaaataaaaa

SEQ ID NO: 155183 - DNA, 33 bp, Homo sapien
caatcctaaaatgagacccccatgcctgttact

SEQ ID NO: 155184 - DNA, 33 bp, Homo sapien
caatcctaaaatgagatccccatgcctgttact

SEQ ID NO: 155185 - DNA, 33 bp, Homo sapien
tggagtgtggccttcacatggatctgcttccct

SEQ ID NO: 155186 - DNA, 33 bp, Homo sapien
tggagtgtggccttcagatggatctgcttccct

SEQ ID NO: 155187 - DNA, 33 bp, Homo sapien
tggcacacgtgagggacgcaagctggactccct

SEQ ID NO: 155188 - DNA, 33 bp, Homo sapien
tggcacacgtgagggatgcaagctggactccct

SEQ ID NO: 155189 - DNA, 33 bp, Homo sapien
ttcacagatcgactacaatttgtaatttaaggt

SEQ ID NO: 155190 - DNA, 33 bp, Homo sapien
ttcacagatcgactacgatttgtaatttaaggt

SEQ ID NO: 155191 - DNA, 33 bp, Homo sapien
tcatacgtgctttacacatactcactcatttaa

SEQ ID NO: 155192 - DNA, 33 bp, Homo sapien
tcatacgtgctttacatatactcactcatttaa

SEQ ID NO: 155193 - DNA, 33 bp, Homo sapien
tgctgtaagtttgagacgcctgctagaggtgac

SEQ ID NO: 155194 - DNA, 33 bp, Homo sapien
tgctgtaagtttgagatgcctgctagaggtgac

SEQ ID NO: 155195 - DNA, 33 bp, Homo sapien
gagagagatagtaagtaacaaggtaggcagtca

SEQ ID NO: 155196 - DNA, 33 bp, Homo sapien
gagagagatagtaagtgacaaggtaggcagtca

SEQ ID NO: 155197 - DNA, 33 bp, Homo sapien
ccctgtcactgtcaggaagaccttgaccaagcc

SEQ ID NO: 155198 - DNA, 33 bp, Homo sapien
ccctgtcactgtcagggagaccttgaccaagcc

SEQ ID NO: 155199 - DNA, 33 bp, Homo sapien
ctcaaggactgctaaacgagtcgatcttctgcc

SEQ ID NO: 155200 - DNA, 33 bp, Homo sapien
ctcaaggactgctaaatgagtcgatcttctgcc

SEQ ID NO: 155201 - DNA, 33 bp, Homo sapien
agagggatttacatctaaaactaggcaacaaaa

SEQ ID NO: 155202 - DNA, 33 bp, Homo sapien
agagggatttacatcttaaactaggcaacaaaa

SEQ ID NO: 155203 - DNA, 33 bp, Homo sapien
tttatgttttagaacagctttagctttacagaa

SEQ ID NO: 155204 - DNA, 33 bp, Homo sapien
tttatgttttagaacatctttagctttacagaa

SEQ ID NO: 155205 - DNA, 33 bp, Homo sapien
aaggagttttcaggaactgcccatggagaaagg

SEQ ID NO: 155206 - DNA, 33 bp, Homo sapien
aaggagttttcaggaattgcccatggagaaagg

SEQ ID NO: 155207 - DNA, 33 bp, Homo sapien
agggtaaataggaatcactcataggccttccca

SEQ ID NO: 155208 - DNA, 33 bp, Homo sapien
agggtaaataggaatcgctcataggccttccca

SEQ ID NO: 155209 - DNA, 33 bp, Homo sapien
cggagtggcatttgaaaagtatctttgtcactg

SEQ ID NO: 155210 - DNA, 33 bp, Homo sapien
cggagtggcatttgaagagtatctttgtcactg

SEQ ID NO: 155211 - DNA, 33 bp, Homo sapien
catgatcacctctgtgcatgagagttccgactg

SEQ ID NO: 155212 - DNA, 33 bp, Homo sapien
catgatcacctctgtgtatgagagttccgactg

SEQ ID NO: 155213 - DNA, 33 bp, Homo sapien
atcagggaagagatcacggcagcctggagcagg

SEQ ID NO: 155214 - DNA, 33 bp, Homo sapien
atcagggaagagatcatggcagcctggagcagg

SEQ ID NO: 155215 - DNA, 33 bp, Homo sapien
tgggttaaatgtcaggcccattatttattggct

SEQ ID NO: 155216 - DNA, 33 bp, Homo sapien
tgggttaaatgtcaggtccattatttattggct

SEQ ID NO: 155217 - DNA, 33 bp, Homo sapien
tgactcctttaagcacaccaactctccagtcag

SEQ ID NO: 155218 - DNA, 33 bp, Homo sapien
tgactcctttaagcactccaactctccagtcag

SEQ ID NO: 155219 - DNA, 33 bp, Homo sapien
atgtctcacagaaaaaagttcttgcaggattca

SEQ ID NO: 155220 - DNA, 33 bp, Homo sapien
atgtctcacagaaaaatgttcttgcaggattca

SEQ ID NO: 155221 - DNA, 33 bp, Homo sapien
tagtgtaagctttttgaaggggaatttgctggc

SEQ ID NO: 155222 - DNA, 33 bp, Homo sapien
tagtgtaagctttttgcaggggaatttgctggc

SEQ ID NO: 155223 - DNA, 33 bp, Homo sapien
gaggtccacacatggcaagtgggatttttcaca

SEQ ID NO: 155224 - DNA, 33 bp, Homo sapien
gaggtccacacatggcgagtgggatttttcaca

SEQ ID NO: 155225 - DNA, 33 bp, Homo sapien
ttttatttattcccacacaccaaaggattttcc

SEQ ID NO: 155226 - DNA, 33 bp, Homo sapien
ttttatttattcccacgcaccaaaggattttcc

SEQ ID NO: 155227 - DNA, 33 bp, Homo sapien
ttgagttgggccttaaaggatgggaaagatggt

SEQ ID NO: 155228 - DNA, 33 bp, Homo sapien
ttgagttgggccttaacggatgggaaagatggt

SEQ ID NO: 155229 - DNA, 33 bp, Homo sapien
ttagaagctgccctcaccccatcaccgagagtg

SEQ ID NO: 155230 - DNA, 33 bp, Homo sapien
ttagaagctgccctcatcccatcaccgagagtg

SEQ ID NO: 155231 - DNA, 33 bp, Homo sapien
actgactgagaaatgacacacacggtagacaag

SEQ ID NO: 155232 - DNA, 33 bp, Homo sapien
actgactgagaaatgatacacacggtagacaag

SEQ ID NO: 155233 - DNA, 33 bp, Homo sapien
agtgcagccagcattacggattgtaagcaaacc

SEQ ID NO: 155234 - DNA, 33 bp, Homo sapien
agtgcagccagcattatggattgtaagcaaacc

SEQ ID NO: 155235 - DNA, 33 bp, Homo sapien
gatagtgtgtggcacccgaagtgatgtgctatg

SEQ ID NO: 155236 - DNA, 33 bp, Homo sapien
gatagtgtgtggcacctgaagtgatgtgctatg

SEQ ID NO: 155237 - DNA, 33 bp, Homo sapien
ggtgaggatctgaaaactgtaagagttacttga

SEQ ID NO: 155238 - DNA, 33 bp, Homo sapien
ggtgaggatctgaaaagtgtaagagttacttga

SEQ ID NO: 155239 - DNA, 33 bp, Homo sapien
cgttcaaggtcaggccagagcaaattggaggcg

SEQ ID NO: 155240 - DNA, 33 bp, Homo sapien
cgttcaaggtcaggccggagcaaattggaggcg

SEQ ID NO: 155241 - DNA, 33 bp, Homo sapien
ctcaccttcaagcttaaaggtatgttcacactt

SEQ ID NO: 155242 - DNA, 33 bp, Homo sapien
ctcaccttcaagcttagaggtatgttcacactt

SEQ ID NO: 155243 - DNA, 33 bp, Homo sapien
acgacatcttcattcacaacagatgaggctgct

SEQ ID NO: 155244 - DNA, 33 bp, Homo sapien
acgacatcttcattcataacagatgaggctgct

SEQ ID NO: 155245 - DNA, 33 bp, Homo sapien
ccaactctgtcgcagaacctattgcttctcctc

SEQ ID NO: 155246 - DNA, 33 bp, Homo sapien
ccaactctgtcgcagagcctattgcttctcctc

SEQ ID NO: 155247 - DNA, 33 bp, Homo sapien
cagtctaccattgatacgctgattccaggtctt

SEQ ID NO: 155248 - DNA, 33 bp, Homo sapien
cagtctaccattgataggctgattccaggtctt

SEQ ID NO: 155249 - DNA, 33 bp, Homo sapien
tagtccatagcaagtaccatttacaatagcacc

SEQ ID NO: 155250 - DNA, 33 bp, Homo sapien
tagtccatagcaagtagcatttacaatagcacc

SEQ ID NO: 155251 - DNA, 33 bp, Homo sapien
aagatgcttctggatccctttaaaagcatgtga

SEQ ID NO: 155252 - DNA, 33 bp, Homo sapien
aagatgcttctggatctctttaaaagcatgtga

SEQ ID NO: 155253 - DNA, 33 bp, Homo sapien
ggcagggagaaaatgcaaccacaacacaaactc

SEQ ID NO: 155254 - DNA, 33 bp, Homo sapien
ggcagggagaaaatgcgaccacaacacaaactc

SEQ ID NO: 155255 - DNA, 33 bp, Homo sapien
caacagcctgaaagtcaatgggagaaatgctgt

SEQ ID NO: 155256 - DNA, 33 bp, Homo sapien
caacagcctgaaagtcgatgggagaaatgctgt

SEQ ID NO: 155257 - DNA, 33 bp, Homo sapien
ggagcaagaaacgggaaccagtgtatctcaacc

SEQ ID NO: 155258 - DNA, 33 bp, Homo sapien
ggagcaagaaacgggatccagtgtatctcaacc

SEQ ID NO: 155259 - DNA, 33 bp, Homo sapien
aattaggtctgagtgaaatgcaaaaatatccag

SEQ ID NO: 155260 - DNA, 33 bp, Homo sapien
aattaggtctgagtgagatgcaaaaatatccag

SEQ ID NO: 155261 - DNA, 33 bp, Homo sapien
ttcccatctcagcttacgggtaactccctcatt

SEQ ID NO: 155262 - DNA, 33 bp, Homo sapien
ttcccatctcagcttatgggtaactccctcatt

SEQ ID NO: 155263 - DNA, 33 bp, Homo sapien
cagacatggagtgaaccagatgaatattggtaa

SEQ ID NO: 155264 - DNA, 33 bp, Homo sapien
cagacatggagtgaacgagatgaatattggtaa

SEQ ID NO: 155265 - DNA, 33 bp, Homo sapien
agaacagttatcagtaccgtggaaattcacaat

SEQ ID NO: 155266 - DNA, 33 bp, Homo sapien
agaacagttatcagtatcgtggaaattcacaat

SEQ ID NO: 155267 - DNA, 33 bp, Homo sapien
ttgaagacctaacccaagaaacagctatagcag

SEQ ID NO: 155268 - DNA, 33 bp, Homo sapien
ttgaagacctaacccaggaaacagctatagcag

SEQ ID NO: 155269 - DNA, 33 bp, Homo sapien
ccagtgattctcaataacttctactccatctga

SEQ ID NO: 155270 - DNA, 33 bp, Homo sapien
ccagtgattctcaataccttctactccatctga

SEQ ID NO: 155271 - DNA, 33 bp, Homo sapien
tttttttctaatggcacgtatctgttatctatt

SEQ ID NO: 155272 - DNA, 33 bp, Homo sapien
tttttttctaatggcatgtatctgttatctatt

SEQ ID NO: 155273 - DNA, 33 bp, Homo sapien
taaaattgagcagagcacagagagttcctatat

SEQ ID NO: 155274 - DNA, 33 bp, Homo sapien
taaaattgagcagagcgcagagagttcctatat

SEQ ID NO: 155275 - DNA, 33 bp, Homo sapien
tggagggttgaataagcagagtgcagataattt

SEQ ID NO: 155276 - DNA, 33 bp, Homo sapien
tggagggttgaataagtagagtgcagataattt

SEQ ID NO: 155277 - DNA, 33 bp, Homo sapien
taggatacagattagacggctgtgattacaaaa

SEQ ID NO: 155278 - DNA, 33 bp, Homo sapien
taggatacagattagatggctgtgattacaaaa

SEQ ID NO: 155279 - DNA, 33 bp, Homo sapien
tgtctttgggagtgaacgtgaaagcaggagaag

SEQ ID NO: 155280 - DNA, 33 bp, Homo sapien
tgtctttgggagtgaatgtgaaagcaggagaag

SEQ ID NO: 155281 - DNA, 33 bp, Homo sapien
ctttgggagaagcaaaagactatgatattcatg

SEQ ID NO: 155282 - DNA, 33 bp, Homo sapien
ctttgggagaagcaaaggactatgatattcatg

SEQ ID NO: 155283 - DNA, 33 bp, Homo sapien
gtccctaatctgggacaatgtctatatcctggc

SEQ ID NO: 155284 - DNA, 33 bp, Homo sapien
gtccctaatctgggaccatgtctatatcctggc

SEQ ID NO: 155285 - DNA, 33 bp, Homo sapien
tcaacgcaggtctgacaagaatggtaggctctg

SEQ ID NO: 155286 - DNA, 33 bp, Homo sapien
tcaacgcaggtctgaccagaatggtaggctctg

SEQ ID NO: 155287 - DNA, 33 bp, Homo sapien
ttattgtggtcatccacagcagcagtgtgacag

SEQ ID NO: 155288 - DNA, 33 bp, Homo sapien
ttattgtggtcatccagagcagcagtgtgacag

SEQ ID NO: 155289 - DNA, 33 bp, Homo sapien
gcacacaaacatttgactaggatggaacctttt

SEQ ID NO: 155290 - DNA, 33 bp, Homo sapien
gcacacaaacatttgagtaggatggaacctttt

SEQ ID NO: 155291 - DNA, 33 bp, Homo sapien
ccagaaaacagagaaacagagggttttgggggg

SEQ ID NO: 155292 - DNA, 33 bp, Homo sapien
ccagaaaacagagaaatagagggttttgggggg

SEQ ID NO: 155293 - DNA, 33 bp, Homo sapien
ggtggtactgtttggaaaggctatgaagggatt

SEQ ID NO: 155294 - DNA, 33 bp, Homo sapien
ggtggtactgtttggagaggctatgaagggatt

SEQ ID NO: 155295 - DNA, 33 bp, Homo sapien
tgctgtgtaatagttacagatagagctccagcg

SEQ ID NO: 155296 - DNA, 33 bp, Homo sapien
tgctgtgtaatagttagagatagagctccagcg

SEQ ID NO: 155297 - DNA, 33 bp, Homo sapien
agggagagacccagacagaaattcaaacctggg

SEQ ID NO: 155298 - DNA, 33 bp, Homo sapien
agggagagacccagacggaaattcaaacctggg

SEQ ID NO: 155299 - DNA, 33 bp, Homo sapien
tggtagacagactggaagaagggaccccaggga

SEQ ID NO: 155300 - DNA, 33 bp, Homo sapien
tggtagacagactggaggaagggaccccaggga

SEQ ID NO: 155301 - DNA, 33 bp, Homo sapien
tcccctggcaggcggaagttccatcatcctccc

SEQ ID NO: 155302 - DNA, 33 bp, Homo sapien
tcccctggcaggcggacgttccatcatcctccc

SEQ ID NO: 155303 - DNA, 33 bp, Homo sapien
ctacttttcacaaccacctccagaaataagagt

SEQ ID NO: 155304 - DNA, 33 bp, Homo sapien
ctacttttcacaaccatctccagaaataagagt

SEQ ID NO: 155305 - DNA, 33 bp, Homo sapien
cccacctaacactttccagctatgtgggggatt

SEQ ID NO: 155306 - DNA, 33 bp, Homo sapien
cccacctaacactttcgagctatgtgggggatt

SEQ ID NO: 155307 - DNA, 33 bp, Homo sapien
agagccatttagacacaatcagggggcgctctg

SEQ ID NO: 155308 - DNA, 33 bp, Homo sapien
agagccatttagacaccatcagggggcgctctg

SEQ ID NO: 155309 - DNA, 33 bp, Homo sapien
cgggctacagtctgcaaggcgtgacacctttgt

SEQ ID NO: 155310 - DNA, 33 bp, Homo sapien
cgggctacagtctgcacggcgtgacacctttgt

SEQ ID NO: 155311 - DNA, 33 bp, Homo sapien
cccccctggctcctgccaagttagtcctcagca

SEQ ID NO: 155312 - DNA, 33 bp, Homo sapien
cccccctggctcctgctaagttagtcctcagca

SEQ ID NO: 155313 - DNA, 33 bp, Homo sapien
gtggagatagaaaacccagttctaggtccttca

SEQ ID NO: 155314 - DNA, 33 bp, Homo sapien
gtggagatagaaaacctagttctaggtccttca

SEQ ID NO: 155315 - DNA, 33 bp, Homo sapien
tggtccagaaatggggaactgtgatagagaatc

SEQ ID NO: 155316 - DNA, 33 bp, Homo sapien
tggtccagaaatgggggactgtgatagagaatc

SEQ ID NO: 155317 - DNA, 33 bp, Homo sapien
ggacactgaatctcagaaagccatggacaaaga

SEQ ID NO: 155318 - DNA, 33 bp, Homo sapien
ggacactgaatctcaggaagccatggacaaaga

SEQ ID NO: 155319 - DNA, 33 bp, Homo sapien
tttgtatctattcagtaaacacctgttgagcac

SEQ ID NO: 155320 - DNA, 33 bp, Homo sapien
tttgtatctattcagtgaacacctgttgagcac

SEQ ID NO: 155321 - DNA, 33 bp, Homo sapien
tcatctgtaaaatggaagtagtagtacctccga

SEQ ID NO: 155322 - DNA, 33 bp, Homo sapien
tcatctgtaaaatggacgtagtagtacctccga

SEQ ID NO: 155323 - DNA, 33 bp, Homo sapien
gtccacctatgggaacacaggaagtaatggaag

SEQ ID NO: 155324 - DNA, 33 bp, Homo sapien
gtccacctatgggaacgcaggaagtaatggaag

SEQ ID NO: 155325 - DNA, 33 bp, Homo sapien
tttggaggccaagtccacttccccttgctgaac

SEQ ID NO: 155326 - DNA, 33 bp, Homo sapien
tttggaggccaagtccgcttccccttgctgaac

SEQ ID NO: 155327 - DNA, 33 bp, Homo sapien
gtttagacctggctggaactttcaggttgtttc

SEQ ID NO: 155328 - DNA, 33 bp, Homo sapien
gtttagacctggctgggactttcaggttgtttc

SEQ ID NO: 155329 - DNA, 33 bp, Homo sapien
acctccactattgccccaattccctagcttcct

SEQ ID NO: 155330 - DNA, 33 bp, Homo sapien
acctccactattgccctaattccctagcttcct

SEQ ID NO: 155331 - DNA, 33 bp, Homo sapien
gcagttgcttgtccatcaatgggttgtgttgtt

SEQ ID NO: 155332 - DNA, 33 bp, Homo sapien
gcagttgcttgtccattaatgggttgtgttgtt

SEQ ID NO: 155333 - DNA, 33 bp, Homo sapien
acagaaaactgcacggaagactgagaaaccagt

SEQ ID NO: 155334 - DNA, 33 bp, Homo sapien
acagaaaactgcacgggagactgagaaaccagt

SEQ ID NO: 155335 - DNA, 33 bp, Homo sapien
gccttcatctctccagaatgacttaattgtacc

SEQ ID NO: 155336 - DNA, 33 bp, Homo sapien
gccttcatctctccaggatgacttaattgtacc

SEQ ID NO: 155337 - DNA, 33 bp, Homo sapien
agggccagggtatacaaaaagatgaaacatcaa

SEQ ID NO: 155338 - DNA, 33 bp, Homo sapien
agggccagggtatacagaaagatgaaacatcaa

SEQ ID NO: 155339 - DNA, 33 bp, Homo sapien
tactcagaccatttaccggttttcagtgtattt

SEQ ID NO: 155340 - DNA, 33 bp, Homo sapien
tactcagaccatttactggttttcagtgtattt

SEQ ID NO: 155341 - DNA, 33 bp, Homo sapien
gaaaagaaagggtatacagccaagataaataca

SEQ ID NO: 155342 - DNA, 33 bp, Homo sapien
gaaaagaaagggtatagagccaagataaataca

SEQ ID NO: 155343 - DNA, 33 bp, Homo sapien
atagaaggtgtttcaccgtagtggataccagag

SEQ ID NO: 155344 - DNA, 33 bp, Homo sapien
atagaaggtgtttcactgtagtggataccagag

SEQ ID NO: 155345 - DNA, 33 bp, Homo sapien
tgacctactttcttaccaaaaatagctcttctt

SEQ ID NO: 155346 - DNA, 33 bp, Homo sapien
tgacctactttcttactaaaaatagctcttctt

SEQ ID NO: 155347 - DNA, 33 bp, Homo sapien
agatattctgaaaagcaaagaagtaggtacaga

SEQ ID NO: 155348 - DNA, 33 bp, Homo sapien
agatattctgaaaagccaagaagtaggtacaga

SEQ ID NO: 155349 - DNA, 33 bp, Homo sapien
aggggaaagtggctgcaacagtatcagagagta

SEQ ID NO: 155350 - DNA, 33 bp, Homo sapien
aggggaaagtggctgcgacagtatcagagagta

SEQ ID NO: 155351 - DNA, 33 bp, Homo sapien
tggaaaagctcttggcacagagtaggtgctcag

SEQ ID NO: 155352 - DNA, 33 bp, Homo sapien
tggaaaagctcttggcgcagagtaggtgctcag

SEQ ID NO: 155353 - DNA, 33 bp, Homo sapien
aagtttttgctttttaacgagacaagatgctac

SEQ ID NO: 155354 - DNA, 33 bp, Homo sapien
aagtttttgctttttagcgagacaagatgctac

SEQ ID NO: 155355 - DNA, 33 bp, Homo sapien
ctttaagatttgactacgctactggattttgga

SEQ ID NO: 155356 - DNA, 33 bp, Homo sapien
ctttaagatttgactatgctactggattttgga

SEQ ID NO: 155357 - DNA, 33 bp, Homo sapien
atcttctcaagaaactcaaatgtggcttccatg

SEQ ID NO: 155358 - DNA, 33 bp, Homo sapien
atcttctcaagaaactgaaatgtggcttccatg

SEQ ID NO: 155359 - DNA, 33 bp, Homo sapien
cattcatcagacattaaggttgcttataccctt

SEQ ID NO: 155360 - DNA, 33 bp, Homo sapien
cattcatcagacattagggttgcttataccctt

SEQ ID NO: 155361 - DNA, 33 bp, Homo sapien
atgtgaagctcttacccagaggcatcttgtggt

SEQ ID NO: 155362 - DNA, 33 bp, Homo sapien
atgtgaagctcttacctagaggcatcttgtggt

SEQ ID NO: 155363 - DNA, 33 bp, Homo sapien
aagtggcttcaattcaacaaacatctcattaag

SEQ ID NO: 155364 - DNA, 33 bp, Homo sapien
aagtggcttcaattcatcaaacatctcattaag

SEQ ID NO: 155365 - DNA, 33 bp, Homo sapien
caaacctatatgggaactgaaggtttgattgat

SEQ ID NO: 155366 - DNA, 33 bp, Homo sapien
caaacctatatgggaattgaaggtttgattgat

SEQ ID NO: 155367 - DNA, 33 bp, Homo sapien
atcactctgcatgatggatgaaaggacagagga

SEQ ID NO: 155368 - DNA, 33 bp, Homo sapien
atcactctgcatgatgtatgaaaggacagagga

SEQ ID NO: 155369 - DNA, 33 bp, Homo sapien
attatgagtcctaatgccagattttatccttcc

SEQ ID NO: 155370 - DNA, 33 bp, Homo sapien
attatgagtcctaatggcagattttatccttcc

SEQ ID NO: 155371 - DNA, 33 bp, Homo sapien
ggggcattcgactataaccacaggccctgcctt

SEQ ID NO: 155372 - DNA, 33 bp, Homo sapien
ggggcattcgactatagccacaggccctgcctt

SEQ ID NO: 155373 - DNA, 33 bp, Homo sapien
ctacttgacatctgaaatatcaactgtcttcca

SEQ ID NO: 155374 - DNA, 33 bp, Homo sapien
ctacttgacatctgaattatcaactgtcttcca

SEQ ID NO: 155375 - DNA, 33 bp, Homo sapien
atcaggagccctttacaattcaatatggaaatg

SEQ ID NO: 155376 - DNA, 33 bp, Homo sapien
atcaggagccctttacgattcaatatggaaatg

SEQ ID NO: 155377 - DNA, 33 bp, Homo sapien
gagccttaatgaatcaaagcaatactgacagga

SEQ ID NO: 155378 - DNA, 33 bp, Homo sapien
gagccttaatgaatcagagcaatactgacagga

SEQ ID NO: 155379 - DNA, 33 bp, Homo sapien
gtgtggatgtaaaataggaaggctgtgacttgt

SEQ ID NO: 155380 - DNA, 33 bp, Homo sapien
gtgtggatgtaaaatatgaaggctgtgacttgt

SEQ ID NO: 155381 - DNA, 33 bp, Homo sapien
gcatccatctggatgcaatgaagaccaatttcc

SEQ ID NO: 155382 - DNA, 33 bp, Homo sapien
gcatccatctggatgcgatgaagaccaatttcc

SEQ ID NO: 155383 - DNA, 33 bp, Homo sapien
gactgactcatcataaatgacctgctttataat

SEQ ID NO: 155384 - DNA, 33 bp, Homo sapien
gactgactcatcataactgacctgctttataat

SEQ ID NO: 155385 - DNA, 33 bp, Homo sapien
aatggcaacgtctgaacatgctgagtcagctgc

SEQ ID NO: 155386 - DNA, 33 bp, Homo sapien
aatggcaacgtctgaagatgctgagtcagctgc

SEQ ID NO: 155387 - DNA, 33 bp, Homo sapien
attattaaacgagcccaaatgagctctggcagt

SEQ ID NO: 155388 - DNA, 33 bp, Homo sapien
attattaaacgagccccaatgagctctggcagt

SEQ ID NO: 155389 - DNA, 33 bp, Homo sapien
tgatgaataatcctaaaacaatataggctggcc

SEQ ID NO: 155390 - DNA, 33 bp, Homo sapien
tgatgaataatcctaagacaatataggctggcc

SEQ ID NO: 155391 - DNA, 33 bp, Homo sapien
tgagtaccacatagtacgccaaaaactgaccag

SEQ ID NO: 155392 - DNA, 33 bp, Homo sapien
tgagtaccacatagtatgccaaaaactgaccag

SEQ ID NO: 155393 - DNA, 33 bp, Homo sapien
ctgacactatgacttacctgtctcacctgctac

SEQ ID NO: 155394 - DNA, 33 bp, Homo sapien
ctgacactatgacttatctgtctcacctgctac

SEQ ID NO: 155395 - DNA, 33 bp, Homo sapien
cttctagaatgcagtccctttcaccctgcagta

SEQ ID NO: 155396 - DNA, 33 bp, Homo sapien
cttctagaatgcagtctctttcaccctgcagta

SEQ ID NO: 155397 - DNA, 33 bp, Homo sapien
ctccacaaccacagaacaagacagttctcacaa

SEQ ID NO: 155398 - DNA, 33 bp, Homo sapien
ctccacaaccacagaagaagacagttctcacaa

SEQ ID NO: 155399 - DNA, 33 bp, Homo sapien
aggtggattctgcatcaagatagtcttttggag

SEQ ID NO: 155400 - DNA, 33 bp, Homo sapien
aggtggattctgcatcgagatagtcttttggag

SEQ ID NO: 155401 - DNA, 33 bp, Homo sapien
aaaacttgtctctagccatagtggcctgcacat

SEQ ID NO: 155402 - DNA, 33 bp, Homo sapien
aaaacttgtctctagctatagtggcctgcacat

SEQ ID NO: 155403 - DNA, 33 bp, Homo sapien
tatagattgagtttcaacaaatgttaatgtaga

SEQ ID NO: 155404 - DNA, 33 bp, Homo sapien
tatagattgagtttcagcaaatgttaatgtaga

SEQ ID NO: 155405 - DNA, 33 bp, Homo sapien
agaggctagaatatagcaggattcgatacatat

SEQ ID NO: 155406 - DNA, 33 bp, Homo sapien
agaggctagaatatagtaggattcgatacatat

SEQ ID NO: 155407 - DNA, 33 bp, Homo sapien
tcaactctttcgtaaccataggcaagttgggaa

SEQ ID NO: 155408 - DNA, 33 bp, Homo sapien
tcaactctttcgtaactataggcaagttgggaa

SEQ ID NO: 155409 - DNA, 33 bp, Homo sapien
aataatagaattgtgccgaaaaaagtgtgagag

SEQ ID NO: 155410 - DNA, 33 bp, Homo sapien
aataatagaattgtgctgaaaaaagtgtgagag

SEQ ID NO: 155411 - DNA, 33 bp, Homo sapien
aggactaaaactgctaaaggatcaacctgtgca

SEQ ID NO: 155412 - DNA, 33 bp, Homo sapien
aggactaaaactgctagaggatcaacctgtgca

SEQ ID NO: 155413 - DNA, 33 bp, Homo sapien
agataggatgtctgcaaagaagggtccagaagg

SEQ ID NO: 155414 - DNA, 33 bp, Homo sapien
agataggatgtctgcacagaagggtccagaagg

SEQ ID NO: 155415 - DNA, 33 bp, Homo sapien
aataatgagcatcaccaaaggaggccactgagg

SEQ ID NO: 155416 - DNA, 33 bp, Homo sapien
aataatgagcatcaccgaaggaggccactgagg

SEQ ID NO: 155417 - DNA, 33 bp, Homo sapien
atacagctaagtacaaagggcaaaagtcgcata

SEQ ID NO: 155418 - DNA, 33 bp, Homo sapien
atacagctaagtacaaggggcaaaagtcgcata

SEQ ID NO: 155419 - DNA, 33 bp, Homo sapien
atgtgatcctgaaaaggaatttaatatcttcca

SEQ ID NO: 155420 - DNA, 33 bp, Homo sapien
atgtgatcctgaaaagtaatttaatatcttcca

SEQ ID NO: 155421 - DNA, 33 bp, Homo sapien
aagcacagagaaatgaaaaggcaggatatgcct

SEQ ID NO: 155422 - DNA, 33 bp, Homo sapien
aagcacagagaaatgagaaggcaggatatgcct

SEQ ID NO: 155423 - DNA, 33 bp, Homo sapien
tctaccctggaacttcaacctcttccttatatt

SEQ ID NO: 155424 - DNA, 33 bp, Homo sapien
tctaccctggaacttccacctcttccttatatt

SEQ ID NO: 155425 - DNA, 33 bp, Homo sapien
gtacactccagcaaaaaaaatggcttgcccttc

SEQ ID NO: 155426 - DNA, 33 bp, Homo sapien
gtacactccagcaaaagaaatggcttgcccttc

SEQ ID NO: 155427 - DNA, 33 bp, Homo sapien
ctcagaatagcagctagcacctaataggttgtc

SEQ ID NO: 155428 - DNA, 33 bp, Homo sapien
ctcagaatagcagctatcacctaataggttgtc

SEQ ID NO: 155429 - DNA, 33 bp, Homo sapien
gatcttttccatcggcaaaaataaatgaagttt

SEQ ID NO: 155430 - DNA, 33 bp, Homo sapien
gatcttttccatcggccaaaataaatgaagttt

SEQ ID NO: 155431 - DNA, 33 bp, Homo sapien
tcagattatgtccacaatatttgaggtgtaatc

SEQ ID NO: 155432 - DNA, 33 bp, Homo sapien
tcagattatgtccacagtatttgaggtgtaatc

SEQ ID NO: 155433 - DNA, 33 bp, Homo sapien
gggcgacgttgtcctaaagcgtgaaaatgtaaa

SEQ ID NO: 155434 - DNA, 33 bp, Homo sapien
gggcgacgttgtcctatagcgtgaaaatgtaaa

SEQ ID NO: 155435 - DNA, 33 bp, Homo sapien
gacgtgcctcaaaaaactgaaaatagagctacc

SEQ ID NO: 155436 - DNA, 33 bp, Homo sapien
gacgtgcctcaaaaaattgaaaatagagctacc

SEQ ID NO: 155437 - DNA, 33 bp, Homo sapien
aggaggtgcaattgacaaggaagagggtataga

SEQ ID NO: 155438 - DNA, 33 bp, Homo sapien
aggaggtgcaattgacgaggaagagggtataga

SEQ ID NO: 155439 - DNA, 33 bp, Homo sapien
atcccatcaattagcacatttggtcttttctac

SEQ ID NO: 155440 - DNA, 33 bp, Homo sapien
atcccatcaattagcagatttggtcttttctac

SEQ ID NO: 155441 - DNA, 33 bp, Homo sapien
aaaatgcaacatacaaacatgtcgctactctaa

SEQ ID NO: 155442 - DNA, 33 bp, Homo sapien
aaaatgcaacatacaatcatgtcgctactctaa

SEQ ID NO: 155443 - DNA, 33 bp, Homo sapien
ttaaaaagttttgagacacaagacatctgaaat

SEQ ID NO: 155444 - DNA, 33 bp, Homo sapien
ttaaaaagttttgagatacaagacatctgaaat

SEQ ID NO: 155445 - DNA, 33 bp, Homo sapien
gaaagttcttctctacactttccatacaccaca

SEQ ID NO: 155446 - DNA, 33 bp, Homo sapien
gaaagttcttctctacgctttccatacaccaca

SEQ ID NO: 155447 - DNA, 33 bp, Homo sapien
acagttgccgtgggaacgctccctaagcttact

SEQ ID NO: 155448 - DNA, 33 bp, Homo sapien
acagttgccgtgggaatgctccctaagcttact

SEQ ID NO: 155449 - DNA, 33 bp, Homo sapien
ctggtttccctcggagacacaaatgctcagggt

SEQ ID NO: 155450 - DNA, 33 bp, Homo sapien
ctggtttccctcggagtcacaaatgctcagggt

SEQ ID NO: 155451 - DNA, 33 bp, Homo sapien
tgtacccatgactccccatatttctcatcaaaa

SEQ ID NO: 155452 - DNA, 33 bp, Homo sapien
tgtacccatgactccctatatttctcatcaaaa

SEQ ID NO: 155453 - DNA, 33 bp, Homo sapien
cagcagcctattaaagccagctcatgcgtaggc

SEQ ID NO: 155454 - DNA, 33 bp, Homo sapien
cagcagcctattaaagtcagctcatgcgtaggc

SEQ ID NO: 155455 - DNA, 33 bp, Homo sapien
tgggactagttaccataaagactctctaacatc

SEQ ID NO: 155456 - DNA, 33 bp, Homo sapien
tgggactagttaccatgaagactctctaacatc

SEQ ID NO: 155457 - DNA, 33 bp, Homo sapien
tgtcacctgtgtgttacgcccctttaggcactg

SEQ ID NO: 155458 - DNA, 33 bp, Homo sapien
tgtcacctgtgtgttatgcccctttaggcactg

SEQ ID NO: 155459 - DNA, 33 bp, Homo sapien
gtctgatttgagcctacggtcttgttttttaaa

SEQ ID NO: 155460 - DNA, 33 bp, Homo sapien
gtctgatttgagcctatggtcttgttttttaaa

SEQ ID NO: 155461 - DNA, 33 bp, Homo sapien
ttgtaagggagcaaaaagaggccaaagaacatg

SEQ ID NO: 155462 - DNA, 33 bp, Homo sapien
ttgtaagggagcaaaaggaggccaaagaacatg

SEQ ID NO: 155463 - DNA, 33 bp, Homo sapien
tacgcagattaagctgccactgtaatcaggata

SEQ ID NO: 155464 - DNA, 33 bp, Homo sapien
tacgcagattaagctgtcactgtaatcaggata

SEQ ID NO: 155465 - DNA, 33 bp, Homo sapien
tttgcatagaaatccgaatacatggaatagccc

SEQ ID NO: 155466 - DNA, 33 bp, Homo sapien
tttgcatagaaatccggatacatggaatagccc

SEQ ID NO: 155467 - DNA, 33 bp, Homo sapien
tcttgcctttgctaagcacctcggtagattttt

SEQ ID NO: 155468 - DNA, 33 bp, Homo sapien
tcttgcctttgctaagtacctcggtagattttt

SEQ ID NO: 155469 - DNA, 33 bp, Homo sapien
ttactttcttaataaacgtgcttttactttgca

SEQ ID NO: 155470 - DNA, 33 bp, Homo sapien
ttactttcttaataaatgtgcttttactttgca

SEQ ID NO: 155471 - DNA, 33 bp, Homo sapien
ctccatcagacacacacgctgggtggtcagtgg

SEQ ID NO: 155472 - DNA, 33 bp, Homo sapien
ctccatcagacacacatgctgggtggtcagtgg

SEQ ID NO: 155473 - DNA, 33 bp, Homo sapien
taacaagactgtccagaatcttcgtaagcctgg

SEQ ID NO: 155474 - DNA, 33 bp, Homo sapien
taacaagactgtccagcatcttcgtaagcctgg

SEQ ID NO: 155475 - DNA, 33 bp, Homo sapien; identical to SEQ ID NO: 155473

SEQ ID NO: 155476 - DNA, 33 bp, Homo sapien; identical to SEQ ID NO: 155474

SEQ ID NO: 155477 - DNA, 33 bp, Homo sapien
aagtcactgaatcccagaaaggctctctacctt

SEQ ID NO: 155478 - DNA, 33 bp, Homo sapien
aagtcactgaatcccataaaggctctctacctt

SEQ ID NO: 155479 - DNA, 33 bp, Homo sapien; identical to SEQ ID NO: 155477

SEQ ID NO: 155480 - DNA, 33 bp, Homo sapien; identical to SEQ ID NO: 155478

SEQ ID NO: 155481 - DNA, 33 bp, Homo sapien
agcaatttgagaatgaactaatacacagacaga

SEQ ID NO: 155482 - DNA, 33 bp, Homo sapien
agcaatttgagaatgagctaatacacagacaga

SEQ ID NO: 155483 - DNA, 33 bp, Homo sapien
aatgcctccagtcataaaagggaacatgatttt

SEQ ID NO: 155484 - DNA, 33 bp, Homo sapien
aatgcctccagtcatagaagggaacatgatttt

SEQ ID NO: 155485 - DNA, 33 bp, Homo sapien
aggaaaataagccagacgccaaacaatattgta

SEQ ID NO: 155486 - DNA, 33 bp, Homo sapien
aggaaaataagccagatgccaaacaatattgta

SEQ ID NO: 155487 - DNA, 33 bp, Homo sapien
ggaactcctacaatcaggtttgccagcactcag

SEQ ID NO: 155488 - DNA, 33 bp, Homo sapien
ggaactcctacaatcatgtttgccagcactcag

SEQ ID NO: 155489 - DNA, 33 bp, Homo sapien
ttgaaagcaaggaatgaagtaaaacctgggttt

SEQ ID NO: 155490 - DNA, 33 bp, Homo sapien
ttgaaagcaaggaatgcagtaaaacctgggttt

SEQ ID NO: 155491 - DNA, 33 bp, Homo sapien
aaaaaagtaacgtaagcaaactctggagacaat

SEQ ID NO: 155492 - DNA, 33 bp, Homo sapien
aaaaaagtaacgtaagtaaactctggagacaat

SEQ ID NO: 155493 - DNA, 33 bp, Homo sapien
gtgttgcttacacatcactgtgtgggaaagcag

SEQ ID NO: 155494 - DNA, 33 bp, Homo sapien
gtgttgcttacacatctctgtgtgggaaagcag

SEQ ID NO: 155495 - DNA, 33 bp, Homo sapien
cccaggaaggagcaccactttttatattcccag

SEQ ID NO: 155496 - DNA, 33 bp, Homo sapien
cccaggaaggagcaccgctttttatattcccag

SEQ ID NO: 155497 - DNA, 33 bp, Homo sapien
gtggtgttagatagcaagttttattaaagcagc

SEQ ID NO: 155498 - DNA, 33 bp, Homo sapien
gtggtgttagatagcatgttttattaaagcagc

SEQ ID NO: 155499 - DNA, 33 bp, Homo sapien
atctgtcccagcaaaacgctacattcctttcat

SEQ ID NO: 155500 - DNA, 33 bp, Homo sapien
atctgtcccagcaaaatgctacattcctttcat

SEQ ID NO: 155501 - DNA, 33 bp, Homo sapien
gatctctaattctcaagaccaccctgcaatgtg

SEQ ID NO: 155502 - DNA, 33 bp, Homo sapien
gatctctaattctcaataccaccctgcaatgtg

SEQ ID NO: 155503 - DNA, 33 bp, Homo sapien
ggagatttgagctccaactgtgtgatctctaat

SEQ ID NO: 155504 - DNA, 33 bp, Homo sapien
ggagatttgagctccagctgtgtgatctctaat

SEQ ID NO: 155505 - DNA, 33 bp, Homo sapien
ggatggttggatccacactccaaaacccttcac

SEQ ID NO: 155506 - DNA, 33 bp, Homo sapien
ggatggttggatccacgctccaaaacccttcac

SEQ ID NO: 155507 - DNA, 33 bp, Homo sapien
tttcaatattatcaggaaggaaacaatgataaa

SEQ ID NO: 155508 - DNA, 33 bp, Homo sapien
tttcaatattatcagggaggaaacaatgataaa

SEQ ID NO: 155509 - DNA, 33 bp, Homo sapien
tttccacctgcagcaacgtccccaactccaatc

SEQ ID NO: 155510 - DNA, 33 bp, Homo sapien
tttccacctgcagcaatgtccccaactccaatc

SEQ ID NO: 155511 - DNA, 33 bp, Homo sapien
aaagaaattctgcaggaagatgtttctcaatat

SEQ ID NO: 155512 - DNA, 33 bp, Homo sapien
aaagaaattctgcaggtagatgtttctcaatat

SEQ ID NO: 155513 - DNA, 33 bp, Homo sapien
caaactgcaagtgatacacaatgcttgatggat

SEQ ID NO: 155514 - DNA, 33 bp, Homo sapien
caaactgcaagtgatagacaatgcttgatggat

SEQ ID NO: 155515 - DNA, 33 bp, Homo sapien
ggaatatcacatccaacttccctcgtacgcatg

SEQ ID NO: 155516 - DNA, 33 bp, Homo sapien
ggaatatcacatccaatttccctcgtacgcatg

SEQ ID NO: 155517 - DNA, 33 bp, Homo sapien
accaccctgtattccaacagaggaagcccttgc

SEQ ID NO: 155518 - DNA, 33 bp, Homo sapien
accaccctgtattccaccagaggaagcccttgc

SEQ ID NO: 155519 - DNA, 33 bp, Homo sapien
gttgggctttaccggcagcaagggcttcctctg

SEQ ID NO: 155520 - DNA, 33 bp, Homo sapien
gttgggctttaccggcggcaagggcttcctctg

SEQ ID NO: 155521 - DNA, 33 bp, Homo sapien
gcccaacttaacatcaagaaatcctgggatatg

SEQ ID NO: 155522 - DNA, 33 bp, Homo sapien
gcccaacttaacatcaggaaatcctgggatatg

SEQ ID NO: 155523 - DNA, 33 bp, Homo sapien
ttttaccctttgctccaatctcagtgtttaatc

SEQ ID NO: 155524 - DNA, 33 bp, Homo sapien
ttttaccctttgctcccatctcagtgtttaatc

SEQ ID NO: 155525 - DNA, 33 bp, Homo sapien
gacaactctacaattcacccagcttgtaccctc

SEQ ID NO: 155526 - DNA, 33 bp, Homo sapien
gacaactctacaattcgcccagcttgtaccctc

SEQ ID NO: 155527 - DNA, 33 bp, Homo sapien
aacaattctgagagtaaaaaagcagcacaaaga

SEQ ID NO: 155528 - DNA, 33 bp, Homo sapien
aacaattctgagagtataaaagcagcacaaaga

SEQ ID NO: 155529 - DNA, 33 bp, Homo sapien
ccctgtagtatcaccaacatttagcctgtgttc

SEQ ID NO: 155530 - DNA, 33 bp, Homo sapien
ccctgtagtatcaccatcatttagcctgtgttc

SEQ ID NO: 155531 - DNA, 33 bp, Homo sapien
cccctgggacaaataactccctttcgttgtgct

SEQ ID NO: 155532 - DNA, 33 bp, Homo sapien
cccctgggacaaataattccctttcgttgtgct

SEQ ID NO: 155533 - DNA, 33 bp, Homo sapien; identical to SEQ ID NO: 155531

SEQ ID NO: 155534 - DNA, 33 bp, Homo sapien; identical to SEQ ID NO: 155532

SEQ ID NO: 155535 - DNA, 33 bp, Homo sapien
ctagaggaaaatgtgaactttgctaggataagt

SEQ ID NO: 155536 - DNA, 33 bp, Homo sapien
ctagaggaaaatgtgacctttgctaggataagt

SEQ ID NO: 155537 - DNA, 33 bp, Homo sapien; identical to SEQ ID NO: 155535

SEQ ID NO: 155538 - DNA, 33 bp, Homo sapien; identical to SEQ ID NO: 155536

SEQ ID NO: 155539 - DNA, 33 bp, Homo sapien
gatgaggcgtaatggcaaacgtataatctggaa

SEQ ID NO: 155540 - DNA, 33 bp, Homo sapien
gatgaggcgtaatggcgaacgtataatctggaa

SEQ ID NO: 155541 - DNA, 33 bp, Homo sapien; identical to SEQ ID NO: 155539

SEQ ID NO: 155542 - DNA, 33 bp, Homo sapien; identical to SEQ ID NO: 155540

SEQ ID NO: 155543 - DNA, 33 bp, Homo sapien
atataagacttccaaactcaggtgcatcctgta

SEQ ID NO: 155544 - DNA, 33 bp, Homo sapien
atataagacttccaaattcaggtgcatcctgta

SEQ ID NO: 155545 - DNA, 33 bp, Homo sapien; identical to SEQ ID NO: 155543

SEQ ID NO: 155546 - DNA, 33 bp, Homo sapien; identical to SEQ ID NO: 155544

SEQ ID NO: 155547 - DNA, 33 bp, Homo sapien
aaagaacaatattgtaaggtcaaattctacgag

SEQ ID NO: 155548 - DNA, 33 bp, Homo sapien
aaagaacaatattgtatggtcaaattctacgag

SEQ ID NO: 155549 - DNA, 33 bp, Homo sapien
taacagtgtatttcaactgtttgtcctcacatc

SEQ ID NO: 155550 - DNA, 33 bp, Homo sapien
taacagtgtatttcaattgtttgtcctcacatc

SEQ ID NO: 155551 - DNA, 33 bp, Homo sapien; identical to SEQ ID NO: 155549

SEQ ID NO: 155552 - DNA, 33 bp, Homo sapien; identical to SEQ ID NO: 155550

SEQ ID NO: 155553 - DNA, 33 bp, Homo sapien
tgattttcaggtggaaactgcttgagaaaaata

SEQ ID NO: 155554 - DNA, 33 bp, Homo sapien
tgattttcaggtggaagctgcttgagaaaaata

SEQ ID NO: 155555 - DNA, 33 bp, Homo sapien
gagcctgccaactctaacagattaaacaaaaat

SEQ ID NO: 155556 - DNA, 33 bp, Homo sapien
gagcctgccaactctatcagattaaacaaaaat

SEQ ID NO: 155557 - DNA, 33 bp, Homo sapien
ttcattcactataatacaactagactacagaac

SEQ ID NO: 155558 - DNA, 33 bp, Homo sapien
ttcattcactataatagaactagactacagaac

SEQ ID NO: 155559 - DNA, 33 bp, Homo sapien
tgcacaattcctgaaaagattgttaagagaccc

SEQ ID NO: 155560 - DNA, 33 bp, Homo sapien
tgcacaattcctgaaacgattgttaagagaccc

SEQ ID NO: 155561 - DNA, 33 bp, Homo sapien
cgactcgtggccacacagagaaacggcaaacca

SEQ ID NO: 155562 - DNA, 33 bp, Homo sapien
cgactcgtggccacacggagaaacggcaaacca

SEQ ID NO: 155563 - DNA, 33 bp, Homo sapien
gtcctaactgaaataactgaggagtgtttcatg

SEQ ID NO: 155564 - DNA, 33 bp, Homo sapien
gtcctaactgaaataattgaggagtgtttcatg

SEQ ID NO: 155565 - DNA, 33 bp, Homo sapien
tgaacaaatacaggtacgacttagttatgaagg

SEQ ID NO: 155566 - DNA, 33 bp, Homo sapien
tgaacaaatacaggtatgacttagttatgaagg

SEQ ID NO: 155567 - DNA, 33 bp, Homo sapien
gcttctctccaccctcagaagaaaatgcatcct

SEQ ID NO: 155568 - DNA, 33 bp, Homo sapien
gcttctctccaccctcggaagaaaatgcatcct

SEQ ID NO: 155569 - DNA, 33 bp, Homo sapien
tgaaacctgaggcagccctgttaggttcaaatc

SEQ ID NO: 155570 - DNA, 33 bp, Homo sapien
tgaaacctgaggcagctctgttaggttcaaatc

SEQ ID NO: 155571 - DNA, 33 bp, Homo sapien
ggatgtagaaaaagcgccaggcttggagtataa

SEQ ID NO: 155572 - DNA, 33 bp, Homo sapien
ggatgtagaaaaagcgtcaggcttggagtataa

SEQ ID NO: 155573 - DNA, 33 bp, Homo sapien
gctcagcaatatagtgaatgaaggagtaagtgt

SEQ ID NO: 155574 - DNA, 33 bp, Homo sapien
gctcagcaatatagtggatgaaggagtaagtgt

SEQ ID NO: 155575 - DNA, 33 bp, Homo sapien
atttgggcacacatcaataattactctaacaca

SEQ ID NO: 155576 - DNA, 33 bp, Homo sapien
atttgggcacacatcagtaattactctaacaca

SEQ ID NO: 155577 - DNA, 33 bp, Homo sapien
catgagagcaatgtaacattttgctaggagaga

SEQ ID NO: 155578 - DNA, 33 bp, Homo sapien
catgagagcaatgtaatattttgctaggagaga

SEQ ID NO: 155579 - DNA, 33 bp, Homo sapien
agggctatggacccaaacattactctctcctgg

SEQ ID NO: 155580 - DNA, 33 bp, Homo sapien
agggctatggacccaagcattactctctcctgg

SEQ ID NO: 155581 - DNA, 33 bp, Homo sapien
cttactggcaatgtataaaaaatcgagtttctc

SEQ ID NO: 155582 - DNA, 33 bp, Homo sapien
cttactggcaatgtatgaaaaatcgagtttctc

SEQ ID NO: 155583 - DNA, 33 bp, Homo sapien
cattttaacttcattcactctgtaaaaactttg

SEQ ID NO: 155584 - DNA, 33 bp, Homo sapien
cattttaacttcattcgctctgtaaaaactttg

SEQ ID NO: 155585 - DNA, 33 bp, Homo sapien
acgcaacagacttgcaaggttttcagcactcta

SEQ ID NO: 155586 - DNA, 33 bp, Homo sapien
acgcaacagacttgcagggttttcagcactcta

SEQ ID NO: 155587 - DNA, 33 bp, Homo sapien
cctcagtgcccaagcacaccaccctaaggcctg

SEQ ID NO: 155588 - DNA, 33 bp, Homo sapien
cctcagtgcccaagcataccaccctaaggcctg

SEQ ID NO: 155589 - DNA, 33 bp, Homo sapien
tcacttatgaccacacactctgctcagagacca

SEQ ID NO: 155590 - DNA, 33 bp, Homo sapien
tcacttatgaccacacgctctgctcagagacca

SEQ ID NO: 155591 - DNA, 33 bp, Homo sapien
cactggagtatatggacatataaagcaaatatt

SEQ ID NO: 155592 - DNA, 33 bp, Homo sapien
cactggagtatatggatatataaagcaaatatt

SEQ ID NO: 155593 - DNA, 33 bp, Homo sapien
tctcttattaacaacacattttgacttcaagtt

SEQ ID NO: 155594 - DNA, 33 bp, Homo sapien
tctcttattaacaacatattttgacttcaagtt

SEQ ID NO: 155595 - DNA, 33 bp, Homo sapien
aatattgactatttagacaaaaacatcgatttt

SEQ ID NO: 155596 - DNA, 33 bp, Homo sapien
aatattgactatttaggcaaaaacatcgatttt

SEQ ID NO: 155597 - DNA, 33 bp, Homo sapien
aatggaaattatcatacggcttttattcttcat

SEQ ID NO: 155598 - DNA, 33 bp, Homo sapien
aatggaaattatcatatggcttttattcttcat

SEQ ID NO: 155599 - DNA, 33 bp, Homo sapien
gactagaaaaaaatgacgttggattgtgccaag

SEQ ID NO: 155600 - DNA, 33 bp, Homo sapien
gactagaaaaaaatgatgttggattgtgccaag

SEQ ID NO: 155601 - DNA, 33 bp, Homo sapien
tggtaaagatgcttgcaaaattcactcatccat

SEQ ID NO: 155602 - DNA, 33 bp, Homo sapien
tggtaaagatgcttgcgaaattcactcatccat

SEQ ID NO: 155603 - DNA, 33 bp, Homo sapien
aagagaagcatggtaccatttggacagtactaa

SEQ ID NO: 155604 - DNA, 33 bp, Homo sapien
aagagaagcatggtactatttggacagtactaa

SEQ ID NO: 155605 - DNA, 33 bp, Homo sapien
aggcttctctaagcaacgtaccttgtttttatt

SEQ ID NO: 155606 - DNA, 33 bp, Homo sapien
aggcttctctaagcaatgtaccttgtttttatt

SEQ ID NO: 155607 - DNA, 33 bp, Homo sapien
aatcttcttgggcaaaagcctaagtctactgat

SEQ ID NO: 155608 - DNA, 33 bp, Homo sapien
aatcttcttgggcaaaggcctaagtctactgat

SEQ ID NO: 155609 - DNA, 33 bp, Homo sapien
gtggaaagatgtgaaaccaaaatcataataaga

SEQ ID NO: 155610 - DNA, 33 bp, Homo sapien
gtggaaagatgtgaaatcaaaatcataataaga

SEQ ID NO: 155611 - DNA, 33 bp, Homo sapien
tccatcagggattctgaaacaccatgctttcct

SEQ ID NO: 155612 - DNA, 33 bp, Homo sapien
tccatcagggattctggaacaccatgctttcct

SEQ ID NO: 155613 - DNA, 33 bp, Homo sapien
ccagagcaactgatcacgtaaatccaatttgag

SEQ ID NO: 155614 - DNA, 33 bp, Homo sapien
ccagagcaactgatcatgtaaatccaatttgag

SEQ ID NO: 155615 - DNA, 33 bp, Homo sapien
ccttctttcaagtctaaatatgtaatgcgactc

SEQ ID NO: 155616 - DNA, 33 bp, Homo sapien
ccttctttcaagtctagatatgtaatgcgactc

SEQ ID NO: 155617 - DNA, 33 bp, Homo sapien
tatgatcacaggctgaaagcttgaagtcagtgg

SEQ ID NO: 155618 - DNA, 33 bp, Homo sapien
tatgatcacaggctgatagcttgaagtcagtgg

SEQ ID NO: 155619 - DNA, 33 bp, Homo sapien; identical to SEQ ID NO: 155617

SEQ ID NO: 155620 - DNA, 33 bp, Homo sapien; identical to SEQ ID NO: 155618

SEQ ID NO: 155621 - DNA, 33 bp, Homo sapien
ataaaagtccctaaacactttctcagtaggctg

SEQ ID NO: 155622 - DNA, 33 bp, Homo sapien
ataaaagtccctaaactctttctcagtaggctg

SEQ ID NO: 155623 - DNA, 33 bp, Homo sapien
cgggggcagaagaagcaagagttgtttgcagta

SEQ ID NO: 155624 - DNA, 33 bp, Homo sapien
cgggggcagaagaagcgagagttgtttgcagta

SEQ ID NO: 155625 - DNA, 33 bp, Homo sapien
cataagaggatgccaacgtggcactgatggagg

SEQ ID NO: 155626 - DNA, 33 bp, Homo sapien
cataagaggatgccaatgtggcactgatggagg

SEQ ID NO: 155627 - DNA, 33 bp, Homo sapien
atatgttcctgttcaactctggcgtggcttttc

SEQ ID NO: 155628 - DNA, 33 bp, Homo sapien
atatgttcctgttcaattctggcgtggcttttc

SEQ ID NO: 155629 - DNA, 33 bp, Homo sapien
gaaggtctgtgaagaaatgattgcacaattgtg

SEQ ID NO: 155630 - DNA, 33 bp, Homo sapien
gaaggtctgtgaagaagtgattgcacaattgtg

SEQ ID NO: 155631 - DNA, 33 bp, Homo sapien
ggacaatggtatgtcaatcctaactggttactc

SEQ ID NO: 155632 - DNA, 33 bp, Homo sapien
ggacaatggtatgtcagtcctaactggttactc

SEQ ID NO: 155633 - DNA, 33 bp, Homo sapien
tatagacattatgaggaaaaagaaagacacaag

SEQ ID NO: 155634 - DNA, 33 bp, Homo sapien
tatagacattatgagggaaaagaaagacacaag

SEQ ID NO: 155635 - DNA, 33 bp, Homo sapien
aatgccagttttccacacccttgctctgtttct

SEQ ID NO: 155636 - DNA, 33 bp, Homo sapien
aatgccagttttccacgcccttgctctgtttct

SEQ ID NO: 155637 - DNA, 33 bp, Homo sapien
ttatttgtttctcttgcaatgcttaatattggg

SEQ ID NO: 155638 - DNA, 33 bp, Homo sapien
ttatttgtttctcttgtaatgcttaatattggg

SEQ ID NO: 155639 - DNA, 33 bp, Homo sapien
gagcatgctcatcaaactcactaacactctgct

SEQ ID NO: 155640 - DNA, 33 bp, Homo sapien
gagcatgctcatcaaagtcactaacactctgct

SEQ ID NO: 155641 - DNA, 33 bp, Homo sapien
aactgccctattccaacactgatgcttttgtag

SEQ ID NO: 155642 - DNA, 33 bp, Homo sapien
aactgccctattccaatactgatgcttttgtag

SEQ ID NO: 155643 - DNA, 33 bp, Homo sapien
gagggcagttagatgacgacactcacactgtgg

SEQ ID NO: 155644 - DNA, 33 bp, Homo sapien
gagggcagttagatgatgacactcacactgtgg

SEQ ID NO: 155645 - DNA, 33 bp, Homo sapien
attttgttgaatgtgtcaatactattctggttc

SEQ ID NO: 155646 - DNA, 33 bp, Homo sapien
attttgttgaatgtgttaatactattctggttc

SEQ ID NO: 155647 - DNA, 33 bp, Homo sapien
gttactataaccagaaaattgagaaggaaagaa

SEQ ID NO: 155648 - DNA, 33 bp, Homo sapien
gttactataaccagaagattgagaaggaaagaa

SEQ ID NO: 155649 - DNA, 33 bp, Homo sapien
agcattcagtgtatcaacaagcctcgtacaata

SEQ ID NO: 155650 - DNA, 33 bp, Homo sapien
agcattcagtgtatcagcaagcctcgtacaata

SEQ ID NO: 155651 - DNA, 33 bp, Homo sapien
aaatgaatatgctaaacggttatctttcaataa

SEQ ID NO: 155652 - DNA, 33 bp, Homo sapien
aaatgaatatgctaaatggttatctttcaataa

SEQ ID NO: 155653 - DNA, 33 bp, Homo sapien
gtcaaagtgattcacagtcagtagagaaaccat

SEQ ID NO: 155654 - DNA, 33 bp, Homo sapien
gtcaaagtgattcacattcagtagagaaaccat

SEQ ID NO: 155655 - DNA, 33 bp, Homo sapien
atgatctctcagccacaaaattactaacttatc

SEQ ID NO: 155656 - DNA, 33 bp, Homo sapien
atgatctctcagccacgaaattactaacttatc

SEQ ID NO: 155657 - DNA, 33 bp, Homo sapien
taaatacaatgctaaaaatgctgggcataaagt

SEQ ID NO: 155658 - DNA, 33 bp, Homo sapien
taaatacaatgctaaacatgctgggcataaagt

SEQ ID NO: 155659 - DNA, 33 bp, Homo sapien
gctggactctgctctaagtggcttatagacatc

SEQ ID NO: 155660 - DNA, 33 bp, Homo sapien
gctggactctgctctatgtggcttatagacatc

SEQ ID NO: 155661 - DNA, 33 bp, Homo sapien
caacattcattacagcaaacacttgcatagcac

SEQ ID NO: 155662 - DNA, 33 bp, Homo sapien
caacattcattacagcgaacacttgcatagcac

SEQ ID NO: 155663 - DNA, 33 bp, Homo sapien
cttaatttattcatctcacaaagaaaatggatc

SEQ ID NO: 155664 - DNA, 33 bp, Homo sapien
cttaatttattcatctgacaaagaaaatggatc

SEQ ID NO: 155665 - DNA, 33 bp, Homo sapien
gtgctcagagaagagaagggaagttttcttggt

SEQ ID NO: 155666 - DNA, 33 bp, Homo sapien
gtgctcagagaagagacgggaagttttcttggt

SEQ ID NO: 155667 - DNA, 33 bp, Homo sapien
taagaacagactgactaactgctaggcattttc

SEQ ID NO: 155668 - DNA, 33 bp, Homo sapien
taagaacagactgactgactgctaggcattttc

SEQ ID NO: 155669 - DNA, 33 bp, Homo sapien
ccaaagggcaaaaatcagagaggacctctaggc

SEQ ID NO: 155670 - DNA, 33 bp, Homo sapien
ccaaagggcaaaaatccgagaggacctctaggc

SEQ ID NO: 155671 - DNA, 33 bp, Homo sapien
actgggtctccagcctaacaacctttgattctt

SEQ ID NO: 155672 - DNA, 33 bp, Homo sapien
actgggtctccagcctgacaacctttgattctt

SEQ ID NO: 155673 - DNA, 33 bp, Homo sapien
gggttaaacatttcaactggctagagaaacagg

SEQ ID NO: 155674 - DNA, 33 bp, Homo sapien
gggttaaacatttcaattggctagagaaacagg

SEQ ID NO: 155675 - DNA, 33 bp, Homo sapien
atgtcttgatatgtgtcaacttcagaatccggt

SEQ ID NO: 155676 - DNA, 33 bp, Homo sapien
atgtcttgatatgtgtgaacttcagaatccggt

SEQ ID NO: 155677 - DNA, 33 bp, Homo sapien
taatttcctcagtctacgcaagtggttctcagc

SEQ ID NO: 155678 - DNA, 33 bp, Homo sapien
taatttcctcagtctatgcaagtggttctcagc

SEQ ID NO: 155679 - DNA, 33 bp, Homo sapien
aatgggagaggttatacaacaagacagatctag

SEQ ID NO: 155680 - DNA, 33 bp, Homo sapien
aatgggagaggttatagaacaagacagatctag

SEQ ID NO: 155681 - DNA, 33 bp, Homo sapien
gctaagatatggagtgaacctaaatatttatca

SEQ ID NO: 155682 - DNA, 33 bp, Homo sapien
gctaagatatggagtggacctaaatatttatca

SEQ ID NO: 155683 - DNA, 33 bp, Homo sapien
ctcttctaagcctacaaatattaacttcagaga

SEQ ID NO: 155684 - DNA, 33 bp, Homo sapien
ctcttctaagcctacagatattaacttcagaga

SEQ ID NO: 155685 - DNA, 33 bp, Homo sapien
attcacagaacactatgaatacttacgtgtttc

SEQ ID NO: 155686 - DNA, 33 bp, Homo sapien
attcacagaacactattaatacttacgtgtttc

SEQ ID NO: 155687 - DNA, 33 bp, Homo sapien
gggacagtccagagtacagtttcgcaaaatgtg

SEQ ID NO: 155688 - DNA, 33 bp, Homo sapien
gggacagtccagagtatagtttcgcaaaatgtg

SEQ ID NO: 155689 - DNA, 33 bp, Homo sapien
caaaaaacatgtaaaagaactctttgaagtaaa

SEQ ID NO: 155690 - DNA, 33 bp, Homo sapien
caaaaaacatgtaaaataactctttgaagtaaa

SEQ ID NO: 155691 - DNA, 33 bp, Homo sapien
cagttatgttttaacactggcattatgtgtgtc

SEQ ID NO: 155692 - DNA, 33 bp, Homo sapien
cagttatgttttaacattggcattatgtgtgtc

SEQ ID NO: 155693 - DNA, 33 bp, Homo sapien
tcaatccttcttcctaaggacaatcacagttat

SEQ ID NO: 155694 - DNA, 33 bp, Homo sapien
tcaatccttcttcctagggacaatcacagttat

SEQ ID NO: 155695 - DNA, 33 bp, Homo sapien
acagagattgctttcaactgattaggattgaga

SEQ ID NO: 155696 - DNA, 33 bp, Homo sapien
acagagattgctttcagctgattaggattgaga

SEQ ID NO: 155697 - DNA, 33 bp, Homo sapien
caaggtctacaacctaaaccaaaggctggtcac

SEQ ID NO: 155698 - DNA, 33 bp, Homo sapien
caaggtctacaacctacaccaaaggctggtcac

SEQ ID NO: 155699 - DNA, 33 bp, Homo sapien
atttgatacagagttaactggtctttcagtatt

SEQ ID NO: 155700 - DNA, 33 bp, Homo sapien
atttgatacagagttacctggtctttcagtatt

SEQ ID NO: 155701 - DNA, 33 bp, Homo sapien
gggagcagctttgtacaggcagttgtcatcagg

SEQ ID NO: 155702 - DNA, 33 bp, Homo sapien
gggagcagctttgtacgggcagttgtcatcagg

SEQ ID NO: 155703 - DNA, 33 bp, Homo sapien
tcaatgatattcttcacgtagtctttggaagta

SEQ ID NO: 155704 - DNA, 33 bp, Homo sapien
tcaatgatattcttcatgtagtctttggaagta

SEQ ID NO: 155705 - DNA, 33 bp, Homo sapien
atcaaccatatacatacgataggccgaataaag

SEQ ID NO: 155706 - DNA, 33 bp, Homo sapien
atcaaccatatacatatgataggccgaataaag

SEQ ID NO: 155707 - DNA, 33 bp, Homo sapien
catgcccagccaataactatattccttcgttta

SEQ ID NO: 155708 - DNA, 33 bp, Homo sapien
catgcccagccaataagtatattccttcgttta

SEQ ID NO: 155709 - DNA, 33 bp, Homo sapien
ctctcttgttttccaactatttgttcacctgga

SEQ ID NO: 155710 - DNA, 33 bp, Homo sapien
ctctcttgttttccaagtatttgttcacctgga

SEQ ID NO: 155711 - DNA, 33 bp, Homo sapien
tggccagactggtctacaacttctcatctcagg

SEQ ID NO: 155712 - DNA, 33 bp, Homo sapien
tggccagactggtctagaacttctcatctcagg

SEQ ID NO: 155713 - DNA, 33 bp, Homo sapien
tcaggatcatgctttcacctggagcaacgtgaa

SEQ ID NO: 155714 - DNA, 33 bp, Homo sapien
tcaggatcatgctttcgcctggagcaacgtgaa

SEQ ID NO: 155715 - DNA, 33 bp, Homo sapien
actagaagtccccatacatgccactggcagcca

SEQ ID NO: 155716 - DNA, 33 bp, Homo sapien
actagaagtccccatatatgccactggcagcca

SEQ ID NO: 155717 - DNA, 33 bp, Homo sapien
cactgatacttgacacagtgagtgccactagaa

SEQ ID NO: 155718 - DNA, 33 bp, Homo sapien
cactgatacttgacacggtgagtgccactagaa

SEQ ID NO: 155719 - DNA, 33 bp, Homo sapien
tcatgaggcttctttcccagctggtggtgtacc

SEQ ID NO: 155720 - DNA, 33 bp, Homo sapien
tcatgaggcttctttctcagctggtggtgtacc

SEQ ID NO: 155721 - DNA, 33 bp, Homo sapien
ctccatgtcaaaaaaaaaagaatgtgggaactc

SEQ ID NO: 155722 - DNA, 33 bp, Homo sapien
ctccatgtcaaaaaaagaagaatgtgggaactc

SEQ ID NO: 155723 - DNA, 33 bp, Homo sapien
cacatcttttgataccagggtctattgcaaccc

SEQ ID NO: 155724 - DNA, 33 bp, Homo sapien
cacatcttttgataccggggtctattgcaaccc

SEQ ID NO: 155725 - DNA, 33 bp, Homo sapien
acttcccctcgcatcaaatggtcatatttagct

SEQ ID NO: 155726 - DNA, 33 bp, Homo sapien
acttcccctcgcatcacatggtcatatttagct

SEQ ID NO: 155727 - DNA, 33 bp, Homo sapien
ggaggactactcctacaataatcatcttgaggg

SEQ ID NO: 155728 - DNA, 33 bp, Homo sapien
ggaggactactcctacgataatcatcttgaggg

SEQ ID NO: 155729 - DNA, 33 bp, Homo sapien
agtgtctagcacattacaaacattcagtaattg

SEQ ID NO: 155730 - DNA, 33 bp, Homo sapien
agtgtctagcacattataaacattcagtaattg

SEQ ID NO: 155731 - DNA, 33 bp, Homo sapien
gcacatacaggatcaccggacatgaggagcttt

SEQ ID NO: 155732 - DNA, 33 bp, Homo sapien
gcacatacaggatcactggacatgaggagcttt

SEQ ID NO: 155733 - DNA, 33 bp, Homo sapien
tttatttagccaaaacaataactcaaaaaggca

SEQ ID NO: 155734 - DNA, 33 bp, Homo sapien
tttatttagccaaaacgataactcaaaaaggca

SEQ ID NO: 155735 - DNA, 33 bp, Homo sapien
tgccttagggccatgaagatttctttgacacca

SEQ ID NO: 155736 - DNA, 33 bp, Homo sapien
tgccttagggccatgaggatttctttgacacca

SEQ ID NO: 155737 - DNA, 33 bp, Homo sapien
cagaatgtaagtagtcaagagtgacacagatgt

SEQ ID NO: 155738 - DNA, 33 bp, Homo sapien
cagaatgtaagtagtccagagtgacacagatgt

SEQ ID NO: 155739 - DNA, 33 bp, Homo sapien
tatgtggttttagatacgttccaggcaccatcc

SEQ ID NO: 155740 - DNA, 33 bp, Homo sapien
tatgtggttttagatatgttccaggcaccatcc

SEQ ID NO: 155741 - DNA, 33 bp, Homo sapien
gaaccgtttgacaccaaaagttcaagaccaacc

SEQ ID NO: 155742 - DNA, 33 bp, Homo sapien
gaaccgtttgacaccagaagttcaagaccaacc

SEQ ID NO: 155743 - DNA, 33 bp, Homo sapien
gcctgattccatagcaataaaactgtctgcttc

SEQ ID NO: 155744 - DNA, 33 bp, Homo sapien
gcctgattccatagcagtaaaactgtctgcttc

SEQ ID NO: 155745 - DNA, 33 bp, Homo sapien
ctgcttttaaatactaacaagaggtctcaaaca

SEQ ID NO: 155746 - DNA, 33 bp, Homo sapien
ctgcttttaaatactagcaagaggtctcaaaca

SEQ ID NO: 155747 - DNA, 33 bp, Homo sapien
agggtggccttgtaaacatactcaggctgtgta

SEQ ID NO: 155748 - DNA, 33 bp, Homo sapien
agggtggccttgtaaagatactcaggctgtgta

SEQ ID NO: 155749 - DNA, 33 bp, Homo sapien
gattgggcactacaggccagaagcccaggatcc

SEQ ID NO: 155750 - DNA, 33 bp, Homo sapien
gattgggcactacaggtcagaagcccaggatcc

SEQ ID NO: 155751 - DNA, 33 bp, Homo sapien
ttttagatactacagacgaaacacctagcatag

SEQ ID NO: 155752 - DNA, 33 bp, Homo sapien
ttttagatactacagatgaaacacctagcatag

SEQ ID NO: 155753 - DNA, 33 bp, Homo sapien
aaatatgtctataaaaagatagcaaatacctga

SEQ ID NO: 155754 - DNA, 33 bp, Homo sapien
aaatatgtctataaaatgatagcaaatacctga

SEQ ID NO: 155755 - DNA, 33 bp, Homo sapien
tatctggttcagcccactaatttctcagatgga

SEQ ID NO: 155756 - DNA, 33 bp, Homo sapien
tatctggttcagcccattaatttctcagatgga

SEQ ID NO: 155757 - DNA, 33 bp, Homo sapien
tgaggagtatgatggaagatgctctagaaattc

SEQ ID NO: 155758 - DNA, 33 bp, Homo sapien
tgaggagtatgatggacgatgctctagaaattc

SEQ ID NO: 155759 - DNA, 33 bp, Homo sapien
ggaaaaggtggttttcaagaatttctagagcat

SEQ ID NO: 155760 - DNA, 33 bp, Homo sapien
ggaaaaggtggttttcgagaatttctagagcat

SEQ ID NO: 155761 - DNA, 33 bp, Homo sapien
acctacaatgagagaaaagtacatcaaaaggaa

SEQ ID NO: 155762 - DNA, 33 bp, Homo sapien
acctacaatgagagaagagtacatcaaaaggaa

SEQ ID NO: 155763 - DNA, 33 bp, Homo sapien
atttggaattgtgcatcagtcctctacccagcc

SEQ ID NO: 155764 - DNA, 33 bp, Homo sapien
atttggaattgtgcattagtcctctacccagcc

SEQ ID NO: 155765 - DNA, 33 bp, Homo sapien
ctggtcagagataggcactgcaggattagggtg

SEQ ID NO: 155766 - DNA, 33 bp, Homo sapien
ctggtcagagataggcgctgcaggattagggtg

SEQ ID NO: 155767 - DNA, 33 bp, Homo sapien
cagcgttgtccttagacctgggccctgtgcccc

SEQ ID NO: 155768 - DNA, 33 bp, Homo sapien
cagcgttgtccttagatctgggccctgtgcccc

SEQ ID NO: 155769 - DNA, 33 bp, Homo sapien
aggtgggtgtgggaacaaatgagccaccaggca

SEQ ID NO: 155770 - DNA, 33 bp, Homo sapien
aggtgggtgtgggaacgaatgagccaccaggca

SEQ ID NO: 155771 - DNA, 33 bp, Homo sapien
gtctgttttatttaccgctatatatctagcacc

SEQ ID NO: 155772 - DNA, 33 bp, Homo sapien
gtctgttttatttacctctatatatctagcacc

SEQ ID NO: 155773 - DNA, 33 bp, Homo sapien
caaacgccaaatcccacgctctttcttcctcca

SEQ ID NO: 155774 - DNA, 33 bp, Homo sapien
caaacgccaaatcccatgctctttcttcctcca

SEQ ID NO: 155775 - DNA, 33 bp, Homo sapien
gagaaccctctttctaacctattagggcacctt

SEQ ID NO: 155776 - DNA, 33 bp, Homo sapien
gagaaccctctttctagcctattagggcacctt

SEQ ID NO: 155777 - DNA, 33 bp, Homo sapien
gggcatgctggtttcacggaaaaggaatgatca

SEQ ID NO: 155778 - DNA, 33 bp, Homo sapien
gggcatgctggtttcatggaaaaggaatgatca

SEQ ID NO: 155779 - DNA, 33 bp, Homo sapien
ctctgggacacgtgacccattctcatgaggtgt

SEQ ID NO: 155780 - DNA, 33 bp, Homo sapien
ctctgggacacgtgactcattctcatgaggtgt

SEQ ID NO: 155781 - DNA, 33 bp, Homo sapien
caagactctgaaaacactgcattctgctccctc

SEQ ID NO: 155782 - DNA, 33 bp, Homo sapien
caagactctgaaaacattgcattctgctccctc

SEQ ID NO: 155783 - DNA, 33 bp, Homo sapien
ccctctttatcccccacgacagaaagcccagtg

SEQ ID NO: 155784 - DNA, 33 bp, Homo sapien
ccctctttatcccccatgacagaaagcccagtg

SEQ ID NO: 155785 - DNA, 33 bp, Homo sapien
gggaagggctgctgcacgacactcagtaccagg

SEQ ID NO: 155786 - DNA, 33 bp, Homo sapien
gggaagggctgctgcatgacactcagtaccagg

SEQ ID NO: 155787 - DNA, 33 bp, Homo sapien
catcatgggctaaagaagaacacagctgacttg

SEQ ID NO: 155788 - DNA, 33 bp, Homo sapien
catcatgggctaaagaggaacacagctgacttg

SEQ ID NO: 155789 - DNA, 33 bp, Homo sapien
gggagatgggaatgagcaattagtatttaatga

SEQ ID NO: 155790 - DNA, 33 bp, Homo sapien
gggagatgggaatgaggaattagtatttaatga

SEQ ID NO: 155791 - DNA, 33 bp, Homo sapien
cctggtagattcatagcccctactcctaagcct

SEQ ID NO: 155792 - DNA, 33 bp, Homo sapien
cctggtagattcatagtccctactcctaagcct

SEQ ID NO: 155793 - DNA, 33 bp, Homo sapien
gcaccgctagctttccaaagttgcctttacaag

SEQ ID NO: 155794 - DNA, 33 bp, Homo sapien
gcaccgctagctttccgaagttgcctttacaag

SEQ ID NO: 155795 - DNA, 33 bp, Homo sapien
tccattgtttcactgacaggcaggtatgactag

SEQ ID NO: 155796 - DNA, 33 bp, Homo sapien
tccattgtttcactgagaggcaggtatgactag

SEQ ID NO: 155797 - DNA, 33 bp, Homo sapien
acaaaaagtgtgaaagcagtgctatgaggtaac

SEQ ID NO: 155798 - DNA, 33 bp, Homo sapien
acaaaaagtgtgaaaggagtgctatgaggtaac

SEQ ID NO: 155799 - DNA, 33 bp, Homo sapien
tttatgccagaaccgcactgttttaattacaat

SEQ ID NO: 155800 - DNA, 33 bp, Homo sapien
tttatgccagaaccgcgctgttttaattacaat

SEQ ID NO: 155801 - DNA, 33 bp, Homo sapien
tgtcctaactcttgtaaaacatcaatatagcca

SEQ ID NO: 155802 - DNA, 33 bp, Homo sapien
tgtcctaactcttgtacaacatcaatatagcca

SEQ ID NO: 155803 - DNA, 33 bp, Homo sapien
aatgtggagcgacaaaaaccctggtaaaggaat

SEQ ID NO: 155804 - DNA, 33 bp, Homo sapien
aatgtggagcgacaaagaccctggtaaaggaat

SEQ ID NO: 155805 - DNA, 33 bp, Homo sapien
ccttataaatgctaaaccatcattgctgtagat

SEQ ID NO: 155806 - DNA, 33 bp, Homo sapien
ccttataaatgctaaatcatcattgctgtagat

SEQ ID NO: 155807 - DNA, 33 bp, Homo sapien
catcactagaggattccaggacatggtaataag

SEQ ID NO: 155808 - DNA, 33 bp, Homo sapien
catcactagaggattctaggacatggtaataag

SEQ ID NO: 155809 - DNA, 33 bp, Homo sapien
gaatctgaataagtaaatgacataaagcccaca

SEQ ID NO: 155810 - DNA, 33 bp, Homo sapien
gaatctgaataagtaattgacataaagcccaca

SEQ ID NO: 155811 - DNA, 33 bp, Homo sapien
accaacaaagagtaaacgatggggttggtgtag

SEQ ID NO: 155812 - DNA, 33 bp, Homo sapien
accaacaaagagtaaatgatggggttggtgtag

SEQ ID NO: 155813 - DNA, 33 bp, Homo sapien
ggtgttctgcattgtgaagaatacctcttggaa

SEQ ID NO: 155814 - DNA, 33 bp, Homo sapien
ggtgttctgcattgtggagaatacctcttggaa

SEQ ID NO: 155815 - DNA, 33 bp, Homo sapien
ggagctgagagaataaatccataggttcacaag

SEQ ID NO: 155816 - DNA, 33 bp, Homo sapien
ggagctgagagaataagtccataggttcacaag

SEQ ID NO: 155817 - DNA, 33 bp, Homo sapien
tagtcaccttttcagaacctctgacatttaacg

SEQ ID NO: 155818 - DNA, 33 bp, Homo sapien
tagtcaccttttcagaccctctgacatttaacg

SEQ ID NO: 155819 - DNA, 33 bp, Homo sapien
gtggcaaactagcatcacctgttagatgttctt

SEQ ID NO: 155820 - DNA, 33 bp, Homo sapien
gtggcaaactagcatcgcctgttagatgttctt

SEQ ID NO: 155821 - DNA, 33 bp, Homo sapien
ttggtggttccatccaagttcagtgatggatgg

SEQ ID NO: 155822 - DNA, 33 bp, Homo sapien
ttggtggttccatccaggttcagtgatggatgg

SEQ ID NO: 155823 - DNA, 33 bp, Homo sapien
agtgcatcttcagcaacctcaaccatcaggtgt

SEQ ID NO: 155824 - DNA, 33 bp, Homo sapien
agtgcatcttcagcaatctcaaccatcaggtgt

SEQ ID NO: 155825 - DNA, 33 bp, Homo sapien
atattcagagctacataaaatccaatgaacaaa

SEQ ID NO: 155826 - DNA, 33 bp, Homo sapien
atattcagagctacatcaaatccaatgaacaaa

SEQ ID NO: 155827 - DNA, 33 bp, Homo sapien
caatgaaattaaggcaaatatcaaaaatttctt

SEQ ID NO: 155828 - DNA, 33 bp, Homo sapien
caatgaaattaaggcagatatcaaaaatttctt

SEQ ID NO: 155829 - DNA, 33 bp, Homo sapien; identical to SEQ ID NO: 155827

SEQ ID NO: 155830 - DNA, 33 bp, Homo sapien; identical to SEQ ID NO: 155828

SEQ ID NO: 155831 - DNA, 33 bp, Homo sapien
caccctcagatcttccacagtattgtcagaaat

SEQ ID NO: 155832 - DNA, 33 bp, Homo sapien
caccctcagatcttccgcagtattgtcagaaat

SEQ ID NO: 155833 - DNA, 33 bp, Homo sapien
cactctttttgtgctcgaattgcattctctgcc

SEQ ID NO: 155834 - DNA, 33 bp, Homo sapien
cactctttttgtgctctaattgcattctctgcc

SEQ ID NO: 155835 - DNA, 33 bp, Homo sapien
atgtataatagacatacagtggtgctgggtcca

SEQ ID NO: 155836 - DNA, 33 bp, Homo sapien
atgtataatagacatagagtggtgctgggtcca

SEQ ID NO: 155837 - DNA, 33 bp, Homo sapien
ctgttcagtacctatacagctactcctgtcctc

SEQ ID NO: 155838 - DNA, 33 bp, Homo sapien
ctgttcagtacctatagagctactcctgtcctc

SEQ ID NO: 155839 - DNA, 33 bp, Homo sapien
aaagccagcttcagtcactacaaatccttcttc

SEQ ID NO: 155840 - DNA, 33 bp, Homo sapien
aaagccagcttcagtctctacaaatccttcttc

SEQ ID NO: 155841 - DNA, 33 bp, Homo sapien
gtgggaatgtaaacaactacaactactatggaa

SEQ ID NO: 155842 - DNA, 33 bp, Homo sapien
gtgggaatgtaaacaagtacaactactatggaa

SEQ ID NO: 155843 - DNA, 33 bp, Homo sapien
ttcctgtgtacccatcacctaatatataccaat

SEQ ID NO: 155844 - DNA, 33 bp, Homo sapien
ttcctgtgtacccatctcctaatatataccaat

SEQ ID NO: 155845 - DNA, 33 bp, Homo sapien
atatttgcttccaatccctcctaaaaatgaata

SEQ ID NO: 155846 - DNA, 33 bp, Homo sapien
atatttgcttccaatctctcctaaaaatgaata

SEQ ID NO: 155847 - DNA, 33 bp, Homo sapien
atcctgcaaggattcaagatagttttaccaata

SEQ ID NO: 155848 - DNA, 33 bp, Homo sapien
atcctgcaaggattcaggatagttttaccaata

SEQ ID NO: 155849 - DNA, 33 bp, Homo sapien
caatcataaagaaggaacatcacagcaatctct

SEQ ID NO: 155850 - DNA, 33 bp, Homo sapien
caatcataaagaaggagcatcacagcaatctct

SEQ ID NO: 155851 - DNA, 33 bp, Homo sapien
agggctttccattctgcaggtttcagcaaatag

SEQ ID NO: 155852 - DNA, 33 bp, Homo sapien
agggctttccattctgtaggtttcagcaaatag

SEQ ID NO: 155853 - DNA, 33 bp, Homo sapien
ggaatgtcactgtcaacaaaataaccagtttcc

SEQ ID NO: 155854 - DNA, 33 bp, Homo sapien
ggaatgtcactgtcaagaaaataaccagtttcc

SEQ ID NO: 155855 - DNA, 33 bp, Homo sapien
aggcttatgaagataccgggcagccttgtgatt

SEQ ID NO: 155856 - DNA, 33 bp, Homo sapien
aggcttatgaagatactgggcagccttgtgatt

SEQ ID NO: 155857 - DNA, 33 bp, Homo sapien
ccaaatatctacagtacgatcttaccaaatttt

SEQ ID NO: 155858 - DNA, 33 bp, Homo sapien
ccaaatatctacagtatgatcttaccaaatttt

SEQ ID NO: 155859 - DNA, 33 bp, Homo sapien
gtttgttgtgtggactcactccaagaatattga

SEQ ID NO: 155860 - DNA, 33 bp, Homo sapien
gtttgttgtgtggactgactccaagaatattga

SEQ ID NO: 155861 - DNA, 33 bp, Homo sapien
ctgccatcctgaagagcaatgccacacccaagc

SEQ ID NO: 155862 - DNA, 33 bp, Homo sapien
ctgccatcctgaagaggaatgccacacccaagc

SEQ ID NO: 155863 - DNA, 33 bp, Homo sapien
gagagaaagatgtgtgaacaaataattcaagta

SEQ ID NO: 155864 - DNA, 33 bp, Homo sapien
gagagaaagatgtgtggacaaataattcaagta

SEQ ID NO: 155865 - DNA, 33 bp, Homo sapien; identical to SEQ ID NO: 155863

SEQ ID NO: 155866 - DNA, 33 bp, Homo sapien; identical to SEQ ID NO: 155864

SEQ ID NO: 155867 - DNA, 33 bp, Homo sapien
actgaatcccagaaaggccctccagctttagca

SEQ ID NO: 155868 - DNA, 33 bp, Homo sapien
actgaatcccagaaagtccctccagctttagca

SEQ ID NO: 155869 - DNA, 33 bp, Homo sapien
tctattgaacccagtaaagaaaagttgcagtga

SEQ ID NO: 155870 - DNA, 33 bp, Homo sapien
tctattgaacccagtagagaaaagttgcagtga

SEQ ID NO: 155871 - DNA, 33 bp, Homo sapien
aagaatagatcaatcactagaggaatttgggaa

SEQ ID NO: 155872 - DNA, 33 bp, Homo sapien
aagaatagatcaatcattagaggaatttgggaa

SEQ ID NO: 155873 - DNA, 33 bp, Homo sapien
atgctcattattccgaatactccagtcttgtga

SEQ ID NO: 155874 - DNA, 33 bp, Homo sapien
atgctcattattccgagtactccagtcttgtga

SEQ ID NO: 155875 - DNA, 33 bp, Homo sapien
gtggtctggatcacaacactatttatcttcagt

SEQ ID NO: 155876 - DNA, 33 bp, Homo sapien
gtggtctggatcacaatactatttatcttcagt

SEQ ID NO: 155877 - DNA, 33 bp, Homo sapien; identical to SEQ ID NO: 155875

SEQ ID NO: 155878 - DNA, 33 bp, Homo sapien; identical to SEQ ID NO: 155876

SEQ ID NO: 155879 - DNA, 33 bp, Homo sapien
taaaaacactctcaccaattggttttataaaaa

SEQ ID NO: 155880 - DNA, 33 bp, Homo sapien
taaaaacactctcacctattggttttataaaaa

SEQ ID NO: 155881 - DNA, 33 bp, Homo sapien; identical to SEQ ID NO: 155879

SEQ ID NO: 155882 - DNA, 33 bp, Homo sapien; identical to SEQ ID NO: 155880

SEQ ID NO: 155883 - DNA, 33 bp, Homo sapien
ccgacaagggaaacgacgcacgtcagcaccgtg

SEQ ID NO: 155884 - DNA, 33 bp, Homo sapien
ccgacaagggaaacgatgcacgtcagcaccgtg

SEQ ID NO: 155885 - DNA, 33 bp, Homo sapien
tcaggcttcagagtcaacaagaactggatttca

SEQ ID NO: 155886 - DNA, 33 bp, Homo sapien
tcaggcttcagagtcagcaagaactggatttca

SEQ ID NO: 155887 - DNA, 33 bp, Homo sapien
accacctctttgcatacctgaattcctccccct

SEQ ID NO: 155888 - DNA, 33 bp, Homo sapien
accacctctttgcatatctgaattcctccccct

SEQ ID NO: 155889 - DNA, 33 bp, Homo sapien; identical to SEQ ID NO: 155887

SEQ ID NO: 155890 - DNA, 33 bp, Homo sapien; identical to SEQ ID NO: 155888

SEQ ID NO: 155891 - DNA, 33 bp, Homo sapien
tgtgcctttaaaataaagactcagtgtggcttt

SEQ ID NO: 155892 - DNA, 33 bp, Homo sapien
tgtgcctttaaaataaggactcagtgtggcttt

SEQ ID NO: 155893 - DNA, 33 bp, Homo sapien
gccgaacccctagaagaattttgtacacagtgt

SEQ ID NO: 155894 - DNA, 33 bp, Homo sapien
gccgaacccctagaagcattttgtacacagtgt

SEQ ID NO: 155895 - DNA, 33 bp, Homo sapien
actgcagcaggtaattaaagtgtgggaatatct

SEQ ID NO: 155896 - DNA, 33 bp, Homo sapien
actgcagcaggtaattgaagtgtgggaatatct

SEQ ID NO: 155897 - DNA, 33 bp, Homo sapien
caacttcagatagagaaagagaagcaggtcaaa

SEQ ID NO: 155898 - DNA, 33 bp, Homo sapien
caacttcagatagagagagagaagcaggtcaaa

SEQ ID NO: 155899 - DNA, 33 bp, Homo sapien; identical to SEQ ID NO: 155897

SEQ ID NO: 155900 - DNA, 33 bp, Homo sapien; identical to SEQ ID NO: 155898

SEQ ID NO: 155901 - DNA, 33 bp, Homo sapien
accatataggatcacaagtatgagggcaactct

SEQ ID NO: 155902 - DNA, 33 bp, Homo sapien
accatataggatcacaggtatgagggcaactct

SEQ ID NO: 155903 - DNA, 33 bp, Homo sapien
gaatctgcagattcagaacctagtgacccagag

SEQ ID NO: 155904 - DNA, 33 bp, Homo sapien
gaatctgcagattcaggacctagtgacccagag

SEQ ID NO: 155905 - DNA, 33 bp, Homo sapien
ggcagatgtatacctacgttagaaacctgcaga

SEQ ID NO: 155906 - DNA, 33 bp, Homo sapien
ggcagatgtatacctatgttagaaacctgcaga

SEQ ID NO: 155907 - DNA, 33 bp, Homo sapien
acacagaatttgaataagaatttttgattaccc

SEQ ID NO: 155908 - DNA, 33 bp, Homo sapien
acacagaatttgaataggaatttttgattaccc

SEQ ID NO: 155909 - DNA, 33 bp, Homo sapien
gaatgaattctggtaaaattgaaatgttcatat

SEQ ID NO: 155910 - DNA, 33 bp, Homo sapien
gaatgaattctggtaagattgaaatgttcatat

SEQ ID NO: 155911 - DNA, 33 bp, Homo sapien
gcagaggacactctatgaagttggaggtgccta

SEQ ID NO: 155912 - DNA, 33 bp, Homo sapien
gcagaggacactctattaagttggaggtgccta

SEQ ID NO: 155913 - DNA, 33 bp, Homo sapien; identical to SEQ ID NO: 155911

SEQ ID NO: 155914 - DNA, 33 bp, Homo sapien; identical to SEQ ID NO: 155912

SEQ ID NO: 155915 - DNA, 33 bp, Homo sapien
gaggacagataattcaagtacactattataagt

SEQ ID NO: 155916 - DNA, 33 bp, Homo sapien
gaggacagataattcacgtacactattataagt

SEQ ID NO: 155917 - DNA, 33 bp, Homo sapien; identical to SEQ ID NO: 155915

SEQ ID NO: 155918 - DNA, 33 bp, Homo sapien; identical to SEQ ID NO: 155916

SEQ ID NO: 155919 - DNA, 33 bp, Homo sapien
tttcaagataatttccactttgaaaccaatatt

SEQ ID NO: 155920 - DNA, 33 bp, Homo sapien
tttcaagataatttccgctttgaaaccaatatt

SEQ ID NO: 155921 - DNA, 33 bp, Homo sapien
aaactccactccaggacgctccgcagcagagac

SEQ ID NO: 155922 - DNA, 33 bp, Homo sapien
aaactccactccaggatgctccgcagcagagac

SEQ ID NO: 155923 - DNA, 33 bp, Homo sapien
atcatttcagttgggacggtctgtttcttcctt

SEQ ID NO: 155924 - DNA, 33 bp, Homo sapien
atcatttcagttgggatggtctgtttcttcctt

SEQ ID NO: 155925 - DNA, 33 bp, Homo sapien
ttcatttaaggagttaaaggacatgcaggcatt

SEQ ID NO: 155926 - DNA, 33 bp, Homo sapien
ttcatttaaggagttagaggacatgcaggcatt

SEQ ID NO: 155927 - DNA, 33 bp, Homo sapien; identical to SEQ ID NO: 155925

SEQ ID NO: 155928 - DNA, 33 bp, Homo sapien; identical to SEQ ID NO: 155926

SEQ ID NO: 155929 - DNA, 33 bp, Homo sapien
ggttcagtgattggaagaaaggaggtgatatgg

SEQ ID NO: 155930 - DNA, 33 bp, Homo sapien
ggttcagtgattggaataaaggaggtgatatgg

SEQ ID NO: 155931 - DNA, 33 bp, Homo sapien
ctatggacaaatcagcagccagagatattggag

SEQ ID NO: 155932 - DNA, 33 bp, Homo sapien
ctatggacaaatcagcggccagagatattggag

SEQ ID NO: 155933 - DNA, 33 bp, Homo sapien; identical to SEQ ID NO: 155931

SEQ ID NO: 155934 - DNA, 33 bp, Homo sapien; identical to SEQ ID NO: 155932

SEQ ID NO: 155935 - DNA, 33 bp, Homo sapien
actggagtgcagttgacagcacaagtgtcacaa

SEQ ID NO: 155936 - DNA, 33 bp, Homo sapien
actggagtgcagttgatagcacaagtgtcacaa

SEQ ID NO: 155937 - DNA, 33 bp, Homo sapien
ctgcaactttcgcctaacaggttcaatccattc

SEQ ID NO: 155938 - DNA, 33 bp, Homo sapien
ctgcaactttcgcctatcaggttcaatccattc

SEQ ID NO: 155939 - DNA, 33 bp, Homo sapien
ttcttggtgacttcaacatccataaagatagtc

SEQ ID NO: 155940 - DNA, 33 bp, Homo sapien
ttcttggtgacttcaatatccataaagatagtc

SEQ ID NO: 155941 - DNA, 33 bp, Homo sapien
caatccttgcccaatacaaacatttaagtgact

SEQ ID NO: 155942 - DNA, 33 bp, Homo sapien
caatccttgcccaatataaacatttaagtgact

SEQ ID NO: 155943 - DNA, 33 bp, Homo sapien; identical to SEQ ID NO: 155941

SEQ ID NO: 155944 - DNA, 33 bp, Homo sapien; identical to SEQ ID NO: 155942

SEQ ID NO: 155945 - DNA, 33 bp, Homo sapien
ccctgaaaccaggtcaagtgttcttcccattct

SEQ ID NO: 155946 - DNA, 33 bp, Homo sapien
ccctgaaaccaggtcaggtgttcttcccattct

SEQ ID NO: 155947 - DNA, 33 bp, Homo sapien
ggaaaataagccaaaccaaagaacaatattgta

SEQ ID NO: 155948 - DNA, 33 bp, Homo sapien
ggaaaataagccaaacgaaagaacaatattgta

SEQ ID NO: 155949 - DNA, 33 bp, Homo sapien
cttccaaatccaggtggatcccagtagacagag

SEQ ID NO: 155950 - DNA, 33 bp, Homo sapien
cttccaaatccaggtgtatcccagtagacagag

SEQ ID NO: 155951 - DNA, 33 bp, Homo sapien; identical to SEQ ID NO: 155949

SEQ ID NO: 155952 - DNA, 33 bp, Homo sapien; identical to SEQ ID NO: 155950

SEQ ID NO: 155953 - DNA, 33 bp, Homo sapien
gggttgcttggatccacgctcagaaacggtagt

SEQ ID NO: 155954 - DNA, 33 bp, Homo sapien
gggttgcttggatccatgctcagaaacggtagt

SEQ ID NO: 155955 - DNA, 33 bp, Homo sapien
gcagagtcaatgagggaaatagggctagtatag

SEQ ID NO: 155956 - DNA, 33 bp, Homo sapien
gcagagtcaatgagggtaatagggctagtatag

SEQ ID NO: 155957 - DNA, 33 bp, Homo sapien; identical to SEQ ID NO: 155955

SEQ ID NO: 155958 - DNA, 33 bp, Homo sapien; identical to SEQ ID NO: 155956

SEQ ID NO: 155959 - DNA, 33 bp, Homo sapien
agagtcgtgctggttcaaaagggctagtcaaag

SEQ ID NO: 155960 - DNA, 33 bp, Homo sapien
agagtcgtgctggttcgaaagggctagtcaaag

SEQ ID NO: 155961 - DNA, 33 bp, Homo sapien; identical to SEQ ID NO: 155959

SEQ ID NO: 155962 - DNA, 33 bp, Homo sapien; identical to SEQ ID NO: 155960

SEQ ID NO: 155963 - DNA, 33 bp, Homo sapien
cttttatagtcagttacggttttagctacaaga

SEQ ID NO: 155964 - DNA, 33 bp, Homo sapien
cttttatagtcagttatggttttagctacaaga

SEQ ID NO: 155965 - DNA, 33 bp, Homo sapien
aagcttcgatagccgaataaatcaagtggaaga

SEQ ID NO: 155966 - DNA, 33 bp, Homo sapien
aagcttcgatagccgattaaatcaagtggaaga

SEQ ID NO: 155967 - DNA, 33 bp, Homo sapien
ttatatagcaaagtgaagctcttcagcaccctc

SEQ ID NO: 155968 - DNA, 33 bp, Homo sapien
ttatatagcaaagtgaggctcttcagcaccctc

SEQ ID NO: 155969 - DNA, 33 bp, Homo sapien
tgctaagaagacggaacagcaacagaggctgcc

SEQ ID NO: 155970 - DNA, 33 bp, Homo sapien
tgctaagaagacggaagagcaacagaggctgcc

SEQ ID NO: 155971 - DNA, 33 bp, Homo sapien
taatacccactagagaccatccactgcagaaga

SEQ ID NO: 155972 - DNA, 33 bp, Homo sapien
taatacccactagagagcatccactgcagaaga

SEQ ID NO: 155973 - DNA, 33 bp, Homo sapien
actggagagatgaccactagtagatttgtggac

SEQ ID NO: 155974 - DNA, 33 bp, Homo sapien
actggagagatgaccattagtagatttgtggac

SEQ ID NO: 155975 - DNA, 33 bp, Homo sapien
gtgtatgcaaaaataaatgtaaaaattatccaa

SEQ ID NO: 155976 - DNA, 33 bp, Homo sapien
gtgtatgcaaaaataagtgtaaaaattatccaa

SEQ ID NO: 155977 - DNA, 33 bp, Homo sapien
ggagtctataagaccactggaaacttccaggac

SEQ ID NO: 155978 - DNA, 33 bp, Homo sapien
ggagtctataagaccattggaaacttccaggac

SEQ ID NO: 155979 - DNA, 33 bp, Homo sapien
agaaagtacaacagtgaatggaaatgaccaagc

SEQ ID NO: 155980 - DNA, 33 bp, Homo sapien
agaaagtacaacagtgcatggaaatgaccaagc

SEQ ID NO: 155981 - DNA, 33 bp, Homo sapien
cagccaggcctgtcagactagaaattgctcagt

SEQ ID NO: 155982 - DNA, 33 bp, Homo sapien
cagccaggcctgtcaggctagaaattgctcagt

SEQ ID NO: 155983 - DNA, 33 bp, Homo sapien
tagttacctctagacaatagacactctcaattg

SEQ ID NO: 155984 - DNA, 33 bp, Homo sapien
tagttacctctagacactagacactctcaattg

SEQ ID NO: 155985 - DNA, 33 bp, Homo sapien
atccaaattcatacaaactgtggtcttcctaaa

SEQ ID NO: 155986 - DNA, 33 bp, Homo sapien
atccaaattcatacaacctgtggtcttcctaaa

SEQ ID NO: 155987 - DNA, 33 bp, Homo sapien
tattggctcagggtcccgaattgcagccatatt

SEQ ID NO: 155988 - DNA, 33 bp, Homo sapien
tattggctcagggtcctgaattgcagccatatt

SEQ ID NO: 155989 - DNA, 33 bp, Homo sapien
actgtctacttacccacgccaattttcttttct

SEQ ID NO: 155990 - DNA, 33 bp, Homo sapien
actgtctacttacccatgccaattttcttttct

SEQ ID NO: 155991 - DNA, 33 bp, Homo sapien
acactgattttctaaagttgggctggacacagg

SEQ ID NO: 155992 - DNA, 33 bp, Homo sapien
acactgattttctaaatttgggctggacacagg

SEQ ID NO: 155993 - DNA, 33 bp, Homo sapien
atatgattgtaccaaacagtaaatgagttaata

SEQ ID NO: 155994 - DNA, 33 bp, Homo sapien
atatgattgtaccaaagagtaaatgagttaata

SEQ ID NO: 155995 - DNA, 33 bp, Homo sapien
atcatagctgccatgaaggaaatcaataggaca

SEQ ID NO: 155996 - DNA, 33 bp, Homo sapien
atcatagctgccatgagggaaatcaataggaca

SEQ ID NO: 155997 - DNA, 33 bp, Homo sapien
gaactcctgacttccaacctggtgcttttccta

SEQ ID NO: 155998 - DNA, 33 bp, Homo sapien
gaactcctgacttccagcctggtgcttttccta

SEQ ID NO: 155999 - DNA, 33 bp, Homo sapien
ataacaggatgaagtaaagaagccagccaaaac

SEQ ID NO: 156000 - DNA, 33 bp, Homo sapien
ataacaggatgaagtacagaagccagccaaaac

SEQ ID NO: 156001 - DNA, 33 bp, Homo sapien
aaatgaggtaacaccacgttctataggaatcac

SEQ ID NO: 156002 - DNA, 33 bp, Homo sapien
aaatgaggtaacaccaggttctataggaatcac

SEQ ID NO: 156003 - DNA, 33 bp, Homo sapien
actagttatgatgctaaacacctattaaaatca

SEQ ID NO: 156004 - DNA, 33 bp, Homo sapien
actagttatgatgctacacacctattaaaatca

SEQ ID NO: 156005 - DNA, 33 bp, Homo sapien
tgtttaacttttaaagaaattgccagacagatt

SEQ ID NO: 156006 - DNA, 33 bp, Homo sapien
tgtttaacttttaaagtaattgccagacagatt

SEQ ID NO: 156007 - DNA, 33 bp, Homo sapien
gattttgattgatgggccatatattagcctggt

SEQ ID NO: 156008 - DNA, 33 bp, Homo sapien
gattttgattgatgggtcatatattagcctggt

SEQ ID NO: 156009 - DNA, 33 bp, Homo sapien
aaccagaaactggaaacgacccaggcatcctcc

SEQ ID NO: 156010 - DNA, 33 bp, Homo sapien
aaccagaaactggaaatgacccaggcatcctcc

SEQ ID NO: 156011 - DNA, 33 bp, Homo sapien
atgaacacacttaagacacctagcacaagttaa

SEQ ID NO: 156012 - DNA, 33 bp, Homo sapien
atgaacacacttaagatacctagcacaagttaa

SEQ ID NO: 156013 - DNA, 33 bp, Homo sapien
tgtgaggtactatgctcaacattatacatgtat

SEQ ID NO: 156014 - DNA, 33 bp, Homo sapien
tgtgaggtactatgctgaacattatacatgtat

SEQ ID NO: 156015 - DNA, 33 bp, Homo sapien
agtcattgcctacaaccccgagaggcagaaggg

SEQ ID NO: 156016 - DNA, 33 bp, Homo sapien
agtcattgcctacaactccgagaggcagaaggg

SEQ ID NO: 156017 - DNA, 33 bp, Homo sapien
ccttttggtgcctgaaatgactctggcttggct

SEQ ID NO: 156018 - DNA, 33 bp, Homo sapien
ccttttggtgcctgaagtgactctggcttggct

SEQ ID NO: 156019 - DNA, 33 bp, Homo sapien
gcttatcactagacacagaaaataaaaactatg

SEQ ID NO: 156020 - DNA, 33 bp, Homo sapien
gcttatcactagacacggaaaataaaaactatg

SEQ ID NO: 156021 - DNA, 33 bp, Homo sapien
tcagccgcctttataacagccaacatttgtaga

SEQ ID NO: 156022 - DNA, 33 bp, Homo sapien
tcagccgcctttataatagccaacatttgtaga

SEQ ID NO: 156023 - DNA, 33 bp, Homo sapien
aaacacttttgcttccactgagattgagatttg

SEQ ID NO: 156024 - DNA, 33 bp, Homo sapien
aaacacttttgcttccgctgagattgagatttg

SEQ ID NO: 156025 - DNA, 33 bp, Homo sapien
tctgtatcagagtcaacgtagatttattaccca

SEQ ID NO: 156026 - DNA, 33 bp, Homo sapien
tctgtatcagagtcaaggtagatttattaccca

SEQ ID NO: 156027 - DNA, 33 bp, Homo sapien
gattccagtctacaaccacctcaagatactaga

SEQ ID NO: 156028 - DNA, 33 bp, Homo sapien
gattccagtctacaactacctcaagatactaga

SEQ ID NO: 156029 - DNA, 33 bp, Homo sapien
tttacaaggtaacctaagggcagagaaagcttc

SEQ ID NO: 156030 - DNA, 33 bp, Homo sapien
tttacaaggtaacctaggggcagagaaagcttc

SEQ ID NO: 156031 - DNA, 33 bp, Homo sapien
taaagctcaaggagccacaaagggatttcctgg

SEQ ID NO: 156032 - DNA, 33 bp, Homo sapien
taaagctcaaggagccgcaaagggatttcctgg

SEQ ID NO: 156033 - DNA, 33 bp, Homo sapien
ccccaaactgggaacaatccaaatatccagcca

SEQ ID NO: 156034 - DNA, 33 bp, Homo sapien
ccccaaactgggaacagtccaaatatccagcca

SEQ ID NO: 156035 - DNA, 33 bp, Homo sapien
agactggatcttgtaaagtaagatgggatatgt

SEQ ID NO: 156036 - DNA, 33 bp, Homo sapien
agactggatcttgtaaggtaagatgggatatgt

SEQ ID NO: 156037 - DNA, 33 bp, Homo sapien
aatcactttcctgcaacgtaaagcccataaaag

SEQ ID NO: 156038 - DNA, 33 bp, Homo sapien
aatcactttcctgcaatgtaaagcccataaaag

SEQ ID NO: 156039 - DNA, 33 bp, Homo sapien
aaaaaaactcatccaaaaaataggtttattact

SEQ ID NO: 156040 - DNA, 33 bp, Homo sapien
aaaaaaactcatccaagaaataggtttattact

SEQ ID NO: 156041 - DNA, 33 bp, Homo sapien
gacttatatgccctcacaagtagcaggttcata

SEQ ID NO: 156042 - DNA, 33 bp, Homo sapien
gacttatatgccctcagaagtagcaggttcata

SEQ ID NO: 156043 - DNA, 33 bp, Homo sapien
aagaatgctttatctaaggcactcagatgtgga

SEQ ID NO: 156044 - DNA, 33 bp, Homo sapien
aagaatgctttatctatggcactcagatgtgga

SEQ ID NO: 156045 - DNA, 33 bp, Homo sapien
ccaagttccatttttagcaccaccaataatttg

SEQ ID NO: 156046 - DNA, 33 bp, Homo sapien
ccaagttccatttttatcaccaccaataatttg

SEQ ID NO: 156047 - DNA, 33 bp, Homo sapien
ttttttcctaaagtaccgagaactaacctcatc

SEQ ID NO: 156048 - DNA, 33 bp, Homo sapien
ttttttcctaaagtactgagaactaacctcatc

SEQ ID NO: 156049 - DNA, 33 bp, Homo sapien
actaatttgtgtcctacgtacatcttaatttaa

SEQ ID NO: 156050 - DNA, 33 bp, Homo sapien
actaatttgtgtcctatgtacatcttaatttaa

SEQ ID NO: 156051 - DNA, 33 bp, Homo sapien
acattcttacaaggagacaaataggaattcaaa

SEQ ID NO: 156052 - DNA, 33 bp, Homo sapien
acattcttacaaggaggcaaataggaattcaaa

SEQ ID NO: 156053 - DNA, 33 bp, Homo sapien
cacgatcttggcactacgcatgggatttccagg

SEQ ID NO: 156054 - DNA, 33 bp, Homo sapien
cacgatcttggcactatgcatgggatttccagg

SEQ ID NO: 156055 - DNA, 33 bp, Homo sapien
gtgatgaaactccactaagcaacagaataggcc

SEQ ID NO: 156056 - DNA, 33 bp, Homo sapien
gtgatgaaactccactgagcaacagaataggcc

SEQ ID NO: 156057 - DNA, 33 bp, Homo sapien
cgttacttagtgatcacagggacagatctggtt

SEQ ID NO: 156058 - DNA, 33 bp, Homo sapien
cgttacttagtgatcatagggacagatctggtt

SEQ ID NO: 156059 - DNA, 33 bp, Homo sapien
gaggaaattacgttcaagcctggaggtcttccc

SEQ ID NO: 156060 - DNA, 33 bp, Homo sapien
gaggaaattacgttcatgcctggaggtcttccc

SEQ ID NO: 156061 - DNA, 33 bp, Homo sapien
atccagaggagtgacacgtcttaaccatttgct

SEQ ID NO: 156062 - DNA, 33 bp, Homo sapien
atccagaggagtgacatgtcttaaccatttgct

SEQ ID NO: 156063 - DNA, 33 bp, Homo sapien
accttttcagcttcccacattgctttggaattc

SEQ ID NO: 156064 - DNA, 33 bp, Homo sapien
accttttcagcttcccgcattgctttggaattc

SEQ ID NO: 156065 - DNA, 33 bp, Homo sapien
taccttgccagggtaaactcacattctgggagt

SEQ ID NO: 156066 - DNA, 33 bp, Homo sapien
taccttgccagggtaagctcacattctgggagt

SEQ ID NO: 156067 - DNA, 33 bp, Homo sapien
agctttaactttctaaaatcctcgtgattgcct

SEQ ID NO: 156068 - DNA, 33 bp, Homo sapien
agctttaactttctaatatcctcgtgattgcct

SEQ ID NO: 156069 - DNA, 33 bp, Homo sapien
ctttagaaatcgtctaagatagtggcttttgtt

SEQ ID NO: 156070 - DNA, 33 bp, Homo sapien
ctttagaaatcgtctaggatagtggcttttgtt

SEQ ID NO: 156071 - DNA, 33 bp, Homo sapien
ggaagctcctcttttacctgctttatatactga

SEQ ID NO: 156072 - DNA, 33 bp, Homo sapien
ggaagctcctcttttatctgctttatatactga

SEQ ID NO: 156073 - DNA, 33 bp, Homo sapien
agaagtgggagggagacgtaagaacctcctcag

SEQ ID NO: 156074 - DNA, 33 bp, Homo sapien
agaagtgggagggagatgtaagaacctcctcag

SEQ ID NO: 156075 - DNA, 33 bp, Homo sapien
ttgtctttatctaccactgggcaacttatcttt

SEQ ID NO: 156076 - DNA, 33 bp, Homo sapien
ttgtctttatctaccattgggcaacttatcttt

SEQ ID NO: 156077 - DNA, 33 bp, Homo sapien
taattcaagaacaatcaattactactacatcat

SEQ ID NO: 156078 - DNA, 33 bp, Homo sapien
taattcaagaacaatccattactactacatcat

SEQ ID NO: 156079 - DNA, 33 bp, Homo sapien
ttggtataatctcagaaagaggtcctttcgtgc

SEQ ID NO: 156080 - DNA, 33 bp, Homo sapien
ttggtataatctcagagagaggtcctttcgtgc

SEQ ID NO: 156081 - DNA, 33 bp, Homo sapien
ctgtgttccactcctacgtgacctctctcagcc

SEQ ID NO: 156082 - DNA, 33 bp, Homo sapien
ctgtgttccactcctatgtgacctctctcagcc

SEQ ID NO: 156083 - DNA, 33 bp, Homo sapien
tttcccatgtgtcagacagtattcttagtgcta

SEQ ID NO: 156084 - DNA, 33 bp, Homo sapien
tttcccatgtgtcagagagtattcttagtgcta

SEQ ID NO: 156085 - DNA, 33 bp, Homo sapien
aatggttagcatccagaatttcttccctaagcc

SEQ ID NO: 156086 - DNA, 33 bp, Homo sapien
aatggttagcatccagcatttcttccctaagcc

SEQ ID NO: 156087 - DNA, 33 bp, Homo sapien
cccttgtctttggctcccgaatatctttggttc

SEQ ID NO: 156088 - DNA, 33 bp, Homo sapien
cccttgtctttggctctcgaatatctttggttc

SEQ ID NO: 156089 - DNA, 33 bp, Homo sapien
ttggcctctttcaaaactgacaacaggcaaaca

SEQ ID NO: 156090 - DNA, 33 bp, Homo sapien
ttggcctctttcaaaattgacaacaggcaaaca

SEQ ID NO: 156091 - DNA, 33 bp, Homo sapien
agagcaagtgggcaaacgccgtgggaagaggct

SEQ ID NO: 156092 - DNA, 33 bp, Homo sapien
agagcaagtgggcaaatgccgtgggaagaggct

SEQ ID NO: 156093 - DNA, 33 bp, Homo sapien
gctcctgggtttctgccaggaaggtattctgag

SEQ ID NO: 156094 - DNA, 33 bp, Homo sapien
gctcctgggtttctgctaggaaggtattctgag

SEQ ID NO: 156095 - DNA, 33 bp, Homo sapien
tgccactcagcaatacacaaggtaaaggcttca

SEQ ID NO: 156096 - DNA, 33 bp, Homo sapien
tgccactcagcaatacgcaaggtaaaggcttca

SEQ ID NO: 156097 - DNA, 33 bp, Homo sapien
ttccctaaatattgaacgtgttggatccagagt

SEQ ID NO: 156098 - DNA, 33 bp, Homo sapien
ttccctaaatattgaatgtgttggatccagagt

SEQ ID NO: 156099 - DNA, 33 bp, Homo sapien
agccaatcaaggggaaacaattatgcaaattta

SEQ ID NO: 156100 - DNA, 33 bp, Homo sapien
agccaatcaaggggaagcaattatgcaaattta

SEQ ID NO: 156101 - DNA, 33 bp, Homo sapien
cttcccacatatcttccagggagattcctaagt

SEQ ID NO: 156102 - DNA, 33 bp, Homo sapien
cttcccacatatcttctagggagattcctaagt

SEQ ID NO: 156103 - DNA, 33 bp, Homo sapien
cctctgacaaatatccactgatgctgacactgg

SEQ ID NO: 156104 - DNA, 33 bp, Homo sapien
cctctgacaaatatccgctgatgctgacactgg

SEQ ID NO: 156105 - DNA, 33 bp, Homo sapien
tgtctcagattcctgacagttggaggtaacttt

SEQ ID NO: 156106 - DNA, 33 bp, Homo sapien
tgtctcagattcctgatagttggaggtaacttt

SEQ ID NO: 156107 - DNA, 33 bp, Homo sapien
atgggactattgatacgagcctcagaaggctgc

SEQ ID NO: 156108 - DNA, 33 bp, Homo sapien
atgggactattgatactagcctcagaaggctgc

SEQ ID NO: 156109 - DNA, 33 bp, Homo sapien
cctatacttattccacaacaagcccctagacta

SEQ ID NO: 156110 - DNA, 33 bp, Homo sapien
cctatacttattccaccacaagcccctagacta

SEQ ID NO: 156111 - DNA, 33 bp, Homo sapien
acgctgagcaataagacgaaggcagggctgtga

SEQ ID NO: 156112 - DNA, 33 bp, Homo sapien
acgctgagcaataagatgaaggcagggctgtga

SEQ ID NO: 156113 - DNA, 33 bp, Homo sapien
tgaaagcagccatagacactgtgtgaaaagaaa

SEQ ID NO: 156114 - DNA, 33 bp, Homo sapien
tgaaagcagccatagatactgtgtgaaaagaaa

SEQ ID NO: 156115 - DNA, 33 bp, Homo sapien
tgtgacagagatcatacggtctgcaaagctgaa

SEQ ID NO: 156116 - DNA, 33 bp, Homo sapien
tgtgacagagatcatatggtctgcaaagctgaa

SEQ ID NO: 156117 - DNA, 33 bp, Homo sapien
aggaaaagtctgtgaaactttgctttagaggga

SEQ ID NO: 156118 - DNA, 33 bp, Homo sapien
aggaaaagtctgtgaacctttgctttagaggga

SEQ ID NO: 156119 - DNA, 33 bp, Homo sapien
accaaatgaaaagcagaaaagaatgttcccata

SEQ ID NO: 156120 - DNA, 33 bp, Homo sapien
accaaatgaaaagcaggaaagaatgttcccata

SEQ ID NO: 156121 - DNA, 33 bp, Homo sapien
aggtttgacttactgcgatggtttggatgtttg

SEQ ID NO: 156122 - DNA, 33 bp, Homo sapien
aggtttgacttactgctatggtttggatgtttg

SEQ ID NO: 156123 - DNA, 33 bp, Homo sapien
ttatttataggagtaacgtggtcatgcatgcat

SEQ ID NO: 156124 - DNA, 33 bp, Homo sapien
ttatttataggagtaatgtggtcatgcatgcat

SEQ ID NO: 156125 - DNA, 33 bp, Homo sapien
atggatctctctccacagtcccccatgcttcat

SEQ ID NO: 156126 - DNA, 33 bp, Homo sapien
atggatctctctccacggtcccccatgcttcat

SEQ ID NO: 156127 - DNA, 33 bp, Homo sapien
ttatctaagacccaccaagtatcctcagagtca

SEQ ID NO: 156128 - DNA, 33 bp, Homo sapien
ttatctaagacccaccgagtatcctcagagtca

SEQ ID NO: 156129 - DNA, 33 bp, Homo sapien
gagagaattaggcacacggataattaagaagaa

SEQ ID NO: 156130 - DNA, 33 bp, Homo sapien
gagagaattaggcacatggataattaagaagaa

SEQ ID NO: 156131 - DNA, 33 bp, Homo sapien
tgtggattaggaaacgaagactcagcaggccat

SEQ ID NO: 156132 - DNA, 33 bp, Homo sapien
tgtggattaggaaacggagactcagcaggccat

SEQ ID NO: 156133 - DNA, 33 bp, Homo sapien
tagtactaggaaaccccgggaagccaataacat

SEQ ID NO: 156134 - DNA, 33 bp, Homo sapien
tagtactaggaaaccctgggaagccaataacat

SEQ ID NO: 156135 - DNA, 33 bp, Homo sapien
attatcttctcttttacgatgatgagagtgcct

SEQ ID NO: 156136 - DNA, 33 bp, Homo sapien
attatcttctcttttatgatgatgagagtgcct

SEQ ID NO: 156137 - DNA, 33 bp, Homo sapien
aatttaatattgaagacgctaaagaggtgttca

SEQ ID NO: 156138 - DNA, 33 bp, Homo sapien
aatttaatattgaagatgctaaagaggtgttca

SEQ ID NO: 156139 - DNA, 33 bp, Homo sapien
aatggtgagtgctaaaagtaaggaactttaagg

SEQ ID NO: 156140 - DNA, 33 bp, Homo sapien
aatggtgagtgctaaaggtaaggaactttaagg

SEQ ID NO: 156141 - DNA, 33 bp, Homo sapien
gcaaaggatgcaaaagacccatgcctccaacct

SEQ ID NO: 156142 - DNA, 33 bp, Homo sapien
gcaaaggatgcaaaaggcccatgcctccaacct

SEQ ID NO: 156143 - DNA, 33 bp, Homo sapien
gcagggcatgaacaagacggggagagatgagcg

SEQ ID NO: 156144 - DNA, 33 bp, Homo sapien
gcagggcatgaacaaggcggggagagatgagcg

SEQ ID NO: 156145 - DNA, 33 bp, Homo sapien
tagctaatttagtccacgattattttatgaaac

SEQ ID NO: 156146 - DNA, 33 bp, Homo sapien
tagctaatttagtccatgattattttatgaaac

SEQ ID NO: 156147 - DNA, 33 bp, Homo sapien
gtgaaagcagaggggacggttctcagggattct

SEQ ID NO: 156148 - DNA, 33 bp, Homo sapien
gtgaaagcagaggggatggttctcagggattct

SEQ ID NO: 156149 - DNA, 33 bp, Homo sapien
agtgtgaaccaccatacccggcaaaagatgcta

SEQ ID NO: 156150 - DNA, 33 bp, Homo sapien
agtgtgaaccaccatatccggcaaaagatgcta

SEQ ID NO: 156151 - DNA, 33 bp, Homo sapien
gggctgagatgccaaacgggacaggattagcta

SEQ ID NO: 156152 - DNA, 33 bp, Homo sapien
gggctgagatgccaaatgggacaggattagcta

SEQ ID NO: 156153 - DNA, 33 bp, Homo sapien
atgcaacttcctttcaactcacagtgtgtccag

SEQ ID NO: 156154 - DNA, 33 bp, Homo sapien
atgcaacttcctttcatctcacagtgtgtccag

SEQ ID NO: 156155 - DNA, 33 bp, Homo sapien
cctggataatcttagacagtaatgatgactgcc

SEQ ID NO: 156156 - DNA, 33 bp, Homo sapien
cctggataatcttagatagtaatgatgactgcc

SEQ ID NO: 156157 - DNA, 33 bp, Homo sapien
aagcaatggtctgtgaagcacaaagcatcaata

SEQ ID NO: 156158 - DNA, 33 bp, Homo sapien
aagcaatggtctgtgaggcacaaagcatcaata

SEQ ID NO: 156159 - DNA, 33 bp, Homo sapien
gaggaataaggcacgaaagtatgaagagacagg

SEQ ID NO: 156160 - DNA, 33 bp, Homo sapien
gaggaataaggcacgatagtatgaagagacagg

SEQ ID NO: 156161 - DNA, 33 bp, Homo sapien
atacctgaggagaaaacgttcaacagtcagatt

SEQ ID NO: 156162 - DNA, 33 bp, Homo sapien
atacctgaggagaaaatgttcaacagtcagatt

SEQ ID NO: 156163 - DNA, 33 bp, Homo sapien
ggtcatgctcagctgacattcattttaacttga

SEQ ID NO: 156164 - DNA, 33 bp, Homo sapien
ggtcatgctcagctgatattcattttaacttga

SEQ ID NO: 156165 - DNA, 33 bp, Homo sapien
ttttaatgagtctccacgcttgggtgagctctc

SEQ ID NO: 156166 - DNA, 33 bp, Homo sapien
ttttaatgagtctccatgcttgggtgagctctc

SEQ ID NO: 156167 - DNA, 33 bp, Homo sapien
gccttattttgccagcacaagtgagagctcacc

SEQ ID NO: 156168 - DNA, 33 bp, Homo sapien
gccttattttgccagcgcaagtgagagctcacc

SEQ ID NO: 156169 - DNA, 33 bp, Homo sapien
caaaccaaaaaaagtcaagaataatatgtacaa

SEQ ID NO: 156170 - DNA, 33 bp, Homo sapien
caaaccaaaaaaagtcgagaataatatgtacaa

SEQ ID NO: 156171 - DNA, 33 bp, Homo sapien
ccatttcttgtccataaaaatctgagaaaaagt

SEQ ID NO: 156172 - DNA, 33 bp, Homo sapien
ccatttcttgtccatagaaatctgagaaaaagt

SEQ ID NO: 156173 - DNA, 33 bp, Homo sapien
tctagccttttgtgggaatttggtatctaggtt

SEQ ID NO: 156174 - DNA, 33 bp, Homo sapien
tctagccttttgtgggcatttggtatctaggtt

SEQ ID NO: 156175 - DNA, 33 bp, Homo sapien
ttccagctctggggtacaatataatgatgtctc

SEQ ID NO: 156176 - DNA, 33 bp, Homo sapien
ttccagctctggggtataatataatgatgtctc

SEQ ID NO: 156177 - DNA, 33 bp, Homo sapien
ctgtctacaactttatcactcacatggctcccg

SEQ ID NO: 156178 - DNA, 33 bp, Homo sapien
ctgtctacaactttattactcacatggctcccg

SEQ ID NO: 156179 - DNA, 33 bp, Homo sapien
ctcccgtgtcattcagaataggcaattagattt

SEQ ID NO: 156180 - DNA, 33 bp, Homo sapien
ctcccgtgtcattcaggataggcaattagattt

SEQ ID NO: 156181 - DNA, 33 bp, Homo sapien
tcattctacaataaaacgttagtgaaccatata

SEQ ID NO: 156182 - DNA, 33 bp, Homo sapien
tcattctacaataaaatgttagtgaaccatata

SEQ ID NO: 156183 - DNA, 33 bp, Homo sapien
aatgggtattcagaataaaatacgttcatgccc

SEQ ID NO: 156184 - DNA, 33 bp, Homo sapien
aatgggtattcagaatcaaatacgttcatgccc

SEQ ID NO: 156185 - DNA, 33 bp, Homo sapien
gaggagagaaagtgacagcctccttagattact

SEQ ID NO: 156186 - DNA, 33 bp, Homo sapien
gaggagagaaagtgacggcctccttagattact

SEQ ID NO: 156187 - DNA, 33 bp, Homo sapien
tttgacgcatattgtccaactactctctcattg

SEQ ID NO: 156188 - DNA, 33 bp, Homo sapien
tttgacgcatattgtctaactactctctcattg

SEQ ID NO: 156189 - DNA, 33 bp, Homo sapien
cttatatgcaacatgaggataaacattttaaga

SEQ ID NO: 156190 - DNA, 33 bp, Homo sapien
cttatatgcaacatgatgataaacattttaaga

SEQ ID NO: 156191 - DNA, 33 bp, Homo sapien
atagtaggtgttcaataaactatggctatcgtg

SEQ ID NO: 156192 - DNA, 33 bp, Homo sapien
atagtaggtgttcaatgaactatggctatcgtg

SEQ ID NO: 156193 - DNA, 33 bp, Homo sapien
cttcagctgttaagtaaattggtctgatctgta

SEQ ID NO: 156194 - DNA, 33 bp, Homo sapien
cttcagctgttaagtacattggtctgatctgta

SEQ ID NO: 156195 - DNA, 33 bp, Homo sapien
gttttaattttgcaacagaaatcgtatcagctg

SEQ ID NO: 156196 - DNA, 33 bp, Homo sapien
gttttaattttgcaacggaaatcgtatcagctg

SEQ ID NO: 156197 - DNA, 33 bp, Homo sapien
gggctttacgggattacgtactggttaaccaca

SEQ ID NO: 156198 - DNA, 33 bp, Homo sapien
gggctttacgggattatgtactggttaaccaca

SEQ ID NO: 156199 - DNA, 33 bp, Homo sapien
gtaggggcaaagaggaacaagtgctatccaagg

SEQ ID NO: 156200 - DNA, 33 bp, Homo sapien
gtaggggcaaagaggagcaagtgctatccaagg

SEQ ID NO: 156201 - DNA, 33 bp, Homo sapien
cagagaccatgaggaaaggaggcgggaagaggc

SEQ ID NO: 156202 - DNA, 33 bp, Homo sapien
cagagaccatgaggaagggaggcgggaagaggc

SEQ ID NO: 156203 - DNA, 33 bp, Homo sapien
gttcactgataaagagaacttggtgaacattga

SEQ ID NO: 156204 - DNA, 33 bp, Homo sapien
gttcactgataaagaggacttggtgaacattga

SEQ ID NO: 156205 - DNA, 33 bp, Homo sapien
ctggtaggggtgagccaggagtcttgtcttctt

SEQ ID NO: 156206 - DNA, 33 bp, Homo sapien
ctggtaggggtgagccgggagtcttgtcttctt

SEQ ID NO: 156207 - DNA, 33 bp, Homo sapien
cctaaatccattaggccctattttgatctccaa

SEQ ID NO: 156208 - DNA, 33 bp, Homo sapien
cctaaatccattaggctctattttgatctccaa

SEQ ID NO: 156209 - DNA, 33 bp, Homo sapien
ttatgggctacaacccacaaacgtctctagaag

SEQ ID NO: 156210 - DNA, 33 bp, Homo sapien
ttatgggctacaacccgcaaacgtctctagaag

SEQ ID NO: 156211 - DNA, 33 bp, Homo sapien
tcaatgtacagaacgacgcagttgaaggaggaa

SEQ ID NO: 156212 - DNA, 33 bp, Homo sapien
tcaatgtacagaacgatgcagttgaaggaggaa

SEQ ID NO: 156213 - DNA, 33 bp, Homo sapien
aatttaggcacagaaacataagtaacttgttca

SEQ ID NO: 156214 - DNA, 33 bp, Homo sapien
aatttaggcacagaaagataagtaacttgttca

SEQ ID NO: 156215 - DNA, 33 bp, Homo sapien
cagatgctacttaatcacaagagtatacatgga

SEQ ID NO: 156216 - DNA, 33 bp, Homo sapien
cagatgctacttaatcgcaagagtatacatgga

SEQ ID NO: 156217 - DNA, 33 bp, Homo sapien
cagggtcttgtaataacggagaaagcacctaaa

SEQ ID NO: 156218 - DNA, 33 bp, Homo sapien
cagggtcttgtaataatggagaaagcacctaaa

SEQ ID NO: 156219 - DNA, 33 bp, Homo sapien
tatagtgggagtcgaaaaacgagaacacatgga

SEQ ID NO: 156220 - DNA, 33 bp, Homo sapien
tatagtgggagtcgaacaacgagaacacatgga

SEQ ID NO: 156221 - DNA, 33 bp, Homo sapien
tatctcagaactcaaagtatgaaaaacaacaaa

SEQ ID NO: 156222 - DNA, 33 bp, Homo sapien
tatctcagaactcaaattatgaaaaacaacaaa

SEQ ID NO: 156223 - DNA, 33 bp, Homo sapien
agagcctcctatttgacaggctgaatgataggg

SEQ ID NO: 156224 - DNA, 33 bp, Homo sapien
agagcctcctatttgataggctgaatgataggg

SEQ ID NO: 156225 - DNA, 33 bp, Homo sapien
cttaactaagcctacaagtcatctatgtctgga

SEQ ID NO: 156226 - DNA, 33 bp, Homo sapien
cttaactaagcctacaggtcatctatgtctgga

SEQ ID NO: 156227 - DNA, 33 bp, Homo sapien
aacaaagatgagcaaaatacagttcatagaagg

SEQ ID NO: 156228 - DNA, 33 bp, Homo sapien
aacaaagatgagcaaactacagttcatagaagg

SEQ ID NO: 156229 - DNA, 33 bp, Homo sapien
agtaaaccactcacacacttagaaacaaaccag

SEQ ID NO: 156230 - DNA, 33 bp, Homo sapien
agtaaaccactcacacgcttagaaacaaaccag

SEQ ID NO: 156231 - DNA, 33 bp, Homo sapien
attctattatggtcacgctcttgctccaagggt

SEQ ID NO: 156232 - DNA, 33 bp, Homo sapien
attctattatggtcactctcttgctccaagggt

SEQ ID NO: 156233 - DNA, 33 bp, Homo sapien
tccagcctcagttttcaaaatttccacctccat

SEQ ID NO: 156234 - DNA, 33 bp, Homo sapien
tccagcctcagttttccaaatttccacctccat

SEQ ID NO: 156235 - DNA, 33 bp, Homo sapien
gtatctttaacctttaaacagtgacagtgtcta

SEQ ID NO: 156236 - DNA, 33 bp, Homo sapien
gtatctttaacctttatacagtgacagtgtcta

SEQ ID NO: 156237 - DNA, 33 bp, Homo sapien
tgagaatcgtagaataatagtatgaaatctctt

SEQ ID NO: 156238 - DNA, 33 bp, Homo sapien
tgagaatcgtagaatagtagtatgaaatctctt

SEQ ID NO: 156239 - DNA, 33 bp, Homo sapien
gtatttgagttactgacagttctgatttagcaa

SEQ ID NO: 156240 - DNA, 33 bp, Homo sapien
gtatttgagttactgagagttctgatttagcaa

SEQ ID NO: 156241 - DNA, 33 bp, Homo sapien
tcctataactaggcaaaggttcaggttaaaaat

SEQ ID NO: 156242 - DNA, 33 bp, Homo sapien
tcctataactaggcaatggttcaggttaaaaat

SEQ ID NO: 156243 - DNA, 33 bp, Homo sapien
acttttcagttaaccaatcaataaagcctcact

SEQ ID NO: 156244 - DNA, 33 bp, Homo sapien
acttttcagttaaccagtcaataaagcctcact

SEQ ID NO: 156245 - DNA, 33 bp, Homo sapien
gctcagtggctgatgacgtacatattaaagata

SEQ ID NO: 156246 - DNA, 33 bp, Homo sapien
gctcagtggctgatgaggtacatattaaagata

SEQ ID NO: 156247 - DNA, 33 bp, Homo sapien
atgaagctaccaagaacgaatacacagtgattt

SEQ ID NO: 156248 - DNA, 33 bp, Homo sapien
atgaagctaccaagaatgaatacacagtgattt

SEQ ID NO: 156249 - DNA, 33 bp, Homo sapien
tggtgtctggagagtacgaaaattggttgttgg

SEQ ID NO: 156250 - DNA, 33 bp, Homo sapien
tggtgtctggagagtatgaaaattggttgttgg

SEQ ID NO: 156251 - DNA, 33 bp, Homo sapien
taacttacccttttgaccagaccttcagcaaaa

SEQ ID NO: 156252 - DNA, 33 bp, Homo sapien
taacttacccttttgatcagaccttcagcaaaa

SEQ ID NO: 156253 - DNA, 33 bp, Homo sapien
tttagtcgatcacacacgtaaaaaataatcttt

SEQ ID NO: 156254 - DNA, 33 bp, Homo sapien
tttagtcgatcacacatgtaaaaaataatcttt

SEQ ID NO: 156255 - DNA, 33 bp, Homo sapien
ttagcgatggggcagaagtgtttcaagatgttt

SEQ ID NO: 156256 - DNA, 33 bp, Homo sapien
ttagcgatggggcagaggtgtttcaagatgttt

SEQ ID NO: 156257 - DNA, 33 bp, Homo sapien
caagctctttttactacgttacctggcctccct

SEQ ID NO: 156258 - DNA, 33 bp, Homo sapien
caagctctttttactatgttacctggcctccct

SEQ ID NO: 156259 - DNA, 33 bp, Homo sapien
tcattttgctttaccacgctgtgcatcttcaag

SEQ ID NO: 156260 - DNA, 33 bp, Homo sapien
tcattttgctttaccatgctgtgcatcttcaag

SEQ ID NO: 156261 - DNA, 33 bp, Homo sapien
acacaagaaaaacaacaatttgattatctagct

SEQ ID NO: 156262 - DNA, 33 bp, Homo sapien
acacaagaaaaacaacgatttgattatctagct

SEQ ID NO: 156263 - DNA, 33 bp, Homo sapien
acatttgaggtgctccaagcagttcagcggttc

SEQ ID NO: 156264 - DNA, 33 bp, Homo sapien
acatttgaggtgctccgagcagttcagcggttc

SEQ ID NO: 156265 - DNA, 33 bp, Homo sapien
agggatcccttaaacacatttctaacatcagtt

SEQ ID NO: 156266 - DNA, 33 bp, Homo sapien
agggatcccttaaacatatttctaacatcagtt

SEQ ID NO: 156267 - DNA, 33 bp, Homo sapien
tactttacagaagagccgagtcctaagaggtgg

SEQ ID NO: 156268 - DNA, 33 bp, Homo sapien
tactttacagaagagctgagtcctaagaggtgg

SEQ ID NO: 156269 - DNA, 33 bp, Homo sapien
cttcatgtggcagcccaagtgaccttttaaaaa

SEQ ID NO: 156270 - DNA, 33 bp, Homo sapien
cttcatgtggcagccctagtgaccttttaaaaa

SEQ ID NO: 156271 - DNA, 33 bp, Homo sapien
catctggtccccctcccatgatggtttggcagc

SEQ ID NO: 156272 - DNA, 33 bp, Homo sapien
catctggtccccctcctatgatggtttggcagc

SEQ ID NO: 156273 - DNA, 33 bp, Homo sapien
aacaaaatggagtagcaagtatcagagagtatt

SEQ ID NO: 156274 - DNA, 33 bp, Homo sapien
aacaaaatggagtagcgagtatcagagagtatt

SEQ ID NO: 156275 - DNA, 33 bp, Homo sapien
cacatctgttcataaccgagatataaggttcat

SEQ ID NO: 156276 - DNA, 33 bp, Homo sapien
cacatctgttcataacggagatataaggttcat

SEQ ID NO: 156277 - DNA, 33 bp, Homo sapien
aatttccaattcatgaggaaagcctaagtaaaa

SEQ ID NO: 156278 - DNA, 33 bp, Homo sapien
aatttccaattcatgatgaaagcctaagtaaaa

SEQ ID NO: 156279 - DNA, 33 bp, Homo sapien
attaaaacatctgatcaaccagaaccattttcc

SEQ ID NO: 156280 - DNA, 33 bp, Homo sapien
attaaaacatctgatccaccagaaccattttcc

SEQ ID NO: 156281 - DNA, 33 bp, Homo sapien
gcaataattgtttcaactcttcgatccaaagat

SEQ ID NO: 156282 - DNA, 33 bp, Homo sapien
gcaataattgtttcaattcttcgatccaaagat

SEQ ID NO: 156283 - DNA, 33 bp, Homo sapien
aagggagccccttatccaagtctgtagttcttc

SEQ ID NO: 156284 - DNA, 33 bp, Homo sapien
aagggagccccttatcgaagtctgtagttcttc

SEQ ID NO: 156285 - DNA, 33 bp, Homo sapien
tgctatatgttgggcactgagtatgtgctggac

SEQ ID NO: 156286 - DNA, 33 bp, Homo sapien
tgctatatgttgggcattgagtatgtgctggac

SEQ ID NO: 156287 - DNA, 33 bp, Homo sapien
agtattaataagaagcaacagcaataactattt

SEQ ID NO: 156288 - DNA, 33 bp, Homo sapien
agtattaataagaagcgacagcaataactattt

SEQ ID NO: 156289 - DNA, 33 bp, Homo sapien
tgatggtaatagcaccgccttcaccagtgagaa

SEQ ID NO: 156290 - DNA, 33 bp, Homo sapien
tgatggtaatagcacctccttcaccagtgagaa

SEQ ID NO: 156291 - DNA, 33 bp, Homo sapien
cttccattacctctcaatactgattacatcgcc

SEQ ID NO: 156292 - DNA, 33 bp, Homo sapien
cttccattacctctcagtactgattacatcgcc

SEQ ID NO: 156293 - DNA, 33 bp, Homo sapien
acagtaagtatgaagaaggcagtgcttaaaccg

SEQ ID NO: 156294 - DNA, 33 bp, Homo sapien
acagtaagtatgaagacggcagtgcttaaaccg

SEQ ID NO: 156295 - DNA, 33 bp, Homo sapien
tgcagtagggcccgcaactccactagatttact

SEQ ID NO: 156296 - DNA, 33 bp, Homo sapien
tgcagtagggcccgcagctccactagatttact

SEQ ID NO: 156297 - DNA, 33 bp, Homo sapien
ggtgctgtctactcacaaataggattccccagc

SEQ ID NO: 156298 - DNA, 33 bp, Homo sapien
ggtgctgtctactcaccaataggattccccagc

SEQ ID NO: 156299 - DNA, 33 bp, Homo sapien
gccacttacattacaccaaaacctcctagaagg

SEQ ID NO: 156300 - DNA, 33 bp, Homo sapien
gccacttacattacacgaaaacctcctagaagg

SEQ ID NO: 156301 - DNA, 33 bp, Homo sapien
gcacaaaatataataaataatgcaaacaaaatc

SEQ ID NO: 156302 - DNA, 33 bp, Homo sapien
gcacaaaatataataagtaatgcaaacaaaatc

SEQ ID NO: 156303 - DNA, 33 bp, Homo sapien
ataaatccttgctgataaactgtttcaatgcac

SEQ ID NO: 156304 - DNA, 33 bp, Homo sapien
ataaatccttgctgattaactgtttcaatgcac

SEQ ID NO: 156305 - DNA, 33 bp, Homo sapien
aattttgcattcagacagaactgggtctatgtg

SEQ ID NO: 156306 - DNA, 33 bp, Homo sapien
aattttgcattcagacggaactgggtctatgtg

SEQ ID NO: 156307 - DNA, 33 bp, Homo sapien
aagtgagaattgacaacgctttttttctgtcca

SEQ ID NO: 156308 - DNA, 33 bp, Homo sapien
aagtgagaattgacaatgctttttttctgtcca

SEQ ID NO: 156309 - DNA, 33 bp, Homo sapien
tattatccttctttgtgaaaagcagtaagaatc

SEQ ID NO: 156310 - DNA, 33 bp, Homo sapien
tattatccttctttgttaaaagcagtaagaatc

SEQ ID NO: 156311 - DNA, 33 bp, Homo sapien
aggaccacctgagcaacgcccaacataccttag

SEQ ID NO: 156312 - DNA, 33 bp, Homo sapien
aggaccacctgagcaatgcccaacataccttag

SEQ ID NO: 156313 - DNA, 33 bp, Homo sapien
aaagagaaggcttgaaatgctgtgctaccttta

SEQ ID NO: 156314 - DNA, 33 bp, Homo sapien
aaagagaaggcttgaagtgctgtgctaccttta

SEQ ID NO: 156315 - DNA, 33 bp, Homo sapien
caatgagaatactctccatccatagccattcct

SEQ ID NO: 156316 - DNA, 33 bp, Homo sapien
caatgagaatactctctatccatagccattcct

SEQ ID NO: 156317 - DNA, 33 bp, Homo sapien
acaatgctgtggaataagtattacgatccccaa

SEQ ID NO: 156318 - DNA, 33 bp, Homo sapien
acaatgctgtggaataggtattacgatccccaa

SEQ ID NO: 156319 - DNA, 33 bp, Homo sapien
tgataaaagttactcaaatctgcctgtgagtag

SEQ ID NO: 156320 - DNA, 33 bp, Homo sapien
tgataaaagttactcagatctgcctgtgagtag

SEQ ID NO: 156321 - DNA, 33 bp, Homo sapien
cctgcttcaagcagcaatgagttttcctgtcag

SEQ ID NO: 156322 - DNA, 33 bp, Homo sapien
cctgcttcaagcagcagtgagttttcctgtcag

SEQ ID NO: 156323 - DNA, 33 bp, Homo sapien
gctgtatggcttgcataaaatgaatgagctata

SEQ ID NO: 156324 - DNA, 33 bp, Homo sapien
gctgtatggcttgcatgaaatgaatgagctata

SEQ ID NO: 156325 - DNA, 33 bp, Homo sapien
gaggatatagctgtgaaccttatattatcacat

SEQ ID NO: 156326 - DNA, 33 bp, Homo sapien
gaggatatagctgtgagccttatattatcacat

SEQ ID NO: 156327 - DNA, 33 bp, Homo sapien
agaataggattaggccacaagggacatttaatg

SEQ ID NO: 156328 - DNA, 33 bp, Homo sapien
agaataggattaggccgcaagggacatttaatg

SEQ ID NO: 156329 - DNA, 33 bp, Homo sapien
tactccaggacttgtaaccgatctgacccaagt

SEQ ID NO: 156330 - DNA, 33 bp, Homo sapien
tactccaggacttgtagccgatctgacccaagt

SEQ ID NO: 156331 - DNA, 33 bp, Homo sapien
ggatatttattcaacccgatattgcaagatgct

SEQ ID NO: 156332 - DNA, 33 bp, Homo sapien
ggatatttattcaacctgatattgcaagatgct

SEQ ID NO: 156333 - DNA, 33 bp, Homo sapien
gtgaaaacctcataaccctaagtcctccccttc

SEQ ID NO: 156334 - DNA, 33 bp, Homo sapien
gtgaaaacctcataactctaagtcctccccttc

SEQ ID NO: 156335 - DNA, 33 bp, Homo sapien
acgatatttatttgcacacagcttcgtgatgta

SEQ ID NO: 156336 - DNA, 33 bp, Homo sapien
acgatatttatttgcatacagcttcgtgatgta

SEQ ID NO: 156337 - DNA, 33 bp, Homo sapien
gccctgctgctgatgcacaatgaaaggagtgtg

SEQ ID NO: 156338 - DNA, 33 bp, Homo sapien
gccctgctgctgatgcgcaatgaaaggagtgtg

SEQ ID NO: 156339 - DNA, 33 bp, Homo sapien
agaatcaaggtgtgagcagcgccatgctccctc

SEQ ID NO: 156340 - DNA, 33 bp, Homo sapien
agaatcaaggtgtgagtagcgccatgctccctc

SEQ ID NO: 156341 - DNA, 33 bp, Homo sapien
tgtgctacataaagcacattagattaactaagc

SEQ ID NO: 156342 - DNA, 33 bp, Homo sapien
tgtgctacataaagcagattagattaactaagc

SEQ ID NO: 156343 - DNA, 33 bp, Homo sapien
cctgccccaagctctacgcaaatgctgttcccc

SEQ ID NO: 156344 - DNA, 33 bp, Homo sapien
cctgccccaagctctatgcaaatgctgttcccc

SEQ ID NO: 156345 - DNA, 33 bp, Homo sapien
gctcagatttcaggaagggggaacaggaagatg

SEQ ID NO: 156346 - DNA, 33 bp, Homo sapien
gctcagatttcaggaatggggaacaggaagatg

SEQ ID NO: 156347 - DNA, 33 bp, Homo sapien
tgacattggggaattaaagtgacaattcttaag

SEQ ID NO: 156348 - DNA, 33 bp, Homo sapien
tgacattggggaattacagtgacaattcttaag

SEQ ID NO: 156349 - DNA, 33 bp, Homo sapien
agagtggcatataagaccagtgttgtgtaaaca

SEQ ID NO: 156350 - DNA, 33 bp, Homo sapien
agagtggcatataagatcagtgttgtgtaaaca

SEQ ID NO: 156351 - DNA, 33 bp, Homo sapien
gtttccacatcactaacgacagaccgcagtcct

SEQ ID NO: 156352 - DNA, 33 bp, Homo sapien
gtttccacatcactaatgacagaccgcagtcct

SEQ ID NO: 156353 - DNA, 33 bp, Homo sapien
gagggcactgttccacaatgtgataggtatttc

SEQ ID NO: 156354 - DNA, 33 bp, Homo sapien
gagggcactgttccacgatgtgataggtatttc

SEQ ID NO: 156355 - DNA, 33 bp, Homo sapien
ttgacctttttgcaggaacactccattcccatg

SEQ ID NO: 156356 - DNA, 33 bp, Homo sapien
ttgacctttttgcagggacactccattcccatg

SEQ ID NO: 156357 - DNA, 33 bp, Homo sapien
atgacatggggctgtaaaaatggagacccaaat

SEQ ID NO: 156358 - DNA, 33 bp, Homo sapien
atgacatggggctgtacaaatggagacccaaat

SEQ ID NO: 156359 - DNA, 33 bp, Homo sapien
tgggaatgattatagtgaccttgcagaatcacc

SEQ ID NO: 156360 - DNA, 33 bp, Homo sapien
tgggaatgattatagttaccttgcagaatcacc

SEQ ID NO: 156361 - DNA, 33 bp, Homo sapien
tggcaagggaatcataacaacagcacatggctc

SEQ ID NO: 156362 - DNA, 33 bp, Homo sapien
tggcaagggaatcatagcaacagcacatggctc

SEQ ID NO: 156363 - DNA, 33 bp, Homo sapien
tctctcaagtgggtcaaaaagataaggggcctc

SEQ ID NO: 156364 - DNA, 33 bp, Homo sapien
tctctcaagtgggtcagaaagataaggggcctc

SEQ ID NO: 156365 - DNA, 33 bp, Homo sapien
ttgtaacaagtcatgaagtagattttattatgc

SEQ ID NO: 156366 - DNA, 33 bp, Homo sapien
ttgtaacaagtcatgaggtagattttattatgc

SEQ ID NO: 156367 - DNA, 33 bp, Homo sapien
ttcatctgagcaccaacatacagtaatgcagac

SEQ ID NO: 156368 - DNA, 33 bp, Homo sapien
ttcatctgagcaccaatatacagtaatgcagac

SEQ ID NO: 156369 - DNA, 33 bp, Homo sapien
tcatcaagctgccaaacgtgtctgtggcacaaa

SEQ ID NO: 156370 - DNA, 33 bp, Homo sapien
tcatcaagctgccaaaggtgtctgtggcacaaa

SEQ ID NO: 156371 - DNA, 33 bp, Homo sapien
agccgtagattgccagactcagtggatctaaca

SEQ ID NO: 156372 - DNA, 33 bp, Homo sapien
agccgtagattgccaggctcagtggatctaaca

SEQ ID NO: 156373 - DNA, 33 bp, Homo sapien
tgttttgtttgtagaactgatttattttagcca

SEQ ID NO: 156374 - DNA, 33 bp, Homo sapien
tgttttgtttgtagaattgatttattttagcca

SEQ ID NO: 156375 - DNA, 33 bp, Homo sapien
atgcaattcatggacaatcgatggtactctagg

SEQ ID NO: 156376 - DNA, 33 bp, Homo sapien
atgcaattcatggacagtcgatggtactctagg

SEQ ID NO: 156377 - DNA, 33 bp, Homo sapien
aaaatgggatccacaccgaacacagaacagaac

SEQ ID NO: 156378 - DNA, 33 bp, Homo sapien
aaaatgggatccacactgaacacagaacagaac

SEQ ID NO: 156379 - DNA, 33 bp, Homo sapien
ggggcagcatcgagccagaatgacagagggcac

SEQ ID NO: 156380 - DNA, 33 bp, Homo sapien
ggggcagcatcgagccggaatgacagagggcac

SEQ ID NO: 156381 - DNA, 33 bp, Homo sapien
gaagtcatcaggttcaagaggttgaaaaagaga

SEQ ID NO: 156382 - DNA, 33 bp, Homo sapien
gaagtcatcaggttcacgaggttgaaaaagaga

SEQ ID NO: 156383 - DNA, 33 bp, Homo sapien
ccacctgacatcacacaaggaaaacaaggctcg

SEQ ID NO: 156384 - DNA, 33 bp, Homo sapien
ccacctgacatcacacgaggaaaacaaggctcg

SEQ ID NO: 156385 - DNA, 33 bp, Homo sapien
tgttaatcagtgaacactgtgtaagcacctatt

SEQ ID NO: 156386 - DNA, 33 bp, Homo sapien
tgttaatcagtgaacattgtgtaagcacctatt

SEQ ID NO: 156387 - DNA, 33 bp, Homo sapien
tatgtaaaaggacagccatggatcccggcaaca

SEQ ID NO: 156388 - DNA, 33 bp, Homo sapien
tatgtaaaaggacagcgatggatcccggcaaca

SEQ ID NO: 156389 - DNA, 33 bp, Homo sapien
acagacaagcaaatgacctccagtttgtaaaga

SEQ ID NO: 156390 - DNA, 33 bp, Homo sapien
acagacaagcaaatgatctccagtttgtaaaga

SEQ ID NO: 156391 - DNA, 33 bp, Homo sapien
cataggctattctgcaatctggaactcatttcc

SEQ ID NO: 156392 - DNA, 33 bp, Homo sapien
cataggctattctgcagtctggaactcatttcc

SEQ ID NO: 156393 - DNA, 33 bp, Homo sapien
gtccagggtccgtgtcactgaactctaagatca

SEQ ID NO: 156394 - DNA, 33 bp, Homo sapien
gtccagggtccgtgtcgctgaactctaagatca

SEQ ID NO: 156395 - DNA, 33 bp, Homo sapien
gtcattgagtccataccatgtgcttggctgtgt

SEQ ID NO: 156396 - DNA, 33 bp, Homo sapien
gtcattgagtccatactatgtgcttggctgtgt

SEQ ID NO: 156397 - DNA, 33 bp, Homo sapien
tttaataggaggaatacgagtcatttgtcttat

SEQ ID NO: 156398 - DNA, 33 bp, Homo sapien
tttaataggaggaatatgagtcatttgtcttat

SEQ ID NO: 156399 - DNA, 33 bp, Homo sapien
gctcagaagtggtggacagtctgcctgaataga

SEQ ID NO: 156400 - DNA, 33 bp, Homo sapien
gctcagaagtggtggagagtctgcctgaataga

SEQ ID NO: 156401 - DNA, 33 bp, Homo sapien
tgagtaactaattcagaattttgtgggagcagg

SEQ ID NO: 156402 - DNA, 33 bp, Homo sapien
tgagtaactaattcaggattttgtgggagcagg

SEQ ID NO: 156403 - DNA, 33 bp, Homo sapien
tctgtttgggacatcactgaatccagcttgaag

SEQ ID NO: 156404 - DNA, 33 bp, Homo sapien
tctgtttgggacatcattgaatccagcttgaag

SEQ ID NO: 156405 - DNA, 33 bp, Homo sapien
ataattactgatagtgaacctttgtctctgttt

SEQ ID NO: 156406 - DNA, 33 bp, Homo sapien
ataattactgatagtggacctttgtctctgttt

SEQ ID NO: 156407 - DNA, 33 bp, Homo sapien
tagccatccgtgagccaaggaaactgtacacag

SEQ ID NO: 156408 - DNA, 33 bp, Homo sapien
tagccatccgtgagccgaggaaactgtacacag

SEQ ID NO: 156409 - DNA, 33 bp, Homo sapien
gtttcctagcttcagggaattctttttcagtct

SEQ ID NO: 156410 - DNA, 33 bp, Homo sapien
gtttcctagcttcaggtaattctttttcagtct

SEQ ID NO: 156411 - DNA, 33 bp, Homo sapien
atctttgcctccgtctaaaacggtatgattcca

SEQ ID NO: 156412 - DNA, 33 bp, Homo sapien
atctttgcctccgtctgaaacggtatgattcca

SEQ ID NO: 156413 - DNA, 33 bp, Homo sapien
gaggtagatgaggcaacttaggttttatccatt

SEQ ID NO: 156414 - DNA, 33 bp, Homo sapien
gaggtagatgaggcaatttaggttttatccatt

SEQ ID NO: 156415 - DNA, 33 bp, Homo sapien
agcaccctgcagttctcaaagctttttcatgaa

SEQ ID NO: 156416 - DNA, 33 bp, Homo sapien
agcaccctgcagttctgaaagctttttcatgaa

SEQ ID NO: 156417 - DNA, 33 bp, Homo sapien
tctctatgctaaccccgcagcctcaattcagca

SEQ ID NO: 156418 - DNA, 33 bp, Homo sapien
tctctatgctaacccctcagcctcaattcagca

SEQ ID NO: 156419 - DNA, 33 bp, Homo sapien
atgtaacgttatgagacccatgttatagatgag

SEQ ID NO: 156420 - DNA, 33 bp, Homo sapien
atgtaacgttatgagatccatgttatagatgag

SEQ ID NO: 156421 - DNA, 33 bp, Homo sapien
aatgttgtagaagagacagtatagcttgcaaag

SEQ ID NO: 156422 - DNA, 33 bp, Homo sapien
aatgttgtagaagagatagtatagcttgcaaag

SEQ ID NO: 156423 - DNA, 33 bp, Homo sapien
tgtacatggagtcaacagctttgattaagcagc

SEQ ID NO: 156424 - DNA, 33 bp, Homo sapien
tgtacatggagtcaacggctttgattaagcagc

SEQ ID NO: 156425 - DNA, 33 bp, Homo sapien
tggaagcaggagagaagaggtgggctctgggca

SEQ ID NO: 156426 - DNA, 33 bp, Homo sapien
tggaagcaggagagaataggtgggctctgggca

SEQ ID NO: 156427 - DNA, 33 bp, Homo sapien
gaaagagccagaacctctgccctcttgcccaga

SEQ ID NO: 156428 - DNA, 33 bp, Homo sapien
gaaagagccagaacctttgccctcttgcccaga

SEQ ID NO: 156429 - DNA, 33 bp, Homo sapien
actgttgtgagtcagacaacattagtcttattt

SEQ ID NO: 156430 - DNA, 33 bp, Homo sapien
actgttgtgagtcagataacattagtcttattt

SEQ ID NO: 156431 - DNA, 33 bp, Homo sapien
taacacccatcaacaggaaactggttaaataaa

SEQ ID NO: 156432 - DNA, 33 bp, Homo sapien
taacacccatcaacagtaaactggttaaataaa

SEQ ID NO: 156433 - DNA, 33 bp, Homo sapien
tctctgcctgtctacacgtctttggataagctg

SEQ ID NO: 156434 - DNA, 33 bp, Homo sapien
tctctgcctgtctacatgtctttggataagctg

SEQ ID NO: 156435 - DNA, 33 bp, Homo sapien
gtgaatacttaacacacagaaactcattcaatc

SEQ ID NO: 156436 - DNA, 33 bp, Homo sapien
gtgaatacttaacacatagaaactcattcaatc

SEQ ID NO: 156437 - DNA, 33 bp, Homo sapien
cagttacacatctcaaagtgtttgtttccttgt

SEQ ID NO: 156438 - DNA, 33 bp, Homo sapien
cagttacacatctcaaggtgtttgtttccttgt

SEQ ID NO: 156439 - DNA, 33 bp, Homo sapien
tagcttgtgcaattaaatggcctttcatacaga

SEQ ID NO: 156440 - DNA, 33 bp, Homo sapien
tagcttgtgcaattaagtggcctttcatacaga

SEQ ID NO: 156441 - DNA, 33 bp, Homo sapien
agtgacagtgcatgtaagtgtccaacatggctg

SEQ ID NO: 156442 - DNA, 33 bp, Homo sapien
agtgacagtgcatgtaggtgtccaacatggctg

SEQ ID NO: 156443 - DNA, 33 bp, Homo sapien
ctccagtgttctcatccactccatttcatctca

SEQ ID NO: 156444 - DNA, 33 bp, Homo sapien
ctccagtgttctcatctactccatttcatctca

SEQ ID NO: 156445 - DNA, 33 bp, Homo sapien
ctgtgctcaattttaacatcactgaagtgtgga

SEQ ID NO: 156446 - DNA, 33 bp, Homo sapien
ctgtgctcaattttaagatcactgaagtgtgga

SEQ ID NO: 156447 - DNA, 33 bp, Homo sapien
cctgggttcaaatctaacacagaatttagctaa

SEQ ID NO: 156448 - DNA, 33 bp, Homo sapien
cctgggttcaaatctagcacagaatttagctaa

SEQ ID NO: 156449 - DNA, 33 bp, Homo sapien
ttcaacttggtcccaacctttatttccattcca

SEQ ID NO: 156450 - DNA, 33 bp, Homo sapien
ttcaacttggtcccaatctttatttccattcca

SEQ ID NO: 156451 - DNA, 33 bp, Homo sapien
aaaactcgtgaattacaaattgctgtacaaata

SEQ ID NO: 156452 - DNA, 33 bp, Homo sapien
aaaactcgtgaattaccaattgctgtacaaata

SEQ ID NO: 156453 - DNA, 33 bp, Homo sapien
atagcaattgatcacacagctgctgccttccca

SEQ ID NO: 156454 - DNA, 33 bp, Homo sapien
atagcaattgatcacatagctgctgccttccca

SEQ ID NO: 156455 - DNA, 33 bp, Homo sapien
tttcccaccacctccacgagctaaaccgacctc

SEQ ID NO: 156456 - DNA, 33 bp, Homo sapien
tttcccaccacctccatgagctaaaccgacctc

SEQ ID NO: 156457 - DNA, 33 bp, Homo sapien
gttctatgttagataccggaaatccaaagatag

SEQ ID NO: 156458 - DNA, 33 bp, Homo sapien
gttctatgttagatactggaaatccaaagatag

SEQ ID NO: 156459 - DNA, 33 bp, Homo sapien
attcctcaggtatttaaggagcacacattatgt

SEQ ID NO: 156460 - DNA, 33 bp, Homo sapien
attcctcaggtatttatggagcacacattatgt

SEQ ID NO: 156461 - DNA, 33 bp, Homo sapien
ccactgagacctgtggacacatctgaatggaat

SEQ ID NO: 156462 - DNA, 33 bp, Homo sapien
ccactgagacctgtgggcacatctgaatggaat

SEQ ID NO: 156463 - DNA, 33 bp, Homo sapien
ggtttgaatctagtccgccctcatcctagttct

SEQ ID NO: 156464 - DNA, 33 bp, Homo sapien
ggtttgaatctagtcctccctcatcctagttct

SEQ ID NO: 156465 - DNA, 33 bp, Homo sapien
caactcacacagacccaactggaagcccagcct

SEQ ID NO: 156466 - DNA, 33 bp, Homo sapien
caactcacacagacccgactggaagcccagcct

SEQ ID NO: 156467 - DNA, 33 bp, Homo sapien
gcaatcaagttaaaacaattgggggagtgtaca

SEQ ID NO: 156468 - DNA, 33 bp, Homo sapien
gcaatcaagttaaaaccattgggggagtgtaca

SEQ ID NO: 156469 - DNA, 33 bp, Homo sapien
ctcccagaaatgatgggaggacattgtgacaag

SEQ ID NO: 156470 - DNA, 33 bp, Homo sapien
ctcccagaaatgatggtaggacattgtgacaag

SEQ ID NO: 156471 - DNA, 33 bp, Homo sapien
gaggggtgtggcagaaaagactttgaaagagaa

SEQ ID NO: 156472 - DNA, 33 bp, Homo sapien
gaggggtgtggcagaacagactttgaaagagaa

SEQ ID NO: 156473 - DNA, 33 bp, Homo sapien
cattttctatgacagtaacaacatggtaacaat

SEQ ID NO: 156474 - DNA, 33 bp, Homo sapien
cattttctatgacagtgacaacatggtaacaat

SEQ ID NO: 156475 - DNA, 33 bp, Homo sapien
aattcctggcacatagaaagtgatatataagga

SEQ ID NO: 156476 - DNA, 33 bp, Homo sapien
aattcctggcacataggaagtgatatataagga

SEQ ID NO: 156477 - DNA, 33 bp, Homo sapien
ttctacctttgctactcacaaagttaccaaact

SEQ ID NO: 156478 - DNA, 33 bp, Homo sapien
ttctacctttgctacttacaaagttaccaaact

SEQ ID NO: 156479 - DNA, 33 bp, Homo sapien
tgctgaggcggattctcagaactaagaatttct

SEQ ID NO: 156480 - DNA, 33 bp, Homo sapien
tgctgaggcggattctgagaactaagaatttct

SEQ ID NO: 156481 - DNA, 33 bp, Homo sapien
ccacagctcgagttcaatatctatttactactg

SEQ ID NO: 156482 - DNA, 33 bp, Homo sapien
ccacagctcgagttcagtatctatttactactg

SEQ ID NO: 156483 - DNA, 33 bp, Homo sapien
agatgccaaagtgccactccaggcctgaatcta

SEQ ID NO: 156484 - DNA, 33 bp, Homo sapien
agatgccaaagtgccattccaggcctgaatcta

SEQ ID NO: 156485 - DNA, 33 bp, Homo sapien
aggacctttctctgcacacgttccttgctatta

SEQ ID NO: 156486 - DNA, 33 bp, Homo sapien
aggacctttctctgcatacgttccttgctatta

SEQ ID NO: 156487 - DNA, 33 bp, Homo sapien
ttattctattagaaacaaaagatcgcctaatgg

SEQ ID NO: 156488 - DNA, 33 bp, Homo sapien
ttattctattagaaacgaaagatcgcctaatgg

SEQ ID NO: 156489 - DNA, 33 bp, Homo sapien
tcccctctgcaaaataccagtaaatctccttgc

SEQ ID NO: 156490 - DNA, 33 bp, Homo sapien
tcccctctgcaaaatatcagtaaatctccttgc

SEQ ID NO: 156491 - DNA, 33 bp, Homo sapien
tgcatggagacttctgcagtgtcttattaaaga

SEQ ID NO: 156492 - DNA, 33 bp, Homo sapien
tgcatggagacttctgtagtgtcttattaaaga

SEQ ID NO: 156493 - DNA, 33 bp, Homo sapien
cttattaaagatgtcaaagtttgtagcatcctg

SEQ ID NO: 156494 - DNA, 33 bp, Homo sapien
cttattaaagatgtcagagtttgtagcatcctg

SEQ ID NO: 156495 - DNA, 33 bp, Homo sapien
gactttccagaaagagacctggagtgaaggcct

SEQ ID NO: 156496 - DNA, 33 bp, Homo sapien
gactttccagaaagagtcctggagtgaaggcct

SEQ ID NO: 156497 - DNA, 33 bp, Homo sapien
ggatgggatcagggctgaccgtatttactaaca

SEQ ID NO: 156498 - DNA, 33 bp, Homo sapien
ggatgggatcagggcttaccgtatttactaaca

SEQ ID NO: 156499 - DNA, 33 bp, Homo sapien
ggaaatgaagacactaaaacagagaagagaagt

SEQ ID NO: 156500 - DNA, 33 bp, Homo sapien
ggaaatgaagacactagaacagagaagagaagt

SEQ ID NO: 156501 - DNA, 33 bp, Homo sapien
agtcaaattcattacacattgtcaacactgact

SEQ ID NO: 156502 - DNA, 33 bp, Homo sapien
agtcaaattcattacatattgtcaacactgact

SEQ ID NO: 156503 - DNA, 33 bp, Homo sapien
ttccttactgttttccaagtttttcaagcatgc

SEQ ID NO: 156504 - DNA, 33 bp, Homo sapien
ttccttactgttttccgagtttttcaagcatgc

SEQ ID NO: 156505 - DNA, 33 bp, Homo sapien
agtctatgacttactaacacaaatatgcataat

SEQ ID NO: 156506 - DNA, 33 bp, Homo sapien
agtctatgacttactaccacaaatatgcataat

SEQ ID NO: 156507 - DNA, 33 bp, Homo sapien
tattttcagttgcttgcagtgaagtatacaaga

SEQ ID NO: 156508 - DNA, 33 bp, Homo sapien
tattttcagttgcttgtagtgaagtatacaaga

SEQ ID NO: 156509 - DNA, 33 bp, Homo sapien
agaggtttctgttttcccagagaactcccctta

SEQ ID NO: 156510 - DNA, 33 bp, Homo sapien
agaggtttctgttttctcagagaactcccctta

SEQ ID NO: 156511 - DNA, 33 bp, Homo sapien
aacaaagggtgaggaacgcagagttcacaggaa

SEQ ID NO: 156512 - DNA, 33 bp, Homo sapien
aacaaagggtgaggaatgcagagttcacaggaa

SEQ ID NO: 156513 - DNA, 33 bp, Homo sapien
tgcatttgtttggaaaatacagctaaatcaacc

SEQ ID NO: 156514 - DNA, 33 bp, Homo sapien
tgcatttgtttggaaagtacagctaaatcaacc

SEQ ID NO: 156515 - DNA, 33 bp, Homo sapien
caagttgtataaagcaataataccaataggaac

SEQ ID NO: 156516 - DNA, 33 bp, Homo sapien
caagttgtataaagcagtaataccaataggaac

SEQ ID NO: 156517 - DNA, 33 bp, Homo sapien
actgcagagaagctgcagagcctgagcagagcc

SEQ ID NO: 156518 - DNA, 33 bp, Homo sapien
actgcagagaagctgcggagcctgagcagagcc

SEQ ID NO: 156519 - DNA, 33 bp, Homo sapien
acacctttcacagcaacactgaaaatacctcat

SEQ ID NO: 156520 - DNA, 33 bp, Homo sapien
acacctttcacagcaatactgaaaatacctcat

SEQ ID NO: 156521 - DNA, 33 bp, Homo sapien
gatagttcccatttaacagacaaacatgcttcc

SEQ ID NO: 156522 - DNA, 33 bp, Homo sapien
gatagttcccatttaatagacaaacatgcttcc

SEQ ID NO: 156523 - DNA, 33 bp, Homo sapien
atctgtccccactctacgttgtactgttgggtg

SEQ ID NO: 156524 - DNA, 33 bp, Homo sapien
atctgtccccactctatgttgtactgttgggtg

SEQ ID NO: 156525 - DNA, 33 bp, Homo sapien
taaaatcaagaaagtagggctctttatacttgc

SEQ ID NO: 156526 - DNA, 33 bp, Homo sapien
taaaatcaagaaagtatggctctttatacttgc

SEQ ID NO: 156527 - DNA, 33 bp, Homo sapien
ccatctaagccagcgacggttcctcctccccct

SEQ ID NO: 156528 - DNA, 33 bp, Homo sapien
ccatctaagccagcgatggttcctcctccccct

SEQ ID NO: 156529 - DNA, 33 bp, Homo sapien
gcttcagattgctaaacgatacaaagtgtgtcc

SEQ ID NO: 156530 - DNA, 33 bp, Homo sapien
gcttcagattgctaaatgatacaaagtgtgtcc

SEQ ID NO: 156531 - DNA, 33 bp, Homo sapien
cctgaaagtggaagtagagggtcaggcacatgg

SEQ ID NO: 156532 - DNA, 33 bp, Homo sapien
cctgaaagtggaagtatagggtcaggcacatgg

SEQ ID NO: 156533 - DNA, 33 bp, Homo sapien
caaagcctctatgagaataccaaaagaaattct

SEQ ID NO: 156534 - DNA, 33 bp, Homo sapien
caaagcctctatgagattaccaaaagaaattct

SEQ ID NO: 156535 - DNA, 33 bp, Homo sapien
aacctcctctcaaaaaattctctctctacacgt

SEQ ID NO: 156536 - DNA, 33 bp, Homo sapien
aacctcctctcaaaaacttctctctctacacgt

SEQ ID NO: 156537 - DNA, 33 bp, Homo sapien
gcccctcagtgaatgaagttttaaagagggcag

SEQ ID NO: 156538 - DNA, 33 bp, Homo sapien
gcccctcagtgaatgaggttttaaagagggcag

SEQ ID NO: 156539 - DNA, 33 bp, Homo sapien
ggttcttcctcaccatcaaaagaaggactcaaa

SEQ ID NO: 156540 - DNA, 33 bp, Homo sapien
ggttcttcctcaccattaaaagaaggactcaaa

SEQ ID NO: 156541 - DNA, 33 bp, Homo sapien
acaatttctgattcaacaggcctggagtggggc

SEQ ID NO: 156542 - DNA, 33 bp, Homo sapien
acaatttctgattcaataggcctggagtggggc

SEQ ID NO: 156543 - DNA, 33 bp, Homo sapien
gttttttcttttcaacagagtcaagcaaaagat

SEQ ID NO: 156544 - DNA, 33 bp, Homo sapien
gttttttcttttcaacggagtcaagcaaaagat

SEQ ID NO: 156545 - DNA, 33 bp, Homo sapien
atgaaaatgtaagcaccgagagttggattattt

SEQ ID NO: 156546 - DNA, 33 bp, Homo sapien
atgaaaatgtaagcactgagagttggattattt

SEQ ID NO: 156547 - DNA, 33 bp, Homo sapien
tttaggaggggagggtaaactacagcattttta

SEQ ID NO: 156548 - DNA, 33 bp, Homo sapien
tttaggaggggagggtgaactacagcattttta

SEQ ID NO: 156549 - DNA, 33 bp, Homo sapien
aggtgagaagaaaaaacgagtaattctgttagg

SEQ ID NO: 156550 - DNA, 33 bp, Homo sapien
aggtgagaagaaaaaatgagtaattctgttagg

SEQ ID NO: 156551 - DNA, 33 bp, Homo sapien
aaggattttgtgacacccctttgagctgcccca

SEQ ID NO: 156552 - DNA, 33 bp, Homo sapien
aaggattttgtgacacgcctttgagctgcccca

SEQ ID NO: 156553 - DNA, 33 bp, Homo sapien
caggtatcaggacacaaactcatccatttatgg

SEQ ID NO: 156554 - DNA, 33 bp, Homo sapien
caggtatcaggacacagactcatccatttatgg

SEQ ID NO: 156555 - DNA, 33 bp, Homo sapien
gaaaattttctccccaaccatcaaagccaaaaa

SEQ ID NO: 156556 - DNA, 33 bp, Homo sapien
gaaaattttctccccagccatcaaagccaaaaa

SEQ ID NO: 156557 - DNA, 33 bp, Homo sapien
ttctgtgaacaaaaccaagcaaattccaacata

SEQ ID NO: 156558 - DNA, 33 bp, Homo sapien
ttctgtgaacaaaacccagcaaattccaacata

SEQ ID NO: 156559 - DNA, 33 bp, Homo sapien
cacaagcgtctcatcaaggatctccagcaagat

SEQ ID NO: 156560 - DNA, 33 bp, Homo sapien
cacaagcgtctcatcagggatctccagcaagat

SEQ ID NO: 156561 - DNA, 33 bp, Homo sapien
tcccatgattatgttaagttaggtaagattcta

SEQ ID NO: 156562 - DNA, 33 bp, Homo sapien
tcccatgattatgttacgttaggtaagattcta

SEQ ID NO: 156563 - DNA, 33 bp, Homo sapien
ataagacaatctaagaataaatgctctgagctg

SEQ ID NO: 156564 - DNA, 33 bp, Homo sapien
ataagacaatctaagagtaaatgctctgagctg

SEQ ID NO: 156565 - DNA, 33 bp, Homo sapien
gctccctttttctccaatcctcctttgttcatc

SEQ ID NO: 156566 - DNA, 33 bp, Homo sapien
gctccctttttctccagtcctcctttgttcatc

SEQ ID NO: 156567 - DNA, 33 bp, Homo sapien
tagtgactggaaagcagcagtgcacttttaaaa

SEQ ID NO: 156568 - DNA, 33 bp, Homo sapien
tagtgactggaaagcatcagtgcacttttaaaa

SEQ ID NO: 156569 - DNA, 33 bp, Homo sapien
gacagtcttggagtgaaggggcatcgtggaaat

SEQ ID NO: 156570 - DNA, 33 bp, Homo sapien
gacagtcttggagtgatggggcatcgtggaaat

SEQ ID NO: 156571 - DNA, 33 bp, Homo sapien
caaccccatgaggcaaatactgttactacctct

SEQ ID NO: 156572 - DNA, 33 bp, Homo sapien
caaccccatgaggcaagtactgttactacctct

SEQ ID NO: 156573 - DNA, 33 bp, Homo sapien
atttctggaaagggcccgagttgacctgctgat

SEQ ID NO: 156574 - DNA, 33 bp, Homo sapien
atttctggaaagggcctgagttgacctgctgat

SEQ ID NO: 156575 - DNA, 33 bp, Homo sapien
ccaatctctctctccaactttacttccattgtc

SEQ ID NO: 156576 - DNA, 33 bp, Homo sapien
ccaatctctctctccacctttacttccattgtc

SEQ ID NO: 156577 - DNA, 33 bp, Homo sapien
taaaatttgatatgtcacatcactccattctct

SEQ ID NO: 156578 - DNA, 33 bp, Homo sapien
taaaatttgatatgtctcatcactccattctct

SEQ ID NO: 156579 - DNA, 33 bp, Homo sapien
atttagggatcaaaaacgtcaaatgtgtgcagg

SEQ ID NO: 156580 - DNA, 33 bp, Homo sapien
atttagggatcaaaaatgtcaaatgtgtgcagg

SEQ ID NO: 156581 - DNA, 33 bp, Homo sapien
atcaaggatttcgaataaccaggtggaaagtct

SEQ ID NO: 156582 - DNA, 33 bp, Homo sapien
atcaaggatttcgaatgaccaggtggaaagtct

SEQ ID NO: 156583 - DNA, 33 bp, Homo sapien
ttcaggggaaagtatacgagacgacactgtgga

SEQ ID NO: 156584 - DNA, 33 bp, Homo sapien
ttcaggggaaagtatatgagacgacactgtgga

SEQ ID NO: 156585 - DNA, 33 bp, Homo sapien
agcatacacagaatggaatactgattgaatgca

SEQ ID NO: 156586 - DNA, 33 bp, Homo sapien
agcatacacagaatgggatactgattgaatgca

SEQ ID NO: 156587 - DNA, 33 bp, Homo sapien
cagctgtacagttcccagggaaaaatgcttaat

SEQ ID NO: 156588 - DNA, 33 bp, Homo sapien
cagctgtacagttcccggggaaaaatgcttaat

SEQ ID NO: 156589 - DNA, 33 bp, Homo sapien
gagcaaaggcaaggaacaggtcccagatggaat

SEQ ID NO: 156590 - DNA, 33 bp, Homo sapien
gagcaaaggcaaggaataggtcccagatggaat

SEQ ID NO: 156591 - DNA, 33 bp, Homo sapien
ctatgcagattaggaccagccagtgggaagaaa

SEQ ID NO: 156592 - DNA, 33 bp, Homo sapien
ctatgcagattaggacgagccagtgggaagaaa

SEQ ID NO: 156593 - DNA, 33 bp, Homo sapien
aggacctcagttgagaagactttgcaatcctac

SEQ ID NO: 156594 - DNA, 33 bp, Homo sapien
aggacctcagttgagaggactttgcaatcctac

SEQ ID NO: 156595 - DNA, 33 bp, Homo sapien
aatttggagaccgagccactgatgtaattttat

SEQ ID NO: 156596 - DNA, 33 bp, Homo sapien
aatttggagaccgagcgactgatgtaattttat

SEQ ID NO: 156597 - DNA, 33 bp, Homo sapien
cagatgaatgtcctcaatatcccataaaggtga

SEQ ID NO: 156598 - DNA, 33 bp, Homo sapien
cagatgaatgtcctcagtatcccataaaggtga

SEQ ID NO: 156599 - DNA, 33 bp, Homo sapien
gtctaggttaaagtatcagaactggacaaaaat

SEQ ID NO: 156600 - DNA, 33 bp, Homo sapien
gtctaggttaaagtattagaactggacaaaaat

SEQ ID NO: 156601 - DNA, 33 bp, Homo sapien
agattcaaattccttacctgtaactttggaata

SEQ ID NO: 156602 - DNA, 33 bp, Homo sapien
agattcaaattccttatctgtaactttggaata

SEQ ID NO: 156603 - DNA, 33 bp, Homo sapien
tctttcttctgacactaaagtctttccctgggg

SEQ ID NO: 156604 - DNA, 33 bp, Homo sapien
tctttcttctgacactgaagtctttccctgggg

SEQ ID NO: 156605 - DNA, 33 bp, Homo sapien
gtcacagctcacataacactctcacaggtacct

SEQ ID NO: 156606 - DNA, 33 bp, Homo sapien
gtcacagctcacataatactctcacaggtacct

SEQ ID NO: 156607 - DNA, 33 bp, Homo sapien
gtaaaatgaagaaaacagtattattcagaagaa

SEQ ID NO: 156608 - DNA, 33 bp, Homo sapien
gtaaaatgaagaaaaccgtattattcagaagaa

SEQ ID NO: 156609 - DNA, 33 bp, Homo sapien
tcaaaatgtgatcatacgtgcataaaatatgga

SEQ ID NO: 156610 - DNA, 33 bp, Homo sapien
tcaaaatgtgatcatatgtgcataaaatatgga

SEQ ID NO: 156611 - DNA, 33 bp, Homo sapien
ttctgctcatgacaagaagtgaacaaagaggaa

SEQ ID NO: 156612 - DNA, 33 bp, Homo sapien
ttctgctcatgacaaggagtgaacaaagaggaa

SEQ ID NO: 156613 - DNA, 33 bp, Homo sapien
ttttgaaatggaaatcaatacaaatgatatcac

SEQ ID NO: 156614 - DNA, 33 bp, Homo sapien
ttttgaaatggaaatcgatacaaatgatatcac

SEQ ID NO: 156615 - DNA, 33 bp, Homo sapien
tgccctttaattctcaacaactactttgtagta

SEQ ID NO: 156616 - DNA, 33 bp, Homo sapien
tgccctttaattctcagcaactactttgtagta

SEQ ID NO: 156617 - DNA, 33 bp, Homo sapien
actggttttcactccaagccagatgaatttaac

SEQ ID NO: 156618 - DNA, 33 bp, Homo sapien
actggttttcactccaggccagatgaatttaac

SEQ ID NO: 156619 - DNA, 33 bp, Homo sapien
ggaaccagctgttaaaatagaactccgcaaaac

SEQ ID NO: 156620 - DNA, 33 bp, Homo sapien
ggaaccagctgttaaagtagaactccgcaaaac

SEQ ID NO: 156621 - DNA, 33 bp, Homo sapien
aataccaagaatcccaaaggctggagaacagac

SEQ ID NO: 156622 - DNA, 33 bp, Homo sapien
aataccaagaatcccagaggctggagaacagac

SEQ ID NO: 156623 - DNA, 33 bp, Homo sapien
ctgggtagaattgagaaagtcattttgcctact

SEQ ID NO: 156624 - DNA, 33 bp, Homo sapien
ctgggtagaattgagagagtcattttgcctact

SEQ ID NO: 156625 - DNA, 33 bp, Homo sapien
tatctcattttcgtaaagggaaagatgacttgt

SEQ ID NO: 156626 - DNA, 33 bp, Homo sapien
tatctcattttcgtaaggggaaagatgacttgt

SEQ ID NO: 156627 - DNA, 33 bp, Homo sapien
cacatactggagataaagagatgaatgaaacag

SEQ ID NO: 156628 - DNA, 33 bp, Homo sapien
cacatactggagataaggagatgaatgaaacag

SEQ ID NO: 156629 - DNA, 33 bp, Homo sapien
agctctttgagccttaaggaaacagagtagatg

SEQ ID NO: 156630 - DNA, 33 bp, Homo sapien
agctctttgagccttatggaaacagagtagatg

SEQ ID NO: 156631 - DNA, 33 bp, Homo sapien
ttaaatcataaaaagccgctctatatacagttt

SEQ ID NO: 156632 - DNA, 33 bp, Homo sapien
ttaaatcataaaaagctgctctatatacagttt

SEQ ID NO: 156633 - DNA, 33 bp, Homo sapien
cctctgcatctgcaaactcacaatgacatgact

SEQ ID NO: 156634 - DNA, 33 bp, Homo sapien
cctctgcatctgcaaagtcacaatgacatgact

SEQ ID NO: 156635 - DNA, 33 bp, Homo sapien
ggcactttctctccaaaagctgtccttccttga

SEQ ID NO: 156636 - DNA, 33 bp, Homo sapien
ggcactttctctccaacagctgtccttccttga

SEQ ID NO: 156637 - DNA, 33 bp, Homo sapien
tcaagggcattgcccacaggacttttagccggg

SEQ ID NO: 156638 - DNA, 33 bp, Homo sapien
tcaagggcattgcccagaggacttttagccggg

SEQ ID NO: 156639 - DNA, 33 bp, Homo sapien
catatttaggccttcacgctttctgctcaggga

SEQ ID NO: 156640 - DNA, 33 bp, Homo sapien
catatttaggccttcatgctttctgctcaggga

SEQ ID NO: 156641 - DNA, 33 bp, Homo sapien
attgccttgaacatccagatcctcacagtccct

SEQ ID NO: 156642 - DNA, 33 bp, Homo sapien
attgccttgaacatccggatcctcacagtccct

SEQ ID NO: 156643 - DNA, 33 bp, Homo sapien
ggaaataagagcaccaagatacgaatcaggaca

SEQ ID NO: 156644 - DNA, 33 bp, Homo sapien
ggaaataagagcaccaggatacgaatcaggaca

SEQ ID NO: 156645 - DNA, 33 bp, Homo sapien
aagacagtcctttccaagctttattgtttttac

SEQ ID NO: 156646 - DNA, 33 bp, Homo sapien
aagacagtcctttccaggctttattgtttttac

SEQ ID NO: 156647 - DNA, 33 bp, Homo sapien
aagtacagatttcagtcaagtgttgaaataatg

SEQ ID NO: 156648 - DNA, 33 bp, Homo sapien
aagtacagatttcagttaagtgttgaaataatg

SEQ ID NO: 156649 - DNA, 33 bp, Homo sapien
tctacctctgtgactacaagtgttcttttattt

SEQ ID NO: 156650 - DNA, 33 bp, Homo sapien
tctacctctgtgactagaagtgttcttttattt

SEQ ID NO: 156651 - DNA, 33 bp, Homo sapien
actacatcaattgcctcaacaatgccttattca

SEQ ID NO: 156652 - DNA, 33 bp, Homo sapien
actacatcaattgccttaacaatgccttattca

SEQ ID NO: 156653 - DNA, 33 bp, Homo sapien
tcaaagagcctctgtacagattgatatattact

SEQ ID NO: 156654 - DNA, 33 bp, Homo sapien
tcaaagagcctctgtagagattgatatattact

SEQ ID NO: 156655 - DNA, 33 bp, Homo sapien
aatttttagaatatgactagaagattgacttca

SEQ ID NO: 156656 - DNA, 33 bp, Homo sapien
aatttttagaatatgagtagaagattgacttca

SEQ ID NO: 156657 - DNA, 33 bp, Homo sapien
cccatatttgttgatgaagtaattcctgccacc

SEQ ID NO: 156658 - DNA, 33 bp, Homo sapien
cccatatttgttgatggagtaattcctgccacc

SEQ ID NO: 156659 - DNA, 33 bp, Homo sapien
aagaacggagtctcccagcaggcatctgtgccc

SEQ ID NO: 156660 - DNA, 33 bp, Homo sapien
aagaacggagtctccccgcaggcatctgtgccc

SEQ ID NO: 156661 - DNA, 33 bp, Homo sapien
cagatacagcaagtaaaaaggaagcatacagaa

SEQ ID NO: 156662 - DNA, 33 bp, Homo sapien
cagatacagcaagtaacaaggaagcatacagaa

SEQ ID NO: 156663 - DNA, 33 bp, Homo sapien
ggtgctacaatcataggcacaaattcatttagt

SEQ ID NO: 156664 - DNA, 33 bp, Homo sapien
ggtgctacaatcatagtcacaaattcatttagt

SEQ ID NO: 156665 - DNA, 33 bp, Homo sapien
atggctggggcagcataaactgaacacctcttc

SEQ ID NO: 156666 - DNA, 33 bp, Homo sapien
atggctggggcagcatcaactgaacacctcttc

SEQ ID NO: 156667 - DNA, 33 bp, Homo sapien
tcttgggaatttcctaactagctttgaggcttg

SEQ ID NO: 156668 - DNA, 33 bp, Homo sapien
tcttgggaatttcctatctagctttgaggcttg

SEQ ID NO: 156669 - DNA, 33 bp, Homo sapien
aactgactagaacttactaaatacttgccaact

SEQ ID NO: 156670 - DNA, 33 bp, Homo sapien
aactgactagaacttattaaatacttgccaact

SEQ ID NO: 156671 - DNA, 33 bp, Homo sapien
gttggcacaaaaagtacagtatcaaacggtcca

SEQ ID NO: 156672 - DNA, 33 bp, Homo sapien
gttggcacaaaaagtagagtatcaaacggtcca

SEQ ID NO: 156673 - DNA, 33 bp, Homo sapien
aaagaaacatttggacaaggttgggagtatttt

SEQ ID NO: 156674 - DNA, 33 bp, Homo sapien
aaagaaacatttggacgaggttgggagtatttt

SEQ ID NO: 156675 - DNA, 33 bp, Homo sapien
tttccctatggtcacagctgccaatcaagaaat

SEQ ID NO: 156676 - DNA, 33 bp, Homo sapien
tttccctatggtcacatctgccaatcaagaaat

SEQ ID NO: 156677 - DNA, 33 bp, Homo sapien
aaaccgatgaggtgctaagaggcaggaaagttc

SEQ ID NO: 156678 - DNA, 33 bp, Homo sapien
aaaccgatgaggtgctcagaggcaggaaagttc

SEQ ID NO: 156679 - DNA, 33 bp, Homo sapien
agaaattcgggtatcacgtctagaaaccatagg

SEQ ID NO: 156680 - DNA, 33 bp, Homo sapien
agaaattcgggtatcatgtctagaaaccatagg

SEQ ID NO: 156681 - DNA, 33 bp, Homo sapien
tagaagaagttggaaacgtgagagagtaaaaag

SEQ ID NO: 156682 - DNA, 33 bp, Homo sapien
tagaagaagttggaaatgtgagagagtaaaaag

SEQ ID NO: 156683 - DNA, 33 bp, Homo sapien
gacttttttcactcttcaacttgttcaaacgct

SEQ ID NO: 156684 - DNA, 33 bp, Homo sapien
gacttttttcactctttaacttgttcaaacgct

SEQ ID NO: 156685 - DNA, 33 bp, Homo sapien
ggagcacagtttgaaaagcaaaagaactgtgtt

SEQ ID NO: 156686 - DNA, 33 bp, Homo sapien
ggagcacagtttgaaaggcaaaagaactgtgtt

SEQ ID NO: 156687 - DNA, 33 bp, Homo sapien
gctaatttgagcatcccatagtcacctagtttt

SEQ ID NO: 156688 - DNA, 33 bp, Homo sapien
gctaatttgagcatccgatagtcacctagtttt

SEQ ID NO: 156689 - DNA, 33 bp, Homo sapien
cacggtgtactgagaacagacagaatgagaagg

SEQ ID NO: 156690 - DNA, 33 bp, Homo sapien
cacggtgtactgagaatagacagaatgagaagg

SEQ ID NO: 156691 - DNA, 33 bp, Homo sapien
caagtcttgcaatgtaaaaatcattgtagagtg

SEQ ID NO: 156692 - DNA, 33 bp, Homo sapien
caagtcttgcaatgtagaaatcattgtagagtg

SEQ ID NO: 156693 - DNA, 33 bp, Homo sapien
tctgtgagccaactcaagctggatgtgaatttt

SEQ ID NO: 156694 - DNA, 33 bp, Homo sapien
tctgtgagccaactcatgctggatgtgaatttt

SEQ ID NO: 156695 - DNA, 33 bp, Homo sapien
attaagctgagttcgcgctcttttttcaccttt

SEQ ID NO: 156696 - DNA, 33 bp, Homo sapien
attaagctgagttcgctctcttttttcaccttt

SEQ ID NO: 156697 - DNA, 33 bp, Homo sapien
tgaacctcttttcttccctgacagcagtggcag

SEQ ID NO: 156698 - DNA, 33 bp, Homo sapien
tgaacctcttttcttctctgacagcagtggcag

SEQ ID NO: 156699 - DNA, 33 bp, Homo sapien
ctcagggtcatagaatcagtttgtcagagtaag

SEQ ID NO: 156700 - DNA, 33 bp, Homo sapien
ctcagggtcatagaattagtttgtcagagtaag

SEQ ID NO: 156701 - DNA, 33 bp, Homo sapien
atcaccaaataaataacgtgtgccttcatcaga

SEQ ID NO: 156702 - DNA, 33 bp, Homo sapien
atcaccaaataaataatgtgtgccttcatcaga

SEQ ID NO: 156703 - DNA, 33 bp, Homo sapien
ccaaagcatcagaaaactccaagaccccaccac

SEQ ID NO: 156704 - DNA, 33 bp, Homo sapien
ccaaagcatcagaaaagtccaagaccccaccac

SEQ ID NO: 156705 - DNA, 33 bp, Homo sapien
acactcaggagtaccacgcaaagcctgtcaact

SEQ ID NO: 156706 - DNA, 33 bp, Homo sapien
acactcaggagtaccatgcaaagcctgtcaact

SEQ ID NO: 156707 - DNA, 33 bp, Homo sapien
aggacttaccacatcaagaattatccatatttc

SEQ ID NO: 156708 - DNA, 33 bp, Homo sapien
aggacttaccacatcaggaattatccatatttc

SEQ ID NO: 156709 - DNA, 33 bp, Homo sapien
catatacagtaggagacgtttgctatattttag

SEQ ID NO: 156710 - DNA, 33 bp, Homo sapien
catatacagtaggagatgtttgctatattttag

SEQ ID NO: 156711 - DNA, 33 bp, Homo sapien
gataagactgactgaagagttttcctccccctt

SEQ ID NO: 156712 - DNA, 33 bp, Homo sapien
gataagactgactgaatagttttcctccccctt

SEQ ID NO: 156713 - DNA, 33 bp, Homo sapien
aggggaatggatgaagacaggagtcagggaggt

SEQ ID NO: 156714 - DNA, 33 bp, Homo sapien
aggggaatggatgaaggcaggagtcagggaggt

SEQ ID NO: 156715 - DNA, 33 bp, Homo sapien
cgtacaagtagaagtcagaatttctgcagccca

SEQ ID NO: 156716 - DNA, 33 bp, Homo sapien
cgtacaagtagaagtccgaatttctgcagccca

SEQ ID NO: 156717 - DNA, 33 bp, Homo sapien
aattctatttaagcaaagcaatttaaagtaata

SEQ ID NO: 156718 - DNA, 33 bp, Homo sapien
aattctatttaagcaacgcaatttaaagtaata

SEQ ID NO: 156719 - DNA, 33 bp, Homo sapien
ccattaaaccaggagacccagtttcagtcttag

SEQ ID NO: 156720 - DNA, 33 bp, Homo sapien
ccattaaaccaggagatccagtttcagtcttag

SEQ ID NO: 156721 - DNA, 33 bp, Homo sapien
cttcaacacatggacaaagcaagagccaggagc

SEQ ID NO: 156722 - DNA, 33 bp, Homo sapien
cttcaacacatggacacagcaagagccaggagc

SEQ ID NO: 156723 - DNA, 33 bp, Homo sapien
ccaggcactgtgcaagacggtggggatacagtg

SEQ ID NO: 156724 - DNA, 33 bp, Homo sapien
ccaggcactgtgcaaggcggtggggatacagtg

SEQ ID NO: 156725 - DNA, 33 bp, Homo sapien
ttcccttcttagggcaacattcttatcacagag

SEQ ID NO: 156726 - DNA, 33 bp, Homo sapien
ttcccttcttagggcagcattcttatcacagag

SEQ ID NO: 156727 - DNA, 33 bp, Homo sapien
cccattcagggtacaaatgatcaggagccacca

SEQ ID NO: 156728 - DNA, 33 bp, Homo sapien
cccattcagggtacaagtgatcaggagccacca

SEQ ID NO: 156729 - DNA, 33 bp, Homo sapien
ccttctgtagcaacaacggctgttccctgagcc

SEQ ID NO: 156730 - DNA, 33 bp, Homo sapien
ccttctgtagcaacaatggctgttccctgagcc

SEQ ID NO: 156731 - DNA, 33 bp, Homo sapien
atttggacgataggacagccctttgtatagaga

SEQ ID NO: 156732 - DNA, 33 bp, Homo sapien
atttggacgataggacggccctttgtatagaga

SEQ ID NO: 156733 - DNA, 33 bp, Homo sapien
cctaatggtccatccgcccgcagcagtcagaat

SEQ ID NO: 156734 - DNA, 33 bp, Homo sapien
cctaatggtccatccgtccgcagcagtcagaat

SEQ ID NO: 156735 - DNA, 33 bp, Homo sapien
tactaagatttctaacacaatggtttctttaaa

SEQ ID NO: 156736 - DNA, 33 bp, Homo sapien
tactaagatttctaacgcaatggtttctttaaa

SEQ ID NO: 156737 - DNA, 33 bp, Homo sapien
tttcaaacagcaaaaaactaggcaggcaacctg

SEQ ID NO: 156738 - DNA, 33 bp, Homo sapien
tttcaaacagcaaaaacctaggcaggcaacctg

SEQ ID NO: 156739 - DNA, 33 bp, Homo sapien
cagaaaggaggtaccactgagatggaaacaact

SEQ ID NO: 156740 - DNA, 33 bp, Homo sapien
cagaaaggaggtaccattgagatggaaacaact

SEQ ID NO: 156741 - DNA, 33 bp, Homo sapien
ctgtaagattgagataaagataacagtacttga

SEQ ID NO: 156742 - DNA, 33 bp, Homo sapien
ctgtaagattgagatacagataacagtacttga

SEQ ID NO: 156743 - DNA, 33 bp, Homo sapien
atagtctactaatgtaccgtgagccttttagga

SEQ ID NO: 156744 - DNA, 33 bp, Homo sapien
atagtctactaatgtatcgtgagccttttagga

SEQ ID NO: 156745 - DNA, 33 bp, Homo sapien
tagataactctcttcaaatgatttcaaggacta

SEQ ID NO: 156746 - DNA, 33 bp, Homo sapien
tagataactctcttcagatgatttcaaggacta

SEQ ID NO: 156747 - DNA, 33 bp, Homo sapien
agacacacagaaatgccattctatgtcatctcc

SEQ ID NO: 156748 - DNA, 33 bp, Homo sapien
agacacacagaaatgctattctatgtcatctcc

SEQ ID NO: 156749 - DNA, 33 bp, Homo sapien
gctttatgcctggggccgcagagacagagatga

SEQ ID NO: 156750 - DNA, 33 bp, Homo sapien
gctttatgcctggggctgcagagacagagatga

SEQ ID NO: 156751 - DNA, 33 bp, Homo sapien
ggcacctagcacattgcagatgttcaataaatc

SEQ ID NO: 156752 - DNA, 33 bp, Homo sapien
ggcacctagcacattgtagatgttcaataaatc

SEQ ID NO: 156753 - DNA, 33 bp, Homo sapien
atatggtgagaagaacgctatgattacacctcg

SEQ ID NO: 156754 - DNA, 33 bp, Homo sapien
atatggtgagaagaactctatgattacacctcg

SEQ ID NO: 156755 - DNA, 33 bp, Homo sapien
gggagacactctgaataaccagatgacttgtcc

SEQ ID NO: 156756 - DNA, 33 bp, Homo sapien
gggagacactctgaatgaccagatgacttgtcc

SEQ ID NO: 156757 - DNA, 33 bp, Homo sapien
gcacctttgtaaatgtgaaggtgaataaagtat

SEQ ID NO: 156758 - DNA, 33 bp, Homo sapien
gcacctttgtaaatgttaaggtgaataaagtat

SEQ ID NO: 156759 - DNA, 33 bp, Homo sapien
acttccctaggacaccacagtgggagcaccagg

SEQ ID NO: 156760 - DNA, 33 bp, Homo sapien
acttccctaggacaccgcagtgggagcaccagg

SEQ ID NO: 156761 - DNA, 33 bp, Homo sapien
ctatagacaggttctaccccgtgggcagattct

SEQ ID NO: 156762 - DNA, 33 bp, Homo sapien
ctatagacaggttctatcccgtgggcagattct

SEQ ID NO: 156763 - DNA, 33 bp, Homo sapien
ataattcacttagaaacgttttcctaggctggg

SEQ ID NO: 156764 - DNA, 33 bp, Homo sapien
ataattcacttagaaatgttttcctaggctggg

SEQ ID NO: 156765 - DNA, 33 bp, Homo sapien
gctaggatttatggaacacttactacgttctaa

SEQ ID NO: 156766 - DNA, 33 bp, Homo sapien
gctaggatttatggaatacttactacgttctaa

SEQ ID NO: 156767 - DNA, 33 bp, Homo sapien
gttctaagggcagtgccaagtgtttcaatgatt

SEQ ID NO: 156768 - DNA, 33 bp, Homo sapien
gttctaagggcagtgctaagtgtttcaatgatt

SEQ ID NO: 156769 - DNA, 33 bp, Homo sapien
gtgttttgctgagtacaatattgattttagtaa

SEQ ID NO: 156770 - DNA, 33 bp, Homo sapien
gtgttttgctgagtaccatattgattttagtaa

SEQ ID NO: 156771 - DNA, 33 bp, Homo sapien
cctcaccaaagttaccacacaatgggtccacag

SEQ ID NO: 156772 - DNA, 33 bp, Homo sapien
cctcaccaaagttaccgcacaatgggtccacag

SEQ ID NO: 156773 - DNA, 33 bp, Homo sapien
cacaggttgctatacaaaaagtttaaatcaata

SEQ ID NO: 156774 - DNA, 33 bp, Homo sapien
cacaggttgctatacagaaagtttaaatcaata

SEQ ID NO: 156775 - DNA, 33 bp, Homo sapien
ttacgataaagtacaacacaaagttcctactca

SEQ ID NO: 156776 - DNA, 33 bp, Homo sapien
ttacgataaagtacaagacaaagttcctactca

SEQ ID NO: 156777 - DNA, 33 bp, Homo sapien
ggagcctaagctagaagaaccacctcttcagaa

SEQ ID NO: 156778 - DNA, 33 bp, Homo sapien
ggagcctaagctagaataaccacctcttcagaa

SEQ ID NO: 156779 - DNA, 33 bp, Homo sapien
ccaaggctggggaatccgagttttcctagtacg

SEQ ID NO: 156780 - DNA, 33 bp, Homo sapien
ccaaggctggggaatctgagttttcctagtacg

SEQ ID NO: 156781 - DNA, 33 bp, Homo sapien
tataccactgccagagactattttgggatgggg

SEQ ID NO: 156782 - DNA, 33 bp, Homo sapien
tataccactgccagagtctattttgggatgggg

SEQ ID NO: 156783 - DNA, 33 bp, Homo sapien
aattgagaaacccgagaccccaaacattactta

SEQ ID NO: 156784 - DNA, 33 bp, Homo sapien
aattgagaaacccgagtccccaaacattactta

SEQ ID NO: 156785 - DNA, 33 bp, Homo sapien
aaaaccagcaagtgaaaaacgcatgcttggcag

SEQ ID NO: 156786 - DNA, 33 bp, Homo sapien
aaaaccagcaagtgaacaacgcatgcttggcag

SEQ ID NO: 156787 - DNA, 33 bp, Homo sapien
ctgctactgagcttgacgtagtgtacacttgct

SEQ ID NO: 156788 - DNA, 33 bp, Homo sapien
ctgctactgagcttgatgtagtgtacacttgct

SEQ ID NO: 156789 - DNA, 33 bp, Homo sapien
atctgctagcagtgaccgagtacgtagaaggaa

SEQ ID NO: 156790 - DNA, 33 bp, Homo sapien
atctgctagcagtgactgagtacgtagaaggaa

SEQ ID NO: 156791 - DNA, 33 bp, Homo sapien
gcttccactggtcccaaaataggaatgactgag

SEQ ID NO: 156792 - DNA, 33 bp, Homo sapien
gcttccactggtcccagaataggaatgactgag

SEQ ID NO: 156793 - DNA, 33 bp, Homo sapien
cagggtaactcaaaagacctttctctgtgccca

SEQ ID NO: 156794 - DNA, 33 bp, Homo sapien
cagggtaactcaaaaggcctttctctgtgccca

SEQ ID NO: 156795 - DNA, 33 bp, Homo sapien
cagtctactcagttgaagaccagagatgaagag

SEQ ID NO: 156796 - DNA, 33 bp, Homo sapien
cagtctactcagttgaggaccagagatgaagag

SEQ ID NO: 156797 - DNA, 33 bp, Homo sapien
ctcatgcccctcacacaattccttcctgctcac

SEQ ID NO: 156798 - DNA, 33 bp, Homo sapien
ctcatgcccctcacacgattccttcctgctcac

SEQ ID NO: 156799 - DNA, 33 bp, Homo sapien
gagggggtgatagccacgaatacagagagatgg

SEQ ID NO: 156800 - DNA, 33 bp, Homo sapien
gagggggtgatagccatgaatacagagagatgg

SEQ ID NO: 156801 - DNA, 33 bp, Homo sapien
aagatgcagacagttcaaggtgctaaggctgaa

SEQ ID NO: 156802 - DNA, 33 bp, Homo sapien
aagatgcagacagttcgaggtgctaaggctgaa

SEQ ID NO: 156803 - DNA, 33 bp, Homo sapien
cctacttcaaccctataagaagtgttgccattc

SEQ ID NO: 156804 - DNA, 33 bp, Homo sapien
cctacttcaaccctatgagaagtgttgccattc

SEQ ID NO: 156805 - DNA, 33 bp, Homo sapien
gtgcttgctttggtcacgttcaacgcactacag

SEQ ID NO: 156806 - DNA, 33 bp, Homo sapien
gtgcttgctttggtcatgttcaacgcactacag

SEQ ID NO: 156807 - DNA, 33 bp, Homo sapien
tttgcctgttccaatcaaaccaccccattcagg

SEQ ID NO: 156808 - DNA, 33 bp, Homo sapien
tttgcctgttccaatcgaaccaccccattcagg

SEQ ID NO: 156809 - DNA, 33 bp, Homo sapien
cctggcaaggcaggacagtcagaagatggggct

SEQ ID NO: 156810 - DNA, 33 bp, Homo sapien
cctggcaaggcaggacggtcagaagatggggct

SEQ ID NO: 156811 - DNA, 33 bp, Homo sapien
cgtgcgtatcgacaccgatgtgggatacgttct

SEQ ID NO: 156812 - DNA, 33 bp, Homo sapien
cgtgcgtatcgacacctatgtgggatacgttct

SEQ ID NO: 156813 - DNA, 33 bp, Homo sapien
agttacaagtagacagaataataacatttacag

SEQ ID NO: 156814 - DNA, 33 bp, Homo sapien
agttacaagtagacaggataataacatttacag

SEQ ID NO: 156815 - DNA, 33 bp, Homo sapien
tctcttactcaaggccaagttacaagtagacag

SEQ ID NO: 156816 - DNA, 33 bp, Homo sapien
tctcttactcaaggccgagttacaagtagacag

SEQ ID NO: 156817 - DNA, 33 bp, Homo sapien
gagaaggggactgggacgcgaagatggaactct

SEQ ID NO: 156818 - DNA, 33 bp, Homo sapien
gagaaggggactgggatgcgaagatggaactct

SEQ ID NO: 156819 - DNA, 33 bp, Homo sapien
cccacccagtctgaataaccaaactctgcttcc

SEQ ID NO: 156820 - DNA, 33 bp, Homo sapien
cccacccagtctgaatcaccaaactctgcttcc

SEQ ID NO: 156821 - DNA, 33 bp, Homo sapien
tgttttgtgtggaggaaaaaggggggagtcagg

SEQ ID NO: 156822 - DNA, 33 bp, Homo sapien
tgttttgtgtggaggagaaaggggggagtcagg

SEQ ID NO: 156823 - DNA, 33 bp, Homo sapien
ggaaaactccaccacacaattgcagaagggtct

SEQ ID NO: 156824 - DNA, 33 bp, Homo sapien
ggaaaactccaccacataattgcagaagggtct

SEQ ID NO: 156825 - DNA, 33 bp, Homo sapien
ttgtatagtctttttacataattggggttgttc

SEQ ID NO: 156826 - DNA, 33 bp, Homo sapien
ttgtatagtctttttagataattggggttgttc

SEQ ID NO: 156827 - DNA, 33 bp, Homo sapien
gaggttgcgaggcgtacaacattcatgaatccg

SEQ ID NO: 156828 - DNA, 33 bp, Homo sapien
gaggttgcgaggcgtataacattcatgaatccg

SEQ ID NO: 156829 - DNA, 33 bp, Homo sapien
tattattccttctacaaatggaagctggcattt

SEQ ID NO: 156830 - DNA, 33 bp, Homo sapien
tattattccttctacagatggaagctggcattt

SEQ ID NO: 156831 - DNA, 33 bp, Homo sapien
tacctcttcttagaaaagtcctctaactcctgt

SEQ ID NO: 156832 - DNA, 33 bp, Homo sapien
tacctcttcttagaaatgtcctctaactcctgt

SEQ ID NO: 156833 - DNA, 33 bp, Homo sapien
gtggcaatgctttatagatatcatcccaagaag

SEQ ID NO: 156834 - DNA, 33 bp, Homo sapien
gtggcaatgctttatatatatcatcccaagaag

SEQ ID NO: 156835 - DNA, 33 bp, Homo sapien
gtctagtacatatctaccagtcaggatgctttt

SEQ ID NO: 156836 - DNA, 33 bp, Homo sapien
gtctagtacatatctatcagtcaggatgctttt

SEQ ID NO: 156837 - DNA, 33 bp, Homo sapien
ctttatttcttaaagacccctctgtcaatcgaa

SEQ ID NO: 156838 - DNA, 33 bp, Homo sapien
ctttatttcttaaagatccctctgtcaatcgaa

SEQ ID NO: 156839 - DNA, 33 bp, Homo sapien
ccacatccttgctgcacgggctataatttaaaa

SEQ ID NO: 156840 - DNA, 33 bp, Homo sapien
ccacatccttgctgcatgggctataatttaaaa

SEQ ID NO: 156841 - DNA, 33 bp, Homo sapien
acaggtttggttgaaccatgtgtttctccactc

SEQ ID NO: 156842 - DNA, 33 bp, Homo sapien
acaggtttggttgaactatgtgtttctccactc

SEQ ID NO: 156843 - DNA, 33 bp, Homo sapien
aaaaattcaagtgctacctaaggctataatctg

SEQ ID NO: 156844 - DNA, 33 bp, Homo sapien
aaaaattcaagtgctatctaaggctataatctg

SEQ ID NO: 156845 - DNA, 33 bp, Homo sapien
atgcaaccacctctaactgatttctttatctct

SEQ ID NO: 156846 - DNA, 33 bp, Homo sapien
atgcaaccacctctaattgatttctttatctct

SEQ ID NO: 156847 - DNA, 33 bp, Homo sapien
actaactactttaaggacaaactgtttctttga

SEQ ID NO: 156848 - DNA, 33 bp, Homo sapien
actaactactttaaggtcaaactgtttctttga

SEQ ID NO: 156849 - DNA, 33 bp, Homo sapien
taattctcatctcctactacagtcaggaagcta

SEQ ID NO: 156850 - DNA, 33 bp, Homo sapien
taattctcatctcctattacagtcaggaagcta

SEQ ID NO: 156851 - DNA, 33 bp, Homo sapien
ccaagcacaaagcaaacgttggacccagaagtt

SEQ ID NO: 156852 - DNA, 33 bp, Homo sapien
ccaagcacaaagcaaatgttggacccagaagtt

SEQ ID NO: 156853 - DNA, 33 bp, Homo sapien
gtgagttgtatgttcaccaagagtcaattgttt

SEQ ID NO: 156854 - DNA, 33 bp, Homo sapien
gtgagttgtatgttcatcaagagtcaattgttt

SEQ ID NO: 156855 - DNA, 33 bp, Homo sapien
agagcctgtaataataagtctaatcaatcttgc

SEQ ID NO: 156856 - DNA, 33 bp, Homo sapien
agagcctgtaataataggtctaatcaatcttgc

SEQ ID NO: 156857 - DNA, 33 bp, Homo sapien
atcattcactaggatgaaaataaacactacaat

SEQ ID NO: 156858 - DNA, 33 bp, Homo sapien
atcattcactaggatgcaaataaacactacaat

SEQ ID NO: 156859 - DNA, 33 bp, Homo sapien
tattaaggctcattaaaattttgagaagtgtgg

SEQ ID NO: 156860 - DNA, 33 bp, Homo sapien
tattaaggctcattaagattttgagaagtgtgg

SEQ ID NO: 156861 - DNA, 33 bp, Homo sapien
caatgaaaaaattgccaaatgatgtatttctca

SEQ ID NO: 156862 - DNA, 33 bp, Homo sapien
caatgaaaaaattgcctaatgatgtatttctca

SEQ ID NO: 156863 - DNA, 33 bp, Homo sapien
ctcttaatgagtgagacacattctgagaaatac

SEQ ID NO: 156864 - DNA, 33 bp, Homo sapien
ctcttaatgagtgagatacattctgagaaatac

SEQ ID NO: 156865 - DNA, 33 bp, Homo sapien
tcagtgaggctgagacaacaaaagtttgtgggg

SEQ ID NO: 156866 - DNA, 33 bp, Homo sapien
tcagtgaggctgagacgacaaaagtttgtgggg

SEQ ID NO: 156867 - DNA, 33 bp, Homo sapien
gaggcagtttttatcccgattagcacaattcta

SEQ ID NO: 156868 - DNA, 33 bp, Homo sapien
gaggcagtttttatcctgattagcacaattcta

SEQ ID NO: 156869 - DNA, 33 bp, Homo sapien
gcaatttgcaaaattacgttaagacaaggaatt

SEQ ID NO: 156870 - DNA, 33 bp, Homo sapien
gcaatttgcaaaattatgttaagacaaggaatt

SEQ ID NO: 156871 - DNA, 33 bp, Homo sapien
aaaaaagattcacgtgccaaaagttatgaatgt

SEQ ID NO: 156872 - DNA, 33 bp, Homo sapien
aaaaaagattcacgtgtcaaaagttatgaatgt

SEQ ID NO: 156873 - DNA, 33 bp, Homo sapien
tccccatgagtctaagcagctgtgaccaggctg

SEQ ID NO: 156874 - DNA, 33 bp, Homo sapien
tccccatgagtctaaggagctgtgaccaggctg

SEQ ID NO: 156875 - DNA, 33 bp, Homo sapien
acatgagaacactgcaggtcaaactttatcaga

SEQ ID NO: 156876 - DNA, 33 bp, Homo sapien
acatgagaacactgcatgtcaaactttatcaga

SEQ ID NO: 156877 - DNA, 33 bp, Homo sapien
gttgccagggtggtataaagaggaacagcaagc

SEQ ID NO: 156878 - DNA, 33 bp, Homo sapien
gttgccagggtggtatcaagaggaacagcaagc

SEQ ID NO: 156879 - DNA, 33 bp, Homo sapien
tcttgattttattaaagaactacttgggcctgt

SEQ ID NO: 156880 - DNA, 33 bp, Homo sapien
tcttgattttattaaataactacttgggcctgt

SEQ ID NO: 156881 - DNA, 33 bp, Homo sapien
atcatattttgaaggcagcagggaatttatatg

SEQ ID NO: 156882 - DNA, 33 bp, Homo sapien
atcatattttgaaggcggcagggaatttatatg

SEQ ID NO: 156883 - DNA, 33 bp, Homo sapien
aaatgtttagtggagcacacaactgcttagaat

SEQ ID NO: 156884 - DNA, 33 bp, Homo sapien
aaatgtttagtggagcccacaactgcttagaat

SEQ ID NO: 156885 - DNA, 33 bp, Homo sapien
gctctgaggggaaaccagcagtctgtcactctc

SEQ ID NO: 156886 - DNA, 33 bp, Homo sapien
gctctgaggggaaaccggcagtctgtcactctc

SEQ ID NO: 156887 - DNA, 33 bp, Homo sapien
aatttgcctttgtaacaacaactgagtctcagc

SEQ ID NO: 156888 - DNA, 33 bp, Homo sapien
aatttgcctttgtaacgacaactgagtctcagc

SEQ ID NO: 156889 - DNA, 33 bp, Homo sapien
gttggttaaatccctgcatttgccttaactgaa

SEQ ID NO: 156890 - DNA, 33 bp, Homo sapien
gttggttaaatccctgtatttgccttaactgaa

SEQ ID NO: 156891 - DNA, 33 bp, Homo sapien
tgatagcaaagtcaacaggatggaatctcatga

SEQ ID NO: 156892 - DNA, 33 bp, Homo sapien
tgatagcaaagtcaacgggatggaatctcatga

SEQ ID NO: 156893 - DNA, 33 bp, Homo sapien
cgggtctagttatctacgtgcaacaagaaaatc

SEQ ID NO: 156894 - DNA, 33 bp, Homo sapien
cgggtctagttatctatgtgcaacaagaaaatc

SEQ ID NO: 156895 - DNA, 33 bp, Homo sapien
aggcatatcacttaagcattccaagccttagtt

SEQ ID NO: 156896 - DNA, 33 bp, Homo sapien
aggcatatcacttaagtattccaagccttagtt

SEQ ID NO: 156897 - DNA, 33 bp, Homo sapien
aagtgatatgcctaaactcaatcatctggttag

SEQ ID NO: 156898 - DNA, 33 bp, Homo sapien
aagtgatatgcctaaagtcaatcatctggttag

SEQ ID NO: 156899 - DNA, 33 bp, Homo sapien
acagcaccagacggtgcaagggaagttaagaaa

SEQ ID NO: 156900 - DNA, 33 bp, Homo sapien
acagcaccagacggtgtaagggaagttaagaaa

SEQ ID NO: 156901 - DNA, 33 bp, Homo sapien
tctggtctgtcagcaccatttactgctgagcag

SEQ ID NO: 156902 - DNA, 33 bp, Homo sapien
tctggtctgtcagcactatttactgctgagcag

SEQ ID NO: 156903 - DNA, 33 bp, Homo sapien
gctagagaatgaccaaatctgctttaagaagtc

SEQ ID NO: 156904 - DNA, 33 bp, Homo sapien
gctagagaatgaccaagtctgctttaagaagtc

SEQ ID NO: 156905 - DNA, 33 bp, Homo sapien
ggattataatgagggtcaattgaaatgattctg

SEQ ID NO: 156906 - DNA, 33 bp, Homo sapien
ggattataatgagggttaattgaaatgattctg

SEQ ID NO: 156907 - DNA, 33 bp, Homo sapien
cccagtatcagccatcagaaaaagcaagagttg

SEQ ID NO: 156908 - DNA, 33 bp, Homo sapien
cccagtatcagccatcggaaaaagcaagagttg

SEQ ID NO: 156909 - DNA, 33 bp, Homo sapien
ccaatgtcaccttgaccgggaactgtgacaatc

SEQ ID NO: 156910 - DNA, 33 bp, Homo sapien
ccaatgtcaccttgactgggaactgtgacaatc

SEQ ID NO: 156911 - DNA, 33 bp, Homo sapien
acatatgagtgaatgacgataataagtcacaaa

SEQ ID NO: 156912 - DNA, 33 bp, Homo sapien
acatatgagtgaatgatgataataagtcacaaa

SEQ ID NO: 156913 - DNA, 33 bp, Homo sapien
tgaaatcactcagcgaaattacagaattctaat

SEQ ID NO: 156914 - DNA, 33 bp, Homo sapien
tgaaatcactcagcgagattacagaattctaat

SEQ ID NO: 156915 - DNA, 33 bp, Homo sapien
atctctactttgatcacaaggcccaaagaagag

SEQ ID NO: 156916 - DNA, 33 bp, Homo sapien
atctctactttgatcataaggcccaaagaagag

SEQ ID NO: 156917 - DNA, 33 bp, Homo sapien
gtggtatattggtagacgtttaacaataagctt

SEQ ID NO: 156918 - DNA, 33 bp, Homo sapien
gtggtatattggtagatgtttaacaataagctt

SEQ ID NO: 156919 - DNA, 33 bp, Homo sapien
gacagtttattgcaacggaggtgatgaaacaac

SEQ ID NO: 156920 - DNA, 33 bp, Homo sapien
gacagtttattgcaactgaggtgatgaaacaac

SEQ ID NO: 156921 - DNA, 33 bp, Homo sapien
tcccaggtgacctcacagcccgggctattctag

SEQ ID NO: 156922 - DNA, 33 bp, Homo sapien
tcccaggtgacctcacggcccgggctattctag

SEQ ID NO: 156923 - DNA, 33 bp, Homo sapien
tgctgttggaaataaagaactcagctgactaag

SEQ ID NO: 156924 - DNA, 33 bp, Homo sapien
tgctgttggaaataaataactcagctgactaag

SEQ ID NO: 156925 - DNA, 33 bp, Homo sapien
ggtttctgtcatttgcaacctaaaagccttaac

SEQ ID NO: 156926 - DNA, 33 bp, Homo sapien
ggtttctgtcatttgccacctaaaagccttaac

SEQ ID NO: 156927 - DNA, 33 bp, Homo sapien
ttcatcaaaagactacaacagcccaaggcaaga

SEQ ID NO: 156928 - DNA, 33 bp, Homo sapien
ttcatcaaaagactaccacagcccaaggcaaga

SEQ ID NO: 156929 - DNA, 33 bp, Homo sapien
gcagtttcatccctatcactctaagatcccttg

SEQ ID NO: 156930 - DNA, 33 bp, Homo sapien
gcagtttcatccctattactctaagatcccttg

SEQ ID NO: 156931 - DNA, 33 bp, Homo sapien
taataaacaatacaataatgacagataaaaaga

SEQ ID NO: 156932 - DNA, 33 bp, Homo sapien
taataaacaatacaattatgacagataaaaaga

SEQ ID NO: 156933 - DNA, 33 bp, Homo sapien
gttaaaatgccctcccactgagaccttgtcatt

SEQ ID NO: 156934 - DNA, 33 bp, Homo sapien
gttaaaatgccctcccgctgagaccttgtcatt

SEQ ID NO: 156935 - DNA, 33 bp, Homo sapien
agaggaagagctaaaaaagacttgaaggtccct

SEQ ID NO: 156936 - DNA, 33 bp, Homo sapien
agaggaagagctaaaagagacttgaaggtccct

SEQ ID NO: 156937 - DNA, 33 bp, Homo sapien
tgtaatgattatctgcccttgaattatggattc

SEQ ID NO: 156938 - DNA, 33 bp, Homo sapien
tgtaatgattatctgctcttgaattatggattc

SEQ ID NO: 156939 - DNA, 33 bp, Homo sapien
tactcttacctagagcaacaaccaaccaaggtc

SEQ ID NO: 156940 - DNA, 33 bp, Homo sapien
tactcttacctagagcgacaaccaaccaaggtc

SEQ ID NO: 156941 - DNA, 33 bp, Homo sapien
aaagctctgcaagacaatgaagaacaagcagca

SEQ ID NO: 156942 - DNA, 33 bp, Homo sapien
aaagctctgcaagacattgaagaacaagcagca

SEQ ID NO: 156943 - DNA, 33 bp, Homo sapien
cacagacaccagaagaaaagaccacgtgaagac

SEQ ID NO: 156944 - DNA, 33 bp, Homo sapien
cacagacaccagaagagaagaccacgtgaagac

SEQ ID NO: 156945 - DNA, 33 bp, Homo sapien
cagccacaacccgaggaacgcctggagccatca

SEQ ID NO: 156946 - DNA, 33 bp, Homo sapien
cagccacaacccgaggcacgcctggagccatca

SEQ ID NO: 156947 - DNA, 33 bp, Homo sapien
gagccatcagaagtggaaagagggaagggagca

SEQ ID NO: 156948 - DNA, 33 bp, Homo sapien
gagccatcagaagtgggaagagggaagggagca

SEQ ID NO: 156949 - DNA, 33 bp, Homo sapien
gcaagacttgtgcaagcagtggatcttagacac

SEQ ID NO: 156950 - DNA, 33 bp, Homo sapien
gcaagacttgtgcaagtagtggatcttagacac

SEQ ID NO: 156951 - DNA, 33 bp, Homo sapien
gtgaggctcttgggtcaaggaatagcaatctca

SEQ ID NO: 156952 - DNA, 33 bp, Homo sapien
gtgaggctcttgggtcgaggaatagcaatctca

SEQ ID NO: 156953 - DNA, 33 bp, Homo sapien
ttaagactctgtttcacgtgtttgaagccccaa

SEQ ID NO: 156954 - DNA, 33 bp, Homo sapien
ttaagactctgtttcaggtgtttgaagccccaa

SEQ ID NO: 156955 - DNA, 33 bp, Homo sapien
aaaaggaatgaattcccgatacatgaaacaacc

SEQ ID NO: 156956 - DNA, 33 bp, Homo sapien
aaaaggaatgaattcctgatacatgaaacaacc

SEQ ID NO: 156957 - DNA, 33 bp, Homo sapien
aatgaatgaacaaaacgccaatgaaagcagaga

SEQ ID NO: 156958 - DNA, 33 bp, Homo sapien
aatgaatgaacaaaactccaatgaaagcagaga

SEQ ID NO: 156959 - DNA, 33 bp, Homo sapien
agtgagtcagtagtaacgcctttatctttaaca

SEQ ID NO: 156960 - DNA, 33 bp, Homo sapien
agtgagtcagtagtaatgcctttatctttaaca

SEQ ID NO: 156961 - DNA, 33 bp, Homo sapien
cagtacctgtttccacacaaatgcacataaaag

SEQ ID NO: 156962 - DNA, 33 bp, Homo sapien
cagtacctgtttccacgcaaatgcacataaaag

SEQ ID NO: 156963 - DNA, 33 bp, Homo sapien
aattgcagtgaaatcacaagtgtctttccgttg

SEQ ID NO: 156964 - DNA, 33 bp, Homo sapien
aattgcagtgaaatcagaagtgtctttccgttg

SEQ ID NO: 156965 - DNA, 33 bp, Homo sapien
ggaggctgagaaaataagcaataaatactagga

SEQ ID NO: 156966 - DNA, 33 bp, Homo sapien
ggaggctgagaaaataggcaataaatactagga

SEQ ID NO: 156967 - DNA, 33 bp, Homo sapien
gaaagtataccttcacactgaatagatgaggaa

SEQ ID NO: 156968 - DNA, 33 bp, Homo sapien
gaaagtataccttcaccctgaatagatgaggaa

SEQ ID NO: 156969 - DNA, 33 bp, Homo sapien
cagagctcatttgcacagtcataaggttttcat

SEQ ID NO: 156970 - DNA, 33 bp, Homo sapien
cagagctcatttgcacggtcataaggttttcat

SEQ ID NO: 156971 - DNA, 33 bp, Homo sapien
tcccatagatcccatagatcgtgtttttaagca

SEQ ID NO: 156972 - DNA, 33 bp, Homo sapien
tcccatagatcccatatatcgtgtttttaagca

SEQ ID NO: 156973 - DNA, 33 bp, Homo sapien
tgttgagaaagtaacaatctggctgctgtgtgg

SEQ ID NO: 156974 - DNA, 33 bp, Homo sapien
tgttgagaaagtaacattctggctgctgtgtgg

SEQ ID NO: 156975 - DNA, 33 bp, Homo sapien
ccagagcaggtgtgaaatcttatggttactgac

SEQ ID NO: 156976 - DNA, 33 bp, Homo sapien
ccagagcaggtgtgaagtcttatggttactgac

SEQ ID NO: 156977 - DNA, 33 bp, Homo sapien
gttttgctcctttcaacagggcctggaaactac

SEQ ID NO: 156978 - DNA, 33 bp, Homo sapien
gttttgctcctttcaatagggcctggaaactac

SEQ ID NO: 156979 - DNA, 33 bp, Homo sapien
ttatctgatacatttaaaattcatgggaataac

SEQ ID NO: 156980 - DNA, 33 bp, Homo sapien
ttatctgatacatttacaattcatgggaataac

SEQ ID NO: 156981 - DNA, 33 bp, Homo sapien
atgtatatcttacttagaacttatgcacctcaa

SEQ ID NO: 156982 - DNA, 33 bp, Homo sapien
atgtatatcttacttataacttatgcacctcaa

SEQ ID NO: 156983 - DNA, 33 bp, Homo sapien
aaaggagagacacataagaacactataaaaata

SEQ ID NO: 156984 - DNA, 33 bp, Homo sapien
aaaggagagacacatatgaacactataaaaata

SEQ ID NO: 156985 - DNA, 33 bp, Homo sapien
gtggactgatagggaacagtacgcagaggggaa

SEQ ID NO: 156986 - DNA, 33 bp, Homo sapien
gtggactgatagggaatagtacgcagaggggaa

SEQ ID NO: 156987 - DNA, 33 bp, Homo sapien
cctaaaatgaatgcaccgaattgtttgtaaata

SEQ ID NO: 156988 - DNA, 33 bp, Homo sapien
cctaaaatgaatgcactgaattgtttgtaaata

SEQ ID NO: 156989 - DNA, 33 bp, Homo sapien
cctctaatgactgttacagctgcatcccacaaa

SEQ ID NO: 156990 - DNA, 33 bp, Homo sapien
cctctaatgactgttatagctgcatcccacaaa

SEQ ID NO: 156991 - DNA, 33 bp, Homo sapien
tttctgagtatctcacaagttaggtttggaagc

SEQ ID NO: 156992 - DNA, 33 bp, Homo sapien
tttctgagtatctcacgagttaggtttggaagc

SEQ ID NO: 156993 - DNA, 33 bp, Homo sapien
gtgccagtaaatcttaccgtgggctttatttgg

SEQ ID NO: 156994 - DNA, 33 bp, Homo sapien
gtgccagtaaatcttatcgtgggctttatttgg

SEQ ID NO: 156995 - DNA, 33 bp, Homo sapien
ccatatcagcaaaatgaaacaagtataaatgta

SEQ ID NO: 156996 - DNA, 33 bp, Homo sapien
ccatatcagcaaaatggaacaagtataaatgta

SEQ ID NO: 156997 - DNA, 33 bp, Homo sapien
agtaaagggagttcatcagacctagggagaata

SEQ ID NO: 156998 - DNA, 33 bp, Homo sapien
agtaaagggagttcatgagacctagggagaata

SEQ ID NO: 156999 - DNA, 33 bp, Homo sapien
taagaactgaagcccactaagttgggagtgggg

SEQ ID NO: 157000 - DNA, 33 bp, Homo sapien
taagaactgaagcccagtaagttgggagtgggg

SEQ ID NO: 157001 - DNA, 33 bp, Homo sapien
gatatgatagatgaaacgtcaggagccagctaa

SEQ ID NO: 157002 - DNA, 33 bp, Homo sapien
gatatgatagatgaaatgtcaggagccagctaa

SEQ ID NO: 157003 - DNA, 33 bp, Homo sapien
atgctcacacaaataacacaggttgagtatctc

SEQ ID NO: 157004 - DNA, 33 bp, Homo sapien
atgctcacacaaataagacaggttgagtatctc

SEQ ID NO: 157005 - DNA, 33 bp, Homo sapien
cttctttcaactccttaaacctatcaaactact

SEQ ID NO: 157006 - DNA, 33 bp, Homo sapien
cttctttcaactccttgaacctatcaaactact

SEQ ID NO: 157007 - DNA, 33 bp, Homo sapien
acaacactctacttaaaaaacatcacaactgaa

SEQ ID NO: 157008 - DNA, 33 bp, Homo sapien
acaacactctacttaagaaacatcacaactgaa

SEQ ID NO: 157009 - DNA, 33 bp, Homo sapien
aatccaacagcctcaacgaatagcataggttaa

SEQ ID NO: 157010 - DNA, 33 bp, Homo sapien
aatccaacagcctcaaggaatagcataggttaa

SEQ ID NO: 157011 - DNA, 33 bp, Homo sapien
aatattcatcacactaaaatacctgagaaagtc

SEQ ID NO: 157012 - DNA, 33 bp, Homo sapien
aatattcatcacactagaatacctgagaaagtc

SEQ ID NO: 157013 - DNA, 33 bp, Homo sapien
atttctaattctgattaaaaaaagactggcaat

SEQ ID NO: 157014 - DNA, 33 bp, Homo sapien
atttctaattctgatttaaaaaagactggcaat

SEQ ID NO: 157015 - DNA, 33 bp, Homo sapien
gctgcaagtctcaggactaacctctggataaaa

SEQ ID NO: 157016 - DNA, 33 bp, Homo sapien
gctgcaagtctcaggattaacctctggataaaa

SEQ ID NO: 157017 - DNA, 33 bp, Homo sapien
caaacaatgggtgcagaaaaatgtctgatagga

SEQ ID NO: 157018 - DNA, 33 bp, Homo sapien
caaacaatgggtgcaggaaaatgtctgatagga

SEQ ID NO: 157019 - DNA, 33 bp, Homo sapien
atgctgcctccaggaaacacactttaaatataa

SEQ ID NO: 157020 - DNA, 33 bp, Homo sapien
atgctgcctccaggaagcacactttaaatataa

SEQ ID NO: 157021 - DNA, 33 bp, Homo sapien
gacggctgttagtataccacaaagcagtgccgt

SEQ ID NO: 157022 - DNA, 33 bp, Homo sapien
gacggctgttagtatatcacaaagcagtgccgt

SEQ ID NO: 157023 - DNA, 33 bp, Homo sapien
taacaatttttgtgtacgtatatatgttaatgt

SEQ ID NO: 157024 - DNA, 33 bp, Homo sapien
taacaatttttgtgtaggtatatatgttaatgt

SEQ ID NO: 157025 - DNA, 33 bp, Homo sapien
gtcaaaacaagacatacacgaggcagcttagca

SEQ ID NO: 157026 - DNA, 33 bp, Homo sapien
gtcaaaacaagacatatacgaggcagcttagca

SEQ ID NO: 157027 - DNA, 33 bp, Homo sapien
tttctctgtaaagggacagctggttaagtattt

SEQ ID NO: 157028 - DNA, 33 bp, Homo sapien
tttctctgtaaagggatagctggttaagtattt

SEQ ID NO: 157029 - DNA, 33 bp, Homo sapien
ttatagcaacgaaacactcaaaatcatgaagag

SEQ ID NO: 157030 - DNA, 33 bp, Homo sapien
ttatagcaacgaaacagtcaaaatcatgaagag

SEQ ID NO: 157031 - DNA, 33 bp, Homo sapien
aatccataacagcaagcaaagtgtttcaagaag

SEQ ID NO: 157032 - DNA, 33 bp, Homo sapien
aatccataacagcaaggaaagtgtttcaagaag

SEQ ID NO: 157033 - DNA, 33 bp, Homo sapien
tttgtattgttacattcaaatccagtggtttgt

SEQ ID NO: 157034 - DNA, 33 bp, Homo sapien
tttgtattgttacattgaaatccagtggtttgt

SEQ ID NO: 157035 - DNA, 33 bp, Homo sapien
aaataaaactcaattacgaaaactcactttgga

SEQ ID NO: 157036 - DNA, 33 bp, Homo sapien
aaataaaactcaattatgaaaactcactttgga

SEQ ID NO: 157037 - DNA, 33 bp, Homo sapien
ttttaaatgtcaaaaaatatagatcgtttaatc

SEQ ID NO: 157038 - DNA, 33 bp, Homo sapien
ttttaaatgtcaaaaattatagatcgtttaatc

SEQ ID NO: 157039 - DNA, 33 bp, Homo sapien
tgcagggtgattctaccattacagtggcatttt

SEQ ID NO: 157040 - DNA, 33 bp, Homo sapien
tgcagggtgattctacgattacagtggcatttt

SEQ ID NO: 157041 - DNA, 33 bp, Homo sapien
caatgttctaggtaggacaaagagcagtaaata

SEQ ID NO: 157042 - DNA, 33 bp, Homo sapien
caatgttctaggtagggcaaagagcagtaaata

SEQ ID NO: 157043 - DNA, 33 bp, Homo sapien
tgcatatattaggttacattcagctctaagtga

SEQ ID NO: 157044 - DNA, 33 bp, Homo sapien
tgcatatattaggttatattcagctctaagtga

SEQ ID NO: 157045 - DNA, 33 bp, Homo sapien
ttggggaagaaaagtacactctagggaacaaga

SEQ ID NO: 157046 - DNA, 33 bp, Homo sapien
ttggggaagaaaagtatactctagggaacaaga

SEQ ID NO: 157047 - DNA, 33 bp, Homo sapien
atgaaagaatgaggaaactcatggggaaaatgc

SEQ ID NO: 157048 - DNA, 33 bp, Homo sapien
atgaaagaatgaggaatctcatggggaaaatgc

SEQ ID NO: 157049 - DNA, 33 bp, Homo sapien
tcagtgagtattactgaacacctcccagggtgg

SEQ ID NO: 157050 - DNA, 33 bp, Homo sapien
tcagtgagtattactggacacctcccagggtgg

SEQ ID NO: 157051 - DNA, 33 bp, Homo sapien
ggtatcactttgcacaatgaagtgggttcctga

SEQ ID NO: 157052 - DNA, 33 bp, Homo sapien
ggtatcactttgcacagtgaagtgggttcctga

SEQ ID NO: 157053 - DNA, 33 bp, Homo sapien
aaggctaatgtcaatgaagatggatttccctcc

SEQ ID NO: 157054 - DNA, 33 bp, Homo sapien
aaggctaatgtcaatggagatggatttccctcc

SEQ ID NO: 157055 - DNA, 33 bp, Homo sapien
tgcagaagccctaaggaagccagatttcaaagt

SEQ ID NO: 157056 - DNA, 33 bp, Homo sapien
tgcagaagccctaaggcagccagatttcaaagt

SEQ ID NO: 157057 - DNA, 33 bp, Homo sapien
catactatacctatgcacagaatcatggatata

SEQ ID NO: 157058 - DNA, 33 bp, Homo sapien
catactatacctatgcgcagaatcatggatata

SEQ ID NO: 157059 - DNA, 33 bp, Homo sapien
taaactcttttggaacacattttggaaaatcaa

SEQ ID NO: 157060 - DNA, 33 bp, Homo sapien
taaactcttttggaactcattttggaaaatcaa

SEQ ID NO: 157061 - DNA, 33 bp, Homo sapien
ataattgacagcaaaccggtataaggaaacttg

SEQ ID NO: 157062 - DNA, 33 bp, Homo sapien
ataattgacagcaaactggtataaggaaacttg

SEQ ID NO: 157063 - DNA, 33 bp, Homo sapien
aatttaccaaaatcacagaattgaataaacaca

SEQ ID NO: 157064 - DNA, 33 bp, Homo sapien
aatttaccaaaatcactgaattgaataaacaca

SEQ ID NO: 157065 - DNA, 33 bp, Homo sapien
ttctctcatgtctgacaggtaagacagggcaca

SEQ ID NO: 157066 - DNA, 33 bp, Homo sapien
ttctctcatgtctgaccggtaagacagggcaca

SEQ ID NO: 157067 - DNA, 33 bp, Homo sapien
atgtaactaaagcttacagagattaaaagccat

SEQ ID NO: 157068 - DNA, 33 bp, Homo sapien
atgtaactaaagcttagagagattaaaagccat

SEQ ID NO: 157069 - DNA, 33 bp, Homo sapien
tgctcctgatttgagacctggtattgatcaaag

SEQ ID NO: 157070 - DNA, 33 bp, Homo sapien
tgctcctgatttgagatctggtattgatcaaag

SEQ ID NO: 157071 - DNA, 33 bp, Homo sapien
aagtataatacctgccgaattacactgtattta

SEQ ID NO: 157072 - DNA, 33 bp, Homo sapien
aagtataatacctgcctaattacactgtattta

SEQ ID NO: 157073 - DNA, 33 bp, Homo sapien
tggactagtttcgagcaacagttgtctaaggaa

SEQ ID NO: 157074 - DNA, 33 bp, Homo sapien
tggactagtttcgagcgacagttgtctaaggaa

SEQ ID NO: 157075 - DNA, 33 bp, Homo sapien
tttcagtatatccatcaaataaccctcaactgt

SEQ ID NO: 157076 - DNA, 33 bp, Homo sapien
tttcagtatatccatccaataaccctcaactgt

SEQ ID NO: 157077 - DNA, 33 bp, Homo sapien
tgcctcaggtaactcactcaacctttctgagac

SEQ ID NO: 157078 - DNA, 33 bp, Homo sapien
tgcctcaggtaactcattcaacctttctgagac

SEQ ID NO: 157079 - DNA, 33 bp, Homo sapien
gctggacacatggcaactcagttacagatgaca

SEQ ID NO: 157080 - DNA, 33 bp, Homo sapien
gctggacacatggcaattcagttacagatgaca

SEQ ID NO: 157081 - DNA, 33 bp, Homo sapien
ttacaatctttttccccggctctgaatggaaat

SEQ ID NO: 157082 - DNA, 33 bp, Homo sapien
ttacaatctttttccctggctctgaatggaaat

SEQ ID NO: 157083 - DNA, 33 bp, Homo sapien
atctctctcctgtttgaacactccaccaaaatg

SEQ ID NO: 157084 - DNA, 33 bp, Homo sapien
atctctctcctgtttggacactccaccaaaatg

SEQ ID NO: 157085 - DNA, 33 bp, Homo sapien
gacagggaagctagaaagtgatttgtccacaga

SEQ ID NO: 157086 - DNA, 33 bp, Homo sapien
gacagggaagctagaaggtgatttgtccacaga

SEQ ID NO: 157087 - DNA, 33 bp, Homo sapien
ctctgtcattgcccacagtgagagcatttgggg

SEQ ID NO: 157088 - DNA, 33 bp, Homo sapien
ctctgtcattgcccacggtgagagcatttgggg

SEQ ID NO: 157089 - DNA, 33 bp, Homo sapien
tagcttctcatttggccccaaagctgtgcccag

SEQ ID NO: 157090 - DNA, 33 bp, Homo sapien
tagcttctcatttggctccaaagctgtgcccag

SEQ ID NO: 157091 - DNA, 33 bp, Homo sapien
gcccaacagctacttacattagacagtacaaag

SEQ ID NO: 157092 - DNA, 33 bp, Homo sapien
gcccaacagctacttatattagacagtacaaag

SEQ ID NO: 157093 - DNA, 33 bp, Homo sapien
tttgctaattttgagacgcttcaaacatatgtt

SEQ ID NO: 157094 - DNA, 33 bp, Homo sapien
tttgctaattttgagaggcttcaaacatatgtt

SEQ ID NO: 157095 - DNA, 33 bp, Homo sapien
tttcaggtgacatggccgatagtcaagaagcca

SEQ ID NO: 157096 - DNA, 33 bp, Homo sapien
tttcaggtgacatggctgatagtcaagaagcca

SEQ ID NO: 157097 - DNA, 33 bp, Homo sapien
ctccgggcctcgcagaaaagggatcttacagtg

SEQ ID NO: 157098 - DNA, 33 bp, Homo sapien
ctccgggcctcgcagagaagggatcttacagtg

SEQ ID NO: 157099 - DNA, 33 bp, Homo sapien
gagatgatgctgaagactagagatactctctcc

SEQ ID NO: 157100 - DNA, 33 bp, Homo sapien
gagatgatgctgaagattagagatactctctcc

SEQ ID NO: 157101 - DNA, 33 bp, Homo sapien
tcctagagtacttactaaatgtggtgccaggca

SEQ ID NO: 157102 - DNA, 33 bp, Homo sapien
tcctagagtacttactgaatgtggtgccaggca

SEQ ID NO: 157103 - DNA, 33 bp, Homo sapien
catggattaagtgtaccggaaaatgatttgcaa

SEQ ID NO: 157104 - DNA, 33 bp, Homo sapien
catggattaagtgtactggaaaatgatttgcaa

SEQ ID NO: 157105 - DNA, 33 bp, Homo sapien
ccatgcttcaattgtaagacctcaaacaagtcc

SEQ ID NO: 157106 - DNA, 33 bp, Homo sapien
ccatgcttcaattgtaggacctcaaacaagtcc

SEQ ID NO: 157107 - DNA, 33 bp, Homo sapien
aatcacagagtgtgggaagaatcaggtcagcta

SEQ ID NO: 157108 - DNA, 33 bp, Homo sapien
aatcacagagtgtggggagaatcaggtcagcta

SEQ ID NO: 157109 - DNA, 33 bp, Homo sapien
acccttatgacaataccgagcatggcctgaggt

SEQ ID NO: 157110 - DNA, 33 bp, Homo sapien
acccttatgacaatactgagcatggcctgaggt

SEQ ID NO: 157111 - DNA, 33 bp, Homo sapien
tttaaatgaagaataccaccagaaataatgaat

SEQ ID NO: 157112 - DNA, 33 bp, Homo sapien
tttaaatgaagaatactaccagaaataatgaat

SEQ ID NO: 157113 - DNA, 33 bp, Homo sapien
cacatttgaggcattcccaggatttataaacca

SEQ ID NO: 157114 - DNA, 33 bp, Homo sapien
cacatttgaggcattctcaggatttataaacca

SEQ ID NO: 157115 - DNA, 33 bp, Homo sapien
tgaacgagatatttaaacccttgtgagatgctt

SEQ ID NO: 157116 - DNA, 33 bp, Homo sapien
tgaacgagatatttaatcccttgtgagatgctt

SEQ ID NO: 157117 - DNA, 33 bp, Homo sapien
agctaaattaagaggggcaaggtaagaggaagg

SEQ ID NO: 157118 - DNA, 33 bp, Homo sapien
agctaaattaagagggtcaaggtaagaggaagg

SEQ ID NO: 157119 - DNA, 33 bp, Homo sapien
atgcctggacatactaggaactcagaaaacata

SEQ ID NO: 157120 - DNA, 33 bp, Homo sapien
atgcctggacatactatgaactcagaaaacata

SEQ ID NO: 157121 - DNA, 33 bp, Homo sapien
acaagtaaaaggcttagaacaatgcctggacat

SEQ ID NO: 157122 - DNA, 33 bp, Homo sapien
acaagtaaaaggcttataacaatgcctggacat

SEQ ID NO: 157123 - DNA, 33 bp, Homo sapien
tacctcctgggtggtaaaatttgactcagatgt

SEQ ID NO: 157124 - DNA, 33 bp, Homo sapien
tacctcctgggtggtacaatttgactcagatgt

SEQ ID NO: 157125 - DNA, 33 bp, Homo sapien
gcatctgtattactgccgcaaagcccaggcagc

SEQ ID NO: 157126 - DNA, 33 bp, Homo sapien
gcatctgtattactgctgcaaagcccaggcagc

SEQ ID NO: 157127 - DNA, 33 bp, Homo sapien
ggccagagacattaaaaaggacacttagtttgg

SEQ ID NO: 157128 - DNA, 33 bp, Homo sapien
ggccagagacattaaagaggacacttagtttgg

SEQ ID NO: 157129 - DNA, 33 bp, Homo sapien
ggcaggcaagtcaaaccactgcttgcttttcag

SEQ ID NO: 157130 - DNA, 33 bp, Homo sapien
ggcaggcaagtcaaactactgcttgcttttcag

SEQ ID NO: 157131 - DNA, 33 bp, Homo sapien
aaagtgcaaaaaccacaaacaaatgagagacaa

SEQ ID NO: 157132 - DNA, 33 bp, Homo sapien
aaagtgcaaaaaccacgaacaaatgagagacaa

SEQ ID NO: 157133 - DNA, 33 bp, Homo sapien
attggttcagaactcacgcagggaattgggctg

SEQ ID NO: 157134 - DNA, 33 bp, Homo sapien
attggttcagaactcaggcagggaattgggctg

SEQ ID NO: 157135 - DNA, 33 bp, Homo sapien
tgaccaagtaagtggccaagtgagactcaaacc

SEQ ID NO: 157136 - DNA, 33 bp, Homo sapien
tgaccaagtaagtggctaagtgagactcaaacc

SEQ ID NO: 157137 - DNA, 33 bp, Homo sapien
agtggactgtggtaataagagaacgaagttttc

SEQ ID NO: 157138 - DNA, 33 bp, Homo sapien
agtggactgtggtaattagagaacgaagttttc

SEQ ID NO: 157139 - DNA, 33 bp, Homo sapien
gtcaactctcatctgacggtaatgcagtcactg

SEQ ID NO: 157140 - DNA, 33 bp, Homo sapien
gtcaactctcatctgatggtaatgcagtcactg

SEQ ID NO: 157141 - DNA, 33 bp, Homo sapien
aagtaagtgtagagtacgttcaccttatataag

SEQ ID NO: 157142 - DNA, 33 bp, Homo sapien
aagtaagtgtagagtatgttcaccttatataag

SEQ ID NO: 157143 - DNA, 33 bp, Homo sapien
tcactaggaattaagcacaatatataatttttt

SEQ ID NO: 157144 - DNA, 33 bp, Homo sapien
tcactaggaattaagcgcaatatataatttttt

SEQ ID NO: 157145 - DNA, 33 bp, Homo sapien
aataagtgcaacctgacagaaatacagcttctc

SEQ ID NO: 157146 - DNA, 33 bp, Homo sapien
aataagtgcaacctgatagaaatacagcttctc

SEQ ID NO: 157147 - DNA, 33 bp, Homo sapien
tctaggtattcagcagcctcctctgagtgaaag

SEQ ID NO: 157148 - DNA, 33 bp, Homo sapien
tctaggtattcagcaggctcctctgagtgaaag

SEQ ID NO: 157149 - DNA, 33 bp, Homo sapien
ctagaatccagactaacgaagattacagatatg

SEQ ID NO: 157150 - DNA, 33 bp, Homo sapien
ctagaatccagactaatgaagattacagatatg

SEQ ID NO: 157151 - DNA, 33 bp, Homo sapien
ttaaatattcattgtcagaacaaggccagaata

SEQ ID NO: 157152 - DNA, 33 bp, Homo sapien
ttaaatattcattgtcggaacaaggccagaata

SEQ ID NO: 157153 - DNA, 33 bp, Homo sapien
aaggtaaggatccttgaaatgtctgttccatta

SEQ ID NO: 157154 - DNA, 33 bp, Homo sapien
aaggtaaggatccttgtaatgtctgttccatta

SEQ ID NO: 157155 - DNA, 33 bp, Homo sapien
ttcatgcaactgctataaggaggcttgctgttg

SEQ ID NO: 157156 - DNA, 33 bp, Homo sapien
ttcatgcaactgctattaggaggcttgctgttg

SEQ ID NO: 157157 - DNA, 33 bp, Homo sapien
cacagtagttgtatggaattgggcaacttggtt

SEQ ID NO: 157158 - DNA, 33 bp, Homo sapien
cacagtagttgtatggcattgggcaacttggtt

SEQ ID NO: 157159 - DNA, 33 bp, Homo sapien
gtgtactagtattatcccaatgtgacagatgag

SEQ ID NO: 157160 - DNA, 33 bp, Homo sapien
gtgtactagtattatctcaatgtgacagatgag

SEQ ID NO: 157161 - DNA, 33 bp, Homo sapien
ttaagaagtgcaagccgaagaagccagagtcag

SEQ ID NO: 157162 - DNA, 33 bp, Homo sapien
ttaagaagtgcaagcctaagaagccagagtcag

SEQ ID NO: 157163 - DNA, 33 bp, Homo sapien
tggcttgcttggtaataaactctcttgtatttg

SEQ ID NO: 157164 - DNA, 33 bp, Homo sapien
tggcttgcttggtaatgaactctcttgtatttg

SEQ ID NO: 157165 - DNA, 33 bp, Homo sapien
tcaacttgccaggcaaatatggcttgcttggta

SEQ ID NO: 157166 - DNA, 33 bp, Homo sapien
tcaacttgccaggcaactatggcttgcttggta

SEQ ID NO: 157167 - DNA, 33 bp, Homo sapien
taatgctggactgagtcaagactttacagaaca

SEQ ID NO: 157168 - DNA, 33 bp, Homo sapien
taatgctggactgagttaagactttacagaaca

SEQ ID NO: 157169 - DNA, 33 bp, Homo sapien
aggccctgggaacccaactgttgtatcagcatg

SEQ ID NO: 157170 - DNA, 33 bp, Homo sapien
aggccctgggaacccacctgttgtatcagcatg

SEQ ID NO: 157171 - DNA, 33 bp, Homo sapien
atgccagaatgatagaaccagcaacaggttacc

SEQ ID NO: 157172 - DNA, 33 bp, Homo sapien
atgccagaatgatagatccagcaacaggttacc

SEQ ID NO: 157173 - DNA, 33 bp, Homo sapien
gaccatctcttcgtgaacatatataactgaatg

SEQ ID NO: 157174 - DNA, 33 bp, Homo sapien
gaccatctcttcgtgagcatatataactgaatg

SEQ ID NO: 157175 - DNA, 33 bp, Homo sapien
tatttagagttatacaccttgttaattgcagaa

SEQ ID NO: 157176 - DNA, 33 bp, Homo sapien
tatttagagttatacagcttgttaattgcagaa

SEQ ID NO: 157177 - DNA, 33 bp, Homo sapien
ctatgtatcttttcgaagagtgtttgttcacgt

SEQ ID NO: 157178 - DNA, 33 bp, Homo sapien
ctatgtatcttttcgaggagtgtttgttcacgt

SEQ ID NO: 157179 - DNA, 33 bp, Homo sapien
aatttacagaacaggaaacaatattcacaacct

SEQ ID NO: 157180 - DNA, 33 bp, Homo sapien
aatttacagaacaggagacaatattcacaacct

SEQ ID NO: 157181 - DNA, 33 bp, Homo sapien
ttaaagcactttggaaattacctgctgaggttc

SEQ ID NO: 157182 - DNA, 33 bp, Homo sapien
ttaaagcactttggaagttacctgctgaggttc

SEQ ID NO: 157183 - DNA, 33 bp, Homo sapien
tctgcacatttacactcacagagccataggcat

SEQ ID NO: 157184 - DNA, 33 bp, Homo sapien
tctgcacatttacacttacagagccataggcat

SEQ ID NO: 157185 - DNA, 33 bp, Homo sapien
gcagccttgactggaaaagtttcaatggagtgg

SEQ ID NO: 157186 - DNA, 33 bp, Homo sapien
gcagccttgactggaacagtttcaatggagtgg

SEQ ID NO: 157187 - DNA, 33 bp, Homo sapien
atggagtggccagcatgaaaccttgtttgaagt

SEQ ID NO: 157188 - DNA, 33 bp, Homo sapien
atggagtggccagcattaaaccttgtttgaagt

SEQ ID NO: 157189 - DNA, 33 bp, Homo sapien
gtatcctcttctgggacgcttacctggaaaaca

SEQ ID NO: 157190 - DNA, 33 bp, Homo sapien
gtatcctcttctgggatgcttacctggaaaaca

SEQ ID NO: 157191 - DNA, 33 bp, Homo sapien
ggttttaagcaggagcacttcagcttagatgca

SEQ ID NO: 157192 - DNA, 33 bp, Homo sapien
ggttttaagcaggagcgcttcagcttagatgca

SEQ ID NO: 157193 - DNA, 33 bp, Homo sapien
gtccaagtccagaacccgggctattattcaatt

SEQ ID NO: 157194 - DNA, 33 bp, Homo sapien
gtccaagtccagaacctgggctattattcaatt

SEQ ID NO: 157195 - DNA, 33 bp, Homo sapien
tctgagaatcctcagaaagtgaaagggatggag

SEQ ID NO: 157196 - DNA, 33 bp, Homo sapien
tctgagaatcctcagagagtgaaagggatggag

SEQ ID NO: 157197 - DNA, 33 bp, Homo sapien
cacactgaaaactccacctgtagtagtctgttc

SEQ ID NO: 157198 - DNA, 33 bp, Homo sapien
cacactgaaaactccatctgtagtagtctgttc

SEQ ID NO: 157199 - DNA, 33 bp, Homo sapien
tacatcaggtaatctacactgagctaatgtagc

SEQ ID NO: 157200 - DNA, 33 bp, Homo sapien
tacatcaggtaatctatactgagctaatgtagc

SEQ ID NO: 157201 - DNA, 33 bp, Homo sapien
tccaggttctggactaagttatctattgctatc

SEQ ID NO: 157202 - DNA, 33 bp, Homo sapien
tccaggttctggactaggttatctattgctatc

SEQ ID NO: 157203 - DNA, 33 bp, Homo sapien
atctccaaatgacaaaccttcagagagaaaatt

SEQ ID NO: 157204 - DNA, 33 bp, Homo sapien
atctccaaatgacaaatcttcagagagaaaatt

SEQ ID NO: 157205 - DNA, 33 bp, Homo sapien
ctcaatacagtagccagtcacttgggcttaaga

SEQ ID NO: 157206 - DNA, 33 bp, Homo sapien
ctcaatacagtagccattcacttgggcttaaga

SEQ ID NO: 157207 - DNA, 33 bp, Homo sapien
tccaagacgccaggtacccttgaactgtgactg

SEQ ID NO: 157208 - DNA, 33 bp, Homo sapien
tccaagacgccaggtagccttgaactgtgactg

SEQ ID NO: 157209 - DNA, 33 bp, Homo sapien
atactagtaggaaaatcaatgcattccctgttg

SEQ ID NO: 157210 - DNA, 33 bp, Homo sapien
atactagtaggaaaattaatgcattccctgttg

SEQ ID NO: 157211 - DNA, 33 bp, Homo sapien
tttcaaaaaaacagaaatcactagaagactccc

SEQ ID NO: 157212 - DNA, 33 bp, Homo sapien
tttcaaaaaaacagaagtcactagaagactccc

SEQ ID NO: 157213 - DNA, 33 bp, Homo sapien
gtaatcaggaaataaaagtaagagcagtcattc

SEQ ID NO: 157214 - DNA, 33 bp, Homo sapien
gtaatcaggaaataaaggtaagagcagtcattc

SEQ ID NO: 157215 - DNA, 33 bp, Homo sapien
aatgctttggaaaagaagatagttgtataagga

SEQ ID NO: 157216 - DNA, 33 bp, Homo sapien
aatgctttggaaaagatgatagttgtataagga

SEQ ID NO: 157217 - DNA, 33 bp, Homo sapien
ggcattgaagctttgcaatgatctggcttctac

SEQ ID NO: 157218 - DNA, 33 bp, Homo sapien
ggcattgaagctttgcgatgatctggcttctac

SEQ ID NO: 157219 - DNA, 33 bp, Homo sapien
gggaagaagggtgttacatcaaacagaaggaac

SEQ ID NO: 157220 - DNA, 33 bp, Homo sapien
gggaagaagggtgttatatcaaacagaaggaac

SEQ ID NO: 157221 - DNA, 33 bp, Homo sapien
tatgagggttatacaaatgcccaaagtaggagg

SEQ ID NO: 157222 - DNA, 33 bp, Homo sapien
tatgagggttatacaagtgcccaaagtaggagg

SEQ ID NO: 157223 - DNA, 33 bp, Homo sapien
tcctttttcttccttacagcagcccgggaaaat

SEQ ID NO: 157224 - DNA, 33 bp, Homo sapien
tcctttttcttccttagagcagcccgggaaaat

SEQ ID NO: 157225 - DNA, 33 bp, Homo sapien
taataaaagtaacctgaaaattatgaaagattc

SEQ ID NO: 157226 - DNA, 33 bp, Homo sapien
taataaaagtaacctggaaattatgaaagattc

SEQ ID NO: 157227 - DNA, 33 bp, Homo sapien
atgtgatgggcattatgagattcctagataatt

SEQ ID NO: 157228 - DNA, 33 bp, Homo sapien
atgtgatgggcattattagattcctagataatt

SEQ ID NO: 157229 - DNA, 33 bp, Homo sapien
tgtgactagtgctgtaataaacttgtgagctca

SEQ ID NO: 157230 - DNA, 33 bp, Homo sapien
tgtgactagtgctgtactaaacttgtgagctca

SEQ ID NO: 157231 - DNA, 33 bp, Homo sapien
tgaacttttcagcatacgtaacgtctttctttg

SEQ ID NO: 157232 - DNA, 33 bp, Homo sapien
tgaacttttcagcatatgtaacgtctttctttg

SEQ ID NO: 157233 - DNA, 33 bp, Homo sapien
agtaaggtattattaccctcgcatcacagatga

SEQ ID NO: 157234 - DNA, 33 bp, Homo sapien
agtaaggtattattactctcgcatcacagatga

SEQ ID NO: 157235 - DNA, 33 bp, Homo sapien
gattgctaatggcttccatctgctataccatct

SEQ ID NO: 157236 - DNA, 33 bp, Homo sapien
gattgctaatggcttctatctgctataccatct

SEQ ID NO: 157237 - DNA, 33 bp, Homo sapien
atcaagccctgccaggaaatgaaggtagaaaat

SEQ ID NO: 157238 - DNA, 33 bp, Homo sapien
atcaagccctgccagggaatgaaggtagaaaat

SEQ ID NO: 157239 - DNA, 33 bp, Homo sapien
tgttctagtggtggtaaatataagtctcacgag

SEQ ID NO: 157240 - DNA, 33 bp, Homo sapien
tgttctagtggtggtagatataagtctcacgag

SEQ ID NO: 157241 - DNA, 33 bp, Homo sapien
cagtctcacgtaggacaggagaactcaatattt

SEQ ID NO: 157242 - DNA, 33 bp, Homo sapien
cagtctcacgtaggaccggagaactcaatattt

SEQ ID NO: 157243 - DNA, 33 bp, Homo sapien
gtttgaaacagtgacgcaaactttctctgagag

SEQ ID NO: 157244 - DNA, 33 bp, Homo sapien
gtttgaaacagtgacgtaaactttctctgagag

SEQ ID NO: 157245 - DNA, 33 bp, Homo sapien
ctcatctacttttttgaactgctgcagattggg

SEQ ID NO: 157246 - DNA, 33 bp, Homo sapien
ctcatctacttttttggactgctgcagattggg

SEQ ID NO: 157247 - DNA, 33 bp, Homo sapien
agcaatggtttgttcagggccacagaaaaatca

SEQ ID NO: 157248 - DNA, 33 bp, Homo sapien
agcaatggtttgttcatggccacagaaaaatca

SEQ ID NO: 157249 - DNA, 33 bp, Homo sapien
ggtagggtctaccttgcacttaagcaaaggcct

SEQ ID NO: 157250 - DNA, 33 bp, Homo sapien
ggtagggtctaccttgtacttaagcaaaggcct

SEQ ID NO: 157251 - DNA, 33 bp, Homo sapien
cagaaaagtctgctcaacctgcaaatatcggaa

SEQ ID NO: 157252 - DNA, 33 bp, Homo sapien
cagaaaagtctgctcatcctgcaaatatcggaa

SEQ ID NO: 157253 - DNA, 33 bp, Homo sapien
ttgattgcagattgggaaatagtaagtgcacct

SEQ ID NO: 157254 - DNA, 33 bp, Homo sapien
ttgattgcagattggggaatagtaagtgcacct

SEQ ID NO: 157255 - DNA, 33 bp, Homo sapien
tcctgtggcttagaagaacaagcagggctcttc

SEQ ID NO: 157256 - DNA, 33 bp, Homo sapien
tcctgtggcttagaaggacaagcagggctcttc

SEQ ID NO: 157257 - DNA, 33 bp, Homo sapien
atgtagactgagcactaaaggccaagcaccacc

SEQ ID NO: 157258 - DNA, 33 bp, Homo sapien
atgtagactgagcactgaaggccaagcaccacc

SEQ ID NO: 157259 - DNA, 33 bp, Homo sapien
ttgtgtttagagtctacgaatcattaactagca

SEQ ID NO: 157260 - DNA, 33 bp, Homo sapien
ttgtgtttagagtctatgaatcattaactagca

SEQ ID NO: 157261 - DNA, 33 bp, Homo sapien
actttctgcttgctacggagacacttttctcct

SEQ ID NO: 157262 - DNA, 33 bp, Homo sapien
actttctgcttgctactgagacacttttctcct

SEQ ID NO: 157263 - DNA, 33 bp, Homo sapien
tcctgttacgttcttacgagcctgaagggcagc

SEQ ID NO: 157264 - DNA, 33 bp, Homo sapien
tcctgttacgttcttatgagcctgaagggcagc

SEQ ID NO: 157265 - DNA, 33 bp, Homo sapien
tgcgttttcatttaacagaatatcagcctgatt

SEQ ID NO: 157266 - DNA, 33 bp, Homo sapien
tgcgttttcatttaacggaatatcagcctgatt

SEQ ID NO: 157267 - DNA, 33 bp, Homo sapien
ttaatgaagtatcttgcagtcttcgaaaaatgc

SEQ ID NO: 157268 - DNA, 33 bp, Homo sapien
ttaatgaagtatcttgtagtcttcgaaaaatgc

SEQ ID NO: 157269 - DNA, 33 bp, Homo sapien
agctcattcctgctaaacaccacatgaaaaagg

SEQ ID NO: 157270 - DNA, 33 bp, Homo sapien
agctcattcctgctaagcaccacatgaaaaagg

SEQ ID NO: 157271 - DNA, 33 bp, Homo sapien
tgaccttccttagttacacagagcctcatcttt

SEQ ID NO: 157272 - DNA, 33 bp, Homo sapien
tgaccttccttagttatacagagcctcatcttt

SEQ ID NO: 157273 - DNA, 33 bp, Homo sapien
tttaaaccaaagtcacaaattaagagaggttac

SEQ ID NO: 157274 - DNA, 33 bp, Homo sapien
tttaaaccaaagtcacgaattaagagaggttac

SEQ ID NO: 157275 - DNA, 33 bp, Homo sapien
tatattagaaatgagacacttacactttaaaat

SEQ ID NO: 157276 - DNA, 33 bp, Homo sapien
tatattagaaatgagatacttacactttaaaat

SEQ ID NO: 157277 - DNA, 33 bp, Homo sapien
gctgatgtgaaggaaacctcgttaaccagagta

SEQ ID NO: 157278 - DNA, 33 bp, Homo sapien
gctgatgtgaaggaaatctcgttaaccagagta

SEQ ID NO: 157279 - DNA, 33 bp, Homo sapien
ttcttagtttgtgttaccagcattagtctgtgc

SEQ ID NO: 157280 - DNA, 33 bp, Homo sapien
ttcttagtttgtgttatcagcattagtctgtgc

SEQ ID NO: 157281 - DNA, 33 bp, Homo sapien
gctgaggactgagcaacggctgcggaatcattc

SEQ ID NO: 157282 - DNA, 33 bp, Homo sapien
gctgaggactgagcaatggctgcggaatcattc

SEQ ID NO: 157283 - DNA, 33 bp, Homo sapien
accccgggcaagtacccctcagcattggatgct

SEQ ID NO: 157284 - DNA, 33 bp, Homo sapien
accccgggcaagtacctctcagcattggatgct

SEQ ID NO: 157285 - DNA, 33 bp, Homo sapien
ggtacctaatccagggccactttaatatacttt

SEQ ID NO: 157286 - DNA, 33 bp, Homo sapien
ggtacctaatccagggtcactttaatatacttt

SEQ ID NO: 157287 - DNA, 33 bp, Homo sapien
ctgtctaaagcatgtcccagaaccagcagcatc

SEQ ID NO: 157288 - DNA, 33 bp, Homo sapien
ctgtctaaagcatgtctcagaaccagcagcatc

SEQ ID NO: 157289 - DNA, 33 bp, Homo sapien
gggcttatgtcagtaacctcacaggtctgctca

SEQ ID NO: 157290 - DNA, 33 bp, Homo sapien
gggcttatgtcagtaagctcacaggtctgctca

SEQ ID NO: 157291 - DNA, 33 bp, Homo sapien
ttatcaggatggttgactacccactcaatttcc

SEQ ID NO: 157292 - DNA, 33 bp, Homo sapien
ttatcaggatggttgattacccactcaatttcc

SEQ ID NO: 157293 - DNA, 33 bp, Homo sapien
cacaagagggacctaactggataattttctaat

SEQ ID NO: 157294 - DNA, 33 bp, Homo sapien
cacaagagggacctaattggataattttctaat

SEQ ID NO: 157295 - DNA, 33 bp, Homo sapien
aagtaaggagagatgcacatagaggaaaggtgt

SEQ ID NO: 157296 - DNA, 33 bp, Homo sapien
aagtaaggagagatgcccatagaggaaaggtgt

SEQ ID NO: 157297 - DNA, 33 bp, Homo sapien
ctgaaaatatagaaaacatggctaatgctgttg

SEQ ID NO: 157298 - DNA, 33 bp, Homo sapien
ctgaaaatatagaaaatatggctaatgctgttg

SEQ ID NO: 157299 - DNA, 33 bp, Homo sapien
gccttagccaaaaacccagtttgaaatagaaac

SEQ ID NO: 157300 - DNA, 33 bp, Homo sapien
gccttagccaaaaacctagtttgaaatagaaac

SEQ ID NO: 157301 - DNA, 33 bp, Homo sapien
gacggcagactacataacctgaaggacttcacc

SEQ ID NO: 157302 - DNA, 33 bp, Homo sapien
gacggcagactacataccctgaaggacttcacc

SEQ ID NO: 157303 - DNA, 33 bp, Homo sapien
tgatctggtatctacagctgtttggttctgact

SEQ ID NO: 157304 - DNA, 33 bp, Homo sapien
tgatctggtatctacatctgtttggttctgact

SEQ ID NO: 157305 - DNA, 33 bp, Homo sapien
ggccacttgcagataccaaaatctgaaaatctt

SEQ ID NO: 157306 - DNA, 33 bp, Homo sapien
ggccacttgcagatacgaaaatctgaaaatctt

SEQ ID NO: 157307 - DNA, 33 bp, Homo sapien
ataacctcaaatgcttcaagattaggtttgctc

SEQ ID NO: 157308 - DNA, 33 bp, Homo sapien
ataacctcaaatgcttgaagattaggtttgctc

SEQ ID NO: 157309 - DNA, 33 bp, Homo sapien
gttcctggcagaatgacagaccactgtgctttg

SEQ ID NO: 157310 - DNA, 33 bp, Homo sapien
gttcctggcagaatgatagaccactgtgctttg

SEQ ID NO: 157311 - DNA, 33 bp, Homo sapien
tcccttggtactcagcagcctagaatgtcaaaa

SEQ ID NO: 157312 - DNA, 33 bp, Homo sapien
tcccttggtactcagcggcctagaatgtcaaaa

SEQ ID NO: 157313 - DNA, 33 bp, Homo sapien
tcatccctcttcttcaataccaccacaacttcc

SEQ ID NO: 157314 - DNA, 33 bp, Homo sapien
tcatccctcttcttcagtaccaccacaacttcc

SEQ ID NO: 157315 - DNA, 33 bp, Homo sapien
tttactagttataaaaccctctgattctcacgg

SEQ ID NO: 157316 - DNA, 33 bp, Homo sapien
tttactagttataaaatcctctgattctcacgg

SEQ ID NO: 157317 - DNA, 33 bp, Homo sapien
ttccaaaggcattctccctagtgcattgatcta

SEQ ID NO: 157318 - DNA, 33 bp, Homo sapien
ttccaaaggcattctctctagtgcattgatcta

SEQ ID NO: 157319 - DNA, 33 bp, Homo sapien
aagtttggagaaaggacatatgattagcaaagt

SEQ ID NO: 157320 - DNA, 33 bp, Homo sapien
aagtttggagaaaggatatatgattagcaaagt

SEQ ID NO: 157321 - DNA, 33 bp, Homo sapien
tgggttggagaacataacttgagattattactt

SEQ ID NO: 157322 - DNA, 33 bp, Homo sapien
tgggttggagaacatatcttgagattattactt

SEQ ID NO: 157323 - DNA, 33 bp, Homo sapien
gtgaggagaaaaaaaaatatcatgtaggaggaa

SEQ ID NO: 157324 - DNA, 33 bp, Homo sapien
gtgaggagaaaaaaaagtatcatgtaggaggaa

SEQ ID NO: 157325 - DNA, 33 bp, Homo sapien
tcctcaccattcccaccgcaacataacggaaga

SEQ ID NO: 157326 - DNA, 33 bp, Homo sapien
tcctcaccattcccactgcaacataacggaaga

SEQ ID NO: 157327 - DNA, 33 bp, Homo sapien
ggaaccactgggatgacggtctcatgaagacgg

SEQ ID NO: 157328 - DNA, 33 bp, Homo sapien
ggaaccactgggatgatggtctcatgaagacgg

SEQ ID NO: 157329 - DNA, 33 bp, Homo sapien
ccagtgatagacagcaaatcttccttgctctta

SEQ ID NO: 157330 - DNA, 33 bp, Homo sapien
ccagtgatagacagcatatcttccttgctctta

SEQ ID NO: 157331 - DNA, 33 bp, Homo sapien
ttctatatcctaaaagcctcaaattcaacagtt

SEQ ID NO: 157332 - DNA, 33 bp, Homo sapien
ttctatatcctaaaagtctcaaattcaacagtt

SEQ ID NO: 157333 - DNA, 33 bp, Homo sapien
ctcatgaccaaacacaaaaagcctaagctgaaa

SEQ ID NO: 157334 - DNA, 33 bp, Homo sapien
ctcatgaccaaacacagaaagcctaagctgaaa

SEQ ID NO: 157335 - DNA, 33 bp, Homo sapien
aattccagcctcagtcagactatggctctgtgt

SEQ ID NO: 157336 - DNA, 33 bp, Homo sapien
aattccagcctcagtcggactatggctctgtgt

SEQ ID NO: 157337 - DNA, 33 bp, Homo sapien
ctcctctggaagagagacacgtgatgcctaaaa

SEQ ID NO: 157338 - DNA, 33 bp, Homo sapien
ctcctctggaagagagtcacgtgatgcctaaaa

SEQ ID NO: 157339 - DNA, 33 bp, Homo sapien
tggattttttttcaacaagacacaagtcaaaaa

SEQ ID NO: 157340 - DNA, 33 bp, Homo sapien
tggattttttttcaaccagacacaagtcaaaaa

SEQ ID NO: 157341 - DNA, 33 bp, Homo sapien
cgatgtggaattctgcaaaagctccttgaggtt

SEQ ID NO: 157342 - DNA, 33 bp, Homo sapien
cgatgtggaattctgcgaaagctccttgaggtt

SEQ ID NO: 157343 - DNA, 33 bp, Homo sapien
tatgcacctggaagaactgatgaaccctagtcc

SEQ ID NO: 157344 - DNA, 33 bp, Homo sapien
tatgcacctggaagaattgatgaaccctagtcc

SEQ ID NO: 157345 - DNA, 33 bp, Homo sapien
cacctatacattattacgcttagtgccccactg

SEQ ID NO: 157346 - DNA, 33 bp, Homo sapien
cacctatacattattaggcttagtgccccactg

SEQ ID NO: 157347 - DNA, 33 bp, Homo sapien
caaagatgagaaatagcattgcagaatcagagc

SEQ ID NO: 157348 - DNA, 33 bp, Homo sapien
caaagatgagaaatagtattgcagaatcagagc

SEQ ID NO: 157349 - DNA, 33 bp, Homo sapien
ctgaatcagaacaagacaaatgagatggtttgt

SEQ ID NO: 157350 - DNA, 33 bp, Homo sapien
ctgaatcagaacaagagaaatgagatggtttgt

SEQ ID NO: 157351 - DNA, 33 bp, Homo sapien
caaaaattccaattagccagaatacgccattct

SEQ ID NO: 157352 - DNA, 33 bp, Homo sapien
caaaaattccaattaggcagaatacgccattct

SEQ ID NO: 157353 - DNA, 33 bp, Homo sapien
gcctatcactctaagaccagaaagaggattcaa

SEQ ID NO: 157354 - DNA, 33 bp, Homo sapien
gcctatcactctaagagcagaaagaggattcaa

SEQ ID NO: 157355 - DNA, 33 bp, Homo sapien
ttttgccagacaaatacggagaaaaaaggatgc

SEQ ID NO: 157356 - DNA, 33 bp, Homo sapien
ttttgccagacaaatagggagaaaaaaggatgc

SEQ ID NO: 157357 - DNA, 33 bp, Homo sapien
aattacatataggacaatggtaggatatgaagt

SEQ ID NO: 157358 - DNA, 33 bp, Homo sapien
aattacatataggacagtggtaggatatgaagt

SEQ ID NO: 157359 - DNA, 33 bp, Homo sapien
attctcaatcatatcaacattttacaggtccct

SEQ ID NO: 157360 - DNA, 33 bp, Homo sapien
attctcaatcatatcatcattttacaggtccct

SEQ ID NO: 157361 - DNA, 33 bp, Homo sapien
gtttctgtcttcgcaacgaagaagttagaatta

SEQ ID NO: 157362 - DNA, 33 bp, Homo sapien
gtttctgtcttcgcaatgaagaagttagaatta

SEQ ID NO: 157363 - DNA, 33 bp, Homo sapien
acctccaatttggagacgcttgtcttattgacc

SEQ ID NO: 157364 - DNA, 33 bp, Homo sapien
acctccaatttggagatgcttgtcttattgacc

SEQ ID NO: 157365 - DNA, 33 bp, Homo sapien
cctgacctcagaaatacgggaaggatgctgtgt

SEQ ID NO: 157366 - DNA, 33 bp, Homo sapien
cctgacctcagaaatatgggaaggatgctgtgt

SEQ ID NO: 157367 - DNA, 33 bp, Homo sapien
atgatgggaaaatataacactctttaagaaaat

SEQ ID NO: 157368 - DNA, 33 bp, Homo sapien
atgatgggaaaatatagcactctttaagaaaat

SEQ ID NO: 157369 - DNA, 33 bp, Homo sapien
cttttctgctattttaccacatagggatggact

SEQ ID NO: 157370 - DNA, 33 bp, Homo sapien
cttttctgctattttatcacatagggatggact

SEQ ID NO: 157371 - DNA, 33 bp, Homo sapien
agcatggctaaggaagaacctggggtcaagagc

SEQ ID NO: 157372 - DNA, 33 bp, Homo sapien
agcatggctaaggaagcacctggggtcaagagc

SEQ ID NO: 157373 - DNA, 33 bp, Homo sapien
aacatttctggagactaagatttttgttgtaat

SEQ ID NO: 157374 - DNA, 33 bp, Homo sapien
aacatttctggagactgagatttttgttgtaat

SEQ ID NO: 157375 - DNA, 33 bp, Homo sapien
ctaaggtggattttcaaaaagggagagacaaca

SEQ ID NO: 157376 - DNA, 33 bp, Homo sapien
ctaaggtggattttcagaaagggagagacaaca

SEQ ID NO: 157377 - DNA, 33 bp, Homo sapien
gttctagttctgttcacagttttttgtcattta

SEQ ID NO: 157378 - DNA, 33 bp, Homo sapien
gttctagttctgttcatagttttttgtcattta

SEQ ID NO: 157379 - DNA, 33 bp, Homo sapien
ccttgacccattcaagaccagagaagggaaaag

SEQ ID NO: 157380 - DNA, 33 bp, Homo sapien
ccttgacccattcaaggccagagaagggaaaag

SEQ ID NO: 157381 - DNA, 33 bp, Homo sapien
aatgattgccacaaaccgcctaacacaaagctt

SEQ ID NO: 157382 - DNA, 33 bp, Homo sapien
aatgattgccacaaactgcctaacacaaagctt

SEQ ID NO: 157383 - DNA, 33 bp, Homo sapien
aatgagtagatgatataaaatgaaacttagtag

SEQ ID NO: 157384 - DNA, 33 bp, Homo sapien
aatgagtagatgatatcaaatgaaacttagtag

SEQ ID NO: 157385 - DNA, 33 bp, Homo sapien
tacagacacaaacatcaatttttttccccaata

SEQ ID NO: 157386 - DNA, 33 bp, Homo sapien
tacagacacaaacatccatttttttccccaata

SEQ ID NO: 157387 - DNA, 33 bp, Homo sapien
agggctgaagaatgaacgagatttggattaaag

SEQ ID NO: 157388 - DNA, 33 bp, Homo sapien
agggctgaagaatgaatgagatttggattaaag

SEQ ID NO: 157389 - DNA, 33 bp, Homo sapien
agcaaaggaactaaacagaaggttgtggtatct

SEQ ID NO: 157390 - DNA, 33 bp, Homo sapien
agcaaaggaactaaactgaaggttgtggtatct

SEQ ID NO: 157391 - DNA, 33 bp, Homo sapien
ttttaactctgggttccgaaaagattatttgaa

SEQ ID NO: 157392 - DNA, 33 bp, Homo sapien
ttttaactctgggttctgaaaagattatttgaa

SEQ ID NO: 157393 - DNA, 33 bp, Homo sapien
gtgtactggcatgtagaagatgttcaaaatgca

SEQ ID NO: 157394 - DNA, 33 bp, Homo sapien
gtgtactggcatgtagtagatgttcaaaatgca

SEQ ID NO: 157395 - DNA, 33 bp, Homo sapien
taaagcagggtcagccaacatttgcttctagat

SEQ ID NO: 157396 - DNA, 33 bp, Homo sapien
taaagcagggtcagccgacatttgcttctagat

SEQ ID NO: 157397 - DNA, 33 bp, Homo sapien
cttgtgtgttaggaccaacaggatcattcaggg

SEQ ID NO: 157398 - DNA, 33 bp, Homo sapien
cttgtgtgttaggaccgacaggatcattcaggg

SEQ ID NO: 157399 - DNA, 33 bp, Homo sapien
tgttggtactcttttcacattactataaagtca

SEQ ID NO: 157400 - DNA, 33 bp, Homo sapien
tgttggtactcttttcgcattactataaagtca

SEQ ID NO: 157401 - DNA, 33 bp, Homo sapien
atgtcccactccctaaagatattgtataaacca

SEQ ID NO: 157402 - DNA, 33 bp, Homo sapien
atgtcccactccctaaggatattgtataaacca

SEQ ID NO: 157403 - DNA, 33 bp, Homo sapien
gagcactggatcaaatcaaccacagaactctct

SEQ ID NO: 157404 - DNA, 33 bp, Homo sapien
gagcactggatcaaatgaaccacagaactctct

SEQ ID NO: 157405 - DNA, 33 bp, Homo sapien
ttaggttaacttgagagctttctagctttttga

SEQ ID NO: 157406 - DNA, 33 bp, Homo sapien
ttaggttaacttgagatctttctagctttttga

SEQ ID NO: 157407 - DNA, 33 bp, Homo sapien
tgagagacttcaaaggcagaatgcaagtctaat

SEQ ID NO: 157408 - DNA, 33 bp, Homo sapien
tgagagacttcaaaggtagaatgcaagtctaat

SEQ ID NO: 157409 - DNA, 33 bp, Homo sapien
caaaaagtcagagagtcacgtgaaaggtaactg

SEQ ID NO: 157410 - DNA, 33 bp, Homo sapien
caaaaagtcagagagtgacgtgaaaggtaactg

SEQ ID NO: 157411 - DNA, 33 bp, Homo sapien
tgtacaaacaaaatcacgtgtatagtgctaata

SEQ ID NO: 157412 - DNA, 33 bp, Homo sapien
tgtacaaacaaaatcaggtgtatagtgctaata

SEQ ID NO: 157413 - DNA, 33 bp, Homo sapien
agcaaatgagaaaaaaagtaaaagtagacttga

SEQ ID NO: 157414 - DNA, 33 bp, Homo sapien
agcaaatgagaaaaaacgtaaaagtagacttga

SEQ ID NO: 157415 - DNA, 33 bp, Homo sapien
atcaaaacaatccagaatatgcttaaatgaaaa

SEQ ID NO: 157416 - DNA, 33 bp, Homo sapien
atcaaaacaatccagagtatgcttaaatgaaaa

SEQ ID NO: 157417 - DNA, 33 bp, Homo sapien
cttggaatttatgttgaaaacagctccctgacc

SEQ ID NO: 157418 - DNA, 33 bp, Homo sapien
cttggaatttatgttggaaacagctccctgacc

SEQ ID NO: 157419 - DNA, 33 bp, Homo sapien
aaaatacagtttcaaacagagctggaacacaca

SEQ ID NO: 157420 - DNA, 33 bp, Homo sapien
aaaatacagtttcaaatagagctggaacacaca

SEQ ID NO: 157421 - DNA, 33 bp, Homo sapien
cactgaaaattgcttaaggtgctattaataact

SEQ ID NO: 157422 - DNA, 33 bp, Homo sapien
cactgaaaattgcttacggtgctattaataact

SEQ ID NO: 157423 - DNA, 33 bp, Homo sapien
agaaggtgcctttagcaagaaagcagcagcagg

SEQ ID NO: 157424 - DNA, 33 bp, Homo sapien
agaaggtgcctttagcgagaaagcagcagcagg

SEQ ID NO: 157425 - DNA, 33 bp, Homo sapien
catgttagctggttcacgaaacaaaccaagtag

SEQ ID NO: 157426 - DNA, 33 bp, Homo sapien
catgttagctggttcatgaaacaaaccaagtag

SEQ ID NO: 157427 - DNA, 33 bp, Homo sapien
tgcctttacacccttacgctgatggcagttcca

SEQ ID NO: 157428 - DNA, 33 bp, Homo sapien
tgcctttacacccttatgctgatggcagttcca

SEQ ID NO: 157429 - DNA, 33 bp, Homo sapien
tggtcatgtttcctagaaagttatctgtttcct

SEQ ID NO: 157430 - DNA, 33 bp, Homo sapien
tggtcatgtttcctaggaagttatctgtttcct

SEQ ID NO: 157431 - DNA, 33 bp, Homo sapien
gagttagatgaagagtaaaacagggacccaaac

SEQ ID NO: 157432 - DNA, 33 bp, Homo sapien
gagttagatgaagagtgaaacagggacccaaac

SEQ ID NO: 157433 - DNA, 33 bp, Homo sapien
gcatttttcatctatcaaataagacaagattag

SEQ ID NO: 157434 - DNA, 33 bp, Homo sapien
gcatttttcatctatcgaataagacaagattag

SEQ ID NO: 157435 - DNA, 33 bp, Homo sapien
ccaagctctaagtgaaacaaatgtttggtttag

SEQ ID NO: 157436 - DNA, 33 bp, Homo sapien
ccaagctctaagtgaagcaaatgtttggtttag

SEQ ID NO: 157437 - DNA, 33 bp, Homo sapien
cagagcatggggatgaataaacaggtttgcctt

SEQ ID NO: 157438 - DNA, 33 bp, Homo sapien
cagagcatggggatgagtaaacaggtttgcctt

SEQ ID NO: 157439 - DNA, 33 bp, Homo sapien
gatgtcttctaggctacggtaaaaagttcagat

SEQ ID NO: 157440 - DNA, 33 bp, Homo sapien
gatgtcttctaggctatggtaaaaagttcagat

SEQ ID NO: 157441 - DNA, 33 bp, Homo sapien
aggtaatatatgtaaaaggtataaaactgaaca

SEQ ID NO: 157442 - DNA, 33 bp, Homo sapien
aggtaatatatgtaaacggtataaaactgaaca

SEQ ID NO: 157443 - DNA, 33 bp, Homo sapien
tgaaaacacatttgtacgcagagataaatgggt

SEQ ID NO: 157444 - DNA, 33 bp, Homo sapien
tgaaaacacatttgtatgcagagataaatgggt

SEQ ID NO: 157445 - DNA, 33 bp, Homo sapien
ttgctattataaacgacggggaaatgaaggaag

SEQ ID NO: 157446 - DNA, 33 bp, Homo sapien
ttgctattataaacgatggggaaatgaaggaag

SEQ ID NO: 157447 - DNA, 33 bp, Homo sapien
tctgttgctggcattgcaggtgtctcgtcaatt

SEQ ID NO: 157448 - DNA, 33 bp, Homo sapien
tctgttgctggcattgtaggtgtctcgtcaatt

SEQ ID NO: 157449 - DNA, 33 bp, Homo sapien
ttgtcatctgcctccaaggtaatcagatcaaac

SEQ ID NO: 157450 - DNA, 33 bp, Homo sapien
ttgtcatctgcctccagggtaatcagatcaaac

SEQ ID NO: 157451 - DNA, 33 bp, Homo sapien
catatatatccaaccacagattcccaaaattgt

SEQ ID NO: 157452 - DNA, 33 bp, Homo sapien
catatatatccaaccatagattcccaaaattgt

SEQ ID NO: 157453 - DNA, 33 bp, Homo sapien
ggatgcatatttgtacagctaactatataaatt

SEQ ID NO: 157454 - DNA, 33 bp, Homo sapien
ggatgcatatttgtacggctaactatataaatt

SEQ ID NO: 157455 - DNA, 33 bp, Homo sapien
tggttcaaatctgtcaataggactcagtaagta

SEQ ID NO: 157456 - DNA, 33 bp, Homo sapien
tggttcaaatctgtcagtaggactcagtaagta

SEQ ID NO: 157457 - DNA, 33 bp, Homo sapien
atttgtagaaaaggaaacagacaaaatgaatgt

SEQ ID NO: 157458 - DNA, 33 bp, Homo sapien
atttgtagaaaaggaaccagacaaaatgaatgt

SEQ ID NO: 157459 - DNA, 33 bp, Homo sapien
ctgaatctacatcaaaatctacttatctatggt

SEQ ID NO: 157460 - DNA, 33 bp, Homo sapien
ctgaatctacatcaaagtctacttatctatggt

SEQ ID NO: 157461 - DNA, 33 bp, Homo sapien
tctagatgcagatgaaagcagaaatctaggtga

SEQ ID NO: 157462 - DNA, 33 bp, Homo sapien
tctagatgcagatgaacgcagaaatctaggtga

SEQ ID NO: 157463 - DNA, 33 bp, Homo sapien
attgcattgtaaaaaaacgtcccctacatcctc

SEQ ID NO: 157464 - DNA, 33 bp, Homo sapien
attgcattgtaaaaaagcgtcccctacatcctc

SEQ ID NO: 157465 - DNA, 33 bp, Homo sapien
agagtttctgtatccaatgataaaaaagctttg

SEQ ID NO: 157466 - DNA, 33 bp, Homo sapien
agagtttctgtatccagtgataaaaaagctttg

SEQ ID NO: 157467 - DNA, 33 bp, Homo sapien
aataaaaatgacttagcatgaattcccaaatat

SEQ ID NO: 157468 - DNA, 33 bp, Homo sapien
aataaaaatgacttaggatgaattcccaaatat

SEQ ID NO: 157469 - DNA, 33 bp, Homo sapien
gtgggaatttctgcccaaggcaaagtgcacagt

SEQ ID NO: 157470 - DNA, 33 bp, Homo sapien
gtgggaatttctgcccgaggcaaagtgcacagt

SEQ ID NO: 157471 - DNA, 33 bp, Homo sapien
accattattaatttcacctcttgcatatctaat

SEQ ID NO: 157472 - DNA, 33 bp, Homo sapien
accattattaatttcagctcttgcatatctaat

SEQ ID NO: 157473 - DNA, 33 bp, Homo sapien
tatgccaaaagcttcccatgaaggtaagaaata

SEQ ID NO: 157474 - DNA, 33 bp, Homo sapien
tatgccaaaagcttcctatgaaggtaagaaata

SEQ ID NO: 157475 - DNA, 33 bp, Homo sapien
aatgtaaattgatacaacctttcttgaggctaa

SEQ ID NO: 157476 - DNA, 33 bp, Homo sapien
aatgtaaattgatacagcctttcttgaggctaa

SEQ ID NO: 157477 - DNA, 33 bp, Homo sapien
taggctcatgagttaacaaggagatgatgtagt

SEQ ID NO: 157478 - DNA, 33 bp, Homo sapien
taggctcatgagttaagaaggagatgatgtagt

SEQ ID NO: 157479 - DNA, 33 bp, Homo sapien
cttacggactcctggaggggagcatcttagttt

SEQ ID NO: 157480 - DNA, 33 bp, Homo sapien
cttacggactcctggatgggagcatcttagttt

SEQ ID NO: 157481 - DNA, 33 bp, Homo sapien
cacagtgcttgctacaatgatatgtacttactt

SEQ ID NO: 157482 - DNA, 33 bp, Homo sapien
cacagtgcttgctacagtgatatgtacttactt

SEQ ID NO: 157483 - DNA, 33 bp, Homo sapien
gccaagaggatggaacaagcccaatgggcctga

SEQ ID NO: 157484 - DNA, 33 bp, Homo sapien
gccaagaggatggaacgagcccaatgggcctga

SEQ ID NO: 157485 - DNA, 33 bp, Homo sapien
taagtgattatcagaactgttaaaatcaggaat

SEQ ID NO: 157486 - DNA, 33 bp, Homo sapien
taagtgattatcagaattgttaaaatcaggaat

SEQ ID NO: 157487 - DNA, 33 bp, Homo sapien
tcttcttcaaacataaatatatcacttcattaa

SEQ ID NO: 157488 - DNA, 33 bp, Homo sapien
tcttcttcaaacataagtatatcacttcattaa

SEQ ID NO: 157489 - DNA, 33 bp, Homo sapien
tcctaggaatgaagacaagtagatatttttgca

SEQ ID NO: 157490 - DNA, 33 bp, Homo sapien
tcctaggaatgaagacgagtagatatttttgca

SEQ ID NO: 157491 - DNA, 33 bp, Homo sapien; identical to SEQ ID NO: 157489

SEQ ID NO: 157492 - DNA, 33 bp, Homo sapien; identical to SEQ ID NO: 157490

SEQ ID NO: 157493 - DNA, 33 bp, Homo sapien
caactgtccttagatacaaatgtgtaagaaaaa

SEQ ID NO: 157494 - DNA, 33 bp, Homo sapien
caactgtccttagatataaatgtgtaagaaaaa

SEQ ID NO: 157495 - DNA, 33 bp, Homo sapien
aataatacctactcacagaattgttatgacaat

SEQ ID NO: 157496 - DNA, 33 bp, Homo sapien
aataatacctactcactgaattgttatgacaat

SEQ ID NO: 157497 - DNA, 33 bp, Homo sapien
ggattgggtaaatggacgtgtctgaaactctga

SEQ ID NO: 157498 - DNA, 33 bp, Homo sapien
ggattgggtaaatggatgtgtctgaaactctga

SEQ ID NO: 157499 - DNA, 33 bp, Homo sapien
aaaggcatcggtggacaacctggggacatctgc

SEQ ID NO: 157500 - DNA, 33 bp, Homo sapien
aaaggcatcggtggacgacctggggacatctgc

SEQ ID NO: 157501 - DNA, 33 bp, Homo sapien
tatcctaattcagaaacgcaaaggagcccaagc

SEQ ID NO: 157502 - DNA, 33 bp, Homo sapien
tatcctaattcagaaatgcaaaggagcccaagc

SEQ ID NO: 157503 - DNA, 33 bp, Homo sapien
tgtgcaaaatgtctcagtcctgaaaatgcagat

SEQ ID NO: 157504 - DNA, 33 bp, Homo sapien
tgtgcaaaatgtctcattcctgaaaatgcagat

SEQ ID NO: 157505 - DNA, 33 bp, Homo sapien
tatgggacattgtgaaggagggaaggaggagga

SEQ ID NO: 157506 - DNA, 33 bp, Homo sapien
tatgggacattgtgaatgagggaaggaggagga

SEQ ID NO: 157507 - DNA, 33 bp, Homo sapien
gtagatagaaaaaggggagatattggtcaaaat

SEQ ID NO: 157508 - DNA, 33 bp, Homo sapien
gtagatagaaaaagggtagatattggtcaaaat

SEQ ID NO: 157509 - DNA, 33 bp, Homo sapien
aaattgaatgaaaggaaaagtctgattcactga

SEQ ID NO: 157510 - DNA, 33 bp, Homo sapien
aaattgaatgaaaggagaagtctgattcactga

SEQ ID NO: 157511 - DNA, 33 bp, Homo sapien
ttacaacccttaagtcaacaaggctgttattta

SEQ ID NO: 157512 - DNA, 33 bp, Homo sapien
ttacaacccttaagtccacaaggctgttattta

SEQ ID NO: 157513 - DNA, 33 bp, Homo sapien
gacattgagtgacaaacgcaagtggcagttgaa

SEQ ID NO: 157514 - DNA, 33 bp, Homo sapien
gacattgagtgacaaatgcaagtggcagttgaa

SEQ ID NO: 157515 - DNA, 33 bp, Homo sapien
ttgtaaaaactagtcaccaggaaaaaggataag

SEQ ID NO: 157516 - DNA, 33 bp, Homo sapien
ttgtaaaaactagtcatcaggaaaaaggataag

SEQ ID NO: 157517 - DNA, 33 bp, Homo sapien
ttatccacaatgaatcaatcaaggcttggcttc

SEQ ID NO: 157518 - DNA, 33 bp, Homo sapien
ttatccacaatgaatcgatcaaggcttggcttc

SEQ ID NO: 157519 - DNA, 33 bp, Homo sapien
ttcaccagcaacactaagtccaacctccactta

SEQ ID NO: 157520 - DNA, 33 bp, Homo sapien
ttcaccagcaacactaggtccaacctccactta

SEQ ID NO: 157521 - DNA, 33 bp, Homo sapien
ttcttacagaggttgacggaaagtccaccagtg

SEQ ID NO: 157522 - DNA, 33 bp, Homo sapien
ttcttacagaggttgatggaaagtccaccagtg

SEQ ID NO: 157523 - DNA, 33 bp, Homo sapien
acattcttagagaaacaaattttcaacccagaa

SEQ ID NO: 157524 - DNA, 33 bp, Homo sapien
acattcttagagaaacgaattttcaacccagaa

SEQ ID NO: 157525 - DNA, 33 bp, Homo sapien
cgattctggcacataacgggtttagatttatat

SEQ ID NO: 157526 - DNA, 33 bp, Homo sapien
cgattctggcacataatgggtttagatttatat

SEQ ID NO: 157527 - DNA, 33 bp, Homo sapien
catggaagctgtcaaagttaggggcttgcaccc

SEQ ID NO: 157528 - DNA, 33 bp, Homo sapien
catggaagctgtcaaatttaggggcttgcaccc

SEQ ID NO: 157529 - DNA, 33 bp, Homo sapien
ggtggttacaactgaaatgagacagatgttatc

SEQ ID NO: 157530 - DNA, 33 bp, Homo sapien
ggtggttacaactgaattgagacagatgttatc

SEQ ID NO: 157531 - DNA, 33 bp, Homo sapien
tatgacaagtgattgcaaaagacggactggcat

SEQ ID NO: 157532 - DNA, 33 bp, Homo sapien
tatgacaagtgattgcgaaagacggactggcat

SEQ ID NO: 157533 - DNA, 33 bp, Homo sapien
gtcaagagtatgcagaaccttaatgtcatgctt

SEQ ID NO: 157534 - DNA, 33 bp, Homo sapien
gtcaagagtatgcagagccttaatgtcatgctt

SEQ ID NO: 157535 - DNA, 33 bp, Homo sapien
tggacggtcaagacaaaatgggggacatgacaa

SEQ ID NO: 157536 - DNA, 33 bp, Homo sapien
tggacggtcaagacaacatgggggacatgacaa

SEQ ID NO: 157537 - DNA, 33 bp, Homo sapien
ttaattttctgattaaatctctttgggatgatc

SEQ ID NO: 157538 - DNA, 33 bp, Homo sapien
ttaattttctgattaagtctctttgggatgatc

SEQ ID NO: 157539 - DNA, 33 bp, Homo sapien
atattttttacttgccagaatgaatttataaat

SEQ ID NO: 157540 - DNA, 33 bp, Homo sapien
atattttttacttgccggaatgaatttataaat

SEQ ID NO: 157541 - DNA, 33 bp, Homo sapien
agtacgtgattgattacataactctggagaaat

SEQ ID NO: 157542 - DNA, 33 bp, Homo sapien
agtacgtgattgattatataactctggagaaat

SEQ ID NO: 157543 - DNA, 33 bp, Homo sapien
tccctctgagatacaaactgatctgatttaaca

SEQ ID NO: 157544 - DNA, 33 bp, Homo sapien
tccctctgagatacaagctgatctgatttaaca

SEQ ID NO: 157545 - DNA, 33 bp, Homo sapien
attctgaaaaccaagaagttagagacacaagat

SEQ ID NO: 157546 - DNA, 33 bp, Homo sapien
attctgaaaaccaagaggttagagacacaagat

SEQ ID NO: 157547 - DNA, 33 bp, Homo sapien
tagcttaaaaaacacactgtacatctctgtaaa

SEQ ID NO: 157548 - DNA, 33 bp, Homo sapien
tagcttaaaaaacacattgtacatctctgtaaa

SEQ ID NO: 157549 - DNA, 33 bp, Homo sapien
agacaatttagttccaataacatactacactct

SEQ ID NO: 157550 - DNA, 33 bp, Homo sapien
agacaatttagttccagtaacatactacactct

SEQ ID NO: 157551 - DNA, 33 bp, Homo sapien
aagcagattttggcttcaagatggtctgtaagt

SEQ ID NO: 157552 - DNA, 33 bp, Homo sapien
aagcagattttggctttaagatggtctgtaagt

SEQ ID NO: 157553 - DNA, 33 bp, Homo sapien
agcccagctgtgccgagatggccactgagggga

SEQ ID NO: 157554 - DNA, 33 bp, Homo sapien
agcccagctgtgccgatatggccactgagggga

SEQ ID NO: 157555 - DNA, 33 bp, Homo sapien
cacaggctgattactgcagaaatgtatgacatg

SEQ ID NO: 157556 - DNA, 33 bp, Homo sapien
cacaggctgattactgtagaaatgtatgacatg

SEQ ID NO: 157557 - DNA, 33 bp, Homo sapien
attaaattgtgttaggaaatggaaaggaagagg

SEQ ID NO: 157558 - DNA, 33 bp, Homo sapien
attaaattgtgttaggcaatggaaaggaagagg

SEQ ID NO: 157559 - DNA, 33 bp, Homo sapien
ccctcttgagacaaccaagtatgtcagagagac

SEQ ID NO: 157560 - DNA, 33 bp, Homo sapien
ccctcttgagacaacctagtatgtcagagagac

SEQ ID NO: 157561 - DNA, 33 bp, Homo sapien
cataggcagagatagacgttcagaaaatggtag

SEQ ID NO: 157562 - DNA, 33 bp, Homo sapien
cataggcagagatagaggttcagaaaatggtag

SEQ ID NO: 157563 - DNA, 33 bp, Homo sapien
ctggcctacatttgaccctgtgactatactgtt

SEQ ID NO: 157564 - DNA, 33 bp, Homo sapien
ctggcctacatttgactctgtgactatactgtt

SEQ ID NO: 157565 - DNA, 33 bp, Homo sapien
atgcaggtaggtaataatatcttcctcacagag

SEQ ID NO: 157566 - DNA, 33 bp, Homo sapien
atgcaggtaggtaatagtatcttcctcacagag

SEQ ID NO: 157567 - DNA, 33 bp, Homo sapien
cctggtactcctctcacacaaaacttccagagg

SEQ ID NO: 157568 - DNA, 33 bp, Homo sapien
cctggtactcctctcagacaaaacttccagagg

SEQ ID NO: 157569 - DNA, 33 bp, Homo sapien
ctttaacagatagagaaattttaactgaagtgt

SEQ ID NO: 157570 - DNA, 33 bp, Homo sapien
ctttaacagatagagacattttaactgaagtgt

SEQ ID NO: 157571 - DNA, 33 bp, Homo sapien
attgtgaaaatagattcaacagggctaaactac

SEQ ID NO: 157572 - DNA, 33 bp, Homo sapien
attgtgaaaatagattgaacagggctaaactac

SEQ ID NO: 157573 - DNA, 33 bp, Homo sapien
tgttcccccattcttaaatctggtctaccctat

SEQ ID NO: 157574 - DNA, 33 bp, Homo sapien
tgttcccccattcttatatctggtctaccctat

SEQ ID NO: 157575 - DNA, 33 bp, Homo sapien
tgatgagagaatgacaaggtcacattacaaagg

SEQ ID NO: 157576 - DNA, 33 bp, Homo sapien
tgatgagagaatgacagggtcacattacaaagg

SEQ ID NO: 157577 - DNA, 33 bp, Homo sapien
ttctggagtgctctagacaaatacaaaatagcc

SEQ ID NO: 157578 - DNA, 33 bp, Homo sapien
ttctggagtgctctaggcaaatacaaaatagcc

SEQ ID NO: 157579 - DNA, 33 bp, Homo sapien
gacctggaggccagaaaaagggctttaggttta

SEQ ID NO: 157580 - DNA, 33 bp, Homo sapien
gacctggaggccagaagaagggctttaggttta

SEQ ID NO: 157581 - DNA, 33 bp, Homo sapien
aatgtgttaacttaaagttggacaaagtaatca

SEQ ID NO: 157582 - DNA, 33 bp, Homo sapien
aatgtgttaacttaaatttggacaaagtaatca

SEQ ID NO: 157583 - DNA, 33 bp, Homo sapien
tttctgctaggagtaaatcaaaatcgttaagag

SEQ ID NO: 157584 - DNA, 33 bp, Homo sapien
tttctgctaggagtaagtcaaaatcgttaagag

SEQ ID NO: 157585 - DNA, 33 bp, Homo sapien
agagatattcagtctgcattttttttcaaagcc

SEQ ID NO: 157586 - DNA, 33 bp, Homo sapien
agagatattcagtctggattttttttcaaagcc

SEQ ID NO: 157587 - DNA, 33 bp, Homo sapien
gtaaaggcacttgcaacaactattaaaagaatt

SEQ ID NO: 157588 - DNA, 33 bp, Homo sapien
gtaaaggcacttgcaataactattaaaagaatt

SEQ ID NO: 157589 - DNA, 33 bp, Homo sapien
tttctagctcttgatgaaactgcaaaaaatatt

SEQ ID NO: 157590 - DNA, 33 bp, Homo sapien
tttctagctcttgatgtaactgcaaaaaatatt

SEQ ID NO: 157591 - DNA, 33 bp, Homo sapien
gaatagtccaagcgacaggtctctggggcctag

SEQ ID NO: 157592 - DNA, 33 bp, Homo sapien
gaatagtccaagcgaccggtctctggggcctag

SEQ ID NO: 157593 - DNA, 33 bp, Homo sapien
aacctctgcagtagcacgacttcgctgactgct

SEQ ID NO: 157594 - DNA, 33 bp, Homo sapien
aacctctgcagtagcatgacttcgctgactgct

SEQ ID NO: 157595 - DNA, 33 bp, Homo sapien
tgtatgagatctgcacaaccagcaataggaata

SEQ ID NO: 157596 - DNA, 33 bp, Homo sapien
tgtatgagatctgcacgaccagcaataggaata

SEQ ID NO: 157597 - DNA, 33 bp, Homo sapien
ttagttgaagttcccaaatacatgatagcctgc

SEQ ID NO: 157598 - DNA, 33 bp, Homo sapien
ttagttgaagttcccagatacatgatagcctgc

SEQ ID NO: 157599 - DNA, 33 bp, Homo sapien
acaggagcactaggaaatgggagcctgaaaggg

SEQ ID NO: 157600 - DNA, 33 bp, Homo sapien
acaggagcactaggaagtgggagcctgaaaggg

SEQ ID NO: 157601 - DNA, 33 bp, Homo sapien
gtagcagttgaagaagaaccaacatatgaagtc

SEQ ID NO: 157602 - DNA, 33 bp, Homo sapien
gtagcagttgaagaagtaccaacatatgaagtc

SEQ ID NO: 157603 - DNA, 33 bp, Homo sapien
aaaacatatgaaagaaccatgtactacctttgc

SEQ ID NO: 157604 - DNA, 33 bp, Homo sapien
aaaacatatgaaagaatcatgtactacctttgc

SEQ ID NO: 157605 - DNA, 33 bp, Homo sapien
gtgatagcagtggagaccatatgaagttgggat

SEQ ID NO: 157606 - DNA, 33 bp, Homo sapien
gtgatagcagtggagatcatatgaagttgggat

SEQ ID NO: 157607 - DNA, 33 bp, Homo sapien
agtgagggagagcacactgaatggtgaggacaa

SEQ ID NO: 157608 - DNA, 33 bp, Homo sapien
agtgagggagagcacagtgaatggtgaggacaa

SEQ ID NO: 157609 - DNA, 33 bp, Homo sapien
cactgcccagccagaaaataaactccagaaggg

SEQ ID NO: 157610 - DNA, 33 bp, Homo sapien
cactgcccagccagaatataaactccagaaggg

SEQ ID NO: 157611 - DNA, 33 bp, Homo sapien
tatttctcactgtggaatagtattttattttgt

SEQ ID NO: 157612 - DNA, 33 bp, Homo sapien
tatttctcactgtggagtagtattttattttgt

SEQ ID NO: 157613 - DNA, 33 bp, Homo sapien
actcagaaaccattgacgtgacaaacgaataca

SEQ ID NO: 157614 - DNA, 33 bp, Homo sapien
actcagaaaccattgatgtgacaaacgaataca

SEQ ID NO: 157615 - DNA, 33 bp, Homo sapien
tgcatggcaataaaaagttagcatagtctttac

SEQ ID NO: 157616 - DNA, 33 bp, Homo sapien
tgcatggcaataaaaatttagcatagtctttac

SEQ ID NO: 157617 - DNA, 33 bp, Homo sapien
tttattgccatgcaaaatacatcaatgatttat

SEQ ID NO: 157618 - DNA, 33 bp, Homo sapien
tttattgccatgcaaagtacatcaatgatttat

SEQ ID NO: 157619 - DNA, 33 bp, Homo sapien
gccagacattgtaaagaccagctgatcattggt

SEQ ID NO: 157620 - DNA, 33 bp, Homo sapien
gccagacattgtaaaggccagctgatcattggt

SEQ ID NO: 157621 - DNA, 33 bp, Homo sapien
aactatggttttgtgacggttgactttcttgaa

SEQ ID NO: 157622 - DNA, 33 bp, Homo sapien
aactatggttttgtgatggttgactttcttgaa

SEQ ID NO: 157623 - DNA, 33 bp, Homo sapien
taaatgtaatgttcctaacttcctgagaagctg

SEQ ID NO: 157624 - DNA, 33 bp, Homo sapien
taaatgtaatgttcctcacttcctgagaagctg

SEQ ID NO: 157625 - DNA, 33 bp, Homo sapien
agaatttcagtttcacaaatacgtcaccctttg

SEQ ID NO: 157626 - DNA, 33 bp, Homo sapien
agaatttcagtttcacgaatacgtcaccctttg

SEQ ID NO: 157627 - DNA, 33 bp, Homo sapien
ccattctattcgagtaaataagctttatctcct

SEQ ID NO: 157628 - DNA, 33 bp, Homo sapien
ccattctattcgagtacataagctttatctcct

SEQ ID NO: 157629 - DNA, 33 bp, Homo sapien
tgcaaacaatatctcaatacattcattttccta

SEQ ID NO: 157630 - DNA, 33 bp, Homo sapien
tgcaaacaatatctcagtacattcattttccta

SEQ ID NO: 157631 - DNA, 33 bp, Homo sapien
tctctgagaagcagaaattaaaaacactgagag

SEQ ID NO: 157632 - DNA, 33 bp, Homo sapien
tctctgagaagcagaatttaaaaacactgagag

SEQ ID NO: 157633 - DNA, 33 bp, Homo sapien
aattctgatttccaggaatttaaaaccacaatt

SEQ ID NO: 157634 - DNA, 33 bp, Homo sapien
aattctgatttccagggatttaaaaccacaatt

SEQ ID NO: 157635 - DNA, 33 bp, Homo sapien
caactctagttacttaactctactccttataat

SEQ ID NO: 157636 - DNA, 33 bp, Homo sapien
caactctagttacttacctctactccttataat

SEQ ID NO: 157637 - DNA, 33 bp, Homo sapien
tactaattatttcttcaaatagtcctcaaacat

SEQ ID NO: 157638 - DNA, 33 bp, Homo sapien
tactaattatttcttcgaatagtcctcaaacat

SEQ ID NO: 157639 - DNA, 33 bp, Homo sapien
cagctggaagaatcagcaaatactttatggagt

SEQ ID NO: 157640 - DNA, 33 bp, Homo sapien
cagctggaagaatcaggaaatactttatggagt

SEQ ID NO: 157641 - DNA, 33 bp, Homo sapien
tgatatctggaggacacgatctttattgcccag

SEQ ID NO: 157642 - DNA, 33 bp, Homo sapien
tgatatctggaggacaggatctttattgcccag

SEQ ID NO: 157643 - DNA, 33 bp, Homo sapien
gaaggagtagcttacaataatgctgtggggtgg

SEQ ID NO: 157644 - DNA, 33 bp, Homo sapien
gaaggagtagcttacagtaatgctgtggggtgg

SEQ ID NO: 157645 - DNA, 33 bp, Homo sapien
gagttatttgctctgaccctaagtcatcaaaaa

SEQ ID NO: 157646 - DNA, 33 bp, Homo sapien
gagttatttgctctgatcctaagtcatcaaaaa

SEQ ID NO: 157647 - DNA, 33 bp, Homo sapien
cttccaaactgttttccaaattgattacactat

SEQ ID NO: 157648 - DNA, 33 bp, Homo sapien
cttccaaactgttttcgaaattgattacactat

SEQ ID NO: 157649 - DNA, 33 bp, Homo sapien
ataaatttggatctacaacaaaaagattaaaga

SEQ ID NO: 157650 - DNA, 33 bp, Homo sapien
ataaatttggatctacgacaaaaagattaaaga

SEQ ID NO: 157651 - DNA, 33 bp, Homo sapien
gaaatagccaccagataaaaaaaagtcacatta

SEQ ID NO: 157652 - DNA, 33 bp, Homo sapien
gaaatagccaccagattaaaaaaagtcacatta

SEQ ID NO: 157653 - DNA, 33 bp, Homo sapien
ttttgtgaactggtggacctacaagtaagtaat

SEQ ID NO: 157654 - DNA, 33 bp, Homo sapien
ttttgtgaactggtggccctacaagtaagtaat

SEQ ID NO: 157655 - DNA, 33 bp, Homo sapien
ggatgaaagggctttgcatgcagaccaatgaac

SEQ ID NO: 157656 - DNA, 33 bp, Homo sapien
ggatgaaagggctttgtatgcagaccaatgaac

SEQ ID NO: 157657 - DNA, 33 bp, Homo sapien
tataacctgcttcttccccaagaaaatccttct

SEQ ID NO: 157658 - DNA, 33 bp, Homo sapien
tataacctgcttcttctccaagaaaatccttct

SEQ ID NO: 157659 - DNA, 33 bp, Homo sapien
aattgttaggagaagcactcagtgatacaagaa

SEQ ID NO: 157660 - DNA, 33 bp, Homo sapien
aattgttaggagaagcgctcagtgatacaagaa

SEQ ID NO: 157661 - DNA, 33 bp, Homo sapien
gatataggggccatcacagaaagcagtgggcag

SEQ ID NO: 157662 - DNA, 33 bp, Homo sapien
gatataggggccatcatagaaagcagtgggcag

SEQ ID NO: 157663 - DNA, 33 bp, Homo sapien
gagaaacacatgaatgccagtgcaatgtggtaa

SEQ ID NO: 157664 - DNA, 33 bp, Homo sapien
gagaaacacatgaatgtcagtgcaatgtggtaa

SEQ ID NO: 157665 - DNA, 33 bp, Homo sapien
gttctactctgctagacgctggcaatatcaaga

SEQ ID NO: 157666 - DNA, 33 bp, Homo sapien
gttctactctgctagatgctggcaatatcaaga

SEQ ID NO: 157667 - DNA, 33 bp, Homo sapien
gacctgagctctagaactgagttccaaactgct

SEQ ID NO: 157668 - DNA, 33 bp, Homo sapien
gacctgagctctagaattgagttccaaactgct

SEQ ID NO: 157669 - DNA, 33 bp, Homo sapien
aaacaaaacagaaagcaaatcttgtgtctttct

SEQ ID NO: 157670 - DNA, 33 bp, Homo sapien
aaacaaaacagaaagcgaatcttgtgtctttct

SEQ ID NO: 157671 - DNA, 33 bp, Homo sapien
cttccagttctgatacacattgaactaagataa

SEQ ID NO: 157672 - DNA, 33 bp, Homo sapien
cttccagttctgatacgcattgaactaagataa

SEQ ID NO: 157673 - DNA, 33 bp, Homo sapien
aataatggtcttcaagcatgattgatgttagta

SEQ ID NO: 157674 - DNA, 33 bp, Homo sapien
aataatggtcttcaaggatgattgatgttagta

SEQ ID NO: 157675 - DNA, 33 bp, Homo sapien
atatattgcttagctacagaaacactggttatg

SEQ ID NO: 157676 - DNA, 33 bp, Homo sapien
atatattgcttagctatagaaacactggttatg

SEQ ID NO: 157677 - DNA, 33 bp, Homo sapien
aaataaacacaaaagaagccagttcacataggt

SEQ ID NO: 157678 - DNA, 33 bp, Homo sapien
aaataaacacaaaagaggccagttcacataggt

SEQ ID NO: 157679 - DNA, 33 bp, Homo sapien
gaatccaccatattgacataatcacaggaagag

SEQ ID NO: 157680 - DNA, 33 bp, Homo sapien
gaatccaccatattgatataatcacaggaagag

SEQ ID NO: 157681 - DNA, 33 bp, Homo sapien
tgtatatttaatcatcacactatccatgtaatg

SEQ ID NO: 157682 - DNA, 33 bp, Homo sapien
tgtatatttaatcatctcactatccatgtaatg

SEQ ID NO: 157683 - DNA, 33 bp, Homo sapien
acatgaaggtctgtaccgtaaaaatcatgcaca

SEQ ID NO: 157684 - DNA, 33 bp, Homo sapien
acatgaaggtctgtactgtaaaaatcatgcaca

SEQ ID NO: 157685 - DNA, 33 bp, Homo sapien
ggcaagcaatctaaataagtgatgtagcccagg

SEQ ID NO: 157686 - DNA, 33 bp, Homo sapien
ggcaagcaatctaaatgagtgatgtagcccagg

SEQ ID NO: 157687 - DNA, 33 bp, Homo sapien
atggaataggtgggtacgtaaagcaaccactcg

SEQ ID NO: 157688 - DNA, 33 bp, Homo sapien
atggaataggtgggtatgtaaagcaaccactcg

SEQ ID NO: 157689 - DNA, 33 bp, Homo sapien
aactttcatgaaatccaaacaactgatcaaaaa

SEQ ID NO: 157690 - DNA, 33 bp, Homo sapien
aactttcatgaaatccgaacaactgatcaaaaa

SEQ ID NO: 157691 - DNA, 33 bp, Homo sapien
ctattttctcctggcactataaagatatacaag

SEQ ID NO: 157692 - DNA, 33 bp, Homo sapien
ctattttctcctggcattataaagatatacaag

SEQ ID NO: 157693 - DNA, 33 bp, Homo sapien
tctattagatgttgcaaaatgttcttaacctct

SEQ ID NO: 157694 - DNA, 33 bp, Homo sapien
tctattagatgttgcagaatgttcttaacctct

SEQ ID NO: 157695 - DNA, 33 bp, Homo sapien
ttgccatttaccccataatgccacttattcact

SEQ ID NO: 157696 - DNA, 33 bp, Homo sapien
ttgccatttaccccatgatgccacttattcact

SEQ ID NO: 157697 - DNA, 33 bp, Homo sapien
ttagttaatgctactgcaaatgatggttgtttg

SEQ ID NO: 157698 - DNA, 33 bp, Homo sapien
ttagttaatgctactgtaaatgatggttgtttg

SEQ ID NO: 157699 - DNA, 33 bp, Homo sapien
ttatttgaagttgaaaatgctctgtttcaattc

SEQ ID NO: 157700 - DNA, 33 bp, Homo sapien
ttatttgaagttgaaagtgctctgtttcaattc

SEQ ID NO: 157701 - DNA, 33 bp, Homo sapien
gctgagacacacaaaaactccatttgaactgca

SEQ ID NO: 157702 - DNA, 33 bp, Homo sapien
gctgagacacacaaaagctccatttgaactgca

SEQ ID NO: 157703 - DNA, 33 bp, Homo sapien
gagaatacagtggcaaagggaagaagaatgaga

SEQ ID NO: 157704 - DNA, 33 bp, Homo sapien
gagaatacagtggcaaggggaagaagaatgaga

SEQ ID NO: 157705 - DNA, 33 bp, Homo sapien
ccactttgtgtcttcacgtagataatccatgtc

SEQ ID NO: 157706 - DNA, 33 bp, Homo sapien
ccactttgtgtcttcatgtagataatccatgtc

SEQ ID NO: 157707 - DNA, 33 bp, Homo sapien
tctttactgttttcaacgacatggattatctac

SEQ ID NO: 157708 - DNA, 33 bp, Homo sapien
tctttactgttttcaatgacatggattatctac

SEQ ID NO: 157709 - DNA, 33 bp, Homo sapien
ttccatccagttggaacgctctttacccagatt

SEQ ID NO: 157710 - DNA, 33 bp, Homo sapien
ttccatccagttggaatgctctttacccagatt

SEQ ID NO: 157711 - DNA, 33 bp, Homo sapien
agagttttgattacttaaacaatgatatacaac

SEQ ID NO: 157712 - DNA, 33 bp, Homo sapien
agagttttgattactttaacaatgatatacaac

SEQ ID NO: 157713 - DNA, 33 bp, Homo sapien
caatttaatcagactacctggaatgaagacttt

SEQ ID NO: 157714 - DNA, 33 bp, Homo sapien
caatttaatcagactatctggaatgaagacttt

SEQ ID NO: 157715 - DNA, 33 bp, Homo sapien
agataagggtcaaaaaaattttgaagtagacta

SEQ ID NO: 157716 - DNA, 33 bp, Homo sapien
agataagggtcaaaaagattttgaagtagacta

SEQ ID NO: 157717 - DNA, 33 bp, Homo sapien
gatcttcaaaacacaaatgcttactgtctatgg

SEQ ID NO: 157718 - DNA, 33 bp, Homo sapien
gatcttcaaaacacaagtgcttactgtctatgg

SEQ ID NO: 157719 - DNA, 33 bp, Homo sapien
tctgagattagaaaagccaaaagatagaagggg

SEQ ID NO: 157720 - DNA, 33 bp, Homo sapien
tctgagattagaaaaggcaaaagatagaagggg

SEQ ID NO: 157721 - DNA, 33 bp, Homo sapien
acttcacttctgacaccgggtttttcccacact

SEQ ID NO: 157722 - DNA, 33 bp, Homo sapien
acttcacttctgacactgggtttttcccacact

SEQ ID NO: 157723 - DNA, 33 bp, Homo sapien
tgtagcatatatcacaaaggaaaagggagtcaa

SEQ ID NO: 157724 - DNA, 33 bp, Homo sapien
tgtagcatatatcacagaggaaaagggagtcaa

SEQ ID NO: 157725 - DNA, 33 bp, Homo sapien
ggcatggccagaattacgacttagatttcctga

SEQ ID NO: 157726 - DNA, 33 bp, Homo sapien
ggcatggccagaattaggacttagatttcctga

SEQ ID NO: 157727 - DNA, 33 bp, Homo sapien
aagtgatatcacaacagatggaatacagaagca

SEQ ID NO: 157728 - DNA, 33 bp, Homo sapien
aagtgatatcacaacatatggaatacagaagca

SEQ ID NO: 157729 - DNA, 33 bp, Homo sapien
ttctctgacataagcaagagctgtagcccaagg

SEQ ID NO: 157730 - DNA, 33 bp, Homo sapien
ttctctgacataagcaggagctgtagcccaagg

SEQ ID NO: 157731 - DNA, 33 bp, Homo sapien
agctctggtttggctacgtgacttgtttactgc

SEQ ID NO: 157732 - DNA, 33 bp, Homo sapien
agctctggtttggctatgtgacttgtttactgc

SEQ ID NO: 157733 - DNA, 33 bp, Homo sapien
ccaaacgtccccactcacacatctgccagttga

SEQ ID NO: 157734 - DNA, 33 bp, Homo sapien
ccaaacgtccccactcgcacatctgccagttga

SEQ ID NO: 157735 - DNA, 33 bp, Homo sapien
gaaaagaaaaggaataagaagacttcaaaagaa

SEQ ID NO: 157736 - DNA, 33 bp, Homo sapien
gaaaagaaaaggaataggaagacttcaaaagaa

SEQ ID NO: 157737 - DNA, 33 bp, Homo sapien
agttgtgctgcaaaaaggtcactttaataggac

SEQ ID NO: 157738 - DNA, 33 bp, Homo sapien
agttgtgctgcaaaaatgtcactttaataggac

SEQ ID NO: 157739 - DNA, 33 bp, Homo sapien
gtgtagggtcagcctcaaagcagtttggtttga

SEQ ID NO: 157740 - DNA, 33 bp, Homo sapien
gtgtagggtcagcctcgaagcagtttggtttga

SEQ ID NO: 157741 - DNA, 33 bp, Homo sapien
attgtgatggatgaacaggaaaataaatagtct

SEQ ID NO: 157742 - DNA, 33 bp, Homo sapien
attgtgatggatgaacgggaaaataaatagtct

SEQ ID NO: 157743 - DNA, 33 bp, Homo sapien
attcatttcataagcagattaaagctagcaagc

SEQ ID NO: 157744 - DNA, 33 bp, Homo sapien
attcatttcataagcatattaaagctagcaagc

SEQ ID NO: 157745 - DNA, 33 bp, Homo sapien
tttgttgtaaggtgggacatccagatcctattt

SEQ ID NO: 157746 - DNA, 33 bp, Homo sapien
tttgttgtaaggtggggcatccagatcctattt

SEQ ID NO: 157747 - DNA, 33 bp, Homo sapien
tagaaggatctagaagaatcactattcccatac

SEQ ID NO: 157748 - DNA, 33 bp, Homo sapien
tagaaggatctagaaggatcactattcccatac

SEQ ID NO: 157749 - DNA, 33 bp, Homo sapien
cgattatatcatcacaccataaactacataatt

SEQ ID NO: 157750 - DNA, 33 bp, Homo sapien
cgattatatcatcacagcataaactacataatt

SEQ ID NO: 157751 - DNA, 33 bp, Homo sapien
tcttggatgtgtatgcaatcagattctcatttt

SEQ ID NO: 157752 - DNA, 33 bp, Homo sapien
tcttggatgtgtatgctatcagattctcatttt

SEQ ID NO: 157753 - DNA, 33 bp, Homo sapien
ctaaaaagccgaactccgagtgttaagctgact

SEQ ID NO: 157754 - DNA, 33 bp, Homo sapien
ctaaaaagccgaactctgagtgttaagctgact

SEQ ID NO: 157755 - DNA, 33 bp, Homo sapien
gaaacaaacaaaaaaacgagagacgctggggcc

SEQ ID NO: 157756 - DNA, 33 bp, Homo sapien
gaaacaaacaaaaaaatgagagacgctggggcc

SEQ ID NO: 157757 - DNA, 33 bp, Homo sapien
aagaatagcaattcccactattttttgttttcc

SEQ ID NO: 157758 - DNA, 33 bp, Homo sapien
aagaatagcaattcccgctattttttgttttcc

SEQ ID NO: 157759 - DNA, 33 bp, Homo sapien
gagtcaaaggagataactgtggatgtttaaagt

SEQ ID NO: 157760 - DNA, 33 bp, Homo sapien
gagtcaaaggagataattgtggatgtttaaagt

SEQ ID NO: 157761 - DNA, 33 bp, Homo sapien
tttctgcagcaggctccaatgctttcctagaaa

SEQ ID NO: 157762 - DNA, 33 bp, Homo sapien
tttctgcagcaggctcgaatgctttcctagaaa

SEQ ID NO: 157763 - DNA, 33 bp, Homo sapien
acaataccagagggaaagtagccctaccaactc

SEQ ID NO: 157764 - DNA, 33 bp, Homo sapien
acaataccagagggaatgtagccctaccaactc

SEQ ID NO: 157765 - DNA, 33 bp, Homo sapien
atgccattgatgcctacatactactcccaatta

SEQ ID NO: 157766 - DNA, 33 bp, Homo sapien
atgccattgatgcctagatactactcccaatta

SEQ ID NO: 157767 - DNA, 33 bp, Homo sapien
acacccatccctactcaacaacttttaacatag

SEQ ID NO: 157768 - DNA, 33 bp, Homo sapien
acacccatccctactcgacaacttttaacatag

SEQ ID NO: 157769 - DNA, 33 bp, Homo sapien
ccatgtgaacttaaaacgtgtttgtatagatga

SEQ ID NO: 157770 - DNA, 33 bp, Homo sapien
ccatgtgaacttaaaatgtgtttgtatagatga

SEQ ID NO: 157771 - DNA, 33 bp, Homo sapien
tccactttcatcaatacctaaagtgttggaaat

SEQ ID NO: 157772 - DNA, 33 bp, Homo sapien
tccactttcatcaatatctaaagtgttggaaat

SEQ ID NO: 157773 - DNA, 33 bp, Homo sapien
gttcaaattatccagaactagatttatatttta

SEQ ID NO: 157774 - DNA, 33 bp, Homo sapien
gttcaaattatccagatctagatttatatttta

SEQ ID NO: 157775 - DNA, 33 bp, Homo sapien
gaaagatctttgagaaagagtcctcagattgtt

SEQ ID NO: 157776 - DNA, 33 bp, Homo sapien
gaaagatctttgagaacgagtcctcagattgtt

SEQ ID NO: 157777 - DNA, 33 bp, Homo sapien
tgatccattcagtctcgcaaagctgaagaacaa

SEQ ID NO: 157778 - DNA, 33 bp, Homo sapien
tgatccattcagtctctcaaagctgaagaacaa

SEQ ID NO: 157779 - DNA, 33 bp, Homo sapien
gagatggcttaccatacagttttataactgagt

SEQ ID NO: 157780 - DNA, 33 bp, Homo sapien
gagatggcttaccatagagttttataactgagt

SEQ ID NO: 157781 - DNA, 33 bp, Homo sapien
tgttaggattttggacaatgccattcaacaagt

SEQ ID NO: 157782 - DNA, 33 bp, Homo sapien
tgttaggattttggacgatgccattcaacaagt

SEQ ID NO: 157783 - DNA, 33 bp, Homo sapien
ttcattcatccactaaaattttcacctataatg

SEQ ID NO: 157784 - DNA, 33 bp, Homo sapien
ttcattcatccactaacattttcacctataatg

SEQ ID NO: 157785 - DNA, 33 bp, Homo sapien
ggtagttggagtacaaatattcaatcttcctgg

SEQ ID NO: 157786 - DNA, 33 bp, Homo sapien
ggtagttggagtacaagtattcaatcttcctgg

SEQ ID NO: 157787 - DNA, 33 bp, Homo sapien
ccagggatatgactctcaagaatttggcaggca

SEQ ID NO: 157788 - DNA, 33 bp, Homo sapien
ccagggatatgactcttaagaatttggcaggca

SEQ ID NO: 157789 - DNA, 33 bp, Homo sapien
gtgaggagagtgtctcaagccaaataatcgcag

SEQ ID NO: 157790 - DNA, 33 bp, Homo sapien
gtgaggagagtgtctccagccaaataatcgcag

SEQ ID NO: 157791 - DNA, 33 bp, Homo sapien
gtgcagctttccaaaaggtacaagtgaaaagca

SEQ ID NO: 157792 - DNA, 33 bp, Homo sapien
gtgcagctttccaaaatgtacaagtgaaaagca

SEQ ID NO: 157793 - DNA, 33 bp, Homo sapien
tttccagaaagaatacagacgctttaactttga

SEQ ID NO: 157794 - DNA, 33 bp, Homo sapien
tttccagaaagaatacggacgctttaactttga

SEQ ID NO: 157795 - DNA, 33 bp, Homo sapien
gttagacagaaacaaaatcctgctaatgatgag

SEQ ID NO: 157796 - DNA, 33 bp, Homo sapien
gttagacagaaacaaagtcctgctaatgatgag

SEQ ID NO: 157797 - DNA, 33 bp, Homo sapien
aagatctcaatcaacaaggaactatgtatagtg

SEQ ID NO: 157798 - DNA, 33 bp, Homo sapien
aagatctcaatcaacagggaactatgtatagtg

SEQ ID NO: 157799 - DNA, 33 bp, Homo sapien
tggtaatttatcttcaggcatagaaaaccttaa

SEQ ID NO: 157800 - DNA, 33 bp, Homo sapien
tggtaatttatcttcatgcatagaaaaccttaa

SEQ ID NO: 157801 - DNA, 33 bp, Homo sapien
ggtttggaagatcataagaggctcatttgtagg

SEQ ID NO: 157802 - DNA, 33 bp, Homo sapien
ggtttggaagatcatacgaggctcatttgtagg

SEQ ID NO: 157803 - DNA, 33 bp, Homo sapien
ctgacatgaaaggaacggctggaaagcatttaa

SEQ ID NO: 157804 - DNA, 33 bp, Homo sapien
ctgacatgaaaggaactgctggaaagcatttaa

SEQ ID NO: 157805 - DNA, 33 bp, Homo sapien
tttagaatccatcaaaccttaccttttatcaca

SEQ ID NO: 157806 - DNA, 33 bp, Homo sapien
tttagaatccatcaaatcttaccttttatcaca

SEQ ID NO: 157807 - DNA, 33 bp, Homo sapien
tagtgaaatcaccttggattctacctgcaccta

SEQ ID NO: 157808 - DNA, 33 bp, Homo sapien
tagtgaaatcaccttgtattctacctgcaccta

SEQ ID NO: 157809 - DNA, 33 bp, Homo sapien
aaatatttagttgttacctgaagcacaatgttt

SEQ ID NO: 157810 - DNA, 33 bp, Homo sapien
aaatatttagttgttatctgaagcacaatgttt

SEQ ID NO: 157811 - DNA, 33 bp, Homo sapien
gttagagctgggaaaacagtaaagaatgtaaag

SEQ ID NO: 157812 - DNA, 33 bp, Homo sapien
gttagagctgggaaaagagtaaagaatgtaaag

SEQ ID NO: 157813 - DNA, 33 bp, Homo sapien
tcataaaatagcacacaatattagagagtggtt

SEQ ID NO: 157814 - DNA, 33 bp, Homo sapien
tcataaaatagcacacgatattagagagtggtt

SEQ ID NO: 157815 - DNA, 33 bp, Homo sapien
attaagattagtcctccgagaagcagcctccct

SEQ ID NO: 157816 - DNA, 33 bp, Homo sapien
attaagattagtcctcggagaagcagcctccct

SEQ ID NO: 157817 - DNA, 33 bp, Homo sapien
tgatcacagctcgctgaaaccttaacctcttgg

SEQ ID NO: 157818 - DNA, 33 bp, Homo sapien
tgatcacagctcgctgcaaccttaacctcttgg

SEQ ID NO: 157819 - DNA, 33 bp, Homo sapien
attactgaaatcaatcactctgaagactcaaag

SEQ ID NO: 157820 - DNA, 33 bp, Homo sapien
attactgaaatcaatctctctgaagactcaaag

SEQ ID NO: 157821 - DNA, 33 bp, Homo sapien
agtagggatgatggaaagatttcagtggagcgg

SEQ ID NO: 157822 - DNA, 33 bp, Homo sapien
agtagggatgatggaacgatttcagtggagcgg

SEQ ID NO: 157823 - DNA, 33 bp, Homo sapien
atattttctcaatttccatagtctttggcttga

SEQ ID NO: 157824 - DNA, 33 bp, Homo sapien
atattttctcaatttctatagtctttggcttga

SEQ ID NO: 157825 - DNA, 33 bp, Homo sapien
tataaaactctaaaacaaatcaagaagatataa

SEQ ID NO: 157826 - DNA, 33 bp, Homo sapien
tataaaactctaaaactaatcaagaagatataa

SEQ ID NO: 157827 - DNA, 33 bp, Homo sapien
acataaatcctgacacagaaaaccgatttacct

SEQ ID NO: 157828 - DNA, 33 bp, Homo sapien
acataaatcctgacacggaaaaccgatttacct

SEQ ID NO: 157829 - DNA, 33 bp, Homo sapien
ttccttctgctggaaaataagtatttgctatag

SEQ ID NO: 157830 - DNA, 33 bp, Homo sapien
ttccttctgctggaaagtaagtatttgctatag

SEQ ID NO: 157831 - DNA, 33 bp, Homo sapien
agaaaaaggaaaatccaattataatgcctgaga

SEQ ID NO: 157832 - DNA, 33 bp, Homo sapien
agaaaaaggaaaatccgattataatgcctgaga

SEQ ID NO: 157833 - DNA, 33 bp, Homo sapien
ttatgccagactataaagcaatatttaggaatt

SEQ ID NO: 157834 - DNA, 33 bp, Homo sapien
ttatgccagactataaggcaatatttaggaatt

SEQ ID NO: 157835 - DNA, 33 bp, Homo sapien
cacctgaaggagatgacctcacgttacatccat

SEQ ID NO: 157836 - DNA, 33 bp, Homo sapien
cacctgaaggagatgagctcacgttacatccat

SEQ ID NO: 157837 - DNA, 33 bp, Homo sapien
aacaaggtctaaaacaatagtgaaaattggtgc

SEQ ID NO: 157838 - DNA, 33 bp, Homo sapien
aacaaggtctaaaacagtagtgaaaattggtgc

SEQ ID NO: 157839 - DNA, 33 bp, Homo sapien
tgtactgaattttgcacgaataatggtttcaaa

SEQ ID NO: 157840 - DNA, 33 bp, Homo sapien
tgtactgaattttgcatgaataatggtttcaaa

SEQ ID NO: 157841 - DNA, 33 bp, Homo sapien
attttccaggcccataagtggaagaaactgccc

SEQ ID NO: 157842 - DNA, 33 bp, Homo sapien
attttccaggcccataggtggaagaaactgccc

SEQ ID NO: 157843 - DNA, 33 bp, Homo sapien
ggcaagagaaggctccaatttgacttgtattct

SEQ ID NO: 157844 - DNA, 33 bp, Homo sapien
ggcaagagaaggctccgatttgacttgtattct

SEQ ID NO: 157845 - DNA, 33 bp, Homo sapien
tttcatagaagctctgcagggacgtttgttttt

SEQ ID NO: 157846 - DNA, 33 bp, Homo sapien
tttcatagaagctctgtagggacgtttgttttt

SEQ ID NO: 157847 - DNA, 33 bp, Homo sapien
gccgattgccatatatcatacaaagcgggcttg

SEQ ID NO: 157848 - DNA, 33 bp, Homo sapien
gccgattgccatatatgatacaaagcgggcttg

SEQ ID NO: 157849 - DNA, 33 bp, Homo sapien
ctactgaagtctttgaataattacgtatcagga

SEQ ID NO: 157850 - DNA, 33 bp, Homo sapien
ctactgaagtctttgagtaattacgtatcagga

SEQ ID NO: 157851 - DNA, 33 bp, Homo sapien
cgcattaaagtacatcaccttaactcacttctg

SEQ ID NO: 157852 - DNA, 33 bp, Homo sapien
cgcattaaagtacatccccttaactcacttctg

SEQ ID NO: 157853 - DNA, 33 bp, Homo sapien
ttgaatatgccatcaaataagcaagtcttgtga

SEQ ID NO: 157854 - DNA, 33 bp, Homo sapien
ttgaatatgccatcaagtaagcaagtcttgtga

SEQ ID NO: 157855 - DNA, 33 bp, Homo sapien
agcctcaataaaacgaataacacttactgcatg

SEQ ID NO: 157856 - DNA, 33 bp, Homo sapien
agcctcaataaaacgattaacacttactgcatg

SEQ ID NO: 157857 - DNA, 33 bp, Homo sapien
aatggatgagatgaagaatcttagtgtgtctga

SEQ ID NO: 157858 - DNA, 33 bp, Homo sapien
aatggatgagatgaaggatcttagtgtgtctga

SEQ ID NO: 157859 - DNA, 33 bp, Homo sapien
cataaaaaagtcgataaaatgattctttccaac

SEQ ID NO: 157860 - DNA, 33 bp, Homo sapien
cataaaaaagtcgatagaatgattctttccaac

SEQ ID NO: 157861 - DNA, 33 bp, Homo sapien
ccccattggaattttaaggagtcaggtcccatt

SEQ ID NO: 157862 - DNA, 33 bp, Homo sapien
ccccattggaattttagggagtcaggtcccatt

SEQ ID NO: 157863 - DNA, 33 bp, Homo sapien
ctggctttacatctcacccagtacagtcctagt

SEQ ID NO: 157864 - DNA, 33 bp, Homo sapien
ctggctttacatctcatccagtacagtcctagt

SEQ ID NO: 157865 - DNA, 33 bp, Homo sapien
gacttgatctaacataccatttatcacggtgaa

SEQ ID NO: 157866 - DNA, 33 bp, Homo sapien
gacttgatctaacatagcatttatcacggtgaa

SEQ ID NO: 157867 - DNA, 33 bp, Homo sapien
attcctattttacttcccttgcaaaaatataac

SEQ ID NO: 157868 - DNA, 33 bp, Homo sapien
attcctattttacttctcttgcaaaaatataac

SEQ ID NO: 157869 - DNA, 33 bp, Homo sapien
ttcccaagtgataagcaataatgacaaggttaa

SEQ ID NO: 157870 - DNA, 33 bp, Homo sapien
ttcccaagtgataagcgataatgacaaggttaa

SEQ ID NO: 157871 - DNA, 33 bp, Homo sapien
ctgcttggtttgacaacttaatatgacattcat

SEQ ID NO: 157872 - DNA, 33 bp, Homo sapien
ctgcttggtttgacaagttaatatgacattcat

SEQ ID NO: 157873 - DNA, 33 bp, Homo sapien
gttagtgagttatagacgtagagagaccacaag

SEQ ID NO: 157874 - DNA, 33 bp, Homo sapien
gttagtgagttatagatgtagagagaccacaag

SEQ ID NO: 157875 - DNA, 33 bp, Homo sapien
atgcactccctcccgcaagtagttgagagcagc

SEQ ID NO: 157876 - DNA, 33 bp, Homo sapien
atgcactccctcccgccagtagttgagagcagc

SEQ ID NO: 157877 - DNA, 33 bp, Homo sapien
ttatatacgacttttacattcttcacacttttc

SEQ ID NO: 157878 - DNA, 33 bp, Homo sapien
ttatatacgacttttagattcttcacacttttc

SEQ ID NO: 157879 - DNA, 33 bp, Homo sapien
attgagatgcattttgaaaacacagaaatccag

SEQ ID NO: 157880 - DNA, 33 bp, Homo sapien
attgagatgcattttggaaacacagaaatccag

SEQ ID NO: 157881 - DNA, 33 bp, Homo sapien
ttcaaagataagtggaataaacaagaaaggcta

SEQ ID NO: 157882 - DNA, 33 bp, Homo sapien
ttcaaagataagtggagtaaacaagaaaggcta

SEQ ID NO: 157883 - DNA, 33 bp, Homo sapien
ggataagagatgagagaaaaagtagacttactg

SEQ ID NO: 157884 - DNA, 33 bp, Homo sapien
ggataagagatgagaggaaaagtagacttactg

SEQ ID NO: 157885 - DNA, 33 bp, Homo sapien
cagtctgtatcctctccgaagcaatgattttcc

SEQ ID NO: 157886 - DNA, 33 bp, Homo sapien
cagtctgtatcctctctgaagcaatgattttcc

SEQ ID NO: 157887 - DNA, 33 bp, Homo sapien
taaaaatagctcagacacccattgtgtttaggg

SEQ ID NO: 157888 - DNA, 33 bp, Homo sapien
taaaaatagctcagacgcccattgtgtttaggg

SEQ ID NO: 157889 - DNA, 33 bp, Homo sapien
atctcaggttgctcccaagagtgactgaattag

SEQ ID NO: 157890 - DNA, 33 bp, Homo sapien
atctcaggttgctccccagagtgactgaattag

SEQ ID NO: 157891 - DNA, 33 bp, Homo sapien
ttgcaaatcagacatacgtgacactcctttttc

SEQ ID NO: 157892 - DNA, 33 bp, Homo sapien
ttgcaaatcagacatatgtgacactcctttttc

SEQ ID NO: 157893 - DNA, 33 bp, Homo sapien
cattttgcctcttaaactgcattcttgagtcca

SEQ ID NO: 157894 - DNA, 33 bp, Homo sapien
cattttgcctcttaaagtgcattcttgagtcca

SEQ ID NO: 157895 - DNA, 33 bp, Homo sapien
ttttcctcacccccacaatgaatccagtagcaa

SEQ ID NO: 157896 - DNA, 33 bp, Homo sapien
ttttcctcacccccacgatgaatccagtagcaa

SEQ ID NO: 157897 - DNA, 33 bp, Homo sapien
ataatgttttttgcggcaacatacatggagccg

SEQ ID NO: 157898 - DNA, 33 bp, Homo sapien
ataatgttttttgcgggaacatacatggagccg

SEQ ID NO: 157899 - DNA, 33 bp, Homo sapien
gtgaaaagcagcatggaaattcctaaaagagct

SEQ ID NO: 157900 - DNA, 33 bp, Homo sapien
gtgaaaagcagcatggcaattcctaaaagagct

SEQ ID NO: 157901 - DNA, 33 bp, Homo sapien
ctgtataaaaaaatacaaaagcatcaaattgca

SEQ ID NO: 157902 - DNA, 33 bp, Homo sapien
ctgtataaaaaaatacgaaagcatcaaattgca

SEQ ID NO: 157903 - DNA, 33 bp, Homo sapien
aatataggtggaatcccggaatataaagaaggc

SEQ ID NO: 157904 - DNA, 33 bp, Homo sapien
aatataggtggaatcctggaatataaagaaggc

SEQ ID NO: 157905 - DNA, 33 bp, Homo sapien
acagtcaagtatgatcactttactccacaacaa

SEQ ID NO: 157906 - DNA, 33 bp, Homo sapien
acagtcaagtatgatcgctttactccacaacaa

SEQ ID NO: 157907 - DNA, 33 bp, Homo sapien
ttcaacacaaacattacgatcatgggtacagag

SEQ ID NO: 157908 - DNA, 33 bp, Homo sapien
ttcaacacaaacattatgatcatgggtacagag

SEQ ID NO: 157909 - DNA, 33 bp, Homo sapien
cccaataatattctgcctattgctctccatctt

SEQ ID NO: 157910 - DNA, 33 bp, Homo sapien
cccaataatattctgcgtattgctctccatctt

SEQ ID NO: 157911 - DNA, 33 bp, Homo sapien
actatagtcacaaaaaagtctaaagatgataac

SEQ ID NO: 157912 - DNA, 33 bp, Homo sapien
actatagtcacaaaaatgtctaaagatgataac

SEQ ID NO: 157913 - DNA, 33 bp, Homo sapien
gtgtccttgaaattgaactccttgaaaatttaa

SEQ ID NO: 157914 - DNA, 33 bp, Homo sapien
gtgtccttgaaattgagctccttgaaaatttaa

SEQ ID NO: 157915 - DNA, 33 bp, Homo sapien
gaacacaaatgaaagcaatttggaagtaatatt

SEQ ID NO: 157916 - DNA, 33 bp, Homo sapien
gaacacaaatgaaagcgatttggaagtaatatt

SEQ ID NO: 157917 - DNA, 33 bp, Homo sapien
cttttatttcctccaccgaacttcattaatgtc

SEQ ID NO: 157918 - DNA, 33 bp, Homo sapien
cttttatttcctccactgaacttcattaatgtc

SEQ ID NO: 157919 - DNA, 33 bp, Homo sapien
cattgagtaacaaagacggtttgggccttataa

SEQ ID NO: 157920 - DNA, 33 bp, Homo sapien
cattgagtaacaaagatggtttgggccttataa

SEQ ID NO: 157921 - DNA, 33 bp, Homo sapien
caaggataagataaggaaaaaaaaggatgagag

SEQ ID NO: 157922 - DNA, 33 bp, Homo sapien
caaggataagataagggaaaaaaaggatgagag

SEQ ID NO: 157923 - DNA, 33 bp, Homo sapien
tctttgaagttgacaacggagccaggaatgaaa

SEQ ID NO: 157924 - DNA, 33 bp, Homo sapien
tctttgaagttgacaatggagccaggaatgaaa

SEQ ID NO: 157925 - DNA, 33 bp, Homo sapien
ttccaacccaattacactctacccatttcaggg

SEQ ID NO: 157926 - DNA, 33 bp, Homo sapien
ttccaacccaattacattctacccatttcaggg

SEQ ID NO: 157927 - DNA, 33 bp, Homo sapien
ctgtccaatcattagaggaccactaagctagct

SEQ ID NO: 157928 - DNA, 33 bp, Homo sapien
ctgtccaatcattagatgaccactaagctagct

SEQ ID NO: 157929 - DNA, 33 bp, Homo sapien
caacttctactgctacgagtggactccaagcca

SEQ ID NO: 157930 - DNA, 33 bp, Homo sapien
caacttctactgctactagtggactccaagcca

SEQ ID NO: 157931 - DNA, 33 bp, Homo sapien
actttacagagctacaaaatactcacagagtga

SEQ ID NO: 157932 - DNA, 33 bp, Homo sapien
actttacagagctacagaatactcacagagtga

SEQ ID NO: 157933 - DNA, 33 bp, Homo sapien
ttacagtacctcaatacagactgcgagctactt

SEQ ID NO: 157934 - DNA, 33 bp, Homo sapien
ttacagtacctcaatatagactgcgagctactt

SEQ ID NO: 157935 - DNA, 33 bp, Homo sapien
gcattgcccttagataaaaaggagatacacttt

SEQ ID NO: 157936 - DNA, 33 bp, Homo sapien
gcattgcccttagatagaaaggagatacacttt

SEQ ID NO: 157937 - DNA, 33 bp, Homo sapien
ccagcctgggcgacaacgacaagagcaacactt

SEQ ID NO: 157938 - DNA, 33 bp, Homo sapien
ccagcctgggcgacaatgacaagagcaacactt

SEQ ID NO: 157939 - DNA, 33 bp, Homo sapien
ccaaagcgggcaccgaagtcaagtgtggtgttt

SEQ ID NO: 157940 - DNA, 33 bp, Homo sapien
ccaaagcgggcaccgaggtcaagtgtggtgttt

SEQ ID NO: 157941 - DNA, 33 bp, Homo sapien
agaagatgtataaacaagaatacagtaacacat

SEQ ID NO: 157942 - DNA, 33 bp, Homo sapien
agaagatgtataaacatgaatacagtaacacat

SEQ ID NO: 157943 - DNA, 33 bp, Homo sapien
tattataaattgatgacaagttgtagtcctctg

SEQ ID NO: 157944 - DNA, 33 bp, Homo sapien
tattataaattgatgagaagttgtagtcctctg

SEQ ID NO: 157945 - DNA, 33 bp, Homo sapien
agaatgaggtgattgaatacaaaggtgaatggg

SEQ ID NO: 157946 - DNA, 33 bp, Homo sapien
agaatgaggtgattgactacaaaggtgaatggg

SEQ ID NO: 157947 - DNA, 33 bp, Homo sapien
atgaagatctttaggacgagtaggggaacagca

SEQ ID NO: 157948 - DNA, 33 bp, Homo sapien
atgaagatctttaggaggagtaggggaacagca

SEQ ID NO: 157949 - DNA, 33 bp, Homo sapien
atttgtcctcagactaaagagatcatggagaac

SEQ ID NO: 157950 - DNA, 33 bp, Homo sapien
atttgtcctcagactacagagatcatggagaac

SEQ ID NO: 157951 - DNA, 33 bp, Homo sapien
taagcaaattcagcctcaaaatgtttcatttag

SEQ ID NO: 157952 - DNA, 33 bp, Homo sapien
taagcaaattcagcctgaaaatgtttcatttag

SEQ ID NO: 157953 - DNA, 33 bp, Homo sapien
ctttctcgtagattaacgtttttgaagttaatc

SEQ ID NO: 157954 - DNA, 33 bp, Homo sapien
ctttctcgtagattaatgtttttgaagttaatc

SEQ ID NO: 157955 - DNA, 33 bp, Homo sapien
taaatttttgtaaacacgcaaatgatctgaata

SEQ ID NO: 157956 - DNA, 33 bp, Homo sapien
taaatttttgtaaacaggcaaatgatctgaata

SEQ ID NO: 157957 - DNA, 33 bp, Homo sapien
gatgaggaataccgtacatttgatggctgggac

SEQ ID NO: 157958 - DNA, 33 bp, Homo sapien
gatgaggaataccgtatatttgatggctgggac

SEQ ID NO: 157959 - DNA, 33 bp, Homo sapien
gaataacacctgcttaactcctatatgccaagt

SEQ ID NO: 157960 - DNA, 33 bp, Homo sapien
gaataacacctgcttacctcctatatgccaagt

SEQ ID NO: 157961 - DNA, 33 bp, Homo sapien
acctatattttatcaggccagagatcaaagaga

SEQ ID NO: 157962 - DNA, 33 bp, Homo sapien
acctatattttatcagtccagagatcaaagaga

SEQ ID NO: 157963 - DNA, 33 bp, Homo sapien
gatgatgttagcattacgttttggtattttaaa

SEQ ID NO: 157964 - DNA, 33 bp, Homo sapien
gatgatgttagcattatgttttggtattttaaa

SEQ ID NO: 157965 - DNA, 33 bp, Homo sapien
cttcatggaaaacaccggacagtatttattgcc

SEQ ID NO: 157966 - DNA, 33 bp, Homo sapien
cttcatggaaaacacctgacagtatttattgcc

SEQ ID NO: 157967 - DNA, 33 bp, Homo sapien
ctttaatgatttcaaacaaatgttgaagggcgt

SEQ ID NO: 157968 - DNA, 33 bp, Homo sapien
ctttaatgatttcaaataaatgttgaagggcgt

SEQ ID NO: 157969 - DNA, 33 bp, Homo sapien
agtgagaatgacgcaccgagtataacactttgc

SEQ ID NO: 157970 - DNA, 33 bp, Homo sapien
agtgagaatgacgcactgagtataacactttgc

SEQ ID NO: 157971 - DNA, 33 bp, Homo sapien
gctaagagaatagtaactccagtgattttccgg

SEQ ID NO: 157972 - DNA, 33 bp, Homo sapien
gctaagagaatagtaattccagtgattttccgg

SEQ ID NO: 157973 - DNA, 33 bp, Homo sapien
caaagttgaattaggaagtgacaattttataaa

SEQ ID NO: 157974 - DNA, 33 bp, Homo sapien
caaagttgaattaggatgtgacaattttataaa

SEQ ID NO: 157975 - DNA, 33 bp, Homo sapien
aaaaagcattataaaacagtcatctaagaaagt

SEQ ID NO: 157976 - DNA, 33 bp, Homo sapien
aaaaagcattataaaatagtcatctaagaaagt

SEQ ID NO: 157977 - DNA, 33 bp, Homo sapien
taggggttcattagaaagaatcacaggactcag

SEQ ID NO: 157978 - DNA, 33 bp, Homo sapien
taggggttcattagaaggaatcacaggactcag

SEQ ID NO: 157979 - DNA, 33 bp, Homo sapien
gtcatgcttatggagacgttttattacagtgaa

SEQ ID NO: 157980 - DNA, 33 bp, Homo sapien
gtcatgcttatggagatgttttattacagtgaa

SEQ ID NO: 157981 - DNA, 33 bp, Homo sapien
gcagagaaaacaagaccatttagaaggcagaaa

SEQ ID NO: 157982 - DNA, 33 bp, Homo sapien
gcagagaaaacaagactatttagaaggcagaaa

SEQ ID NO: 157983 - DNA, 33 bp, Homo sapien
tgctttttggtactgagagtcaggaggacatgt

SEQ ID NO: 157984 - DNA, 33 bp, Homo sapien
tgctttttggtactgatagtcaggaggacatgt

SEQ ID NO: 157985 - DNA, 33 bp, Homo sapien
tgtgcttcagtcgtacaattaaaaaatttaata

SEQ ID NO: 157986 - DNA, 33 bp, Homo sapien
tgtgcttcagtcgtacgattaaaaaatttaata

SEQ ID NO: 157987 - DNA, 33 bp, Homo sapien
acactgcattcagaagaaaagaaagattaaaaa

SEQ ID NO: 157988 - DNA, 33 bp, Homo sapien
acactgcattcagaagtaaagaaagattaaaaa

SEQ ID NO: 157989 - DNA, 33 bp, Homo sapien
cataaataaaacaagcaaagccaactacagctg

SEQ ID NO: 157990 - DNA, 33 bp, Homo sapien
cataaataaaacaagctaagccaactacagctg

SEQ ID NO: 157991 - DNA, 33 bp, Homo sapien
atacacacaatttcctaaatgctgaattacaat

SEQ ID NO: 157992 - DNA, 33 bp, Homo sapien
atacacacaatttcctgaatgctgaattacaat

SEQ ID NO: 157993 - DNA, 33 bp, Homo sapien
tgtgttccctcttaacacttagcatctaatttt

SEQ ID NO: 157994 - DNA, 33 bp, Homo sapien
tgtgttccctcttaacgcttagcatctaatttt

SEQ ID NO: 157995 - DNA, 33 bp, Homo sapien
cctccaatatacacacaatttcatagtgccact

SEQ ID NO: 157996 - DNA, 33 bp, Homo sapien
cctccaatatacacacgatttcatagtgccact

SEQ ID NO: 157997 - DNA, 33 bp, Homo sapien
gagccttcttactcgtcaacatttaaattggac

SEQ ID NO: 157998 - DNA, 33 bp, Homo sapien
gagccttcttactcgtgaacatttaaattggac

SEQ ID NO: 157999 - DNA, 33 bp, Homo sapien
tcaagaacaaaataagaacttgcatgatcacat

SEQ ID NO: 158000 - DNA, 33 bp, Homo sapien
tcaagaacaaaataagcacttgcatgatcacat

SEQ ID NO: 158001 - DNA, 33 bp, Homo sapien
tgtcttatcaatatgccattctgcttctgactt

SEQ ID NO: 158002 - DNA, 33 bp, Homo sapien
tgtcttatcaatatgctattctgcttctgactt

SEQ ID NO: 158003 - DNA, 33 bp, Homo sapien
cctcccagtggtttcacggggtgctgaatagat

SEQ ID NO: 158004 - DNA, 33 bp, Homo sapien
cctcccagtggtttcatggggtgctgaatagat

SEQ ID NO: 158005 - DNA, 33 bp, Homo sapien
aaaagacaaaaaccgcaattagttttgcaccaa

SEQ ID NO: 158006 - DNA, 33 bp, Homo sapien
aaaagacaaaaaccgccattagttttgcaccaa

SEQ ID NO: 158007 - DNA, 33 bp, Homo sapien
ggtcaccctgtggctacgatgaaattcctgaaa

SEQ ID NO: 158008 - DNA, 33 bp, Homo sapien
ggtcaccctgtggctatgatgaaattcctgaaa

SEQ ID NO: 158009 - DNA, 33 bp, Homo sapien
tctgattctgcctttgaaaatttaaaaactgct

SEQ ID NO: 158010 - DNA, 33 bp, Homo sapien
tctgattctgcctttgcaaatttaaaaactgct

SEQ ID NO: 158011 - DNA, 33 bp, Homo sapien
atgatttggcctagaaaagagaacattaaaaag

SEQ ID NO: 158012 - DNA, 33 bp, Homo sapien
atgatttggcctagaagagagaacattaaaaag

SEQ ID NO: 158013 - DNA, 33 bp, Homo sapien
aaagaatagctataaactcagtgaagttgatta

SEQ ID NO: 158014 - DNA, 33 bp, Homo sapien
aaagaatagctataaattcagtgaagttgatta

SEQ ID NO: 158015 - DNA, 33 bp, Homo sapien
cctagtgttacaaagaagaaaagctggagcatc

SEQ ID NO: 158016 - DNA, 33 bp, Homo sapien
cctagtgttacaaagaggaaaagctggagcatc

SEQ ID NO: 158017 - DNA, 33 bp, Homo sapien
cacaaggcttcaactgcattttgcaatgttttg

SEQ ID NO: 158018 - DNA, 33 bp, Homo sapien
cacaaggcttcaactgtattttgcaatgttttg

SEQ ID NO: 158019 - DNA, 33 bp, Homo sapien
tattctgtaacagagaacatggtatttataact

SEQ ID NO: 158020 - DNA, 33 bp, Homo sapien
tattctgtaacagagatcatggtatttataact

SEQ ID NO: 158021 - DNA, 33 bp, Homo sapien
gagcccaaactgacaaagtgtctgcgtggcaga

SEQ ID NO: 158022 - DNA, 33 bp, Homo sapien
gagcccaaactgacaaggtgtctgcgtggcaga

SEQ ID NO: 158023 - DNA, 33 bp, Homo sapien
gtcacctctggccttaaaagactgggtgcttat

SEQ ID NO: 158024 - DNA, 33 bp, Homo sapien
gtcacctctggccttataagactgggtgcttat

SEQ ID NO: 158025 - DNA, 33 bp, Homo sapien
tctcaccagcttatcacgagacaatcgtattta

SEQ ID NO: 158026 - DNA, 33 bp, Homo sapien
tctcaccagcttatcatgagacaatcgtattta

SEQ ID NO: 158027 - DNA, 33 bp, Homo sapien
cttcttggagattgaacaggccaaagaaaaagt

SEQ ID NO: 158028 - DNA, 33 bp, Homo sapien
cttcttggagattgaataggccaaagaaaaagt

SEQ ID NO: 158029 - DNA, 33 bp, Homo sapien
ttagtcactgtggtcaatcacttactataccca

SEQ ID NO: 158030 - DNA, 33 bp, Homo sapien
ttagtcactgtggtcagtcacttactataccca

SEQ ID NO: 158031 - DNA, 33 bp, Homo sapien
tactgactttattagcaactcattttgataact

SEQ ID NO: 158032 - DNA, 33 bp, Homo sapien
tactgactttattagccactcattttgataact

SEQ ID NO: 158033 - DNA, 33 bp, Homo sapien
gggagtatcatacaaacaagcctatcaggttga

SEQ ID NO: 158034 - DNA, 33 bp, Homo sapien
gggagtatcatacaaagaagcctatcaggttga

SEQ ID NO: 158035 - DNA, 33 bp, Homo sapien
tgaatcccacaatgtacgtttgagttaccttct

SEQ ID NO: 158036 - DNA, 33 bp, Homo sapien
tgaatcccacaatgtaggtttgagttaccttct

SEQ ID NO: 158037 - DNA, 33 bp, Homo sapien
ccctctcactaggggtaacaaatgcaatatgag

SEQ ID NO: 158038 - DNA, 33 bp, Homo sapien
ccctctcactaggggttacaaatgcaatatgag

SEQ ID NO: 158039 - DNA, 33 bp, Homo sapien
gtcttgtgttctagtccgaaattggacaaatca

SEQ ID NO: 158040 - DNA, 33 bp, Homo sapien
gtcttgtgttctagtctgaaattggacaaatca

SEQ ID NO: 158041 - DNA, 33 bp, Homo sapien
acttttcagtctcatacattctgcagatctcac

SEQ ID NO: 158042 - DNA, 33 bp, Homo sapien
acttttcagtctcatatattctgcagatctcac

SEQ ID NO: 158043 - DNA, 33 bp, Homo sapien
catgagagtagcaaaaagagtccttgctgaaac

SEQ ID NO: 158044 - DNA, 33 bp, Homo sapien
catgagagtagcaaaaggagtccttgctgaaac

SEQ ID NO: 158045 - DNA, 33 bp, Homo sapien
ttttatacaagaaaatcaaaacagatcacgaat

SEQ ID NO: 158046 - DNA, 33 bp, Homo sapien
ttttatacaagaaaatgaaaacagatcacgaat

SEQ ID NO: 158047 - DNA, 33 bp, Homo sapien
gcaatgccagatcaaacgaggatcactacaaac

SEQ ID NO: 158048 - DNA, 33 bp, Homo sapien
gcaatgccagatcaaaggaggatcactacaaac

SEQ ID NO: 158049 - DNA, 33 bp, Homo sapien
tgttaaaaagtgagcaaaggatattaacagacg

SEQ ID NO: 158050 - DNA, 33 bp, Homo sapien
tgttaaaaagtgagcagaggatattaacagacg

SEQ ID NO: 158051 - DNA, 33 bp, Homo sapien
ctcaatggaagaaagacagcataatgatgagtc

SEQ ID NO: 158052 - DNA, 33 bp, Homo sapien
ctcaatggaagaaagagagcataatgatgagtc

SEQ ID NO: 158053 - DNA, 33 bp, Homo sapien
ttaagtgaataatgaacctttgcataacctcct

SEQ ID NO: 158054 - DNA, 33 bp, Homo sapien
ttaagtgaataatgaatctttgcataacctcct

SEQ ID NO: 158055 - DNA, 33 bp, Homo sapien
aagaaagaagaaaaaaatatttgctcaagctgt

SEQ ID NO: 158056 - DNA, 33 bp, Homo sapien
aagaaagaagaaaaaagtatttgctcaagctgt

SEQ ID NO: 158057 - DNA, 33 bp, Homo sapien
aaaaatataaaaacccaacaatttgctatgttc

SEQ ID NO: 158058 - DNA, 33 bp, Homo sapien
aaaaatataaaaacccgacaatttgctatgttc

SEQ ID NO: 158059 - DNA, 33 bp, Homo sapien
gctctaaaacatggaaaaggcaagtcaatcttc

SEQ ID NO: 158060 - DNA, 33 bp, Homo sapien
gctctaaaacatggaacaggcaagtcaatcttc

SEQ ID NO: 158061 - DNA, 33 bp, Homo sapien
aatgtgtcttttctgacatttgtggcatagtgc

SEQ ID NO: 158062 - DNA, 33 bp, Homo sapien
aatgtgtcttttctgagatttgtggcatagtgc

SEQ ID NO: 158063 - DNA, 33 bp, Homo sapien
tccaattcaaaaggaacgtatgaatgtttggtg

SEQ ID NO: 158064 - DNA, 33 bp, Homo sapien
tccaattcaaaaggaatgtatgaatgtttggtg

SEQ ID NO: 158065 - DNA, 33 bp, Homo sapien
ataaagcgatttcttgaaaaagcagttatctag

SEQ ID NO: 158066 - DNA, 33 bp, Homo sapien
ataaagcgatttcttggaaaagcagttatctag

SEQ ID NO: 158067 - DNA, 33 bp, Homo sapien
aatatgcaatagaaacacagtgactcttaacca

SEQ ID NO: 158068 - DNA, 33 bp, Homo sapien
aatatgcaatagaaacgcagtgactcttaacca

SEQ ID NO: 158069 - DNA, 33 bp, Homo sapien
actccagggagagtgacagggtagaagaattag

SEQ ID NO: 158070 - DNA, 33 bp, Homo sapien
actccagggagagtgagagggtagaagaattag

SEQ ID NO: 158071 - DNA, 33 bp, Homo sapien
aaaccagtccctcaaaatgaaacaacaggatgt

SEQ ID NO: 158072 - DNA, 33 bp, Homo sapien
aaaccagtccctcaaagtgaaacaacaggatgt

SEQ ID NO: 158073 - DNA, 33 bp, Homo sapien
cattttagccagggcaatagtaggacagactga

SEQ ID NO: 158074 - DNA, 33 bp, Homo sapien
cattttagccagggcactagtaggacagactga

SEQ ID NO: 158075 - DNA, 33 bp, Homo sapien
taggagctggcactgcactgttcttctggatac

SEQ ID NO: 158076 - DNA, 33 bp, Homo sapien
taggagctggcactgcgctgttcttctggatac

SEQ ID NO: 158077 - DNA, 33 bp, Homo sapien
gggacaaccagtgtatgaagttaattcaacaaa

SEQ ID NO: 158078 - DNA, 33 bp, Homo sapien
gggacaaccagtgtattaagttaattcaacaaa

SEQ ID NO: 158079 - DNA, 33 bp, Homo sapien
ttgttttgtatctagaactgcatggtggtgaaa

SEQ ID NO: 158080 - DNA, 33 bp, Homo sapien
ttgttttgtatctagagctgcatggtggtgaaa

SEQ ID NO: 158081 - DNA, 33 bp, Homo sapien
ttgactgtaggtgataaacatatacacaaaata

SEQ ID NO: 158082 - DNA, 33 bp, Homo sapien
ttgactgtaggtgatacacatatacacaaaata

SEQ ID NO: 158083 - DNA, 33 bp, Homo sapien
tacataaaacattccaatcacttgtttattact

SEQ ID NO: 158084 - DNA, 33 bp, Homo sapien
tacataaaacattccagtcacttgtttattact

SEQ ID NO: 158085 - DNA, 33 bp, Homo sapien
tatcctagttatagaacataggctctgtttgaa

SEQ ID NO: 158086 - DNA, 33 bp, Homo sapien
tatcctagttatagaagataggctctgtttgaa

SEQ ID NO: 158087 - DNA, 33 bp, Homo sapien
ttaggacaccataataacctgtttgaaaaccac

SEQ ID NO: 158088 - DNA, 33 bp, Homo sapien
ttaggacaccataatatcctgtttgaaaaccac

SEQ ID NO: 158089 - DNA, 33 bp, Homo sapien
aagagataattcgtccacaataatatgaagtaa

SEQ ID NO: 158090 - DNA, 33 bp, Homo sapien
aagagataattcgtccgcaataatatgaagtaa

SEQ ID NO: 158091 - DNA, 33 bp, Homo sapien
ctgttctgttaatgaagtaggacccctagtctt

SEQ ID NO: 158092 - DNA, 33 bp, Homo sapien
ctgttctgttaatgaattaggacccctagtctt

SEQ ID NO: 158093 - DNA, 33 bp, Homo sapien
cactttgtttgctataaaaaatgttcttggaaa

SEQ ID NO: 158094 - DNA, 33 bp, Homo sapien
cactttgtttgctatataaaatgttcttggaaa

SEQ ID NO: 158095 - DNA, 33 bp, Homo sapien
acagtcagaaagactccagtaattcaatgggaa

SEQ ID NO: 158096 - DNA, 33 bp, Homo sapien
acagtcagaaagactctagtaattcaatgggaa

SEQ ID NO: 158097 - DNA, 33 bp, Homo sapien
taaaattaggaggatacactgagtgtctaaggt

SEQ ID NO: 158098 - DNA, 33 bp, Homo sapien
taaaattaggaggatatactgagtgtctaaggt

SEQ ID NO: 158099 - DNA, 33 bp, Homo sapien
gtcttgaggatgaaacaaaataatgtgtgtgaa

SEQ ID NO: 158100 - DNA, 33 bp, Homo sapien
gtcttgaggatgaaacgaaataatgtgtgtgaa

SEQ ID NO: 158101 - DNA, 33 bp, Homo sapien
acaagctcttactgggcagatagccaacgtaat

SEQ ID NO: 158102 - DNA, 33 bp, Homo sapien
acaagctcttactggggagatagccaacgtaat

SEQ ID NO: 158103 - DNA, 33 bp, Homo sapien
aggaagttggatgtcacagactttttcttaatt

SEQ ID NO: 158104 - DNA, 33 bp, Homo sapien
aggaagttggatgtcatagactttttcttaatt

SEQ ID NO: 158105 - DNA, 33 bp, Homo sapien
tgtttccctgacataccaaccatctattgagca

SEQ ID NO: 158106 - DNA, 33 bp, Homo sapien
tgtttccctgacatactaaccatctattgagca

SEQ ID NO: 158107 - DNA, 33 bp, Homo sapien
aaagaaaaccttgaaaaagtatgcgatgcttac

SEQ ID NO: 158108 - DNA, 33 bp, Homo sapien
aaagaaaaccttgaaagagtatgcgatgcttac

SEQ ID NO: 158109 - DNA, 33 bp, Homo sapien
acatgaacaatgaacaatgaaagaagtgtggtc

SEQ ID NO: 158110 - DNA, 33 bp, Homo sapien
acatgaacaatgaacagtgaaagaagtgtggtc

SEQ ID NO: 158111 - DNA, 33 bp, Homo sapien
atgttttagttattgcagaatacagtagcaatc

SEQ ID NO: 158112 - DNA, 33 bp, Homo sapien
atgttttagttattgcggaatacagtagcaatc

SEQ ID NO: 158113 - DNA, 33 bp, Homo sapien
tatgaacactcaagcacaaatctttgtgtaaat

SEQ ID NO: 158114 - DNA, 33 bp, Homo sapien
tatgaacactcaagcagaaatctttgtgtaaat

SEQ ID NO: 158115 - DNA, 33 bp, Homo sapien
tattttagtggctatgcagttgtatgccattgt

SEQ ID NO: 158116 - DNA, 33 bp, Homo sapien
tattttagtggctatgtagttgtatgccattgt

SEQ ID NO: 158117 - DNA, 33 bp, Homo sapien
gagtaaaaatagcccaatcaaaaatggaaaaaa

SEQ ID NO: 158118 - DNA, 33 bp, Homo sapien
gagtaaaaatagcccagtcaaaaatggaaaaaa

SEQ ID NO: 158119 - DNA, 33 bp, Homo sapien
tgcaaactactttttacgcaccttctgcagcct

SEQ ID NO: 158120 - DNA, 33 bp, Homo sapien
tgcaaactactttttatgcaccttctgcagcct

SEQ ID NO: 158121 - DNA, 33 bp, Homo sapien
tgcttttctaaacctcaaaacacttcaccatat

SEQ ID NO: 158122 - DNA, 33 bp, Homo sapien
tgcttttctaaacctctaaacacttcaccatat

SEQ ID NO: 158123 - DNA, 33 bp, Homo sapien
gccatagcctgcttgccaatgattatttatggg

SEQ ID NO: 158124 - DNA, 33 bp, Homo sapien
gccatagcctgcttgcgaatgattatttatggg

SEQ ID NO: 158125 - DNA, 33 bp, Homo sapien
gacaacattatagaagccactcagctgcttctg

SEQ ID NO: 158126 - DNA, 33 bp, Homo sapien
gacaacattatagaagtcactcagctgcttctg

SEQ ID NO: 158127 - DNA, 33 bp, Homo sapien
ggctgctctgctcttacaggccagcgttaggtt

SEQ ID NO: 158128 - DNA, 33 bp, Homo sapien
ggctgctctgctcttataggccagcgttaggtt

SEQ ID NO: 158129 - DNA, 33 bp, Homo sapien
tttctgctcaatactcaatttccaggaatcact

SEQ ID NO: 158130 - DNA, 33 bp, Homo sapien
tttctgctcaatactccatttccaggaatcact

SEQ ID NO: 158131 - DNA, 33 bp, Homo sapien
ctagttctccttccacaaacggacacatttaat

SEQ ID NO: 158132 - DNA, 33 bp, Homo sapien
ctagttctccttccactaacggacacatttaat

SEQ ID NO: 158133 - DNA, 33 bp, Homo sapien
tgtgatcataagcagagtacttaaactcactca

SEQ ID NO: 158134 - DNA, 33 bp, Homo sapien
tgtgatcataagcagattacttaaactcactca

SEQ ID NO: 158135 - DNA, 33 bp, Homo sapien
gaaaccttaaacacaacgtgaatacaaataaag

SEQ ID NO: 158136 - DNA, 33 bp, Homo sapien
gaaaccttaaacacaatgtgaatacaaataaag

SEQ ID NO: 158137 - DNA, 33 bp, Homo sapien
atgtttttcttgtagacagactattcagtagct

SEQ ID NO: 158138 - DNA, 33 bp, Homo sapien
atgtttttcttgtagatagactattcagtagct

SEQ ID NO: 158139 - DNA, 33 bp, Homo sapien
gaaaaggtaggaaaatcaaacataaccagaggg

SEQ ID NO: 158140 - DNA, 33 bp, Homo sapien
gaaaaggtaggaaaatgaaacataaccagaggg

SEQ ID NO: 158141 - DNA, 33 bp, Homo sapien
gaagggagaaaagacacagaatatttgagtcat

SEQ ID NO: 158142 - DNA, 33 bp, Homo sapien
gaagggagaaaagacatagaatatttgagtcat

SEQ ID NO: 158143 - DNA, 33 bp, Homo sapien
tttatttgattctatgcatgatggttctgtttg

SEQ ID NO: 158144 - DNA, 33 bp, Homo sapien
tttatttgattctatgtatgatggttctgtttg

SEQ ID NO: 158145 - DNA, 33 bp, Homo sapien
ggtcttggcttaaatgacactgcttcagagagc

SEQ ID NO: 158146 - DNA, 33 bp, Homo sapien
ggtcttggcttaaatgtcactgcttcagagagc

SEQ ID NO: 158147 - DNA, 33 bp, Homo sapien
ctctcaaaatcaattcccattttcaatattcct

SEQ ID NO: 158148 - DNA, 33 bp, Homo sapien
ctctcaaaatcaattctcattttcaatattcct

SEQ ID NO: 158149 - DNA, 33 bp, Homo sapien
gtctttttagacataacgctattgtacacttaa

SEQ ID NO: 158150 - DNA, 33 bp, Homo sapien
gtctttttagacataatgctattgtacacttaa

SEQ ID NO: 158151 - DNA, 33 bp, Homo sapien
tactgcaataaaatgaatatcacaacaaggcaa

SEQ ID NO: 158152 - DNA, 33 bp, Homo sapien
tactgcaataaaatgagtatcacaacaaggcaa

SEQ ID NO: 158153 - DNA, 33 bp, Homo sapien
agaagaggttgtttccaagaagttgtttggagg

SEQ ID NO: 158154 - DNA, 33 bp, Homo sapien
agaagaggttgtttccgagaagttgtttggagg

SEQ ID NO: 158155 - DNA, 33 bp, Homo sapien
tgtaaatcagattgaactaagataagcaataca

SEQ ID NO: 158156 - DNA, 33 bp, Homo sapien
tgtaaatcagattgaattaagataagcaataca

SEQ ID NO: 158157 - DNA, 33 bp, Homo sapien
tggcctgcgcttcaggaactttaactctagtaa

SEQ ID NO: 158158 - DNA, 33 bp, Homo sapien
tggcctgcgcttcaggcactttaactctagtaa

SEQ ID NO: 158159 - DNA, 33 bp, Homo sapien
aaacacacacataaaccgatgaaatagaataga

SEQ ID NO: 158160 - DNA, 33 bp, Homo sapien
aaacacacacataaactgatgaaatagaataga

SEQ ID NO: 158161 - DNA, 33 bp, Homo sapien
ggctgaaggtgcctggaaagttcaaataagatg

SEQ ID NO: 158162 - DNA, 33 bp, Homo sapien
ggctgaaggtgcctgggaagttcaaataagatg

SEQ ID NO: 158163 - DNA, 33 bp, Homo sapien
ctcatttaacataggcactttggatggaactgc

SEQ ID NO: 158164 - DNA, 33 bp, Homo sapien
ctcatttaacataggcgctttggatggaactgc

SEQ ID NO: 158165 - DNA, 33 bp, Homo sapien
aatagcttcttacatacctttccaaaaaatgca

SEQ ID NO: 158166 - DNA, 33 bp, Homo sapien
aatagcttcttacatatctttccaaaaaatgca

SEQ ID NO: 158167 - DNA, 33 bp, Homo sapien
ctttctctggatacaaagaattataaaaccaac

SEQ ID NO: 158168 - DNA, 33 bp, Homo sapien
ctttctctggatacaaggaattataaaaccaac

SEQ ID NO: 158169 - DNA, 33 bp, Homo sapien
atgagagacttcacaacgcagagggaagtagat

SEQ ID NO: 158170 - DNA, 33 bp, Homo sapien
atgagagacttcacaatgcagagggaagtagat

SEQ ID NO: 158171 - DNA, 33 bp, Homo sapien
tccttctgcttttggaaggtctaacctattgag

SEQ ID NO: 158172 - DNA, 33 bp, Homo sapien
tccttctgcttttggatggtctaacctattgag

SEQ ID NO: 158173 - DNA, 33 bp, Homo sapien
ttttcctgatcaactaaacaagatgaagtctga

SEQ ID NO: 158174 - DNA, 33 bp, Homo sapien
ttttcctgatcaactagacaagatgaagtctga

SEQ ID NO: 158175 - DNA, 33 bp, Homo sapien
attgtatttgtgtaataaaaaaaaagcaggaaa

SEQ ID NO: 158176 - DNA, 33 bp, Homo sapien
attgtatttgtgtaattaaaaaaaagcaggaaa

SEQ ID NO: 158177 - DNA, 33 bp, Homo sapien
tatgatcactttggtcccagtcatcatatctct

SEQ ID NO: 158178 - DNA, 33 bp, Homo sapien
tatgatcactttggtctcagtcatcatatctct

SEQ ID NO: 158179 - DNA, 33 bp, Homo sapien
taaattatcagtgaaaccatgacaccttagaga

SEQ ID NO: 158180 - DNA, 33 bp, Homo sapien
taaattatcagtgaaatcatgacaccttagaga

SEQ ID NO: 158181 - DNA, 33 bp, Homo sapien
aatgattcaagcacagaaaagaattggtgagct

SEQ ID NO: 158182 - DNA, 33 bp, Homo sapien
aatgattcaagcacaggaaagaattggtgagct

SEQ ID NO: 158183 - DNA, 33 bp, Homo sapien
aacttctgccatcaacacttctctgaaataagt

SEQ ID NO: 158184 - DNA, 33 bp, Homo sapien
aacttctgccatcaacgcttctctgaaataagt

SEQ ID NO: 158185 - DNA, 33 bp, Homo sapien
actcatatcatgtaaccgctctgtcccagtttc

SEQ ID NO: 158186 - DNA, 33 bp, Homo sapien
actcatatcatgtaactgctctgtcccagtttc

SEQ ID NO: 158187 - DNA, 33 bp, Homo sapien
atcaattatcatcttacgtattttgagcaattt

SEQ ID NO: 158188 - DNA, 33 bp, Homo sapien
atcaattatcatcttatgtattttgagcaattt

SEQ ID NO: 158189 - DNA, 33 bp, Homo sapien
aaagcacagtaaatacaaatatatgcctttgga

SEQ ID NO: 158190 - DNA, 33 bp, Homo sapien
aaagcacagtaaatacgaatatatgcctttgga

SEQ ID NO: 158191 - DNA, 33 bp, Homo sapien
attccatgaggtgcgcaaaggccctacttccgc

SEQ ID NO: 158192 - DNA, 33 bp, Homo sapien
attccatgaggtgcgcgaaggccctacttccgc

SEQ ID NO: 158193 - DNA, 33 bp, Homo sapien
aatatcataggatgcaagactgaaaacctaatc

SEQ ID NO: 158194 - DNA, 33 bp, Homo sapien
aatatcataggatgcacgactgaaaacctaatc

SEQ ID NO: 158195 - DNA, 33 bp, Homo sapien
ctggcaaattgtgttacgtataagcatatgttt

SEQ ID NO: 158196 - DNA, 33 bp, Homo sapien
ctggcaaattgtgttaggtataagcatatgttt

SEQ ID NO: 158197 - DNA, 33 bp, Homo sapien
cacccatgttggagagaaccaccagagccacca

SEQ ID NO: 158198 - DNA, 33 bp, Homo sapien
cacccatgttggagaggaccaccagagccacca

SEQ ID NO: 158199 - DNA, 33 bp, Homo sapien
ttcgagtatggtgaaacacctggtcttatatta

SEQ ID NO: 158200 - DNA, 33 bp, Homo sapien
ttcgagtatggtgaaatacctggtcttatatta

SEQ ID NO: 158201 - DNA, 33 bp, Homo sapien
cttgcaataggcaagaagtaatgtttatatgat

SEQ ID NO: 158202 - DNA, 33 bp, Homo sapien
cttgcaataggcaagaggtaatgtttatatgat

SEQ ID NO: 158203 - DNA, 33 bp, Homo sapien
ccatgcccggacagaacatagcacttttgtatg

SEQ ID NO: 158204 - DNA, 33 bp, Homo sapien
ccatgcccggacagaatatagcacttttgtatg

SEQ ID NO: 158205 - DNA, 33 bp, Homo sapien
tgcttcaggtttcccaaatgcaaatgtcaaata

SEQ ID NO: 158206 - DNA, 33 bp, Homo sapien
tgcttcaggtttcccagatgcaaatgtcaaata

SEQ ID NO: 158207 - DNA, 33 bp, Homo sapien
actgtggcctgtgtacaatgtcaaaagagtagg

SEQ ID NO: 158208 - DNA, 33 bp, Homo sapien
actgtggcctgtgtacgatgtcaaaagagtagg

SEQ ID NO: 158209 - DNA, 33 bp, Homo sapien
atgttcacaagttgacacctttcagagcagtta

SEQ ID NO: 158210 - DNA, 33 bp, Homo sapien
atgttcacaagttgacgcctttcagagcagtta

SEQ ID NO: 158211 - DNA, 33 bp, Homo sapien
tgtgcagctcagttcaaaaatgaaagtagcatg

SEQ ID NO: 158212 - DNA, 33 bp, Homo sapien
tgtgcagctcagttcagaaatgaaagtagcatg

SEQ ID NO: 158213 - DNA, 33 bp, Homo sapien
taaaatccgactggaaaaacagatgaaccattt

SEQ ID NO: 158214 - DNA, 33 bp, Homo sapien
taaaatccgactggaacaacagatgaaccattt

SEQ ID NO: 158215 - DNA, 33 bp, Homo sapien
cctttacctggaatataaaaactaagcacttta

SEQ ID NO: 158216 - DNA, 33 bp, Homo sapien
cctttacctggaatatgaaaactaagcacttta

SEQ ID NO: 158217 - DNA, 33 bp, Homo sapien
aaataaaagcttatgaaaaatgatggtattaaa

SEQ ID NO: 158218 - DNA, 33 bp, Homo sapien
aaataaaagcttatgagaaatgatggtattaaa

SEQ ID NO: 158219 - DNA, 33 bp, Homo sapien
aagtatatttatgaacaatagtagccatgaaga

SEQ ID NO: 158220 - DNA, 33 bp, Homo sapien
aagtatatttatgaactatagtagccatgaaga

SEQ ID NO: 158221 - DNA, 33 bp, Homo sapien
aaatatacttctgttaaactcaagatttttcag

SEQ ID NO: 158222 - DNA, 33 bp, Homo sapien
aaatatacttctgttacactcaagatttttcag

SEQ ID NO: 158223 - DNA, 33 bp, Homo sapien
agaattttccactgaacagctgtgatatatgga

SEQ ID NO: 158224 - DNA, 33 bp, Homo sapien
agaattttccactgaatagctgtgatatatgga

SEQ ID NO: 158225 - DNA, 33 bp, Homo sapien
aataaaatgaaagaaccatagtgtccctatgga

SEQ ID NO: 158226 - DNA, 33 bp, Homo sapien
aataaaatgaaagaactatagtgtccctatgga

SEQ ID NO: 158227 - DNA, 33 bp, Homo sapien
ggcatctctacacttccagtatccttttccctt

SEQ ID NO: 158228 - DNA, 33 bp, Homo sapien
ggcatctctacacttctagtatccttttccctt

SEQ ID NO: 158229 - DNA, 33 bp, Homo sapien
gtatgcaaacagtgaaattcaactgctgtgtat

SEQ ID NO: 158230 - DNA, 33 bp, Homo sapien
gtatgcaaacagtgaatttcaactgctgtgtat

SEQ ID NO: 158231 - DNA, 33 bp, Homo sapien
ggattggaaaggagaaatgaaggtggaaataac

SEQ ID NO: 158232 - DNA, 33 bp, Homo sapien
ggattggaaaggagaagtgaaggtggaaataac

SEQ ID NO: 158233 - DNA, 33 bp, Homo sapien
atgtgtatgcatattaagttggagaaatttgag

SEQ ID NO: 158234 - DNA, 33 bp, Homo sapien
atgtgtatgcatattaggttggagaaatttgag

SEQ ID NO: 158235 - DNA, 33 bp, Homo sapien
gtcaactctcctcaggacattctttgtaaatgt

SEQ ID NO: 158236 - DNA, 33 bp, Homo sapien
gtcaactctcctcagggcattctttgtaaatgt

SEQ ID NO: 158237 - DNA, 33 bp, Homo sapien
tgaggtacatgatctacgtggcaaaaaggaaca

SEQ ID NO: 158238 - DNA, 33 bp, Homo sapien
tgaggtacatgatctatgtggcaaaaaggaaca

SEQ ID NO: 158239 - DNA, 33 bp, Homo sapien
aaaatacatcaagagagctggtagaatgacata

SEQ ID NO: 158240 - DNA, 33 bp, Homo sapien
aaaatacatcaagagatctggtagaatgacata

SEQ ID NO: 158241 - DNA, 33 bp, Homo sapien
ttggctgtttggaagggaatttgtatacttgtt

SEQ ID NO: 158242 - DNA, 33 bp, Homo sapien
ttggctgtttggaaggtaatttgtatacttgtt

SEQ ID NO: 158243 - DNA, 33 bp, Homo sapien
tctcttgtcacttatacgtcaacatggtttgaa

SEQ ID NO: 158244 - DNA, 33 bp, Homo sapien
tctcttgtcacttatatgtcaacatggtttgaa

SEQ ID NO: 158245 - DNA, 33 bp, Homo sapien
ctgacatataaacctacggcttttggcacttat

SEQ ID NO: 158246 - DNA, 33 bp, Homo sapien
ctgacatataaacctatggcttttggcacttat

SEQ ID NO: 158247 - DNA, 33 bp, Homo sapien
tagtcctccaaaagtaagaacccagctgattat

SEQ ID NO: 158248 - DNA, 33 bp, Homo sapien
tagtcctccaaaagtaggaacccagctgattat

SEQ ID NO: 158249 - DNA, 33 bp, Homo sapien
ttgtcaaggattttaaagtccacatttgtgaat

SEQ ID NO: 158250 - DNA, 33 bp, Homo sapien
ttgtcaaggattttaatgtccacatttgtgaat

SEQ ID NO: 158251 - DNA, 33 bp, Homo sapien
aaggtaaacagtctcagtagccttaagtgaccc

SEQ ID NO: 158252 - DNA, 33 bp, Homo sapien
aaggtaaacagtctcattagccttaagtgaccc

SEQ ID NO: 158253 - DNA, 33 bp, Homo sapien
ttgggcaacgctaaagaccaccttaggttaagt

SEQ ID NO: 158254 - DNA, 33 bp, Homo sapien
ttgggcaacgctaaagcccaccttaggttaagt

SEQ ID NO: 158255 - DNA, 33 bp, Homo sapien
ttgttgaaaggctttcaataggaatcaaaggat

SEQ ID NO: 158256 - DNA, 33 bp, Homo sapien
ttgttgaaaggctttccataggaatcaaaggat

SEQ ID NO: 158257 - DNA, 33 bp, Homo sapien
tctaattttgagttaacctctctaattgtgagc

SEQ ID NO: 158258 - DNA, 33 bp, Homo sapien
tctaattttgagttaatctctctaattgtgagc

SEQ ID NO: 158259 - DNA, 33 bp, Homo sapien
gtttttgccatggaaacgaatggtaggcatgga

SEQ ID NO: 158260 - DNA, 33 bp, Homo sapien
gtttttgccatggaaatgaatggtaggcatgga

SEQ ID NO: 158261 - DNA, 33 bp, Homo sapien
tctcaattctacaagaaaaacatatcagactcc

SEQ ID NO: 158262 - DNA, 33 bp, Homo sapien
tctcaattctacaagagaaacatatcagactcc

SEQ ID NO: 158263 - DNA, 33 bp, Homo sapien
caaatgacttatcttcaaacatgatctctttct

SEQ ID NO: 158264 - DNA, 33 bp, Homo sapien
caaatgacttatcttcgaacatgatctctttct

SEQ ID NO: 158265 - DNA, 33 bp, Homo sapien
gtggttttgttatctacgctctcagtgttattt

SEQ ID NO: 158266 - DNA, 33 bp, Homo sapien
gtggttttgttatctatgctctcagtgttattt

SEQ ID NO: 158267 - DNA, 33 bp, Homo sapien
ctttacatgcttggaacaatttatgaatctgag

SEQ ID NO: 158268 - DNA, 33 bp, Homo sapien
ctttacatgcttggaataatttatgaatctgag

SEQ ID NO: 158269 - DNA, 33 bp, Homo sapien
ttctttcttactatgccagagttatcatgtatg

SEQ ID NO: 158270 - DNA, 33 bp, Homo sapien
ttctttcttactatgctagagttatcatgtatg

SEQ ID NO: 158271 - DNA, 33 bp, Homo sapien
caattactcctcatcaatatgaaatcaatattc

SEQ ID NO: 158272 - DNA, 33 bp, Homo sapien
caattactcctcatcagtatgaaatcaatattc

SEQ ID NO: 158273 - DNA, 33 bp, Homo sapien
aaacatacataaatacactattgcctttcactg

SEQ ID NO: 158274 - DNA, 33 bp, Homo sapien
aaacatacataaataccctattgcctttcactg

SEQ ID NO: 158275 - DNA, 33 bp, Homo sapien
gagacactgccttatacggacaccttaagaatg

SEQ ID NO: 158276 - DNA, 33 bp, Homo sapien
gagacactgccttatatggacaccttaagaatg

SEQ ID NO: 158277 - DNA, 33 bp, Homo sapien
cctttaaaacatcttacgtgagacactgcctta

SEQ ID NO: 158278 - DNA, 33 bp, Homo sapien
cctttaaaacatcttatgtgagacactgcctta

SEQ ID NO: 158279 - DNA, 33 bp, Homo sapien
ccctccgcctcacaatcacacaaaatcaatcaa

SEQ ID NO: 158280 - DNA, 33 bp, Homo sapien
ccctccgcctcacaatgacacaaaatcaatcaa

SEQ ID NO: 158281 - DNA, 33 bp, Homo sapien
accctgagatgttgtaggagatagtcaccttgg

SEQ ID NO: 158282 - DNA, 33 bp, Homo sapien
accctgagatgttgtatgagatagtcaccttgg

SEQ ID NO: 158283 - DNA, 33 bp, Homo sapien
gacattggtagcttgacaggaacagcagtgaat

SEQ ID NO: 158284 - DNA, 33 bp, Homo sapien
gacattggtagcttgataggaacagcagtgaat

SEQ ID NO: 158285 - DNA, 33 bp, Homo sapien
ttccagggaatcatgccctatttctaccagcag

SEQ ID NO: 158286 - DNA, 33 bp, Homo sapien
ttccagggaatcatgctctatttctaccagcag

SEQ ID NO: 158287 - DNA, 33 bp, Homo sapien
cagaaagtaaaaggaaagattgatagcggagtg

SEQ ID NO: 158288 - DNA, 33 bp, Homo sapien
cagaaagtaaaaggaatgattgatagcggagtg

SEQ ID NO: 158289 - DNA, 33 bp, Homo sapien
aggtttacttcatataaggttgtcaaaaacaaa

SEQ ID NO: 158290 - DNA, 33 bp, Homo sapien
aggtttacttcatatagggttgtcaaaaacaaa

SEQ ID NO: 158291 - DNA, 33 bp, Homo sapien
attactccagtccttccctcctacacactgaga

SEQ ID NO: 158292 - DNA, 33 bp, Homo sapien
attactccagtccttctctcctacacactgaga

SEQ ID NO: 158293 - DNA, 33 bp, Homo sapien
taggtgctgggatacaacagtgtaaaaacatag

SEQ ID NO: 158294 - DNA, 33 bp, Homo sapien
taggtgctgggatacagcagtgtaaaaacatag

SEQ ID NO: 158295 - DNA, 33 bp, Homo sapien
atcattgaataagcatgaaatcgattgtgattt

SEQ ID NO: 158296 - DNA, 33 bp, Homo sapien
atcattgaataagcattaaatcgattgtgattt

SEQ ID NO: 158297 - DNA, 33 bp, Homo sapien
catgaatcatcctctactaccttttaacttttc

SEQ ID NO: 158298 - DNA, 33 bp, Homo sapien
catgaatcatcctctagtaccttttaacttttc

SEQ ID NO: 158299 - DNA, 33 bp, Homo sapien
catcttccttcatgaccaacattttcatgtctg

SEQ ID NO: 158300 - DNA, 33 bp, Homo sapien
catcttccttcatgacgaacattttcatgtctg

SEQ ID NO: 158301 - DNA, 33 bp, Homo sapien
cagaatggcagacagaaagaggactggagggtg

SEQ ID NO: 158302 - DNA, 33 bp, Homo sapien
cagaatggcagacagagagaggactggagggtg

SEQ ID NO: 158303 - DNA, 33 bp, Homo sapien
gaggactggagggtgactattgtggttttcctg

SEQ ID NO: 158304 - DNA, 33 bp, Homo sapien
gaggactggagggtgagtattgtggttttcctg

SEQ ID NO: 158305 - DNA, 33 bp, Homo sapien
ttggagtgctttcctcaattaatccctaccctt

SEQ ID NO: 158306 - DNA, 33 bp, Homo sapien
ttggagtgctttcctcgattaatccctaccctt

SEQ ID NO: 158307 - DNA, 33 bp, Homo sapien
acatattggagcctgcgcttcctggtttctcat

SEQ ID NO: 158308 - DNA, 33 bp, Homo sapien
acatattggagcctgctcttcctggtttctcat

SEQ ID NO: 158309 - DNA, 33 bp, Homo sapien
gaaataaaatcatctacacaaatactgtggaag

SEQ ID NO: 158310 - DNA, 33 bp, Homo sapien
gaaataaaatcatctagacaaatactgtggaag

SEQ ID NO: 158311 - DNA, 33 bp, Homo sapien
taaaacaccatgtcagaatgaaaaggttgggaa

SEQ ID NO: 158312 - DNA, 33 bp, Homo sapien
taaaacaccatgtcaggatgaaaaggttgggaa

SEQ ID NO: 158313 - DNA, 33 bp, Homo sapien
actagaggaatgcctaagtaactttgcaatatt

SEQ ID NO: 158314 - DNA, 33 bp, Homo sapien
actagaggaatgcctaggtaactttgcaatatt

SEQ ID NO: 158315 - DNA, 33 bp, Homo sapien
caagggaagagcatgaaaccttaaagctagaaa

SEQ ID NO: 158316 - DNA, 33 bp, Homo sapien
caagggaagagcatgataccttaaagctagaaa

SEQ ID NO: 158317 - DNA, 33 bp, Homo sapien
ggcaacatagcagaaccgacttcatattgaatc

SEQ ID NO: 158318 - DNA, 33 bp, Homo sapien
ggcaacatagcagaactgacttcatattgaatc

SEQ ID NO: 158319 - DNA, 33 bp, Homo sapien
acccttagtcattccacgtatgcatttcagaag

SEQ ID NO: 158320 - DNA, 33 bp, Homo sapien
acccttagtcattccatgtatgcatttcagaag

SEQ ID NO: 158321 - DNA, 33 bp, Homo sapien
tttgtctctcatttgacctttgtttgtgaaaat

SEQ ID NO: 158322 - DNA, 33 bp, Homo sapien
tttgtctctcatttgagctttgtttgtgaaaat

SEQ ID NO: 158323 - DNA, 33 bp, Homo sapien
aaaattactgaatgaacgagttgagagggtgtg

SEQ ID NO: 158324 - DNA, 33 bp, Homo sapien
aaaattactgaatgaatgagttgagagggtgtg

SEQ ID NO: 158325 - DNA, 33 bp, Homo sapien
ttatttttgaccaccaatgctatgtatgtaatc

SEQ ID NO: 158326 - DNA, 33 bp, Homo sapien
ttatttttgaccaccagtgctatgtatgtaatc

SEQ ID NO: 158327 - DNA, 33 bp, Homo sapien
tatgcaaataacttgccaaatgaattatgtaag

SEQ ID NO: 158328 - DNA, 33 bp, Homo sapien
tatgcaaataacttgctaaatgaattatgtaag

SEQ ID NO: 158329 - DNA, 33 bp, Homo sapien
tgcagaatccaaagcactgacataggaagtcgc

SEQ ID NO: 158330 - DNA, 33 bp, Homo sapien
tgcagaatccaaagcagtgacataggaagtcgc

SEQ ID NO: 158331 - DNA, 33 bp, Homo sapien
tcaatattctcagcaacaaatgccagtgctcaa

SEQ ID NO: 158332 - DNA, 33 bp, Homo sapien
tcaatattctcagcaagaaatgccagtgctcaa

SEQ ID NO: 158333 - DNA, 33 bp, Homo sapien
ctaaaatcccagagaaaagtagagtacacagag

SEQ ID NO: 158334 - DNA, 33 bp, Homo sapien
ctaaaatcccagagaagagtagagtacacagag

SEQ ID NO: 158335 - DNA, 33 bp, Homo sapien
gcccctgtcaacctgaataacaatggagaaaat

SEQ ID NO: 158336 - DNA, 33 bp, Homo sapien
gcccctgtcaacctgagtaacaatggagaaaat

SEQ ID NO: 158337 - DNA, 33 bp, Homo sapien
gctaaatgaaagaaaacgaagaagttgttgcca

SEQ ID NO: 158338 - DNA, 33 bp, Homo sapien
gctaaatgaaagaaaatgaagaagttgttgcca

SEQ ID NO: 158339 - DNA, 33 bp, Homo sapien
tgggttgtttcagaagacaaaatcagacccgtt

SEQ ID NO: 158340 - DNA, 33 bp, Homo sapien
tgggttgtttcagaaggcaaaatcagacccgtt

SEQ ID NO: 158341 - DNA, 33 bp, Homo sapien
tgttttagagggcaaagatgatttgagaggcag

SEQ ID NO: 158342 - DNA, 33 bp, Homo sapien
tgttttagagggcaaatatgatttgagaggcag

SEQ ID NO: 158343 - DNA, 33 bp, Homo sapien
ggtctggttcagatgcacaatttgtggttctaa

SEQ ID NO: 158344 - DNA, 33 bp, Homo sapien
ggtctggttcagatgcccaatttgtggttctaa

SEQ ID NO: 158345 - DNA, 33 bp, Homo sapien
ccttctatttctgtgaactttgtgacaagctca

SEQ ID NO: 158346 - DNA, 33 bp, Homo sapien
ccttctatttctgtgatctttgtgacaagctca

SEQ ID NO: 158347 - DNA, 33 bp, Homo sapien
aggttaaaaaatactcaagatctctggacttga

SEQ ID NO: 158348 - DNA, 33 bp, Homo sapien
aggttaaaaaatactcgagatctctggacttga

SEQ ID NO: 158349 - DNA, 33 bp, Homo sapien
agataaacagcaaagcaaattgttataagtatg

SEQ ID NO: 158350 - DNA, 33 bp, Homo sapien
agataaacagcaaagccaattgttataagtatg

SEQ ID NO: 158351 - DNA, 33 bp, Homo sapien
gaacttacagaaggaaacaagctgtaaggaagc

SEQ ID NO: 158352 - DNA, 33 bp, Homo sapien
gaacttacagaaggaaccaagctgtaaggaagc

SEQ ID NO: 158353 - DNA, 33 bp, Homo sapien
ttgctgacataaagaaatgctgatcttcaaaac

SEQ ID NO: 158354 - DNA, 33 bp, Homo sapien
ttgctgacataaagaactgctgatcttcaaaac

SEQ ID NO: 158355 - DNA, 33 bp, Homo sapien
tttctacctttatatgaagcaagtttaaaaagt

SEQ ID NO: 158356 - DNA, 33 bp, Homo sapien
tttctacctttatatgcagcaagtttaaaaagt

SEQ ID NO: 158357 - DNA, 33 bp, Homo sapien
ctgccaaagcaaggaacggagaaatagctcatt

SEQ ID NO: 158358 - DNA, 33 bp, Homo sapien
ctgccaaagcaaggaatggagaaatagctcatt

SEQ ID NO: 158359 - DNA, 33 bp, Homo sapien
cgaggaagtcattctgccaaccatcgtcttcat

SEQ ID NO: 158360 - DNA, 33 bp, Homo sapien
cgaggaagtcattctgtcaaccatcgtcttcat

SEQ ID NO: 158361 - DNA, 33 bp, Homo sapien
ttctctgggacaaaaaataagagagaagaggat

SEQ ID NO: 158362 - DNA, 33 bp, Homo sapien
ttctctgggacaaaaagtaagagagaagaggat

SEQ ID NO: 158363 - DNA, 33 bp, Homo sapien
agagcttgagaaggagacatttgtgactgagct

SEQ ID NO: 158364 - DNA, 33 bp, Homo sapien
agagcttgagaaggaggcatttgtgactgagct

SEQ ID NO: 158365 - DNA, 33 bp, Homo sapien
tgtttgtggaggatagaatttgtagctgttatc

SEQ ID NO: 158366 - DNA, 33 bp, Homo sapien
tgtttgtggaggataggatttgtagctgttatc

SEQ ID NO: 158367 - DNA, 33 bp, Homo sapien
aaatggactaataccaatactaactttcctttt

SEQ ID NO: 158368 - DNA, 33 bp, Homo sapien
aaatggactaataccagtactaactttcctttt

SEQ ID NO: 158369 - DNA, 33 bp, Homo sapien
tattttcttgagctataaaatgcctacaaaacc

SEQ ID NO: 158370 - DNA, 33 bp, Homo sapien
tattttcttgagctattaaatgcctacaaaacc

SEQ ID NO: 158371 - DNA, 33 bp, Homo sapien
cttccctccttataaaaatccagccactttgcc

SEQ ID NO: 158372 - DNA, 33 bp, Homo sapien
cttccctccttataaagatccagccactttgcc

SEQ ID NO: 158373 - DNA, 33 bp, Homo sapien
atggtcagctgaccaacgaggcatgagctgtat

SEQ ID NO: 158374 - DNA, 33 bp, Homo sapien
atggtcagctgaccaatgaggcatgagctgtat

SEQ ID NO: 158375 - DNA, 33 bp, Homo sapien
ggcaaataggtataaactgcacgacaggcaagc

SEQ ID NO: 158376 - DNA, 33 bp, Homo sapien
ggcaaataggtataaagtgcacgacaggcaagc

SEQ ID NO: 158377 - DNA, 33 bp, Homo sapien
tccatctcactcacacactttcaacctccaaga

SEQ ID NO: 158378 - DNA, 33 bp, Homo sapien
tccatctcactcacacgctttcaacctccaaga

SEQ ID NO: 158379 - DNA, 33 bp, Homo sapien
acagagtaacctggtcactgtggtatctgtagg

SEQ ID NO: 158380 - DNA, 33 bp, Homo sapien
acagagtaacctggtcgctgtggtatctgtagg

SEQ ID NO: 158381 - DNA, 33 bp, Homo sapien
taggctgccaaaacacaactgtctaaaattttc

SEQ ID NO: 158382 - DNA, 33 bp, Homo sapien
taggctgccaaaacacgactgtctaaaattttc

SEQ ID NO: 158383 - DNA, 33 bp, Homo sapien
atggtgccttccctaccgaggttaatgatgagg

SEQ ID NO: 158384 - DNA, 33 bp, Homo sapien
atggtgccttccctactgaggttaatgatgagg

SEQ ID NO: 158385 - DNA, 33 bp, Homo sapien
gttctccatgcctgtgaagcaacctggaaggaa

SEQ ID NO: 158386 - DNA, 33 bp, Homo sapien
gttctccatgcctgtggagcaacctggaaggaa

SEQ ID NO: 158387 - DNA, 33 bp, Homo sapien
catagaagaactataccctggaagaaacgattt

SEQ ID NO: 158388 - DNA, 33 bp, Homo sapien
catagaagaactatactctggaagaaacgattt

SEQ ID NO: 158389 - DNA, 33 bp, Homo sapien
ttagtgtgctagctctcaaagatgccttctttt

SEQ ID NO: 158390 - DNA, 33 bp, Homo sapien
ttagtgtgctagctctgaaagatgccttctttt

SEQ ID NO: 158391 - DNA, 33 bp, Homo sapien
gagaaggcagaaaagaagacgaagaaagaagca

SEQ ID NO: 158392 - DNA, 33 bp, Homo sapien
gagaaggcagaaaagacgacgaagaaagaagca

SEQ ID NO: 158393 - DNA, 33 bp, Homo sapien
gggaggagacatccccaataatctgttggaatg

SEQ ID NO: 158394 - DNA, 33 bp, Homo sapien
gggaggagacatccccgataatctgttggaatg

SEQ ID NO: 158395 - DNA, 33 bp, Homo sapien
tgctaccaatcctagacagccctgtggatgaga

SEQ ID NO: 158396 - DNA, 33 bp, Homo sapien
tgctaccaatcctagagagccctgtggatgaga

SEQ ID NO: 158397 - DNA, 33 bp, Homo sapien
ttggtgttgcttttaccggacacatcctcccaa

SEQ ID NO: 158398 - DNA, 33 bp, Homo sapien
ttggtgttgcttttactggacacatcctcccaa

SEQ ID NO: 158399 - DNA, 33 bp, Homo sapien
aaagaacgtgtgtaggaaatgtaggttgtaatt

SEQ ID NO: 158400 - DNA, 33 bp, Homo sapien
aaagaacgtgtgtagggaatgtaggttgtaatt

SEQ ID NO: 158401 - DNA, 33 bp, Homo sapien
aatgaaataatattgcaaaagtggtatttaatc

SEQ ID NO: 158402 - DNA, 33 bp, Homo sapien
aatgaaataatattgcgaaagtggtatttaatc

SEQ ID NO: 158403 - DNA, 33 bp, Homo sapien
caacagagtgaaaagacaggctatagaatggaa

SEQ ID NO: 158404 - DNA, 33 bp, Homo sapien
caacagagtgaaaagagaggctatagaatggaa

SEQ ID NO: 158405 - DNA, 33 bp, Homo sapien
gaactagtctctgtccacagggtaattctgtgt

SEQ ID NO: 158406 - DNA, 33 bp, Homo sapien
gaactagtctctgtccgcagggtaattctgtgt

SEQ ID NO: 158407 - DNA, 33 bp, Homo sapien
ctgtgagaccttaagaatcaagcctgtgcagac

SEQ ID NO: 158408 - DNA, 33 bp, Homo sapien
ctgtgagaccttaagagtcaagcctgtgcagac

SEQ ID NO: 158409 - DNA, 33 bp, Homo sapien
ataaagtctcatgtagaaaaattgtatcagtac

SEQ ID NO: 158410 - DNA, 33 bp, Homo sapien
ataaagtctcatgtaggaaaattgtatcagtac

SEQ ID NO: 158411 - DNA, 33 bp, Homo sapien
cttaataaaaagcctacaagaactatactatat

SEQ ID NO: 158412 - DNA, 33 bp, Homo sapien
cttaataaaaagcctagaagaactatactatat

SEQ ID NO: 158413 - DNA, 33 bp, Homo sapien
gatgtggaggacaacaatgagggatgatcttcc

SEQ ID NO: 158414 - DNA, 33 bp, Homo sapien
gatgtggaggacaacattgagggatgatcttcc

SEQ ID NO: 158415 - DNA, 33 bp, Homo sapien
tagagagaacatatacagaaggcaaactgactg

SEQ ID NO: 158416 - DNA, 33 bp, Homo sapien
tagagagaacatatacggaaggcaaactgactg

SEQ ID NO: 158417 - DNA, 33 bp, Homo sapien
taagaagatcacactccgaataggcacttcatg

SEQ ID NO: 158418 - DNA, 33 bp, Homo sapien
taagaagatcacactctgaataggcacttcatg

SEQ ID NO: 158419 - DNA, 33 bp, Homo sapien
actgatgtattaaatacgcactgattaggatcc

SEQ ID NO: 158420 - DNA, 33 bp, Homo sapien
actgatgtattaaatatgcactgattaggatcc

SEQ ID NO: 158421 - DNA, 33 bp, Homo sapien
gagagaggagtaatgcccaaggaggatatcaca

SEQ ID NO: 158422 - DNA, 33 bp, Homo sapien
gagagaggagtaatgctcaaggaggatatcaca

SEQ ID NO: 158423 - DNA, 33 bp, Homo sapien
caaatgatcaaaaagacggaatgggatgtaaac

SEQ ID NO: 158424 - DNA, 33 bp, Homo sapien
caaatgatcaaaaagagggaatgggatgtaaac

SEQ ID NO: 158425 - DNA, 33 bp, Homo sapien
agaaaaactgcctaaggataaaacgacaaataa

SEQ ID NO: 158426 - DNA, 33 bp, Homo sapien
agaaaaactgcctaagtataaaacgacaaataa

SEQ ID NO: 158427 - DNA, 33 bp, Homo sapien
gatgttgatgaaaacagagtggcattgctgaga

SEQ ID NO: 158428 - DNA, 33 bp, Homo sapien
gatgttgatgaaaacatagtggcattgctgaga

SEQ ID NO: 158429 - DNA, 33 bp, Homo sapien
aaacagtccgagtcccacaacagaagaacttag

SEQ ID NO: 158430 - DNA, 33 bp, Homo sapien
aaacagtccgagtcccgcaacagaagaacttag

SEQ ID NO: 158431 - DNA, 33 bp, Homo sapien
tattctcttccatccaaaaaagtaaaatgaaaa

SEQ ID NO: 158432 - DNA, 33 bp, Homo sapien
tattctcttccatccagaaaagtaaaatgaaaa

SEQ ID NO: 158433 - DNA, 33 bp, Homo sapien
tgcacaggcaagcacgaaaacatacatatgcac

SEQ ID NO: 158434 - DNA, 33 bp, Homo sapien
tgcacaggcaagcacgcaaacatacatatgcac

SEQ ID NO: 158435 - DNA, 33 bp, Homo sapien
ttataattccttcatacagaacgctcattttgt

SEQ ID NO: 158436 - DNA, 33 bp, Homo sapien
ttataattccttcatagagaacgctcattttgt

SEQ ID NO: 158437 - DNA, 33 bp, Homo sapien
atagaccttttttgtacgtaagcaaactcaaca

SEQ ID NO: 158438 - DNA, 33 bp, Homo sapien
atagaccttttttgtatgtaagcaaactcaaca

SEQ ID NO: 158439 - DNA, 33 bp, Homo sapien
aaggttgaaacaaacactgcttgttcgcaaagg

SEQ ID NO: 158440 - DNA, 33 bp, Homo sapien
aaggttgaaacaaacattgcttgttcgcaaagg

SEQ ID NO: 158441 - DNA, 33 bp, Homo sapien
gactatgagagaaacaaggtcatagattggttg

SEQ ID NO: 158442 - DNA, 33 bp, Homo sapien
gactatgagagaaacagggtcatagattggttg

SEQ ID NO: 158443 - DNA, 33 bp, Homo sapien
atatctttaggagtaacagtaagaagagtcact

SEQ ID NO: 158444 - DNA, 33 bp, Homo sapien
atatctttaggagtaatagtaagaagagtcact

SEQ ID NO: 158445 - DNA, 33 bp, Homo sapien
ggaaaagaatgtgaataaataatctgatgacaa

SEQ ID NO: 158446 - DNA, 33 bp, Homo sapien
ggaaaagaatgtgaatgaataatctgatgacaa

SEQ ID NO: 158447 - DNA, 33 bp, Homo sapien
aataaaacttggtacaataattcctttgatgta

SEQ ID NO: 158448 - DNA, 33 bp, Homo sapien
aataaaacttggtacagtaattcctttgatgta

SEQ ID NO: 158449 - DNA, 33 bp, Homo sapien
ggatagctgaaagaacactccaggggggccgtt

SEQ ID NO: 158450 - DNA, 33 bp, Homo sapien
ggatagctgaaagaacgctccaggggggccgtt

SEQ ID NO: 158451 - DNA, 33 bp, Homo sapien
cagactgggcatatacactgtcctccagactgg

SEQ ID NO: 158452 - DNA, 33 bp, Homo sapien
cagactgggcatatactctgtcctccagactgg

SEQ ID NO: 158453 - DNA, 33 bp, Homo sapien
tgcagctctgacactgcattgcactaatcctga

SEQ ID NO: 158454 - DNA, 33 bp, Homo sapien
tgcagctctgacactgtattgcactaatcctga

SEQ ID NO: 158455 - DNA, 33 bp, Homo sapien
aaataagataagaaacactaaacaaacataact

SEQ ID NO: 158456 - DNA, 33 bp, Homo sapien
aaataagataagaaacgctaaacaaacataact

SEQ ID NO: 158457 - DNA, 33 bp, Homo sapien
gcacagtcttgggtgcactacgggcccacacca

SEQ ID NO: 158458 - DNA, 33 bp, Homo sapien
gcacagtcttgggtgcgctacgggcccacacca

SEQ ID NO: 158459 - DNA, 33 bp, Homo sapien
cataatgcaaaagcacactaaatagttaaaaga

SEQ ID NO: 158460 - DNA, 33 bp, Homo sapien
cataatgcaaaagcacgctaaatagttaaaaga

SEQ ID NO: 158461 - DNA, 33 bp, Homo sapien
tgcaacttgtattcctaaaatgaacatctccaa

SEQ ID NO: 158462 - DNA, 33 bp, Homo sapien
tgcaacttgtattcctgaaatgaacatctccaa

SEQ ID NO: 158463 - DNA, 33 bp, Homo sapien
tcagatgtgtttgataaagtttcctgcctccag

SEQ ID NO: 158464 - DNA, 33 bp, Homo sapien
tcagatgtgtttgatacagtttcctgcctccag

SEQ ID NO: 158465 - DNA, 33 bp, Homo sapien
ccatttgatagtgataacttgctcagtcacttg

SEQ ID NO: 158466 - DNA, 33 bp, Homo sapien
ccatttgatagtgataccttgctcagtcacttg

SEQ ID NO: 158467 - DNA, 33 bp, Homo sapien
taaataaatatgataacaaggatatggtgaata

SEQ ID NO: 158468 - DNA, 33 bp, Homo sapien
taaataaatatgataagaaggatatggtgaata

SEQ ID NO: 158469 - DNA, 33 bp, Homo sapien
taaacaaatctacaaaccatctccttgaacttc

SEQ ID NO: 158470 - DNA, 33 bp, Homo sapien
taaacaaatctacaaagcatctccttgaacttc

SEQ ID NO: 158471 - DNA, 33 bp, Homo sapien
aacaaaaaggaaacaaatggaagagacaatgac

SEQ ID NO: 158472 - DNA, 33 bp, Homo sapien
aacaaaaaggaaacaagtggaagagacaatgac

SEQ ID NO: 158473 - DNA, 33 bp, Homo sapien
aggatgaagaacactaagtccaagtaaattagg

SEQ ID NO: 158474 - DNA, 33 bp, Homo sapien
aggatgaagaacactaggtccaagtaaattagg

SEQ ID NO: 158475 - DNA, 33 bp, Homo sapien
cacagctcaaaatggccaactttactagtccaa

SEQ ID NO: 158476 - DNA, 33 bp, Homo sapien
cacagctcaaaatggctaactttactagtccaa

SEQ ID NO: 158477 - DNA, 33 bp, Homo sapien
aggaaccccagcaacactaacagctgaattctt

SEQ ID NO: 158478 - DNA, 33 bp, Homo sapien
aggaaccccagcaacagtaacagctgaattctt

SEQ ID NO: 158479 - DNA, 33 bp, Homo sapien
aaacagcttggttttcaacaatgactgtatcta

SEQ ID NO: 158480 - DNA, 33 bp, Homo sapien
aaacagcttggttttcgacaatgactgtatcta

SEQ ID NO: 158481 - DNA, 33 bp, Homo sapien
ctcccggcattttaaaggataactgaaatgtaa

SEQ ID NO: 158482 - DNA, 33 bp, Homo sapien
ctcccggcattttaaatgataactgaaatgtaa

SEQ ID NO: 158483 - DNA, 33 bp, Homo sapien
cacatgagcaattaacagcttcttacagttgca

SEQ ID NO: 158484 - DNA, 33 bp, Homo sapien
cacatgagcaattaacggcttcttacagttgca

SEQ ID NO: 158485 - DNA, 33 bp, Homo sapien
ctaaattcaaggcttaggctgagtacctctcac

SEQ ID NO: 158486 - DNA, 33 bp, Homo sapien
ctaaattcaaggcttatgctgagtacctctcac

SEQ ID NO: 158487 - DNA, 33 bp, Homo sapien
tctctttcatagcttccaatacatagcttttgt

SEQ ID NO: 158488 - DNA, 33 bp, Homo sapien
tctctttcatagcttctaatacatagcttttgt

SEQ ID NO: 158489 - DNA, 33 bp, Homo sapien
gaagctatgaaagagactaataggaggtaaagg

SEQ ID NO: 158490 - DNA, 33 bp, Homo sapien
gaagctatgaaagagattaataggaggtaaagg

SEQ ID NO: 158491 - DNA, 33 bp, Homo sapien
aactcaatgtagatcccaagtccttgcaataga

SEQ ID NO: 158492 - DNA, 33 bp, Homo sapien
aactcaatgtagatcctaagtccttgcaataga

SEQ ID NO: 158493 - DNA, 33 bp, Homo sapien
tccacagtcaacacacagtccaaagtgaccatt

SEQ ID NO: 158494 - DNA, 33 bp, Homo sapien
tccacagtcaacacactgtccaaagtgaccatt

SEQ ID NO: 158495 - DNA, 33 bp, Homo sapien
ggttggtagccctgtaagtgctgataggtgttt

SEQ ID NO: 158496 - DNA, 33 bp, Homo sapien
ggttggtagccctgtaggtgctgataggtgttt

SEQ ID NO: 158497 - DNA, 33 bp, Homo sapien
aaagaagaaaaaaggcaagctacgtgcatttga

SEQ ID NO: 158498 - DNA, 33 bp, Homo sapien
aaagaagaaaaaaggcgagctacgtgcatttga

SEQ ID NO: 158499 - DNA, 33 bp, Homo sapien
ctccacaaacatcagactatttcatcaaaaaaa

SEQ ID NO: 158500 - DNA, 33 bp, Homo sapien
ctccacaaacatcagagtatttcatcaaaaaaa

SEQ ID NO: 158501 - DNA, 33 bp, Homo sapien
cataaatcttctttcacaatatggctgcactgg

SEQ ID NO: 158502 - DNA, 33 bp, Homo sapien
cataaatcttctttcataatatggctgcactgg

SEQ ID NO: 158503 - DNA, 33 bp, Homo sapien
cttagggctttcaaaactggaagaaaaatgacc

SEQ ID NO: 158504 - DNA, 33 bp, Homo sapien
cttagggctttcaaaattggaagaaaaatgacc

SEQ ID NO: 158505 - DNA, 33 bp, Homo sapien
gagatggtaaaactaccggagaaatgttctcaa

SEQ ID NO: 158506 - DNA, 33 bp, Homo sapien
gagatggtaaaactactggagaaatgttctcaa

SEQ ID NO: 158507 - DNA, 33 bp, Homo sapien
gtagtgaaactccatcgcttaaagttattttga

SEQ ID NO: 158508 - DNA, 33 bp, Homo sapien
gtagtgaaactccatctcttaaagttattttga

SEQ ID NO: 158509 - DNA, 33 bp, Homo sapien
ccttaagacttttggccgattaaatggtgctta

SEQ ID NO: 158510 - DNA, 33 bp, Homo sapien
ccttaagacttttggctgattaaatggtgctta

SEQ ID NO: 158511 - DNA, 33 bp, Homo sapien
tcagatcatcaagagacagagggtcacaggatc

SEQ ID NO: 158512 - DNA, 33 bp, Homo sapien
tcagatcatcaagagagagagggtcacaggatc

SEQ ID NO: 158513 - DNA, 33 bp, Homo sapien
ttaccaacatctctaacggttaacaacagtaat

SEQ ID NO: 158514 - DNA, 33 bp, Homo sapien
ttaccaacatctctaatggttaacaacagtaat

SEQ ID NO: 158515 - DNA, 33 bp, Homo sapien
ggctagttgaacattacgcttactatttgtttt

SEQ ID NO: 158516 - DNA, 33 bp, Homo sapien
ggctagttgaacattatgcttactatttgtttt

SEQ ID NO: 158517 - DNA, 33 bp, Homo sapien
ctcataacatttgccaactattgtgtctaaggg

SEQ ID NO: 158518 - DNA, 33 bp, Homo sapien
ctcataacatttgccatctattgtgtctaaggg

SEQ ID NO: 158519 - DNA, 33 bp, Homo sapien
atacactgttaaagtcaattaaacttcaatcac

SEQ ID NO: 158520 - DNA, 33 bp, Homo sapien
atacactgttaaagtcgattaaacttcaatcac

SEQ ID NO: 158521 - DNA, 33 bp, Homo sapien
tgccagtctggacaaaacgatcaagtagacagt

SEQ ID NO: 158522 - DNA, 33 bp, Homo sapien
tgccagtctggacaaagcgatcaagtagacagt

SEQ ID NO: 158523 - DNA, 33 bp, Homo sapien
ttctgaaaggcaggaaacatgatttattcattc

SEQ ID NO: 158524 - DNA, 33 bp, Homo sapien
ttctgaaaggcaggaagcatgatttattcattc

SEQ ID NO: 158525 - DNA, 33 bp, Homo sapien
aatcactaggtgagaaaggtgtaaagaggtgga

SEQ ID NO: 158526 - DNA, 33 bp, Homo sapien
aatcactaggtgagaatggtgtaaagaggtgga

SEQ ID NO: 158527 - DNA, 33 bp, Homo sapien
tagactcctttgctcacacgaattgactgtttg

SEQ ID NO: 158528 - DNA, 33 bp, Homo sapien
tagactcctttgctcatacgaattgactgtttg

SEQ ID NO: 158529 - DNA, 33 bp, Homo sapien
gagcattcccatttgtaaacacgagcacaggct

SEQ ID NO: 158530 - DNA, 33 bp, Homo sapien
gagcattcccatttgtgaacacgagcacaggct

SEQ ID NO: 158531 - DNA, 33 bp, Homo sapien
tccttttttaatttgcacagatatacttatgag

SEQ ID NO: 158532 - DNA, 33 bp, Homo sapien
tccttttttaatttgcgcagatatacttatgag

SEQ ID NO: 158533 - DNA, 33 bp, Homo sapien
tgattttgggtaattcccattgtgttccattaa

SEQ ID NO: 158534 - DNA, 33 bp, Homo sapien
tgattttgggtaattctcattgtgttccattaa

SEQ ID NO: 158535 - DNA, 33 bp, Homo sapien
gccaagcgaagtctatcaatttggggtcattct

SEQ ID NO: 158536 - DNA, 33 bp, Homo sapien
gccaagcgaagtctattaatttggggtcattct

SEQ ID NO: 158537 - DNA, 33 bp, Homo sapien
gcaagctcagtactgaaaaaaggaagaagaata

SEQ ID NO: 158538 - DNA, 33 bp, Homo sapien
gcaagctcagtactgataaaaggaagaagaata

SEQ ID NO: 158539 - DNA, 33 bp, Homo sapien
ttacgtgctacattcacgaccctggttcttgtc

SEQ ID NO: 158540 - DNA, 33 bp, Homo sapien
ttacgtgctacattcatgaccctggttcttgtc

SEQ ID NO: 158541 - DNA, 33 bp, Homo sapien
tcttcataatattggagtaaggagatagttcaa

SEQ ID NO: 158542 - DNA, 33 bp, Homo sapien
tcttcataatattggattaaggagatagttcaa

SEQ ID NO: 158543 - DNA, 33 bp, Homo sapien
tagattttgacctcaaaggactgtgccaaaaaa

SEQ ID NO: 158544 - DNA, 33 bp, Homo sapien
tagattttgacctcaagggactgtgccaaaaaa

SEQ ID NO: 158545 - DNA, 33 bp, Homo sapien
ctaacatataaggccccagttcccatgctttag

SEQ ID NO: 158546 - DNA, 33 bp, Homo sapien
ctaacatataaggccctagttcccatgctttag

SEQ ID NO: 158547 - DNA, 33 bp, Homo sapien
tatgaagtttagtacaaaaatattcaaattgct

SEQ ID NO: 158548 - DNA, 33 bp, Homo sapien
tatgaagtttagtacagaaatattcaaattgct

SEQ ID NO: 158549 - DNA, 33 bp, Homo sapien
atgtctgcttttggaccgggacaccctacatac

SEQ ID NO: 158550 - DNA, 33 bp, Homo sapien
atgtctgcttttggactgggacaccctacatac

SEQ ID NO: 158551 - DNA, 33 bp, Homo sapien
tcatttaaaaagcatcagatattcaatttcaaa

SEQ ID NO: 158552 - DNA, 33 bp, Homo sapien
tcatttaaaaagcatcggatattcaatttcaaa

SEQ ID NO: 158553 - DNA, 33 bp, Homo sapien
gaggatggtaagggaggctcaacatctagcaaa

SEQ ID NO: 158554 - DNA, 33 bp, Homo sapien
gaggatggtaagggagtctcaacatctagcaaa

SEQ ID NO: 158555 - DNA, 33 bp, Homo sapien
tggaatgagacttttaaaaatttgaatttacat

SEQ ID NO: 158556 - DNA, 33 bp, Homo sapien
tggaatgagacttttagaaatttgaatttacat

SEQ ID NO: 158557 - DNA, 33 bp, Homo sapien
agcttcgccaatgacaagagatgaaacaggatt

SEQ ID NO: 158558 - DNA, 33 bp, Homo sapien
agcttcgccaatgacatgagatgaaacaggatt

SEQ ID NO: 158559 - DNA, 33 bp, Homo sapien
attaaacactctcttcaactttatattctagat

SEQ ID NO: 158560 - DNA, 33 bp, Homo sapien
attaaacactctcttcgactttatattctagat

SEQ ID NO: 158561 - DNA, 33 bp, Homo sapien
aaccaagatttaaaagccttatgtgattaagtc

SEQ ID NO: 158562 - DNA, 33 bp, Homo sapien
aaccaagatttaaaaggcttatgtgattaagtc

SEQ ID NO: 158563 - DNA, 33 bp, Homo sapien
tggtttaaaagtcagacagagggatttcacaaa

SEQ ID NO: 158564 - DNA, 33 bp, Homo sapien
tggtttaaaagtcagagagagggatttcacaaa

SEQ ID NO: 158565 - DNA, 33 bp, Homo sapien
taaatatgggttgtcaatagcatatggacattg

SEQ ID NO: 158566 - DNA, 33 bp, Homo sapien
taaatatgggttgtcattagcatatggacattg

SEQ ID NO: 158567 - DNA, 33 bp, Homo sapien
atggaaaaattcctcaacatccaggtacagtcc

SEQ ID NO: 158568 - DNA, 33 bp, Homo sapien
atggaaaaattcctcagcatccaggtacagtcc

SEQ ID NO: 158569 - DNA, 33 bp, Homo sapien
atttgtgagtttggaaaaagaaactggaggcac

SEQ ID NO: 158570 - DNA, 33 bp, Homo sapien
atttgtgagtttggaagaagaaactggaggcac

SEQ ID NO: 158571 - DNA, 33 bp, Homo sapien
atttctggagtcagtccaaaggaaagatagagg

SEQ ID NO: 158572 - DNA, 33 bp, Homo sapien
atttctggagtcagtcgaaaggaaagatagagg

SEQ ID NO: 158573 - DNA, 33 bp, Homo sapien
tgggtagctagtcagacacgaacagggcaggag

SEQ ID NO: 158574 - DNA, 33 bp, Homo sapien
tgggtagctagtcagatacgaacagggcaggag

SEQ ID NO: 158575 - DNA, 33 bp, Homo sapien
gttcaaaaacagatcaatcatttaacaagaact

SEQ ID NO: 158576 - DNA, 33 bp, Homo sapien
gttcaaaaacagatcagtcatttaacaagaact

SEQ ID NO: 158577 - DNA, 33 bp, Homo sapien
aaagagacagactgtacgttggagcttcacctc

SEQ ID NO: 158578 - DNA, 33 bp, Homo sapien
aaagagacagactgtatgttggagcttcacctc

SEQ ID NO: 158579 - DNA, 33 bp, Homo sapien
atcagcttggatgacaccttgaattcagtcttg

SEQ ID NO: 158580 - DNA, 33 bp, Homo sapien
atcagcttggatgacatcttgaattcagtcttg

SEQ ID NO: 158581 - DNA, 33 bp, Homo sapien
gaaagaatttgtgaccactagaccacatgacct

SEQ ID NO: 158582 - DNA, 33 bp, Homo sapien
gaaagaatttgtgaccgctagaccacatgacct

SEQ ID NO: 158583 - DNA, 33 bp, Homo sapien
acattttgactataacagagcatggagaagatc

SEQ ID NO: 158584 - DNA, 33 bp, Homo sapien
acattttgactataacggagcatggagaagatc

SEQ ID NO: 158585 - DNA, 33 bp, Homo sapien
gcatcaaagtcaaccagaaatgacagattagaa

SEQ ID NO: 158586 - DNA, 33 bp, Homo sapien
gcatcaaagtcaaccataaatgacagattagaa

SEQ ID NO: 158587 - DNA, 33 bp, Homo sapien
aaggcatttaatactcaagcagttttcctacct

SEQ ID NO: 158588 - DNA, 33 bp, Homo sapien
aaggcatttaatactcgagcagttttcctacct

SEQ ID NO: 158589 - DNA, 33 bp, Homo sapien
attagattttattagcaaagattatgtaactaa

SEQ ID NO: 158590 - DNA, 33 bp, Homo sapien
attagattttattagcgaagattatgtaactaa

SEQ ID NO: 158591 - DNA, 33 bp, Homo sapien
gacgttttgataagaacattagtatgaatagaa

SEQ ID NO: 158592 - DNA, 33 bp, Homo sapien
gacgttttgataagaagattagtatgaatagaa

SEQ ID NO: 158593 - DNA, 33 bp, Homo sapien
acatttcagctatccaacattttggaagataag

SEQ ID NO: 158594 - DNA, 33 bp, Homo sapien
acatttcagctatccagcattttggaagataag

SEQ ID NO: 158595 - DNA, 33 bp, Homo sapien
ctactaaaattaaacactggggagactctccag

SEQ ID NO: 158596 - DNA, 33 bp, Homo sapien
ctactaaaattaaacattggggagactctccag

SEQ ID NO: 158597 - DNA, 33 bp, Homo sapien
gagtctcttctaaaaaagtttctgccacatctc

SEQ ID NO: 158598 - DNA, 33 bp, Homo sapien
gagtctcttctaaaaacgtttctgccacatctc

SEQ ID NO: 158599 - DNA, 33 bp, Homo sapien
gcaaatttattttactcagaagttgtctatgct

SEQ ID NO: 158600 - DNA, 33 bp, Homo sapien
gcaaatttattttactgagaagttgtctatgct

SEQ ID NO: 158601 - DNA, 33 bp, Homo sapien
ctaagacaccactccaagttatgggtaatagca

SEQ ID NO: 158602 - DNA, 33 bp, Homo sapien
ctaagacaccactccaggttatgggtaatagca

SEQ ID NO: 158603 - DNA, 33 bp, Homo sapien
tggcattccatggtaaaggtctatcccagcttg

SEQ ID NO: 158604 - DNA, 33 bp, Homo sapien
tggcattccatggtaagggtctatcccagcttg

SEQ ID NO: 158605 - DNA, 33 bp, Homo sapien
ctacccatctgttttcgcatgctatctacttca

SEQ ID NO: 158606 - DNA, 33 bp, Homo sapien
ctacccatctgttttctcatgctatctacttca

SEQ ID NO: 158607 - DNA, 33 bp, Homo sapien
ctgtagacttagtcaaacacaaacaataaaggc

SEQ ID NO: 158608 - DNA, 33 bp, Homo sapien
ctgtagacttagtcaaccacaaacaataaaggc

SEQ ID NO: 158609 - DNA, 33 bp, Homo sapien
ctggaaattgcaatggacaacttgattggaatg

SEQ ID NO: 158610 - DNA, 33 bp, Homo sapien
ctggaaattgcaatgggcaacttgattggaatg

SEQ ID NO: 158611 - DNA, 33 bp, Homo sapien
gtaaggtgtatgttcaatcatcaaagtagagct

SEQ ID NO: 158612 - DNA, 33 bp, Homo sapien
gtaaggtgtatgttcagtcatcaaagtagagct

SEQ ID NO: 158613 - DNA, 33 bp, Homo sapien
gtctgcttgtaacgaaataagatttttgaatct

SEQ ID NO: 158614 - DNA, 33 bp, Homo sapien
gtctgcttgtaacgaagtaagatttttgaatct

SEQ ID NO: 158615 - DNA, 33 bp, Homo sapien
gtcaaactcaggaaatcagaggatagaatggta

SEQ ID NO: 158616 - DNA, 33 bp, Homo sapien
gtcaaactcaggaaatgagaggatagaatggta

SEQ ID NO: 158617 - DNA, 33 bp, Homo sapien
ttctcactctgccaccactgtaatttatcactc

SEQ ID NO: 158618 - DNA, 33 bp, Homo sapien
ttctcactctgccaccgctgtaatttatcactc

SEQ ID NO: 158619 - DNA, 33 bp, Homo sapien
tctccattccttactccataatcaaagcataca

SEQ ID NO: 158620 - DNA, 33 bp, Homo sapien
tctccattccttactctataatcaaagcataca

SEQ ID NO: 158621 - DNA, 33 bp, Homo sapien
tttctaataggttatccaatttggtgtgtaaaa

SEQ ID NO: 158622 - DNA, 33 bp, Homo sapien
tttctaataggttatctaatttggtgtgtaaaa

SEQ ID NO: 158623 - DNA, 33 bp, Homo sapien
gccattgacgtaccccccggtcacgcctatttg

SEQ ID NO: 158624 - DNA, 33 bp, Homo sapien
gccattgacgtacccctcggtcacgcctatttg

SEQ ID NO: 158625 - DNA, 33 bp, Homo sapien
tacttagtgttgacaacatagatgtgtgactgg

SEQ ID NO: 158626 - DNA, 33 bp, Homo sapien
tacttagtgttgacaatatagatgtgtgactgg

SEQ ID NO: 158627 - DNA, 33 bp, Homo sapien
ttcctatttctctataacctcgcctgcatctat

SEQ ID NO: 158628 - DNA, 33 bp, Homo sapien
ttcctatttctctatagcctcgcctgcatctat

SEQ ID NO: 158629 - DNA, 33 bp, Homo sapien
attagtgacatttaaaaatgaagcagtgttaac

SEQ ID NO: 158630 - DNA, 33 bp, Homo sapien
attagtgacatttaaacatgaagcagtgttaac

SEQ ID NO: 158631 - DNA, 33 bp, Homo sapien
cttcctcctctgtccaatctatatttcaaacac

SEQ ID NO: 158632 - DNA, 33 bp, Homo sapien
cttcctcctctgtccattctatatttcaaacac

SEQ ID NO: 158633 - DNA, 33 bp, Homo sapien
atgtcttttgtgtccacatggtagctgagtcgt

SEQ ID NO: 158634 - DNA, 33 bp, Homo sapien
atgtcttttgtgtccagatggtagctgagtcgt

SEQ ID NO: 158635 - DNA, 33 bp, Homo sapien
attaaatggtacaaaaaggtgaatctagaatgt

SEQ ID NO: 158636 - DNA, 33 bp, Homo sapien
attaaatggtacaaaacggtgaatctagaatgt

SEQ ID NO: 158637 - DNA, 33 bp, Homo sapien
taaaaatgggattatcaaaggtcagcaaagggt

SEQ ID NO: 158638 - DNA, 33 bp, Homo sapien
taaaaatgggattatcgaaggtcagcaaagggt

SEQ ID NO: 158639 - DNA, 33 bp, Homo sapien
ctgctcagtttaaacactaaaagtgaacaagtt

SEQ ID NO: 158640 - DNA, 33 bp, Homo sapien
ctgctcagtttaaacattaaaagtgaacaagtt

SEQ ID NO: 158641 - DNA, 33 bp, Homo sapien
aactttactgtttggaagatgaaggaagaggcc

SEQ ID NO: 158642 - DNA, 33 bp, Homo sapien
aactttactgtttggacgatgaaggaagaggcc

SEQ ID NO: 158643 - DNA, 33 bp, Homo sapien
tattctgcccacaacaatattaccctattgtgc

SEQ ID NO: 158644 - DNA, 33 bp, Homo sapien
tattctgcccacaacagtattaccctattgtgc

SEQ ID NO: 158645 - DNA, 33 bp, Homo sapien
ttgggtttgtgatagacgtagatgtaacttacc

SEQ ID NO: 158646 - DNA, 33 bp, Homo sapien
ttgggtttgtgatagatgtagatgtaacttacc

SEQ ID NO: 158647 - DNA, 33 bp, Homo sapien
aagcagaagtgttgtgaaaacagataccacacc

SEQ ID NO: 158648 - DNA, 33 bp, Homo sapien
aagcagaagtgttgtggaaacagataccacacc

SEQ ID NO: 158649 - DNA, 33 bp, Homo sapien
cagccatttcattaaaaatccactgaagtttag

SEQ ID NO: 158650 - DNA, 33 bp, Homo sapien
cagccatttcattaaatatccactgaagtttag

SEQ ID NO: 158651 - DNA, 33 bp, Homo sapien
tctgtcatcaatttaacgggattcacaattcag

SEQ ID NO: 158652 - DNA, 33 bp, Homo sapien
tctgtcatcaatttaatgggattcacaattcag

SEQ ID NO: 158653 - DNA, 33 bp, Homo sapien
ctaaacactgaaatgacggagctagcttcttat

SEQ ID NO: 158654 - DNA, 33 bp, Homo sapien
ctaaacactgaaatgatggagctagcttcttat

SEQ ID NO: 158655 - DNA, 33 bp, Homo sapien
tttctcttccgaataagggggataatactattc

SEQ ID NO: 158656 - DNA, 33 bp, Homo sapien
tttctcttccgaataatggggataatactattc

SEQ ID NO: 158657 - DNA, 33 bp, Homo sapien
aagaaagactatgcaaaaccactgtaatagaga

SEQ ID NO: 158658 - DNA, 33 bp, Homo sapien
aagaaagactatgcaagaccactgtaatagaga

SEQ ID NO: 158659 - DNA, 33 bp, Homo sapien
accacagagagcagacgcaatttcctatattga

SEQ ID NO: 158660 - DNA, 33 bp, Homo sapien
accacagagagcagactcaatttcctatattga

SEQ ID NO: 158661 - DNA, 33 bp, Homo sapien
agatgaaagaggataaccatcattaagactgat

SEQ ID NO: 158662 - DNA, 33 bp, Homo sapien
agatgaaagaggataatcatcattaagactgat

SEQ ID NO: 158663 - DNA, 33 bp, Homo sapien
atctggtgaaatcattcaagtggaatttacata

SEQ ID NO: 158664 - DNA, 33 bp, Homo sapien
atctggtgaaatcatttaagtggaatttacata

SEQ ID NO: 158665 - DNA, 33 bp, Homo sapien
cagggtcagtggtctacctgattttgaaaagga

SEQ ID NO: 158666 - DNA, 33 bp, Homo sapien
cagggtcagtggtctagctgattttgaaaagga

SEQ ID NO: 158667 - DNA, 33 bp, Homo sapien
cagaggtttgcccctgaagattgttttcccaag

SEQ ID NO: 158668 - DNA, 33 bp, Homo sapien
cagaggtttgcccctggagattgttttcccaag

SEQ ID NO: 158669 - DNA, 33 bp, Homo sapien
gtgaaccctgaggctacggaagatctgataaaa

SEQ ID NO: 158670 - DNA, 33 bp, Homo sapien
gtgaaccctgaggctatggaagatctgataaaa

SEQ ID NO: 158671 - DNA, 33 bp, Homo sapien
ctgacatttaatgatcaacattccaattggcat

SEQ ID NO: 158672 - DNA, 33 bp, Homo sapien
ctgacatttaatgatcgacattccaattggcat

SEQ ID NO: 158673 - DNA, 33 bp, Homo sapien
cttcctgttcagcctacagaacgatgatccaat

SEQ ID NO: 158674 - DNA, 33 bp, Homo sapien
cttcctgttcagcctatagaacgatgatccaat

SEQ ID NO: 158675 - DNA, 33 bp, Homo sapien
acttgttgtgcagttgcaaaatctttgaatcca

SEQ ID NO: 158676 - DNA, 33 bp, Homo sapien
acttgttgtgcagttgtaaaatctttgaatcca

SEQ ID NO: 158677 - DNA, 33 bp, Homo sapien
tcttttagcagcacaacataaactgttctctga

SEQ ID NO: 158678 - DNA, 33 bp, Homo sapien
tcttttagcagcacaatataaactgttctctga

SEQ ID NO: 158679 - DNA, 33 bp, Homo sapien
ttgctgagatacttgccaaaattgataaaacgc

SEQ ID NO: 158680 - DNA, 33 bp, Homo sapien
ttgctgagatacttgcgaaaattgataaaacgc

SEQ ID NO: 158681 - DNA, 33 bp, Homo sapien
tggtaagagaaaatgaagaatgaaagagtagtc

SEQ ID NO: 158682 - DNA, 33 bp, Homo sapien
tggtaagagaaaatgaggaatgaaagagtagtc

SEQ ID NO: 158683 - DNA, 33 bp, Homo sapien
ttgtagatactcaaaaaaatgcttggaaaggga

SEQ ID NO: 158684 - DNA, 33 bp, Homo sapien
ttgtagatactcaaaagaatgcttggaaaggga

SEQ ID NO: 158685 - DNA, 33 bp, Homo sapien
caaggcaaactggatcacactgaagctcaagaa

SEQ ID NO: 158686 - DNA, 33 bp, Homo sapien
caaggcaaactggatcgcactgaagctcaagaa

SEQ ID NO: 158687 - DNA, 33 bp, Homo sapien
aaactgaactcctttcactatggtggattttta

SEQ ID NO: 158688 - DNA, 33 bp, Homo sapien
aaactgaactcctttccctatggtggattttta

SEQ ID NO: 158689 - DNA, 33 bp, Homo sapien
atatattgttgttatgaaggaattacataaggt

SEQ ID NO: 158690 - DNA, 33 bp, Homo sapien
atatattgttgttatggaggaattacataaggt

SEQ ID NO: 158691 - DNA, 33 bp, Homo sapien
gctggcccaagtttacccaaacaccaggagaga

SEQ ID NO: 158692 - DNA, 33 bp, Homo sapien
gctggcccaagtttacgcaaacaccaggagaga

SEQ ID NO: 158693 - DNA, 33 bp, Homo sapien
ggatctgagctcttaactggatcctatggcaca

SEQ ID NO: 158694 - DNA, 33 bp, Homo sapien
ggatctgagctcttaattggatcctatggcaca

SEQ ID NO: 158695 - DNA, 33 bp, Homo sapien
aagaacatctctataaacttagctcctagtatg

SEQ ID NO: 158696 - DNA, 33 bp, Homo sapien
aagaacatctctataatcttagctcctagtatg

SEQ ID NO: 158697 - DNA, 33 bp, Homo sapien
agagtgtaaacaaactcacaaagctcacagatg

SEQ ID NO: 158698 - DNA, 33 bp, Homo sapien
agagtgtaaacaaactgacaaagctcacagatg

SEQ ID NO: 158699 - DNA, 33 bp, Homo sapien
agaaagtgagcttgtacgtattttttctatcat

SEQ ID NO: 158700 - DNA, 33 bp, Homo sapien
agaaagtgagcttgtatgtattttttctatcat

SEQ ID NO: 158701 - DNA, 33 bp, Homo sapien
cactcaagctagatcacggtgttctcctataga

SEQ ID NO: 158702 - DNA, 33 bp, Homo sapien
cactcaagctagatcatggtgttctcctataga

SEQ ID NO: 158703 - DNA, 33 bp, Homo sapien
gcaagaatggttaaaactggaaggcaatcaaaa

SEQ ID NO: 158704 - DNA, 33 bp, Homo sapien
gcaagaatggttaaaagtggaaggcaatcaaaa

SEQ ID NO: 158705 - DNA, 33 bp, Homo sapien
gctgtgaccccactcaaatctcattttgaatta

SEQ ID NO: 158706 - DNA, 33 bp, Homo sapien
gctgtgaccccactcagatctcattttgaatta

SEQ ID NO: 158707 - DNA, 33 bp, Homo sapien
attctgcctgccacaccacttaaatgtctactg

SEQ ID NO: 158708 - DNA, 33 bp, Homo sapien
attctgcctgccacactacttaaatgtctactg

SEQ ID NO: 158709 - DNA, 33 bp, Homo sapien
cacagatgatacagcacaaaaatctggttcttc

SEQ ID NO: 158710 - DNA, 33 bp, Homo sapien
cacagatgatacagcataaaaatctggttcttc

SEQ ID NO: 158711 - DNA, 33 bp, Homo sapien
agagatgttggcaaaagaaattggaagtgaggt

SEQ ID NO: 158712 - DNA, 33 bp, Homo sapien
agagatgttggcaaaataaattggaagtgaggt

SEQ ID NO: 158713 - DNA, 33 bp, Homo sapien
acaattagatcgtggaaaccagttctagtaaac

SEQ ID NO: 158714 - DNA, 33 bp, Homo sapien
acaattagatcgtggataccagttctagtaaac

SEQ ID NO: 158715 - DNA, 33 bp, Homo sapien
tccaactgttaactaacgatcctctctccatac

SEQ ID NO: 158716 - DNA, 33 bp, Homo sapien
tccaactgttaactaatgatcctctctccatac

SEQ ID NO: 158717 - DNA, 33 bp, Homo sapien
catgttactatagagaggtataatacaccagca

SEQ ID NO: 158718 - DNA, 33 bp, Homo sapien
catgttactatagagatgtataatacaccagca

SEQ ID NO: 158719 - DNA, 33 bp, Homo sapien
gaaaatatatcctacagctcagaagcatacatt

SEQ ID NO: 158720 - DNA, 33 bp, Homo sapien
gaaaatatatcctacatctcagaagcatacatt

SEQ ID NO: 158721 - DNA, 33 bp, Homo sapien
ccatgaggagaatttacccaatgtatgcttctg

SEQ ID NO: 158722 - DNA, 33 bp, Homo sapien
ccatgaggagaatttagccaatgtatgcttctg

SEQ ID NO: 158723 - DNA, 33 bp, Homo sapien
tccttctctctcagcaagtctttcttccttgta

SEQ ID NO: 158724 - DNA, 33 bp, Homo sapien
tccttctctctcagcaggtctttcttccttgta

SEQ ID NO: 158725 - DNA, 33 bp, Homo sapien
ctgctgaggactcagccctaactatctacgtag

SEQ ID NO: 158726 - DNA, 33 bp, Homo sapien
ctgctgaggactcagcgctaactatctacgtag

SEQ ID NO: 158727 - DNA, 33 bp, Homo sapien
atcccaaaactcataaatggaaaaggggattga

SEQ ID NO: 158728 - DNA, 33 bp, Homo sapien
atcccaaaactcataattggaaaaggggattga

SEQ ID NO: 158729 - DNA, 33 bp, Homo sapien
tttgttccaggacttacggggaatcctttaatc

SEQ ID NO: 158730 - DNA, 33 bp, Homo sapien
tttgttccaggacttagggggaatcctttaatc

SEQ ID NO: 158731 - DNA, 33 bp, Homo sapien
gaggtaatctgttatagtagcaactggcaacta

SEQ ID NO: 158732 - DNA, 33 bp, Homo sapien
gaggtaatctgttatattagcaactggcaacta

SEQ ID NO: 158733 - DNA, 33 bp, Homo sapien
gaaatacaggtcaaaaatattctttgttcacag

SEQ ID NO: 158734 - DNA, 33 bp, Homo sapien
gaaatacaggtcaaaagtattctttgttcacag

SEQ ID NO: 158735 - DNA, 33 bp, Homo sapien
ccatccttcgaaaccaatacagcttctttctct

SEQ ID NO: 158736 - DNA, 33 bp, Homo sapien
ccatccttcgaaaccagtacagcttctttctct

SEQ ID NO: 158737 - DNA, 33 bp, Homo sapien
aggcataggaaagacaaatagcacgtattctta

SEQ ID NO: 158738 - DNA, 33 bp, Homo sapien
aggcataggaaagacagatagcacgtattctta

SEQ ID NO: 158739 - DNA, 33 bp, Homo sapien
tagtagtctttcaaggacaataaatattgccct

SEQ ID NO: 158740 - DNA, 33 bp, Homo sapien
tagtagtctttcaagggcaataaatattgccct

SEQ ID NO: 158741 - DNA, 33 bp, Homo sapien
atatgatgttctactgcatataaagtcaccttg

SEQ ID NO: 158742 - DNA, 33 bp, Homo sapien
atatgatgttctactgtatataaagtcaccttg

SEQ ID NO: 158743 - DNA, 33 bp, Homo sapien
taaagtcaccttgtcacgttatgcctgtccctt

SEQ ID NO: 158744 - DNA, 33 bp, Homo sapien
taaagtcaccttgtcatgttatgcctgtccctt

SEQ ID NO: 158745 - DNA, 33 bp, Homo sapien
attaagacattgataacgcctagtagaaagagc

SEQ ID NO: 158746 - DNA, 33 bp, Homo sapien
attaagacattgataatgcctagtagaaagagc

SEQ ID NO: 158747 - DNA, 33 bp, Homo sapien
tcacagctgtagtgacagattgaagaactgagt

SEQ ID NO: 158748 - DNA, 33 bp, Homo sapien
tcacagctgtagtgacggattgaagaactgagt

SEQ ID NO: 158749 - DNA, 33 bp, Homo sapien
ctgctgcttattggccaattttaatgacagagt

SEQ ID NO: 158750 - DNA, 33 bp, Homo sapien
ctgctgcttattggccgattttaatgacagagt

SEQ ID NO: 158751 - DNA, 33 bp, Homo sapien
tttgttattgtttggcacctgttaatattagct

SEQ ID NO: 158752 - DNA, 33 bp, Homo sapien
tttgttattgtttggcgcctgttaatattagct

SEQ ID NO: 158753 - DNA, 33 bp, Homo sapien
tcatttagctgaaaaaccataatgatagcattg

SEQ ID NO: 158754 - DNA, 33 bp, Homo sapien
tcatttagctgaaaaatcataatgatagcattg

SEQ ID NO: 158755 - DNA, 33 bp, Homo sapien
ggactctttgcaggaacaatttttgagactgat

SEQ ID NO: 158756 - DNA, 33 bp, Homo sapien
ggactctttgcaggaataatttttgagactgat

SEQ ID NO: 158757 - DNA, 33 bp, Homo sapien
ttttttccctggcaaaatatctgccactgctgt

SEQ ID NO: 158758 - DNA, 33 bp, Homo sapien
ttttttccctggcaaagtatctgccactgctgt

SEQ ID NO: 158759 - DNA, 33 bp, Homo sapien
tgttggaactcctcaaactgccattctgtacat

SEQ ID NO: 158760 - DNA, 33 bp, Homo sapien
tgttggaactcctcaatctgccattctgtacat

SEQ ID NO: 158761 - DNA, 33 bp, Homo sapien
agggaaaagctaaataacagtgcaatttaattt

SEQ ID NO: 158762 - DNA, 33 bp, Homo sapien
agggaaaagctaaataccagtgcaatttaattt

SEQ ID NO: 158763 - DNA, 33 bp, Homo sapien
ttatgtcatatatcttcaaaattttaatcaact

SEQ ID NO: 158764 - DNA, 33 bp, Homo sapien
ttatgtcatatatcttgaaaattttaatcaact

SEQ ID NO: 158765 - DNA, 33 bp, Homo sapien
tttcttttgctcaggacaattttggatattctg

SEQ ID NO: 158766 - DNA, 33 bp, Homo sapien
tttcttttgctcaggataattttggatattctg

SEQ ID NO: 158767 - DNA, 33 bp, Homo sapien
caggagctctttgccagaaactaaagataaaaa

SEQ ID NO: 158768 - DNA, 33 bp, Homo sapien
caggagctctttgccataaactaaagataaaaa

SEQ ID NO: 158769 - DNA, 33 bp, Homo sapien
atggcttgtgtacaaacgagacattatattgag

SEQ ID NO: 158770 - DNA, 33 bp, Homo sapien
atggcttgtgtacaaatgagacattatattgag

SEQ ID NO: 158771 - DNA, 33 bp, Homo sapien
gatactttgagaagtacaagttaaataggttgg

SEQ ID NO: 158772 - DNA, 33 bp, Homo sapien
gatactttgagaagtagaagttaaataggttgg

SEQ ID NO: 158773 - DNA, 33 bp, Homo sapien
agtagcctctggtgcccagcctacgtgttctgc

SEQ ID NO: 158774 - DNA, 33 bp, Homo sapien
agtagcctctggtgcctagcctacgtgttctgc

SEQ ID NO: 158775 - DNA, 33 bp, Homo sapien
gaaagctttaactcacgggaggatatacccaga

SEQ ID NO: 158776 - DNA, 33 bp, Homo sapien
gaaagctttaactcactggaggatatacccaga

SEQ ID NO: 158777 - DNA, 33 bp, Homo sapien
cttttaggagcataagcattagggtcatatcct

SEQ ID NO: 158778 - DNA, 33 bp, Homo sapien
cttttaggagcataaggattagggtcatatcct

SEQ ID NO: 158779 - DNA, 33 bp, Homo sapien
ggaaagcctgggtccacagccctgacttgggta

SEQ ID NO: 158780 - DNA, 33 bp, Homo sapien
ggaaagcctgggtccatagccctgacttgggta

SEQ ID NO: 158781 - DNA, 33 bp, Homo sapien
tcctcccaagatatcaatgaggggaaggatcaa

SEQ ID NO: 158782 - DNA, 33 bp, Homo sapien
tcctcccaagatatcagtgaggggaaggatcaa

SEQ ID NO: 158783 - DNA, 33 bp, Homo sapien
atgacaatgtttctccacaggacagaattatat

SEQ ID NO: 158784 - DNA, 33 bp, Homo sapien
atgacaatgtttctccgcaggacagaattatat

SEQ ID NO: 158785 - DNA, 33 bp, Homo sapien
agcatttgcatggaaaaagaagcagtcagcaga

SEQ ID NO: 158786 - DNA, 33 bp, Homo sapien
agcatttgcatggaaagagaagcagtcagcaga

SEQ ID NO: 158787 - DNA, 33 bp, Homo sapien
tgacagttgcttgtacactggtctcgatcaaaa

SEQ ID NO: 158788 - DNA, 33 bp, Homo sapien
tgacagttgcttgtaccctggtctcgatcaaaa

SEQ ID NO: 158789 - DNA, 33 bp, Homo sapien
ttctcaagatcaacttcaacatgacagttgctt

SEQ ID NO: 158790 - DNA, 33 bp, Homo sapien
ttctcaagatcaactttaacatgacagttgctt

SEQ ID NO: 158791 - DNA, 33 bp, Homo sapien
ttctagcaattgccacaccaaagctaaacaaat

SEQ ID NO: 158792 - DNA, 33 bp, Homo sapien
ttctagcaattgccacgccaaagctaaacaaat

SEQ ID NO: 158793 - DNA, 33 bp, Homo sapien
gggaaataatttatgactaagctctcaaaagca

SEQ ID NO: 158794 - DNA, 33 bp, Homo sapien
gggaaataatttatgattaagctctcaaaagca

SEQ ID NO: 158795 - DNA, 33 bp, Homo sapien
ggctccctatctttcaacacatacgaaattaac

SEQ ID NO: 158796 - DNA, 33 bp, Homo sapien
ggctccctatctttcaccacatacgaaattaac

SEQ ID NO: 158797 - DNA, 33 bp, Homo sapien
tgtgcctcattttccacatagcctaataatact

SEQ ID NO: 158798 - DNA, 33 bp, Homo sapien
tgtgcctcattttccatatagcctaataatact

SEQ ID NO: 158799 - DNA, 33 bp, Homo sapien
ttgtatgcaaatttagccaaaagcgttttcagt

SEQ ID NO: 158800 - DNA, 33 bp, Homo sapien
ttgtatgcaaatttagtcaaaagcgttttcagt

SEQ ID NO: 158801 - DNA, 33 bp, Homo sapien
ggaactaaccacaaaaaaaaatgaatatgagac

SEQ ID NO: 158802 - DNA, 33 bp, Homo sapien
ggaactaaccacaaaagaaaatgaatatgagac

SEQ ID NO: 158803 - DNA, 33 bp, Homo sapien
ttgaattacttcacccaataggaatatttatct

SEQ ID NO: 158804 - DNA, 33 bp, Homo sapien
ttgaattacttcaccctataggaatatttatct

SEQ ID NO: 158805 - DNA, 33 bp, Homo sapien
ttttaattgtgaggacaagaaatttaggagggc

SEQ ID NO: 158806 - DNA, 33 bp, Homo sapien
ttttaattgtgaggaccagaaatttaggagggc

SEQ ID NO: 158807 - DNA, 33 bp, Homo sapien
tgatctgatccacagcaaggacctcagatgaga

SEQ ID NO: 158808 - DNA, 33 bp, Homo sapien
tgatctgatccacagcgaggacctcagatgaga

SEQ ID NO: 158809 - DNA, 33 bp, Homo sapien
tgaaactatgctagacactcacattaagagact

SEQ ID NO: 158810 - DNA, 33 bp, Homo sapien
tgaaactatgctagacgctcacattaagagact

SEQ ID NO: 158811 - DNA, 33 bp, Homo sapien
ctctcttcagcctgataacttcccattagcttt

SEQ ID NO: 158812 - DNA, 33 bp, Homo sapien
ctctcttcagcctgatgacttcccattagcttt

SEQ ID NO: 158813 - DNA, 33 bp, Homo sapien
atatctggccagtccactgatttttgatcttac

SEQ ID NO: 158814 - DNA, 33 bp, Homo sapien
atatctggccagtccattgatttttgatcttac

SEQ ID NO: 158815 - DNA, 33 bp, Homo sapien
tagcaaacgtgttccacaatttcatcctactca

SEQ ID NO: 158816 - DNA, 33 bp, Homo sapien
tagcaaacgtgttccataatttcatcctactca

SEQ ID NO: 158817 - DNA, 33 bp, Homo sapien
acatgagaaatatttgaaaagactagttgttta

SEQ ID NO: 158818 - DNA, 33 bp, Homo sapien
acatgagaaatatttgtaaagactagttgttta

SEQ ID NO: 158819 - DNA, 33 bp, Homo sapien
atatagatttgatatgcaaaccctgatttgtta

SEQ ID NO: 158820 - DNA, 33 bp, Homo sapien
atatagatttgatatgtaaaccctgatttgtta

SEQ ID NO: 158821 - DNA, 33 bp, Homo sapien
ataaaagtatgcataaacaacaagcataagtat

SEQ ID NO: 158822 - DNA, 33 bp, Homo sapien
ataaaagtatgcataagcaacaagcataagtat

SEQ ID NO: 158823 - DNA, 33 bp, Homo sapien
tgactgctgctgtaacactgttcaaatatcaat

SEQ ID NO: 158824 - DNA, 33 bp, Homo sapien
tgactgctgctgtaacgctgttcaaatatcaat

SEQ ID NO: 158825 - DNA, 33 bp, Homo sapien
atctgcataattgtaaaaatacgaactgtcaag

SEQ ID NO: 158826 - DNA, 33 bp, Homo sapien
atctgcataattgtaacaatacgaactgtcaag

SEQ ID NO: 158827 - DNA, 33 bp, Homo sapien
tgttccagtaaattgacgtgggctttcacttgc

SEQ ID NO: 158828 - DNA, 33 bp, Homo sapien
tgttccagtaaattgatgtgggctttcacttgc

SEQ ID NO: 158829 - DNA, 33 bp, Homo sapien
gatgacagaaaactcacaaaagacaggtgtaat

SEQ ID NO: 158830 - DNA, 33 bp, Homo sapien
gatgacagaaaactcagaaaagacaggtgtaat

SEQ ID NO: 158831 - DNA, 33 bp, Homo sapien
tttaatacctgctatacgccagcctttaatcag

SEQ ID NO: 158832 - DNA, 33 bp, Homo sapien
tttaatacctgctatatgccagcctttaatcag

SEQ ID NO: 158833 - DNA, 33 bp, Homo sapien
ctctgaaagtggataaagatgatcctggattga

SEQ ID NO: 158834 - DNA, 33 bp, Homo sapien
ctctgaaagtggataaggatgatcctggattga

SEQ ID NO: 158835 - DNA, 33 bp, Homo sapien
catgtactagatagaactggggaccttgcttaa

SEQ ID NO: 158836 - DNA, 33 bp, Homo sapien
catgtactagatagaattggggaccttgcttaa

SEQ ID NO: 158837 - DNA, 33 bp, Homo sapien
ttcaatcaactctggaacaaaaatattcaagta

SEQ ID NO: 158838 - DNA, 33 bp, Homo sapien
ttcaatcaactctggatcaaaaatattcaagta

SEQ ID NO: 158839 - DNA, 33 bp, Homo sapien
attcagttttggataaatattgaattcactctt

SEQ ID NO: 158840 - DNA, 33 bp, Homo sapien
attcagttttggataagtattgaattcactctt

SEQ ID NO: 158841 - DNA, 33 bp, Homo sapien
aagttccaaaggttaacggttattgggagcttc

SEQ ID NO: 158842 - DNA, 33 bp, Homo sapien
aagttccaaaggttaatggttattgggagcttc

SEQ ID NO: 158843 - DNA, 33 bp, Homo sapien
aatgaaacaaaagtaaacatctcaaggctgaac

SEQ ID NO: 158844 - DNA, 33 bp, Homo sapien
aatgaaacaaaagtaagcatctcaaggctgaac

SEQ ID NO: 158845 - DNA, 33 bp, Homo sapien
actgatctttggcacactcaatggaaatataca

SEQ ID NO: 158846 - DNA, 33 bp, Homo sapien
actgatctttggcacagtcaatggaaatataca

SEQ ID NO: 158847 - DNA, 33 bp, Homo sapien
gacagtggctgcttgaacctgataaaatttgag

SEQ ID NO: 158848 - DNA, 33 bp, Homo sapien
gacagtggctgcttgaccctgataaaatttgag

SEQ ID NO: 158849 - DNA, 33 bp, Homo sapien
tgttcttcattaaaaacttctttcagctacttg

SEQ ID NO: 158850 - DNA, 33 bp, Homo sapien
tgttcttcattaaaaatttctttcagctacttg

SEQ ID NO: 158851 - DNA, 33 bp, Homo sapien
aacagaatagataatacagatggagacataaat

SEQ ID NO: 158852 - DNA, 33 bp, Homo sapien
aacagaatagataatagagatggagacataaat

SEQ ID NO: 158853 - DNA, 33 bp, Homo sapien
tcataggcagtatccaataagtggttatagcag

SEQ ID NO: 158854 - DNA, 33 bp, Homo sapien
tcataggcagtatccagtaagtggttatagcag

SEQ ID NO: 158855 - DNA, 33 bp, Homo sapien
gccataaggattgcaactcataagcaagtccta

SEQ ID NO: 158856 - DNA, 33 bp, Homo sapien
gccataaggattgcaagtcataagcaagtccta

SEQ ID NO: 158857 - DNA, 33 bp, Homo sapien
ctatgaagcagaactacggacactgaaaactca

SEQ ID NO: 158858 - DNA, 33 bp, Homo sapien
ctatgaagcagaactatggacactgaaaactca

SEQ ID NO: 158859 - DNA, 33 bp, Homo sapien
tgctgactgattgctagagtcaaggtgactttt

SEQ ID NO: 158860 - DNA, 33 bp, Homo sapien
tgctgactgattgctatagtcaaggtgactttt

SEQ ID NO: 158861 - DNA, 33 bp, Homo sapien
tcaacaagatgttgaaaatcattccttaactat

SEQ ID NO: 158862 - DNA, 33 bp, Homo sapien
tcaacaagatgttgaagatcattccttaactat

SEQ ID NO: 158863 - DNA, 33 bp, Homo sapien
ctttcctgaacaaaaacgtattaaaaacatatt

SEQ ID NO: 158864 - DNA, 33 bp, Homo sapien
ctttcctgaacaaaaatgtattaaaaacatatt

SEQ ID NO: 158865 - DNA, 33 bp, Homo sapien
attttgggaaaagataccaaatgatcacttttt

SEQ ID NO: 158866 - DNA, 33 bp, Homo sapien
attttgggaaaagatagcaaatgatcacttttt

SEQ ID NO: 158867 - DNA, 33 bp, Homo sapien
aaatacaatagtaacaacagatgctatgaatct

SEQ ID NO: 158868 - DNA, 33 bp, Homo sapien
aaatacaatagtaacagcagatgctatgaatct

SEQ ID NO: 158869 - DNA, 33 bp, Homo sapien
accttgcattgtgtaactgaagaacatatccaa

SEQ ID NO: 158870 - DNA, 33 bp, Homo sapien
accttgcattgtgtaattgaagaacatatccaa

SEQ ID NO: 158871 - DNA, 33 bp, Homo sapien
tgtgaggctacaataaataacttaaaaagagcc

SEQ ID NO: 158872 - DNA, 33 bp, Homo sapien
tgtgaggctacaataagtaacttaaaaagagcc

SEQ ID NO: 158873 - DNA, 33 bp, Homo sapien
ttttaccagctgatacaattcaaataataagaa

SEQ ID NO: 158874 - DNA, 33 bp, Homo sapien
ttttaccagctgataccattcaaataataagaa

SEQ ID NO: 158875 - DNA, 33 bp, Homo sapien
tacattcagaggtgtaaaatttatataacagaa

SEQ ID NO: 158876 - DNA, 33 bp, Homo sapien
tacattcagaggtgtacaatttatataacagaa

SEQ ID NO: 158877 - DNA, 33 bp, Homo sapien
gaaaatcaataccccaaagatatcacaacataa

SEQ ID NO: 158878 - DNA, 33 bp, Homo sapien
gaaaatcaataccccagagatatcacaacataa

SEQ ID NO: 158879 - DNA, 33 bp, Homo sapien
cttagcttctccatgccatttcttttgaacaaa

SEQ ID NO: 158880 - DNA, 33 bp, Homo sapien
cttagcttctccatgcgatttcttttgaacaaa

SEQ ID NO: 158881 - DNA, 33 bp, Homo sapien
ttctaaatgactacttaaaaaggcgagagtgat

SEQ ID NO: 158882 - DNA, 33 bp, Homo sapien
ttctaaatgactacttgaaaaggcgagagtgat

SEQ ID NO: 158883 - DNA, 33 bp, Homo sapien
ttgcggtgagtcgagacgattgcaccaccgaac

SEQ ID NO: 158884 - DNA, 33 bp, Homo sapien
ttgcggtgagtcgagatgattgcaccaccgaac

SEQ ID NO: 158885 - DNA, 33 bp, Homo sapien
aaatatgttcaaagaaagaagatttccagttga

SEQ ID NO: 158886 - DNA, 33 bp, Homo sapien
aaatatgttcaaagaacgaagatttccagttga

SEQ ID NO: 158887 - DNA, 33 bp, Homo sapien
gcactagctgaaaccacatggatttacaaccac

SEQ ID NO: 158888 - DNA, 33 bp, Homo sapien
gcactagctgaaaccagatggatttacaaccac

SEQ ID NO: 158889 - DNA, 33 bp, Homo sapien
atctataaggacattaagccagaaataatcttt

SEQ ID NO: 158890 - DNA, 33 bp, Homo sapien
atctataaggacattaggccagaaataatcttt

SEQ ID NO: 158891 - DNA, 33 bp, Homo sapien
cttttatttctaccacccttgtcctcataatgg

SEQ ID NO: 158892 - DNA, 33 bp, Homo sapien
cttttatttctaccacgcttgtcctcataatgg

SEQ ID NO: 158893 - DNA, 33 bp, Homo sapien
gtgttgatgaaaagcaaaatgagttgtctaagg

SEQ ID NO: 158894 - DNA, 33 bp, Homo sapien
gtgttgatgaaaagcataatgagttgtctaagg

SEQ ID NO: 158895 - DNA, 33 bp, Homo sapien
tctgtgtgttgtgttacgatggtcatctcacat

SEQ ID NO: 158896 - DNA, 33 bp, Homo sapien
tctgtgtgttgtgttatgatggtcatctcacat

SEQ ID NO: 158897 - DNA, 33 bp, Homo sapien
taaagtactcacgatacgtaattctctcaaaag

SEQ ID NO: 158898 - DNA, 33 bp, Homo sapien
taaagtactcacgataggtaattctctcaaaag

SEQ ID NO: 158899 - DNA, 33 bp, Homo sapien
tattttggtaggagaaagattaacaatgacttg

SEQ ID NO: 158900 - DNA, 33 bp, Homo sapien
tattttggtaggagaatgattaacaatgacttg

SEQ ID NO: 158901 - DNA, 33 bp, Homo sapien
tttcttgacacaatgaaggcccttagcaactaa

SEQ ID NO: 158902 - DNA, 33 bp, Homo sapien
tttcttgacacaatgacggcccttagcaactaa

SEQ ID NO: 158903 - DNA, 33 bp, Homo sapien
taatggtcagagagaaatcaattttgtgtgttt

SEQ ID NO: 158904 - DNA, 33 bp, Homo sapien
taatggtcagagagaattcaattttgtgtgttt

SEQ ID NO: 158905 - DNA, 33 bp, Homo sapien
gtaattattgagttgaacatttaagcatatcag

SEQ ID NO: 158906 - DNA, 33 bp, Homo sapien
gtaattattgagttgatcatttaagcatatcag

SEQ ID NO: 158907 - DNA, 33 bp, Homo sapien
aaggcagtacttattacagagaaagacagtttt

SEQ ID NO: 158908 - DNA, 33 bp, Homo sapien
aaggcagtacttattagagagaaagacagtttt

SEQ ID NO: 158909 - DNA, 33 bp, Homo sapien
tgcctaaacttcttgcaaaggaaataagctgaa

SEQ ID NO: 158910 - DNA, 33 bp, Homo sapien
tgcctaaacttcttgccaaggaaataagctgaa

SEQ ID NO: 158911 - DNA, 33 bp, Homo sapien
atagctcaagttctaaaagaaggtctaaaagac

SEQ ID NO: 158912 - DNA, 33 bp, Homo sapien
atagctcaagttctaagagaaggtctaaaagac

SEQ ID NO: 158913 - DNA, 33 bp, Homo sapien
aaaatctaattgtcaacccttgccttgcttata

SEQ ID NO: 158914 - DNA, 33 bp, Homo sapien
aaaatctaattgtcaatccttgccttgcttata

SEQ ID NO: 158915 - DNA, 33 bp, Homo sapien
catacctcttttgcccacagactctgcttaaca

SEQ ID NO: 158916 - DNA, 33 bp, Homo sapien
catacctcttttgcccgcagactctgcttaaca

SEQ ID NO: 158917 - DNA, 33 bp, Homo sapien
gctgaggtttcactgcaagtaaatatggccagg

SEQ ID NO: 158918 - DNA, 33 bp, Homo sapien
gctgaggtttcactgcgagtaaatatggccagg

SEQ ID NO: 158919 - DNA, 33 bp, Homo sapien
gaattgaataaaaagccccattctgttagaaat

SEQ ID NO: 158920 - DNA, 33 bp, Homo sapien
gaattgaataaaaagcgccattctgttagaaat

SEQ ID NO: 158921 - DNA, 33 bp, Homo sapien
ttattagacaaagtaaataggtgaaatcatgtc

SEQ ID NO: 158922 - DNA, 33 bp, Homo sapien
ttattagacaaagtaagtaggtgaaatcatgtc

SEQ ID NO: 158923 - DNA, 33 bp, Homo sapien
ttcacctgacaaaaagcattacatgaaaaatat

SEQ ID NO: 158924 - DNA, 33 bp, Homo sapien
ttcacctgacaaaaaggattacatgaaaaatat

SEQ ID NO: 158925 - DNA, 33 bp, Homo sapien
tctatgttaatgggccaaaaaaaactgcccata

SEQ ID NO: 158926 - DNA, 33 bp, Homo sapien
tctatgttaatgggccgaaaaaaactgcccata

SEQ ID NO: 158927 - DNA, 33 bp, Homo sapien
tagatcgatagagacacattttccatattcagt

SEQ ID NO: 158928 - DNA, 33 bp, Homo sapien
tagatcgatagagacatattttccatattcagt

SEQ ID NO: 158929 - DNA, 33 bp, Homo sapien
ggcattttagatacataaacactcataccattg

SEQ ID NO: 158930 - DNA, 33 bp, Homo sapien
ggcattttagatacatcaacactcataccattg

SEQ ID NO: 158931 - DNA, 33 bp, Homo sapien
gctattttcattgctaataacatcaggccttta

SEQ ID NO: 158932 - DNA, 33 bp, Homo sapien
gctattttcattgctagtaacatcaggccttta

SEQ ID NO: 158933 - DNA, 33 bp, Homo sapien
ctgatggcatctgaaaactttggacaaatacaa

SEQ ID NO: 158934 - DNA, 33 bp, Homo sapien
ctgatggcatctgaaagctttggacaaatacaa

SEQ ID NO: 158935 - DNA, 33 bp, Homo sapien
ggagatgacagtggaacactatttcaaggaagc

SEQ ID NO: 158936 - DNA, 33 bp, Homo sapien
ggagatgacagtggaatactatttcaaggaagc

SEQ ID NO: 158937 - DNA, 33 bp, Homo sapien
agttctaccatgaagacacaaactgtgaatact

SEQ ID NO: 158938 - DNA, 33 bp, Homo sapien
agttctaccatgaagatacaaactgtgaatact

SEQ ID NO: 158939 - DNA, 33 bp, Homo sapien
aaagtacactggaaatcacagtgcagcaccatc

SEQ ID NO: 158940 - DNA, 33 bp, Homo sapien
aaagtacactggaaattacagtgcagcaccatc

SEQ ID NO: 158941 - DNA, 33 bp, Homo sapien
aatgccacaaagataagccttgagaagagaaac

SEQ ID NO: 158942 - DNA, 33 bp, Homo sapien
aatgccacaaagataatccttgagaagagaaac

SEQ ID NO: 158943 - DNA, 33 bp, Homo sapien
catgaattatctcaacagacaaacaaatgcaaa

SEQ ID NO: 158944 - DNA, 33 bp, Homo sapien
catgaattatctcaacggacaaacaaatgcaaa

SEQ ID NO: 158945 - DNA, 33 bp, Homo sapien
gtcatatttttcttgcaaacaaacactggcatg

SEQ ID NO: 158946 - DNA, 33 bp, Homo sapien
gtcatatttttcttgcgaacaaacactggcatg

SEQ ID NO: 158947 - DNA, 33 bp, Homo sapien
gtgttacattttgagaatatctgatctagtata

SEQ ID NO: 158948 - DNA, 33 bp, Homo sapien
gtgttacattttgagactatctgatctagtata

SEQ ID NO: 158949 - DNA, 33 bp, Homo sapien
attctgtacagttattcaaagctgaaagacaaa

SEQ ID NO: 158950 - DNA, 33 bp, Homo sapien
attctgtacagttattgaaagctgaaagacaaa

SEQ ID NO: 158951 - DNA, 33 bp, Homo sapien
aattacacaaaaagcaaggctaatttgcccctc

SEQ ID NO: 158952 - DNA, 33 bp, Homo sapien
aattacacaaaaagcagggctaatttgcccctc

SEQ ID NO: 158953 - DNA, 33 bp, Homo sapien
accatccactggatcgcagcccaaattacacaa

SEQ ID NO: 158954 - DNA, 33 bp, Homo sapien
accatccactggatcgtagcccaaattacacaa

SEQ ID NO: 158955 - DNA, 33 bp, Homo sapien
gaattggtatcgctaacacgctcagtccttgaa

SEQ ID NO: 158956 - DNA, 33 bp, Homo sapien
gaattggtatcgctaatacgctcagtccttgaa

SEQ ID NO: 158957 - DNA, 33 bp, Homo sapien
gctcttaaggtacaaactattctcattttctca

SEQ ID NO: 158958 - DNA, 33 bp, Homo sapien
gctcttaaggtacaaattattctcattttctca

SEQ ID NO: 158959 - DNA, 33 bp, Homo sapien
tatattcctaaagctaacaccacaataaagtta

SEQ ID NO: 158960 - DNA, 33 bp, Homo sapien
tatattcctaaagctatcaccacaataaagtta

SEQ ID NO: 158961 - DNA, 33 bp, Homo sapien
aattttacttgagaaacgttgccctaaaactat

SEQ ID NO: 158962 - DNA, 33 bp, Homo sapien
aattttacttgagaaatgttgccctaaaactat

SEQ ID NO: 158963 - DNA, 33 bp, Homo sapien
catttgtgcatcagaaactgaacccataaatgc

SEQ ID NO: 158964 - DNA, 33 bp, Homo sapien
catttgtgcatcagaagctgaacccataaatgc

SEQ ID NO: 158965 - DNA, 33 bp, Homo sapien
tgttttcaattgtaaaagctgaggtaacagcta

SEQ ID NO: 158966 - DNA, 33 bp, Homo sapien
tgttttcaattgtaaatgctgaggtaacagcta

SEQ ID NO: 158967 - DNA, 33 bp, Homo sapien
aaatagactccaagccactttaatttaaaattt

SEQ ID NO: 158968 - DNA, 33 bp, Homo sapien
aaatagactccaagccgctttaatttaaaattt

SEQ ID NO: 158969 - DNA, 33 bp, Homo sapien
gagatcacgtttttccagatggtcttcatgctt

SEQ ID NO: 158970 - DNA, 33 bp, Homo sapien
gagatcacgtttttccggatggtcttcatgctt

SEQ ID NO: 158971 - DNA, 33 bp, Homo sapien
gcttgtggatgtttgtcaatatttaggcattga

SEQ ID NO: 158972 - DNA, 33 bp, Homo sapien
gcttgtggatgtttgttaatatttaggcattga

SEQ ID NO: 158973 - DNA, 33 bp, Homo sapien
gacactggatagaaccaataaccaaaatgaaag

SEQ ID NO: 158974 - DNA, 33 bp, Homo sapien
gacactggatagaaccgataaccaaaatgaaag

SEQ ID NO: 158975 - DNA, 33 bp, Homo sapien
gtcactcatacgtcataaaaacataatctgtgg

SEQ ID NO: 158976 - DNA, 33 bp, Homo sapien
gtcactcatacgtcatcaaaacataatctgtgg

SEQ ID NO: 158977 - DNA, 33 bp, Homo sapien
gtggaaggcacatttaaaaagttacaaaatgca

SEQ ID NO: 158978 - DNA, 33 bp, Homo sapien
gtggaaggcacatttagaaagttacaaaatgca

SEQ ID NO: 158979 - DNA, 33 bp, Homo sapien
tcactcatatgtacgcagaagctaaaacagttg

SEQ ID NO: 158980 - DNA, 33 bp, Homo sapien
tcactcatatgtacgcggaagctaaaacagttg

SEQ ID NO: 158981 - DNA, 33 bp, Homo sapien
tgtaattttatttccaagaaccaacctctttct

SEQ ID NO: 158982 - DNA, 33 bp, Homo sapien
tgtaattttatttccatgaaccaacctctttct

SEQ ID NO: 158983 - DNA, 33 bp, Homo sapien
cactcagtaaagttaacaattttatcatagttt

SEQ ID NO: 158984 - DNA, 33 bp, Homo sapien
cactcagtaaagttaagaattttatcatagttt

SEQ ID NO: 158985 - DNA, 33 bp, Homo sapien
ctggtgctctatggaagaatctttttcttgcct

SEQ ID NO: 158986 - DNA, 33 bp, Homo sapien
ctggtgctctatggaataatctttttcttgcct

SEQ ID NO: 158987 - DNA, 33 bp, Homo sapien
cactcactccatttgacggttttcttcactgtc

SEQ ID NO: 158988 - DNA, 33 bp, Homo sapien
cactcactccatttgatggttttcttcactgtc

SEQ ID NO: 158989 - DNA, 33 bp, Homo sapien
atgatatagtgcttacaaagtatgtcttaaaac

SEQ ID NO: 158990 - DNA, 33 bp, Homo sapien
atgatatagtgcttaccaagtatgtcttaaaac

SEQ ID NO: 158991 - DNA, 33 bp, Homo sapien
gttttggtcaagggagccattatatcagaagtc

SEQ ID NO: 158992 - DNA, 33 bp, Homo sapien
gttttggtcaagggaggcattatatcagaagtc

SEQ ID NO: 158993 - DNA, 33 bp, Homo sapien
acccaaaatatcaacaatgtggaagttaagaaa

SEQ ID NO: 158994 - DNA, 33 bp, Homo sapien
acccaaaatatcaacagtgtggaagttaagaaa

SEQ ID NO: 158995 - DNA, 33 bp, Homo sapien
tgtggtaaaattcagcactgctatatcatattg

SEQ ID NO: 158996 - DNA, 33 bp, Homo sapien
tgtggtaaaattcagcgctgctatatcatattg

SEQ ID NO: 158997 - DNA, 33 bp, Homo sapien
agaagtagccttctaaatcatgacccaatcttc

SEQ ID NO: 158998 - DNA, 33 bp, Homo sapien
agaagtagccttctaattcatgacccaatcttc

SEQ ID NO: 158999 - DNA, 33 bp, Homo sapien
gttggcacacagtagacgtacaaaaataaataa

SEQ ID NO: 159000 - DNA, 33 bp, Homo sapien
gttggcacacagtagatgtacaaaaataaataa

SEQ ID NO: 159001 - DNA, 33 bp, Homo sapien
acttggggttattaaacacttgtctgacagaat

SEQ ID NO: 159002 - DNA, 33 bp, Homo sapien
acttggggttattaaatacttgtctgacagaat

SEQ ID NO: 159003 - DNA, 33 bp, Homo sapien
tatgctggaaaagtccccagtttgatatttgat

SEQ ID NO: 159004 - DNA, 33 bp, Homo sapien
tatgctggaaaagtccgcagtttgatatttgat

SEQ ID NO: 159005 - DNA, 33 bp, Homo sapien
ataatctaggcttcaccaataagtgtggttctg

SEQ ID NO: 159006 - DNA, 33 bp, Homo sapien
ataatctaggcttcactaataagtgtggttctg

SEQ ID NO: 159007 - DNA, 33 bp, Homo sapien
tctttgtcttgttttacattggcagccagaaga

SEQ ID NO: 159008 - DNA, 33 bp, Homo sapien
tctttgtcttgttttatattggcagccagaaga

SEQ ID NO: 159009 - DNA, 33 bp, Homo sapien
ttgagtaggcattgaaaaactataatcaggaga

SEQ ID NO: 159010 - DNA, 33 bp, Homo sapien
ttgagtaggcattgaacaactataatcaggaga

SEQ ID NO: 159011 - DNA, 33 bp, Homo sapien
tgctgattggaaaggccgatccagcaattactg

SEQ ID NO: 159012 - DNA, 33 bp, Homo sapien
tgctgattggaaaggctgatccagcaattactg

SEQ ID NO: 159013 - DNA, 33 bp, Homo sapien
aatatctacaagatatcaaaaaacacaacatca

SEQ ID NO: 159014 - DNA, 33 bp, Homo sapien
aatatctacaagatatgaaaaaacacaacatca

SEQ ID NO: 159015 - DNA, 33 bp, Homo sapien
tattgccgttgagtgaagagagagaaaaaagca

SEQ ID NO: 159016 - DNA, 33 bp, Homo sapien
tattgccgttgagtgaggagagagaaaaaagca

SEQ ID NO: 159017 - DNA, 33 bp, Homo sapien
attcgtccaataagaacttcagcatctcattcg

SEQ ID NO: 159018 - DNA, 33 bp, Homo sapien
attcgtccaataagaatttcagcatctcattcg

SEQ ID NO: 159019 - DNA, 33 bp, Homo sapien
atctgcatacttgatccccatggccgtgagaca

SEQ ID NO: 159020 - DNA, 33 bp, Homo sapien
atctgcatacttgatctccatggccgtgagaca

SEQ ID NO: 159021 - DNA, 33 bp, Homo sapien
actaagaaggagatacagagacaagaaagaaag

SEQ ID NO: 159022 - DNA, 33 bp, Homo sapien
actaagaaggagatacggagacaagaaagaaag

SEQ ID NO: 159023 - DNA, 33 bp, Homo sapien
acaagaaagaaagatcaaaactgattcatgtaa

SEQ ID NO: 159024 - DNA, 33 bp, Homo sapien
acaagaaagaaagatcgaaactgattcatgtaa

SEQ ID NO: 159025 - DNA, 33 bp, Homo sapien
agacactgactttatcactgctcttgaaaagtt

SEQ ID NO: 159026 - DNA, 33 bp, Homo sapien
agacactgactttatcgctgctcttgaaaagtt

SEQ ID NO: 159027 - DNA, 33 bp, Homo sapien
ttgataaaaatggtaacgacttgaagatttcct

SEQ ID NO: 159028 - DNA, 33 bp, Homo sapien
ttgataaaaatggtaatgacttgaagatttcct

SEQ ID NO: 159029 - DNA, 33 bp, Homo sapien
cttcctcattctatcccctatactgttttatca

SEQ ID NO: 159030 - DNA, 33 bp, Homo sapien
cttcctcattctatcctctatactgttttatca

SEQ ID NO: 159031 - DNA, 33 bp, Homo sapien
gtgcagaaagcaagaggaaaggaggttcttggc

SEQ ID NO: 159032 - DNA, 33 bp, Homo sapien
gtgcagaaagcaagagtaaaggaggttcttggc

SEQ ID NO: 159033 - DNA, 33 bp, Homo sapien
atgaatgacttggtacaaaagtgagtaaattct

SEQ ID NO: 159034 - DNA, 33 bp, Homo sapien
atgaatgacttggtacgaaagtgagtaaattct

SEQ ID NO: 159035 - DNA, 33 bp, Homo sapien
ctagggaaagtaatcccagtgagcaattatcct

SEQ ID NO: 159036 - DNA, 33 bp, Homo sapien
ctagggaaagtaatcctagtgagcaattatcct

SEQ ID NO: 159037 - DNA, 33 bp, Homo sapien
ggctttgttgttaagaagtggcccttcagagtt

SEQ ID NO: 159038 - DNA, 33 bp, Homo sapien
ggctttgttgttaagaggtggcccttcagagtt

SEQ ID NO: 159039 - DNA, 33 bp, Homo sapien
tagatagaaaatgctaagtcttaaggtggcaca

SEQ ID NO: 159040 - DNA, 33 bp, Homo sapien
tagatagaaaatgctatgtcttaaggtggcaca

SEQ ID NO: 159041 - DNA, 33 bp, Homo sapien
tagaaacagtaggaaaagagaaatggctattta

SEQ ID NO: 159042 - DNA, 33 bp, Homo sapien
tagaaacagtaggaaaggagaaatggctattta

SEQ ID NO: 159043 - DNA, 33 bp, Homo sapien
ggatgctgataagctacctggaacttttgatac

SEQ ID NO: 159044 - DNA, 33 bp, Homo sapien
ggatgctgataagctatctggaacttttgatac

SEQ ID NO: 159045 - DNA, 33 bp, Homo sapien
tactatgtttttccccaaaatcatccaaaatag

SEQ ID NO: 159046 - DNA, 33 bp, Homo sapien
tactatgtttttcccccaaatcatccaaaatag

SEQ ID NO: 159047 - DNA, 33 bp, Homo sapien
tgataacagacagagaagatggggaaaatgctg

SEQ ID NO: 159048 - DNA, 33 bp, Homo sapien
tgataacagacagagaggatggggaaaatgctg

SEQ ID NO: 159049 - DNA, 33 bp, Homo sapien
cagcatttatggttacgcaatccttgcctgctt

SEQ ID NO: 159050 - DNA, 33 bp, Homo sapien
cagcatttatggttactcaatccttgcctgctt

SEQ ID NO: 159051 - DNA, 33 bp, Homo sapien
cacaggcatcaaccaaatgtatatcatgattct

SEQ ID NO: 159052 - DNA, 33 bp, Homo sapien
cacaggcatcaaccaagtgtatatcatgattct

SEQ ID NO: 159053 - DNA, 33 bp, Homo sapien
ctgactgcataatgaaaaagtgcctatatgacc

SEQ ID NO: 159054 - DNA, 33 bp, Homo sapien
ctgactgcataatgaacaagtgcctatatgacc

SEQ ID NO: 159055 - DNA, 33 bp, Homo sapien
aatggttaatgggtgaaaaaagaaaatgcagaa

SEQ ID NO: 159056 - DNA, 33 bp, Homo sapien
aatggttaatgggtgacaaaagaaaatgcagaa

SEQ ID NO: 159057 - DNA, 33 bp, Homo sapien
ggtgcaccaaagtcccaaaagataatggacagc

SEQ ID NO: 159058 - DNA, 33 bp, Homo sapien
ggtgcaccaaagtcccgaaagataatggacagc

SEQ ID NO: 159059 - DNA, 33 bp, Homo sapien
ataatgtttctattcacgtagacttgaaaggat

SEQ ID NO: 159060 - DNA, 33 bp, Homo sapien
ataatgtttctattcatgtagacttgaaaggat

SEQ ID NO: 159061 - DNA, 33 bp, Homo sapien
tcaaagctaaagtgaaatagatgattattccag

SEQ ID NO: 159062 - DNA, 33 bp, Homo sapien
tcaaagctaaagtgaactagatgattattccag

SEQ ID NO: 159063 - DNA, 33 bp, Homo sapien
accagaagtcaatagaacttcactcctcccctg

SEQ ID NO: 159064 - DNA, 33 bp, Homo sapien
accagaagtcaatagaccttcactcctcccctg

SEQ ID NO: 159065 - DNA, 33 bp, Homo sapien
gaattacagtaataagaagttgaacatcctgtg

SEQ ID NO: 159066 - DNA, 33 bp, Homo sapien
gaattacagtaataagcagttgaacatcctgtg

SEQ ID NO: 159067 - DNA, 33 bp, Homo sapien
tgaagtgcttgctttacaaaatgaggcattaag

SEQ ID NO: 159068 - DNA, 33 bp, Homo sapien
tgaagtgcttgctttataaaatgaggcattaag

SEQ ID NO: 159069 - DNA, 33 bp, Homo sapien
tttgactgtctccttaaataattagaagggtaa

SEQ ID NO: 159070 - DNA, 33 bp, Homo sapien
tttgactgtctccttacataattagaagggtaa

SEQ ID NO: 159071 - DNA, 33 bp, Homo sapien
attccattaataccaaacaatcactaaatgctg

SEQ ID NO: 159072 - DNA, 33 bp, Homo sapien
attccattaataccaagcaatcactaaatgctg

SEQ ID NO: 159073 - DNA, 33 bp, Homo sapien
taagatttcatgcatacgtttcaacttagaaca

SEQ ID NO: 159074 - DNA, 33 bp, Homo sapien
taagatttcatgcatatgtttcaacttagaaca

SEQ ID NO: 159075 - DNA, 33 bp, Homo sapien
gacttattgaaaaatgacatcattttgcttccc

SEQ ID NO: 159076 - DNA, 33 bp, Homo sapien
gacttattgaaaaatggcatcattttgcttccc

SEQ ID NO: 159077 - DNA, 33 bp, Homo sapien
agtcttgagctttggacactcctgtacttgaat

SEQ ID NO: 159078 - DNA, 33 bp, Homo sapien
agtcttgagctttggagactcctgtacttgaat

SEQ ID NO: 159079 - DNA, 33 bp, Homo sapien
ttgaatggagaatacaacaggccatctggaact

SEQ ID NO: 159080 - DNA, 33 bp, Homo sapien
ttgaatggagaatacagcaggccatctggaact

SEQ ID NO: 159081 - DNA, 33 bp, Homo sapien
gaaactgcaaattcacagggctggacatccatt

SEQ ID NO: 159082 - DNA, 33 bp, Homo sapien
gaaactgcaaattcacggggctggacatccatt

SEQ ID NO: 159083 - DNA, 33 bp, Homo sapien
cacaatgttctattaaatcaaaatctaatccat

SEQ ID NO: 159084 - DNA, 33 bp, Homo sapien
cacaatgttctattaagtcaaaatctaatccat

SEQ ID NO: 159085 - DNA, 33 bp, Homo sapien
atgctgccttatgccacataatctcagatgtca

SEQ ID NO: 159086 - DNA, 33 bp, Homo sapien
atgctgccttatgccatataatctcagatgtca

SEQ ID NO: 159087 - DNA, 33 bp, Homo sapien
gactctccttccaataagtatcactgttaggga

SEQ ID NO: 159088 - DNA, 33 bp, Homo sapien
gactctccttccaatatgtatcactgttaggga

SEQ ID NO: 159089 - DNA, 33 bp, Homo sapien
tagtattttccccaaactgttatgaacacaccg

SEQ ID NO: 159090 - DNA, 33 bp, Homo sapien
tagtattttccccaaagtgttatgaacacaccg

SEQ ID NO: 159091 - DNA, 33 bp, Homo sapien
aaattgcattcagtttaaaaaatggcacagtat

SEQ ID NO: 159092 - DNA, 33 bp, Homo sapien
aaattgcattcagttttaaaaatggcacagtat

SEQ ID NO: 159093 - DNA, 33 bp, Homo sapien
acttgttagtacatataaacaggagaaaaccca

SEQ ID NO: 159094 - DNA, 33 bp, Homo sapien
acttgttagtacatatcaacaggagaaaaccca

SEQ ID NO: 159095 - DNA, 33 bp, Homo sapien
aatagtgaagttgccactaagaagattttcctg

SEQ ID NO: 159096 - DNA, 33 bp, Homo sapien
aatagtgaagttgccattaagaagattttcctg

SEQ ID NO: 159097 - DNA, 33 bp, Homo sapien
atgtactgagtccaaagatattcattcaaataa

SEQ ID NO: 159098 - DNA, 33 bp, Homo sapien
atgtactgagtccaaatatattcattcaaataa

SEQ ID NO: 159099 - DNA, 33 bp, Homo sapien
ttcaccaggacgaaaactattactcaagcattt

SEQ ID NO: 159100 - DNA, 33 bp, Homo sapien
ttcaccaggacgaaaagtattactcaagcattt

SEQ ID NO: 159101 - DNA, 33 bp, Homo sapien
caaggtcattagagacagacaaggaagtcaggt

SEQ ID NO: 159102 - DNA, 33 bp, Homo sapien
caaggtcattagagaccgacaaggaagtcaggt

SEQ ID NO: 159103 - DNA, 33 bp, Homo sapien
gagtttgataatttgcagaaaaatacaaagctt

SEQ ID NO: 159104 - DNA, 33 bp, Homo sapien
gagtttgataatttgcggaaaaatacaaagctt

SEQ ID NO: 159105 - DNA, 33 bp, Homo sapien
agctgtttaaaaagaaagtagacacgctagact

SEQ ID NO: 159106 - DNA, 33 bp, Homo sapien
agctgtttaaaaagaaggtagacacgctagact

SEQ ID NO: 159107 - DNA, 33 bp, Homo sapien
ttattctgccatataagagtaattttcgttctt

SEQ ID NO: 159108 - DNA, 33 bp, Homo sapien
ttattctgccatataatagtaattttcgttctt

SEQ ID NO: 159109 - DNA, 33 bp, Homo sapien
gttctatgagtggttccacttaaagagtaaact

SEQ ID NO: 159110 - DNA, 33 bp, Homo sapien
gttctatgagtggttctacttaaagagtaaact

SEQ ID NO: 159111 - DNA, 33 bp, Homo sapien
aagcttaaacaattacacagcatttacttcctt

SEQ ID NO: 159112 - DNA, 33 bp, Homo sapien
aagcttaaacaattacgcagcatttacttcctt

SEQ ID NO: 159113 - DNA, 33 bp, Homo sapien
tctggatttatgtgaaatgactggtaaatcaag

SEQ ID NO: 159114 - DNA, 33 bp, Homo sapien
tctggatttatgtgaactgactggtaaatcaag

SEQ ID NO: 159115 - DNA, 33 bp, Homo sapien
ctccagttcaactacacgcagtattggtatgtg

SEQ ID NO: 159116 - DNA, 33 bp, Homo sapien
ctccagttcaactacaggcagtattggtatgtg

SEQ ID NO: 159117 - DNA, 33 bp, Homo sapien
cattatttagctccaaattatgaatgagaacat

SEQ ID NO: 159118 - DNA, 33 bp, Homo sapien
cattatttagctccaatttatgaatgagaacat

SEQ ID NO: 159119 - DNA, 33 bp, Homo sapien
aatcacactgggtggcaatctactctggaactt

SEQ ID NO: 159120 - DNA, 33 bp, Homo sapien
aatcacactgggtggcgatctactctggaactt

SEQ ID NO: 159121 - DNA, 33 bp, Homo sapien
aaaatttgagatcataacacaattccaaatata

SEQ ID NO: 159122 - DNA, 33 bp, Homo sapien
aaaatttgagatcatagcacaattccaaatata

SEQ ID NO: 159123 - DNA, 33 bp, Homo sapien
gggagacagagctcagacaataattctcactcg

SEQ ID NO: 159124 - DNA, 33 bp, Homo sapien
gggagacagagctcaggcaataattctcactcg

SEQ ID NO: 159125 - DNA, 33 bp, Homo sapien
cagtgtgcttgttataagtgtcctaaatcaaat

SEQ ID NO: 159126 - DNA, 33 bp, Homo sapien
cagtgtgcttgttataggtgtcctaaatcaaat

SEQ ID NO: 159127 - DNA, 33 bp, Homo sapien
ctcttctttctggctaaagaaaacccacaaatg

SEQ ID NO: 159128 - DNA, 33 bp, Homo sapien
ctcttctttctggctacagaaaacccacaaatg

SEQ ID NO: 159129 - DNA, 33 bp, Homo sapien
ttgactatttggggaacgacaagactaaataat

SEQ ID NO: 159130 - DNA, 33 bp, Homo sapien
ttgactatttggggaaggacaagactaaataat

SEQ ID NO: 159131 - DNA, 33 bp, Homo sapien
ttgtggcaactcccaaaattatgctcattcaca

SEQ ID NO: 159132 - DNA, 33 bp, Homo sapien
ttgtggcaactcccaacattatgctcattcaca

SEQ ID NO: 159133 - DNA, 33 bp, Homo sapien
ccacactgcttggccactgatatgatttgaatg

SEQ ID NO: 159134 - DNA, 33 bp, Homo sapien
ccacactgcttggccattgatatgatttgaatg

SEQ ID NO: 159135 - DNA, 33 bp, Homo sapien
ttgaaaatctgggatacagaacatgcaggtttg

SEQ ID NO: 159136 - DNA, 33 bp, Homo sapien
ttgaaaatctgggatagagaacatgcaggtttg

SEQ ID NO: 159137 - DNA, 33 bp, Homo sapien
ggtatatctgggcgtaagtggacagagtgaaca

SEQ ID NO: 159138 - DNA, 33 bp, Homo sapien
ggtatatctgggcgtacgtggacagagtgaaca

SEQ ID NO: 159139 - DNA, 33 bp, Homo sapien
ggagtgaaaagagtcaagaagggttccaagaat

SEQ ID NO: 159140 - DNA, 33 bp, Homo sapien
ggagtgaaaagagtcaggaagggttccaagaat

SEQ ID NO: 159141 - DNA, 33 bp, Homo sapien
taaccattcaagcaaaagttagtagttaaaatt

SEQ ID NO: 159142 - DNA, 33 bp, Homo sapien
taaccattcaagcaaaggttagtagttaaaatt

SEQ ID NO: 159143 - DNA, 33 bp, Homo sapien
agaaaatccaataaaacgttagccaatactttc

SEQ ID NO: 159144 - DNA, 33 bp, Homo sapien
agaaaatccaataaaatgttagccaatactttc

SEQ ID NO: 159145 - DNA, 33 bp, Homo sapien
tcttcaggtgagatgaaaactcattttccgagc

SEQ ID NO: 159146 - DNA, 33 bp, Homo sapien
tcttcaggtgagatgagaactcattttccgagc

SEQ ID NO: 159147 - DNA, 33 bp, Homo sapien
agtatctagcactggaacttgaccatgttcaat

SEQ ID NO: 159148 - DNA, 33 bp, Homo sapien
agtatctagcactggaccttgaccatgttcaat

SEQ ID NO: 159149 - DNA, 33 bp, Homo sapien
aacaaactaagagtgcacagatagttaagggac

SEQ ID NO: 159150 - DNA, 33 bp, Homo sapien
aacaaactaagagtgcgcagatagttaagggac

SEQ ID NO: 159151 - DNA, 33 bp, Homo sapien
gaattaaaaatgagtccatgatggtcctcacgg

SEQ ID NO: 159152 - DNA, 33 bp, Homo sapien
gaattaaaaatgagtctatgatggtcctcacgg

SEQ ID NO: 159153 - DNA, 33 bp, Homo sapien
tggtaaagaggaataacttagatgaaattagta

SEQ ID NO: 159154 - DNA, 33 bp, Homo sapien
tggtaaagaggaataagttagatgaaattagta

SEQ ID NO: 159155 - DNA, 33 bp, Homo sapien
ccagggtgagaaaacactacttagagacaagga

SEQ ID NO: 159156 - DNA, 33 bp, Homo sapien
ccagggtgagaaaacagtacttagagacaagga

SEQ ID NO: 159157 - DNA, 33 bp, Homo sapien
aaactgtctgagatccaaaaagaagagagttat

SEQ ID NO: 159158 - DNA, 33 bp, Homo sapien
aaactgtctgagatccgaaaagaagagagttat

SEQ ID NO: 159159 - DNA, 33 bp, Homo sapien
ccctctcttgtgcgaaagactttgggccctcag

SEQ ID NO: 159160 - DNA, 33 bp, Homo sapien
ccctctcttgtgcgaaggactttgggccctcag

SEQ ID NO: 159161 - DNA, 33 bp, Homo sapien
ttatttctctttccgaactgtgtttccctgagc

SEQ ID NO: 159162 - DNA, 33 bp, Homo sapien
ttatttctctttccgagctgtgtttccctgagc

SEQ ID NO: 159163 - DNA, 33 bp, Homo sapien
ctcattcccttgacacaaattgttttgggaaaa

SEQ ID NO: 159164 - DNA, 33 bp, Homo sapien
ctcattcccttgacaccaattgttttgggaaaa

SEQ ID NO: 159165 - DNA, 33 bp, Homo sapien
ttggattagtgagaaaggatcaaacacattgtc

SEQ ID NO: 159166 - DNA, 33 bp, Homo sapien
ttggattagtgagaaatgatcaaacacattgtc

SEQ ID NO: 159167 - DNA, 33 bp, Homo sapien
ctgtataagtttccagacattaccatttcctca

SEQ ID NO: 159168 - DNA, 33 bp, Homo sapien
ctgtataagtttccaggcattaccatttcctca

SEQ ID NO: 159169 - DNA, 33 bp, Homo sapien
cctggcaatccatgtcactctttggcttgtagt

SEQ ID NO: 159170 - DNA, 33 bp, Homo sapien
cctggcaatccatgtcgctctttggcttgtagt

SEQ ID NO: 159171 - DNA, 33 bp, Homo sapien
catattgattagaaccagctaaaacttgaattc

SEQ ID NO: 159172 - DNA, 33 bp, Homo sapien
catattgattagaaccggctaaaacttgaattc

SEQ ID NO: 159173 - DNA, 33 bp, Homo sapien
aaggaaagatgagaaaagaaccttgagaatgaa

SEQ ID NO: 159174 - DNA, 33 bp, Homo sapien
aaggaaagatgagaaaggaaccttgagaatgaa

SEQ ID NO: 159175 - DNA, 33 bp, Homo sapien
gaatatcactggtaaaataagaggtttgcataa

SEQ ID NO: 159176 - DNA, 33 bp, Homo sapien
gaatatcactggtaaagtaagaggtttgcataa

SEQ ID NO: 159177 - DNA, 33 bp, Homo sapien
ttgctagaaataacgcagaaaataatgttttat

SEQ ID NO: 159178 - DNA, 33 bp, Homo sapien
ttgctagaaataacgccgaaaataatgttttat

SEQ ID NO: 159179 - DNA, 33 bp, Homo sapien
ttcacaaagtgttggaaatattcttgaagcaat

SEQ ID NO: 159180 - DNA, 33 bp, Homo sapien
ttcacaaagtgttggagatattcttgaagcaat

SEQ ID NO: 159181 - DNA, 33 bp, Homo sapien
taattaaattaccacaaattgagtgatgcaaaa

SEQ ID NO: 159182 - DNA, 33 bp, Homo sapien
taattaaattaccacagattgagtgatgcaaaa

SEQ ID NO: 159183 - DNA, 33 bp, Homo sapien
gtgatgccagactgtcaaacacaagagctaata

SEQ ID NO: 159184 - DNA, 33 bp, Homo sapien
gtgatgccagactgtctaacacaagagctaata

SEQ ID NO: 159185 - DNA, 33 bp, Homo sapien
tttgcattaagcctaactgaagacttaaactga

SEQ ID NO: 159186 - DNA, 33 bp, Homo sapien
tttgcattaagcctaattgaagacttaaactga

SEQ ID NO: 159187 - DNA, 33 bp, Homo sapien
agaacacattctgaaacgaaatggaaggaagag

SEQ ID NO: 159188 - DNA, 33 bp, Homo sapien
agaacacattctgaaatgaaatggaaggaagag

SEQ ID NO: 159189 - DNA, 33 bp, Homo sapien
tgttcgactttactgagaagatggctcataatt

SEQ ID NO: 159190 - DNA, 33 bp, Homo sapien
tgttcgactttactgataagatggctcataatt

SEQ ID NO: 159191 - DNA, 33 bp, Homo sapien
aataaccttctgaacaagcaggggtatacgttt

SEQ ID NO: 159192 - DNA, 33 bp, Homo sapien
aataaccttctgaacacgcaggggtatacgttt

SEQ ID NO: 159193 - DNA, 33 bp, Homo sapien
gcaaatggcatatgcaaagcaagttctattctt

SEQ ID NO: 159194 - DNA, 33 bp, Homo sapien
gcaaatggcatatgcagagcaagttctattctt

SEQ ID NO: 159195 - DNA, 33 bp, Homo sapien
tgtagtatctaaatcacgtcaagtgtgaagcaa

SEQ ID NO: 159196 - DNA, 33 bp, Homo sapien
tgtagtatctaaatcatgtcaagtgtgaagcaa

SEQ ID NO: 159197 - DNA, 33 bp, Homo sapien
aaaagtgtgtgagaatcaactttctgaaaatga

SEQ ID NO: 159198 - DNA, 33 bp, Homo sapien
aaaagtgtgtgagaattaactttctgaaaatga

SEQ ID NO: 159199 - DNA, 33 bp, Homo sapien
gttgataggttttttacgtccagatgtttttaa

SEQ ID NO: 159200 - DNA, 33 bp, Homo sapien
gttgataggttttttatgtccagatgtttttaa

SEQ ID NO: 159201 - DNA, 33 bp, Homo sapien
gaatattgctcacttacctatctttcattgttt

SEQ ID NO: 159202 - DNA, 33 bp, Homo sapien
gaatattgctcacttatctatctttcattgttt

SEQ ID NO: 159203 - DNA, 33 bp, Homo sapien
gttaaggtcttgctaagcattctctctttcctt

SEQ ID NO: 159204 - DNA, 33 bp, Homo sapien
gttaaggtcttgctaatcattctctctttcctt

SEQ ID NO: 159205 - DNA, 33 bp, Homo sapien
gtgagaaaaattcatacataaaaaattcatagc

SEQ ID NO: 159206 - DNA, 33 bp, Homo sapien
gtgagaaaaattcatagataaaaaattcatagc

SEQ ID NO: 159207 - DNA, 33 bp, Homo sapien
ctctggtatttatctcaaagctgcataacttga

SEQ ID NO: 159208 - DNA, 33 bp, Homo sapien
ctctggtatttatctccaagctgcataacttga

SEQ ID NO: 159209 - DNA, 33 bp, Homo sapien
caagaagatacatcacaatagccaaagttaaga

SEQ ID NO: 159210 - DNA, 33 bp, Homo sapien
caagaagatacatcacgatagccaaagttaaga

SEQ ID NO: 159211 - DNA, 33 bp, Homo sapien
tttattcaacttttcacgtgtctcaataatgtt

SEQ ID NO: 159212 - DNA, 33 bp, Homo sapien
tttattcaacttttcatgtgtctcaataatgtt

SEQ ID NO: 159213 - DNA, 33 bp, Homo sapien
aatatctaattcaggaaaaacaatcgacctgga

SEQ ID NO: 159214 - DNA, 33 bp, Homo sapien
aatatctaattcaggagaaacaatcgacctgga

SEQ ID NO: 159215 - DNA, 33 bp, Homo sapien
gtatttgctagttatcactgtgaatgagttgga

SEQ ID NO: 159216 - DNA, 33 bp, Homo sapien
gtatttgctagttatccctgtgaatgagttgga

SEQ ID NO: 159217 - DNA, 33 bp, Homo sapien
ctcccaccaacagtataaaagcgatcctatttc

SEQ ID NO: 159218 - DNA, 33 bp, Homo sapien
ctcccaccaacagtatgaaagcgatcctatttc

SEQ ID NO: 159219 - DNA, 33 bp, Homo sapien
ggaagctaagcaccttaaaaaaagtttagaaga

SEQ ID NO: 159220 - DNA, 33 bp, Homo sapien
ggaagctaagcacctttaaaaaagtttagaaga

SEQ ID NO: 159221 - DNA, 33 bp, Homo sapien
gttaaatatagaatgaacataaggcccaacaac

SEQ ID NO: 159222 - DNA, 33 bp, Homo sapien
gttaaatatagaatgaccataaggcccaacaac

SEQ ID NO: 159223 - DNA, 33 bp, Homo sapien
aagggggaataggaaacgactgctaatgaatac

SEQ ID NO: 159224 - DNA, 33 bp, Homo sapien
aagggggaataggaaatgactgctaatgaatac

SEQ ID NO: 159225 - DNA, 33 bp, Homo sapien
cttttcagctcctgaactgtgcagtctgtggtt

SEQ ID NO: 159226 - DNA, 33 bp, Homo sapien
cttttcagctcctgaagtgtgcagtctgtggtt

SEQ ID NO: 159227 - DNA, 33 bp, Homo sapien
tcactggcttacaggaagaaagtctctgtagaa

SEQ ID NO: 159228 - DNA, 33 bp, Homo sapien
tcactggcttacaggaggaaagtctctgtagaa

SEQ ID NO: 159229 - DNA, 33 bp, Homo sapien
tagagaattggagacaacctacagccttaagag

SEQ ID NO: 159230 - DNA, 33 bp, Homo sapien
tagagaattggagacaccctacagccttaagag

SEQ ID NO: 159231 - DNA, 33 bp, Homo sapien
tacaaagtgctttccagagtacagatacatttg

SEQ ID NO: 159232 - DNA, 33 bp, Homo sapien
tacaaagtgctttccatagtacagatacatttg

SEQ ID NO: 159233 - DNA, 33 bp, Homo sapien
tttgtaacatcttgagcccttgttttctctttc

SEQ ID NO: 159234 - DNA, 33 bp, Homo sapien
tttgtaacatcttgagtccttgttttctctttc

SEQ ID NO: 159235 - DNA, 33 bp, Homo sapien
tttagataatctcttagactacctgcagcttca

SEQ ID NO: 159236 - DNA, 33 bp, Homo sapien
tttagataatctcttatactacctgcagcttca

SEQ ID NO: 159237 - DNA, 33 bp, Homo sapien
atttttctcccagctagaaaggattggcagtag

SEQ ID NO: 159238 - DNA, 33 bp, Homo sapien
atttttctcccagctataaaggattggcagtag

SEQ ID NO: 159239 - DNA, 33 bp, Homo sapien
agtttaataaatcagactaatgcattttaaaat

SEQ ID NO: 159240 - DNA, 33 bp, Homo sapien
agtttaataaatcagagtaatgcattttaaaat

SEQ ID NO: 159241 - DNA, 33 bp, Homo sapien
atgataaggcctcaatcaattttcaaggtgaaa

SEQ ID NO: 159242 - DNA, 33 bp, Homo sapien
atgataaggcctcaatgaattttcaaggtgaaa

SEQ ID NO: 159243 - DNA, 33 bp, Homo sapien
ccatgtttttgaagcacataccatctgagaaga

SEQ ID NO: 159244 - DNA, 33 bp, Homo sapien
ccatgtttttgaagcatataccatctgagaaga

SEQ ID NO: 159245 - DNA, 33 bp, Homo sapien
ataattaattacaagcagcctcagctgagccaa

SEQ ID NO: 159246 - DNA, 33 bp, Homo sapien
ataattaattacaagcggcctcagctgagccaa

SEQ ID NO: 159247 - DNA, 33 bp, Homo sapien
tgtttccgtaaagctaaatgtcattgccagagt

SEQ ID NO: 159248 - DNA, 33 bp, Homo sapien
tgtttccgtaaagctagatgtcattgccagagt

SEQ ID NO: 159249 - DNA, 33 bp, Homo sapien
tttctccctgagtatacgcttggttacattttt

SEQ ID NO: 159250 - DNA, 33 bp, Homo sapien
tttctccctgagtatatgcttggttacattttt

SEQ ID NO: 159251 - DNA, 33 bp, Homo sapien
ctcaggataaagatgaataaatccagattgtgt

SEQ ID NO: 159252 - DNA, 33 bp, Homo sapien
ctcaggataaagatgagtaaatccagattgtgt

SEQ ID NO: 159253 - DNA, 33 bp, Homo sapien
caaaaatgaggttggccaatgcagtgagaaaag

SEQ ID NO: 159254 - DNA, 33 bp, Homo sapien
caaaaatgaggttggctaatgcagtgagaaaag

SEQ ID NO: 159255 - DNA, 33 bp, Homo sapien
atggatttgaccaatggatagattcaaaacata

SEQ ID NO: 159256 - DNA, 33 bp, Homo sapien
atggatttgaccaatgtatagattcaaaacata

SEQ ID NO: 159257 - DNA, 33 bp, Homo sapien
atttgtttctctgctacgtttgcacaaaactat

SEQ ID NO: 159258 - DNA, 33 bp, Homo sapien
atttgtttctctgctaggtttgcacaaaactat

SEQ ID NO: 159259 - DNA, 33 bp, Homo sapien
agtgttctaggaggtaataattgctaggaggaa

SEQ ID NO: 159260 - DNA, 33 bp, Homo sapien
agtgttctaggaggtagtaattgctaggaggaa

SEQ ID NO: 159261 - DNA, 33 bp, Homo sapien
tgaaatttcttgttctcaatgcatggtataaaa

SEQ ID NO: 159262 - DNA, 33 bp, Homo sapien
tgaaatttcttgttctgaatgcatggtataaaa

SEQ ID NO: 159263 - DNA, 33 bp, Homo sapien
aaggaacatactcaaaaatagaaggacaacatt

SEQ ID NO: 159264 - DNA, 33 bp, Homo sapien
aaggaacatactcaaacatagaaggacaacatt

SEQ ID NO: 159265 - DNA, 33 bp, Homo sapien
attattagagaaacgcaaatcaaaatcacaatg

SEQ ID NO: 159266 - DNA, 33 bp, Homo sapien
attattagagaaacgcgaatcaaaatcacaatg

SEQ ID NO: 159267 - DNA, 33 bp, Homo sapien
gttgttgaggagatcaaatacaaaaattcacat

SEQ ID NO: 159268 - DNA, 33 bp, Homo sapien
gttgttgaggagatcacatacaaaaattcacat

SEQ ID NO: 159269 - DNA, 33 bp, Homo sapien
agttcagagataaaataatgtttcctcacaact

SEQ ID NO: 159270 - DNA, 33 bp, Homo sapien
agttcagagataaaatcatgtttcctcacaact

SEQ ID NO: 159271 - DNA, 33 bp, Homo sapien
ataaacctcttgcaaacataattctgtgttgtg

SEQ ID NO: 159272 - DNA, 33 bp, Homo sapien
ataaacctcttgcaaatataattctgtgttgtg

SEQ ID NO: 159273 - DNA, 33 bp, Homo sapien
atctgaataattgtaacgtgagaattcttagaa

SEQ ID NO: 159274 - DNA, 33 bp, Homo sapien
atctgaataattgtaaggtgagaattcttagaa

SEQ ID NO: 159275 - DNA, 33 bp, Homo sapien
agttaagagattaaagacatttgttgaactagg

SEQ ID NO: 159276 - DNA, 33 bp, Homo sapien
agttaagagattaaagtcatttgttgaactagg

SEQ ID NO: 159277 - DNA, 33 bp, Homo sapien
aatgatctgagaaaagcaatggcttcacagtag

SEQ ID NO: 159278 - DNA, 33 bp, Homo sapien
aatgatctgagaaaaggaatggcttcacagtag

SEQ ID NO: 159279 - DNA, 33 bp, Homo sapien
ttctcatatttcatcactagtcatgtatatgct

SEQ ID NO: 159280 - DNA, 33 bp, Homo sapien
ttctcatatttcatcagtagtcatgtatatgct

SEQ ID NO: 159281 - DNA, 33 bp, Homo sapien
agagtaaacataaaacccagagtgggagaaata

SEQ ID NO: 159282 - DNA, 33 bp, Homo sapien
agagtaaacataaaactcagagtgggagaaata

SEQ ID NO: 159283 - DNA, 33 bp, Homo sapien
gctttccttagcataccgggcacctagctggac

SEQ ID NO: 159284 - DNA, 33 bp, Homo sapien
gctttccttagcatactgggcacctagctggac

SEQ ID NO: 159285 - DNA, 33 bp, Homo sapien
tgtagacaaaacacaacaatcatgagagacttc

SEQ ID NO: 159286 - DNA, 33 bp, Homo sapien
tgtagacaaaacacaataatcatgagagacttc

SEQ ID NO: 159287 - DNA, 33 bp, Homo sapien
cttgtctttttatctaacctgacactctgtatc

SEQ ID NO: 159288 - DNA, 33 bp, Homo sapien
cttgtctttttatctagcctgacactctgtatc

SEQ ID NO: 159289 - DNA, 33 bp, Homo sapien
aagacccttgtgggtccaggatcaaagggattt

SEQ ID NO: 159290 - DNA, 33 bp, Homo sapien
aagacccttgtgggtcgaggatcaaagggattt

SEQ ID NO: 159291 - DNA, 33 bp, Homo sapien
ttccatctaaaatgtcaaagtcccataagaata

SEQ ID NO: 159292 - DNA, 33 bp, Homo sapien
ttccatctaaaatgtctaagtcccataagaata

SEQ ID NO: 159293 - DNA, 33 bp, Homo sapien
aaaaacaccatccttaaaattaacaccatggcc

SEQ ID NO: 159294 - DNA, 33 bp, Homo sapien
aaaaacaccatccttagaattaacaccatggcc

SEQ ID NO: 159295 - DNA, 33 bp, Homo sapien
atgtcccactaattccgattactcacacctggt

SEQ ID NO: 159296 - DNA, 33 bp, Homo sapien
atgtcccactaattcctattactcacacctggt

SEQ ID NO: 159297 - DNA, 33 bp, Homo sapien
agggtcacttagaaaacggccctcagattcctt

SEQ ID NO: 159298 - DNA, 33 bp, Homo sapien
agggtcacttagaaaatggccctcagattcctt

SEQ ID NO: 159299 - DNA, 33 bp, Homo sapien
taatattcaatgtaaacgtgttttgcaatgttt

SEQ ID NO: 159300 - DNA, 33 bp, Homo sapien
taatattcaatgtaaatgtgttttgcaatgttt

SEQ ID NO: 159301 - DNA, 33 bp, Homo sapien
ataaagttggagacggaaagacacacaacttta

SEQ ID NO: 159302 - DNA, 33 bp, Homo sapien
ataaagttggagacgggaagacacacaacttta

SEQ ID NO: 159303 - DNA, 33 bp, Homo sapien
tgagggatgtctgtacactgaattgtgaaaata

SEQ ID NO: 159304 - DNA, 33 bp, Homo sapien
tgagggatgtctgtacgctgaattgtgaaaata

SEQ ID NO: 159305 - DNA, 33 bp, Homo sapien
ttttatcattgtggaccactctctgaaattatg

SEQ ID NO: 159306 - DNA, 33 bp, Homo sapien
ttttatcattgtggactactctctgaaattatg

SEQ ID NO: 159307 - DNA, 33 bp, Homo sapien
tagttggttatgattacggttttaaatgctaac

SEQ ID NO: 159308 - DNA, 33 bp, Homo sapien
tagttggttatgattatggttttaaatgctaac

SEQ ID NO: 159309 - DNA, 33 bp, Homo sapien
gcacagagagactgagccattttaaaaaggaac

SEQ ID NO: 159310 - DNA, 33 bp, Homo sapien
gcacagagagactgagtcattttaaaaaggaac

SEQ ID NO: 159311 - DNA, 33 bp, Homo sapien
ggccaagaaacatgtgaaaaatgctcatcatca

SEQ ID NO: 159312 - DNA, 33 bp, Homo sapien
ggccaagaaacatgtggaaaatgctcatcatca

SEQ ID NO: 159313 - DNA, 33 bp, Homo sapien
atcatatagattacaaatctttcgctggaggaa

SEQ ID NO: 159314 - DNA, 33 bp, Homo sapien
atcatatagattacaattctttcgctggaggaa

SEQ ID NO: 159315 - DNA, 33 bp, Homo sapien
caaatttgggatcgttaaaagatttatattttc

SEQ ID NO: 159316 - DNA, 33 bp, Homo sapien
caaatttgggatcgttcaaagatttatattttc

SEQ ID NO: 159317 - DNA, 33 bp, Homo sapien
atttccagatgttgtacgtgtagctggggtttg

SEQ ID NO: 159318 - DNA, 33 bp, Homo sapien
atttccagatgttgtatgtgtagctggggtttg

SEQ ID NO: 159319 - DNA, 33 bp, Homo sapien
tgctttctccactagaatataacctccactgac

SEQ ID NO: 159320 - DNA, 33 bp, Homo sapien
tgctttctccactagagtataacctccactgac

SEQ ID NO: 159321 - DNA, 33 bp, Homo sapien
gatcagaggtatgccactaaatctcagaatcta

SEQ ID NO: 159322 - DNA, 33 bp, Homo sapien
gatcagaggtatgccattaaatctcagaatcta

SEQ ID NO: 159323 - DNA, 33 bp, Homo sapien
caatggttcaacttaacggttttttcatgattc

SEQ ID NO: 159324 - DNA, 33 bp, Homo sapien
caatggttcaacttaatggttttttcatgattc

SEQ ID NO: 159325 - DNA, 33 bp, Homo sapien
acatacagataaagaaatcaaaggttgaaaaca

SEQ ID NO: 159326 - DNA, 33 bp, Homo sapien
acatacagataaagaagtcaaaggttgaaaaca

SEQ ID NO: 159327 - DNA, 33 bp, Homo sapien
atggtgaataactttccataggacccacaaggc

SEQ ID NO: 159328 - DNA, 33 bp, Homo sapien
atggtgaataactttctataggacccacaaggc

SEQ ID NO: 159329 - DNA, 33 bp, Homo sapien
ttagtgcatccagcaaatagttccaaatatcac

SEQ ID NO: 159330 - DNA, 33 bp, Homo sapien
ttagtgcatccagcaagtagttccaaatatcac

SEQ ID NO: 159331 - DNA, 33 bp, Homo sapien
tgcaactcaaagtttaaccgtctatgtattatt

SEQ ID NO: 159332 - DNA, 33 bp, Homo sapien
tgcaactcaaagtttagccgtctatgtattatt

SEQ ID NO: 159333 - DNA, 33 bp, Homo sapien
gtgtctactttgacagacaggattaaaagtagg

SEQ ID NO: 159334 - DNA, 33 bp, Homo sapien
gtgtctactttgacagccaggattaaaagtagg

SEQ ID NO: 159335 - DNA, 33 bp, Homo sapien
acgaacttgctacaatgaaatggatgagttagg

SEQ ID NO: 159336 - DNA, 33 bp, Homo sapien
acgaacttgctacaattaaatggatgagttagg

SEQ ID NO: 159337 - DNA, 33 bp, Homo sapien
aatggacattataaaaattaaccacaccttgca

SEQ ID NO: 159338 - DNA, 33 bp, Homo sapien
aatggacattataaaacttaaccacaccttgca

SEQ ID NO: 159339 - DNA, 33 bp, Homo sapien
attagtaaaatttgaaagaggcctgtagatgtg

SEQ ID NO: 159340 - DNA, 33 bp, Homo sapien
attagtaaaatttgaatgaggcctgtagatgtg

SEQ ID NO: 159341 - DNA, 33 bp, Homo sapien
gttaaaaaaactgtgaacaatcaagtaaagttc

SEQ ID NO: 159342 - DNA, 33 bp, Homo sapien
gttaaaaaaactgtgagcaatcaagtaaagttc

SEQ ID NO: 159343 - DNA, 33 bp, Homo sapien
aaaactgaatactaataaaatcatggacttcga

SEQ ID NO: 159344 - DNA, 33 bp, Homo sapien
aaaactgaatactaatgaaatcatggacttcga

SEQ ID NO: 159345 - DNA, 33 bp, Homo sapien
gccaaaattcagaccaatgaaaatgccaaatgc

SEQ ID NO: 159346 - DNA, 33 bp, Homo sapien
gccaaaattcagaccagtgaaaatgccaaatgc

SEQ ID NO: 159347 - DNA, 33 bp, Homo sapien
ggtctcagatgggtatcagaaagttgttggaaa

SEQ ID NO: 159348 - DNA, 33 bp, Homo sapien
ggtctcagatgggtatgagaaagttgttggaaa

SEQ ID NO: 159349 - DNA, 33 bp, Homo sapien
agggtgagaaggaagaaagataatccttaatca

SEQ ID NO: 159350 - DNA, 33 bp, Homo sapien
agggtgagaaggaagagagataatccttaatca

SEQ ID NO: 159351 - DNA, 33 bp, Homo sapien
ccttaatcatacaggacctttatttatagcatg

SEQ ID NO: 159352 - DNA, 33 bp, Homo sapien
ccttaatcatacaggagctttatttatagcatg

SEQ ID NO: 159353 - DNA, 33 bp, Homo sapien
ttccagatgagacttcaaatttgtaattacaca

SEQ ID NO: 159354 - DNA, 33 bp, Homo sapien
ttccagatgagacttcgaatttgtaattacaca

SEQ ID NO: 159355 - DNA, 33 bp, Homo sapien
gttattcaggtctcaaacgttcttcaggtagta

SEQ ID NO: 159356 - DNA, 33 bp, Homo sapien
gttattcaggtctcaagcgttcttcaggtagta

SEQ ID NO: 159357 - DNA, 33 bp, Homo sapien
gccactttagtgaaaagggaagtcaaagcaaaa

SEQ ID NO: 159358 - DNA, 33 bp, Homo sapien
gccactttagtgaaaatggaagtcaaagcaaaa

SEQ ID NO: 159359 - DNA, 33 bp, Homo sapien
atttttgtttaagtccaaagcaatagttttgca

SEQ ID NO: 159360 - DNA, 33 bp, Homo sapien
atttttgtttaagtccgaagcaatagttttgca

SEQ ID NO: 159361 - DNA, 33 bp, Homo sapien
aatgggagaacataacagcaaactatatatgca

SEQ ID NO: 159362 - DNA, 33 bp, Homo sapien
aatgggagaacataactgcaaactatatatgca

SEQ ID NO: 159363 - DNA, 33 bp, Homo sapien
caaaaaattaagccacagccaaatgatcttcta

SEQ ID NO: 159364 - DNA, 33 bp, Homo sapien
caaaaaattaagccaccgccaaatgatcttcta

SEQ ID NO: 159365 - DNA, 33 bp, Homo sapien
acatagactgatagaaaagaatacagaaccaaa

SEQ ID NO: 159366 - DNA, 33 bp, Homo sapien
acatagactgatagaacagaatacagaaccaaa

SEQ ID NO: 159367 - DNA, 33 bp, Homo sapien
tggcatgggtgcaaaaatagacacatagactga

SEQ ID NO: 159368 - DNA, 33 bp, Homo sapien
tggcatgggtgcaaaagtagacacatagactga

SEQ ID NO: 159369 - DNA, 33 bp, Homo sapien
caccatggaatcatgcaatcttggctgcaggaa

SEQ ID NO: 159370 - DNA, 33 bp, Homo sapien
caccatggaatcatgcgatcttggctgcaggaa

SEQ ID NO: 159371 - DNA, 33 bp, Homo sapien
caatctatacttacaacttataggtaatctcaa

SEQ ID NO: 159372 - DNA, 33 bp, Homo sapien
caatctatacttacaatttataggtaatctcaa

SEQ ID NO: 159373 - DNA, 33 bp, Homo sapien
gggatgggagtacaatgatcccaagtggttcac

SEQ ID NO: 159374 - DNA, 33 bp, Homo sapien
gggatgggagtacaattatcccaagtggttcac

SEQ ID NO: 159375 - DNA, 33 bp, Homo sapien
attctaacctatttcaagtaagtggtgtataga

SEQ ID NO: 159376 - DNA, 33 bp, Homo sapien
attctaacctatttcaggtaagtggtgtataga

SEQ ID NO: 159377 - DNA, 33 bp, Homo sapien
aggatggagaaatgccgaaatggaaataaaaaa

SEQ ID NO: 159378 - DNA, 33 bp, Homo sapien
aggatggagaaatgcctaaatggaaataaaaaa

SEQ ID NO: 159379 - DNA, 33 bp, Homo sapien
taaataagtacgtaaccatgaaagaaatacagt

SEQ ID NO: 159380 - DNA, 33 bp, Homo sapien
taaataagtacgtaactatgaaagaaatacagt

SEQ ID NO: 159381 - DNA, 33 bp, Homo sapien
tttttcttttgcaggaagaagagaataatatca

SEQ ID NO: 159382 - DNA, 33 bp, Homo sapien
tttttcttttgcaggaggaagagaataatatca

SEQ ID NO: 159383 - DNA, 33 bp, Homo sapien
atacgaagatatataaaaccactgagacatttg

SEQ ID NO: 159384 - DNA, 33 bp, Homo sapien
atacgaagatatataacaccactgagacatttg

SEQ ID NO: 159385 - DNA, 33 bp, Homo sapien
tatcttaagtgtaataactcaaaaacaaaaagt

SEQ ID NO: 159386 - DNA, 33 bp, Homo sapien
tatcttaagtgtaatatctcaaaaacaaaaagt

SEQ ID NO: 159387 - DNA, 33 bp, Homo sapien
aaattaggaaggcagacgcttaatgtgttggaa

SEQ ID NO: 159388 - DNA, 33 bp, Homo sapien
aaattaggaaggcagatgcttaatgtgttggaa

SEQ ID NO: 159389 - DNA, 33 bp, Homo sapien
cagtttcttaaatcaacgtaaatctgtggaaaa

SEQ ID NO: 159390 - DNA, 33 bp, Homo sapien
cagtttcttaaatcaatgtaaatctgtggaaaa

SEQ ID NO: 159391 - DNA, 33 bp, Homo sapien
gtggtgcttagcaaagaaaaacaaggctaacac

SEQ ID NO: 159392 - DNA, 33 bp, Homo sapien
gtggtgcttagcaaaggaaaacaaggctaacac

SEQ ID NO: 159393 - DNA, 33 bp, Homo sapien
gacacacaaatacttaacgatatgtattgcaaa

SEQ ID NO: 159394 - DNA, 33 bp, Homo sapien
gacacacaaatacttaccgatatgtattgcaaa

SEQ ID NO: 159395 - DNA, 33 bp, Homo sapien
gggcaaccattgcatacatttgagcataatttt

SEQ ID NO: 159396 - DNA, 33 bp, Homo sapien
gggcaaccattgcatatatttgagcataatttt

SEQ ID NO: 159397 - DNA, 33 bp, Homo sapien
ctcagatagatgcatcacttacagagcacagta

SEQ ID NO: 159398 - DNA, 33 bp, Homo sapien
ctcagatagatgcatcgcttacagagcacagta

SEQ ID NO: 159399 - DNA, 33 bp, Homo sapien
cgcaggcaataccaaactccctatgtcaaggtc

SEQ ID NO: 159400 - DNA, 33 bp, Homo sapien
cgcaggcaataccaaagtccctatgtcaaggtc

SEQ ID NO: 159401 - DNA, 33 bp, Homo sapien
ctgtcgacttttacccagacctttcaactctta

SEQ ID NO: 159402 - DNA, 33 bp, Homo sapien
ctgtcgacttttacccggacctttcaactctta

SEQ ID NO: 159403 - DNA, 33 bp, Homo sapien
aggatggctccagacaaggatacagattttgat

SEQ ID NO: 159404 - DNA, 33 bp, Homo sapien
aggatggctccagacagggatacagattttgat

SEQ ID NO: 159405 - DNA, 33 bp, Homo sapien
tatggaataaaactaaatgcccattaagagatg

SEQ ID NO: 159406 - DNA, 33 bp, Homo sapien
tatggaataaaactaattgcccattaagagatg

SEQ ID NO: 159407 - DNA, 33 bp, Homo sapien
ttgccaatgaagtgtacgcagtaaagattggag

SEQ ID NO: 159408 - DNA, 33 bp, Homo sapien
ttgccaatgaagtgtatgcagtaaagattggag

SEQ ID NO: 159409 - DNA, 33 bp, Homo sapien
ttgtatcctgtgagtccaaaacttccttaacac

SEQ ID NO: 159410 - DNA, 33 bp, Homo sapien
ttgtatcctgtgagtcgaaaacttccttaacac

SEQ ID NO: 159411 - DNA, 33 bp, Homo sapien
tgctgatttctcaaaaaagtcaccaattcttca

SEQ ID NO: 159412 - DNA, 33 bp, Homo sapien
tgctgatttctcaaaagagtcaccaattcttca

SEQ ID NO: 159413 - DNA, 33 bp, Homo sapien
tgccttcatttcagacactttcgttatctctac

SEQ ID NO: 159414 - DNA, 33 bp, Homo sapien
tgccttcatttcagactctttcgttatctctac

SEQ ID NO: 159415 - DNA, 33 bp, Homo sapien
caaagatttaaggtgcactatgatggagaatgt

SEQ ID NO: 159416 - DNA, 33 bp, Homo sapien
caaagatttaaggtgcgctatgatggagaatgt

SEQ ID NO: 159417 - DNA, 33 bp, Homo sapien
ggagctcaaatactcaatagtaataaaacagta

SEQ ID NO: 159418 - DNA, 33 bp, Homo sapien
ggagctcaaatactcagtagtaataaaacagta

SEQ ID NO: 159419 - DNA, 33 bp, Homo sapien
ccagttttcccaagaacacttattgaagaggct

SEQ ID NO: 159420 - DNA, 33 bp, Homo sapien
ccagttttcccaagaatacttattgaagaggct

SEQ ID NO: 159421 - DNA, 33 bp, Homo sapien
tagatttacttttctaccattgtgtgtcattga

SEQ ID NO: 159422 - DNA, 33 bp, Homo sapien
tagatttacttttctatcattgtgtgtcattga

SEQ ID NO: 159423 - DNA, 33 bp, Homo sapien
cagcccatcatagacactaccaacatgaatgtg

SEQ ID NO: 159424 - DNA, 33 bp, Homo sapien
cagcccatcatagacattaccaacatgaatgtg

SEQ ID NO: 159425 - DNA, 33 bp, Homo sapien
atttctctaatgaccagctttctttcatatgtt

SEQ ID NO: 159426 - DNA, 33 bp, Homo sapien
atttctctaatgaccatctttctttcatatgtt

SEQ ID NO: 159427 - DNA, 33 bp, Homo sapien
tacttatgcatagatgccaaacaggtttcaaat

SEQ ID NO: 159428 - DNA, 33 bp, Homo sapien
tacttatgcatagatgtcaaacaggtttcaaat

SEQ ID NO: 159429 - DNA, 33 bp, Homo sapien
caaatagaaaggataaatacttgagttgatgga

SEQ ID NO: 159430 - DNA, 33 bp, Homo sapien
caaatagaaaggataattacttgagttgatgga

SEQ ID NO: 159431 - DNA, 33 bp, Homo sapien
accagaggataggaataaggtgtgaggggcaga

SEQ ID NO: 159432 - DNA, 33 bp, Homo sapien
accagaggataggaatgaggtgtgaggggcaga

SEQ ID NO: 159433 - DNA, 33 bp, Homo sapien
tattaaagtttccacgaatttgtcaatggctct

SEQ ID NO: 159434 - DNA, 33 bp, Homo sapien
tattaaagtttccacgcatttgtcaatggctct

SEQ ID NO: 159435 - DNA, 33 bp, Homo sapien
aagctggccacaatgaaccccttgtgaaatatc

SEQ ID NO: 159436 - DNA, 33 bp, Homo sapien
aagctggccacaatgacccccttgtgaaatatc

SEQ ID NO: 159437 - DNA, 33 bp, Homo sapien
tgggcatgcgtatttccccttgccaccgccatg

SEQ ID NO: 159438 - DNA, 33 bp, Homo sapien
tgggcatgcgtatttctccttgccaccgccatg

SEQ ID NO: 159439 - DNA, 33 bp, Homo sapien
agaaagaacctagagcactaacttgcaagtaat

SEQ ID NO: 159440 - DNA, 33 bp, Homo sapien
agaaagaacctagagcgctaacttgcaagtaat

SEQ ID NO: 159441 - DNA, 33 bp, Homo sapien
attcaaggggaagtggaaagggcttgtataagt

SEQ ID NO: 159442 - DNA, 33 bp, Homo sapien
attcaaggggaagtgggaagggcttgtataagt

SEQ ID NO: 159443 - DNA, 33 bp, Homo sapien
gacagagagaaacaagaaattggtatacacaac

SEQ ID NO: 159444 - DNA, 33 bp, Homo sapien
gacagagagaaacaaggaattggtatacacaac

SEQ ID NO: 159445 - DNA, 33 bp, Homo sapien
tactaaatgctcagtaaataattggtaagtaca

SEQ ID NO: 159446 - DNA, 33 bp, Homo sapien
tactaaatgctcagtagataattggtaagtaca

SEQ ID NO: 159447 - DNA, 33 bp, Homo sapien
tcatggagaacagagaagagcaagatagaacaa

SEQ ID NO: 159448 - DNA, 33 bp, Homo sapien
tcatggagaacagagacgagcaagatagaacaa

SEQ ID NO: 159449 - DNA, 33 bp, Homo sapien
tgctagcaaggtcagcagaaccctatggtctaa

SEQ ID NO: 159450 - DNA, 33 bp, Homo sapien
tgctagcaaggtcagcggaaccctatggtctaa

SEQ ID NO: 159451 - DNA, 33 bp, Homo sapien
gtaggcaaacttcttaaagaataggtcagtcct

SEQ ID NO: 159452 - DNA, 33 bp, Homo sapien
gtaggcaaacttcttagagaataggtcagtcct

SEQ ID NO: 159453 - DNA, 33 bp, Homo sapien
aactgtgtgaatacagccacctaggatcttccc

SEQ ID NO: 159454 - DNA, 33 bp, Homo sapien
aactgtgtgaatacaggcacctaggatcttccc

SEQ ID NO: 159455 - DNA, 33 bp, Homo sapien
gttgcagattgtaaaacgtgatgaggatgtact

SEQ ID NO: 159456 - DNA, 33 bp, Homo sapien
gttgcagattgtaaaatgtgatgaggatgtact

SEQ ID NO: 159457 - DNA, 33 bp, Homo sapien
ctctaccagcatacatcaaactctattattttc

SEQ ID NO: 159458 - DNA, 33 bp, Homo sapien
ctctaccagcatacattaaactctattattttc

SEQ ID NO: 159459 - DNA, 33 bp, Homo sapien
aagcgtctaaatggtcccatgcaataagtattt

SEQ ID NO: 159460 - DNA, 33 bp, Homo sapien
aagcgtctaaatggtctcatgcaataagtattt

SEQ ID NO: 159461 - DNA, 33 bp, Homo sapien
taaacaacactctagaatccatattattactat

SEQ ID NO: 159462 - DNA, 33 bp, Homo sapien
taaacaacactctagagtccatattattactat

SEQ ID NO: 159463 - DNA, 33 bp, Homo sapien
agttaattgtggtccaaaaaatgcaaatgaaaa

SEQ ID NO: 159464 - DNA, 33 bp, Homo sapien
agttaattgtggtccagaaaatgcaaatgaaaa

SEQ ID NO: 159465 - DNA, 33 bp, Homo sapien
gtttcattgcatagtacggcgactttagttaac

SEQ ID NO: 159466 - DNA, 33 bp, Homo sapien
gtttcattgcatagtatggcgactttagttaac

SEQ ID NO: 159467 - DNA, 33 bp, Homo sapien
gtacttttgctgcaagactctgtcagggtgttg

SEQ ID NO: 159468 - DNA, 33 bp, Homo sapien
gtacttttgctgcaagtctctgtcagggtgttg

SEQ ID NO: 159469 - DNA, 33 bp, Homo sapien
ttcacttacactgtagacctaaagaacttggct

SEQ ID NO: 159470 - DNA, 33 bp, Homo sapien
ttcacttacactgtaggcctaaagaacttggct

SEQ ID NO: 159471 - DNA, 33 bp, Homo sapien
gcctatgtatgttaccccttatcaaaatgtgca

SEQ ID NO: 159472 - DNA, 33 bp, Homo sapien
gcctatgtatgttacctcttatcaaaatgtgca

SEQ ID NO: 159473 - DNA, 33 bp, Homo sapien
gtcatccaagctaaaaacatctgagaccaagtt

SEQ ID NO: 159474 - DNA, 33 bp, Homo sapien
gtcatccaagctaaaagcatctgagaccaagtt

SEQ ID NO: 159475 - DNA, 33 bp, Homo sapien
cattggcctgtccaacagtgtatcgtaactgtg

SEQ ID NO: 159476 - DNA, 33 bp, Homo sapien
cattggcctgtccaacggtgtatcgtaactgtg

SEQ ID NO: 159477 - DNA, 33 bp, Homo sapien
atccttaagtgaaataggtacagcaccagtgga

SEQ ID NO: 159478 - DNA, 33 bp, Homo sapien
atccttaagtgaaatatgtacagcaccagtgga

SEQ ID NO: 159479 - DNA, 33 bp, Homo sapien
caagatatagagcccaatagtacatttatagcc

SEQ ID NO: 159480 - DNA, 33 bp, Homo sapien
caagatatagagcccagtagtacatttatagcc

SEQ ID NO: 159481 - DNA, 33 bp, Homo sapien
tggcttgattgtgatacagcattctccaaaaca

SEQ ID NO: 159482 - DNA, 33 bp, Homo sapien
tggcttgattgtgatatagcattctccaaaaca

SEQ ID NO: 159483 - DNA, 33 bp, Homo sapien
aattttaagtattcaactgcatgaaaaccaatt

SEQ ID NO: 159484 - DNA, 33 bp, Homo sapien
aattttaagtattcaagtgcatgaaaaccaatt

SEQ ID NO: 159485 - DNA, 33 bp, Homo sapien
tcaaatatgtcttatacgtaaaaaatgcagatt

SEQ ID NO: 159486 - DNA, 33 bp, Homo sapien
tcaaatatgtcttatatgtaaaaaatgcagatt

SEQ ID NO: 159487 - DNA, 33 bp, Homo sapien
tttccatcatcctggaatcacccatttttctga

SEQ ID NO: 159488 - DNA, 33 bp, Homo sapien
tttccatcatcctggagtcacccatttttctga

SEQ ID NO: 159489 - DNA, 33 bp, Homo sapien
tataatcaagctaacacgtcgatcatcttatta

SEQ ID NO: 159490 - DNA, 33 bp, Homo sapien
tataatcaagctaacaggtcgatcatcttatta

SEQ ID NO: 159491 - DNA, 33 bp, Homo sapien
catgtgtaagctaaaaaagttgatcttattgtg

SEQ ID NO: 159492 - DNA, 33 bp, Homo sapien
catgtgtaagctaaaagagttgatcttattgtg

SEQ ID NO: 159493 - DNA, 33 bp, Homo sapien
agactactcatctcagaaagctaatgaagcaaa

SEQ ID NO: 159494 - DNA, 33 bp, Homo sapien
agactactcatctcaggaagctaatgaagcaaa

SEQ ID NO: 159495 - DNA, 33 bp, Homo sapien
aacagatcaaaaagtacaacagtcataaggaat

SEQ ID NO: 159496 - DNA, 33 bp, Homo sapien
aacagatcaaaaagtataacagtcataaggaat

SEQ ID NO: 159497 - DNA, 33 bp, Homo sapien
aaactctttccttatcaatctgtgttctcttag

SEQ ID NO: 159498 - DNA, 33 bp, Homo sapien
aaactctttccttatccatctgtgttctcttag

SEQ ID NO: 159499 - DNA, 33 bp, Homo sapien
caaaagaatagtgatacggttttgataactgat

SEQ ID NO: 159500 - DNA, 33 bp, Homo sapien
caaaagaatagtgatatggttttgataactgat

SEQ ID NO: 159501 - DNA, 33 bp, Homo sapien
gaatgcctggccttaactggttctcccagctca

SEQ ID NO: 159502 - DNA, 33 bp, Homo sapien
gaatgcctggccttaagtggttctcccagctca

SEQ ID NO: 159503 - DNA, 33 bp, Homo sapien
gtcttctatttttgcacacagttgccttgatta

SEQ ID NO: 159504 - DNA, 33 bp, Homo sapien
gtcttctatttttgcagacagttgccttgatta

SEQ ID NO: 159505 - DNA, 33 bp, Homo sapien
tcaatgcaggctttccccagctaccaaagctgc

SEQ ID NO: 159506 - DNA, 33 bp, Homo sapien
tcaatgcaggctttccgcagctaccaaagctgc

SEQ ID NO: 159507 - DNA, 33 bp, Homo sapien
ccaagaaatctgattccaatgcctttgcttata

SEQ ID NO: 159508 - DNA, 33 bp, Homo sapien
ccaagaaatctgattctaatgcctttgcttata

SEQ ID NO: 159509 - DNA, 33 bp, Homo sapien
tgaaactgaattcaaacttggactctagagggt

SEQ ID NO: 159510 - DNA, 33 bp, Homo sapien
tgaaactgaattcaaatttggactctagagggt

SEQ ID NO: 159511 - DNA, 33 bp, Homo sapien
acaaaggcattatggaaaaattgatttgttata

SEQ ID NO: 159512 - DNA, 33 bp, Homo sapien
acaaaggcattatggagaaattgatttgttata

SEQ ID NO: 159513 - DNA, 33 bp, Homo sapien
aattgtccctcttgcacaacccttcaaagattt

SEQ ID NO: 159514 - DNA, 33 bp, Homo sapien
aattgtccctcttgcataacccttcaaagattt

SEQ ID NO: 159515 - DNA, 33 bp, Homo sapien
ccaaatggattttggccatgaacaactgctatg

SEQ ID NO: 159516 - DNA, 33 bp, Homo sapien
ccaaatggattttggctatgaacaactgctatg

SEQ ID NO: 159517 - DNA, 33 bp, Homo sapien
caacaacgtaccagatcaaagacagtcaggtag

SEQ ID NO: 159518 - DNA, 33 bp, Homo sapien
caacaacgtaccagattaaagacagtcaggtag

SEQ ID NO: 159519 - DNA, 33 bp, Homo sapien
agtcatactctaaacactgctcgaacatctttg

SEQ ID NO: 159520 - DNA, 33 bp, Homo sapien
agtcatactctaaacattgctcgaacatctttg

SEQ ID NO: 159521 - DNA, 33 bp, Homo sapien
ttttctagtttttagacgtacacagtgtgttaa

SEQ ID NO: 159522 - DNA, 33 bp, Homo sapien
ttttctagtttttagatgtacacagtgtgttaa

SEQ ID NO: 159523 - DNA, 33 bp, Homo sapien
gtttataatgtgaacacgagataatattacaat

SEQ ID NO: 159524 - DNA, 33 bp, Homo sapien
gtttataatgtgaacatgagataatattacaat

SEQ ID NO: 159525 - DNA, 33 bp, Homo sapien
aatccctggattactcaaacacaagaatattgt

SEQ ID NO: 159526 - DNA, 33 bp, Homo sapien
aatccctggattactcgaacacaagaatattgt

SEQ ID NO: 159527 - DNA, 33 bp, Homo sapien
tatttttattctttgcactagttttgcctataa

SEQ ID NO: 159528 - DNA, 33 bp, Homo sapien
tatttttattctttgcgctagttttgcctataa

SEQ ID NO: 159529 - DNA, 33 bp, Homo sapien
caatctgctgagacacaaatatttaattaatga

SEQ ID NO: 159530 - DNA, 33 bp, Homo sapien
caatctgctgagacaccaatatttaattaatga

SEQ ID NO: 159531 - DNA, 33 bp, Homo sapien
gctaataatctctgtacctcatcttctcttgac

SEQ ID NO: 159532 - DNA, 33 bp, Homo sapien
gctaataatctctgtatctcatcttctcttgac

SEQ ID NO: 159533 - DNA, 33 bp, Homo sapien
aaaacaataacaaacacgagtttacctggattg

SEQ ID NO: 159534 - DNA, 33 bp, Homo sapien
aaaacaataacaaacatgagtttacctggattg

SEQ ID NO: 159535 - DNA, 33 bp, Homo sapien
taagcttggccaaatgcatattcctatctgctc

SEQ ID NO: 159536 - DNA, 33 bp, Homo sapien
taagcttggccaaatgtatattcctatctgctc

SEQ ID NO: 159537 - DNA, 33 bp, Homo sapien
aagcctgtgagttgaaagctgtaggtcatggat

SEQ ID NO: 159538 - DNA, 33 bp, Homo sapien
aagcctgtgagttgaacgctgtaggtcatggat

SEQ ID NO: 159539 - DNA, 33 bp, Homo sapien
cagtctatcatctccaactatatacccaccatt

SEQ ID NO: 159540 - DNA, 33 bp, Homo sapien
cagtctatcatctccacctatatacccaccatt

SEQ ID NO: 159541 - DNA, 33 bp, Homo sapien
ctgttaacagttaattcaagcctgcaaatatca

SEQ ID NO: 159542 - DNA, 33 bp, Homo sapien
ctgttaacagttaatttaagcctgcaaatatca

SEQ ID NO: 159543 - DNA, 33 bp, Homo sapien
agttaactgtattacaatctacaatgccatcta

SEQ ID NO: 159544 - DNA, 33 bp, Homo sapien
agttaactgtattacagtctacaatgccatcta

SEQ ID NO: 159545 - DNA, 33 bp, Homo sapien
ctagtacaatcgtttccatcataaaatttgaaa

SEQ ID NO: 159546 - DNA, 33 bp, Homo sapien
ctagtacaatcgtttctatcataaaatttgaaa

SEQ ID NO: 159547 - DNA, 33 bp, Homo sapien
ggttgctatgccttcagtatcaaatttctcact

SEQ ID NO: 159548 - DNA, 33 bp, Homo sapien
ggttgctatgccttcattatcaaatttctcact

SEQ ID NO: 159549 - DNA, 33 bp, Homo sapien
aacaaaacagagagtaaatttttgttgcatgaa

SEQ ID NO: 159550 - DNA, 33 bp, Homo sapien
aacaaaacagagagtagatttttgttgcatgaa

SEQ ID NO: 159551 - DNA, 33 bp, Homo sapien
tatctatctcaaaaacccacagcttgtctgaat

SEQ ID NO: 159552 - DNA, 33 bp, Homo sapien
tatctatctcaaaaacgcacagcttgtctgaat

SEQ ID NO: 159553 - DNA, 33 bp, Homo sapien
tcatactcagtggtgagaatgagaagcttttcc

SEQ ID NO: 159554 - DNA, 33 bp, Homo sapien
tcatactcagtggtgataatgagaagcttttcc

SEQ ID NO: 159555 - DNA, 33 bp, Homo sapien
tgctgcaataaacaaacctgtgaatgtgccttt

SEQ ID NO: 159556 - DNA, 33 bp, Homo sapien
tgctgcaataaacaaatctgtgaatgtgccttt

SEQ ID NO: 159557 - DNA, 33 bp, Homo sapien
ttgacagttcaaagatcaataatgttgactggt

SEQ ID NO: 159558 - DNA, 33 bp, Homo sapien
ttgacagttcaaagattaataatgttgactggt

SEQ ID NO: 159559 - DNA, 33 bp, Homo sapien
taaaagattctactacaatacaagtccattata

SEQ ID NO: 159560 - DNA, 33 bp, Homo sapien
taaaagattctactaccatacaagtccattata

SEQ ID NO: 159561 - DNA, 33 bp, Homo sapien
ccacaagccaaataaacagaggctgacccaggc

SEQ ID NO: 159562 - DNA, 33 bp, Homo sapien
ccacaagccaaataaagagaggctgacccaggc

SEQ ID NO: 159563 - DNA, 33 bp, Homo sapien
ataaaattaagttgtgaaatcacagcaccaacc

SEQ ID NO: 159564 - DNA, 33 bp, Homo sapien
ataaaattaagttgtgcaatcacagcaccaacc

SEQ ID NO: 159565 - DNA, 33 bp, Homo sapien
tctcagaagtggaagacggtataatgttgtgga

SEQ ID NO: 159566 - DNA, 33 bp, Homo sapien
tctcagaagtggaagatggtataatgttgtgga

SEQ ID NO: 159567 - DNA, 33 bp, Homo sapien
agcatgacattctgcccatttgcttgtctatac

SEQ ID NO: 159568 - DNA, 33 bp, Homo sapien
agcatgacattctgcctatttgcttgtctatac

SEQ ID NO: 159569 - DNA, 33 bp, Homo sapien
tttctaacaaatcccacgtatgcagactgctgt

SEQ ID NO: 159570 - DNA, 33 bp, Homo sapien
tttctaacaaatcccaggtatgcagactgctgt

SEQ ID NO: 159571 - DNA, 33 bp, Homo sapien
agtcttatttgtttacagaggtttgtctaatga

SEQ ID NO: 159572 - DNA, 33 bp, Homo sapien
agtcttatttgtttactgaggtttgtctaatga

SEQ ID NO: 159573 - DNA, 33 bp, Homo sapien
atgacaactagactggccagtgattaacatttt

SEQ ID NO: 159574 - DNA, 33 bp, Homo sapien
atgacaactagactggtcagtgattaacatttt

SEQ ID NO: 159575 - DNA, 33 bp, Homo sapien
atacatcagagaaaacccaagataatgctattc

SEQ ID NO: 159576 - DNA, 33 bp, Homo sapien
atacatcagagaaaactcaagataatgctattc

SEQ ID NO: 159577 - DNA, 33 bp, Homo sapien
gcatttattcacatgaaagttgaactgcttgtt

SEQ ID NO: 159578 - DNA, 33 bp, Homo sapien
gcatttattcacatgagagttgaactgcttgtt

SEQ ID NO: 159579 - DNA, 33 bp, Homo sapien
tcttacttcagttaaaaggttccacatagtgga

SEQ ID NO: 159580 - DNA, 33 bp, Homo sapien
tcttacttcagttaaacggttccacatagtgga

SEQ ID NO: 159581 - DNA, 33 bp, Homo sapien
ctgaagcaaatcacaaaggaagggtttcaagat

SEQ ID NO: 159582 - DNA, 33 bp, Homo sapien
ctgaagcaaatcacaagggaagggtttcaagat

SEQ ID NO: 159583 - DNA, 33 bp, Homo sapien
aaaagcaacacagagcaaatcatattagtgctt

SEQ ID NO: 159584 - DNA, 33 bp, Homo sapien
aaaagcaacacagagcgaatcatattagtgctt

SEQ ID NO: 159585 - DNA, 33 bp, Homo sapien
tgaaccagttaacaaactccaaaatgaggaatg

SEQ ID NO: 159586 - DNA, 33 bp, Homo sapien
tgaaccagttaacaaattccaaaatgaggaatg

SEQ ID NO: 159587 - DNA, 33 bp, Homo sapien
cagctttgctatgcaccctgatacaaattttgt

SEQ ID NO: 159588 - DNA, 33 bp, Homo sapien
cagctttgctatgcactctgatacaaattttgt

SEQ ID NO: 159589 - DNA, 33 bp, Homo sapien
ttgttaagcccctgcaaaactcccaggtctctc

SEQ ID NO: 159590 - DNA, 33 bp, Homo sapien
ttgttaagcccctgcagaactcccaggtctctc

SEQ ID NO: 159591 - DNA, 33 bp, Homo sapien
taaatattaaagcaaaagtgatcacaaaagctg

SEQ ID NO: 159592 - DNA, 33 bp, Homo sapien
taaatattaaagcaaaggtgatcacaaaagctg

SEQ ID NO: 159593 - DNA, 33 bp, Homo sapien
ttaggccaattttcacaaaaagtattaagaacc

SEQ ID NO: 159594 - DNA, 33 bp, Homo sapien
ttaggccaattttcacgaaaagtattaagaacc

SEQ ID NO: 159595 - DNA, 33 bp, Homo sapien
tttgctaaaatctaaaatataatgccatttagc

SEQ ID NO: 159596 - DNA, 33 bp, Homo sapien
tttgctaaaatctaaactataatgccatttagc

SEQ ID NO: 159597 - DNA, 33 bp, Homo sapien
gtctgagagttagttacgtattaacacagcaga

SEQ ID NO: 159598 - DNA, 33 bp, Homo sapien
gtctgagagttagttatgtattaacacagcaga

SEQ ID NO: 159599 - DNA, 33 bp, Homo sapien
taattattatgaagtcaaagcagaacagtgaga

SEQ ID NO: 159600 - DNA, 33 bp, Homo sapien
taattattatgaagtcgaagcagaacagtgaga

SEQ ID NO: 159601 - DNA, 33 bp, Homo sapien
tcaaatctagaaacctcactctaggaatttata

SEQ ID NO: 159602 - DNA, 33 bp, Homo sapien
tcaaatctagaaacctgactctaggaatttata

SEQ ID NO: 159603 - DNA, 33 bp, Homo sapien
tcttgaaaaggcaaaaaggtaacatgtaacaat

SEQ ID NO: 159604 - DNA, 33 bp, Homo sapien
tcttgaaaaggcaaaagggtaacatgtaacaat

SEQ ID NO: 159605 - DNA, 33 bp, Homo sapien
gccagtatgtacatgacgtgatttgcctctaaa

SEQ ID NO: 159606 - DNA, 33 bp, Homo sapien
gccagtatgtacatgatgtgatttgcctctaaa

SEQ ID NO: 159607 - DNA, 33 bp, Homo sapien
ggtcctctcagaataaaatacaaactcttaaat

SEQ ID NO: 159608 - DNA, 33 bp, Homo sapien
ggtcctctcagaataacatacaaactcttaaat

SEQ ID NO: 159609 - DNA, 33 bp, Homo sapien
gtatctagtggtagacagaggatagtgagtgaa

SEQ ID NO: 159610 - DNA, 33 bp, Homo sapien
gtatctagtggtagacggaggatagtgagtgaa

SEQ ID NO: 159611 - DNA, 33 bp, Homo sapien
ccataagacctttaaaactgctatattctacca

SEQ ID NO: 159612 - DNA, 33 bp, Homo sapien
ccataagacctttaaacctgctatattctacca

SEQ ID NO: 159613 - DNA, 33 bp, Homo sapien
cagtgaattgatgagagaggctaggacgttact

SEQ ID NO: 159614 - DNA, 33 bp, Homo sapien
cagtgaattgatgagataggctaggacgttact

SEQ ID NO: 159615 - DNA, 33 bp, Homo sapien
cttgagtggatggttccaagagaggctttcctg

SEQ ID NO: 159616 - DNA, 33 bp, Homo sapien
cttgagtggatggttctaagagaggctttcctg

SEQ ID NO: 159617 - DNA, 33 bp, Homo sapien
tccacttgaccaagaaatcgtgtgggcttagaa

SEQ ID NO: 159618 - DNA, 33 bp, Homo sapien
tccacttgaccaagaagtcgtgtgggcttagaa

SEQ ID NO: 159619 - DNA, 33 bp, Homo sapien
tcaccttcaaatggaacgccatcaagctaacag

SEQ ID NO: 159620 - DNA, 33 bp, Homo sapien
tcaccttcaaatggaatgccatcaagctaacag

SEQ ID NO: 159621 - DNA, 33 bp, Homo sapien
tgtggggtgccatataggtagtattctggaggt

SEQ ID NO: 159622 - DNA, 33 bp, Homo sapien
tgtggggtgccatatatgtagtattctggaggt

SEQ ID NO: 159623 - DNA, 33 bp, Homo sapien
tattatttgaaagttacgtacactgtgtataca

SEQ ID NO: 159624 - DNA, 33 bp, Homo sapien
tattatttgaaagttatgtacactgtgtataca

SEQ ID NO: 159625 - DNA, 33 bp, Homo sapien
cactccagtaacctcacgttgatatgattagct

SEQ ID NO: 159626 - DNA, 33 bp, Homo sapien
cactccagtaacctcatgttgatatgattagct

SEQ ID NO: 159627 - DNA, 33 bp, Homo sapien
agacagaattggccaaaaaaaggctttaagggc

SEQ ID NO: 159628 - DNA, 33 bp, Homo sapien
agacagaattggccaagaaaaggctttaagggc

SEQ ID NO: 159629 - DNA, 33 bp, Homo sapien
ttttgtgtgtgggaaaacatttataaattttct

SEQ ID NO: 159630 - DNA, 33 bp, Homo sapien
ttttgtgtgtgggaaatcatttataaattttct

SEQ ID NO: 159631 - DNA, 33 bp, Homo sapien
gattctcaaattgggaataagaagccataggga

SEQ ID NO: 159632 - DNA, 33 bp, Homo sapien
gattctcaaattgggagtaagaagccataggga

SEQ ID NO: 159633 - DNA, 33 bp, Homo sapien
ggattaagagaaagccaccttttagatagctct

SEQ ID NO: 159634 - DNA, 33 bp, Homo sapien
ggattaagagaaagccgccttttagatagctct

SEQ ID NO: 159635 - DNA, 33 bp, Homo sapien
gcattttgcaatacccactcagcagccatttac

SEQ ID NO: 159636 - DNA, 33 bp, Homo sapien
gcattttgcaatacccgctcagcagccatttac

SEQ ID NO: 159637 - DNA, 33 bp, Homo sapien
ttacttttacaactcaaagttctgtgtactatc

SEQ ID NO: 159638 - DNA, 33 bp, Homo sapien
ttacttttacaactcagagttctgtgtactatc

SEQ ID NO: 159639 - DNA, 33 bp, Homo sapien
atttgcaaataacatgaatggaactcgaggaca

SEQ ID NO: 159640 - DNA, 33 bp, Homo sapien
atttgcaaataacatggatggaactcgaggaca

SEQ ID NO: 159641 - DNA, 33 bp, Homo sapien
agccaattatttctcaatctcataaccattatt

SEQ ID NO: 159642 - DNA, 33 bp, Homo sapien
agccaattatttctcagtctcataaccattatt

SEQ ID NO: 159643 - DNA, 33 bp, Homo sapien
tattaacatggatgacggaacaaatcaatgaaa

SEQ ID NO: 159644 - DNA, 33 bp, Homo sapien
tattaacatggatgactgaacaaatcaatgaaa

SEQ ID NO: 159645 - DNA, 33 bp, Homo sapien
atgaaatagtgttcagaagtagatacacatata

SEQ ID NO: 159646 - DNA, 33 bp, Homo sapien
atgaaatagtgttcagcagtagatacacatata

SEQ ID NO: 159647 - DNA, 33 bp, Homo sapien
gcaatgccatcaatgactaaatacagctatact

SEQ ID NO: 159648 - DNA, 33 bp, Homo sapien
gcaatgccatcaatgagtaaatacagctatact

SEQ ID NO: 159649 - DNA, 33 bp, Homo sapien
attatattcatggtcccagccaattccataaat

SEQ ID NO: 159650 - DNA, 33 bp, Homo sapien
attatattcatggtcctagccaattccataaat

SEQ ID NO: 159651 - DNA, 33 bp, Homo sapien
gtgtctgtgttcatgacaggtagtagcctgtaa

SEQ ID NO: 159652 - DNA, 33 bp, Homo sapien
gtgtctgtgttcatgagaggtagtagcctgtaa

SEQ ID NO: 159653 - DNA, 33 bp, Homo sapien
ggggagtagaattttgcagggctagcagggtgg

SEQ ID NO: 159654 - DNA, 33 bp, Homo sapien
ggggagtagaattttgtagggctagcagggtgg

SEQ ID NO: 159655 - DNA, 33 bp, Homo sapien
atctgctcacctaggaaagatgctgcttgctgc

SEQ ID NO: 159656 - DNA, 33 bp, Homo sapien
atctgctcacctaggacagatgctgcttgctgc

SEQ ID NO: 159657 - DNA, 33 bp, Homo sapien
agagcaggaactatcacaaaatcttggcacaaa

SEQ ID NO: 159658 - DNA, 33 bp, Homo sapien
agagcaggaactatcataaaatcttggcacaaa

SEQ ID NO: 159659 - DNA, 33 bp, Homo sapien
ttgaatgggaagatgcaaaaaggcaaggcagtc

SEQ ID NO: 159660 - DNA, 33 bp, Homo sapien
ttgaatgggaagatgcgaaaaggcaaggcagtc

SEQ ID NO: 159661 - DNA, 33 bp, Homo sapien
gttcagggctatgctaaaaattagtaggccaaa

SEQ ID NO: 159662 - DNA, 33 bp, Homo sapien
gttcagggctatgctagaaattagtaggccaaa

SEQ ID NO: 159663 - DNA, 33 bp, Homo sapien
gtgtttaaatattctacgctctgcttattcgtg

SEQ ID NO: 159664 - DNA, 33 bp, Homo sapien
gtgtttaaatattctatgctctgcttattcgtg

SEQ ID NO: 159665 - DNA, 33 bp, Homo sapien
tcccagtatctgtctccgaatatttttgtattt

SEQ ID NO: 159666 - DNA, 33 bp, Homo sapien
tcccagtatctgtctctgaatatttttgtattt

SEQ ID NO: 159667 - DNA, 33 bp, Homo sapien
cctttgtgatatctgcacaatggtcttagtttt

SEQ ID NO: 159668 - DNA, 33 bp, Homo sapien
cctttgtgatatctgcgcaatggtcttagtttt

SEQ ID NO: 159669 - DNA, 33 bp, Homo sapien
tgtatatttcaatagccgcagaaaaggttttca

SEQ ID NO: 159670 - DNA, 33 bp, Homo sapien
tgtatatttcaatagctgcagaaaaggttttca

SEQ ID NO: 159671 - DNA, 33 bp, Homo sapien
tttctgctatcttcaacctgaatttaagaaaat

SEQ ID NO: 159672 - DNA, 33 bp, Homo sapien
tttctgctatcttcaatctgaatttaagaaaat

SEQ ID NO: 159673 - DNA, 33 bp, Homo sapien
tctaagatcaacatgaaggaaataatgctaaaa

SEQ ID NO: 159674 - DNA, 33 bp, Homo sapien
tctaagatcaacatgagggaaataatgctaaaa

SEQ ID NO: 159675 - DNA, 33 bp, Homo sapien
ggaaggcacatacatcccagaacatgactgtct

SEQ ID NO: 159676 - DNA, 33 bp, Homo sapien
ggaaggcacatacatctcagaacatgactgtct

SEQ ID NO: 159677 - DNA, 33 bp, Homo sapien
taatggtctggatctgcattttcctaatcatta

SEQ ID NO: 159678 - DNA, 33 bp, Homo sapien
taatggtctggatctggattttcctaatcatta

SEQ ID NO: 159679 - DNA, 33 bp, Homo sapien
tctttattagatggaccaaaggagcctttttat

SEQ ID NO: 159680 - DNA, 33 bp, Homo sapien
tctttattagatggacgaaaggagcctttttat

SEQ ID NO: 159681 - DNA, 33 bp, Homo sapien
atttatatgagggctaaaaggacagatgaaagt

SEQ ID NO: 159682 - DNA, 33 bp, Homo sapien
atttatatgagggctagaaggacagatgaaagt

SEQ ID NO: 159683 - DNA, 33 bp, Homo sapien
tttacttaagtctcgccatatactgctttacgt

SEQ ID NO: 159684 - DNA, 33 bp, Homo sapien
tttacttaagtctcgctatatactgctttacgt

SEQ ID NO: 159685 - DNA, 33 bp, Homo sapien
acccatttggtacacactggtattatttcagaa

SEQ ID NO: 159686 - DNA, 33 bp, Homo sapien
acccatttggtacacagtggtattatttcagaa

SEQ ID NO: 159687 - DNA, 33 bp, Homo sapien
atattaaatttcagaaagggcgtgtgacttgcc

SEQ ID NO: 159688 - DNA, 33 bp, Homo sapien
atattaaatttcagaacgggcgtgtgacttgcc

SEQ ID NO: 159689 - DNA, 33 bp, Homo sapien
agtagtcatttagtccaaaaaaaaattgtgaaa

SEQ ID NO: 159690 - DNA, 33 bp, Homo sapien
agtagtcatttagtccgaaaaaaaattgtgaaa

SEQ ID NO: 159691 - DNA, 33 bp, Homo sapien
aggctgcatagcagaaagtgagcagtacagtgg

SEQ ID NO: 159692 - DNA, 33 bp, Homo sapien
aggctgcatagcagaaggtgagcagtacagtgg

SEQ ID NO: 159693 - DNA, 33 bp, Homo sapien
aggctgagaccataaaactatacaagatcaatt

SEQ ID NO: 159694 - DNA, 33 bp, Homo sapien
aggctgagaccataaacctatacaagatcaatt

SEQ ID NO: 159695 - DNA, 33 bp, Homo sapien
gaacttatctggataacggatgaagtttttaac

SEQ ID NO: 159696 - DNA, 33 bp, Homo sapien
gaacttatctggataatggatgaagtttttaac

SEQ ID NO: 159697 - DNA, 33 bp, Homo sapien
tgccaggtgttgtagacgggtgttagataatcc

SEQ ID NO: 159698 - DNA, 33 bp, Homo sapien
tgccaggtgttgtagatgggtgttagataatcc

SEQ ID NO: 159699 - DNA, 33 bp, Homo sapien
aaagcaagttttaaagaaagtaagatataaata

SEQ ID NO: 159700 - DNA, 33 bp, Homo sapien
aaagcaagttttaaagtaagtaagatataaata

SEQ ID NO: 159701 - DNA, 33 bp, Homo sapien
ctctatgtatgttaccagagatatcgagttact

SEQ ID NO: 159702 - DNA, 33 bp, Homo sapien
ctctatgtatgttaccggagatatcgagttact

SEQ ID NO: 159703 - DNA, 33 bp, Homo sapien
gttatacctgaagaaacagaattctcatacatg

SEQ ID NO: 159704 - DNA, 33 bp, Homo sapien
gttatacctgaagaaatagaattctcatacatg

SEQ ID NO: 159705 - DNA, 33 bp, Homo sapien
caaagaaaagtacagacgagtttccagaaatga

SEQ ID NO: 159706 - DNA, 33 bp, Homo sapien
caaagaaaagtacagatgagtttccagaaatga

SEQ ID NO: 159707 - DNA, 33 bp, Homo sapien
tactgaaagaatctctaaacaacatcttgtgtt

SEQ ID NO: 159708 - DNA, 33 bp, Homo sapien
tactgaaagaatctctgaacaacatcttgtgtt

SEQ ID NO: 159709 - DNA, 33 bp, Homo sapien
cccgaatccctagccaaagaaattgtttcagat

SEQ ID NO: 159710 - DNA, 33 bp, Homo sapien
cccgaatccctagccacagaaattgtttcagat

SEQ ID NO: 159711 - DNA, 33 bp, Homo sapien
atgacagtaaggataacataaactgcagatgct

SEQ ID NO: 159712 - DNA, 33 bp, Homo sapien
atgacagtaaggataagataaactgcagatgct

SEQ ID NO: 159713 - DNA, 33 bp, Homo sapien
aattcttgtgtagatccaaaggtagctatgcat

SEQ ID NO: 159714 - DNA, 33 bp, Homo sapien
aattcttgtgtagatctaaaggtagctatgcat

SEQ ID NO: 159715 - DNA, 33 bp, Homo sapien
cgaagagggtctctaactccgtgaaccaattac

SEQ ID NO: 159716 - DNA, 33 bp, Homo sapien
cgaagagggtctctaattccgtgaaccaattac

SEQ ID NO: 159717 - DNA, 33 bp, Homo sapien
gacaggtgaattaatcactaacatctttgttta

SEQ ID NO: 159718 - DNA, 33 bp, Homo sapien
gacaggtgaattaatcgctaacatctttgttta

SEQ ID NO: 159719 - DNA, 33 bp, Homo sapien
ttgtggttcacaaaacagttttagcagattatc

SEQ ID NO: 159720 - DNA, 33 bp, Homo sapien
ttgtggttcacaaaacggttttagcagattatc

SEQ ID NO: 159721 - DNA, 33 bp, Homo sapien
ataacagcatttacaaaactcttgagaaagttg

SEQ ID NO: 159722 - DNA, 33 bp, Homo sapien
ataacagcatttacaatactcttgagaaagttg

SEQ ID NO: 159723 - DNA, 33 bp, Homo sapien
gttggaatttttctcaagatattgtcagattga

SEQ ID NO: 159724 - DNA, 33 bp, Homo sapien
gttggaatttttctcaggatattgtcagattga

SEQ ID NO: 159725 - DNA, 33 bp, Homo sapien
tggtgcattgtgcaaagccaagagataggcaat

SEQ ID NO: 159726 - DNA, 33 bp, Homo sapien
tggtgcattgtgcaaatccaagagataggcaat

SEQ ID NO: 159727 - DNA, 33 bp, Homo sapien
aagccaaagattctgccagtaaaaagaaaactt

SEQ ID NO: 159728 - DNA, 33 bp, Homo sapien
aagccaaagattctgcgagtaaaaagaaaactt

SEQ ID NO: 159729 - DNA, 33 bp, Homo sapien
cttagaacgtgactcacgactcattttagaatc

SEQ ID NO: 159730 - DNA, 33 bp, Homo sapien
cttagaacgtgactcatgactcattttagaatc

SEQ ID NO: 159731 - DNA, 33 bp, Homo sapien
catttaaagtcttcacacataaagaatcataac

SEQ ID NO: 159732 - DNA, 33 bp, Homo sapien
catttaaagtcttcacgcataaagaatcataac

SEQ ID NO: 159733 - DNA, 33 bp, Homo sapien
ccaacaatcacatgagaaaaagttcattatcac

SEQ ID NO: 159734 - DNA, 33 bp, Homo sapien
ccaacaatcacatgagcaaaagttcattatcac

SEQ ID NO: 159735 - DNA, 33 bp, Homo sapien
atctctgcacggaccaaagacattgtaaagttt

SEQ ID NO: 159736 - DNA, 33 bp, Homo sapien
atctctgcacggaccatagacattgtaaagttt

SEQ ID NO: 159737 - DNA, 33 bp, Homo sapien
acatccttacccaaaggcttgtggagttgaggg

SEQ ID NO: 159738 - DNA, 33 bp, Homo sapien
acatccttacccaaagtcttgtggagttgaggg

SEQ ID NO: 159739 - DNA, 33 bp, Homo sapien
ttatcattttttgttgcaatttattaccattcg

SEQ ID NO: 159740 - DNA, 33 bp, Homo sapien
ttatcattttttgttggaatttattaccattcg

SEQ ID NO: 159741 - DNA, 33 bp, Homo sapien
gctcaattactgtaaaatggtgtacaataagcc

SEQ ID NO: 159742 - DNA, 33 bp, Homo sapien
gctcaattactgtaaagtggtgtacaataagcc

SEQ ID NO: 159743 - DNA, 33 bp, Homo sapien
tcaccatgctatacaacagatcaccacaaatta

SEQ ID NO: 159744 - DNA, 33 bp, Homo sapien
tcaccatgctatacaatagatcaccacaaatta

SEQ ID NO: 159745 - DNA, 33 bp, Homo sapien
ctaatctacattcccactgacaatgaaaaaagg

SEQ ID NO: 159746 - DNA, 33 bp, Homo sapien
ctaatctacattcccagtgacaatgaaaaaagg

SEQ ID NO: 159747 - DNA, 33 bp, Homo sapien
agaaggcaattgtgcacacaaaaagatataaag

SEQ ID NO: 159748 - DNA, 33 bp, Homo sapien
agaaggcaattgtgcatacaaaaagatataaag

SEQ ID NO: 159749 - DNA, 33 bp, Homo sapien
ggaggccttagcagacggtagcctctaatacac

SEQ ID NO: 159750 - DNA, 33 bp, Homo sapien
ggaggccttagcagactgtagcctctaatacac

SEQ ID NO: 159751 - DNA, 33 bp, Homo sapien
agatacttccctgaggaaaacttacttctaaca

SEQ ID NO: 159752 - DNA, 33 bp, Homo sapien
agatacttccctgaggtaaacttacttctaaca

SEQ ID NO: 159753 - DNA, 33 bp, Homo sapien
ttgctgcaacagccaaggattcagttacatgat

SEQ ID NO: 159754 - DNA, 33 bp, Homo sapien
ttgctgcaacagccaatgattcagttacatgat

SEQ ID NO: 159755 - DNA, 33 bp, Homo sapien
ttgattttgaggatgaagagtggataaagacac

SEQ ID NO: 159756 - DNA, 33 bp, Homo sapien
ttgattttgaggatgaggagtggataaagacac

SEQ ID NO: 159757 - DNA, 33 bp, Homo sapien
tgaagatgaaaatagccaatcacagatgaagat

SEQ ID NO: 159758 - DNA, 33 bp, Homo sapien
tgaagatgaaaatagctaatcacagatgaagat

SEQ ID NO: 159759 - DNA, 33 bp, Homo sapien
tgataagctagattacacttgttaacttattag

SEQ ID NO: 159760 - DNA, 33 bp, Homo sapien
tgataagctagattacgcttgttaacttattag

SEQ ID NO: 159761 - DNA, 33 bp, Homo sapien
aaaaagaaactacctcaaaactatttgtaaaca

SEQ ID NO: 159762 - DNA, 33 bp, Homo sapien
aaaaagaaactacctcgaaactatttgtaaaca

SEQ ID NO: 159763 - DNA, 33 bp, Homo sapien
ccatcatagaacacaactggcagtaccaaggtc

SEQ ID NO: 159764 - DNA, 33 bp, Homo sapien
ccatcatagaacacaattggcagtaccaaggtc

SEQ ID NO: 159765 - DNA, 33 bp, Homo sapien
ctcacaactttggtaactgttaatcagtggtaa

SEQ ID NO: 159766 - DNA, 33 bp, Homo sapien
ctcacaactttggtaattgttaatcagtggtaa

SEQ ID NO: 159767 - DNA, 33 bp, Homo sapien
aaagcattccaaataaagaactctcccagtagt

SEQ ID NO: 159768 - DNA, 33 bp, Homo sapien
aaagcattccaaataaggaactctcccagtagt

SEQ ID NO: 159769 - DNA, 33 bp, Homo sapien
tttcaagaatcaagaacctcctatttacttgtg

SEQ ID NO: 159770 - DNA, 33 bp, Homo sapien
tttcaagaatcaagaatctcctatttacttgtg

SEQ ID NO: 159771 - DNA, 33 bp, Homo sapien
tatatggcttagagaaacttgtaaatagcctgt

SEQ ID NO: 159772 - DNA, 33 bp, Homo sapien
tatatggcttagagaagcttgtaaatagcctgt

SEQ ID NO: 159773 - DNA, 33 bp, Homo sapien
cttgggtcttccaaagccttggcaaacttaaca

SEQ ID NO: 159774 - DNA, 33 bp, Homo sapien
cttgggtcttccaaaggcttggcaaacttaaca

SEQ ID NO: 159775 - DNA, 33 bp, Homo sapien
tccatatgaaagactaatacttttgcctgctta

SEQ ID NO: 159776 - DNA, 33 bp, Homo sapien
tccatatgaaagactagtacttttgcctgctta

SEQ ID NO: 159777 - DNA, 33 bp, Homo sapien
tcttacttttgtcttacgcttcagatacgtttt

SEQ ID NO: 159778 - DNA, 33 bp, Homo sapien
tcttacttttgtcttatgcttcagatacgtttt

SEQ ID NO: 159779 - DNA, 33 bp, Homo sapien
gctcccacatgacttccatagcatctatacatg

SEQ ID NO: 159780 - DNA, 33 bp, Homo sapien
gctcccacatgacttctatagcatctatacatg

SEQ ID NO: 159781 - DNA, 33 bp, Homo sapien
gagagtagatattgtcagaaaagggtaattcct

SEQ ID NO: 159782 - DNA, 33 bp, Homo sapien
gagagtagatattgtctgaaaagggtaattcct

SEQ ID NO: 159783 - DNA, 33 bp, Homo sapien
atgtggcccattaacaccattacagttatttgt

SEQ ID NO: 159784 - DNA, 33 bp, Homo sapien
atgtggcccattaacatcattacagttatttgt

SEQ ID NO: 159785 - DNA, 33 bp, Homo sapien
taaagaaatgtgtaaacgttagcattgttaaaa

SEQ ID NO: 159786 - DNA, 33 bp, Homo sapien
taaagaaatgtgtaaatgttagcattgttaaaa

SEQ ID NO: 159787 - DNA, 33 bp, Homo sapien
cagacctagtcaagctgaaaattattgcacatc

SEQ ID NO: 159788 - DNA, 33 bp, Homo sapien
cagacctagtcaagcttaaaattattgcacatc

SEQ ID NO: 159789 - DNA, 33 bp, Homo sapien
taacaagtccattgaaaaataacgtctcttatg

SEQ ID NO: 159790 - DNA, 33 bp, Homo sapien
taacaagtccattgaagaataacgtctcttatg

SEQ ID NO: 159791 - DNA, 33 bp, Homo sapien
gttgcaaggtctacatcagtagtttttatttgt

SEQ ID NO: 159792 - DNA, 33 bp, Homo sapien
gttgcaaggtctacattagtagtttttatttgt

SEQ ID NO: 159793 - DNA, 33 bp, Homo sapien
cagactgcttttgtggaaattactgatgagtaa

SEQ ID NO: 159794 - DNA, 33 bp, Homo sapien
cagactgcttttgtggcaattactgatgagtaa

SEQ ID NO: 159795 - DNA, 33 bp, Homo sapien
ttcatgtttgactttagggagaatatgttggct

SEQ ID NO: 159796 - DNA, 33 bp, Homo sapien
ttcatgtttgactttatggagaatatgttggct

SEQ ID NO: 159797 - DNA, 33 bp, Homo sapien
aaatcgaaataagtgccccacagtttcagaggc

SEQ ID NO: 159798 - DNA, 33 bp, Homo sapien
aaatcgaaataagtgctccacagtttcagaggc

SEQ ID NO: 159799 - DNA, 33 bp, Homo sapien
tgtcttttatttgacaatgctgaaaatatgccc

SEQ ID NO: 159800 - DNA, 33 bp, Homo sapien
tgtcttttatttgacagtgctgaaaatatgccc

SEQ ID NO: 159801 - DNA, 33 bp, Homo sapien
cctgttgttctgccaacaaactactcctgtttt

SEQ ID NO: 159802 - DNA, 33 bp, Homo sapien
cctgttgttctgccaataaactactcctgtttt

SEQ ID NO: 159803 - DNA, 33 bp, Homo sapien
tataacacttcttttcacagtaactcctagcag

SEQ ID NO: 159804 - DNA, 33 bp, Homo sapien
tataacacttcttttcgcagtaactcctagcag

SEQ ID NO: 159805 - DNA, 33 bp, Homo sapien
aaatttaattacaacactactgagaaggtcata

SEQ ID NO: 159806 - DNA, 33 bp, Homo sapien
aaatttaattacaacagtactgagaaggtcata

SEQ ID NO: 159807 - DNA, 33 bp, Homo sapien
gtttcctgataaacacagaaggcactaaaataa

SEQ ID NO: 159808 - DNA, 33 bp, Homo sapien
gtttcctgataaacactgaaggcactaaaataa

SEQ ID NO: 159809 - DNA, 33 bp, Homo sapien
tctgagacaagtgccaatcaatttagaagctta

SEQ ID NO: 159810 - DNA, 33 bp, Homo sapien
tctgagacaagtgccagtcaatttagaagctta

SEQ ID NO: 159811 - DNA, 33 bp, Homo sapien
tcagataaacaatgaacgacattttcgtataag

SEQ ID NO: 159812 - DNA, 33 bp, Homo sapien
tcagataaacaatgaatgacattttcgtataag

SEQ ID NO: 159813 - DNA, 33 bp, Homo sapien
gaaaataatggaaacactagacatattgattac

SEQ ID NO: 159814 - DNA, 33 bp, Homo sapien
gaaaataatggaaacagtagacatattgattac

SEQ ID NO: 159815 - DNA, 33 bp, Homo sapien
attgaagcaagccacaaatgggtctcaggtggt

SEQ ID NO: 159816 - DNA, 33 bp, Homo sapien
attgaagcaagccacagatgggtctcaggtggt

SEQ ID NO: 159817 - DNA, 33 bp, Homo sapien
gttgttttacctaatgacagaatttatggtaag

SEQ ID NO: 159818 - DNA, 33 bp, Homo sapien
gttgttttacctaatggcagaatttatggtaag

SEQ ID NO: 159819 - DNA, 33 bp, Homo sapien
ttgttaccacagaacaggaggtcttggcgttga

SEQ ID NO: 159820 - DNA, 33 bp, Homo sapien
ttgttaccacagaacatgaggtcttggcgttga

SEQ ID NO: 159821 - DNA, 33 bp, Homo sapien
tgcttgatagttttgaaaaggcctagtccagta

SEQ ID NO: 159822 - DNA, 33 bp, Homo sapien
tgcttgatagttttgagaaggcctagtccagta

SEQ ID NO: 159823 - DNA, 33 bp, Homo sapien
gacaagttgcctacaacgttttaagaacttgtt

SEQ ID NO: 159824 - DNA, 33 bp, Homo sapien
gacaagttgcctacaatgttttaagaacttgtt

SEQ ID NO: 159825 - DNA, 33 bp, Homo sapien
aatttatatcaattacaatgttactggcaggtc

SEQ ID NO: 159826 - DNA, 33 bp, Homo sapien
aatttatatcaattacgatgttactggcaggtc

SEQ ID NO: 159827 - DNA, 33 bp, Homo sapien
aaattaaatgtgaaaccgcagacctaaatcaat

SEQ ID NO: 159828 - DNA, 33 bp, Homo sapien
aaattaaatgtgaaacggcagacctaaatcaat

SEQ ID NO: 159829 - DNA, 33 bp, Homo sapien
gccaaaaaaggaggtaagagacaatagagctct

SEQ ID NO: 159830 - DNA, 33 bp, Homo sapien
gccaaaaaaggaggtaggagacaatagagctct

SEQ ID NO: 159831 - DNA, 33 bp, Homo sapien
aaaccaagaacattaaaaaaattatgagagcct

SEQ ID NO: 159832 - DNA, 33 bp, Homo sapien
aaaccaagaacattaacaaaattatgagagcct

SEQ ID NO: 159833 - DNA, 33 bp, Homo sapien
aaaaattacaaaatgcaaccaaaagagatataa

SEQ ID NO: 159834 - DNA, 33 bp, Homo sapien
aaaaattacaaaatgcgaccaaaagagatataa

SEQ ID NO: 159835 - DNA, 33 bp, Homo sapien
ataatattgtaactaaagagctcagcacagtac

SEQ ID NO: 159836 - DNA, 33 bp, Homo sapien
ataatattgtaactaaggagctcagcacagtac

SEQ ID NO: 159837 - DNA, 33 bp, Homo sapien
gagatctttaaaaaaaattgtcattaaacactt

SEQ ID NO: 159838 - DNA, 33 bp, Homo sapien
gagatctttaaaaaaatttgtcattaaacactt

SEQ ID NO: 159839 - DNA, 33 bp, Homo sapien
ttcatccattaacaaacacagtttatttctcta

SEQ ID NO: 159840 - DNA, 33 bp, Homo sapien
ttcatccattaacaaatacagtttatttctcta

SEQ ID NO: 159841 - DNA, 33 bp, Homo sapien
aaatgaaaactatcaaagaaacaaccttatcct

SEQ ID NO: 159842 - DNA, 33 bp, Homo sapien
aaatgaaaactatcaaggaaacaaccttatcct

SEQ ID NO: 159843 - DNA, 33 bp, Homo sapien
aataaagtttcattgaaatagtcacattcattc

SEQ ID NO: 159844 - DNA, 33 bp, Homo sapien
aataaagtttcattgatatagtcacattcattc

SEQ ID NO: 159845 - DNA, 33 bp, Homo sapien
gagtatattgagctcaccttattgtgaaatcca

SEQ ID NO: 159846 - DNA, 33 bp, Homo sapien
gagtatattgagctcatcttattgtgaaatcca

SEQ ID NO: 159847 - DNA, 33 bp, Homo sapien
gaacactaagattatgaaagttagaacaacgct

SEQ ID NO: 159848 - DNA, 33 bp, Homo sapien
gaacactaagattatggaagttagaacaacgct

SEQ ID NO: 159849 - DNA, 33 bp, Homo sapien
tatcaaatctctttcaacatccagaattcttga

SEQ ID NO: 159850 - DNA, 33 bp, Homo sapien
tatcaaatctctttcagcatccagaattcttga

SEQ ID NO: 159851 - DNA, 33 bp, Homo sapien
ctgatactgacacaccagagttttgaattttgc

SEQ ID NO: 159852 - DNA, 33 bp, Homo sapien
ctgatactgacacaccggagttttgaattttgc

SEQ ID NO: 159853 - DNA, 33 bp, Homo sapien
gagtgatgggtcataaactcggtgaaaaacaga

SEQ ID NO: 159854 - DNA, 33 bp, Homo sapien
gagtgatgggtcataacctcggtgaaaaacaga

SEQ ID NO: 159855 - DNA, 33 bp, Homo sapien
ttccttcttttttggccgaatattattcatata

SEQ ID NO: 159856 - DNA, 33 bp, Homo sapien
ttccttcttttttggctgaatattattcatata

SEQ ID NO: 159857 - DNA, 33 bp, Homo sapien
acagaataatacagaaggttgggtgacaaattt

SEQ ID NO: 159858 - DNA, 33 bp, Homo sapien
acagaataatacagaatgttgggtgacaaattt

SEQ ID NO: 159859 - DNA, 33 bp, Homo sapien
agcgtatagagaccaaggaatatctacagcaaa

SEQ ID NO: 159860 - DNA, 33 bp, Homo sapien
agcgtatagagaccaatgaatatctacagcaaa

SEQ ID NO: 159861 - DNA, 33 bp, Homo sapien
ttaaatgccaatgctcagaatatttaacctgca

SEQ ID NO: 159862 - DNA, 33 bp, Homo sapien
ttaaatgccaatgctcggaatatttaacctgca

SEQ ID NO: 159863 - DNA, 33 bp, Homo sapien
aaactatgattatacactatcagacttgaaaat

SEQ ID NO: 159864 - DNA, 33 bp, Homo sapien
aaactatgattatacagtatcagacttgaaaat

SEQ ID NO: 159865 - DNA, 33 bp, Homo sapien
ttttcaagtaacaataaccgcatttttttcttc

SEQ ID NO: 159866 - DNA, 33 bp, Homo sapien
ttttcaagtaacaatatccgcatttttttcttc

SEQ ID NO: 159867 - DNA, 33 bp, Homo sapien
taaaaagatgttatcaatgaagtaaactgttct

SEQ ID NO: 159868 - DNA, 33 bp, Homo sapien
taaaaagatgttatcagtgaagtaaactgttct

SEQ ID NO: 159869 - DNA, 33 bp, Homo sapien
ttttcactcagcttaaatccttgaagtttcatc

SEQ ID NO: 159870 - DNA, 33 bp, Homo sapien
ttttcactcagcttaattccttgaagtttcatc

SEQ ID NO: 159871 - DNA, 33 bp, Homo sapien
tatttcaaagtaacacagtagctccatgtttag

SEQ ID NO: 159872 - DNA, 33 bp, Homo sapien
tatttcaaagtaacacggtagctccatgtttag

SEQ ID NO: 159873 - DNA, 33 bp, Homo sapien
tttactgttactcattcaactttaacaaaatcc

SEQ ID NO: 159874 - DNA, 33 bp, Homo sapien
tttactgttactcattgaactttaacaaaatcc

SEQ ID NO: 159875 - DNA, 33 bp, Homo sapien
aggaaagcactattacagcttggttttgagtag

SEQ ID NO: 159876 - DNA, 33 bp, Homo sapien
aggaaagcactattacggcttggttttgagtag

SEQ ID NO: 159877 - DNA, 33 bp, Homo sapien
acatccaaacactataagcctaggacatctaaa

SEQ ID NO: 159878 - DNA, 33 bp, Homo sapien
acatccaaacactatatgcctaggacatctaaa

SEQ ID NO: 159879 - DNA, 33 bp, Homo sapien
tgaacctctttaagtcaaggttattgttcagca

SEQ ID NO: 159880 - DNA, 33 bp, Homo sapien
tgaacctctttaagtctaggttattgttcagca

SEQ ID NO: 159881 - DNA, 33 bp, Homo sapien
cattttggaatacagaactcagcatgtttatca

SEQ ID NO: 159882 - DNA, 33 bp, Homo sapien
cattttggaatacagagctcagcatgtttatca

SEQ ID NO: 159883 - DNA, 33 bp, Homo sapien
aatacactatctgggtaaaattctattattgtg

SEQ ID NO: 159884 - DNA, 33 bp, Homo sapien
aatacactatctgggtgaaattctattattgtg

SEQ ID NO: 159885 - DNA, 33 bp, Homo sapien
cagaaattgttcttgaataggtaaatttccttg

SEQ ID NO: 159886 - DNA, 33 bp, Homo sapien
cagaaattgttcttgagtaggtaaatttccttg

SEQ ID NO: 159887 - DNA, 33 bp, Homo sapien
taattatgtctctatcaatattttgggtgaaaa

SEQ ID NO: 159888 - DNA, 33 bp, Homo sapien
taattatgtctctatcgatattttgggtgaaaa

SEQ ID NO: 159889 - DNA, 33 bp, Homo sapien
aattgcttggagtatcacccttaagctaataaa

SEQ ID NO: 159890 - DNA, 33 bp, Homo sapien
aattgcttggagtatcgcccttaagctaataaa

SEQ ID NO: 159891 - DNA, 33 bp, Homo sapien
gcctgctgaagaagccaaattgttttgccacag

SEQ ID NO: 159892 - DNA, 33 bp, Homo sapien
gcctgctgaagaagccgaattgttttgccacag

SEQ ID NO: 159893 - DNA, 33 bp, Homo sapien
tctaatctgtaataagccccttctaccatatca

SEQ ID NO: 159894 - DNA, 33 bp, Homo sapien
tctaatctgtaataagtcccttctaccatatca

SEQ ID NO: 159895 - DNA, 33 bp, Homo sapien
ttggaggatagataaaatcagctttagtatcct

SEQ ID NO: 159896 - DNA, 33 bp, Homo sapien
ttggaggatagataaattcagctttagtatcct

SEQ ID NO: 159897 - DNA, 33 bp, Homo sapien
gaaagaataaataaccaataaatgacatgcgtt

SEQ ID NO: 159898 - DNA, 33 bp, Homo sapien
gaaagaataaataaccgataaatgacatgcgtt

SEQ ID NO: 159899 - DNA, 33 bp, Homo sapien
ctaggatgcttggttaaattctaaatttccatt

SEQ ID NO: 159900 - DNA, 33 bp, Homo sapien
ctaggatgcttggttatattctaaatttccatt

SEQ ID NO: 159901 - DNA, 33 bp, Homo sapien
agaggttaagttactgaaggcaagtgccatgga

SEQ ID NO: 159902 - DNA, 33 bp, Homo sapien
agaggttaagttactgcaggcaagtgccatgga

SEQ ID NO: 159903 - DNA, 33 bp, Homo sapien
atggtaaaatcacagaggctttgaaaagacagg

SEQ ID NO: 159904 - DNA, 33 bp, Homo sapien
atggtaaaatcacagatgctttgaaaagacagg

SEQ ID NO: 159905 - DNA, 33 bp, Homo sapien
gctgaaactatccccacattcatgtctcatccc

SEQ ID NO: 159906 - DNA, 33 bp, Homo sapien
gctgaaactatccccatattcatgtctcatccc

SEQ ID NO: 159907 - DNA, 33 bp, Homo sapien
tccagttaggacttaccgatgttgccgtactgc

SEQ ID NO: 159908 - DNA, 33 bp, Homo sapien
tccagttaggacttactgatgttgccgtactgc

SEQ ID NO: 159909 - DNA, 33 bp, Homo sapien
cgaattgaattaaataacaggacactcattgtc

SEQ ID NO: 159910 - DNA, 33 bp, Homo sapien
cgaattgaattaaatagcaggacactcattgtc

SEQ ID NO: 159911 - DNA, 33 bp, Homo sapien
atcatattgatttgtcgaggtaaaattaggata

SEQ ID NO: 159912 - DNA, 33 bp, Homo sapien
atcatattgatttgtctaggtaaaattaggata

SEQ ID NO: 159913 - DNA, 33 bp, Homo sapien
taccttatctacaggacgtggcttggtgtcact

SEQ ID NO: 159914 - DNA, 33 bp, Homo sapien
taccttatctacaggatgtggcttggtgtcact

SEQ ID NO: 159915 - DNA, 33 bp, Homo sapien
tctacccccagttctactaaggataagaacact

SEQ ID NO: 159916 - DNA, 33 bp, Homo sapien
tctacccccagttctattaaggataagaacact

SEQ ID NO: 159917 - DNA, 33 bp, Homo sapien
aataattgctagttgcccattagagaatactac

SEQ ID NO: 159918 - DNA, 33 bp, Homo sapien
aataattgctagttgctcattagagaatactac

SEQ ID NO: 159919 - DNA, 33 bp, Homo sapien
aaaactttggactaggccagaggaggtagacat

SEQ ID NO: 159920 - DNA, 33 bp, Homo sapien
aaaactttggactaggtcagaggaggtagacat

SEQ ID NO: 159921 - DNA, 33 bp, Homo sapien
aagtgttttcacaggtaaatttctgcttcctaa

SEQ ID NO: 159922 - DNA, 33 bp, Homo sapien
aagtgttttcacaggtgaatttctgcttcctaa

SEQ ID NO: 159923 - DNA, 33 bp, Homo sapien
agggggaaacagtttcacacggcagtcacagca

SEQ ID NO: 159924 - DNA, 33 bp, Homo sapien
agggggaaacagtttcgcacggcagtcacagca

SEQ ID NO: 159925 - DNA, 33 bp, Homo sapien
acatcctctccccccacgctacctcacagatct

SEQ ID NO: 159926 - DNA, 33 bp, Homo sapien
acatcctctccccccaggctacctcacagatct

SEQ ID NO: 159927 - DNA, 33 bp, Homo sapien
accttaggaccttgaacgtgtcagaaggagtag

SEQ ID NO: 159928 - DNA, 33 bp, Homo sapien
accttaggaccttgaatgtgtcagaaggagtag

SEQ ID NO: 159929 - DNA, 33 bp, Homo sapien
atgacttaggaccatgaagtaaaccctggaaga

SEQ ID NO: 159930 - DNA, 33 bp, Homo sapien
atgacttaggaccatggagtaaaccctggaaga

SEQ ID NO: 159931 - DNA, 33 bp, Homo sapien
ttctttactgcaaccaaaaatagcatatttgta

SEQ ID NO: 159932 - DNA, 33 bp, Homo sapien
ttctttactgcaaccagaaatagcatatttgta

SEQ ID NO: 159933 - DNA, 33 bp, Homo sapien
taatattggagacctgaaggattcagccatggc

SEQ ID NO: 159934 - DNA, 33 bp, Homo sapien
taatattggagacctgcaggattcagccatggc

SEQ ID NO: 159935 - DNA, 33 bp, Homo sapien
ttgaacacaaataagacgtagggaagaagtaaa

SEQ ID NO: 159936 - DNA, 33 bp, Homo sapien
ttgaacacaaataagatgtagggaagaagtaaa

SEQ ID NO: 159937 - DNA, 33 bp, Homo sapien
tcacaggctatagtgaccctttcctgctaatgg

SEQ ID NO: 159938 - DNA, 33 bp, Homo sapien
tcacaggctatagtgatcctttcctgctaatgg

SEQ ID NO: 159939 - DNA, 33 bp, Homo sapien
ctatatcaccgttggaaaaggttttggctaagt

SEQ ID NO: 159940 - DNA, 33 bp, Homo sapien
ctatatcaccgttggataaggttttggctaagt

SEQ ID NO: 159941 - DNA, 33 bp, Homo sapien
ttcctcctcttgtttgcactttggttgccccga

SEQ ID NO: 159942 - DNA, 33 bp, Homo sapien
ttcctcctcttgtttgtactttggttgccccga

SEQ ID NO: 159943 - DNA, 33 bp, Homo sapien
agatggtggtattacacagacaatcaagccgtt

SEQ ID NO: 159944 - DNA, 33 bp, Homo sapien
agatggtggtattacatagacaatcaagccgtt

SEQ ID NO: 159945 - DNA, 33 bp, Homo sapien
ctacgcatcataccaaccttatgactcaaagct

SEQ ID NO: 159946 - DNA, 33 bp, Homo sapien
ctacgcatcataccaatcttatgactcaaagct

SEQ ID NO: 159947 - DNA, 33 bp, Homo sapien
actctcagcagactagaacacattctccaaagg

SEQ ID NO: 159948 - DNA, 33 bp, Homo sapien
actctcagcagactaggacacattctccaaagg

SEQ ID NO: 159949 - DNA, 33 bp, Homo sapien
gaaagaatttgaatccaaaaccccagaggttga

SEQ ID NO: 159950 - DNA, 33 bp, Homo sapien
gaaagaatttgaatccgaaaccccagaggttga

SEQ ID NO: 159951 - DNA, 33 bp, Homo sapien
gagggcttacgtatacacatcaaagcttctatt

SEQ ID NO: 159952 - DNA, 33 bp, Homo sapien
gagggcttacgtatacccatcaaagcttctatt

SEQ ID NO: 159953 - DNA, 33 bp, Homo sapien
acctgacagtgaatgcaatatgtgatccttgag

SEQ ID NO: 159954 - DNA, 33 bp, Homo sapien
acctgacagtgaatgccatatgtgatccttgag

SEQ ID NO: 159955 - DNA, 33 bp, Homo sapien
cctctgtctccatgcccgacaggatggctgtga

SEQ ID NO: 159956 - DNA, 33 bp, Homo sapien
cctctgtctccatgcctgacaggatggctgtga

SEQ ID NO: 159957 - DNA, 33 bp, Homo sapien
tcatgtaacctgttaaaccactatatcagctgt

SEQ ID NO: 159958 - DNA, 33 bp, Homo sapien
tcatgtaacctgttaagccactatatcagctgt

SEQ ID NO: 159959 - DNA, 33 bp, Homo sapien
ggttttggagtcaaaacacctgaatttagctta

SEQ ID NO: 159960 - DNA, 33 bp, Homo sapien
ggttttggagtcaaaatacctgaatttagctta

SEQ ID NO: 159961 - DNA, 33 bp, Homo sapien
taaatatgatgaaagcgatgcaagaactgtggg

SEQ ID NO: 159962 - DNA, 33 bp, Homo sapien
taaatatgatgaaagctatgcaagaactgtggg

SEQ ID NO: 159963 - DNA, 33 bp, Homo sapien
tcttttctctttaggagacttgtccaaatagat

SEQ ID NO: 159964 - DNA, 33 bp, Homo sapien
tcttttctctttaggatacttgtccaaatagat

SEQ ID NO: 159965 - DNA, 33 bp, Homo sapien
tagtttgcctgtgatcaaaaaaatacccagtaa

SEQ ID NO: 159966 - DNA, 33 bp, Homo sapien
tagtttgcctgtgatctaaaaaatacccagtaa

SEQ ID NO: 159967 - DNA, 33 bp, Homo sapien
aaacagtaaacagtaaagtctgagggatacatg

SEQ ID NO: 159968 - DNA, 33 bp, Homo sapien
aaacagtaaacagtaaggtctgagggatacatg

SEQ ID NO: 159969 - DNA, 33 bp, Homo sapien
tcccagcttgagcctacgtgagtgacaataaac

SEQ ID NO: 159970 - DNA, 33 bp, Homo sapien
tcccagcttgagcctatgtgagtgacaataaac

SEQ ID NO: 159971 - DNA, 33 bp, Homo sapien
gatgtactaattttgacacattacattttgcac

SEQ ID NO: 159972 - DNA, 33 bp, Homo sapien
gatgtactaattttgagacattacattttgcac

SEQ ID NO: 159973 - DNA, 33 bp, Homo sapien
aataatgtgcttaagacgtgcagagaacaccaa

SEQ ID NO: 159974 - DNA, 33 bp, Homo sapien
aataatgtgcttaagatgtgcagagaacaccaa

SEQ ID NO: 159975 - DNA, 33 bp, Homo sapien
ggatacataattgtaaagaactttgcaaatcat

SEQ ID NO: 159976 - DNA, 33 bp, Homo sapien
ggatacataattgtaaggaactttgcaaatcat

SEQ ID NO: 159977 - DNA, 33 bp, Homo sapien
agaattcctacaattcaacaacaaaaagacaaa

SEQ ID NO: 159978 - DNA, 33 bp, Homo sapien
agaattcctacaattcgacaacaaaaagacaaa

SEQ ID NO: 159979 - DNA, 33 bp, Homo sapien
gcctacaatcacagtgaaaataaggagtcttga

SEQ ID NO: 159980 - DNA, 33 bp, Homo sapien
gcctacaatcacagtggaaataaggagtcttga

SEQ ID NO: 159981 - DNA, 33 bp, Homo sapien
ttgaaagagcatttccaaaccactctgaactcc

SEQ ID NO: 159982 - DNA, 33 bp, Homo sapien
ttgaaagagcatttccgaaccactctgaactcc

SEQ ID NO: 159983 - DNA, 33 bp, Homo sapien
cattgtccttctgcaactatggcaagttaagtt

SEQ ID NO: 159984 - DNA, 33 bp, Homo sapien
cattgtccttctgcaattatggcaagttaagtt

SEQ ID NO: 159985 - DNA, 33 bp, Homo sapien
cttgaatcaagcctgcaaatttggaactatttt

SEQ ID NO: 159986 - DNA, 33 bp, Homo sapien
cttgaatcaagcctgccaatttggaactatttt

SEQ ID NO: 159987 - DNA, 33 bp, Homo sapien
agaaactcataatttgcataatggcaacaaagc

SEQ ID NO: 159988 - DNA, 33 bp, Homo sapien
agaaactcataatttgtataatggcaacaaagc

SEQ ID NO: 159989 - DNA, 33 bp, Homo sapien
tgtgctctaaatgaaacaaatgttaaggtatac

SEQ ID NO: 159990 - DNA, 33 bp, Homo sapien
tgtgctctaaatgaaagaaatgttaaggtatac

SEQ ID NO: 159991 - DNA, 33 bp, Homo sapien
ttgacagtaggcactccatagttgttgaatgaa

SEQ ID NO: 159992 - DNA, 33 bp, Homo sapien
ttgacagtaggcactctatagttgttgaatgaa

SEQ ID NO: 159993 - DNA, 33 bp, Homo sapien
ctccgtgtttggtggaagagtccacaggaagat

SEQ ID NO: 159994 - DNA, 33 bp, Homo sapien
ctccgtgtttggtggaggagtccacaggaagat

SEQ ID NO: 159995 - DNA, 33 bp, Homo sapien
gctaggtgatattaaaatgaaattcagctaata

SEQ ID NO: 159996 - DNA, 33 bp, Homo sapien
gctaggtgatattaaagtgaaattcagctaata

SEQ ID NO: 159997 - DNA, 33 bp, Homo sapien
ggccaaaaatcttgacgcttctatctcacaaca

SEQ ID NO: 159998 - DNA, 33 bp, Homo sapien
ggccaaaaatcttgactcttctatctcacaaca

SEQ ID NO: 159999 - DNA, 33 bp, Homo sapien
gtcatttcagtcgatgcagaaaagcttggggcc

SEQ ID NO: 160000 - DNA, 33 bp, Homo sapien
gtcatttcagtcgatggagaaaagcttggggcc

SEQ ID NO: 160001 - DNA, 33 bp, Homo sapien
cagtgaataaactaacagccttaaacaaatatt

SEQ ID NO: 160002 - DNA, 33 bp, Homo sapien
cagtgaataaactaacggccttaaacaaatatt

SEQ ID NO: 160003 - DNA, 33 bp, Homo sapien
caactccataatgagcaagccctacatactaaa

SEQ ID NO: 160004 - DNA, 33 bp, Homo sapien
caactccataatgagcgagccctacatactaaa

SEQ ID NO: 160005 - DNA, 33 bp, Homo sapien
actgtagttggaagatcaattattgatacataa

SEQ ID NO: 160006 - DNA, 33 bp, Homo sapien
actgtagttggaagattaattattgatacataa

SEQ ID NO: 160007 - DNA, 33 bp, Homo sapien
gtttacatcactgggaaactttttattcctttg

SEQ ID NO: 160008 - DNA, 33 bp, Homo sapien
gtttacatcactgggagactttttattcctttg

SEQ ID NO: 160009 - DNA, 33 bp, Homo sapien
aataaataaccagcctcaaagcttggcaaagag

SEQ ID NO: 160010 - DNA, 33 bp, Homo sapien
aataaataaccagcctgaaagcttggcaaagag

SEQ ID NO: 160011 - DNA, 33 bp, Homo sapien
gtgtcgcataagcctgaaaaggatgctcctaca

SEQ ID NO: 160012 - DNA, 33 bp, Homo sapien
gtgtcgcataagcctgcaaaggatgctcctaca

SEQ ID NO: 160013 - DNA, 33 bp, Homo sapien
atggcttgaatccagaagcagcagttgcagtga

SEQ ID NO: 160014 - DNA, 33 bp, Homo sapien
atggcttgaatccagaggcagcagttgcagtga

SEQ ID NO: 160015 - DNA, 33 bp, Homo sapien
ctggtcccacctcacagaacttaaaagcaagaa

SEQ ID NO: 160016 - DNA, 33 bp, Homo sapien
ctggtcccacctcacataacttaaaagcaagaa

SEQ ID NO: 160017 - DNA, 33 bp, Homo sapien
acataaggtaacaaagaaaattgacaaagtaga

SEQ ID NO: 160018 - DNA, 33 bp, Homo sapien
acataaggtaacaaagcaaattgacaaagtaga

SEQ ID NO: 160019 - DNA, 33 bp, Homo sapien
aagaggcatctgcacgccaaggagagaggcccc

SEQ ID NO: 160020 - DNA, 33 bp, Homo sapien
aagaggcatctgcacgtcaaggagagaggcccc

SEQ ID NO: 160021 - DNA, 33 bp, Homo sapien
ggacacaactcagtcaataacagagtccacgcc

SEQ ID NO: 160022 - DNA, 33 bp, Homo sapien
ggacacaactcagtcagtaacagagtccacgcc

SEQ ID NO: 160023 - DNA, 33 bp, Homo sapien
tttcttttccacactgcagaggttctccatgaa

SEQ ID NO: 160024 - DNA, 33 bp, Homo sapien
tttcttttccacactgtagaggttctccatgaa

SEQ ID NO: 160025 - DNA, 33 bp, Homo sapien
ctaatagtaccacaaaatctgaacttattccag

SEQ ID NO: 160026 - DNA, 33 bp, Homo sapien
ctaatagtaccacaaagtctgaacttattccag

SEQ ID NO: 160027 - DNA, 33 bp, Homo sapien
aataattgagatagtacaaaaagcactgttact

SEQ ID NO: 160028 - DNA, 33 bp, Homo sapien
aataattgagatagtataaaaagcactgttact

SEQ ID NO: 160029 - DNA, 33 bp, Homo sapien
taaatgatgctttttaacaatcacaactcttta

SEQ ID NO: 160030 - DNA, 33 bp, Homo sapien
taaatgatgctttttatcaatcacaactcttta

SEQ ID NO: 160031 - DNA, 33 bp, Homo sapien
ttaaatcatattgataagtagtgcttccatgcc

SEQ ID NO: 160032 - DNA, 33 bp, Homo sapien
ttaaatcatattgataggtagtgcttccatgcc

SEQ ID NO: 160033 - DNA, 33 bp, Homo sapien
attctcataaggagtacacaatccacatcactc

SEQ ID NO: 160034 - DNA, 33 bp, Homo sapien
attctcataaggagtatacaatccacatcactc

SEQ ID NO: 160035 - DNA, 33 bp, Homo sapien
tttggcatttggtggcaaaatggaatgtttaca

SEQ ID NO: 160036 - DNA, 33 bp, Homo sapien
tttggcatttggtggcgaaatggaatgtttaca

SEQ ID NO: 160037 - DNA, 33 bp, Homo sapien
gccaacaataactcaccgattcattctggcttg

SEQ ID NO: 160038 - DNA, 33 bp, Homo sapien
gccaacaataactcactgattcattctggcttg

SEQ ID NO: 160039 - DNA, 33 bp, Homo sapien
tttttctctccagaaaaacttcattctcctgtc

SEQ ID NO: 160040 - DNA, 33 bp, Homo sapien
tttttctctccagaaagacttcattctcctgtc

SEQ ID NO: 160041 - DNA, 33 bp, Homo sapien
aattatacacatccataaacctttcaacaacag

SEQ ID NO: 160042 - DNA, 33 bp, Homo sapien
aattatacacatccatgaacctttcaacaacag

SEQ ID NO: 160043 - DNA, 33 bp, Homo sapien
acacacttgatgcagaacttcttgaatttccat

SEQ ID NO: 160044 - DNA, 33 bp, Homo sapien
acacacttgatgcagaccttcttgaatttccat

SEQ ID NO: 160045 - DNA, 33 bp, Homo sapien
gcaaataaatgacagtaaataattagaagtaat

SEQ ID NO: 160046 - DNA, 33 bp, Homo sapien
gcaaataaatgacagttaataattagaagtaat

SEQ ID NO: 160047 - DNA, 33 bp, Homo sapien
ataactctttgtgctacgaagtgagaatatatt

SEQ ID NO: 160048 - DNA, 33 bp, Homo sapien
ataactctttgtgctaggaagtgagaatatatt

SEQ ID NO: 160049 - DNA, 33 bp, Homo sapien
gagcccactgatccaacgtactgagaagaatac

SEQ ID NO: 160050 - DNA, 33 bp, Homo sapien
gagcccactgatccaatgtactgagaagaatac

SEQ ID NO: 160051 - DNA, 33 bp, Homo sapien
tgtctttgatatgcaaaattcaatgtttagaag

SEQ ID NO: 160052 - DNA, 33 bp, Homo sapien
tgtctttgatatgcaagattcaatgtttagaag

SEQ ID NO: 160053 - DNA, 33 bp, Homo sapien
cctagagctttacaaaattcttataaggtaggt

SEQ ID NO: 160054 - DNA, 33 bp, Homo sapien
cctagagctttacaaatttcttataaggtaggt

SEQ ID NO: 160055 - DNA, 33 bp, Homo sapien
tgagaagatgaatacgccaatcaccctgatctg

SEQ ID NO: 160056 - DNA, 33 bp, Homo sapien
tgagaagatgaatacgtcaatcaccctgatctg

SEQ ID NO: 160057 - DNA, 33 bp, Homo sapien
gattggacaaaaaaaaatcttactgtgtcttca

SEQ ID NO: 160058 - DNA, 33 bp, Homo sapien
gattggacaaaaaaaattcttactgtgtcttca

SEQ ID NO: 160059 - DNA, 33 bp, Homo sapien
aatgtgtcacactccacaagagattggacaaaa

SEQ ID NO: 160060 - DNA, 33 bp, Homo sapien
aatgtgtcacactccataagagattggacaaaa

SEQ ID NO: 160061 - DNA, 33 bp, Homo sapien
gaggatgagcaatacaatcacaatccctccttc

SEQ ID NO: 160062 - DNA, 33 bp, Homo sapien
gaggatgagcaatacagtcacaatccctccttc

SEQ ID NO: 160063 - DNA, 33 bp, Homo sapien
cgatacccttaaatacaaattaaaccatgtcac

SEQ ID NO: 160064 - DNA, 33 bp, Homo sapien
cgatacccttaaatacgaattaaaccatgtcac

SEQ ID NO: 160065 - DNA, 33 bp, Homo sapien
ggcacctccaaatgtacatggttgattctgaaa

SEQ ID NO: 160066 - DNA, 33 bp, Homo sapien
ggcacctccaaatgtatatggttgattctgaaa

SEQ ID NO: 160067 - DNA, 33 bp, Homo sapien
tgttttgtgtagcacactgaaagaaaacctatc

SEQ ID NO: 160068 - DNA, 33 bp, Homo sapien
tgttttgtgtagcacattgaaagaaaacctatc

SEQ ID NO: 160069 - DNA, 33 bp, Homo sapien
gttagctgatagtaaaaatgttggactgagagt

SEQ ID NO: 160070 - DNA, 33 bp, Homo sapien
gttagctgatagtaaagatgttggactgagagt

SEQ ID NO: 160071 - DNA, 33 bp, Homo sapien
ttctcaaccagggctcagaaatagaaagctgat

SEQ ID NO: 160072 - DNA, 33 bp, Homo sapien
ttctcaaccagggctcggaaatagaaagctgat

SEQ ID NO: 160073 - DNA, 33 bp, Homo sapien
caacaaacctgtggcacgagtttatctctgtaa

SEQ ID NO: 160074 - DNA, 33 bp, Homo sapien
caacaaacctgtggcatgagtttatctctgtaa

SEQ ID NO: 160075 - DNA, 33 bp, Homo sapien
taccaaaaccctaccactgactgccagtttgta

SEQ ID NO: 160076 - DNA, 33 bp, Homo sapien
taccaaaaccctaccattgactgccagtttgta

SEQ ID NO: 160077 - DNA, 33 bp, Homo sapien
tgtcttgtggtcagtgaatttgagaaaaatacg

SEQ ID NO: 160078 - DNA, 33 bp, Homo sapien
tgtcttgtggtcagtgcatttgagaaaaatacg

SEQ ID NO: 160079 - DNA, 33 bp, Homo sapien
catataaaacatgggtcacacagaaaatcacct

SEQ ID NO: 160080 - DNA, 33 bp, Homo sapien
catataaaacatgggttacacagaaaatcacct

SEQ ID NO: 160081 - DNA, 33 bp, Homo sapien
ttttgcccatttttaaagacaagattgatttcc

SEQ ID NO: 160082 - DNA, 33 bp, Homo sapien
ttttgcccatttttaaggacaagattgatttcc

SEQ ID NO: 160083 - DNA, 33 bp, Homo sapien
ttaacagatatatgaacagggatactcattgca

SEQ ID NO: 160084 - DNA, 33 bp, Homo sapien
ttaacagatatatgaagagggatactcattgca

SEQ ID NO: 160085 - DNA, 33 bp, Homo sapien
atttggttggaggtaaataacaatacaatcata

SEQ ID NO: 160086 - DNA, 33 bp, Homo sapien
atttggttggaggtaagtaacaatacaatcata

SEQ ID NO: 160087 - DNA, 33 bp, Homo sapien
aaggaagtcatacaaacgaccaagcatatgaaa

SEQ ID NO: 160088 - DNA, 33 bp, Homo sapien
aaggaagtcatacaaaggaccaagcatatgaaa

SEQ ID NO: 160089 - DNA, 33 bp, Homo sapien
ctgggaggaacaaacaaccaactccagatgcac

SEQ ID NO: 160090 - DNA, 33 bp, Homo sapien
ctgggaggaacaaacacccaactccagatgcac

SEQ ID NO: 160091 - DNA, 33 bp, Homo sapien
gattggatttctgataagtcagcatagagactg

SEQ ID NO: 160092 - DNA, 33 bp, Homo sapien
gattggatttctgatacgtcagcatagagactg

SEQ ID NO: 160093 - DNA, 33 bp, Homo sapien
ggaataaagaaacagcaatattattctccctca

SEQ ID NO: 160094 - DNA, 33 bp, Homo sapien
ggaataaagaaacagcgatattattctccctca

SEQ ID NO: 160095 - DNA, 33 bp, Homo sapien
tgacatatgtaaaataactagcaagagtgccag

SEQ ID NO: 160096 - DNA, 33 bp, Homo sapien
tgacatatgtaaaatagctagcaagagtgccag

SEQ ID NO: 160097 - DNA, 33 bp, Homo sapien
tctacttcctatctcacgttactgtgcacatat

SEQ ID NO: 160098 - DNA, 33 bp, Homo sapien
tctacttcctatctcatgttactgtgcacatat

SEQ ID NO: 160099 - DNA, 33 bp, Homo sapien
cagtcagtttgctataagaatttcaaagtgctt

SEQ ID NO: 160100 - DNA, 33 bp, Homo sapien
cagtcagtttgctataggaatttcaaagtgctt

SEQ ID NO: 160101 - DNA, 33 bp, Homo sapien
gtatatatacagacacacacagaagtatgtata

SEQ ID NO: 160102 - DNA, 33 bp, Homo sapien
gtatatatacagacactcacagaagtatgtata

SEQ ID NO: 160103 - DNA, 33 bp, Homo sapien
gtggcattgctaggtcaattagttctttaagaa

SEQ ID NO: 160104 - DNA, 33 bp, Homo sapien
gtggcattgctaggtcgattagttctttaagaa

SEQ ID NO: 160105 - DNA, 33 bp, Homo sapien
actaaatatcatgaccagacataagtgctttca

SEQ ID NO: 160106 - DNA, 33 bp, Homo sapien
actaaatatcatgaccggacataagtgctttca

SEQ ID NO: 160107 - DNA, 33 bp, Homo sapien
ttccagaactcaagaaatgttgtttagcacaaa

SEQ ID NO: 160108 - DNA, 33 bp, Homo sapien
ttccagaactcaagaactgttgtttagcacaaa

SEQ ID NO: 160109 - DNA, 33 bp, Homo sapien
acactgctcatattcaaacagatggcaaacggt

SEQ ID NO: 160110 - DNA, 33 bp, Homo sapien
acactgctcatattcagacagatggcaaacggt

SEQ ID NO: 160111 - DNA, 33 bp, Homo sapien
cactcacatagatagaataactagaaacagaaa

SEQ ID NO: 160112 - DNA, 33 bp, Homo sapien
cactcacatagatagagtaactagaaacagaaa

SEQ ID NO: 160113 - DNA, 33 bp, Homo sapien
aactagaaacagaaaacgtcagaagttgagcaa

SEQ ID NO: 160114 - DNA, 33 bp, Homo sapien
aactagaaacagaaaatgtcagaagttgagcaa

SEQ ID NO: 160115 - DNA, 33 bp, Homo sapien
ttcttacctcaagtagcagcatttaaaatcaac

SEQ ID NO: 160116 - DNA, 33 bp, Homo sapien
ttcttacctcaagtagtagcatttaaaatcaac

SEQ ID NO: 160117 - DNA, 33 bp, Homo sapien
tataatctcaatcagcgacatcattctggcctg

SEQ ID NO: 160118 - DNA, 33 bp, Homo sapien
tataatctcaatcagctacatcattctggcctg

SEQ ID NO: 160119 - DNA, 33 bp, Homo sapien
caatgacacaaaacagaatactttgcttttcat

SEQ ID NO: 160120 - DNA, 33 bp, Homo sapien
caatgacacaaaacagcatactttgcttttcat

SEQ ID NO: 160121 - DNA, 33 bp, Homo sapien
tgccagcaggagatcacagggcaatataaaaca

SEQ ID NO: 160122 - DNA, 33 bp, Homo sapien
tgccagcaggagatcagagggcaatataaaaca

SEQ ID NO: 160123 - DNA, 33 bp, Homo sapien
tacctaatgtaaataacgagttagcaggtgtag

SEQ ID NO: 160124 - DNA, 33 bp, Homo sapien
tacctaatgtaaataatgagttagcaggtgtag

SEQ ID NO: 160125 - DNA, 33 bp, Homo sapien
tggttctgaacataccaaaacacttaatgtttg

SEQ ID NO: 160126 - DNA, 33 bp, Homo sapien
tggttctgaacataccgaaacacttaatgtttg

SEQ ID NO: 160127 - DNA, 33 bp, Homo sapien
gaagtatagtcacctaagtaaaagtagatttca

SEQ ID NO: 160128 - DNA, 33 bp, Homo sapien
gaagtatagtcacctacgtaaaagtagatttca

SEQ ID NO: 160129 - DNA, 33 bp, Homo sapien
agacttgagaaatccaaataggtttgattccat

SEQ ID NO: 160130 - DNA, 33 bp, Homo sapien
agacttgagaaatccagataggtttgattccat

SEQ ID NO: 160131 - DNA, 33 bp, Homo sapien
ccacttccaagcctgcaagtttggctaaaactc

SEQ ID NO: 160132 - DNA, 33 bp, Homo sapien
ccacttccaagcctgcgagtttggctaaaactc

SEQ ID NO: 160133 - DNA, 33 bp, Homo sapien
gataattgtgtgataaatggtgaaactttgtct

SEQ ID NO: 160134 - DNA, 33 bp, Homo sapien
gataattgtgtgataactggtgaaactttgtct

SEQ ID NO: 160135 - DNA, 33 bp, Homo sapien
tgtggtgtgactccaactcaaacactttagaat

SEQ ID NO: 160136 - DNA, 33 bp, Homo sapien
tgtggtgtgactccaattcaaacactttagaat

SEQ ID NO: 160137 - DNA, 33 bp, Homo sapien
cattcaaaaaatccccaaattgctgcctgttag

SEQ ID NO: 160138 - DNA, 33 bp, Homo sapien
cattcaaaaaatcccccaattgctgcctgttag

SEQ ID NO: 160139 - DNA, 33 bp, Homo sapien
acaagaaatatccacacatggcagagtgataaa

SEQ ID NO: 160140 - DNA, 33 bp, Homo sapien
acaagaaatatccacatatggcagagtgataaa

SEQ ID NO: 160141 - DNA, 33 bp, Homo sapien
aagaatgctctgctgacgagttactggagaaat

SEQ ID NO: 160142 - DNA, 33 bp, Homo sapien
aagaatgctctgctgatgagttactggagaaat

SEQ ID NO: 160143 - DNA, 33 bp, Homo sapien
atttaggaaactaaaaatactgtccaacattgg

SEQ ID NO: 160144 - DNA, 33 bp, Homo sapien
atttaggaaactaaaagtactgtccaacattgg

SEQ ID NO: 160145 - DNA, 33 bp, Homo sapien
aacctctgcttaaccaagggcattgtcctagaa

SEQ ID NO: 160146 - DNA, 33 bp, Homo sapien
aacctctgcttaaccaggggcattgtcctagaa

SEQ ID NO: 160147 - DNA, 33 bp, Homo sapien
atatagaggaagtaaacaggagaagagctacaa

SEQ ID NO: 160148 - DNA, 33 bp, Homo sapien
atatagaggaagtaaataggagaagagctacaa

SEQ ID NO: 160149 - DNA, 33 bp, Homo sapien
gaccttgtgtttgaccaagagagagccaactta

SEQ ID NO: 160150 - DNA, 33 bp, Homo sapien
gaccttgtgtttgaccgagagagagccaactta

SEQ ID NO: 160151 - DNA, 33 bp, Homo sapien
tactaagaatccgtaactctctcccaaaagtgt

SEQ ID NO: 160152 - DNA, 33 bp, Homo sapien
tactaagaatccgtaattctctcccaaaagtgt

SEQ ID NO: 160153 - DNA, 33 bp, Homo sapien
agctgggttgtttgaaatactcaggaatccagc

SEQ ID NO: 160154 - DNA, 33 bp, Homo sapien
agctgggttgtttgaagtactcaggaatccagc

SEQ ID NO: 160155 - DNA, 33 bp, Homo sapien
gagagggtgtaggtaaacttttgactcagtatt

SEQ ID NO: 160156 - DNA, 33 bp, Homo sapien
gagagggtgtaggtaaccttttgactcagtatt

SEQ ID NO: 160157 - DNA, 33 bp, Homo sapien
aggcaatggagttgcacggacctcagctactct

SEQ ID NO: 160158 - DNA, 33 bp, Homo sapien
aggcaatggagttgcatggacctcagctactct

SEQ ID NO: 160159 - DNA, 33 bp, Homo sapien
ctgtgccagactcagaacattggcattcccatt

SEQ ID NO: 160160 - DNA, 33 bp, Homo sapien
ctgtgccagactcagagcattggcattcccatt

SEQ ID NO: 160161 - DNA, 33 bp, Homo sapien
tcccatttctgtgtctcaaaggtacttagctga

SEQ ID NO: 160162 - DNA, 33 bp, Homo sapien
tcccatttctgtgtcttaaaggtacttagctga

SEQ ID NO: 160163 - DNA, 33 bp, Homo sapien
acctcctgaccaattacgtatttatttgccatt

SEQ ID NO: 160164 - DNA, 33 bp, Homo sapien
acctcctgaccaattatgtatttatttgccatt

SEQ ID NO: 160165 - DNA, 33 bp, Homo sapien
gctacaaaatcagttcaagcagaatgaattgtt

SEQ ID NO: 160166 - DNA, 33 bp, Homo sapien
gctacaaaatcagttcgagcagaatgaattgtt

SEQ ID NO: 160167 - DNA, 33 bp, Homo sapien
ctagaactaactttcaatccccacaaaggcact

SEQ ID NO: 160168 - DNA, 33 bp, Homo sapien
ctagaactaactttcagtccccacaaaggcact

SEQ ID NO: 160169 - DNA, 33 bp, Homo sapien
agtttattaaaggaataatgcatcttgatagtc

SEQ ID NO: 160170 - DNA, 33 bp, Homo sapien
agtttattaaaggaatcatgcatcttgatagtc

SEQ ID NO: 160171 - DNA, 33 bp, Homo sapien
aggattacaagagtgactcaccgcatccagtct

SEQ ID NO: 160172 - DNA, 33 bp, Homo sapien
aggattacaagagtgagtcaccgcatccagtct

SEQ ID NO: 160173 - DNA, 33 bp, Homo sapien
tagaaaagaggatgtaaatttttaggtactttt

SEQ ID NO: 160174 - DNA, 33 bp, Homo sapien
tagaaaagaggatgtagatttttaggtactttt

SEQ ID NO: 160175 - DNA, 33 bp, Homo sapien
ttcctgggtggcctacaaatctgtaagaagaca

SEQ ID NO: 160176 - DNA, 33 bp, Homo sapien
ttcctgggtggcctacgaatctgtaagaagaca

SEQ ID NO: 160177 - DNA, 33 bp, Homo sapien
tagtattgttgggttacaggataagcatattgt

SEQ ID NO: 160178 - DNA, 33 bp, Homo sapien
tagtattgttgggttataggataagcatattgt

SEQ ID NO: 160179 - DNA, 33 bp, Homo sapien
cattgtttgaaagaaacaggaaattagatgtca

SEQ ID NO: 160180 - DNA, 33 bp, Homo sapien
cattgtttgaaagaaataggaaattagatgtca

SEQ ID NO: 160181 - DNA, 33 bp, Homo sapien
ccctcaattttaatcacggaacctaagtggcag

SEQ ID NO: 160182 - DNA, 33 bp, Homo sapien
ccctcaattttaatcatggaacctaagtggcag

SEQ ID NO: 160183 - DNA, 33 bp, Homo sapien
ctatacattgttaaccagatgcttgaatcagag

SEQ ID NO: 160184 - DNA, 33 bp, Homo sapien
ctatacattgttaaccggatgcttgaatcagag

SEQ ID NO: 160185 - DNA, 33 bp, Homo sapien
aagtagctcaatgggaaaagtggattatataaa

SEQ ID NO: 160186 - DNA, 33 bp, Homo sapien
aagtagctcaatgggagaagtggattatataaa

SEQ ID NO: 160187 - DNA, 33 bp, Homo sapien
aggtatagtaaatgctaactaaagctgaaatgg

SEQ ID NO: 160188 - DNA, 33 bp, Homo sapien
aggtatagtaaatgctcactaaagctgaaatgg

SEQ ID NO: 160189 - DNA, 33 bp, Homo sapien
ttgggatctatactacagatacactatgcaaac

SEQ ID NO: 160190 - DNA, 33 bp, Homo sapien
ttgggatctatactacggatacactatgcaaac

SEQ ID NO: 160191 - DNA, 33 bp, Homo sapien
attttaacttgaagccagacattttaggttcga

SEQ ID NO: 160192 - DNA, 33 bp, Homo sapien
attttaacttgaagccggacattttaggttcga

SEQ ID NO: 160193 - DNA, 33 bp, Homo sapien
aggaattttgccttcaatatgggagcacagatg

SEQ ID NO: 160194 - DNA, 33 bp, Homo sapien
aggaattttgccttcagtatgggagcacagatg

SEQ ID NO: 160195 - DNA, 33 bp, Homo sapien
tatctattgactagaacaataaaagcatgtttc

SEQ ID NO: 160196 - DNA, 33 bp, Homo sapien
tatctattgactagaagaataaaagcatgtttc

SEQ ID NO: 160197 - DNA, 33 bp, Homo sapien
gccttgaatattccaccgtctgcttggcatctc

SEQ ID NO: 160198 - DNA, 33 bp, Homo sapien
gccttgaatattccactgtctgcttggcatctc

SEQ ID NO: 160199 - DNA, 33 bp, Homo sapien
actttaaatttgggcacggcaagttttagatgt

SEQ ID NO: 160200 - DNA, 33 bp, Homo sapien
actttaaatttgggcatggcaagttttagatgt

SEQ ID NO: 160201 - DNA, 33 bp, Homo sapien
ttttccacacattgtaaagtgaaagctcttcag

SEQ ID NO: 160202 - DNA, 33 bp, Homo sapien
ttttccacacattgtacagtgaaagctcttcag

SEQ ID NO: 160203 - DNA, 33 bp, Homo sapien
aatagattgtgctaagaatcattttggaagaat

SEQ ID NO: 160204 - DNA, 33 bp, Homo sapien
aatagattgtgctaaggatcattttggaagaat

SEQ ID NO: 160205 - DNA, 33 bp, Homo sapien
tgacagtattgttaaccctcacaagaactaatc

SEQ ID NO: 160206 - DNA, 33 bp, Homo sapien
tgacagtattgttaactctcacaagaactaatc

SEQ ID NO: 160207 - DNA, 33 bp, Homo sapien
actttcacagagaaaaaccaacctgctccaaat

SEQ ID NO: 160208 - DNA, 33 bp, Homo sapien
actttcacagagaaaagccaacctgctccaaat

SEQ ID NO: 160209 - DNA, 33 bp, Homo sapien
aaagttggagtctttcaaagaatatcccgagag

SEQ ID NO: 160210 - DNA, 33 bp, Homo sapien
aaagttggagtctttctaagaatatcccgagag

SEQ ID NO: 160211 - DNA, 33 bp, Homo sapien
tttcctgagggaaatacaaagacacatattagc

SEQ ID NO: 160212 - DNA, 33 bp, Homo sapien
tttcctgagggaaatagaaagacacatattagc

SEQ ID NO: 160213 - DNA, 33 bp, Homo sapien
taaacaactctgacctaagacattttctaattg

SEQ ID NO: 160214 - DNA, 33 bp, Homo sapien
taaacaactctgaccttagacattttctaattg

SEQ ID NO: 160215 - DNA, 33 bp, Homo sapien
gctgttttctggagataagagcaatggacaact

SEQ ID NO: 160216 - DNA, 33 bp, Homo sapien
gctgttttctggagatgagagcaatggacaact

SEQ ID NO: 160217 - DNA, 33 bp, Homo sapien
aataaggtagattacacacaagaatcagaaatt

SEQ ID NO: 160218 - DNA, 33 bp, Homo sapien
aataaggtagattacatacaagaatcagaaatt

SEQ ID NO: 160219 - DNA, 33 bp, Homo sapien
tgacatacaaaggcacccttcattattatatac

SEQ ID NO: 160220 - DNA, 33 bp, Homo sapien
tgacatacaaaggcactcttcattattatatac

SEQ ID NO: 160221 - DNA, 33 bp, Homo sapien
atgtctactctctcaacgctgacatacaaaggc

SEQ ID NO: 160222 - DNA, 33 bp, Homo sapien
atgtctactctctcaatgctgacatacaaaggc

SEQ ID NO: 160223 - DNA, 33 bp, Homo sapien
tgttcccttttgtgaactggaaggtaaggatcc

SEQ ID NO: 160224 - DNA, 33 bp, Homo sapien
tgttcccttttgtgaattggaaggtaaggatcc

SEQ ID NO: 160225 - DNA, 33 bp, Homo sapien
atgaaacattcttatacatgagaaacctttata

SEQ ID NO: 160226 - DNA, 33 bp, Homo sapien
atgaaacattcttatagatgagaaacctttata

SEQ ID NO: 160227 - DNA, 33 bp, Homo sapien
atttccaaaatagcaacatccttgaatttatat

SEQ ID NO: 160228 - DNA, 33 bp, Homo sapien
atttccaaaatagcaatatccttgaatttatat

SEQ ID NO: 160229 - DNA, 33 bp, Homo sapien
aactctaccacttcataaaggcttgttgtgatc

SEQ ID NO: 160230 - DNA, 33 bp, Homo sapien
aactctaccacttcatgaaggcttgttgtgatc

SEQ ID NO: 160231 - DNA, 33 bp, Homo sapien
agatcaatggaatgcaaagaatagatgtgcaga

SEQ ID NO: 160232 - DNA, 33 bp, Homo sapien
agatcaatggaatgcagagaatagatgtgcaga

SEQ ID NO: 160233 - DNA, 33 bp, Homo sapien
gtgttagctcattatccctctggaaaaagatgt

SEQ ID NO: 160234 - DNA, 33 bp, Homo sapien
gtgttagctcattatctctctggaaaaagatgt

SEQ ID NO: 160235 - DNA, 33 bp, Homo sapien
gggttttaaaataaaacgaattgcaccacatag

SEQ ID NO: 160236 - DNA, 33 bp, Homo sapien
gggttttaaaataaaatgaattgcaccacatag

SEQ ID NO: 160237 - DNA, 33 bp, Homo sapien
aaagaaacagaaactcaagatactatagacaga

SEQ ID NO: 160238 - DNA, 33 bp, Homo sapien
aaagaaacagaaactccagatactatagacaga

SEQ ID NO: 160239 - DNA, 33 bp, Homo sapien
cagatgaaggaagacaccaatttagtgaaagtc

SEQ ID NO: 160240 - DNA, 33 bp, Homo sapien
cagatgaaggaagacagcaatttagtgaaagtc

SEQ ID NO: 160241 - DNA, 33 bp, Homo sapien
tgctcatcagatcaaccctttctatattcataa

SEQ ID NO: 160242 - DNA, 33 bp, Homo sapien
tgctcatcagatcaactctttctatattcataa

SEQ ID NO: 160243 - DNA, 33 bp, Homo sapien
ctaagcaaaactttgagcctggctttatctgat

SEQ ID NO: 160244 - DNA, 33 bp, Homo sapien
ctaagcaaaactttgatcctggctttatctgat

SEQ ID NO: 160245 - DNA, 33 bp, Homo sapien
gtgttgctcatgggtaaagataaaacatttgtt

SEQ ID NO: 160246 - DNA, 33 bp, Homo sapien
gtgttgctcatgggtatagataaaacatttgtt

SEQ ID NO: 160247 - DNA, 33 bp, Homo sapien
tccattcgttgtttcacccttcaaagtatacta

SEQ ID NO: 160248 - DNA, 33 bp, Homo sapien
tccattcgttgtttcatccttcaaagtatacta

SEQ ID NO: 160249 - DNA, 33 bp, Homo sapien
tgttcagggttatgaaaacttcccttcccacat

SEQ ID NO: 160250 - DNA, 33 bp, Homo sapien
tgttcagggttatgaagacttcccttcccacat

SEQ ID NO: 160251 - DNA, 33 bp, Homo sapien
tacttctggctcctggaagacagtaagcacaca

SEQ ID NO: 160252 - DNA, 33 bp, Homo sapien
tacttctggctcctggcagacagtaagcacaca

SEQ ID NO: 160253 - DNA, 33 bp, Homo sapien
tactaattttataataactctcaatgctgggct

SEQ ID NO: 160254 - DNA, 33 bp, Homo sapien
tactaattttataatatctctcaatgctgggct

SEQ ID NO: 160255 - DNA, 33 bp, Homo sapien
atattcatttataatcacaatgcaactagcaag

SEQ ID NO: 160256 - DNA, 33 bp, Homo sapien
atattcatttataatcgcaatgcaactagcaag

SEQ ID NO: 160257 - DNA, 33 bp, Homo sapien
acatacgtaaatataaactatctccttttcctt

SEQ ID NO: 160258 - DNA, 33 bp, Homo sapien
acatacgtaaatataagctatctccttttcctt

SEQ ID NO: 160259 - DNA, 33 bp, Homo sapien
ctttgacagacctacaggaacaaggaaattgat

SEQ ID NO: 160260 - DNA, 33 bp, Homo sapien
ctttgacagacctacatgaacaaggaaattgat

SEQ ID NO: 160261 - DNA, 33 bp, Homo sapien
aaaagcttacactagaatccagaattgtatcat

SEQ ID NO: 160262 - DNA, 33 bp, Homo sapien
aaaagcttacactagattccagaattgtatcat

SEQ ID NO: 160263 - DNA, 33 bp, Homo sapien
cctggtaaaataccgaaaatgcctatcttaacg

SEQ ID NO: 160264 - DNA, 33 bp, Homo sapien
cctggtaaaataccgacaatgcctatcttaacg

SEQ ID NO: 160265 - DNA, 33 bp, Homo sapien
aggatttacaattacagacagtgctttattgag

SEQ ID NO: 160266 - DNA, 33 bp, Homo sapien
aggatttacaattacatacagtgctttattgag

SEQ ID NO: 160267 - DNA, 33 bp, Homo sapien
gcaaataaatcccacacctgtgcatcatgatct

SEQ ID NO: 160268 - DNA, 33 bp, Homo sapien
gcaaataaatcccacatctgtgcatcatgatct

SEQ ID NO: 160269 - DNA, 33 bp, Homo sapien
gccctttccactttgacatagacttcttttcct

SEQ ID NO: 160270 - DNA, 33 bp, Homo sapien
gccctttccactttgatatagacttcttttcct

SEQ ID NO: 160271 - DNA, 33 bp, Homo sapien
ctctcttctgcaagacaatttaataagataaaa

SEQ ID NO: 160272 - DNA, 33 bp, Homo sapien
ctctcttctgcaagacgatttaataagataaaa

SEQ ID NO: 160273 - DNA, 33 bp, Homo sapien
ttagagcacaaaaagcaatgtgtaaaaatttgt

SEQ ID NO: 160274 - DNA, 33 bp, Homo sapien
ttagagcacaaaaagcgatgtgtaaaaatttgt

SEQ ID NO: 160275 - DNA, 33 bp, Homo sapien
aataaaaagaatgtagaccagtactcaagacta

SEQ ID NO: 160276 - DNA, 33 bp, Homo sapien
aataaaaagaatgtaggccagtactcaagacta

SEQ ID NO: 160277 - DNA, 33 bp, Homo sapien
ccatgcttctcaccataagagaaaagtaagtca

SEQ ID NO: 160278 - DNA, 33 bp, Homo sapien
ccatgcttctcaccattagagaaaagtaagtca

SEQ ID NO: 160279 - DNA, 33 bp, Homo sapien
tatgacctcggtgaagacagggcttgtaattgc

SEQ ID NO: 160280 - DNA, 33 bp, Homo sapien
tatgacctcggtgaaggcagggcttgtaattgc

SEQ ID NO: 160281 - DNA, 33 bp, Homo sapien
tgaggaagatcaatacaatagacctcattcaat

SEQ ID NO: 160282 - DNA, 33 bp, Homo sapien
tgaggaagatcaatacgatagacctcattcaat

SEQ ID NO: 160283 - DNA, 33 bp, Homo sapien
aagtttcactccatagacctaaggataaagatg

SEQ ID NO: 160284 - DNA, 33 bp, Homo sapien
aagtttcactccatagtcctaaggataaagatg

SEQ ID NO: 160285 - DNA, 33 bp, Homo sapien
caactctatgacatgcaataggtaagcaagcat

SEQ ID NO: 160286 - DNA, 33 bp, Homo sapien
caactctatgacatgcgataggtaagcaagcat

SEQ ID NO: 160287 - DNA, 33 bp, Homo sapien
atatacaacagctcaaataataatttacacaga

SEQ ID NO: 160288 - DNA, 33 bp, Homo sapien
atatacaacagctcaagtaataatttacacaga

SEQ ID NO: 160289 - DNA, 33 bp, Homo sapien
accagctgttagcaaaagaggataggaagcatg

SEQ ID NO: 160290 - DNA, 33 bp, Homo sapien
accagctgttagcaaatgaggataggaagcatg

SEQ ID NO: 160291 - DNA, 33 bp, Homo sapien
ggatgtggaacaactacaccattcttgaacaaa

SEQ ID NO: 160292 - DNA, 33 bp, Homo sapien
ggatgtggaacaactagaccattcttgaacaaa

SEQ ID NO: 160293 - DNA, 33 bp, Homo sapien
caatctacaggtttaacgtaattcccatcaaag

SEQ ID NO: 160294 - DNA, 33 bp, Homo sapien
caatctacaggtttaatgtaattcccatcaaag

SEQ ID NO: 160295 - DNA, 33 bp, Homo sapien
ctgctcttaaaatcaagtacaccacagaaccct

SEQ ID NO: 160296 - DNA, 33 bp, Homo sapien
ctgctcttaaaatcaattacaccacagaaccct

SEQ ID NO: 160297 - DNA, 33 bp, Homo sapien
ctcaggatctacttcacggggaatccaagttga

SEQ ID NO: 160298 - DNA, 33 bp, Homo sapien
ctcaggatctacttcatggggaatccaagttga

SEQ ID NO: 160299 - DNA, 33 bp, Homo sapien
cacaagaccgaggtggcatggattgctgaatca

SEQ ID NO: 160300 - DNA, 33 bp, Homo sapien
cacaagaccgaggtggtatggattgctgaatca

SEQ ID NO: 160301 - DNA, 33 bp, Homo sapien
atactgatgttctaaaattgccaatactgtccc

SEQ ID NO: 160302 - DNA, 33 bp, Homo sapien
atactgatgttctaaagttgccaatactgtccc

SEQ ID NO: 160303 - DNA, 33 bp, Homo sapien
atgaatgctatctcccaggagaaatgtggatcc

SEQ ID NO: 160304 - DNA, 33 bp, Homo sapien
atgaatgctatctcccgggagaaatgtggatcc

SEQ ID NO: 160305 - DNA, 33 bp, Homo sapien
tggtttaagccatccactctgaagtatttgtta

SEQ ID NO: 160306 - DNA, 33 bp, Homo sapien
tggtttaagccatccagtctgaagtatttgtta

SEQ ID NO: 160307 - DNA, 33 bp, Homo sapien
acctcatctttccaccacaataagaacttggaa

SEQ ID NO: 160308 - DNA, 33 bp, Homo sapien
acctcatctttccaccgcaataagaacttggaa

SEQ ID NO: 160309 - DNA, 33 bp, Homo sapien
cacaccctagatgcaaaatgatttaagtaaaaa

SEQ ID NO: 160310 - DNA, 33 bp, Homo sapien
cacaccctagatgcaagatgatttaagtaaaaa

SEQ ID NO: 160311 - DNA, 33 bp, Homo sapien
aaaggtctaatatcacaaatttacaaggaagtt

SEQ ID NO: 160312 - DNA, 33 bp, Homo sapien
aaaggtctaatatcacgaatttacaaggaagtt

SEQ ID NO: 160313 - DNA, 33 bp, Homo sapien
gatcaaggttctctgaacaaaattgactagaag

SEQ ID NO: 160314 - DNA, 33 bp, Homo sapien
gatcaaggttctctgatcaaaattgactagaag

SEQ ID NO: 160315 - DNA, 33 bp, Homo sapien
gagtggaggatatggcaaggttagtaacagcat

SEQ ID NO: 160316 - DNA, 33 bp, Homo sapien
gagtggaggatatggcgaggttagtaacagcat

SEQ ID NO: 160317 - DNA, 33 bp, Homo sapien
ccactgactgaggttactaaagaagaatgggac

SEQ ID NO: 160318 - DNA, 33 bp, Homo sapien
ccactgactgaggttattaaagaagaatgggac

SEQ ID NO: 160319 - DNA, 33 bp, Homo sapien
gttaacaaatattccaatacaatgcaatacata

SEQ ID NO: 160320 - DNA, 33 bp, Homo sapien
gttaacaaatattccagtacaatgcaatacata

SEQ ID NO: 160321 - DNA, 33 bp, Homo sapien
ggtcttcagccgtagacgcaactcaactactgc

SEQ ID NO: 160322 - DNA, 33 bp, Homo sapien
ggtcttcagccgtagatgcaactcaactactgc

SEQ ID NO: 160323 - DNA, 33 bp, Homo sapien
ggagttattagaattacgattccccctacttga

SEQ ID NO: 160324 - DNA, 33 bp, Homo sapien
ggagttattagaattaggattccccctacttga

SEQ ID NO: 160325 - DNA, 33 bp, Homo sapien
tctttcgattctcaaaatagtccatggtctaag

SEQ ID NO: 160326 - DNA, 33 bp, Homo sapien
tctttcgattctcaaagtagtccatggtctaag

SEQ ID NO: 160327 - DNA, 33 bp, Homo sapien
aagctggaggcccaaaatgcatgaaactgggac

SEQ ID NO: 160328 - DNA, 33 bp, Homo sapien
aagctggaggcccaaagtgcatgaaactgggac

SEQ ID NO: 160329 - DNA, 33 bp, Homo sapien
cagacttttgcacaacaccaaatagaattgatc

SEQ ID NO: 160330 - DNA, 33 bp, Homo sapien
cagacttttgcacaacgccaaatagaattgatc

SEQ ID NO: 160331 - DNA, 33 bp, Homo sapien
ctgtccactcaaattcactcttcccgcatttct

SEQ ID NO: 160332 - DNA, 33 bp, Homo sapien
ctgtccactcaaattcgctcttcccgcatttct

SEQ ID NO: 160333 - DNA, 33 bp, Homo sapien
gtaatttattgggagaacaaaacaacttttcca

SEQ ID NO: 160334 - DNA, 33 bp, Homo sapien
gtaatttattgggagagcaaaacaacttttcca

SEQ ID NO: 160335 - DNA, 33 bp, Homo sapien
aaaaaagcctggagaacgcttcacttgctaaac

SEQ ID NO: 160336 - DNA, 33 bp, Homo sapien
aaaaaagcctggagaatgcttcacttgctaaac

SEQ ID NO: 160337 - DNA, 33 bp, Homo sapien
gaaaaatgttagggtcaaggatcagcttggtgc

SEQ ID NO: 160338 - DNA, 33 bp, Homo sapien
gaaaaatgttagggtcgaggatcagcttggtgc

SEQ ID NO: 160339 - DNA, 33 bp, Homo sapien
gtttggacattgcgagccagtctcagtaagtgt

SEQ ID NO: 160340 - DNA, 33 bp, Homo sapien
gtttggacattgcgaggcagtctcagtaagtgt

SEQ ID NO: 160341 - DNA, 33 bp, Homo sapien
tgctctgagtccttccaatgacaattattttgt

SEQ ID NO: 160342 - DNA, 33 bp, Homo sapien
tgctctgagtccttccgatgacaattattttgt

SEQ ID NO: 160343 - DNA, 33 bp, Homo sapien
gactctctcttctctacgttaactttttacagg

SEQ ID NO: 160344 - DNA, 33 bp, Homo sapien
gactctctcttctctatgttaactttttacagg

SEQ ID NO: 160345 - DNA, 33 bp, Homo sapien
cttattgacagtcttacgggcaagacgttgctg

SEQ ID NO: 160346 - DNA, 33 bp, Homo sapien
cttattgacagtcttatgggcaagacgttgctg

SEQ ID NO: 160347 - DNA, 33 bp, Homo sapien
ataattctatcataaacacaaatgcaagcatat

SEQ ID NO: 160348 - DNA, 33 bp, Homo sapien
ataattctatcataaagacaaatgcaagcatat

SEQ ID NO: 160349 - DNA, 33 bp, Homo sapien
tttaaagggagcttgaatagttatcagggactg

SEQ ID NO: 160350 - DNA, 33 bp, Homo sapien
tttaaagggagcttgagtagttatcagggactg

SEQ ID NO: 160351 - DNA, 33 bp, Homo sapien
acctgttcagagtgacagctcatttattgcaca

SEQ ID NO: 160352 - DNA, 33 bp, Homo sapien
acctgttcagagtgaccgctcatttattgcaca

SEQ ID NO: 160353 - DNA, 33 bp, Homo sapien
tgccatcccttgacacaggttaaaatgtactac

SEQ ID NO: 160354 - DNA, 33 bp, Homo sapien
tgccatcccttgacaccggttaaaatgtactac

SEQ ID NO: 160355 - DNA, 33 bp, Homo sapien
aagcagaaataagcataagagccaattaattgt

SEQ ID NO: 160356 - DNA, 33 bp, Homo sapien
aagcagaaataagcatgagagccaattaattgt

SEQ ID NO: 160357 - DNA, 33 bp, Homo sapien
cacatatgcttcctcaaatcattggcttggata

SEQ ID NO: 160358 - DNA, 33 bp, Homo sapien
cacatatgcttcctcagatcattggcttggata

SEQ ID NO: 160359 - DNA, 33 bp, Homo sapien
acaagacaaatgatcaacatccaaaaaactttt

SEQ ID NO: 160360 - DNA, 33 bp, Homo sapien
acaagacaaatgatcatcatccaaaaaactttt

SEQ ID NO: 160361 - DNA, 33 bp, Homo sapien
aggacagcaagttgccagccatattctctagtc

SEQ ID NO: 160362 - DNA, 33 bp, Homo sapien
aggacagcaagttgccggccatattctctagtc

SEQ ID NO: 160363 - DNA, 33 bp, Homo sapien
aagtgaaaactcacaaataactgttaggaccct

SEQ ID NO: 160364 - DNA, 33 bp, Homo sapien
aagtgaaaactcacaagtaactgttaggaccct

SEQ ID NO: 160365 - DNA, 33 bp, Homo sapien
tctatcaagaatttaacatcgtgtgcctgctgt

SEQ ID NO: 160366 - DNA, 33 bp, Homo sapien
tctatcaagaatttaagatcgtgtgcctgctgt

SEQ ID NO: 160367 - DNA, 33 bp, Homo sapien
gtgtgccctaatcagacgcttcacttcttgaat

SEQ ID NO: 160368 - DNA, 33 bp, Homo sapien
gtgtgccctaatcagatgcttcacttcttgaat

SEQ ID NO: 160369 - DNA, 33 bp, Homo sapien
tcttcttcttctgatacggacaccagtcctatt

SEQ ID NO: 160370 - DNA, 33 bp, Homo sapien
tcttcttcttctgatatggacaccagtcctatt

SEQ ID NO: 160371 - DNA, 33 bp, Homo sapien
tgttagtgtttaaccacccataattaatgttac

SEQ ID NO: 160372 - DNA, 33 bp, Homo sapien
tgttagtgtttaaccatccataattaatgttac

SEQ ID NO: 160373 - DNA, 33 bp, Homo sapien
ccaacaaagatccccaaatttggccactcttat

SEQ ID NO: 160374 - DNA, 33 bp, Homo sapien
ccaacaaagatccccacatttggccactcttat

SEQ ID NO: 160375 - DNA, 33 bp, Homo sapien
tagtgacatcttacacaagtgttgttcattttg

SEQ ID NO: 160376 - DNA, 33 bp, Homo sapien
tagtgacatcttacacgagtgttgttcattttg

SEQ ID NO: 160377 - DNA, 33 bp, Homo sapien
aggtcaaaaaatggaacgttgccagccacccca

SEQ ID NO: 160378 - DNA, 33 bp, Homo sapien
aggtcaaaaaatggaatgttgccagccacccca

SEQ ID NO: 160379 - DNA, 33 bp, Homo sapien
cagactttgtaagctactacccttggaagatcc

SEQ ID NO: 160380 - DNA, 33 bp, Homo sapien
cagactttgtaagctattacccttggaagatcc

SEQ ID NO: 160381 - DNA, 33 bp, Homo sapien
ttctgtcttctccaaaataactatgactgtgac

SEQ ID NO: 160382 - DNA, 33 bp, Homo sapien
ttctgtcttctccaaagtaactatgactgtgac

SEQ ID NO: 160383 - DNA, 33 bp, Homo sapien
ccattctacccttctccaagaccttggcaatca

SEQ ID NO: 160384 - DNA, 33 bp, Homo sapien
ccattctacccttctcgaagaccttggcaatca

SEQ ID NO: 160385 - DNA, 33 bp, Homo sapien
gttaagagagaaaatgaaatcagtaaacaaaat

SEQ ID NO: 160386 - DNA, 33 bp, Homo sapien
gttaagagagaaaatggaatcagtaaacaaaat

SEQ ID NO: 160387 - DNA, 33 bp, Homo sapien
accttggcacaactcacctggaataattcaaaa

SEQ ID NO: 160388 - DNA, 33 bp, Homo sapien
accttggcacaactcatctggaataattcaaaa

SEQ ID NO: 160389 - DNA, 33 bp, Homo sapien
aggtggaccttcagacaatcttaaagtgtcagt

SEQ ID NO: 160390 - DNA, 33 bp, Homo sapien
aggtggaccttcagacgatcttaaagtgtcagt

SEQ ID NO: 160391 - DNA, 33 bp, Homo sapien
ataattaagacttttcaaacaggaagcttgatt

SEQ ID NO: 160392 - DNA, 33 bp, Homo sapien
ataattaagacttttcgaacaggaagcttgatt

SEQ ID NO: 160393 - DNA, 33 bp, Homo sapien
gccttccaccaattacaccaacagcccttgctg

SEQ ID NO: 160394 - DNA, 33 bp, Homo sapien
gccttccaccaattacgccaacagcccttgctg

SEQ ID NO: 160395 - DNA, 33 bp, Homo sapien
ttttgattctgattcactccaaattctttttta

SEQ ID NO: 160396 - DNA, 33 bp, Homo sapien
ttttgattctgattcagtccaaattctttttta

SEQ ID NO: 160397 - DNA, 33 bp, Homo sapien
taatatctgaaagcaaccaatcttattcaccaa

SEQ ID NO: 160398 - DNA, 33 bp, Homo sapien
taatatctgaaagcaatcaatcttattcaccaa

SEQ ID NO: 160399 - DNA, 33 bp, Homo sapien
caattgaagaggcctgaaagccttttgagtctt

SEQ ID NO: 160400 - DNA, 33 bp, Homo sapien
caattgaagaggcctgcaagccttttgagtctt

SEQ ID NO: 160401 - DNA, 33 bp, Homo sapien
tttatgtccctcaagacagaatcagaaaacatg

SEQ ID NO: 160402 - DNA, 33 bp, Homo sapien
tttatgtccctcaagagagaatcagaaaacatg

SEQ ID NO: 160403 - DNA, 33 bp, Homo sapien
agtttacatgaggagacgacatggagaagccct

SEQ ID NO: 160404 - DNA, 33 bp, Homo sapien
agtttacatgaggagatgacatggagaagccct

SEQ ID NO: 160405 - DNA, 33 bp, Homo sapien
atgaaaagaaagcatcaaaacaattctaaagaa

SEQ ID NO: 160406 - DNA, 33 bp, Homo sapien
atgaaaagaaagcatcgaaacaattctaaagaa

SEQ ID NO: 160407 - DNA, 33 bp, Homo sapien
tgtacagcactttgtacgtcctggcaggcataa

SEQ ID NO: 160408 - DNA, 33 bp, Homo sapien
tgtacagcactttgtaggtcctggcaggcataa

SEQ ID NO: 160409 - DNA, 33 bp, Homo sapien
ttatctataaactttaacagatgaaagacttga

SEQ ID NO: 160410 - DNA, 33 bp, Homo sapien
ttatctataaactttagcagatgaaagacttga

SEQ ID NO: 160411 - DNA, 33 bp, Homo sapien
ccagctagtcagcataacacccagtaggtagtt

SEQ ID NO: 160412 - DNA, 33 bp, Homo sapien
ccagctagtcagcatagcacccagtaggtagtt

SEQ ID NO: 160413 - DNA, 33 bp, Homo sapien
aatggggattctgataccaacctaaaggagttg

SEQ ID NO: 160414 - DNA, 33 bp, Homo sapien
aatggggattctgatatcaacctaaaggagttg

SEQ ID NO: 160415 - DNA, 33 bp, Homo sapien
cgaacactatcaaaaaactccagcccagccatg

SEQ ID NO: 160416 - DNA, 33 bp, Homo sapien
cgaacactatcaaaaatctccagcccagccatg

SEQ ID NO: 160417 - DNA, 33 bp, Homo sapien
gagtgacagtcataataagcaatagaattagta

SEQ ID NO: 160418 - DNA, 33 bp, Homo sapien
gagtgacagtcataatcagcaatagaattagta

SEQ ID NO: 160419 - DNA, 33 bp, Homo sapien
gccagagccagcaatcaatgtgaggaaggtgct

SEQ ID NO: 160420 - DNA, 33 bp, Homo sapien
gccagagccagcaatcgatgtgaggaaggtgct

SEQ ID NO: 160421 - DNA, 33 bp, Homo sapien
cacagctgtgctttgagtattccaatatttagc

SEQ ID NO: 160422 - DNA, 33 bp, Homo sapien
cacagctgtgctttgattattccaatatttagc

SEQ ID NO: 160423 - DNA, 33 bp, Homo sapien
caatgcattcactacaaaaacattaagtacaca

SEQ ID NO: 160424 - DNA, 33 bp, Homo sapien
caatgcattcactacacaaacattaagtacaca

SEQ ID NO: 160425 - DNA, 33 bp, Homo sapien
caggccctcacattgacagttgttattaagaaa

SEQ ID NO: 160426 - DNA, 33 bp, Homo sapien
caggccctcacattgatagttgttattaagaaa

SEQ ID NO: 160427 - DNA, 33 bp, Homo sapien
aaaaatttgattatgagagcagactatattttt

SEQ ID NO: 160428 - DNA, 33 bp, Homo sapien
aaaaatttgattatgatagcagactatattttt

SEQ ID NO: 160429 - DNA, 33 bp, Homo sapien
tcattctctctttgataagatgattgagctgag

SEQ ID NO: 160430 - DNA, 33 bp, Homo sapien
tcattctctctttgatgagatgattgagctgag

SEQ ID NO: 160431 - DNA, 33 bp, Homo sapien
tgaatgggtttcaagcaaactctgttcagatga

SEQ ID NO: 160432 - DNA, 33 bp, Homo sapien
tgaatgggtttcaagcgaactctgttcagatga

SEQ ID NO: 160433 - DNA, 33 bp, Homo sapien
ttgttcaaggaactcaatgaaggccagggtact

SEQ ID NO: 160434 - DNA, 33 bp, Homo sapien
ttgttcaaggaactcagtgaaggccagggtact

SEQ ID NO: 160435 - DNA, 33 bp, Homo sapien
agcaaacaggcctgaccaagagctttccttcag

SEQ ID NO: 160436 - DNA, 33 bp, Homo sapien
agcaaacaggcctgacgaagagctttccttcag

SEQ ID NO: 160437 - DNA, 33 bp, Homo sapien
tgaaattactcagaacaccttgcagtcacgtgg

SEQ ID NO: 160438 - DNA, 33 bp, Homo sapien
tgaaattactcagaacgccttgcagtcacgtgg

SEQ ID NO: 160439 - DNA, 33 bp, Homo sapien
aagtgaaaactgaccaagcatagaagaaaagaa

SEQ ID NO: 160440 - DNA, 33 bp, Homo sapien
aagtgaaaactgaccaggcatagaagaaaagaa

SEQ ID NO: 160441 - DNA, 33 bp, Homo sapien
cagagccacttcaacaaaacagactcttggctt

SEQ ID NO: 160442 - DNA, 33 bp, Homo sapien
cagagccacttcaacacaacagactcttggctt

SEQ ID NO: 160443 - DNA, 33 bp, Homo sapien
ccccagacttggcctaaacttggtagagaagat

SEQ ID NO: 160444 - DNA, 33 bp, Homo sapien
ccccagacttggcctagacttggtagagaagat

SEQ ID NO: 160445 - DNA, 33 bp, Homo sapien
ccaatgaaatttataacgccttgtcaaattttt

SEQ ID NO: 160446 - DNA, 33 bp, Homo sapien
ccaatgaaatttataatgccttgtcaaattttt

SEQ ID NO: 160447 - DNA, 33 bp, Homo sapien
ggaaactgaggcagagaacggttaatatcttgt

SEQ ID NO: 160448 - DNA, 33 bp, Homo sapien
ggaaactgaggcagaggacggttaatatcttgt

SEQ ID NO: 160449 - DNA, 33 bp, Homo sapien
atcctgtgagttgaaccgcacccaaatgactgc

SEQ ID NO: 160450 - DNA, 33 bp, Homo sapien
atcctgtgagttgaactgcacccaaatgactgc

SEQ ID NO: 160451 - DNA, 33 bp, Homo sapien
gagagatgcatagttccaagaggagccatctaa

SEQ ID NO: 160452 - DNA, 33 bp, Homo sapien
gagagatgcatagttctaagaggagccatctaa

SEQ ID NO: 160453 - DNA, 33 bp, Homo sapien
cttggggcccaggaataaaatgataccactatg

SEQ ID NO: 160454 - DNA, 33 bp, Homo sapien
cttggggcccaggaatgaaatgataccactatg

SEQ ID NO: 160455 - DNA, 33 bp, Homo sapien
acattacaccacaaagaatgatatttttttagc

SEQ ID NO: 160456 - DNA, 33 bp, Homo sapien
acattacaccacaaagtatgatatttttttagc

SEQ ID NO: 160457 - DNA, 33 bp, Homo sapien
aacttcttttctaatcaccaaagcaatataggc

SEQ ID NO: 160458 - DNA, 33 bp, Homo sapien
aacttcttttctaatcgccaaagcaatataggc

SEQ ID NO: 160459 - DNA, 33 bp, Homo sapien
cagctggtaagccaaaccttgcatgagcattaa

SEQ ID NO: 160460 - DNA, 33 bp, Homo sapien
cagctggtaagccaaatcttgcatgagcattaa

SEQ ID NO: 160461 - DNA, 33 bp, Homo sapien
gatttttctaagctaaatgccagaacttgagca

SEQ ID NO: 160462 - DNA, 33 bp, Homo sapien
gatttttctaagctaattgccagaacttgagca

SEQ ID NO: 160463 - DNA, 33 bp, Homo sapien
atctctttctggccaaatccctatgaaattacc

SEQ ID NO: 160464 - DNA, 33 bp, Homo sapien
atctctttctggccaagtccctatgaaattacc

SEQ ID NO: 160465 - DNA, 33 bp, Homo sapien
agagcttcagggaaagaattgaaagaaggtgta

SEQ ID NO: 160466 - DNA, 33 bp, Homo sapien
agagcttcagggaaaggattgaaagaaggtgta

SEQ ID NO: 160467 - DNA, 33 bp, Homo sapien
ttagcatgagtgaaaaactggagtgagagtctt

SEQ ID NO: 160468 - DNA, 33 bp, Homo sapien
ttagcatgagtgaaaacctggagtgagagtctt

SEQ ID NO: 160469 - DNA, 33 bp, Homo sapien
tctaggctgatcctataacttactttggccaat

SEQ ID NO: 160470 - DNA, 33 bp, Homo sapien
tctaggctgatcctatgacttactttggccaat

SEQ ID NO: 160471 - DNA, 33 bp, Homo sapien
gaacatgactttgcaactcctcctatcaagaag

SEQ ID NO: 160472 - DNA, 33 bp, Homo sapien
gaacatgactttgcaattcctcctatcaagaag

SEQ ID NO: 160473 - DNA, 33 bp, Homo sapien
taggtgtctaacaaaaatacataattgggaata

SEQ ID NO: 160474 - DNA, 33 bp, Homo sapien
taggtgtctaacaaaagtacataattgggaata

SEQ ID NO: 160475 - DNA, 33 bp, Homo sapien
tttcagaattggggcaagaattacacaagatga

SEQ ID NO: 160476 - DNA, 33 bp, Homo sapien
tttcagaattggggcaggaattacacaagatga

SEQ ID NO: 160477 - DNA, 33 bp, Homo sapien
taaaaattgaaggagaactcattaactgttgtg

SEQ ID NO: 160478 - DNA, 33 bp, Homo sapien
taaaaattgaaggagatctcattaactgttgtg

SEQ ID NO: 160479 - DNA, 33 bp, Homo sapien
aaatttatatatcaaaatcctaacttccaaggc

SEQ ID NO: 160480 - DNA, 33 bp, Homo sapien
aaatttatatatcaaactcctaacttccaaggc

SEQ ID NO: 160481 - DNA, 33 bp, Homo sapien
gtttgatctatgagaagtactgacagaagatta

SEQ ID NO: 160482 - DNA, 33 bp, Homo sapien
gtttgatctatgagaattactgacagaagatta

SEQ ID NO: 160483 - DNA, 33 bp, Homo sapien
agaaaggattaatacactaatgcacgtaaaata

SEQ ID NO: 160484 - DNA, 33 bp, Homo sapien
agaaaggattaatacagtaatgcacgtaaaata

SEQ ID NO: 160485 - DNA, 33 bp, Homo sapien
caacctccagaaacaaatacctcagaatggcta

SEQ ID NO: 160486 - DNA, 33 bp, Homo sapien
caacctccagaaacaagtacctcagaatggcta

SEQ ID NO: 160487 - DNA, 33 bp, Homo sapien
agcagccaagaggagaaaacattagacctcatc

SEQ ID NO: 160488 - DNA, 33 bp, Homo sapien
agcagccaagaggagagaacattagacctcatc

SEQ ID NO: 160489 - DNA, 33 bp, Homo sapien
gtatcacttactcctccaccacagggtatttat

SEQ ID NO: 160490 - DNA, 33 bp, Homo sapien
gtatcacttactcctcgaccacagggtatttat

SEQ ID NO: 160491 - DNA, 33 bp, Homo sapien
cagagacctcaaggccagatgttatcagcctgt

SEQ ID NO: 160492 - DNA, 33 bp, Homo sapien
cagagacctcaaggccggatgttatcagcctgt

SEQ ID NO: 160493 - DNA, 33 bp, Homo sapien
ttatgttcagtagcacagccctgaccccaacat

SEQ ID NO: 160494 - DNA, 33 bp, Homo sapien
ttatgttcagtagcacggccctgaccccaacat

SEQ ID NO: 160495 - DNA, 33 bp, Homo sapien
ggcttgcaggaatcaaagaaacattttttaaaa

SEQ ID NO: 160496 - DNA, 33 bp, Homo sapien
ggcttgcaggaatcaaggaaacattttttaaaa

SEQ ID NO: 160497 - DNA, 33 bp, Homo sapien
tctttggtagtccacacggtctattgttcccat

SEQ ID NO: 160498 - DNA, 33 bp, Homo sapien
tctttggtagtccacatggtctattgttcccat

SEQ ID NO: 160499 - DNA, 33 bp, Homo sapien
catcactggccttagccacctttcatatttact

SEQ ID NO: 160500 - DNA, 33 bp, Homo sapien
catcactggccttagctacctttcatatttact

SEQ ID NO: 160501 - DNA, 33 bp, Homo sapien
gccccaggtttattccacagctcggaagttaaa

SEQ ID NO: 160502 - DNA, 33 bp, Homo sapien
gccccaggtttattcctcagctcggaagttaaa

SEQ ID NO: 160503 - DNA, 33 bp, Homo sapien
cattcactgtaggaaacaccatagatttaataa

SEQ ID NO: 160504 - DNA, 33 bp, Homo sapien
cattcactgtaggaaataccatagatttaataa

SEQ ID NO: 160505 - DNA, 33 bp, Homo sapien
tttagcagttactggcaacactgtcatgaaggc

SEQ ID NO: 160506 - DNA, 33 bp, Homo sapien
tttagcagttactggctacactgtcatgaaggc

SEQ ID NO: 160507 - DNA, 33 bp, Homo sapien
aagtcaaaagccagacaggtggaaaggaggtaa

SEQ ID NO: 160508 - DNA, 33 bp, Homo sapien
aagtcaaaagccagactggtggaaaggaggtaa

SEQ ID NO: 160509 - DNA, 33 bp, Homo sapien
gtcttgctttatcctaaggagcaataggctgag

SEQ ID NO: 160510 - DNA, 33 bp, Homo sapien
gtcttgctttatcctagggagcaataggctgag

SEQ ID NO: 160511 - DNA, 33 bp, Homo sapien
tctccataaatttacaagtctgattccttagag

SEQ ID NO: 160512 - DNA, 33 bp, Homo sapien
tctccataaatttacacgtctgattccttagag

SEQ ID NO: 160513 - DNA, 33 bp, Homo sapien
cagtttctgtttgtcacgatgcttctaatgtta

SEQ ID NO: 160514 - DNA, 33 bp, Homo sapien
cagtttctgtttgtcatgatgcttctaatgtta

SEQ ID NO: 160515 - DNA, 33 bp, Homo sapien
agttactgattagatgcaggtgagaatgtggga

SEQ ID NO: 160516 - DNA, 33 bp, Homo sapien
agttactgattagatggaggtgagaatgtggga

SEQ ID NO: 160517 - DNA, 33 bp, Homo sapien
acttctcaaaacaagacgtacaagtggccaaga

SEQ ID NO: 160518 - DNA, 33 bp, Homo sapien
acttctcaaaacaagatgtacaagtggccaaga

SEQ ID NO: 160519 - DNA, 33 bp, Homo sapien
acaccattctggatatcaatgttgagaaagaat

SEQ ID NO: 160520 - DNA, 33 bp, Homo sapien
acaccattctggatattaatgttgagaaagaat

SEQ ID NO: 160521 - DNA, 33 bp, Homo sapien
tacccttcacccacagcccctaattgttacatg

SEQ ID NO: 160522 - DNA, 33 bp, Homo sapien
tacccttcacccacagtccctaattgttacatg

SEQ ID NO: 160523 - DNA, 33 bp, Homo sapien
cactgtaagaaatgagaccgctggacttaatta

SEQ ID NO: 160524 - DNA, 33 bp, Homo sapien
cactgtaagaaatgaggccgctggacttaatta

SEQ ID NO: 160525 - DNA, 33 bp, Homo sapien
cccctgcactggagtacctatcatgacaaatag

SEQ ID NO: 160526 - DNA, 33 bp, Homo sapien
cccctgcactggagtatctatcatgacaaatag

SEQ ID NO: 160527 - DNA, 33 bp, Homo sapien
ataagagaacattttcaaatgctgagccagttt

SEQ ID NO: 160528 - DNA, 33 bp, Homo sapien
ataagagaacattttcgaatgctgagccagttt

SEQ ID NO: 160529 - DNA, 33 bp, Homo sapien
aaacacaggaatgaggaagcatttttgttttta

SEQ ID NO: 160530 - DNA, 33 bp, Homo sapien
aaacacaggaatgagggagcatttttgttttta

SEQ ID NO: 160531 - DNA, 33 bp, Homo sapien
attcaaaaccatgtagaagtttaactgaattta

SEQ ID NO: 160532 - DNA, 33 bp, Homo sapien
attcaaaaccatgtaggagtttaactgaattta

SEQ ID NO: 160533 - DNA, 33 bp, Homo sapien
aaacgtggacttaaacacttgctaaaatgatcc

SEQ ID NO: 160534 - DNA, 33 bp, Homo sapien
aaacgtggacttaaacccttgctaaaatgatcc

SEQ ID NO: 160535 - DNA, 33 bp, Homo sapien
tgatagcaacagtgtcaaagcagaactataaag

SEQ ID NO: 160536 - DNA, 33 bp, Homo sapien
tgatagcaacagtgtcgaagcagaactataaag

SEQ ID NO: 160537 - DNA, 33 bp, Homo sapien
aaaaaaatacagctaacgtcaaccaacaaatat

SEQ ID NO: 160538 - DNA, 33 bp, Homo sapien
aaaaaaatacagctaatgtcaaccaacaaatat

SEQ ID NO: 160539 - DNA, 33 bp, Homo sapien
gagctgtgggaggagaagtttttcacaaagaaa

SEQ ID NO: 160540 - DNA, 33 bp, Homo sapien
gagctgtgggaggagaggtttttcacaaagaaa

SEQ ID NO: 160541 - DNA, 33 bp, Homo sapien
agcagatggaggcccactatcgtacaatggcta

SEQ ID NO: 160542 - DNA, 33 bp, Homo sapien
agcagatggaggcccagtatcgtacaatggcta

SEQ ID NO: 160543 - DNA, 33 bp, Homo sapien
tacttctaaaaactcaatagaacccaggagtag

SEQ ID NO: 160544 - DNA, 33 bp, Homo sapien
tacttctaaaaactcagtagaacccaggagtag

SEQ ID NO: 160545 - DNA, 33 bp, Homo sapien
attaactgtaagacaacagacattgataatgat

SEQ ID NO: 160546 - DNA, 33 bp, Homo sapien
attaactgtaagacaatagacattgataatgat

SEQ ID NO: 160547 - DNA, 33 bp, Homo sapien
actgaactagaaagcacagtggttaacaatttc

SEQ ID NO: 160548 - DNA, 33 bp, Homo sapien
actgaactagaaagcatagtggttaacaatttc

SEQ ID NO: 160549 - DNA, 33 bp, Homo sapien
catcacttaagtgccaatcaaagctccatcgag

SEQ ID NO: 160550 - DNA, 33 bp, Homo sapien
catcacttaagtgccactcaaagctccatcgag

SEQ ID NO: 160551 - DNA, 33 bp, Homo sapien
aatcagatttagaaaacattaggcattgccggg

SEQ ID NO: 160552 - DNA, 33 bp, Homo sapien
aatcagatttagaaaagattaggcattgccggg

SEQ ID NO: 160553 - DNA, 33 bp, Homo sapien
ttcaaagaccggtagacgctcttctactctttg

SEQ ID NO: 160554 - DNA, 33 bp, Homo sapien
ttcaaagaccggtagatgctcttctactctttg

SEQ ID NO: 160555 - DNA, 33 bp, Homo sapien
aacacatgaacctatcaataattataaaataga

SEQ ID NO: 160556 - DNA, 33 bp, Homo sapien
aacacatgaacctatccataattataaaataga

SEQ ID NO: 160557 - DNA, 33 bp, Homo sapien
actttatatacagggcaaaaggtaaattcatac

SEQ ID NO: 160558 - DNA, 33 bp, Homo sapien
actttatatacagggcgaaaggtaaattcatac

SEQ ID NO: 160559 - DNA, 33 bp, Homo sapien
tggctgggcgtcatcacgtatgcctgtaatccc

SEQ ID NO: 160560 - DNA, 33 bp, Homo sapien
tggctgggcgtcatcatgtatgcctgtaatccc

SEQ ID NO: 160561 - DNA, 33 bp, Homo sapien
gaaatggtttgatcacaatgggaccataatcca

SEQ ID NO: 160562 - DNA, 33 bp, Homo sapien
gaaatggtttgatcaccatgggaccataatcca

SEQ ID NO: 160563 - DNA, 33 bp, Homo sapien
atctgaattggtagacgaggtaaagaagatcac

SEQ ID NO: 160564 - DNA, 33 bp, Homo sapien
atctgaattggtagactaggtaaagaagatcac

SEQ ID NO: 160565 - DNA, 33 bp, Homo sapien
ctatgaagttgtaggaagttgctgtatctcatt

SEQ ID NO: 160566 - DNA, 33 bp, Homo sapien
ctatgaagttgtaggatgttgctgtatctcatt

SEQ ID NO: 160567 - DNA, 33 bp, Homo sapien
gcctttgagcccaacaatagcagtgctgacatg

SEQ ID NO: 160568 - DNA, 33 bp, Homo sapien
gcctttgagcccaacagtagcagtgctgacatg

SEQ ID NO: 160569 - DNA, 33 bp, Homo sapien
tgtaacctaatcgctaaagtgacatcatcatat

SEQ ID NO: 160570 - DNA, 33 bp, Homo sapien
tgtaacctaatcgctagagtgacatcatcatat

SEQ ID NO: 160571 - DNA, 33 bp, Homo sapien
tccctcaactgtgacaagttagtggggagcaat

SEQ ID NO: 160572 - DNA, 33 bp, Homo sapien
tccctcaactgtgacaggttagtggggagcaat

SEQ ID NO: 160573 - DNA, 33 bp, Homo sapien
actggaagtatttgtcacacgaatgactgtata

SEQ ID NO: 160574 - DNA, 33 bp, Homo sapien
actggaagtatttgtcgcacgaatgactgtata

SEQ ID NO: 160575 - DNA, 33 bp, Homo sapien
attggctgctggataactcaagccaaacttgca

SEQ ID NO: 160576 - DNA, 33 bp, Homo sapien
attggctgctggataattcaagccaaacttgca

SEQ ID NO: 160577 - DNA, 33 bp, Homo sapien
gggagagtctaggccacggtctttatcagagat

SEQ ID NO: 160578 - DNA, 33 bp, Homo sapien
gggagagtctaggccatggtctttatcagagat

SEQ ID NO: 160579 - DNA, 33 bp, Homo sapien
tgcagcacatagcaccacttttgaagtactgca

SEQ ID NO: 160580 - DNA, 33 bp, Homo sapien
tgcagcacatagcaccgcttttgaagtactgca

SEQ ID NO: 160581 - DNA, 33 bp, Homo sapien
catttaaccttgcagagcctcagctttctcata

SEQ ID NO: 160582 - DNA, 33 bp, Homo sapien
catttaaccttgcagatcctcagctttctcata

SEQ ID NO: 160583 - DNA, 33 bp, Homo sapien
ccttttaatccaccgaagccatgaccttcttgt

SEQ ID NO: 160584 - DNA, 33 bp, Homo sapien
ccttttaatccaccgaggccatgaccttcttgt

SEQ ID NO: 160585 - DNA, 33 bp, Homo sapien
tcaaagctccctgtgaactatttttgctgggta

SEQ ID NO: 160586 - DNA, 33 bp, Homo sapien
tcaaagctccctgtgatctatttttgctgggta

SEQ ID NO: 160587 - DNA, 33 bp, Homo sapien
ggagcattagaaagaaaaagtgtgcttagatga

SEQ ID NO: 160588 - DNA, 33 bp, Homo sapien
ggagcattagaaagaacaagtgtgcttagatga

SEQ ID NO: 160589 - DNA, 33 bp, Homo sapien
gaaaaatctctaaaagcctgtataaatgcaaaa

SEQ ID NO: 160590 - DNA, 33 bp, Homo sapien
gaaaaatctctaaaaggctgtataaatgcaaaa

SEQ ID NO: 160591 - DNA, 33 bp, Homo sapien
tggtacttcccgggtaagagagaataaagaact

SEQ ID NO: 160592 - DNA, 33 bp, Homo sapien
tggtacttcccgggtatgagagaataaagaact

SEQ ID NO: 160593 - DNA, 33 bp, Homo sapien
gaatgaaaatgtccaccgctctagaagagttta

SEQ ID NO: 160594 - DNA, 33 bp, Homo sapien
gaatgaaaatgtccactgctctagaagagttta

SEQ ID NO: 160595 - DNA, 33 bp, Homo sapien
tgttaaccttaaaagaccaatccaggactcttc

SEQ ID NO: 160596 - DNA, 33 bp, Homo sapien
tgttaaccttaaaagatcaatccaggactcttc

SEQ ID NO: 160597 - DNA, 33 bp, Homo sapien
aacagctcttctatcacgtgttcgaaagtgtca

SEQ ID NO: 160598 - DNA, 33 bp, Homo sapien
aacagctcttctatcatgtgttcgaaagtgtca

SEQ ID NO: 160599 - DNA, 33 bp, Homo sapien
atgtgtctttttgtaactccatgcctcagaact

SEQ ID NO: 160600 - DNA, 33 bp, Homo sapien
atgtgtctttttgtaagtccatgcctcagaact

SEQ ID NO: 160601 - DNA, 33 bp, Homo sapien
tgtaggacagttagtacgtggtagtgttatctg

SEQ ID NO: 160602 - DNA, 33 bp, Homo sapien
tgtaggacagttagtatgtggtagtgttatctg

SEQ ID NO: 160603 - DNA, 33 bp, Homo sapien
aagctacaagtaatgagcactttcctgtgcttt

SEQ ID NO: 160604 - DNA, 33 bp, Homo sapien
aagctacaagtaatgatcactttcctgtgcttt

SEQ ID NO: 160605 - DNA, 33 bp, Homo sapien
tcagtcctgaaaataacgttaatagctgagaaa

SEQ ID NO: 160606 - DNA, 33 bp, Homo sapien
tcagtcctgaaaataatgttaatagctgagaaa

SEQ ID NO: 160607 - DNA, 33 bp, Homo sapien
ggaagataattgattaacagaagtatgtaatgg

SEQ ID NO: 160608 - DNA, 33 bp, Homo sapien
ggaagataattgattaccagaagtatgtaatgg

SEQ ID NO: 160609 - DNA, 33 bp, Homo sapien
agcttcctttctacaacctgctgataagtcatc

SEQ ID NO: 160610 - DNA, 33 bp, Homo sapien
agcttcctttctacaatctgctgataagtcatc

SEQ ID NO: 160611 - DNA, 33 bp, Homo sapien
atctgatcttttgctacgagaaaagtctgagtg

SEQ ID NO: 160612 - DNA, 33 bp, Homo sapien
atctgatcttttgctatgagaaaagtctgagtg

SEQ ID NO: 160613 - DNA, 33 bp, Homo sapien
atatctataaaactgacgtgatatgaaggtgtc

SEQ ID NO: 160614 - DNA, 33 bp, Homo sapien
atatctataaaactgatgtgatatgaaggtgtc

SEQ ID NO: 160615 - DNA, 33 bp, Homo sapien
cacatggaatactgagaaagaactgaatgactc

SEQ ID NO: 160616 - DNA, 33 bp, Homo sapien
cacatggaatactgaggaagaactgaatgactc

SEQ ID NO: 160617 - DNA, 33 bp, Homo sapien
cttcatttcacagaagaaaactgagatctggaa

SEQ ID NO: 160618 - DNA, 33 bp, Homo sapien
cttcatttcacagaaggaaactgagatctggaa

SEQ ID NO: 160619 - DNA, 33 bp, Homo sapien
tgactatgaactagacactgctatggttagagc

SEQ ID NO: 160620 - DNA, 33 bp, Homo sapien
tgactatgaactagactctgctatggttagagc

SEQ ID NO: 160621 - DNA, 33 bp, Homo sapien
tattgatttccaaaacagggagagaagtcttac

SEQ ID NO: 160622 - DNA, 33 bp, Homo sapien
tattgatttccaaaacggggagagaagtcttac

SEQ ID NO: 160623 - DNA, 33 bp, Homo sapien
cagtaccctttgaaccacatgcacaaagagaga

SEQ ID NO: 160624 - DNA, 33 bp, Homo sapien
cagtaccctttgaaccgcatgcacaaagagaga

SEQ ID NO: 160625 - DNA, 33 bp, Homo sapien
ggtcgaaaaacgacacaagaatgaacaatcagt

SEQ ID NO: 160626 - DNA, 33 bp, Homo sapien
ggtcgaaaaacgacaccagaatgaacaatcagt

SEQ ID NO: 160627 - DNA, 33 bp, Homo sapien
tcttgaaagttctataccattttgagctttaaa

SEQ ID NO: 160628 - DNA, 33 bp, Homo sapien
tcttgaaagttctatatcattttgagctttaaa

SEQ ID NO: 160629 - DNA, 33 bp, Homo sapien
catttcacctcaaagaagtaacacaattttctt

SEQ ID NO: 160630 - DNA, 33 bp, Homo sapien
catttcacctcaaagatgtaacacaattttctt

SEQ ID NO: 160631 - DNA, 33 bp, Homo sapien
ataatgccaggcacataatagatacatgttaaa

SEQ ID NO: 160632 - DNA, 33 bp, Homo sapien
ataatgccaggcacatgatagatacatgttaaa

SEQ ID NO: 160633 - DNA, 33 bp, Homo sapien
gctagtttcttcataccattcagatctcagccc

SEQ ID NO: 160634 - DNA, 33 bp, Homo sapien
gctagtttcttcatacgattcagatctcagccc

SEQ ID NO: 160635 - DNA, 33 bp, Homo sapien
tgctttatgttttgaaaagaatagactagaaat

SEQ ID NO: 160636 - DNA, 33 bp, Homo sapien
tgctttatgttttgaagagaatagactagaaat

SEQ ID NO: 160637 - DNA, 33 bp, Homo sapien
gcaaatcctacaatcaatagaatgcacctcttt

SEQ ID NO: 160638 - DNA, 33 bp, Homo sapien
gcaaatcctacaatcagtagaatgcacctcttt

SEQ ID NO: 160639 - DNA, 33 bp, Homo sapien
tcgccactgttcttcacctaagataatggagca

SEQ ID NO: 160640 - DNA, 33 bp, Homo sapien
tcgccactgttcttcagctaagataatggagca

SEQ ID NO: 160641 - DNA, 33 bp, Homo sapien
gtgagaaatattgctaactgatgatggaagata

SEQ ID NO: 160642 - DNA, 33 bp, Homo sapien
gtgagaaatattgctatctgatgatggaagata

SEQ ID NO: 160643 - DNA, 33 bp, Homo sapien
tcccgagatttttgcagtatactatgttgtctc

SEQ ID NO: 160644 - DNA, 33 bp, Homo sapien
tcccgagatttttgcattatactatgttgtctc

SEQ ID NO: 160645 - DNA, 33 bp, Homo sapien
aagggaagctgagaaacgtagtcattattctgg

SEQ ID NO: 160646 - DNA, 33 bp, Homo sapien
aagggaagctgagaaatgtagtcattattctgg

SEQ ID NO: 160647 - DNA, 33 bp, Homo sapien
gcctagcaagattataacttcaggcacagtttc

SEQ ID NO: 160648 - DNA, 33 bp, Homo sapien
gcctagcaagattatagcttcaggcacagtttc

SEQ ID NO: 160649 - DNA, 33 bp, Homo sapien
acctatgaacttctacaacgtgcccccttccac

SEQ ID NO: 160650 - DNA, 33 bp, Homo sapien
acctatgaacttctacgacgtgcccccttccac

SEQ ID NO: 160651 - DNA, 33 bp, Homo sapien
gtcaaactcagcaaagactttcatgctgtcaag

SEQ ID NO: 160652 - DNA, 33 bp, Homo sapien
gtcaaactcagcaaaggctttcatgctgtcaag

SEQ ID NO: 160653 - DNA, 33 bp, Homo sapien
aatgggttatgcttcaaattttatttctgagta

SEQ ID NO: 160654 - DNA, 33 bp, Homo sapien
aatgggttatgcttcatattttatttctgagta

SEQ ID NO: 160655 - DNA, 33 bp, Homo sapien
gaaagaatgggaagcccatgacacagattggca

SEQ ID NO: 160656 - DNA, 33 bp, Homo sapien
gaaagaatgggaagcctatgacacagattggca

SEQ ID NO: 160657 - DNA, 33 bp, Homo sapien
gaagtcacatttcaaacattaattcactcaata

SEQ ID NO: 160658 - DNA, 33 bp, Homo sapien
gaagtcacatttcaaatattaattcactcaata

SEQ ID NO: 160659 - DNA, 33 bp, Homo sapien
taccaaacctactacaacttctatccattggca

SEQ ID NO: 160660 - DNA, 33 bp, Homo sapien
taccaaacctactacagcttctatccattggca

SEQ ID NO: 160661 - DNA, 33 bp, Homo sapien
tccagaaatagctgcaaagttacaaattaagga

SEQ ID NO: 160662 - DNA, 33 bp, Homo sapien
tccagaaatagctgcatagttacaaattaagga

SEQ ID NO: 160663 - DNA, 33 bp, Homo sapien
aactaaaagcactacaatagggctctggaatta

SEQ ID NO: 160664 - DNA, 33 bp, Homo sapien
aactaaaagcactacagtagggctctggaatta

SEQ ID NO: 160665 - DNA, 33 bp, Homo sapien
cactgcatttcccaacaccagttacatgaaaca

SEQ ID NO: 160666 - DNA, 33 bp, Homo sapien
cactgcatttcccaacgccagttacatgaaaca

SEQ ID NO: 160667 - DNA, 33 bp, Homo sapien
attttaatctgaagctaaaagggccaaataaga

SEQ ID NO: 160668 - DNA, 33 bp, Homo sapien
attttaatctgaagctgaaagggccaaataaga

SEQ ID NO: 160669 - DNA, 33 bp, Homo sapien
aggcaagatggtgctagatatgcttgttagaaa

SEQ ID NO: 160670 - DNA, 33 bp, Homo sapien
aggcaagatggtgctatatatgcttgttagaaa

SEQ ID NO: 160671 - DNA, 33 bp, Homo sapien
catacaaatccttcacccagagaattaagtggt

SEQ ID NO: 160672 - DNA, 33 bp, Homo sapien
catacaaatccttcactcagagaattaagtggt

SEQ ID NO: 160673 - DNA, 33 bp, Homo sapien
ttgcgtatgtttggaaatgtatggcatcaaatc

SEQ ID NO: 160674 - DNA, 33 bp, Homo sapien
ttgcgtatgtttggaagtgtatggcatcaaatc

SEQ ID NO: 160675 - DNA, 33 bp, Homo sapien
tagggggtaaacatagacacaatacacacaaaa

SEQ ID NO: 160676 - DNA, 33 bp, Homo sapien
tagggggtaaacataggcacaatacacacaaaa

SEQ ID NO: 160677 - DNA, 33 bp, Homo sapien
tgcacagtttagggaacgaggtatttgcatttt

SEQ ID NO: 160678 - DNA, 33 bp, Homo sapien
tgcacagtttagggaatgaggtatttgcatttt

SEQ ID NO: 160679 - DNA, 33 bp, Homo sapien
agcttggccttccagacccaccacagcctggac

SEQ ID NO: 160680 - DNA, 33 bp, Homo sapien
agcttggccttccagatccaccacagcctggac

SEQ ID NO: 160681 - DNA, 33 bp, Homo sapien
aactcagtgccaggacccttgagtgtgtctttc

SEQ ID NO: 160682 - DNA, 33 bp, Homo sapien
aactcagtgccaggactcttgagtgtgtctttc

SEQ ID NO: 160683 - DNA, 33 bp, Homo sapien
tctatttctggaataaccatttgtttattggcc

SEQ ID NO: 160684 - DNA, 33 bp, Homo sapien
tctatttctggaataatcatttgtttattggcc

SEQ ID NO: 160685 - DNA, 33 bp, Homo sapien
atatgcatactctttcacccgagtaattccact

SEQ ID NO: 160686 - DNA, 33 bp, Homo sapien
atatgcatactctttcgcccgagtaattccact

SEQ ID NO: 160687 - DNA, 33 bp, Homo sapien
ggcagcacagcatgccacttgtaattaatcacc

SEQ ID NO: 160688 - DNA, 33 bp, Homo sapien
ggcagcacagcatgccgcttgtaattaatcacc

SEQ ID NO: 160689 - DNA, 33 bp, Homo sapien
gttttcttcagtgtagccataatttgtattttt

SEQ ID NO: 160690 - DNA, 33 bp, Homo sapien
gttttcttcagtgtagtcataatttgtattttt

SEQ ID NO: 160691 - DNA, 33 bp, Homo sapien
ggaggagcaaagttataagcctacctaagcata

SEQ ID NO: 160692 - DNA, 33 bp, Homo sapien
ggaggagcaaagttatgagcctacctaagcata

SEQ ID NO: 160693 - DNA, 33 bp, Homo sapien
agtaaaacagacaatgaaaactacaactcagag

SEQ ID NO: 160694 - DNA, 33 bp, Homo sapien
agtaaaacagacaatggaaactacaactcagag

SEQ ID NO: 160695 - DNA, 33 bp, Homo sapien
ttttggcatgtttcaaatgtggaccaatcagaa

SEQ ID NO: 160696 - DNA, 33 bp, Homo sapien
ttttggcatgtttcaactgtggaccaatcagaa

SEQ ID NO: 160697 - DNA, 33 bp, Homo sapien
agttccatgacaatagcagaccaacacaagaca

SEQ ID NO: 160698 - DNA, 33 bp, Homo sapien
agttccatgacaatagtagaccaacacaagaca

SEQ ID NO: 160699 - DNA, 33 bp, Homo sapien
tcttccaaatggtctccaattgtttaatcagtg

SEQ ID NO: 160700 - DNA, 33 bp, Homo sapien
tcttccaaatggtctctaattgtttaatcagtg

SEQ ID NO: 160701 - DNA, 33 bp, Homo sapien
ccaggaccagtaatcactgacaggcaatatgga

SEQ ID NO: 160702 - DNA, 33 bp, Homo sapien
ccaggaccagtaatcattgacaggcaatatgga

SEQ ID NO: 160703 - DNA, 33 bp, Homo sapien
acatttcttcaggtgacagataatttcttatac

SEQ ID NO: 160704 - DNA, 33 bp, Homo sapien
acatttcttcaggtgagagataatttcttatac

SEQ ID NO: 160705 - DNA, 33 bp, Homo sapien
tcttttcatttgcaacccttgctctaatgagtc

SEQ ID NO: 160706 - DNA, 33 bp, Homo sapien
tcttttcatttgcaactcttgctctaatgagtc

SEQ ID NO: 160707 - DNA, 33 bp, Homo sapien
acttgctagcagattacaccaaagcactagttt

SEQ ID NO: 160708 - DNA, 33 bp, Homo sapien
acttgctagcagattataccaaagcactagttt

SEQ ID NO: 160709 - DNA, 33 bp, Homo sapien
cagtaaaggaggcaataaggattatctctcagc

SEQ ID NO: 160710 - DNA, 33 bp, Homo sapien
cagtaaaggaggcaatgaggattatctctcagc

SEQ ID NO: 160711 - DNA, 33 bp, Homo sapien
ttgtattattatcctcactctacaaatgaggga

SEQ ID NO: 160712 - DNA, 33 bp, Homo sapien
ttgtattattatcctcgctctacaaatgaggga

SEQ ID NO: 160713 - DNA, 33 bp, Homo sapien
tacctttgaattctagccagataatcttgggca

SEQ ID NO: 160714 - DNA, 33 bp, Homo sapien
tacctttgaattctaggcagataatcttgggca

SEQ ID NO: 160715 - DNA, 33 bp, Homo sapien
gcctgtgctctatagacgaaataacaaagccta

SEQ ID NO: 160716 - DNA, 33 bp, Homo sapien
gcctgtgctctatagatgaaataacaaagccta

SEQ ID NO: 160717 - DNA, 33 bp, Homo sapien
attaatgttgttttcacgtctgtttacacaaca

SEQ ID NO: 160718 - DNA, 33 bp, Homo sapien
attaatgttgttttcatgtctgtttacacaaca

SEQ ID NO: 160719 - DNA, 33 bp, Homo sapien
attgcaacaattcgtcacgtcttcaggcttcat

SEQ ID NO: 160720 - DNA, 33 bp, Homo sapien
attgcaacaattcgtcgcgtcttcaggcttcat

SEQ ID NO: 160721 - DNA, 33 bp, Homo sapien
tacaggcatatgtccaagatattttgggttcgg

SEQ ID NO: 160722 - DNA, 33 bp, Homo sapien
tacaggcatatgtccaggatattttgggttcgg

SEQ ID NO: 160723 - DNA, 33 bp, Homo sapien
tggttttttaggttgacgtaaatggtgtcagaa

SEQ ID NO: 160724 - DNA, 33 bp, Homo sapien
tggttttttaggttgatgtaaatggtgtcagaa

SEQ ID NO: 160725 - DNA, 33 bp, Homo sapien
gcactctggattcacaaaatttacattctatct

SEQ ID NO: 160726 - DNA, 33 bp, Homo sapien
gcactctggattcacataatttacattctatct

SEQ ID NO: 160727 - DNA, 33 bp, Homo sapien
cttactctacactcaagaatctatagctccttg

SEQ ID NO: 160728 - DNA, 33 bp, Homo sapien
cttactctacactcaataatctatagctccttg

SEQ ID NO: 160729 - DNA, 33 bp, Homo sapien
tgtgcagagatccaaccgcaacaatgaatttgt

SEQ ID NO: 160730 - DNA, 33 bp, Homo sapien
tgtgcagagatccaacggcaacaatgaatttgt

SEQ ID NO: 160731 - DNA, 33 bp, Homo sapien
aaagccatcagtgatacgatgtgggttcttcat

SEQ ID NO: 160732 - DNA, 33 bp, Homo sapien
aaagccatcagtgatatgatgtgggttcttcat

SEQ ID NO: 160733 - DNA, 33 bp, Homo sapien
tttagaagtaacattgaaaacattaaacttctt

SEQ ID NO: 160734 - DNA, 33 bp, Homo sapien
tttagaagtaacattggaaacattaaacttctt

SEQ ID NO: 160735 - DNA, 33 bp, Homo sapien
tattaagaaaatagccaaagtattgaaagtatc

SEQ ID NO: 160736 - DNA, 33 bp, Homo sapien
tattaagaaaatagcccaagtattgaaagtatc

SEQ ID NO: 160737 - DNA, 33 bp, Homo sapien
ggcgctgttttggaaaagcggcagttaggactc

SEQ ID NO: 160738 - DNA, 33 bp, Homo sapien
ggcgctgttttggaaacgcggcagttaggactc

SEQ ID NO: 160739 - DNA, 33 bp, Homo sapien
tattagtttctgctaactcacgtttaccacaca

SEQ ID NO: 160740 - DNA, 33 bp, Homo sapien
tattagtttctgctaagtcacgtttaccacaca

SEQ ID NO: 160741 - DNA, 33 bp, Homo sapien
gaatgatatttttttacgaggtgacttccaaat

SEQ ID NO: 160742 - DNA, 33 bp, Homo sapien
gaatgatatttttttatgaggtgacttccaaat

SEQ ID NO: 160743 - DNA, 33 bp, Homo sapien
acatccagaatccacacggaactcgaaaaaatg

SEQ ID NO: 160744 - DNA, 33 bp, Homo sapien
acatccagaatccacatggaactcgaaaaaatg

SEQ ID NO: 160745 - DNA, 33 bp, Homo sapien
tgtatcatgattatgcacttgtagatgtactga

SEQ ID NO: 160746 - DNA, 33 bp, Homo sapien
tgtatcatgattatgcccttgtagatgtactga

SEQ ID NO: 160747 - DNA, 33 bp, Homo sapien
gagacattacctgctcaataaggcataccttac

SEQ ID NO: 160748 - DNA, 33 bp, Homo sapien
gagacattacctgctcgataaggcataccttac

SEQ ID NO: 160749 - DNA, 33 bp, Homo sapien
ggaataactaacttcaatcagtttaggagatgc

SEQ ID NO: 160750 - DNA, 33 bp, Homo sapien
ggaataactaacttcagtcagtttaggagatgc

SEQ ID NO: 160751 - DNA, 33 bp, Homo sapien
gtgatcaagaatagagacattgaaacagaacaa

SEQ ID NO: 160752 - DNA, 33 bp, Homo sapien
gtgatcaagaatagaggcattgaaacagaacaa

SEQ ID NO: 160753 - DNA, 33 bp, Homo sapien
acttgtgccaatttctgaaccaattatagtggg

SEQ ID NO: 160754 - DNA, 33 bp, Homo sapien
acttgtgccaatttcttaaccaattatagtggg

SEQ ID NO: 160755 - DNA, 33 bp, Homo sapien
ttagaattggaatccccctctcaccaatggtat

SEQ ID NO: 160756 - DNA, 33 bp, Homo sapien
ttagaattggaatccctctctcaccaatggtat

SEQ ID NO: 160757 - DNA, 33 bp, Homo sapien
tccctatgttgtgatacgacctgttaacttggc

SEQ ID NO: 160758 - DNA, 33 bp, Homo sapien
tccctatgttgtgatatgacctgttaacttggc

SEQ ID NO: 160759 - DNA, 33 bp, Homo sapien
tgctatacaaatttcagtaatggattcatcaga

SEQ ID NO: 160760 - DNA, 33 bp, Homo sapien
tgctatacaaatttcattaatggattcatcaga

SEQ ID NO: 160761 - DNA, 33 bp, Homo sapien
agcaggcaaaatgagaactcgtgcagggcaatt

SEQ ID NO: 160762 - DNA, 33 bp, Homo sapien
agcaggcaaaatgagagctcgtgcagggcaatt

SEQ ID NO: 160763 - DNA, 33 bp, Homo sapien
gatggttaacccgaatcatcttgtcattaccaa

SEQ ID NO: 160764 - DNA, 33 bp, Homo sapien
gatggttaacccgaattatcttgtcattaccaa

SEQ ID NO: 160765 - DNA, 33 bp, Homo sapien
atacaagtatatgggaaggttagatcgaacatt

SEQ ID NO: 160766 - DNA, 33 bp, Homo sapien
atacaagtatatgggagggttagatcgaacatt

SEQ ID NO: 160767 - DNA, 33 bp, Homo sapien
gcaggattcttgaaatcatagagctggaagggg

SEQ ID NO: 160768 - DNA, 33 bp, Homo sapien
gcaggattcttgaaattatagagctggaagggg

SEQ ID NO: 160769 - DNA, 33 bp, Homo sapien
gcattgtaattgtgatcaggcttattaaaagca

SEQ ID NO: 160770 - DNA, 33 bp, Homo sapien
gcattgtaattgtgatgaggcttattaaaagca

SEQ ID NO: 160771 - DNA, 33 bp, Homo sapien
gtggcacatgtacaccaaaagcttcttaagctg

SEQ ID NO: 160772 - DNA, 33 bp, Homo sapien
gtggcacatgtacaccgaaagcttcttaagctg

SEQ ID NO: 160773 - DNA, 33 bp, Homo sapien
gtcaccaaaatcagagaaaacttgagataagaa

SEQ ID NO: 160774 - DNA, 33 bp, Homo sapien
gtcaccaaaatcagagcaaacttgagataagaa

SEQ ID NO: 160775 - DNA, 33 bp, Homo sapien
tcatcacttcacctaaacggcctcaccttcagg

SEQ ID NO: 160776 - DNA, 33 bp, Homo sapien
tcatcacttcacctaagcggcctcaccttcagg

SEQ ID NO: 160777 - DNA, 33 bp, Homo sapien
acatagaatggcaaaacgaggacagaataacct

SEQ ID NO: 160778 - DNA, 33 bp, Homo sapien
acatagaatggcaaaatgaggacagaataacct

SEQ ID NO: 160779 - DNA, 33 bp, Homo sapien
atcatatgacttagagcccttcaatcttcgaaa

SEQ ID NO: 160780 - DNA, 33 bp, Homo sapien
atcatatgacttagagtccttcaatcttcgaaa

SEQ ID NO: 160781 - DNA, 33 bp, Homo sapien
taaagcacaggcatacaacagcatttgaggaac

SEQ ID NO: 160782 - DNA, 33 bp, Homo sapien
taaagcacaggcatacgacagcatttgaggaac

SEQ ID NO: 160783 - DNA, 33 bp, Homo sapien
gatggtagtgcgttcacgaaaaaacaattttgt

SEQ ID NO: 160784 - DNA, 33 bp, Homo sapien
gatggtagtgcgttcatgaaaaaacaattttgt

SEQ ID NO: 160785 - DNA, 33 bp, Homo sapien
atgaatgcccctgtcacgaagctccctttgctg

SEQ ID NO: 160786 - DNA, 33 bp, Homo sapien
atgaatgcccctgtcatgaagctccctttgctg

SEQ ID NO: 160787 - DNA, 33 bp, Homo sapien
tctaaaatattattgcccaaaagttgtgtcaca

SEQ ID NO: 160788 - DNA, 33 bp, Homo sapien
tctaaaatattattgctcaaaagttgtgtcaca

SEQ ID NO: 160789 - DNA, 33 bp, Homo sapien
tcttccagagaaacagacctagacctagtcctc

SEQ ID NO: 160790 - DNA, 33 bp, Homo sapien
tcttccagagaaacagtcctagacctagtcctc

SEQ ID NO: 160791 - DNA, 33 bp, Homo sapien
aacaaaggacatggaaatcccaaacaacagcat

SEQ ID NO: 160792 - DNA, 33 bp, Homo sapien
aacaaaggacatggaagtcccaaacaacagcat

SEQ ID NO: 160793 - DNA, 33 bp, Homo sapien
agaaaaggacagactagatttgatcttcaataa

SEQ ID NO: 160794 - DNA, 33 bp, Homo sapien
agaaaaggacagactatatttgatcttcaataa

SEQ ID NO: 160795 - DNA, 33 bp, Homo sapien
ttaggttctgacaccccattaggatttttaaaa

SEQ ID NO: 160796 - DNA, 33 bp, Homo sapien
ttaggttctgacaccctattaggatttttaaaa

SEQ ID NO: 160797 - DNA, 33 bp, Homo sapien
acttgggcttgaagaacataaaattgttgcagc

SEQ ID NO: 160798 - DNA, 33 bp, Homo sapien
acttgggcttgaagaagataaaattgttgcagc

SEQ ID NO: 160799 - DNA, 33 bp, Homo sapien
tgctgtaccacttaccagctgcaacgtcttagg

SEQ ID NO: 160800 - DNA, 33 bp, Homo sapien
tgctgtaccacttaccggctgcaacgtcttagg

SEQ ID NO: 160801 - DNA, 33 bp, Homo sapien
aattacaatgtctaccacattaagtgaaggtca

SEQ ID NO: 160802 - DNA, 33 bp, Homo sapien
aattacaatgtctacctcattaagtgaaggtca

SEQ ID NO: 160803 - DNA, 33 bp, Homo sapien
caatgcttgctatagggcccatttttaatctac

SEQ ID NO: 160804 - DNA, 33 bp, Homo sapien
caatgcttgctataggtcccatttttaatctac

SEQ ID NO: 160805 - DNA, 33 bp, Homo sapien
ggctccctcatgctccacttctggttgggtttg

SEQ ID NO: 160806 - DNA, 33 bp, Homo sapien
ggctccctcatgctccgcttctggttgggtttg

SEQ ID NO: 160807 - DNA, 33 bp, Homo sapien
gaagtgataattgaacaaagatctgacaaaaga

SEQ ID NO: 160808 - DNA, 33 bp, Homo sapien
gaagtgataattgaacgaagatctgacaaaaga

SEQ ID NO: 160809 - DNA, 33 bp, Homo sapien
atctgatttaaattaccaaattggcaaagctct

SEQ ID NO: 160810 - DNA, 33 bp, Homo sapien
atctgatttaaattacgaaattggcaaagctct

SEQ ID NO: 160811 - DNA, 33 bp, Homo sapien
tagatttctccaaggacgctgacaggaaaataa

SEQ ID NO: 160812 - DNA, 33 bp, Homo sapien
tagatttctccaaggaggctgacaggaaaataa

SEQ ID NO: 160813 - DNA, 33 bp, Homo sapien
attgttatttccaggcaatgtttaacagagcgt

SEQ ID NO: 160814 - DNA, 33 bp, Homo sapien
attgttatttccaggccatgtttaacagagcgt

SEQ ID NO: 160815 - DNA, 33 bp, Homo sapien
tctaggtctcctttcaagtgaaaatatatgatt

SEQ ID NO: 160816 - DNA, 33 bp, Homo sapien
tctaggtctcctttcacgtgaaaatatatgatt

SEQ ID NO: 160817 - DNA, 33 bp, Homo sapien
ttcttgactccatatgcaacagcttaggctatt

SEQ ID NO: 160818 - DNA, 33 bp, Homo sapien
ttcttgactccatatgtaacagcttaggctatt

SEQ ID NO: 160819 - DNA, 33 bp, Homo sapien
cctcaaccctgcactacggatcaagattatcac

SEQ ID NO: 160820 - DNA, 33 bp, Homo sapien
cctcaaccctgcactatggatcaagattatcac

SEQ ID NO: 160821 - DNA, 33 bp, Homo sapien
agaaaatttttcatcaaagtttgtcacaggttg

SEQ ID NO: 160822 - DNA, 33 bp, Homo sapien
agaaaatttttcatcacagtttgtcacaggttg

SEQ ID NO: 160823 - DNA, 33 bp, Homo sapien
cccagacacctatgaaaagactcaagtgcaggg

SEQ ID NO: 160824 - DNA, 33 bp, Homo sapien
cccagacacctatgaagagactcaagtgcaggg

SEQ ID NO: 160825 - DNA, 33 bp, Homo sapien
gaaaaaacagtaaaaacgggtagcagtagaatc

SEQ ID NO: 160826 - DNA, 33 bp, Homo sapien
gaaaaaacagtaaaaatgggtagcagtagaatc

SEQ ID NO: 160827 - DNA, 33 bp, Homo sapien
caggccccaaaccaaacctacttcttccataag

SEQ ID NO: 160828 - DNA, 33 bp, Homo sapien
caggccccaaaccaaagctacttcttccataag

SEQ ID NO: 160829 - DNA, 33 bp, Homo sapien
ttgaaatctcacaacaaaccttagaagcagtta

SEQ ID NO: 160830 - DNA, 33 bp, Homo sapien
ttgaaatctcacaacagaccttagaagcagtta

SEQ ID NO: 160831 - DNA, 33 bp, Homo sapien
aactggaactctcacaaaacaaccactttagaa

SEQ ID NO: 160832 - DNA, 33 bp, Homo sapien
aactggaactctcacagaacaaccactttagaa

SEQ ID NO: 160833 - DNA, 33 bp, Homo sapien
tccgaggtaaatataacaaagagtctcatctct

SEQ ID NO: 160834 - DNA, 33 bp, Homo sapien
tccgaggtaaatataataaagagtctcatctct

SEQ ID NO: 160835 - DNA, 33 bp, Homo sapien
ttaaatgtgctaaaaagcaaaaccaataatata

SEQ ID NO: 160836 - DNA, 33 bp, Homo sapien
ttaaatgtgctaaaaatcaaaaccaataatata

SEQ ID NO: 160837 - DNA, 33 bp, Homo sapien
ttaccagcaataccccaacaaactcttttaaag

SEQ ID NO: 160838 - DNA, 33 bp, Homo sapien
ttaccagcaataccccgacaaactcttttaaag

SEQ ID NO: 160839 - DNA, 33 bp, Homo sapien
agctgggatccatttacaaggaactctgggact

SEQ ID NO: 160840 - DNA, 33 bp, Homo sapien
agctgggatccatttagaaggaactctgggact

SEQ ID NO: 160841 - DNA, 33 bp, Homo sapien
tagattcaagtgtttaaagaatggcactaaggc

SEQ ID NO: 160842 - DNA, 33 bp, Homo sapien
tagattcaagtgtttatagaatggcactaaggc

SEQ ID NO: 160843 - DNA, 33 bp, Homo sapien
ttgtatagtgatctagaaaaaaggagagacgga

SEQ ID NO: 160844 - DNA, 33 bp, Homo sapien
ttgtatagtgatctaggaaaaaggagagacgga

SEQ ID NO: 160845 - DNA, 33 bp, Homo sapien
tattcatttattctgtaaacatatgctgagccc

SEQ ID NO: 160846 - DNA, 33 bp, Homo sapien
tattcatttattctgtgaacatatgctgagccc

SEQ ID NO: 160847 - DNA, 33 bp, Homo sapien
gagatctgtagggtcacgtcattcaattcctta

SEQ ID NO: 160848 - DNA, 33 bp, Homo sapien
gagatctgtagggtcatgtcattcaattcctta

SEQ ID NO: 160849 - DNA, 33 bp, Homo sapien
gaacatagctctctaaagttgccactaaaaatt

SEQ ID NO: 160850 - DNA, 33 bp, Homo sapien
gaacatagctctctaaggttgccactaaaaatt

SEQ ID NO: 160851 - DNA, 33 bp, Homo sapien
actgagcagctacctcaatgctttactcttacg

SEQ ID NO: 160852 - DNA, 33 bp, Homo sapien
actgagcagctacctcgatgctttactcttacg

SEQ ID NO: 160853 - DNA, 33 bp, Homo sapien
acactgtaatatactacccaatctttcaaaaaa

SEQ ID NO: 160854 - DNA, 33 bp, Homo sapien
acactgtaatatactatccaatctttcaaaaaa

SEQ ID NO: 160855 - DNA, 33 bp, Homo sapien
ggaaaaaacataacaaccacagcctgtttagct

SEQ ID NO: 160856 - DNA, 33 bp, Homo sapien
ggaaaaaacataacaatcacagcctgtttagct

SEQ ID NO: 160857 - DNA, 33 bp, Homo sapien
ggggtgattagtactgaagaagtgagaatggag

SEQ ID NO: 160858 - DNA, 33 bp, Homo sapien
ggggtgattagtactggagaagtgagaatggag

SEQ ID NO: 160859 - DNA, 33 bp, Homo sapien
ataaccactctacaaacgaaacatgattacagc

SEQ ID NO: 160860 - DNA, 33 bp, Homo sapien
ataaccactctacaaatgaaacatgattacagc

SEQ ID NO: 160861 - DNA, 33 bp, Homo sapien
caagtgaatggcagagaccaacacagagccagg

SEQ ID NO: 160862 - DNA, 33 bp, Homo sapien
caagtgaatggcagagcccaacacagagccagg

SEQ ID NO: 160863 - DNA, 33 bp, Homo sapien
cttcagtgagcatgtaataaaaaaccctctttt

SEQ ID NO: 160864 - DNA, 33 bp, Homo sapien
cttcagtgagcatgtagtaaaaaaccctctttt

SEQ ID NO: 160865 - DNA, 33 bp, Homo sapien
ccaccataatcaatccaacacaagccttttgta

SEQ ID NO: 160866 - DNA, 33 bp, Homo sapien
ccaccataatcaatccgacacaagccttttgta

SEQ ID NO: 160867 - DNA, 33 bp, Homo sapien
ctgatattcactatgacgtctacacacacattt

SEQ ID NO: 160868 - DNA, 33 bp, Homo sapien
ctgatattcactatgatgtctacacacacattt

SEQ ID NO: 160869 - DNA, 33 bp, Homo sapien
accagaacgtaacagcaaaacgtggtaacatct

SEQ ID NO: 160870 - DNA, 33 bp, Homo sapien
accagaacgtaacagcgaaacgtggtaacatct

SEQ ID NO: 160871 - DNA, 33 bp, Homo sapien
ttcccgctttctgctaagtcactgaggctgcat

SEQ ID NO: 160872 - DNA, 33 bp, Homo sapien
ttcccgctttctgctaggtcactgaggctgcat

SEQ ID NO: 160873 - DNA, 33 bp, Homo sapien
ttcttcctccaggaacactactcgtctacttcc

SEQ ID NO: 160874 - DNA, 33 bp, Homo sapien
ttcttcctccaggaacgctactcgtctacttcc

SEQ ID NO: 160875 - DNA, 33 bp, Homo sapien
gtgaactcacagctaacagtagattcaaaatga

SEQ ID NO: 160876 - DNA, 33 bp, Homo sapien
gtgaactcacagctaatagtagattcaaaatga

SEQ ID NO: 160877 - DNA, 33 bp, Homo sapien
cagtaagttgctcccacctaaaatattcatatc

SEQ ID NO: 160878 - DNA, 33 bp, Homo sapien
cagtaagttgctcccatctaaaatattcatatc

SEQ ID NO: 160879 - DNA, 33 bp, Homo sapien
gaattacttcttcatccgaatatttccctacat

SEQ ID NO: 160880 - DNA, 33 bp, Homo sapien
gaattacttcttcatctgaatatttccctacat

SEQ ID NO: 160881 - DNA, 33 bp, Homo sapien
gggtgaaaagttaccaaaggagagtggtcacat

SEQ ID NO: 160882 - DNA, 33 bp, Homo sapien
gggtgaaaagttaccagaggagagtggtcacat

SEQ ID NO: 160883 - DNA, 33 bp, Homo sapien
agtacagtggtcaaatcatagtagattttcaaa

SEQ ID NO: 160884 - DNA, 33 bp, Homo sapien
agtacagtggtcaaattatagtagattttcaaa

SEQ ID NO: 160885 - DNA, 33 bp, Homo sapien
gagagatgaactgggacgctttccagccataat

SEQ ID NO: 160886 - DNA, 33 bp, Homo sapien
gagagatgaactgggatgctttccagccataat

SEQ ID NO: 160887 - DNA, 33 bp, Homo sapien
tgactctccctgcttcacttagaggatcctcct

SEQ ID NO: 160888 - DNA, 33 bp, Homo sapien
tgactctccctgcttcgcttagaggatcctcct

SEQ ID NO: 160889 - DNA, 33 bp, Homo sapien
tgaaatacagactagacgagaagaatgtatatt

SEQ ID NO: 160890 - DNA, 33 bp, Homo sapien
tgaaatacagactagatgagaagaatgtatatt

SEQ ID NO: 160891 - DNA, 33 bp, Homo sapien
gagagagagggaaaaaaataggatgtggtcatt

SEQ ID NO: 160892 - DNA, 33 bp, Homo sapien
gagagagagggaaaaatataggatgtggtcatt

SEQ ID NO: 160893 - DNA, 33 bp, Homo sapien
tcacatcatttaagagaaattcttctggacatg

SEQ ID NO: 160894 - DNA, 33 bp, Homo sapien
tcacatcatttaagagcaattcttctggacatg

SEQ ID NO: 160895 - DNA, 33 bp, Homo sapien
gaactgtgttctgcaaactgacattccaaatta

SEQ ID NO: 160896 - DNA, 33 bp, Homo sapien
gaactgtgttctgcaagctgacattccaaatta

SEQ ID NO: 160897 - DNA, 33 bp, Homo sapien
ctacttccctgaatgaccttttgtgattgtacc

SEQ ID NO: 160898 - DNA, 33 bp, Homo sapien
ctacttccctgaatgatcttttgtgattgtacc

SEQ ID NO: 160899 - DNA, 33 bp, Homo sapien
ccagtcaattcaaaacccctgaggaaaagcaaa

SEQ ID NO: 160900 - DNA, 33 bp, Homo sapien
ccagtcaattcaaaactcctgaggaaaagcaaa

SEQ ID NO: 160901 - DNA, 33 bp, Homo sapien
ccaacatcttttggaaatgacatataatatgca

SEQ ID NO: 160902 - DNA, 33 bp, Homo sapien
ccaacatcttttggaagtgacatataatatgca

SEQ ID NO: 160903 - DNA, 33 bp, Homo sapien
tcagaacaaaactgaacgtaattgagactcaaa

SEQ ID NO: 160904 - DNA, 33 bp, Homo sapien
tcagaacaaaactgaatgtaattgagactcaaa

SEQ ID NO: 160905 - DNA, 33 bp, Homo sapien
agacaaataagccaaactgaggttttcaattct

SEQ ID NO: 160906 - DNA, 33 bp, Homo sapien
agacaaataagccaaattgaggttttcaattct

SEQ ID NO: 160907 - DNA, 33 bp, Homo sapien
catatgtcagagaccactggaagttaaaaatat

SEQ ID NO: 160908 - DNA, 33 bp, Homo sapien
catatgtcagagaccattggaagttaaaaatat

SEQ ID NO: 160909 - DNA, 33 bp, Homo sapien
acactgttacattaaagttaaaccttctggcac

SEQ ID NO: 160910 - DNA, 33 bp, Homo sapien
acactgttacattaaatttaaaccttctggcac

SEQ ID NO: 160911 - DNA, 33 bp, Homo sapien
ttgaacaaagcatataagattaaaatgaccaca

SEQ ID NO: 160912 - DNA, 33 bp, Homo sapien
ttgaacaaagcatatatgattaaaatgaccaca

SEQ ID NO: 160913 - DNA, 33 bp, Homo sapien
caaagccagcagcataacatttccaatctcctt

SEQ ID NO: 160914 - DNA, 33 bp, Homo sapien
caaagccagcagcatagcatttccaatctcctt

SEQ ID NO: 160915 - DNA, 33 bp, Homo sapien
ttggccaccttacacccattattcagagaagct

SEQ ID NO: 160916 - DNA, 33 bp, Homo sapien
ttggccaccttacaccgattattcagagaagct

SEQ ID NO: 160917 - DNA, 33 bp, Homo sapien
cacagtatgcattgaacacagaggctgagaaaa

SEQ ID NO: 160918 - DNA, 33 bp, Homo sapien
cacagtatgcattgaatacagaggctgagaaaa

SEQ ID NO: 160919 - DNA, 33 bp, Homo sapien
ccactaaatatccacccagtcctctgagaatct

SEQ ID NO: 160920 - DNA, 33 bp, Homo sapien
ccactaaatatccacctagtcctctgagaatct

SEQ ID NO: 160921 - DNA, 33 bp, Homo sapien
cagcagatgttgctggcattaagaacatgaggg

SEQ ID NO: 160922 - DNA, 33 bp, Homo sapien
cagcagatgttgctgggattaagaacatgaggg

SEQ ID NO: 160923 - DNA, 33 bp, Homo sapien
gattatttcttacaagccttcataaaaatggaa

SEQ ID NO: 160924 - DNA, 33 bp, Homo sapien
gattatttcttacaaggcttcataaaaatggaa

SEQ ID NO: 160925 - DNA, 33 bp, Homo sapien
gctcattctgcaaaaccggcattgcctttagaa

SEQ ID NO: 160926 - DNA, 33 bp, Homo sapien
gctcattctgcaaaactggcattgcctttagaa

SEQ ID NO: 160927 - DNA, 33 bp, Homo sapien
tgaactcctcttgttccattcaacctctaacta

SEQ ID NO: 160928 - DNA, 33 bp, Homo sapien
tgaactcctcttgttctattcaacctctaacta

SEQ ID NO: 160929 - DNA, 33 bp, Homo sapien
agccttgagcagctagaacctgaattccacctt

SEQ ID NO: 160930 - DNA, 33 bp, Homo sapien
agccttgagcagctaggacctgaattccacctt

SEQ ID NO: 160931 - DNA, 33 bp, Homo sapien
tgaggatcataagcacagaaaggttaagtgtct

SEQ ID NO: 160932 - DNA, 33 bp, Homo sapien
tgaggatcataagcacggaaaggttaagtgtct

SEQ ID NO: 160933 - DNA, 33 bp, Homo sapien
agctggtgtgccttcaagtgttaaatttaaatt

SEQ ID NO: 160934 - DNA, 33 bp, Homo sapien
agctggtgtgccttcaggtgttaaatttaaatt

SEQ ID NO: 160935 - DNA, 33 bp, Homo sapien
tttaggagaaaggaaactgttactcatggccta

SEQ ID NO: 160936 - DNA, 33 bp, Homo sapien
tttaggagaaaggaaagtgttactcatggccta

SEQ ID NO: 160937 - DNA, 33 bp, Homo sapien
ttatcttgcaaattgaaaaggaggttaaggccg

SEQ ID NO: 160938 - DNA, 33 bp, Homo sapien
ttatcttgcaaattgagaaggaggttaaggccg

SEQ ID NO: 160939 - DNA, 33 bp, Homo sapien
ataatttcattgcttaggcttctctcaaactga

SEQ ID NO: 160940 - DNA, 33 bp, Homo sapien
ataatttcattgcttatgcttctctcaaactga

SEQ ID NO: 160941 - DNA, 33 bp, Homo sapien
tcccatcccactgaccccaatcttatgtttcct

SEQ ID NO: 160942 - DNA, 33 bp, Homo sapien
tcccatcccactgacctcaatcttatgtttcct

SEQ ID NO: 160943 - DNA, 33 bp, Homo sapien
tgctctgtctctgaaaacctgtatccaaagtgt

SEQ ID NO: 160944 - DNA, 33 bp, Homo sapien
tgctctgtctctgaaaccctgtatccaaagtgt

SEQ ID NO: 160945 - DNA, 33 bp, Homo sapien
gctaccttgaagatacaccatgactctgaccac

SEQ ID NO: 160946 - DNA, 33 bp, Homo sapien
gctaccttgaagatacgccatgactctgaccac

SEQ ID NO: 160947 - DNA, 33 bp, Homo sapien
gatttcaatcaagttaaattggctcagagaatg

SEQ ID NO: 160948 - DNA, 33 bp, Homo sapien
gatttcaatcaagttacattggctcagagaatg

SEQ ID NO: 160949 - DNA, 33 bp, Homo sapien
ataaacacagtttgcacagtaattaccaataag

SEQ ID NO: 160950 - DNA, 33 bp, Homo sapien
ataaacacagtttgcatagtaattaccaataag

SEQ ID NO: 160951 - DNA, 33 bp, Homo sapien
attgccggcatggaaagacaactgatgtttgtt

SEQ ID NO: 160952 - DNA, 33 bp, Homo sapien
attgccggcatggaaatacaactgatgtttgtt

SEQ ID NO: 160953 - DNA, 33 bp, Homo sapien
taaatgatctcttctacctatggagaatttata

SEQ ID NO: 160954 - DNA, 33 bp, Homo sapien
taaatgatctcttctagctatggagaatttata

SEQ ID NO: 160955 - DNA, 33 bp, Homo sapien
atgcactgaatttaaaatgatatccacaaatca

SEQ ID NO: 160956 - DNA, 33 bp, Homo sapien
atgcactgaatttaaagtgatatccacaaatca

SEQ ID NO: 160957 - DNA, 33 bp, Homo sapien
gtattcatatcacacacattcttctagggaatg

SEQ ID NO: 160958 - DNA, 33 bp, Homo sapien
gtattcatatcacacatattcttctagggaatg

SEQ ID NO: 160959 - DNA, 33 bp, Homo sapien
ttatgttttaatctcacgaaagcataataataa

SEQ ID NO: 160960 - DNA, 33 bp, Homo sapien
ttatgttttaatctcatgaaagcataataataa

SEQ ID NO: 160961 - DNA, 33 bp, Homo sapien
taggcagagagtgtcagcttaagtagagactga

SEQ ID NO: 160962 - DNA, 33 bp, Homo sapien
taggcagagagtgtcatcttaagtagagactga

SEQ ID NO: 160963 - DNA, 33 bp, Homo sapien
gtgttctgggtactaccgatgtataacaaacca

SEQ ID NO: 160964 - DNA, 33 bp, Homo sapien
gtgttctgggtactactgatgtataacaaacca

SEQ ID NO: 160965 - DNA, 33 bp, Homo sapien
agctcctccattggtcaaagcagtcagaagccc

SEQ ID NO: 160966 - DNA, 33 bp, Homo sapien
agctcctccattggtccaagcagtcagaagccc

SEQ ID NO: 160967 - DNA, 33 bp, Homo sapien
ccctgttgggctaagacagatttaaggaaagca

SEQ ID NO: 160968 - DNA, 33 bp, Homo sapien
ccctgttgggctaagatagatttaaggaaagca

SEQ ID NO: 160969 - DNA, 33 bp, Homo sapien
attaagacagtctcaacgcaaagaaccatttaa

SEQ ID NO: 160970 - DNA, 33 bp, Homo sapien
attaagacagtctcaaggcaaagaaccatttaa

SEQ ID NO: 160971 - DNA, 33 bp, Homo sapien
ctatatggttacacaaaatatccacttaaaatt

SEQ ID NO: 160972 - DNA, 33 bp, Homo sapien
ctatatggttacacaagatatccacttaaaatt

SEQ ID NO: 160973 - DNA, 33 bp, Homo sapien
ttgaaatgatccataactgtcaaggccattcat

SEQ ID NO: 160974 - DNA, 33 bp, Homo sapien
ttgaaatgatccataattgtcaaggccattcat

SEQ ID NO: 160975 - DNA, 33 bp, Homo sapien
aatttgtattggcatcaagtacatatagctcca

SEQ ID NO: 160976 - DNA, 33 bp, Homo sapien
aatttgtattggcatcgagtacatatagctcca

SEQ ID NO: 160977 - DNA, 33 bp, Homo sapien
agggccttaatagacccaaactcaaatcctttc

SEQ ID NO: 160978 - DNA, 33 bp, Homo sapien
agggccttaatagacctaaactcaaatcctttc

SEQ ID NO: 160979 - DNA, 33 bp, Homo sapien
ggtgatcttaaaaccccagccatttccaccatt

SEQ ID NO: 160980 - DNA, 33 bp, Homo sapien
ggtgatcttaaaaccctagccatttccaccatt

SEQ ID NO: 160981 - DNA, 33 bp, Homo sapien
gtctcctgcttatcaaaacacagaacataccat

SEQ ID NO: 160982 - DNA, 33 bp, Homo sapien
gtctcctgcttatcaagacacagaacataccat

SEQ ID NO: 160983 - DNA, 33 bp, Homo sapien
tacatcttagtcctaacacacacaaattagata

SEQ ID NO: 160984 - DNA, 33 bp, Homo sapien
tacatcttagtcctaatacacacaaattagata

SEQ ID NO: 160985 - DNA, 33 bp, Homo sapien
tacaccaattttcagagcatgggtaataaacaa

SEQ ID NO: 160986 - DNA, 33 bp, Homo sapien
tacaccaattttcagatcatgggtaataaacaa

SEQ ID NO: 160987 - DNA, 33 bp, Homo sapien
acaaacagagttgagacattggtcaagggaatg

SEQ ID NO: 160988 - DNA, 33 bp, Homo sapien
acaaacagagttgagagattggtcaagggaatg

SEQ ID NO: 160989 - DNA, 33 bp, Homo sapien
aatttattacatagctcaacaagaggattcaaa

SEQ ID NO: 160990 - DNA, 33 bp, Homo sapien
aatttattacatagctgaacaagaggattcaaa

SEQ ID NO: 160991 - DNA, 33 bp, Homo sapien
ggtttatcttaggtgtcacaaatggaagcattt

SEQ ID NO: 160992 - DNA, 33 bp, Homo sapien
ggtttatcttaggtgttacaaatggaagcattt

SEQ ID NO: 160993 - DNA, 33 bp, Homo sapien
tgagaatgaaaactggcacagccattatggaca

SEQ ID NO: 160994 - DNA, 33 bp, Homo sapien
tgagaatgaaaactggtacagccattatggaca

SEQ ID NO: 160995 - DNA, 33 bp, Homo sapien
aaaagaaaattgaaacgcgaaaataaagtgttc

SEQ ID NO: 160996 - DNA, 33 bp, Homo sapien
aaaagaaaattgaaactcgaaaataaagtgttc

SEQ ID NO: 160997 - DNA, 33 bp, Homo sapien
tgatcataggctttgacgctatctatgaattgc

SEQ ID NO: 160998 - DNA, 33 bp, Homo sapien
tgatcataggctttgatgctatctatgaattgc

SEQ ID NO: 160999 - DNA, 33 bp, Homo sapien
aagaaataagttactcaaagtcacatcaccaat

SEQ ID NO: 161000 - DNA, 33 bp, Homo sapien
aagaaataagttactcgaagtcacatcaccaat

SEQ ID NO: 161001 - DNA, 33 bp, Homo sapien
caatggataatacacaagaatgtagttacaggg

SEQ ID NO: 161002 - DNA, 33 bp, Homo sapien
caatggataatacacaggaatgtagttacaggg

SEQ ID NO: 161003 - DNA, 33 bp, Homo sapien
tctatggaataattaaagtttataggcaaaaca

SEQ ID NO: 161004 - DNA, 33 bp, Homo sapien
tctatggaataattaaggtttataggcaaaaca

SEQ ID NO: 161005 - DNA, 33 bp, Homo sapien
accccagggttgagataaagaagatgtaatttg

SEQ ID NO: 161006 - DNA, 33 bp, Homo sapien
accccagggttgagatgaagaagatgtaatttg

SEQ ID NO: 161007 - DNA, 33 bp, Homo sapien
tccatgataagtactacgtcatctttaatgtca

SEQ ID NO: 161008 - DNA, 33 bp, Homo sapien
tccatgataagtactatgtcatctttaatgtca

SEQ ID NO: 161009 - DNA, 33 bp, Homo sapien
aggcgcatgaagcattaaaggctataacatagg

SEQ ID NO: 161010 - DNA, 33 bp, Homo sapien
aggcgcatgaagcattcaaggctataacatagg

SEQ ID NO: 161011 - DNA, 33 bp, Homo sapien
catatcaccaggtaaacactgagctaacttggt

SEQ ID NO: 161012 - DNA, 33 bp, Homo sapien
catatcaccaggtaaatactgagctaacttggt

SEQ ID NO: 161013 - DNA, 33 bp, Homo sapien
tccctagagaagcgaccggtttttatcctctct

SEQ ID NO: 161014 - DNA, 33 bp, Homo sapien
tccctagagaagcgactggtttttatcctctct

SEQ ID NO: 161015 - DNA, 33 bp, Homo sapien
tttaataaataattaaatgattgctgtattcca

SEQ ID NO: 161016 - DNA, 33 bp, Homo sapien
tttaataaataattaagtgattgctgtattcca

SEQ ID NO: 161017 - DNA, 33 bp, Homo sapien
tgaatacatttgtgcagtctctttctacataaa

SEQ ID NO: 161018 - DNA, 33 bp, Homo sapien
tgaatacatttgtgcattctctttctacataaa

SEQ ID NO: 161019 - DNA, 33 bp, Homo sapien
tcataagacttgataagggagatttgttataaa

SEQ ID NO: 161020 - DNA, 33 bp, Homo sapien
tcataagacttgataatggagatttgttataaa

SEQ ID NO: 161021 - DNA, 33 bp, Homo sapien
atcacaatgccagatacagtcagagataatgta

SEQ ID NO: 161022 - DNA, 33 bp, Homo sapien
atcacaatgccagatagagtcagagataatgta

SEQ ID NO: 161023 - DNA, 33 bp, Homo sapien
attcatcaaatgatgacgtcacagaagaagtgt

SEQ ID NO: 161024 - DNA, 33 bp, Homo sapien
attcatcaaatgatgatgtcacagaagaagtgt

SEQ ID NO: 161025 - DNA, 33 bp, Homo sapien
gggggaggtctataaacagccactgtgggaatg

SEQ ID NO: 161026 - DNA, 33 bp, Homo sapien
gggggaggtctataaagagccactgtgggaatg

SEQ ID NO: 161027 - DNA, 33 bp, Homo sapien
catgtcaaggaaataacattctgtcctggcata

SEQ ID NO: 161028 - DNA, 33 bp, Homo sapien
catgtcaaggaaataatattctgtcctggcata

SEQ ID NO: 161029 - DNA, 33 bp, Homo sapien
ataagcaggataattaagggcataatctgatat

SEQ ID NO: 161030 - DNA, 33 bp, Homo sapien
ataagcaggataattaggggcataatctgatat

SEQ ID NO: 161031 - DNA, 33 bp, Homo sapien
taatatgtaaattcacaagctttggttgtcttt

SEQ ID NO: 161032 - DNA, 33 bp, Homo sapien
taatatgtaaattcacgagctttggttgtcttt

SEQ ID NO: 161033 - DNA, 33 bp, Homo sapien
gttcaacctctaagtcggaatggaactaggatc

SEQ ID NO: 161034 - DNA, 33 bp, Homo sapien
gttcaacctctaagtctgaatggaactaggatc

SEQ ID NO: 161035 - DNA, 33 bp, Homo sapien
catccttagtgtcacacggctaataaatttaga

SEQ ID NO: 161036 - DNA, 33 bp, Homo sapien
catccttagtgtcacatggctaataaatttaga

SEQ ID NO: 161037 - DNA, 33 bp, Homo sapien
gtgctgtaaagtagtacgggttttgacaaatgc

SEQ ID NO: 161038 - DNA, 33 bp, Homo sapien
gtgctgtaaagtagtatgggttttgacaaatgc

SEQ ID NO: 161039 - DNA, 33 bp, Homo sapien
tctaattctcacagtcccttctatttatttgtt

SEQ ID NO: 161040 - DNA, 33 bp, Homo sapien
tctaattctcacagtctcttctatttatttgtt

SEQ ID NO: 161041 - DNA, 33 bp, Homo sapien
ttcaggccagcaaaaaattttgataatatgcaa

SEQ ID NO: 161042 - DNA, 33 bp, Homo sapien
ttcaggccagcaaaaacttttgataatatgcaa

SEQ ID NO: 161043 - DNA, 33 bp, Homo sapien
atgagtgtttagacagacatattaggaaaaatc

SEQ ID NO: 161044 - DNA, 33 bp, Homo sapien
atgagtgtttagacaggcatattaggaaaaatc

SEQ ID NO: 161045 - DNA, 33 bp, Homo sapien
aacaagaaccctatgacaacattagcttaagga

SEQ ID NO: 161046 - DNA, 33 bp, Homo sapien
aacaagaaccctatgagaacattagcttaagga

SEQ ID NO: 161047 - DNA, 33 bp, Homo sapien
actcatgaatcattggaaaaagatgcaaatcaa

SEQ ID NO: 161048 - DNA, 33 bp, Homo sapien
actcatgaatcattgggaaaagatgcaaatcaa

SEQ ID NO: 161049 - DNA, 33 bp, Homo sapien
taggcccaagtttctacgaatatttatccaact

SEQ ID NO: 161050 - DNA, 33 bp, Homo sapien
taggcccaagtttctatgaatatttatccaact

SEQ ID NO: 161051 - DNA, 33 bp, Homo sapien
taaattatgagctgcacggaatcttccaaggga

SEQ ID NO: 161052 - DNA, 33 bp, Homo sapien
taaattatgagctgcatggaatcttccaaggga

SEQ ID NO: 161053 - DNA, 33 bp, Homo sapien
tttattttattgctcaactttaatctattctca

SEQ ID NO: 161054 - DNA, 33 bp, Homo sapien
tttattttattgctcagctttaatctattctca

SEQ ID NO: 161055 - DNA, 33 bp, Homo sapien
tttactattctatgcaatcaaagtagaaaattt

SEQ ID NO: 161056 - DNA, 33 bp, Homo sapien
tttactattctatgcagtcaaagtagaaaattt

SEQ ID NO: 161057 - DNA, 33 bp, Homo sapien
ttgtcagaaccaatctcaactgaagccgaagtt

SEQ ID NO: 161058 - DNA, 33 bp, Homo sapien
ttgtcagaaccaatctgaactgaagccgaagtt

SEQ ID NO: 161059 - DNA, 33 bp, Homo sapien
atactaacagaaaacaagagcaaaatagaaagc

SEQ ID NO: 161060 - DNA, 33 bp, Homo sapien
atactaacagaaaacaggagcaaaatagaaagc

SEQ ID NO: 161061 - DNA, 33 bp, Homo sapien
aggaagacagtatgcacagatcatgtaagcaga

SEQ ID NO: 161062 - DNA, 33 bp, Homo sapien
aggaagacagtatgcagagatcatgtaagcaga

SEQ ID NO: 161063 - DNA, 33 bp, Homo sapien
gtttgcacataatgaacgatgtctcagagacag

SEQ ID NO: 161064 - DNA, 33 bp, Homo sapien
gtttgcacataatgaatgatgtctcagagacag

SEQ ID NO: 161065 - DNA, 33 bp, Homo sapien
ttataagatgcatttacccctccaagaatcaca

SEQ ID NO: 161066 - DNA, 33 bp, Homo sapien
ttataagatgcatttatccctccaagaatcaca

SEQ ID NO: 161067 - DNA, 33 bp, Homo sapien
caacctagagtaggagaacaatgtatgacttca

SEQ ID NO: 161068 - DNA, 33 bp, Homo sapien
caacctagagtaggagcacaatgtatgacttca

SEQ ID NO: 161069 - DNA, 33 bp, Homo sapien
tgcttctggtatctagcaacagaagaaaataac

SEQ ID NO: 161070 - DNA, 33 bp, Homo sapien
tgcttctggtatctaggaacagaagaaaataac

SEQ ID NO: 161071 - DNA, 33 bp, Homo sapien
atcaatgtaatattccactgctaaatttaggaa

SEQ ID NO: 161072 - DNA, 33 bp, Homo sapien
atcaatgtaatattccgctgctaaatttaggaa

SEQ ID NO: 161073 - DNA, 33 bp, Homo sapien
tcagggcacatagctaacagctgactgaactgg

SEQ ID NO: 161074 - DNA, 33 bp, Homo sapien
tcagggcacatagctagcagctgactgaactgg

SEQ ID NO: 161075 - DNA, 33 bp, Homo sapien
atggacaacaaatacggcaaggatgtggaacaa

SEQ ID NO: 161076 - DNA, 33 bp, Homo sapien
atggacaacaaatacgtcaaggatgtggaacaa

SEQ ID NO: 161077 - DNA, 33 bp, Homo sapien
atggttaaaaagaccaatgattgccaggaatta

SEQ ID NO: 161078 - DNA, 33 bp, Homo sapien
atggttaaaaagaccagtgattgccaggaatta

SEQ ID NO: 161079 - DNA, 33 bp, Homo sapien
ataataaagagaaccacgtacgaactataggca

SEQ ID NO: 161080 - DNA, 33 bp, Homo sapien
ataataaagagaaccatgtacgaactataggca

SEQ ID NO: 161081 - DNA, 33 bp, Homo sapien
gggtcttataaggcaaattagcatatatgagtt

SEQ ID NO: 161082 - DNA, 33 bp, Homo sapien
gggtcttataaggcaacttagcatatatgagtt

SEQ ID NO: 161083 - DNA, 33 bp, Homo sapien
gattcagcaggagaaacctgaaaatcgtgatgt

SEQ ID NO: 161084 - DNA, 33 bp, Homo sapien
gattcagcaggagaaatctgaaaatcgtgatgt

SEQ ID NO: 161085 - DNA, 33 bp, Homo sapien
catctgacctttctgcgcaccttttcccctatt

SEQ ID NO: 161086 - DNA, 33 bp, Homo sapien
catctgacctttctgctcaccttttcccctatt

SEQ ID NO: 161087 - DNA, 33 bp, Homo sapien
gcactgtctttgttaaatcctgggatcaaaagt

SEQ ID NO: 161088 - DNA, 33 bp, Homo sapien
gcactgtctttgttaactcctgggatcaaaagt

SEQ ID NO: 161089 - DNA, 33 bp, Homo sapien
acctccactattcaaaacacttctttccatcca

SEQ ID NO: 161090 - DNA, 33 bp, Homo sapien
acctccactattcaaagcacttctttccatcca

SEQ ID NO: 161091 - DNA, 33 bp, Homo sapien
ttgaagtgaatatttaagccaaatcagtatcat

SEQ ID NO: 161092 - DNA, 33 bp, Homo sapien
ttgaagtgaatatttatgccaaatcagtatcat

SEQ ID NO: 161093 - DNA, 33 bp, Homo sapien
ccacctaagtttcaaacagcaaccagagtgatt

SEQ ID NO: 161094 - DNA, 33 bp, Homo sapien
ccacctaagtttcaaatagcaaccagagtgatt

SEQ ID NO: 161095 - DNA, 33 bp, Homo sapien
tgtgtgtgctgaggttgaacattaacttatact

SEQ ID NO: 161096 - DNA, 33 bp, Homo sapien
tgtgtgtgctgaggtttaacattaacttatact

SEQ ID NO: 161097 - DNA, 33 bp, Homo sapien
tcactaacctttatgccatgtttttacactgtt

SEQ ID NO: 161098 - DNA, 33 bp, Homo sapien
tcactaacctttatgcgatgtttttacactgtt

SEQ ID NO: 161099 - DNA, 33 bp, Homo sapien
aagatagtaggtaggcccaaataaaaacatcat

SEQ ID NO: 161100 - DNA, 33 bp, Homo sapien
aagatagtaggtaggctcaaataaaaacatcat

SEQ ID NO: 161101 - DNA, 33 bp, Homo sapien
acagccctattcaagacaaaaaaattgaaacac

SEQ ID NO: 161102 - DNA, 33 bp, Homo sapien
acagccctattcaagataaaaaaattgaaacac

SEQ ID NO: 161103 - DNA, 33 bp, Homo sapien
atgcctgtaatgataaggagaatgatggtaatg

SEQ ID NO: 161104 - DNA, 33 bp, Homo sapien
atgcctgtaatgataatgagaatgatggtaatg

SEQ ID NO: 161105 - DNA, 33 bp, Homo sapien
aaaatacataaaagaccgcaggctggctagttt

SEQ ID NO: 161106 - DNA, 33 bp, Homo sapien
aaaatacataaaagactgcaggctggctagttt

SEQ ID NO: 161107 - DNA, 33 bp, Homo sapien
cctgtgagcttgcaacgaattaaaatatgatat

SEQ ID NO: 161108 - DNA, 33 bp, Homo sapien
cctgtgagcttgcaactaattaaaatatgatat

SEQ ID NO: 161109 - DNA, 33 bp, Homo sapien
tcccactgccttctggaatccatggtctcagat

SEQ ID NO: 161110 - DNA, 33 bp, Homo sapien
tcccactgccttctggcatccatggtctcagat

SEQ ID NO: 161111 - DNA, 33 bp, Homo sapien
caacaaaatctgacaaatattgaagacacaaag

SEQ ID NO: 161112 - DNA, 33 bp, Homo sapien
caacaaaatctgacaactattgaagacacaaag

SEQ ID NO: 161113 - DNA, 33 bp, Homo sapien
gccttagtgcattataaccactataatcaaata

SEQ ID NO: 161114 - DNA, 33 bp, Homo sapien
gccttagtgcattatagccactataatcaaata

SEQ ID NO: 161115 - DNA, 33 bp, Homo sapien
gccatttgaggacacaatgagaaggagccatct

SEQ ID NO: 161116 - DNA, 33 bp, Homo sapien
gccatttgaggacacagtgagaaggagccatct

SEQ ID NO: 161117 - DNA, 33 bp, Homo sapien
agtttcaggtagtctcacttcacctctggcttt

SEQ ID NO: 161118 - DNA, 33 bp, Homo sapien
agtttcaggtagtctcgcttcacctctggcttt

SEQ ID NO: 161119 - DNA, 33 bp, Homo sapien
tcaatgtctgataatgccagtcccacggccctt

SEQ ID NO: 161120 - DNA, 33 bp, Homo sapien
tcaatgtctgataatgtcagtcccacggccctt

SEQ ID NO: 161121 - DNA, 33 bp, Homo sapien
aactatgaagttcagtcaataataatgtatata

SEQ ID NO: 161122 - DNA, 33 bp, Homo sapien
aactatgaagttcagttaataataatgtatata

SEQ ID NO: 161123 - DNA, 33 bp, Homo sapien
caatttaagtggaggacgatctactgaaccaaa

SEQ ID NO: 161124 - DNA, 33 bp, Homo sapien
caatttaagtggaggatgatctactgaaccaaa

SEQ ID NO: 161125 - DNA, 33 bp, Homo sapien
gctctgctacttgccaaatgagatttatttatg

SEQ ID NO: 161126 - DNA, 33 bp, Homo sapien
gctctgctacttgccagatgagatttatttatg

SEQ ID NO: 161127 - DNA, 33 bp, Homo sapien
gaagatagcgccaaaccatgtgatatagtttgg

SEQ ID NO: 161128 - DNA, 33 bp, Homo sapien
gaagatagcgccaaacgatgtgatatagtttgg

SEQ ID NO: 161129 - DNA, 33 bp, Homo sapien
atgcttcacaacctgccaatttctgctgctaaa

SEQ ID NO: 161130 - DNA, 33 bp, Homo sapien
atgcttcacaacctgcgaatttctgctgctaaa

SEQ ID NO: 161131 - DNA, 33 bp, Homo sapien
tggatgtttgaacttcaaagtgatggtttagac

SEQ ID NO: 161132 - DNA, 33 bp, Homo sapien
tggatgtttgaacttccaagtgatggtttagac

SEQ ID NO: 161133 - DNA, 33 bp, Homo sapien
tctatggcttatgtaagacactatggcaaaatg

SEQ ID NO: 161134 - DNA, 33 bp, Homo sapien
tctatggcttatgtaatacactatggcaaaatg

SEQ ID NO: 161135 - DNA, 33 bp, Homo sapien
aaatatcttatcttcacctcagacatggggagt

SEQ ID NO: 161136 - DNA, 33 bp, Homo sapien
aaatatcttatcttcagctcagacatggggagt

SEQ ID NO: 161137 - DNA, 33 bp, Homo sapien
aataggcgtatatatcactgctaatacaagaaa

SEQ ID NO: 161138 - DNA, 33 bp, Homo sapien
aataggcgtatatatcgctgctaatacaagaaa

SEQ ID NO: 161139 - DNA, 33 bp, Homo sapien
tgcttttgcaacttcaacaagaattatgggatc

SEQ ID NO: 161140 - DNA, 33 bp, Homo sapien
tgcttttgcaacttcagcaagaattatgggatc

SEQ ID NO: 161141 - DNA, 33 bp, Homo sapien
aatagagctaaccttcactggtaggcctgggat

SEQ ID NO: 161142 - DNA, 33 bp, Homo sapien
aatagagctaaccttcgctggtaggcctgggat

SEQ ID NO: 161143 - DNA, 33 bp, Homo sapien
gattatatgagagaatcactcagtatgggggca

SEQ ID NO: 161144 - DNA, 33 bp, Homo sapien
gattatatgagagaatgactcagtatgggggca

SEQ ID NO: 161145 - DNA, 33 bp, Homo sapien
tgtataatttatggcgaaaaacatcaaaaatat

SEQ ID NO: 161146 - DNA, 33 bp, Homo sapien
tgtataatttatggcggaaaacatcaaaaatat

SEQ ID NO: 161147 - DNA, 33 bp, Homo sapien
ttaatgaaaatgaacaaattaagtcagtagaac

SEQ ID NO: 161148 - DNA, 33 bp, Homo sapien
ttaatgaaaatgaacacattaagtcagtagaac

SEQ ID NO: 161149 - DNA, 33 bp, Homo sapien
cctcgacactcagaaaattacctagcatcagaa

SEQ ID NO: 161150 - DNA, 33 bp, Homo sapien
cctcgacactcagaaacttacctagcatcagaa

SEQ ID NO: 161151 - DNA, 33 bp, Homo sapien
gctgtgcagcatttcaacagaattatttatttt

SEQ ID NO: 161152 - DNA, 33 bp, Homo sapien
gctgtgcagcatttcaccagaattatttatttt

SEQ ID NO: 161153 - DNA, 33 bp, Homo sapien
tgcctctctcaatttgcaacagtaggcaatagt

SEQ ID NO: 161154 - DNA, 33 bp, Homo sapien
tgcctctctcaatttgtaacagtaggcaatagt

SEQ ID NO: 161155 - DNA, 33 bp, Homo sapien
ttcaaaactaattttaggtgctccatatagttc

SEQ ID NO: 161156 - DNA, 33 bp, Homo sapien
ttcaaaactaattttatgtgctccatatagttc

SEQ ID NO: 161157 - DNA, 33 bp, Homo sapien
gagacagttagaggaacgggttgaatagtgact

SEQ ID NO: 161158 - DNA, 33 bp, Homo sapien
gagacagttagaggaatgggttgaatagtgact

SEQ ID NO: 161159 - DNA, 33 bp, Homo sapien
taaacatagagataaactgagagtgagagaggt

SEQ ID NO: 161160 - DNA, 33 bp, Homo sapien
taaacatagagataaattgagagtgagagaggt

SEQ ID NO: 161161 - DNA, 33 bp, Homo sapien
atgaatacaaaacatacgaaacagatgtttagt

SEQ ID NO: 161162 - DNA, 33 bp, Homo sapien
atgaatacaaaacataggaaacagatgtttagt

SEQ ID NO: 161163 - DNA, 33 bp, Homo sapien
ttgggttgcaagtaaccgagtagcttccattaa

SEQ ID NO: 161164 - DNA, 33 bp, Homo sapien
ttgggttgcaagtaactgagtagcttccattaa

SEQ ID NO: 161165 - DNA, 33 bp, Homo sapien
aaagttgttgggggagaacttgaaatagaagca

SEQ ID NO: 161166 - DNA, 33 bp, Homo sapien
aaagttgttgggggagtacttgaaatagaagca

SEQ ID NO: 161167 - DNA, 33 bp, Homo sapien
tcctacagccccttagatttcgttgcactatca

SEQ ID NO: 161168 - DNA, 33 bp, Homo sapien
tcctacagccccttaggtttcgttgcactatca

SEQ ID NO: 161169 - DNA, 33 bp, Homo sapien
ccatgaatttcttgcacggctattcctaaagcc

SEQ ID NO: 161170 - DNA, 33 bp, Homo sapien
ccatgaatttcttgcatggctattcctaaagcc

SEQ ID NO: 161171 - DNA, 33 bp, Homo sapien
aatcttgtaaatttcaaaatcctgaagccaaat

SEQ ID NO: 161172 - DNA, 33 bp, Homo sapien
aatcttgtaaatttcacaatcctgaagccaaat

SEQ ID NO: 161173 - DNA, 33 bp, Homo sapien
tttcaagtcattctataagcaggtcaaccagaa

SEQ ID NO: 161174 - DNA, 33 bp, Homo sapien
tttcaagtcattctatgagcaggtcaaccagaa

SEQ ID NO: 161175 - DNA, 33 bp, Homo sapien
ctcccatagccaaaaaactattcacccaactgg

SEQ ID NO: 161176 - DNA, 33 bp, Homo sapien
ctcccatagccaaaaatctattcacccaactgg

SEQ ID NO: 161177 - DNA, 33 bp, Homo sapien
attgagattcttgtaaccaggcaaactactacc

SEQ ID NO: 161178 - DNA, 33 bp, Homo sapien
attgagattcttgtaatcaggcaaactactacc

SEQ ID NO: 161179 - DNA, 33 bp, Homo sapien
ttatgggcaaggatgacaaaacaggtttttctc

SEQ ID NO: 161180 - DNA, 33 bp, Homo sapien
ttatgggcaaggatgagaaaacaggtttttctc

SEQ ID NO: 161181 - DNA, 33 bp, Homo sapien
tctagataagcccctgaaatcaatatgttatta

SEQ ID NO: 161182 - DNA, 33 bp, Homo sapien
tctagataagcccctgcaatcaatatgttatta

SEQ ID NO: 161183 - DNA, 33 bp, Homo sapien
tacagtattataacctcaaaagtcgatagtgaa

SEQ ID NO: 161184 - DNA, 33 bp, Homo sapien
tacagtattataaccttaaaagtcgatagtgaa

SEQ ID NO: 161185 - DNA, 33 bp, Homo sapien
tttaggccactgtagcaaaaaacactggcaccc

SEQ ID NO: 161186 - DNA, 33 bp, Homo sapien
tttaggccactgtagcgaaaaacactggcaccc

SEQ ID NO: 161187 - DNA, 33 bp, Homo sapien
agaatgtaatttccctaactatgagaggcacgt

SEQ ID NO: 161188 - DNA, 33 bp, Homo sapien
agaatgtaatttccctcactatgagaggcacgt

SEQ ID NO: 161189 - DNA, 33 bp, Homo sapien
taagaaaaatgaggctcaatcaaatacaatgat

SEQ ID NO: 161190 - DNA, 33 bp, Homo sapien
taagaaaaatgaggcttaatcaaatacaatgat

SEQ ID NO: 161191 - DNA, 33 bp, Homo sapien
tgtttttgtggtttatcaaattaattcccagat

SEQ ID NO: 161192 - DNA, 33 bp, Homo sapien
tgtttttgtggtttatgaaattaattcccagat

SEQ ID NO: 161193 - DNA, 33 bp, Homo sapien
gtgtaaccttgagcaaaatagctgtctccaaag

SEQ ID NO: 161194 - DNA, 33 bp, Homo sapien
gtgtaaccttgagcaagatagctgtctccaaag

SEQ ID NO: 161195 - DNA, 33 bp, Homo sapien
ctgcctcgtgtcagataagccattagatcctta

SEQ ID NO: 161196 - DNA, 33 bp, Homo sapien
ctgcctcgtgtcagatgagccattagatcctta

SEQ ID NO: 161197 - DNA, 33 bp, Homo sapien
gtatcatttggacataacagtaatcatttccaa

SEQ ID NO: 161198 - DNA, 33 bp, Homo sapien
gtatcatttggacatagcagtaatcatttccaa

SEQ ID NO: 161199 - DNA, 33 bp, Homo sapien
taaacattagctcataacctcatttagaatcca

SEQ ID NO: 161200 - DNA, 33 bp, Homo sapien
taaacattagctcatagcctcatttagaatcca

SEQ ID NO: 161201 - DNA, 33 bp, Homo sapien
ctcatgacatagtcaaatcacacatatttgtat

SEQ ID NO: 161202 - DNA, 33 bp, Homo sapien
ctcatgacatagtcaattcacacatatttgtat

SEQ ID NO: 161203 - DNA, 33 bp, Homo sapien
ctgaattgggaagtcacactcaatgctcacatg

SEQ ID NO: 161204 - DNA, 33 bp, Homo sapien
ctgaattgggaagtcatactcaatgctcacatg

SEQ ID NO: 161205 - DNA, 33 bp, Homo sapien
acacagtcaaatacctcaaatgtctatcagtca

SEQ ID NO: 161206 - DNA, 33 bp, Homo sapien
acacagtcaaataccttaaatgtctatcagtca

SEQ ID NO: 161207 - DNA, 33 bp, Homo sapien
tagtatgctgcctctccagttgacaagattatt

SEQ ID NO: 161208 - DNA, 33 bp, Homo sapien
tagtatgctgcctctctagttgacaagattatt

SEQ ID NO: 161209 - DNA, 33 bp, Homo sapien
atctcatcaaatgttacgaaatgctttaaaaga

SEQ ID NO: 161210 - DNA, 33 bp, Homo sapien
atctcatcaaatgttatgaaatgctttaaaaga

SEQ ID NO: 161211 - DNA, 33 bp, Homo sapien
attgcctatgctgaaactctgctcagaacacct

SEQ ID NO: 161212 - DNA, 33 bp, Homo sapien
attgcctatgctgaaattctgctcagaacacct

SEQ ID NO: 161213 - DNA, 33 bp, Homo sapien
catgtcaaatcacgtccagatgttatagtctaa

SEQ ID NO: 161214 - DNA, 33 bp, Homo sapien
catgtcaaatcacgtctagatgttatagtctaa

SEQ ID NO: 161215 - DNA, 33 bp, Homo sapien
tgacatctcatattgaaccattttttttaacta

SEQ ID NO: 161216 - DNA, 33 bp, Homo sapien
tgacatctcatattgagccattttttttaacta

SEQ ID NO: 161217 - DNA, 33 bp, Homo sapien
atttactcacaaaatacggaagagtcctttctg

SEQ ID NO: 161218 - DNA, 33 bp, Homo sapien
atttactcacaaaatatggaagagtcctttctg

SEQ ID NO: 161219 - DNA, 33 bp, Homo sapien
acaaatactttaatacccctgtgtccttgccct

SEQ ID NO: 161220 - DNA, 33 bp, Homo sapien
acaaatactttaatactcctgtgtccttgccct

SEQ ID NO: 161221 - DNA, 33 bp, Homo sapien
tagtagtatataaaaaacattcacaaataaaat

SEQ ID NO: 161222 - DNA, 33 bp, Homo sapien
tagtagtatataaaaatcattcacaaataaaat

SEQ ID NO: 161223 - DNA, 33 bp, Homo sapien
ggctagaagatgaaataaaaggtatagagatag

SEQ ID NO: 161224 - DNA, 33 bp, Homo sapien
ggctagaagatgaaattaaaggtatagagatag

SEQ ID NO: 161225 - DNA, 33 bp, Homo sapien
cgacagttgttatccacaggggattggtttgaa

SEQ ID NO: 161226 - DNA, 33 bp, Homo sapien
cgacagttgttatccataggggattggtttgaa

SEQ ID NO: 161227 - DNA, 33 bp, Homo sapien
gattatgctgccattggaataaaactgaatttt

SEQ ID NO: 161228 - DNA, 33 bp, Homo sapien
gattatgctgccattgtaataaaactgaatttt

SEQ ID NO: 161229 - DNA, 33 bp, Homo sapien
tttagtgcaaagagaaaggaaacttcactcagc

SEQ ID NO: 161230 - DNA, 33 bp, Homo sapien
tttagtgcaaagagaatggaaacttcactcagc

SEQ ID NO: 161231 - DNA, 33 bp, Homo sapien
agagagagggaaaatacgtctatagccacaatt

SEQ ID NO: 161232 - DNA, 33 bp, Homo sapien
agagagagggaaaatatgtctatagccacaatt

SEQ ID NO: 161233 - DNA, 33 bp, Homo sapien
cagttagttctgacaacgtctcatttgtatatc

SEQ ID NO: 161234 - DNA, 33 bp, Homo sapien
cagttagttctgacaatgtctcatttgtatatc

SEQ ID NO: 161235 - DNA, 33 bp, Homo sapien
attacttatgatcctacatgcagaactctattc

SEQ ID NO: 161236 - DNA, 33 bp, Homo sapien
attacttatgatcctatatgcagaactctattc

SEQ ID NO: 161237 - DNA, 33 bp, Homo sapien
gagatgaaccagagtacatggcaaggacagtgg

SEQ ID NO: 161238 - DNA, 33 bp, Homo sapien
gagatgaaccagagtatatggcaaggacagtgg

SEQ ID NO: 161239 - DNA, 33 bp, Homo sapien
ggggactacagtgtataacgaaatgctattgag

SEQ ID NO: 161240 - DNA, 33 bp, Homo sapien
ggggactacagtgtatgacgaaatgctattgag

SEQ ID NO: 161241 - DNA, 33 bp, Homo sapien
ggccagctctttgtcaatcaagcaagcagtcag

SEQ ID NO: 161242 - DNA, 33 bp, Homo sapien
ggccagctctttgtcagtcaagcaagcagtcag

SEQ ID NO: 161243 - DNA, 33 bp, Homo sapien
tcacatagctgttaaacgcagaggtaggatttt

SEQ ID NO: 161244 - DNA, 33 bp, Homo sapien
tcacatagctgttaaatgcagaggtaggatttt

SEQ ID NO: 161245 - DNA, 33 bp, Homo sapien
agtaatctactttttcacttcttgcacttgaga

SEQ ID NO: 161246 - DNA, 33 bp, Homo sapien
agtaatctactttttcgcttcttgcacttgaga

SEQ ID NO: 161247 - DNA, 33 bp, Homo sapien
ttatccactgtcacacaaaaaagctttggatac

SEQ ID NO: 161248 - DNA, 33 bp, Homo sapien
ttatccactgtcacacgaaaaagctttggatac

SEQ ID NO: 161249 - DNA, 33 bp, Homo sapien
agttttggatttcctacaatagagtttggatta

SEQ ID NO: 161250 - DNA, 33 bp, Homo sapien
agttttggatttcctataatagagtttggatta

SEQ ID NO: 161251 - DNA, 33 bp, Homo sapien
agtcagcttggaggaaatagaaaagaggtaaaa

SEQ ID NO: 161252 - DNA, 33 bp, Homo sapien
agtcagcttggaggaagtagaaaagaggtaaaa

SEQ ID NO: 161253 - DNA, 33 bp, Homo sapien
caggcaatggaagtgactaaatagtactagttt

SEQ ID NO: 161254 - DNA, 33 bp, Homo sapien
caggcaatggaagtgattaaatagtactagttt

SEQ ID NO: 161255 - DNA, 33 bp, Homo sapien
gccatattgccactgacgaatatgatgttccca

SEQ ID NO: 161256 - DNA, 33 bp, Homo sapien
gccatattgccactgatgaatatgatgttccca

SEQ ID NO: 161257 - DNA, 33 bp, Homo sapien
gttcattgtcatgtcacaaacaactgccaccac

SEQ ID NO: 161258 - DNA, 33 bp, Homo sapien
gttcattgtcatgtcataaacaactgccaccac

SEQ ID NO: 161259 - DNA, 33 bp, Homo sapien
ttttacattcctctaaaccagaaatctcatagt

SEQ ID NO: 161260 - DNA, 33 bp, Homo sapien
ttttacattcctctaacccagaaatctcatagt

SEQ ID NO: 161261 - DNA, 33 bp, Homo sapien
ggaaatgaaatgtacaccggttagaaatgtaag

SEQ ID NO: 161262 - DNA, 33 bp, Homo sapien
ggaaatgaaatgtacatcggttagaaatgtaag

SEQ ID NO: 161263 - DNA, 33 bp, Homo sapien
tgtgacaatgtgataaccacgtagtgcaagtag

SEQ ID NO: 161264 - DNA, 33 bp, Homo sapien
tgtgacaatgtgataagcacgtagtgcaagtag

SEQ ID NO: 161265 - DNA, 33 bp, Homo sapien
caactgcaagataaacaacattagagagccaca

SEQ ID NO: 161266 - DNA, 33 bp, Homo sapien
caactgcaagataaaccacattagagagccaca

SEQ ID NO: 161267 - DNA, 33 bp, Homo sapien
aatggcaaatgactgaaagagtagatgagaaat

SEQ ID NO: 161268 - DNA, 33 bp, Homo sapien
aatggcaaatgactgacagagtagatgagaaat

SEQ ID NO: 161269 - DNA, 33 bp, Homo sapien
aatgggcttaacagaaagctggaagtggattaa

SEQ ID NO: 161270 - DNA, 33 bp, Homo sapien
aatgggcttaacagaaggctggaagtggattaa

SEQ ID NO: 161271 - DNA, 33 bp, Homo sapien
ctctgtttcttgagtacctcaaattcctttccc

SEQ ID NO: 161272 - DNA, 33 bp, Homo sapien
ctctgtttcttgagtatctcaaattcctttccc

SEQ ID NO: 161273 - DNA, 33 bp, Homo sapien
acattattggcataccaaactgaattactttat

SEQ ID NO: 161274 - DNA, 33 bp, Homo sapien
acattattggcataccgaactgaattactttat

SEQ ID NO: 161275 - DNA, 33 bp, Homo sapien
attaatgcttaaagagaagtgaaaaatcttgtc

SEQ ID NO: 161276 - DNA, 33 bp, Homo sapien
attaatgcttaaagagtagtgaaaaatcttgtc

SEQ ID NO: 161277 - DNA, 33 bp, Homo sapien
gtacttttagatccccaaatgcagatggagata

SEQ ID NO: 161278 - DNA, 33 bp, Homo sapien
gtacttttagatccccgaatgcagatggagata

SEQ ID NO: 161279 - DNA, 33 bp, Homo sapien
gccaggggtaatgctaaacactttacaggaatg

SEQ ID NO: 161280 - DNA, 33 bp, Homo sapien
gccaggggtaatgctagacactttacaggaatg

SEQ ID NO: 161281 - DNA, 33 bp, Homo sapien
aaaccacatggaataaatatttgacagttgagg

SEQ ID NO: 161282 - DNA, 33 bp, Homo sapien
aaaccacatggaataagtatttgacagttgagg

SEQ ID NO: 161283 - DNA, 33 bp, Homo sapien
tagctgctggccaacaccttgaagaaacattgt

SEQ ID NO: 161284 - DNA, 33 bp, Homo sapien
tagctgctggccaacatcttgaagaaacattgt

SEQ ID NO: 161285 - DNA, 33 bp, Homo sapien
tccttgagcttcagttaaaagaggagacgtgta

SEQ ID NO: 161286 - DNA, 33 bp, Homo sapien
tccttgagcttcagttgaaagaggagacgtgta

SEQ ID NO: 161287 - DNA, 33 bp, Homo sapien
tatatatgcagctacaatggaagttattcttag

SEQ ID NO: 161288 - DNA, 33 bp, Homo sapien
tatatatgcagctacagtggaagttattcttag

SEQ ID NO: 161289 - DNA, 33 bp, Homo sapien
ttcaggtttgtaaatgcaatacagataatttct

SEQ ID NO: 161290 - DNA, 33 bp, Homo sapien
ttcaggtttgtaaatggaatacagataatttct

SEQ ID NO: 161291 - DNA, 33 bp, Homo sapien
gtttttgaacatgaagccttaccctttggaatg

SEQ ID NO: 161292 - DNA, 33 bp, Homo sapien
gtttttgaacatgaaggcttaccctttggaatg

SEQ ID NO: 161293 - DNA, 33 bp, Homo sapien
tcattgccatgaaagcactacaagacaaagtgc

SEQ ID NO: 161294 - DNA, 33 bp, Homo sapien
tcattgccatgaaagcgctacaagacaaagtgc

SEQ ID NO: 161295 - DNA, 33 bp, Homo sapien
aaaagagggatggataccttaaagtctagtagg

SEQ ID NO: 161296 - DNA, 33 bp, Homo sapien
aaaagagggatggatagcttaaagtctagtagg

SEQ ID NO: 161297 - DNA, 33 bp, Homo sapien
caggtcacgctgacacaagaggtaggctcccat

SEQ ID NO: 161298 - DNA, 33 bp, Homo sapien
caggtcacgctgacacgagaggtaggctcccat

SEQ ID NO: 161299 - DNA, 33 bp, Homo sapien
acctattaattcctgagagttagcaaacaccag

SEQ ID NO: 161300 - DNA, 33 bp, Homo sapien
acctattaattcctgatagttagcaaacaccag

SEQ ID NO: 161301 - DNA, 33 bp, Homo sapien
atttgggaattctttgaaactttctatgaaacc

SEQ ID NO: 161302 - DNA, 33 bp, Homo sapien
atttgggaattctttggaactttctatgaaacc

SEQ ID NO: 161303 - DNA, 33 bp, Homo sapien
ccctggtgttagtaaaactgaagaaatgtcaat

SEQ ID NO: 161304 - DNA, 33 bp, Homo sapien
ccctggtgttagtaaagctgaagaaatgtcaat

SEQ ID NO: 161305 - DNA, 33 bp, Homo sapien
ctttacatggcatacaaatggacaacttgtctt

SEQ ID NO: 161306 - DNA, 33 bp, Homo sapien
ctttacatggcatacagatggacaacttgtctt

SEQ ID NO: 161307 - DNA, 33 bp, Homo sapien
aaaacgctgctgaaaaaatgcatagatgacaca

SEQ ID NO: 161308 - DNA, 33 bp, Homo sapien
aaaacgctgctgaaaatatgcatagatgacaca

SEQ ID NO: 161309 - DNA, 33 bp, Homo sapien
atgtacagctccaagccataaaaaccctggaag

SEQ ID NO: 161310 - DNA, 33 bp, Homo sapien
atgtacagctccaagctataaaaaccctggaag

SEQ ID NO: 161311 - DNA, 33 bp, Homo sapien
gagtaaaggaacaagacgagtgaataatggagt

SEQ ID NO: 161312 - DNA, 33 bp, Homo sapien
gagtaaaggaacaagatgagtgaataatggagt

SEQ ID NO: 161313 - DNA, 33 bp, Homo sapien
atataagtaaagactcaagatacagttgtggct

SEQ ID NO: 161314 - DNA, 33 bp, Homo sapien
atataagtaaagactcgagatacagttgtggct

SEQ ID NO: 161315 - DNA, 33 bp, Homo sapien
gggatactctagaaaaagagactgctgttcata

SEQ ID NO: 161316 - DNA, 33 bp, Homo sapien
gggatactctagaaaaggagactgctgttcata

SEQ ID NO: 161317 - DNA, 33 bp, Homo sapien
cttaaggaggagactcaaaatgttggtaagcag

SEQ ID NO: 161318 - DNA, 33 bp, Homo sapien
cttaaggaggagactcgaaatgttggtaagcag

SEQ ID NO: 161319 - DNA, 33 bp, Homo sapien
ccaaggttgaggacaagctggggaaagaacaca

SEQ ID NO: 161320 - DNA, 33 bp, Homo sapien
ccaaggttgaggacaatctggggaaagaacaca

SEQ ID NO: 161321 - DNA, 33 bp, Homo sapien
gatatttaggagagaaatattccagcaaaagga

SEQ ID NO: 161322 - DNA, 33 bp, Homo sapien
gatatttaggagagaattattccagcaaaagga

SEQ ID NO: 161323 - DNA, 33 bp, Homo sapien
cactgatagtctacccacttacccacattattg

SEQ ID NO: 161324 - DNA, 33 bp, Homo sapien
cactgatagtctaccctcttacccacattattg

SEQ ID NO: 161325 - DNA, 33 bp, Homo sapien
aacattgatgagcttacaatgtcttgtagatga

SEQ ID NO: 161326 - DNA, 33 bp, Homo sapien
aacattgatgagcttataatgtcttgtagatga

SEQ ID NO: 161327 - DNA, 33 bp, Homo sapien
gatatgatattattgacaaaggcagggtcattg

SEQ ID NO: 161328 - DNA, 33 bp, Homo sapien
gatatgatattattgagaaaggcagggtcattg

SEQ ID NO: 161329 - DNA, 33 bp, Homo sapien
actgattgttgacacaagggtgattatgagaga

SEQ ID NO: 161330 - DNA, 33 bp, Homo sapien
actgattgttgacacaggggtgattatgagaga

SEQ ID NO: 161331 - DNA, 33 bp, Homo sapien
ggagacaggaaattcacaggagatatgactatg

SEQ ID NO: 161332 - DNA, 33 bp, Homo sapien
ggagacaggaaattcagaggagatatgactatg

SEQ ID NO: 161333 - DNA, 33 bp, Homo sapien
gcaggctgcagaatgaaccatttcccctgttaa

SEQ ID NO: 161334 - DNA, 33 bp, Homo sapien
gcaggctgcagaatgagccatttcccctgttaa

SEQ ID NO: 161335 - DNA, 33 bp, Homo sapien
ccaaatggatcaagcaaaattcaggattatttc

SEQ ID NO: 161336 - DNA, 33 bp, Homo sapien
ccaaatggatcaagcacaattcaggattatttc

SEQ ID NO: 161337 - DNA, 33 bp, Homo sapien
ggcaggatatatgttaaggcactagggtgagcc

SEQ ID NO: 161338 - DNA, 33 bp, Homo sapien
ggcaggatatatgttagggcactagggtgagcc

SEQ ID NO: 161339 - DNA, 33 bp, Homo sapien
taaattccgcatattaacaagatacccagcaaa

SEQ ID NO: 161340 - DNA, 33 bp, Homo sapien
taaattccgcatattagcaagatacccagcaaa

SEQ ID NO: 161341 - DNA, 33 bp, Homo sapien
gttaagtgtgtcaaaactgaagtccgagagggt

SEQ ID NO: 161342 - DNA, 33 bp, Homo sapien
gttaagtgtgtcaaaattgaagtccgagagggt

SEQ ID NO: 161343 - DNA, 33 bp, Homo sapien
tattgaagtatgtttacgtcatgatagtaataa

SEQ ID NO: 161344 - DNA, 33 bp, Homo sapien
tattgaagtatgtttatgtcatgatagtaataa

SEQ ID NO: 161345 - DNA, 33 bp, Homo sapien
aaacgttgtatctgaacgctgtatgttacaatt

SEQ ID NO: 161346 - DNA, 33 bp, Homo sapien
aaacgttgtatctgaatgctgtatgttacaatt

SEQ ID NO: 161347 - DNA, 33 bp, Homo sapien
aatgtgtttagttatccgaattctctccagctc

SEQ ID NO: 161348 - DNA, 33 bp, Homo sapien
aatgtgtttagttatctgaattctctccagctc

SEQ ID NO: 161349 - DNA, 33 bp, Homo sapien
atgtgttgaaatagaacccaatatatgagtaag

SEQ ID NO: 161350 - DNA, 33 bp, Homo sapien
atgtgttgaaatagaatccaatatatgagtaag

SEQ ID NO: 161351 - DNA, 33 bp, Homo sapien
acaaaaacatttataacgggcctagcttgtatc

SEQ ID NO: 161352 - DNA, 33 bp, Homo sapien
acaaaaacatttataatgggcctagcttgtatc

SEQ ID NO: 161353 - DNA, 33 bp, Homo sapien
cacttcggtggtaagacgctgatagaagtcaca

SEQ ID NO: 161354 - DNA, 33 bp, Homo sapien
cacttcggtggtaagatgctgatagaagtcaca

SEQ ID NO: 161355 - DNA, 33 bp, Homo sapien
cttgtcatagtacgagaagcattaatctgtcca

SEQ ID NO: 161356 - DNA, 33 bp, Homo sapien
cttgtcatagtacgaggagcattaatctgtcca

SEQ ID NO: 161357 - DNA, 33 bp, Homo sapien
aaaaaaagcaggtgccaacagaggcagaaaata

SEQ ID NO: 161358 - DNA, 33 bp, Homo sapien
aaaaaaagcaggtgccgacagaggcagaaaata

SEQ ID NO: 161359 - DNA, 33 bp, Homo sapien
aactggtttactacatcagtagcgggggaagga

SEQ ID NO: 161360 - DNA, 33 bp, Homo sapien
aactggtttactacatgagtagcgggggaagga

SEQ ID NO: 161361 - DNA, 33 bp, Homo sapien
atctgtaactacctgacgagcccaattagttgc

SEQ ID NO: 161362 - DNA, 33 bp, Homo sapien
atctgtaactacctgatgagcccaattagttgc

SEQ ID NO: 161363 - DNA, 33 bp, Homo sapien
gaagaaatctggtacaagctaaagttattcatc

SEQ ID NO: 161364 - DNA, 33 bp, Homo sapien
gaagaaatctggtacatgctaaagttattcatc

SEQ ID NO: 161365 - DNA, 33 bp, Homo sapien
tttcatgtttaaaataagacttatggcaaacaa

SEQ ID NO: 161366 - DNA, 33 bp, Homo sapien
tttcatgtttaaaatacgacttatggcaaacaa

SEQ ID NO: 161367 - DNA, 33 bp, Homo sapien
aagaactttgtcaattcaatcagatgaaatata

SEQ ID NO: 161368 - DNA, 33 bp, Homo sapien
aagaactttgtcaattgaatcagatgaaatata

SEQ ID NO: 161369 - DNA, 33 bp, Homo sapien
agggtcagaatttgaacaaaggcaatctgactt

SEQ ID NO: 161370 - DNA, 33 bp, Homo sapien
agggtcagaatttgaagaaaggcaatctgactt

SEQ ID NO: 161371 - DNA, 33 bp, Homo sapien
aacagtgaaacacgcaatagaaatgtttcttta

SEQ ID NO: 161372 - DNA, 33 bp, Homo sapien
aacagtgaaacacgcactagaaatgtttcttta

SEQ ID NO: 161373 - DNA, 33 bp, Homo sapien
acatgaactgttgaggcaaatgaccctctgtga

SEQ ID NO: 161374 - DNA, 33 bp, Homo sapien
acatgaactgttgaggtaaatgaccctctgtga

SEQ ID NO: 161375 - DNA, 33 bp, Homo sapien
ccctcacctatgtctacgatagtcatttcatat

SEQ ID NO: 161376 - DNA, 33 bp, Homo sapien
ccctcacctatgtctatgatagtcatttcatat

SEQ ID NO: 161377 - DNA, 33 bp, Homo sapien
atgacagtgacaccaaaacccaagtgcctactc

SEQ ID NO: 161378 - DNA, 33 bp, Homo sapien
atgacagtgacaccaagacccaagtgcctactc

SEQ ID NO: 161379 - DNA, 33 bp, Homo sapien
tcaagggatgaagttaagtttccatctttaaaa

SEQ ID NO: 161380 - DNA, 33 bp, Homo sapien
tcaagggatgaagttaggtttccatctttaaaa

SEQ ID NO: 161381 - DNA, 33 bp, Homo sapien
atagcttgcttcatcaaaatcagggaggtcaag

SEQ ID NO: 161382 - DNA, 33 bp, Homo sapien
atagcttgcttcatcacaatcagggaggtcaag

SEQ ID NO: 161383 - DNA, 33 bp, Homo sapien
gatacaggctttggaacaaaggtgggtctaaag

SEQ ID NO: 161384 - DNA, 33 bp, Homo sapien
gatacaggctttggaataaaggtgggtctaaag

SEQ ID NO: 161385 - DNA, 33 bp, Homo sapien
tattggttccaatcaacaatttcaaaagcattt

SEQ ID NO: 161386 - DNA, 33 bp, Homo sapien
tattggttccaatcaataatttcaaaagcattt

SEQ ID NO: 161387 - DNA, 33 bp, Homo sapien
tctcacctttattcaccgagtaactttaggcaa

SEQ ID NO: 161388 - DNA, 33 bp, Homo sapien
tctcacctttattcacggagtaactttaggcaa

SEQ ID NO: 161389 - DNA, 33 bp, Homo sapien
ctcagtgtcctaaggaaaaatgggcacttagat

SEQ ID NO: 161390 - DNA, 33 bp, Homo sapien
ctcagtgtcctaaggagaaatgggcacttagat

SEQ ID NO: 161391 - DNA, 33 bp, Homo sapien
tataaaggatgagtagaaatggactagacagaa

SEQ ID NO: 161392 - DNA, 33 bp, Homo sapien
tataaaggatgagtaggaatggactagacagaa

SEQ ID NO: 161393 - DNA, 33 bp, Homo sapien
taatgaaattagagaccatatgaatgataggca

SEQ ID NO: 161394 - DNA, 33 bp, Homo sapien
taatgaaattagagactatatgaatgataggca

SEQ ID NO: 161395 - DNA, 33 bp, Homo sapien
atggcttaataaatacgcgaaaattaatgcaag

SEQ ID NO: 161396 - DNA, 33 bp, Homo sapien
atggcttaataaatactcgaaaattaatgcaag

SEQ ID NO: 161397 - DNA, 33 bp, Homo sapien
ggatgggtgaagaggacaagtggtaaagatgag

SEQ ID NO: 161398 - DNA, 33 bp, Homo sapien
ggatgggtgaagaggataagtggtaaagatgag

SEQ ID NO: 161399 - DNA, 33 bp, Homo sapien
aaattgtgttcctcacagtaggaaggtaacgtt

SEQ ID NO: 161400 - DNA, 33 bp, Homo sapien
aaattgtgttcctcacggtaggaaggtaacgtt

SEQ ID NO: 161401 - DNA, 33 bp, Homo sapien
agtttctaactgttaaacatttgtggagggtac

SEQ ID NO: 161402 - DNA, 33 bp, Homo sapien
agtttctaactgttaagcatttgtggagggtac

SEQ ID NO: 161403 - DNA, 33 bp, Homo sapien
agcctctcccctaaccacaaaagatactagatg

SEQ ID NO: 161404 - DNA, 33 bp, Homo sapien
agcctctcccctaaccgcaaaagatactagatg

SEQ ID NO: 161405 - DNA, 33 bp, Homo sapien
caaagcaggactctaacgttcctctgcctttct

SEQ ID NO: 161406 - DNA, 33 bp, Homo sapien
caaagcaggactctaatgttcctctgcctttct

SEQ ID NO: 161407 - DNA, 33 bp, Homo sapien
ccaaggagtgagaataatacacaggtagttttt

SEQ ID NO: 161408 - DNA, 33 bp, Homo sapien
ccaaggagtgagaatagtacacaggtagttttt

SEQ ID NO: 161409 - DNA, 33 bp, Homo sapien
atcaaaccttgttagaactgcctaaacacaata

SEQ ID NO: 161410 - DNA, 33 bp, Homo sapien
atcaaaccttgttagacctgcctaaacacaata

SEQ ID NO: 161411 - DNA, 33 bp, Homo sapien
ttgctcatttaagcaaaggttaaaccccagaac

SEQ ID NO: 161412 - DNA, 33 bp, Homo sapien
ttgctcatttaagcaacggttaaaccccagaac

SEQ ID NO: 161413 - DNA, 33 bp, Homo sapien
agcccatcaaaactaacgtgactggagatcaca

SEQ ID NO: 161414 - DNA, 33 bp, Homo sapien
agcccatcaaaactaatgtgactggagatcaca

SEQ ID NO: 161415 - DNA, 33 bp, Homo sapien
aaacctcagtgacatgaaatttactcgtgtaac

SEQ ID NO: 161416 - DNA, 33 bp, Homo sapien
aaacctcagtgacatgcaatttactcgtgtaac

SEQ ID NO: 161417 - DNA, 33 bp, Homo sapien
caaacggatttgataacggactccttttgttat

SEQ ID NO: 161418 - DNA, 33 bp, Homo sapien
caaacggatttgataatggactccttttgttat

SEQ ID NO: 161419 - DNA, 33 bp, Homo sapien
tttgtcagtcctcagaactggcctcaatcagtg

SEQ ID NO: 161420 - DNA, 33 bp, Homo sapien
tttgtcagtcctcagagctggcctcaatcagtg

SEQ ID NO: 161421 - DNA, 33 bp, Homo sapien
tttgatatttatttcaaggtcaatagaaatgta

SEQ ID NO: 161422 - DNA, 33 bp, Homo sapien
tttgatatttatttcagggtcaatagaaatgta

SEQ ID NO: 161423 - DNA, 33 bp, Homo sapien
accccatatgcagtcaacatcatagtaaactat

SEQ ID NO: 161424 - DNA, 33 bp, Homo sapien
accccatatgcagtcaccatcatagtaaactat

SEQ ID NO: 161425 - DNA, 33 bp, Homo sapien
atgtgctaggttaagacgagcaatacttggtac

SEQ ID NO: 161426 - DNA, 33 bp, Homo sapien
atgtgctaggttaagatgagcaatacttggtac

SEQ ID NO: 161427 - DNA, 33 bp, Homo sapien
catgtacaggataaaacgcaatgaaagcccact

SEQ ID NO: 161428 - DNA, 33 bp, Homo sapien
catgtacaggataaaatgcaatgaaagcccact

SEQ ID NO: 161429 - DNA, 33 bp, Homo sapien
agaaccaggctccagtcaatacagaatcttatt

SEQ ID NO: 161430 - DNA, 33 bp, Homo sapien
agaaccaggctccagttaatacagaatcttatt

SEQ ID NO: 161431 - DNA, 33 bp, Homo sapien
actcagtatcttagctcaagacgacatatccac

SEQ ID NO: 161432 - DNA, 33 bp, Homo sapien
actcagtatcttagcttaagacgacatatccac

SEQ ID NO: 161433 - DNA, 33 bp, Homo sapien
cgtgtggcctacacccagaagcagactcaatga

SEQ ID NO: 161434 - DNA, 33 bp, Homo sapien
cgtgtggcctacacccggaagcagactcaatga

SEQ ID NO: 161435 - DNA, 33 bp, Homo sapien
aaccagagcccttacactggtctacaagttcca

SEQ ID NO: 161436 - DNA, 33 bp, Homo sapien
aaccagagcccttacattggtctacaagttcca

SEQ ID NO: 161437 - DNA, 33 bp, Homo sapien
tcaaggaactggtatacgaaacagtgagagtgc

SEQ ID NO: 161438 - DNA, 33 bp, Homo sapien
tcaaggaactggtatatgaaacagtgagagtgc

SEQ ID NO: 161439 - DNA, 33 bp, Homo sapien
ttctgatctaaagaagccattgttgtgtttcta

SEQ ID NO: 161440 - DNA, 33 bp, Homo sapien
ttctgatctaaagaagtcattgttgtgtttcta

SEQ ID NO: 161441 - DNA, 33 bp, Homo sapien
agaaaatactggaagacgatgtttgaggtaagc

SEQ ID NO: 161442 - DNA, 33 bp, Homo sapien
agaaaatactggaagaggatgtttgaggtaagc

SEQ ID NO: 161443 - DNA, 33 bp, Homo sapien
tctccttcaccttcctcactaccatgaactcag

SEQ ID NO: 161444 - DNA, 33 bp, Homo sapien
tctccttcaccttccttactaccatgaactcag

SEQ ID NO: 161445 - DNA, 33 bp, Homo sapien
tgcccctagtgagaagaagcagcatctaatcca

SEQ ID NO: 161446 - DNA, 33 bp, Homo sapien
tgcccctagtgagaagcagcagcatctaatcca

SEQ ID NO: 161447 - DNA, 33 bp, Homo sapien
aattggtactcatacacatattaagtgtatatt

SEQ ID NO: 161448 - DNA, 33 bp, Homo sapien
aattggtactcatacatatattaagtgtatatt

SEQ ID NO: 161449 - DNA, 33 bp, Homo sapien
gcagaatctgcttgccactagtgaaaagagccc

SEQ ID NO: 161450 - DNA, 33 bp, Homo sapien
gcagaatctgcttgccgctagtgaaaagagccc

SEQ ID NO: 161451 - DNA, 33 bp, Homo sapien
gaaaggtaaatagtgacgcagagaaaagtccat

SEQ ID NO: 161452 - DNA, 33 bp, Homo sapien
gaaaggtaaatagtgaggcagagaaaagtccat

SEQ ID NO: 161453 - DNA, 33 bp, Homo sapien
tcaatttctcttgagtaacataggctacatgaa

SEQ ID NO: 161454 - DNA, 33 bp, Homo sapien
tcaatttctcttgagtcacataggctacatgaa

SEQ ID NO: 161455 - DNA, 33 bp, Homo sapien
ctacctaagagatgacagtaacgaaaaaaaaat

SEQ ID NO: 161456 - DNA, 33 bp, Homo sapien
ctacctaagagatgacggtaacgaaaaaaaaat

SEQ ID NO: 161457 - DNA, 33 bp, Homo sapien
aacaagacaaaaataaagcccagatgatataaa

SEQ ID NO: 161458 - DNA, 33 bp, Homo sapien
aacaagacaaaaataaggcccagatgatataaa

SEQ ID NO: 161459 - DNA, 33 bp, Homo sapien
taggattttctttataccttcagactcacaaaa

SEQ ID NO: 161460 - DNA, 33 bp, Homo sapien
taggattttctttatagcttcagactcacaaaa

SEQ ID NO: 161461 - DNA, 33 bp, Homo sapien
gtgttctatgcccactaactgcctcatgaatat

SEQ ID NO: 161462 - DNA, 33 bp, Homo sapien
gtgttctatgcccacttactgcctcatgaatat

SEQ ID NO: 161463 - DNA, 33 bp, Homo sapien
aacactggaatgataaactcacatgtattatct

SEQ ID NO: 161464 - DNA, 33 bp, Homo sapien
aacactggaatgataagctcacatgtattatct

SEQ ID NO: 161465 - DNA, 33 bp, Homo sapien
aactgtgtctgcaggaagttgcattctgtaatt

SEQ ID NO: 161466 - DNA, 33 bp, Homo sapien
aactgtgtctgcaggaggttgcattctgtaatt

SEQ ID NO: 161467 - DNA, 33 bp, Homo sapien
cttgcttgtttgaaaaattcttccatacttcca

SEQ ID NO: 161468 - DNA, 33 bp, Homo sapien
cttgcttgtttgaaaagttcttccatacttcca

SEQ ID NO: 161469 - DNA, 33 bp, Homo sapien
cttttaattcactgtacgctaacaaatttagta

SEQ ID NO: 161470 - DNA, 33 bp, Homo sapien
cttttaattcactgtatgctaacaaatttagta

SEQ ID NO: 161471 - DNA, 33 bp, Homo sapien
tgcacaagaatgttaaactataagcagggcaaa

SEQ ID NO: 161472 - DNA, 33 bp, Homo sapien
tgcacaagaatgttaagctataagcagggcaaa

SEQ ID NO: 161473 - DNA, 33 bp, Homo sapien
cacattctggccatgactcagtttaccaaatgc

SEQ ID NO: 161474 - DNA, 33 bp, Homo sapien
cacattctggccatgattcagtttaccaaatgc

SEQ ID NO: 161475 - DNA, 33 bp, Homo sapien
cattctgttggaaacccagtgaaagcaaaagaa

SEQ ID NO: 161476 - DNA, 33 bp, Homo sapien
cattctgttggaaacctagtgaaagcaaaagaa

SEQ ID NO: 161477 - DNA, 33 bp, Homo sapien
tatttaccagcctagaacaagatgctggaagag

SEQ ID NO: 161478 - DNA, 33 bp, Homo sapien
tatttaccagcctagagcaagatgctggaagag

SEQ ID NO: 161479 - DNA, 33 bp, Homo sapien
gatgcaaactggcacaaccatccttggtgataa

SEQ ID NO: 161480 - DNA, 33 bp, Homo sapien
gatgcaaactggcacatccatccttggtgataa

SEQ ID NO: 161481 - DNA, 33 bp, Homo sapien
aaagtttgcaggacaaaaaacaccatattaaaa

SEQ ID NO: 161482 - DNA, 33 bp, Homo sapien
aaagtttgcaggacaacaaacaccatattaaaa

SEQ ID NO: 161483 - DNA, 33 bp, Homo sapien
actttgtcttttgaaacactatcatgtctctgt

SEQ ID NO: 161484 - DNA, 33 bp, Homo sapien
actttgtcttttgaaatactatcatgtctctgt

SEQ ID NO: 161485 - DNA, 33 bp, Homo sapien
agctcagcgtgcgttacggatgttaactccttt

SEQ ID NO: 161486 - DNA, 33 bp, Homo sapien
agctcagcgtgcgttatggatgttaactccttt

SEQ ID NO: 161487 - DNA, 33 bp, Homo sapien
cgtttaccacagtcccacaaagtaagcaataca

SEQ ID NO: 161488 - DNA, 33 bp, Homo sapien
cgtttaccacagtcccgcaaagtaagcaataca

SEQ ID NO: 161489 - DNA, 33 bp, Homo sapien
gactagaaaatgcagaaccttttcatgtgactt

SEQ ID NO: 161490 - DNA, 33 bp, Homo sapien
gactagaaaatgcagacccttttcatgtgactt

SEQ ID NO: 161491 - DNA, 33 bp, Homo sapien
caagctcatagtcacaccttcctacatctgatc

SEQ ID NO: 161492 - DNA, 33 bp, Homo sapien
caagctcatagtcacagcttcctacatctgatc

SEQ ID NO: 161493 - DNA, 33 bp, Homo sapien
gaaccatgagtttgaacgctcttttttcagttt

SEQ ID NO: 161494 - DNA, 33 bp, Homo sapien
gaaccatgagtttgaatgctcttttttcagttt

SEQ ID NO: 161495 - DNA, 33 bp, Homo sapien
gttatataccaccatgaagacctggcctagctt

SEQ ID NO: 161496 - DNA, 33 bp, Homo sapien
gttatataccaccatggagacctggcctagctt

SEQ ID NO: 161497 - DNA, 33 bp, Homo sapien
acaaaaatcttgaggtaaaaaggctctttcata

SEQ ID NO: 161498 - DNA, 33 bp, Homo sapien
acaaaaatcttgaggtgaaaaggctctttcata

SEQ ID NO: 161499 - DNA, 33 bp, Homo sapien
gacagtgatctccaacaatgaactcatatggca

SEQ ID NO: 161500 - DNA, 33 bp, Homo sapien
gacagtgatctccaaccatgaactcatatggca

SEQ ID NO: 161501 - DNA, 33 bp, Homo sapien
attctgtgaagattagaaacaaaatacacaacc

SEQ ID NO: 161502 - DNA, 33 bp, Homo sapien
attctgtgaagattagtaacaaaatacacaacc

SEQ ID NO: 161503 - DNA, 33 bp, Homo sapien
gtcaacaacctttatcaagtcataattaactaa

SEQ ID NO: 161504 - DNA, 33 bp, Homo sapien
gtcaacaacctttatcgagtcataattaactaa

SEQ ID NO: 161505 - DNA, 33 bp, Homo sapien
attcactgcagttactcagaacatggataatct

SEQ ID NO: 161506 - DNA, 33 bp, Homo sapien
attcactgcagttacttagaacatggataatct

SEQ ID NO: 161507 - DNA, 33 bp, Homo sapien
ttgactccataatccacgctcttaaccgttgcc

SEQ ID NO: 161508 - DNA, 33 bp, Homo sapien
ttgactccataatccatgctcttaaccgttgcc

SEQ ID NO: 161509 - DNA, 33 bp, Homo sapien
gcactaagcttgaccacagggagacccggataa

SEQ ID NO: 161510 - DNA, 33 bp, Homo sapien
gcactaagcttgaccatagggagacccggataa

SEQ ID NO: 161511 - DNA, 33 bp, Homo sapien
ccccaagctcctctgaaattaggttatttaaaa

SEQ ID NO: 161512 - DNA, 33 bp, Homo sapien
ccccaagctcctctgatattaggttatttaaaa

SEQ ID NO: 161513 - DNA, 33 bp, Homo sapien
aacacacaaaaacccacatcctaccagagactg

SEQ ID NO: 161514 - DNA, 33 bp, Homo sapien
aacacacaaaaacccatatcctaccagagactg

SEQ ID NO: 161515 - DNA, 33 bp, Homo sapien
aaaatccagctactcccgaacctacctttcctc

SEQ ID NO: 161516 - DNA, 33 bp, Homo sapien
aaaatccagctactcctgaacctacctttcctc

SEQ ID NO: 161517 - DNA, 33 bp, Homo sapien
gtaagtaaaaatgctacgcacagagttgttcac

SEQ ID NO: 161518 - DNA, 33 bp, Homo sapien
gtaagtaaaaatgctatgcacagagttgttcac

SEQ ID NO: 161519 - DNA, 33 bp, Homo sapien
aggttgcctggttggaactaaagtgtcatggta

SEQ ID NO: 161520 - DNA, 33 bp, Homo sapien
aggttgcctggttggagctaaagtgtcatggta

SEQ ID NO: 161521 - DNA, 33 bp, Homo sapien
tttttcagacgtgaatcagcatcatttcttggg

SEQ ID NO: 161522 - DNA, 33 bp, Homo sapien
tttttcagacgtgaatgagcatcatttcttggg

SEQ ID NO: 161523 - DNA, 33 bp, Homo sapien
tcttaggcagtgagaaacccttgaagattttta

SEQ ID NO: 161524 - DNA, 33 bp, Homo sapien
tcttaggcagtgagaagcccttgaagattttta

SEQ ID NO: 161525 - DNA, 33 bp, Homo sapien
ggcagagaaacttagcaatgctctcttagctct

SEQ ID NO: 161526 - DNA, 33 bp, Homo sapien
ggcagagaaacttagcgatgctctcttagctct

SEQ ID NO: 161527 - DNA, 33 bp, Homo sapien
aaagatggagacattgaagaaagggcccttcta

SEQ ID NO: 161528 - DNA, 33 bp, Homo sapien
aaagatggagacattgcagaaagggcccttcta

SEQ ID NO: 161529 - DNA, 33 bp, Homo sapien
caaagccagcctcagaaagacttagtctgagat

SEQ ID NO: 161530 - DNA, 33 bp, Homo sapien
caaagccagcctcagagagacttagtctgagat

SEQ ID NO: 161531 - DNA, 33 bp, Homo sapien
attctggacctttccaatgccttaaacagtgcc

SEQ ID NO: 161532 - DNA, 33 bp, Homo sapien
attctggacctttccagtgccttaaacagtgcc

SEQ ID NO: 161533 - DNA, 33 bp, Homo sapien
atggtttggaatgacaaatacttcacaatagga

SEQ ID NO: 161534 - DNA, 33 bp, Homo sapien
atggtttggaatgacagatacttcacaatagga

SEQ ID NO: 161535 - DNA, 33 bp, Homo sapien
ttatccagatgattagaaaacagccagtttgaa

SEQ ID NO: 161536 - DNA, 33 bp, Homo sapien
ttatccagatgattaggaaacagccagtttgaa

SEQ ID NO: 161537 - DNA, 33 bp, Homo sapien
aggcagtcattaccaccgtcaattttaggatgt

SEQ ID NO: 161538 - DNA, 33 bp, Homo sapien
aggcagtcattaccacggtcaattttaggatgt

SEQ ID NO: 161539 - DNA, 33 bp, Homo sapien
ccccagaaaaccttataagcctcttagtaaaag

SEQ ID NO: 161540 - DNA, 33 bp, Homo sapien
ccccagaaaaccttattagcctcttagtaaaag

SEQ ID NO: 161541 - DNA, 33 bp, Homo sapien
aattaagcatgaaaatcaagggagaagaggacc

SEQ ID NO: 161542 - DNA, 33 bp, Homo sapien
aattaagcatgaaaatgaagggagaagaggacc

SEQ ID NO: 161543 - DNA, 33 bp, Homo sapien
taaatgcgtgacgagaagtgaaatagagataca

SEQ ID NO: 161544 - DNA, 33 bp, Homo sapien
taaatgcgtgacgagaggtgaaatagagataca

SEQ ID NO: 161545 - DNA, 33 bp, Homo sapien
ggttgttggactgaagacctcagtttctcatgg

SEQ ID NO: 161546 - DNA, 33 bp, Homo sapien
ggttgttggactgaaggcctcagtttctcatgg

SEQ ID NO: 161547 - DNA, 33 bp, Homo sapien
ggacagataaatatcaatatggaaaaccgtgac

SEQ ID NO: 161548 - DNA, 33 bp, Homo sapien
ggacagataaatatcagtatggaaaaccgtgac

SEQ ID NO: 161549 - DNA, 33 bp, Homo sapien
ccaggtaccatttatcaaagactactgtttcct

SEQ ID NO: 161550 - DNA, 33 bp, Homo sapien
ccaggtaccatttatcgaagactactgtttcct

SEQ ID NO: 161551 - DNA, 33 bp, Homo sapien
ttctttgaatgtttaaatgttgatatctacggt

SEQ ID NO: 161552 - DNA, 33 bp, Homo sapien
ttctttgaatgtttaattgttgatatctacggt

SEQ ID NO: 161553 - DNA, 33 bp, Homo sapien
gatatctacggtggacagtagctcggatctcag

SEQ ID NO: 161554 - DNA, 33 bp, Homo sapien
gatatctacggtggacggtagctcggatctcag

SEQ ID NO: 161555 - DNA, 33 bp, Homo sapien
ttttgaaggtcacttacatggagtatcattttc

SEQ ID NO: 161556 - DNA, 33 bp, Homo sapien
ttttgaaggtcacttatatggagtatcattttc

SEQ ID NO: 161557 - DNA, 33 bp, Homo sapien
taaggccaaaccccgcagagctctataccactg

SEQ ID NO: 161558 - DNA, 33 bp, Homo sapien
taaggccaaaccccgcggagctctataccactg

SEQ ID NO: 161559 - DNA, 33 bp, Homo sapien
gtgagcagctctagaaatcactcttagttacag

SEQ ID NO: 161560 - DNA, 33 bp, Homo sapien
gtgagcagctctagaagtcactcttagttacag

SEQ ID NO: 161561 - DNA, 33 bp, Homo sapien
aaagggaacaaaattcgaatctgtcaaatacta

SEQ ID NO: 161562 - DNA, 33 bp, Homo sapien
aaagggaacaaaattctaatctgtcaaatacta

SEQ ID NO: 161563 - DNA, 33 bp, Homo sapien
aagctctcccatggtacgaagtatgtatgaggc

SEQ ID NO: 161564 - DNA, 33 bp, Homo sapien
aagctctcccatggtatgaagtatgtatgaggc

SEQ ID NO: 161565 - DNA, 33 bp, Homo sapien
ttttctgtagctagaccaagccacaatccatat

SEQ ID NO: 161566 - DNA, 33 bp, Homo sapien
ttttctgtagctagacgaagccacaatccatat

SEQ ID NO: 161567 - DNA, 33 bp, Homo sapien
gattacttttgagaaaactgtgaatccttaata

SEQ ID NO: 161568 - DNA, 33 bp, Homo sapien
gattacttttgagaaacctgtgaatccttaata

SEQ ID NO: 161569 - DNA, 33 bp, Homo sapien
gagtccctgcttagtaacccaacagatatttca

SEQ ID NO: 161570 - DNA, 33 bp, Homo sapien
gagtccctgcttagtagcccaacagatatttca

SEQ ID NO: 161571 - DNA, 33 bp, Homo sapien
aagcaacgtttgggagaacttataccataggta

SEQ ID NO: 161572 - DNA, 33 bp, Homo sapien
aagcaacgtttgggagtacttataccataggta

SEQ ID NO: 161573 - DNA, 33 bp, Homo sapien
cataatcagaggttccacatccagggatttaac

SEQ ID NO: 161574 - DNA, 33 bp, Homo sapien
cataatcagaggttccgcatccagggatttaac

SEQ ID NO: 161575 - DNA, 33 bp, Homo sapien
atctcctgttacttgacggcattttcgttgttt

SEQ ID NO: 161576 - DNA, 33 bp, Homo sapien
atctcctgttacttgatggcattttcgttgttt

SEQ ID NO: 161577 - DNA, 33 bp, Homo sapien
ggcatggtctatgttccactaatggtacacaag

SEQ ID NO: 161578 - DNA, 33 bp, Homo sapien
ggcatggtctatgttctactaatggtacacaag

SEQ ID NO: 161579 - DNA, 33 bp, Homo sapien
tgcagaagatacagaagagataaaactcaaata

SEQ ID NO: 161580 - DNA, 33 bp, Homo sapien
tgcagaagatacagaatagataaaactcaaata

SEQ ID NO: 161581 - DNA, 33 bp, Homo sapien
gagtagaagcagaagccagattgcattgagtaa

SEQ ID NO: 161582 - DNA, 33 bp, Homo sapien
gagtagaagcagaagctagattgcattgagtaa

SEQ ID NO: 161583 - DNA, 33 bp, Homo sapien
agtatgcagtgggtaccaactaagtgctaagca

SEQ ID NO: 161584 - DNA, 33 bp, Homo sapien
agtatgcagtgggtactaactaagtgctaagca

SEQ ID NO: 161585 - DNA, 33 bp, Homo sapien
tctgaggactctgctacgttggaattttggtaa

SEQ ID NO: 161586 - DNA, 33 bp, Homo sapien
tctgaggactctgctaggttggaattttggtaa

SEQ ID NO: 161587 - DNA, 33 bp, Homo sapien
aaagagagtaacagagaaaattaccaagatatg

SEQ ID NO: 161588 - DNA, 33 bp, Homo sapien
aaagagagtaacagagcaaattaccaagatatg

SEQ ID NO: 161589 - DNA, 33 bp, Homo sapien
aatttttaaggagacaaaaatagagcctaagaa

SEQ ID NO: 161590 - DNA, 33 bp, Homo sapien
aatttttaaggagacagaaatagagcctaagaa

SEQ ID NO: 161591 - DNA, 33 bp, Homo sapien
gtcattgtgttgtggcacatctcaactccccag

SEQ ID NO: 161592 - DNA, 33 bp, Homo sapien
gtcattgtgttgtggcgcatctcaactccccag

SEQ ID NO: 161593 - DNA, 33 bp, Homo sapien
ctatcatcacctgttaggtttcatggctgtttg

SEQ ID NO: 161594 - DNA, 33 bp, Homo sapien
ctatcatcacctgttatgtttcatggctgtttg

SEQ ID NO: 161595 - DNA, 33 bp, Homo sapien
gattccaaagttctgaaagacttaacctatcat

SEQ ID NO: 161596 - DNA, 33 bp, Homo sapien
gattccaaagttctgagagacttaacctatcat

SEQ ID NO: 161597 - DNA, 33 bp, Homo sapien
tgtcccaaaggtttgagaatgactgctgccgaa

SEQ ID NO: 161598 - DNA, 33 bp, Homo sapien
tgtcccaaaggtttgataatgactgctgccgaa

SEQ ID NO: 161599 - DNA, 33 bp, Homo sapien
acatactcggtgaatgacagatagctcccactt

SEQ ID NO: 161600 - DNA, 33 bp, Homo sapien
acatactcggtgaatggcagatagctcccactt

SEQ ID NO: 161601 - DNA, 33 bp, Homo sapien
aaataacatttcctgaccattcactacttgtac

SEQ ID NO: 161602 - DNA, 33 bp, Homo sapien
aaataacatttcctgatcattcactacttgtac

SEQ ID NO: 161603 - DNA, 33 bp, Homo sapien
cctactaggtgacatacgtacagattaaccagg

SEQ ID NO: 161604 - DNA, 33 bp, Homo sapien
cctactaggtgacatatgtacagattaaccagg

SEQ ID NO: 161605 - DNA, 33 bp, Homo sapien
ggttgcctgggtaacaatgagctattcttggcc

SEQ ID NO: 161606 - DNA, 33 bp, Homo sapien
ggttgcctgggtaacagtgagctattcttggcc

SEQ ID NO: 161607 - DNA, 33 bp, Homo sapien
actgtatgcttgaagaatcagatttgcattcct

SEQ ID NO: 161608 - DNA, 33 bp, Homo sapien
actgtatgcttgaagagtcagatttgcattcct

SEQ ID NO: 161609 - DNA, 33 bp, Homo sapien
tatgctgctgagttctcaaatgacctaacattt

SEQ ID NO: 161610 - DNA, 33 bp, Homo sapien
tatgctgctgagttcttaaatgacctaacattt

SEQ ID NO: 161611 - DNA, 33 bp, Homo sapien
ctataattcagtgagaaaatagaactgtatcct

SEQ ID NO: 161612 - DNA, 33 bp, Homo sapien
ctataattcagtgagagaatagaactgtatcct

SEQ ID NO: 161613 - DNA, 33 bp, Homo sapien
ctaaggcgttccagaaatggcgttgttcttttt

SEQ ID NO: 161614 - DNA, 33 bp, Homo sapien
ctaaggcgttccagaagtggcgttgttcttttt

SEQ ID NO: 161615 - DNA, 33 bp, Homo sapien
tcgtgcatttgaaatcaacatactaccttgtgt

SEQ ID NO: 161616 - DNA, 33 bp, Homo sapien
tcgtgcatttgaaatcgacatactaccttgtgt

SEQ ID NO: 161617 - DNA, 33 bp, Homo sapien
ttatagatgaggtaaacgaagctttgagaggtt

SEQ ID NO: 161618 - DNA, 33 bp, Homo sapien
ttatagatgaggtaaatgaagctttgagaggtt

SEQ ID NO: 161619 - DNA, 33 bp, Homo sapien
gctgcctgtgttccaacgcaaaccaagggtgca

SEQ ID NO: 161620 - DNA, 33 bp, Homo sapien
gctgcctgtgttccaatgcaaaccaagggtgca

SEQ ID NO: 161621 - DNA, 33 bp, Homo sapien
accgttcctgttaaaacaagattgagaaacagg

SEQ ID NO: 161622 - DNA, 33 bp, Homo sapien
accgttcctgttaaaataagattgagaaacagg

SEQ ID NO: 161623 - DNA, 33 bp, Homo sapien
aatatgggagacggaaataattgcacattccat

SEQ ID NO: 161624 - DNA, 33 bp, Homo sapien
aatatgggagacggaagtaattgcacattccat

SEQ ID NO: 161625 - DNA, 33 bp, Homo sapien
gcgtgttgaactggaacctaagggccttgctag

SEQ ID NO: 161626 - DNA, 33 bp, Homo sapien
gcgtgttgaactggaatctaagggccttgctag

SEQ ID NO: 161627 - DNA, 33 bp, Homo sapien
acgagaagcaaaacaaacaggatccctgcatcc

SEQ ID NO: 161628 - DNA, 33 bp, Homo sapien
acgagaagcaaaacaaccaggatccctgcatcc

SEQ ID NO: 161629 - DNA, 33 bp, Homo sapien
gtttattgatttgtcaaagatgaatttgttact

SEQ ID NO: 161630 - DNA, 33 bp, Homo sapien
gtttattgatttgtcacagatgaatttgttact

SEQ ID NO: 161631 - DNA, 33 bp, Homo sapien
gctgggtgctagcaaagcttctcaatggagttc

SEQ ID NO: 161632 - DNA, 33 bp, Homo sapien
gctgggtgctagcaaatcttctcaatggagttc

SEQ ID NO: 161633 - DNA, 33 bp, Homo sapien
ccccttccgtaattcacgctaagtgccataatt

SEQ ID NO: 161634 - DNA, 33 bp, Homo sapien
ccccttccgtaattcatgctaagtgccataatt

SEQ ID NO: 161635 - DNA, 33 bp, Homo sapien
gacatacctgcgtgacgaggaagaagactttgc

SEQ ID NO: 161636 - DNA, 33 bp, Homo sapien
gacatacctgcgtgactaggaagaagactttgc

SEQ ID NO: 161637 - DNA, 33 bp, Homo sapien
ccccagtcttgacaacaaagaatatcttcagac

SEQ ID NO: 161638 - DNA, 33 bp, Homo sapien
ccccagtcttgacaacgaagaatatcttcagac

SEQ ID NO: 161639 - DNA, 33 bp, Homo sapien
gatatactttgacgacaacaatcatggaatcca

SEQ ID NO: 161640 - DNA, 33 bp, Homo sapien
gatatactttgacgacgacaatcatggaatcca

SEQ ID NO: 161641 - DNA, 33 bp, Homo sapien
agtgtaggaaatacaaatcagtccaaagtttgg

SEQ ID NO: 161642 - DNA, 33 bp, Homo sapien
agtgtaggaaatacaagtcagtccaaagtttgg

SEQ ID NO: 161643 - DNA, 33 bp, Homo sapien
atgctacatatttgtcaatccattcacttttaa

SEQ ID NO: 161644 - DNA, 33 bp, Homo sapien
atgctacatatttgtcgatccattcacttttaa

SEQ ID NO: 161645 - DNA, 33 bp, Homo sapien
tgtttgagtttccgaaactgtggtttgctgtct

SEQ ID NO: 161646 - DNA, 33 bp, Homo sapien
tgtttgagtttccgaatctgtggtttgctgtct

SEQ ID NO: 161647 - DNA, 33 bp, Homo sapien
acatatgtagacgataactggccaatctgacat

SEQ ID NO: 161648 - DNA, 33 bp, Homo sapien
acatatgtagacgatacctggccaatctgacat

SEQ ID NO: 161649 - DNA, 33 bp, Homo sapien
ttccattatgggtgataaaacacaccgtgcttt

SEQ ID NO: 161650 - DNA, 33 bp, Homo sapien
ttccattatgggtgatgaaacacaccgtgcttt

SEQ ID NO: 161651 - DNA, 33 bp, Homo sapien
atccacattttaaaagacttgcacacaaaaggc

SEQ ID NO: 161652 - DNA, 33 bp, Homo sapien
atccacattttaaaagtcttgcacacaaaaggc

SEQ ID NO: 161653 - DNA, 33 bp, Homo sapien
actaattcctggaagccattgaaacacatctgt

SEQ ID NO: 161654 - DNA, 33 bp, Homo sapien
actaattcctggaagctattgaaacacatctgt

SEQ ID NO: 161655 - DNA, 33 bp, Homo sapien
aaggtcactagtcatacgggattaaggacccac

SEQ ID NO: 161656 - DNA, 33 bp, Homo sapien
aaggtcactagtcatatgggattaaggacccac

SEQ ID NO: 161657 - DNA, 33 bp, Homo sapien
gaaacctgaaaggaagaatgaaatatcctaata

SEQ ID NO: 161658 - DNA, 33 bp, Homo sapien
gaaacctgaaaggaaggatgaaatatcctaata

SEQ ID NO: 161659 - DNA, 33 bp, Homo sapien
atgggggaagaagttacattttcatagagaaat

SEQ ID NO: 161660 - DNA, 33 bp, Homo sapien
atgggggaagaagttagattttcatagagaaat

SEQ ID NO: 161661 - DNA, 33 bp, Homo sapien
cctttacatttcctcacggtatactttgattat

SEQ ID NO: 161662 - DNA, 33 bp, Homo sapien
cctttacatttcctcatggtatactttgattat

SEQ ID NO: 161663 - DNA, 33 bp, Homo sapien
caccttcttggaaaccaatgtgaattatggaag

SEQ ID NO: 161664 - DNA, 33 bp, Homo sapien
caccttcttggaaacccatgtgaattatggaag

SEQ ID NO: 161665 - DNA, 33 bp, Homo sapien
tacatgcaaatctcaacgtgcaagggagtaagc

SEQ ID NO: 161666 - DNA, 33 bp, Homo sapien
tacatgcaaatctcaatgtgcaagggagtaagc

SEQ ID NO: 161667 - DNA, 33 bp, Homo sapien
aggaggaaattgtccaacaagagctgaatgaga

SEQ ID NO: 161668 - DNA, 33 bp, Homo sapien
aggaggaaattgtccatcaagagctgaatgaga

SEQ ID NO: 161669 - DNA, 33 bp, Homo sapien
ctccttggtatttaccacattcagtgatagctg

SEQ ID NO: 161670 - DNA, 33 bp, Homo sapien
ctccttggtatttaccgcattcagtgatagctg

SEQ ID NO: 161671 - DNA, 33 bp, Homo sapien
acactatttttacatacgcgaagtttggtgtca

SEQ ID NO: 161672 - DNA, 33 bp, Homo sapien
acactatttttacatatgcgaagtttggtgtca

SEQ ID NO: 161673 - DNA, 33 bp, Homo sapien
ggatccttcctctaccacttaacgctgttgtgg

SEQ ID NO: 161674 - DNA, 33 bp, Homo sapien
ggatccttcctctaccgcttaacgctgttgtgg

SEQ ID NO: 161675 - DNA, 33 bp, Homo sapien
tcagctaagttcatcactacccacctttcaaag

SEQ ID NO: 161676 - DNA, 33 bp, Homo sapien
tcagctaagttcatcattacccacctttcaaag

SEQ ID NO: 161677 - DNA, 33 bp, Homo sapien; identical to SEQ ID NO: 161675

SEQ ID NO: 161678 - DNA, 33 bp, Homo sapien; identical to SEQ ID NO: 161676

SEQ ID NO: 161679 - DNA, 33 bp, Homo sapien
cttttaaaaaatgacaagacacaaaatatgaca

SEQ ID NO: 161680 - DNA, 33 bp, Homo sapien
cttttaaaaaatgacatgacacaaaatatgaca

SEQ ID NO: 161681 - DNA, 33 bp, Homo sapien
cgagggaggacaggagaaatgtgttgtgcttaa

SEQ ID NO: 161682 - DNA, 33 bp, Homo sapien
cgagggaggacaggaggaatgtgttgtgcttaa

SEQ ID NO: 161683 - DNA, 33 bp, Homo sapien
ttgtaaccactgtgaacgtcttcttcaagatga

SEQ ID NO: 161684 - DNA, 33 bp, Homo sapien
ttgtaaccactgtgaatgtcttcttcaagatga

SEQ ID NO: 161685 - DNA, 33 bp, Homo sapien
tgcaaaggagttacacagaaaaggcagctgtat

SEQ ID NO: 161686 - DNA, 33 bp, Homo sapien
tgcaaaggagttacacggaaaaggcagctgtat

SEQ ID NO: 161687 - DNA, 33 bp, Homo sapien
gtataatgctgtctggaccaataattgttttaa

SEQ ID NO: 161688 - DNA, 33 bp, Homo sapien
gtataatgctgtctggtccaataattgttttaa

SEQ ID NO: 161689 - DNA, 33 bp, Homo sapien
tcaaaccatcatcttcactgcaacttcctaata

SEQ ID NO: 161690 - DNA, 33 bp, Homo sapien
tcaaaccatcatcttcgctgcaacttcctaata

SEQ ID NO: 161691 - DNA, 33 bp, Homo sapien
ccttgctgcacatttacaagacaaagtcagagt

SEQ ID NO: 161692 - DNA, 33 bp, Homo sapien
ccttgctgcacatttataagacaaagtcagagt

SEQ ID NO: 161693 - DNA, 33 bp, Homo sapien
acttcttactgatgtaccttcttttggaaatgt

SEQ ID NO: 161694 - DNA, 33 bp, Homo sapien
acttcttactgatgtatcttcttttggaaatgt

SEQ ID NO: 161695 - DNA, 33 bp, Homo sapien
atgtataatatctcaacttctgggtccatttca

SEQ ID NO: 161696 - DNA, 33 bp, Homo sapien
atgtataatatctcaatttctgggtccatttca

SEQ ID NO: 161697 - DNA, 33 bp, Homo sapien
cctctgttattatcacggctagttctcatcagg

SEQ ID NO: 161698 - DNA, 33 bp, Homo sapien
cctctgttattatcactgctagttctcatcagg

SEQ ID NO: 161699 - DNA, 33 bp, Homo sapien
ggggaacggtaggagaaactagagattctgtgg

SEQ ID NO: 161700 - DNA, 33 bp, Homo sapien
ggggaacggtaggagagactagagattctgtgg

SEQ ID NO: 161701 - DNA, 33 bp, Homo sapien
attcactgctcatgaaatggtccttgtgaatga

SEQ ID NO: 161702 - DNA, 33 bp, Homo sapien
attcactgctcatgaagtggtccttgtgaatga

SEQ ID NO: 161703 - DNA, 33 bp, Homo sapien
catatccagtgtttaccataggccactgttcaa

SEQ ID NO: 161704 - DNA, 33 bp, Homo sapien
catatccagtgtttactataggccactgttcaa

SEQ ID NO: 161705 - DNA, 33 bp, Homo sapien
tcaaggtttgaggaaacttctcaacacatctaa

SEQ ID NO: 161706 - DNA, 33 bp, Homo sapien
tcaaggtttgaggaaatttctcaacacatctaa

SEQ ID NO: 161707 - DNA, 33 bp, Homo sapien
gaataacaccacttcaaatttatagctgggagg

SEQ ID NO: 161708 - DNA, 33 bp, Homo sapien
gaataacaccacttcagatttatagctgggagg

SEQ ID NO: 161709 - DNA, 33 bp, Homo sapien
ccgaattccgaaacagccataaaatgtgatttg

SEQ ID NO: 161710 - DNA, 33 bp, Homo sapien
ccgaattccgaaacagtcataaaatgtgatttg

SEQ ID NO: 161711 - DNA, 33 bp, Homo sapien
ccttccacttaagccacattctaacttgacact

SEQ ID NO: 161712 - DNA, 33 bp, Homo sapien
ccttccacttaagccagattctaacttgacact

SEQ ID NO: 161713 - DNA, 33 bp, Homo sapien
ctacagaaattgaaataaggtgttcccaggatc

SEQ ID NO: 161714 - DNA, 33 bp, Homo sapien
ctacagaaattgaaatgaggtgttcccaggatc

SEQ ID NO: 161715 - DNA, 33 bp, Homo sapien
gtcttgttttagcaagacctgaatcaagagggg

SEQ ID NO: 161716 - DNA, 33 bp, Homo sapien
gtcttgttttagcaagtcctgaatcaagagggg

SEQ ID NO: 161717 - DNA, 33 bp, Homo sapien
tatctcatgttgaacactggcttaaacattaca

SEQ ID NO: 161718 - DNA, 33 bp, Homo sapien
tatctcatgttgaacattggcttaaacattaca

SEQ ID NO: 161719 - DNA, 33 bp, Homo sapien
caaggaaaggcctgccacctaaattagtaagtt

SEQ ID NO: 161720 - DNA, 33 bp, Homo sapien
caaggaaaggcctgccgcctaaattagtaagtt

SEQ ID NO: 161721 - DNA, 33 bp, Homo sapien
agtcttagcaggaaacagaatccagctcagata

SEQ ID NO: 161722 - DNA, 33 bp, Homo sapien
agtcttagcaggaaacggaatccagctcagata

SEQ ID NO: 161723 - DNA, 33 bp, Homo sapien
aagcaaatcatttttacggcaaatgcatctgag

SEQ ID NO: 161724 - DNA, 33 bp, Homo sapien
aagcaaatcatttttatggcaaatgcatctgag

SEQ ID NO: 161725 - DNA, 33 bp, Homo sapien
atcagacctaatctgacgagtaaaacacgtaag

SEQ ID NO: 161726 - DNA, 33 bp, Homo sapien
atcagacctaatctgatgagtaaaacacgtaag

SEQ ID NO: 161727 - DNA, 33 bp, Homo sapien
agctgttactgtcccaaggcccggaaaaacaag

SEQ ID NO: 161728 - DNA, 33 bp, Homo sapien
agctgttactgtcccagggcccggaaaaacaag

SEQ ID NO: 161729 - DNA, 33 bp, Homo sapien
ttggacaccgtgtttcaaactgtacaactgctt

SEQ ID NO: 161730 - DNA, 33 bp, Homo sapien
ttggacaccgtgtttcgaactgtacaactgctt

SEQ ID NO: 161731 - DNA, 33 bp, Homo sapien
gacagcttggcagataaggacgtaagccatttg

SEQ ID NO: 161732 - DNA, 33 bp, Homo sapien
gacagcttggcagatagggacgtaagccatttg

SEQ ID NO: 161733 - DNA, 33 bp, Homo sapien
aagaacccctggacaaatgtgaaatactgttat

SEQ ID NO: 161734 - DNA, 33 bp, Homo sapien
aagaacccctggacaagtgtgaaatactgttat

SEQ ID NO: 161735 - DNA, 33 bp, Homo sapien
ttatgtgttgattttaccgaggagactgtaagc

SEQ ID NO: 161736 - DNA, 33 bp, Homo sapien
ttatgtgttgattttatcgaggagactgtaagc

SEQ ID NO: 161737 - DNA, 33 bp, Homo sapien
tctgcagggtattggcaatgatttttcttcttt

SEQ ID NO: 161738 - DNA, 33 bp, Homo sapien
tctgcagggtattggcgatgatttttcttcttt

SEQ ID NO: 161739 - DNA, 33 bp, Homo sapien
ccaggtagtcacaaaccgaacacacatatatat

SEQ ID NO: 161740 - DNA, 33 bp, Homo sapien
ccaggtagtcacaaactgaacacacatatatat

SEQ ID NO: 161741 - DNA, 33 bp, Homo sapien
ttaatcatttgtggaacatttcttggattcttt

SEQ ID NO: 161742 - DNA, 33 bp, Homo sapien
ttaatcatttgtggaatatttcttggattcttt

SEQ ID NO: 161743 - DNA, 33 bp, Homo sapien
tgaccccttcagaaagcattgtaggacactgat

SEQ ID NO: 161744 - DNA, 33 bp, Homo sapien
tgaccccttcagaaagtattgtaggacactgat

SEQ ID NO: 161745 - DNA, 33 bp, Homo sapien
ttaaaagcaattccaacagagagtacaaagtgc

SEQ ID NO: 161746 - DNA, 33 bp, Homo sapien
ttaaaagcaattccaatagagagtacaaagtgc

SEQ ID NO: 161747 - DNA, 33 bp, Homo sapien
gattggagccagaagaacctggcaagtgtgacc

SEQ ID NO: 161748 - DNA, 33 bp, Homo sapien
gattggagccagaagaccctggcaagtgtgacc

SEQ ID NO: 161749 - DNA, 33 bp, Homo sapien
ctggaaaacagccccacctaaaactgctcctca

SEQ ID NO: 161750 - DNA, 33 bp, Homo sapien
ctggaaaacagccccagctaaaactgctcctca

SEQ ID NO: 161751 - DNA, 33 bp, Homo sapien
tacacaaatgttaaaacggagattgttcttcag

SEQ ID NO: 161752 - DNA, 33 bp, Homo sapien
tacacaaatgttaaaatggagattgttcttcag

SEQ ID NO: 161753 - DNA, 33 bp, Homo sapien
gaagagagcccttaaaatcagtcaggaccagac

SEQ ID NO: 161754 - DNA, 33 bp, Homo sapien
gaagagagcccttaaactcagtcaggaccagac

SEQ ID NO: 161755 - DNA, 33 bp, Homo sapien
gtgatcttgtgctttgaaggactggaggagaca

SEQ ID NO: 161756 - DNA, 33 bp, Homo sapien
gtgatcttgtgctttgcaggactggaggagaca

SEQ ID NO: 161757 - DNA, 33 bp, Homo sapien
cattcagagaaactcaacggggatggtgaagca

SEQ ID NO: 161758 - DNA, 33 bp, Homo sapien
cattcagagaaactcagcggggatggtgaagca

SEQ ID NO: 161759 - DNA, 33 bp, Homo sapien
gacagatacaggagaaaagtgtccatttttatg

SEQ ID NO: 161760 - DNA, 33 bp, Homo sapien
gacagatacaggagaacagtgtccatttttatg

SEQ ID NO: 161761 - DNA, 33 bp, Homo sapien
gatattgttttccgagccccaacaagcacaaga

SEQ ID NO: 161762 - DNA, 33 bp, Homo sapien
gatattgttttccgagtcccaacaagcacaaga

SEQ ID NO: 161763 - DNA, 33 bp, Homo sapien
tattaagttcgaaagacggcaggaggtcttcaa

SEQ ID NO: 161764 - DNA, 33 bp, Homo sapien
tattaagttcgaaagatggcaggaggtcttcaa

SEQ ID NO: 161765 - DNA, 33 bp, Homo sapien
gaattgctttctaggggacaacattcagatcct

SEQ ID NO: 161766 - DNA, 33 bp, Homo sapien
gaattgctttctagggtacaacattcagatcct

SEQ ID NO: 161767 - DNA, 33 bp, Homo sapien
atgacataccataatcaagagcattgttagcca

SEQ ID NO: 161768 - DNA, 33 bp, Homo sapien
atgacataccataatcgagagcattgttagcca

SEQ ID NO: 161769 - DNA, 33 bp, Homo sapien
ccatttgagatcttaaataacacttctgaacat

SEQ ID NO: 161770 - DNA, 33 bp, Homo sapien
ccatttgagatcttaagtaacacttctgaacat

SEQ ID NO: 161771 - DNA, 33 bp, Homo sapien
cacatgaggaccaagcacagagaaacagggaag

SEQ ID NO: 161772 - DNA, 33 bp, Homo sapien
cacatgaggaccaagcgcagagaaacagggaag

SEQ ID NO: 161773 - DNA, 33 bp, Homo sapien
acaaggtaagcttcaccggagagtcctgaagct

SEQ ID NO: 161774 - DNA, 33 bp, Homo sapien
acaaggtaagcttcactggagagtcctgaagct

SEQ ID NO: 161775 - DNA, 33 bp, Homo sapien
cctaatccttgctaaccatttttctgcttaagg

SEQ ID NO: 161776 - DNA, 33 bp, Homo sapien
cctaatccttgctaacgatttttctgcttaagg

SEQ ID NO: 161777 - DNA, 33 bp, Homo sapien
agttttgtttgagtcacggtctaaaaatcttca

SEQ ID NO: 161778 - DNA, 33 bp, Homo sapien
agttttgtttgagtcatggtctaaaaatcttca

SEQ ID NO: 161779 - DNA, 33 bp, Homo sapien
cttgttgcaattaccaatggctataatatagaa

SEQ ID NO: 161780 - DNA, 33 bp, Homo sapien
cttgttgcaattaccagtggctataatatagaa

SEQ ID NO: 161781 - DNA, 33 bp, Homo sapien
gtactatggacttgagactaggaaggaacacat

SEQ ID NO: 161782 - DNA, 33 bp, Homo sapien
gtactatggacttgagtctaggaaggaacacat

SEQ ID NO: 161783 - DNA, 33 bp, Homo sapien
acttggaatgcactcaaagggatggtaagccag

SEQ ID NO: 161784 - DNA, 33 bp, Homo sapien
acttggaatgcactcacagggatggtaagccag

SEQ ID NO: 161785 - DNA, 33 bp, Homo sapien
aagcatctaatcatgacgcacaaatttgtgaga

SEQ ID NO: 161786 - DNA, 33 bp, Homo sapien
aagcatctaatcatgaggcacaaatttgtgaga

SEQ ID NO: 161787 - DNA, 33 bp, Homo sapien
ttgattttctccatcaactaaattgttcaatat

SEQ ID NO: 161788 - DNA, 33 bp, Homo sapien
ttgattttctccatcagctaaattgttcaatat

SEQ ID NO: 161789 - DNA, 33 bp, Homo sapien
gacaaagcatgaaggaaaatcttgtttcttttg

SEQ ID NO: 161790 - DNA, 33 bp, Homo sapien
gacaaagcatgaaggagaatcttgtttcttttg

SEQ ID NO: 161791 - DNA, 33 bp, Homo sapien
ttactttccagttagacgaaggaagcccaagag

SEQ ID NO: 161792 - DNA, 33 bp, Homo sapien
ttactttccagttagatgaaggaagcccaagag

SEQ ID NO: 161793 - DNA, 33 bp, Homo sapien
cattgagtacttactaaacactaggcaaaaact

SEQ ID NO: 161794 - DNA, 33 bp, Homo sapien
cattgagtacttactatacactaggcaaaaact

SEQ ID NO: 161795 - DNA, 33 bp, Homo sapien
cagtgctggtagaagacgaagtgactacagtgg

SEQ ID NO: 161796 - DNA, 33 bp, Homo sapien
cagtgctggtagaagatgaagtgactacagtgg

SEQ ID NO: 161797 - DNA, 33 bp, Homo sapien
ctctatccattaatcactatacctcacacagac

SEQ ID NO: 161798 - DNA, 33 bp, Homo sapien
ctctatccattaatcattatacctcacacagac

SEQ ID NO: 161799 - DNA, 33 bp, Homo sapien
tcccattctatcctaactaaataggctgcctca

SEQ ID NO: 161800 - DNA, 33 bp, Homo sapien
tcccattctatcctaattaaataggctgcctca

SEQ ID NO: 161801 - DNA, 33 bp, Homo sapien
atcatctaagagagaacatgaaactcaacaaga

SEQ ID NO: 161802 - DNA, 33 bp, Homo sapien
atcatctaagagagaatatgaaactcaacaaga

SEQ ID NO: 161803 - DNA, 33 bp, Homo sapien
atgctgtgctaggcacgggggatgtactgaaac

SEQ ID NO: 161804 - DNA, 33 bp, Homo sapien
atgctgtgctaggcactggggatgtactgaaac

SEQ ID NO: 161805 - DNA, 33 bp, Homo sapien
aaatacattttgtaaaatgcagaacaatactaa

SEQ ID NO: 161806 - DNA, 33 bp, Homo sapien
aaatacattttgtaaactgcagaacaatactaa

SEQ ID NO: 161807 - DNA, 33 bp, Homo sapien
acattttcactctaaaagatggttgaaagcctt

SEQ ID NO: 161808 - DNA, 33 bp, Homo sapien
acattttcactctaaacgatggttgaaagcctt

SEQ ID NO: 161809 - DNA, 33 bp, Homo sapien
ttactggaatttctaaccatatgaagccatatg

SEQ ID NO: 161810 - DNA, 33 bp, Homo sapien
ttactggaatttctaatcatatgaagccatatg

SEQ ID NO: 161811 - DNA, 33 bp, Homo sapien
acatagtacagagggacaagatatttttcaata

SEQ ID NO: 161812 - DNA, 33 bp, Homo sapien
acatagtacagagggagaagatatttttcaata

SEQ ID NO: 161813 - DNA, 33 bp, Homo sapien
cactggagacactcagaaataaccagggagaca

SEQ ID NO: 161814 - DNA, 33 bp, Homo sapien
cactggagacactcaggaataaccagggagaca

SEQ ID NO: 161815 - DNA, 33 bp, Homo sapien
ctatgactccacaatacggtcttagaggaggag

SEQ ID NO: 161816 - DNA, 33 bp, Homo sapien
ctatgactccacaatatggtcttagaggaggag

SEQ ID NO: 161817 - DNA, 33 bp, Homo sapien
tagtttctaaggatccagaatccaggagcagct

SEQ ID NO: 161818 - DNA, 33 bp, Homo sapien
tagtttctaaggatccggaatccaggagcagct

SEQ ID NO: 161819 - DNA, 33 bp, Homo sapien
ctaagtggatttccaactgggtgaagccaactg

SEQ ID NO: 161820 - DNA, 33 bp, Homo sapien
ctaagtggatttccaattgggtgaagccaactg

SEQ ID NO: 161821 - DNA, 33 bp, Homo sapien
aacaggatattttagcacaaacatttcatggca

SEQ ID NO: 161822 - DNA, 33 bp, Homo sapien
aacaggatattttagcccaaacatttcatggca

SEQ ID NO: 161823 - DNA, 33 bp, Homo sapien
ccttcctctcgatgtcaaacttaaaaacatgac

SEQ ID NO: 161824 - DNA, 33 bp, Homo sapien
ccttcctctcgatgtcgaacttaaaaacatgac

SEQ ID NO: 161825 - DNA, 33 bp, Homo sapien
tgtaaaacgaaaaggactcatgttggatagaga

SEQ ID NO: 161826 - DNA, 33 bp, Homo sapien
tgtaaaacgaaaaggattcatgttggatagaga

SEQ ID NO: 161827 - DNA, 33 bp, Homo sapien
aaggcgtttgcaccaaaaaattgctattatttg

SEQ ID NO: 161828 - DNA, 33 bp, Homo sapien
aaggcgtttgcaccaataaattgctattatttg

SEQ ID NO: 161829 - DNA, 33 bp, Homo sapien
tttatcaagcaacttacgttacactgactttgt

SEQ ID NO: 161830 - DNA, 33 bp, Homo sapien
tttatcaagcaacttatgttacactgactttgt

SEQ ID NO: 161831 - DNA, 33 bp, Homo sapien
tcctgaaacatcagcaacacatggtattgtagc

SEQ ID NO: 161832 - DNA, 33 bp, Homo sapien
tcctgaaacatcagcaccacatggtattgtagc

SEQ ID NO: 161833 - DNA, 33 bp, Homo sapien
ggaaattacttccatgcaagggtagcctccaag

SEQ ID NO: 161834 - DNA, 33 bp, Homo sapien
ggaaattacttccatgtaagggtagcctccaag

SEQ ID NO: 161835 - DNA, 33 bp, Homo sapien
atgcctgtaaagcaaaatctctgtgatttaaaa

SEQ ID NO: 161836 - DNA, 33 bp, Homo sapien
atgcctgtaaagcaaagtctctgtgatttaaaa

SEQ ID NO: 161837 - DNA, 33 bp, Homo sapien
aagctcatcaaagaaccacattggctcataact

SEQ ID NO: 161838 - DNA, 33 bp, Homo sapien
aagctcatcaaagaactacattggctcataact

SEQ ID NO: 161839 - DNA, 33 bp, Homo sapien
ggtgagctctgctataccttacaatggaatttt

SEQ ID NO: 161840 - DNA, 33 bp, Homo sapien
ggtgagctctgctatatcttacaatggaatttt

SEQ ID NO: 161841 - DNA, 33 bp, Homo sapien
atttattctttgaatgacacaaaagcaccatga

SEQ ID NO: 161842 - DNA, 33 bp, Homo sapien
atttattctttgaatggcacaaaagcaccatga

SEQ ID NO: 161843 - DNA, 33 bp, Homo sapien
atagaaattcttcagaaataagcagtgaacttg

SEQ ID NO: 161844 - DNA, 33 bp, Homo sapien
atagaaattcttcagagataagcagtgaacttg

SEQ ID NO: 161845 - DNA, 33 bp, Homo sapien
agaacctggaataatgcacttttatactgataa

SEQ ID NO: 161846 - DNA, 33 bp, Homo sapien
agaacctggaataatggacttttatactgataa

SEQ ID NO: 161847 - DNA, 33 bp, Homo sapien
atgagctttgaagagaagaaggtttgctttaat

SEQ ID NO: 161848 - DNA, 33 bp, Homo sapien
atgagctttgaagagaggaaggtttgctttaat

SEQ ID NO: 161849 - DNA, 33 bp, Homo sapien
atcctagaggggaaaacggactcaagacctcct

SEQ ID NO: 161850 - DNA, 33 bp, Homo sapien
atcctagaggggaaaatggactcaagacctcct

SEQ ID NO: 161851 - DNA, 33 bp, Homo sapien
catgtttccacacgcaacaaactgtactagaca

SEQ ID NO: 161852 - DNA, 33 bp, Homo sapien
catgtttccacacgcagcaaactgtactagaca

SEQ ID NO: 161853 - DNA, 33 bp, Homo sapien
ggtgagagctcaggaaaaaagtaatattagtgt

SEQ ID NO: 161854 - DNA, 33 bp, Homo sapien
ggtgagagctcaggaagaaagtaatattagtgt

SEQ ID NO: 161855 - DNA, 33 bp, Homo sapien
agatttcatttacctacacatgtttaaggcaat

SEQ ID NO: 161856 - DNA, 33 bp, Homo sapien
agatttcatttacctatacatgtttaaggcaat

SEQ ID NO: 161857 - DNA, 33 bp, Homo sapien
gaaagaacttcagggaaaaggatgcaaccaacc

SEQ ID NO: 161858 - DNA, 33 bp, Homo sapien
gaaagaacttcagggagaaggatgcaaccaacc

SEQ ID NO: 161859 - DNA, 33 bp, Homo sapien
ggcctaggctttgagccatcagggttatggttg

SEQ ID NO: 161860 - DNA, 33 bp, Homo sapien
ggcctaggctttgagctatcagggttatggttg

SEQ ID NO: 161861 - DNA, 33 bp, Homo sapien
tttagtccctgattgcaccaatggatgctcaat

SEQ ID NO: 161862 - DNA, 33 bp, Homo sapien
tttagtccctgattgcgccaatggatgctcaat

SEQ ID NO: 161863 - DNA, 33 bp, Homo sapien
catctgatactgtgaaatgtggaaagtgctcaa

SEQ ID NO: 161864 - DNA, 33 bp, Homo sapien
catctgatactgtgaagtgtggaaagtgctcaa

SEQ ID NO: 161865 - DNA, 33 bp, Homo sapien
acaccaaacatgttcccacagcatcctacacct

SEQ ID NO: 161866 - DNA, 33 bp, Homo sapien
acaccaaacatgttcctacagcatcctacacct

SEQ ID NO: 161867 - DNA, 33 bp, Homo sapien
taaaaaataaaatgtacgtcagaaaacttgtaa

SEQ ID NO: 161868 - DNA, 33 bp, Homo sapien
taaaaaataaaatgtatgtcagaaaacttgtaa

SEQ ID NO: 161869 - DNA, 33 bp, Homo sapien
tgatgctttgtatttcactttgcctgacatcac

SEQ ID NO: 161870 - DNA, 33 bp, Homo sapien
tgatgctttgtatttcgctttgcctgacatcac

SEQ ID NO: 161871 - DNA, 33 bp, Homo sapien
gcaaaagagaatggaccaagcactgttcccaga

SEQ ID NO: 161872 - DNA, 33 bp, Homo sapien
gcaaaagagaatggacgaagcactgttcccaga

SEQ ID NO: 161873 - DNA, 33 bp, Homo sapien
cctttgtctcaagtgtaaaagtcataaatgttt

SEQ ID NO: 161874 - DNA, 33 bp, Homo sapien
cctttgtctcaagtgtgaaagtcataaatgttt

SEQ ID NO: 161875 - DNA, 33 bp, Homo sapien
ggaactcaatgattgaagagaggcaaatacact

SEQ ID NO: 161876 - DNA, 33 bp, Homo sapien
ggaactcaatgattgaggagaggcaaatacact

SEQ ID NO: 161877 - DNA, 33 bp, Homo sapien
ttgagatttcctacaccaacatataaacaatat

SEQ ID NO: 161878 - DNA, 33 bp, Homo sapien
ttgagatttcctacactaacatataaacaatat

SEQ ID NO: 161879 - DNA, 33 bp, Homo sapien
agaagagaaaatattaccatcagtctttccaag

SEQ ID NO: 161880 - DNA, 33 bp, Homo sapien
agaagagaaaatattatcatcagtctttccaag

SEQ ID NO: 161881 - DNA, 33 bp, Homo sapien
gaatgttagctcttgcccattatcaacttttgt

SEQ ID NO: 161882 - DNA, 33 bp, Homo sapien
gaatgttagctcttgctcattatcaacttttgt

SEQ ID NO: 161883 - DNA, 33 bp, Homo sapien
ttatggttcttgtataaatctatcctttctaca

SEQ ID NO: 161884 - DNA, 33 bp, Homo sapien
ttatggttcttgtatagatctatcctttctaca

SEQ ID NO: 161885 - DNA, 33 bp, Homo sapien
agaactactactgaaggacaatgtgaattatat

SEQ ID NO: 161886 - DNA, 33 bp, Homo sapien
agaactactactgaagtacaatgtgaattatat

SEQ ID NO: 161887 - DNA, 33 bp, Homo sapien
ttagtctagtgctggacaaagacatttataaaa

SEQ ID NO: 161888 - DNA, 33 bp, Homo sapien
ttagtctagtgctggataaagacatttataaaa

SEQ ID NO: 161889 - DNA, 33 bp, Homo sapien
aagtataaaaagcataagaaagtacagcagtta

SEQ ID NO: 161890 - DNA, 33 bp, Homo sapien
aagtataaaaagcataggaaagtacagcagtta

SEQ ID NO: 161891 - DNA, 33 bp, Homo sapien
catacatagcactagacaccaaactctgggtac

SEQ ID NO: 161892 - DNA, 33 bp, Homo sapien
catacatagcactagataccaaactctgggtac

SEQ ID NO: 161893 - DNA, 33 bp, Homo sapien
gaaaaactcctccctactagctctccaagatgt

SEQ ID NO: 161894 - DNA, 33 bp, Homo sapien
gaaaaactcctccctagtagctctccaagatgt

SEQ ID NO: 161895 - DNA, 33 bp, Homo sapien
tcattcttccctgggcaaccatggatctgcttt

SEQ ID NO: 161896 - DNA, 33 bp, Homo sapien
tcattcttccctgggcgaccatggatctgcttt

SEQ ID NO: 161897 - DNA, 33 bp, Homo sapien
aataagtaacgagatcaaagatgtaataaaatc

SEQ ID NO: 161898 - DNA, 33 bp, Homo sapien
aataagtaacgagatcgaagatgtaataaaatc

SEQ ID NO: 161899 - DNA, 33 bp, Homo sapien
aggatctgtatgtgtacatcgccactcttattt

SEQ ID NO: 161900 - DNA, 33 bp, Homo sapien
aggatctgtatgtgtatatcgccactcttattt

SEQ ID NO: 161901 - DNA, 33 bp, Homo sapien
ttgatgatatattcaacacaagctacagagaga

SEQ ID NO: 161902 - DNA, 33 bp, Homo sapien
ttgatgatatattcaatacaagctacagagaga

SEQ ID NO: 161903 - DNA, 33 bp, Homo sapien
tgcaagtgtagcataacccctgtcctgtatgac

SEQ ID NO: 161904 - DNA, 33 bp, Homo sapien
tgcaagtgtagcataatccctgtcctgtatgac

SEQ ID NO: 161905 - DNA, 33 bp, Homo sapien
agttcagtaacacaaccagaagagcattcccca

SEQ ID NO: 161906 - DNA, 33 bp, Homo sapien
agttcagtaacacaactagaagagcattcccca

SEQ ID NO: 161907 - DNA, 33 bp, Homo sapien
gttttaatgtttcacaaaccaattctgtactac

SEQ ID NO: 161908 - DNA, 33 bp, Homo sapien
gttttaatgtttcacataccaattctgtactac

SEQ ID NO: 161909 - DNA, 33 bp, Homo sapien
atcttaaaacaaatgaagaacataccttaaaac

SEQ ID NO: 161910 - DNA, 33 bp, Homo sapien
atcttaaaacaaatgaggaacataccttaaaac

SEQ ID NO: 161911 - DNA, 33 bp, Homo sapien
ccatctttgacccaaacaacacttgttttaagc

SEQ ID NO: 161912 - DNA, 33 bp, Homo sapien
ccatctttgacccaaagaacacttgttttaagc

SEQ ID NO: 161913 - DNA, 33 bp, Homo sapien
ttttctagctcagaaaataaaccttacatttta

SEQ ID NO: 161914 - DNA, 33 bp, Homo sapien
ttttctagctcagaaagtaaaccttacatttta

SEQ ID NO: 161915 - DNA, 33 bp, Homo sapien
atttaaatttcttatcaaggtcccagcaatatg

SEQ ID NO: 161916 - DNA, 33 bp, Homo sapien
atttaaatttcttatcgaggtcccagcaatatg

SEQ ID NO: 161917 - DNA, 33 bp, Homo sapien
ccggcaagcaaacaaacgaaacatctaaaaata

SEQ ID NO: 161918 - DNA, 33 bp, Homo sapien
ccggcaagcaaacaaatgaaacatctaaaaata

SEQ ID NO: 161919 - DNA, 33 bp, Homo sapien
gaatccatcattcctacctaagcattagtatct

SEQ ID NO: 161920 - DNA, 33 bp, Homo sapien
gaatccatcattcctagctaagcattagtatct

SEQ ID NO: 161921 - DNA, 33 bp, Homo sapien
catctaatcctcacaccccattcaagtttcagc

SEQ ID NO: 161922 - DNA, 33 bp, Homo sapien
catctaatcctcacactccattcaagtttcagc

SEQ ID NO: 161923 - DNA, 33 bp, Homo sapien
agtcttatttttggcactatcagctacatttgt

SEQ ID NO: 161924 - DNA, 33 bp, Homo sapien
agtcttatttttggcattatcagctacatttgt

SEQ ID NO: 161925 - DNA, 33 bp, Homo sapien
agctagtaaatgaataagagagaattacagtca

SEQ ID NO: 161926 - DNA, 33 bp, Homo sapien
agctagtaaatgaataggagagaattacagtca

SEQ ID NO: 161927 - DNA, 33 bp, Homo sapien
agattaagtgtaatgaaaggtttctgaatcgta

SEQ ID NO: 161928 - DNA, 33 bp, Homo sapien
agattaagtgtaatgagaggtttctgaatcgta

SEQ ID NO: 161929 - DNA, 33 bp, Homo sapien
acgagatagcagtacaacttagggcatggcaga

SEQ ID NO: 161930 - DNA, 33 bp, Homo sapien
acgagatagcagtacagcttagggcatggcaga

SEQ ID NO: 161931 - DNA, 33 bp, Homo sapien
aaagcttcatagtacaaaaggaatactactgaa

SEQ ID NO: 161932 - DNA, 33 bp, Homo sapien
aaagcttcatagtacagaaggaatactactgaa

SEQ ID NO: 161933 - DNA, 33 bp, Homo sapien
tataccataatcatcaaatatcaaagattccta

SEQ ID NO: 161934 - DNA, 33 bp, Homo sapien
tataccataatcatcatatatcaaagattccta

SEQ ID NO: 161935 - DNA, 33 bp, Homo sapien
tctgattcttcaagaccaggttagatagcctac

SEQ ID NO: 161936 - DNA, 33 bp, Homo sapien
tctgattcttcaagactaggttagatagcctac

SEQ ID NO: 161937 - DNA, 33 bp, Homo sapien
aaagtaacgtttttgacgatctggaagaagatg

SEQ ID NO: 161938 - DNA, 33 bp, Homo sapien
aaagtaacgtttttgatgatctggaagaagatg

SEQ ID NO: 161939 - DNA, 33 bp, Homo sapien
tgaaaaccacggaggaaaggaagaaatctactc

SEQ ID NO: 161940 - DNA, 33 bp, Homo sapien
tgaaaaccacggaggagaggaagaaatctactc

SEQ ID NO: 161941 - DNA, 33 bp, Homo sapien
taaagactaaatgctaactaatgtctatgataa

SEQ ID NO: 161942 - DNA, 33 bp, Homo sapien
taaagactaaatgctagctaatgtctatgataa

SEQ ID NO: 161943 - DNA, 33 bp, Homo sapien
tacatttttgagttgagattgaaggaagaatga

SEQ ID NO: 161944 - DNA, 33 bp, Homo sapien
tacatttttgagttgatattgaaggaagaatga

SEQ ID NO: 161945 - DNA, 33 bp, Homo sapien
tctaggttgttcataacgatggtaactagacct

SEQ ID NO: 161946 - DNA, 33 bp, Homo sapien
tctaggttgttcataatgatggtaactagacct

SEQ ID NO: 161947 - DNA, 33 bp, Homo sapien
ttgattttttccaaaacttgtagctttgtgttt

SEQ ID NO: 161948 - DNA, 33 bp, Homo sapien
ttgattttttccaaaatttgtagctttgtgttt

SEQ ID NO: 161949 - DNA, 33 bp, Homo sapien
aattagagagactggtcaatgtggatagatctt

SEQ ID NO: 161950 - DNA, 33 bp, Homo sapien
aattagagagactggtgaatgtggatagatctt

SEQ ID NO: 161951 - DNA, 33 bp, Homo sapien
cataataactgctaacgaaaaatgtgtttgatt

SEQ ID NO: 161952 - DNA, 33 bp, Homo sapien
cataataactgctaactaaaaatgtgtttgatt

SEQ ID NO: 161953 - DNA, 33 bp, Homo sapien
cagctcttttttgttcccagtgacccccaggaa

SEQ ID NO: 161954 - DNA, 33 bp, Homo sapien
cagctcttttttgttctcagtgacccccaggaa

SEQ ID NO: 161955 - DNA, 33 bp, Homo sapien
atactcattttgttcacacatagtttctctgag

SEQ ID NO: 161956 - DNA, 33 bp, Homo sapien
atactcattttgttcatacatagtttctctgag

SEQ ID NO: 161957 - DNA, 33 bp, Homo sapien
ctgaatcatcacaaacaagggaaacttcataag

SEQ ID NO: 161958 - DNA, 33 bp, Homo sapien
ctgaatcatcacaaacgagggaaacttcataag

SEQ ID NO: 161959 - DNA, 33 bp, Homo sapien
tagtagtgattcaaaactgtccatgagaaaaat

SEQ ID NO: 161960 - DNA, 33 bp, Homo sapien
tagtagtgattcaaaattgtccatgagaaaaat

SEQ ID NO: 161961 - DNA, 33 bp, Homo sapien
gatggtccatttcacaatcaagccaacttatat

SEQ ID NO: 161962 - DNA, 33 bp, Homo sapien
gatggtccatttcacagtcaagccaacttatat

SEQ ID NO: 161963 - DNA, 33 bp, Homo sapien
actcatgctagagttacagaatctgcaagaaga

SEQ ID NO: 161964 - DNA, 33 bp, Homo sapien
actcatgctagagttatagaatctgcaagaaga

SEQ ID NO: 161965 - DNA, 33 bp, Homo sapien
gaaccccaggtataaaatgagaaatatgaatac

SEQ ID NO: 161966 - DNA, 33 bp, Homo sapien
gaaccccaggtataaattgagaaatatgaatac

SEQ ID NO: 161967 - DNA, 33 bp, Homo sapien
gttctaaataaagcacacaagttttctcattta

SEQ ID NO: 161968 - DNA, 33 bp, Homo sapien
gttctaaataaagcacgcaagttttctcattta

SEQ ID NO: 161969 - DNA, 33 bp, Homo sapien
tgagggaactgtcagaaaagggctatgtgggag

SEQ ID NO: 161970 - DNA, 33 bp, Homo sapien
tgagggaactgtcagagaagggctatgtgggag

SEQ ID NO: 161971 - DNA, 33 bp, Homo sapien
ggtaaacttctagtgaagagagatcgcctctgt

SEQ ID NO: 161972 - DNA, 33 bp, Homo sapien
ggtaaacttctagtgacgagagatcgcctctgt

SEQ ID NO: 161973 - DNA, 33 bp, Homo sapien
aagtcagtgtttgaaacagattgattccccata

SEQ ID NO: 161974 - DNA, 33 bp, Homo sapien
aagtcagtgtttgaaatagattgattccccata

SEQ ID NO: 161975 - DNA, 33 bp, Homo sapien
gagaaaataataagacaaacaagtagatgctgc

SEQ ID NO: 161976 - DNA, 33 bp, Homo sapien
gagaaaataataagacgaacaagtagatgctgc

SEQ ID NO: 161977 - DNA, 33 bp, Homo sapien
taatacctattttacaaggttgcaaaaagaaaa

SEQ ID NO: 161978 - DNA, 33 bp, Homo sapien
taatacctattttacagggttgcaaaaagaaaa

SEQ ID NO: 161979 - DNA, 33 bp, Homo sapien
aagaagtttgtaccaactatctcaaagaaagtt

SEQ ID NO: 161980 - DNA, 33 bp, Homo sapien
aagaagtttgtaccaattatctcaaagaaagtt

SEQ ID NO: 161981 - DNA, 33 bp, Homo sapien
aagcttctgtgccatacgcaaggctctcccaga

SEQ ID NO: 161982 - DNA, 33 bp, Homo sapien
aagcttctgtgccatatgcaaggctctcccaga

SEQ ID NO: 161983 - DNA, 33 bp, Homo sapien
aatttgttcaaggtaccgatttcattctaatta

SEQ ID NO: 161984 - DNA, 33 bp, Homo sapien
aatttgttcaaggtactgatttcattctaatta

SEQ ID NO: 161985 - DNA, 33 bp, Homo sapien
agcaacatagacttcacgcttaattagaatgaa

SEQ ID NO: 161986 - DNA, 33 bp, Homo sapien
agcaacatagacttcaggcttaattagaatgaa

SEQ ID NO: 161987 - DNA, 33 bp, Homo sapien
agggctgagtaacataaggtagttccttacggc

SEQ ID NO: 161988 - DNA, 33 bp, Homo sapien
agggctgagtaacatacggtagttccttacggc

SEQ ID NO: 161989 - DNA, 33 bp, Homo sapien
aggaagtgagtttgtacacagtaagtcttcctt

SEQ ID NO: 161990 - DNA, 33 bp, Homo sapien
aggaagtgagtttgtatacagtaagtcttcctt

SEQ ID NO: 161991 - DNA, 33 bp, Homo sapien
ttgtttttagtaggaacattttaaatcaggctt

SEQ ID NO: 161992 - DNA, 33 bp, Homo sapien
ttgtttttagtaggaatattttaaatcaggctt

SEQ ID NO: 161993 - DNA, 33 bp, Homo sapien
tatcatctggtcagaaatactgaagcatccagg

SEQ ID NO: 161994 - DNA, 33 bp, Homo sapien
tatcatctggtcagaagtactgaagcatccagg

SEQ ID NO: 161995 - DNA, 33 bp, Homo sapien
cacattaagttatgaaagattactagcagttcc

SEQ ID NO: 161996 - DNA, 33 bp, Homo sapien
cacattaagttatgaatgattactagcagttcc

SEQ ID NO: 161997 - DNA, 33 bp, Homo sapien
agaaccactgataggcacagcaatctcaggcct

SEQ ID NO: 161998 - DNA, 33 bp, Homo sapien
agaaccactgataggcgcagcaatctcaggcct

SEQ ID NO: 161999 - DNA, 33 bp, Homo sapien
atgcctgctctacaaaatgtgctgatttctctg

SEQ ID NO: 162000 - DNA, 33 bp, Homo sapien
atgcctgctctacaaattgtgctgatttctctg

SEQ ID NO: 162001 - DNA, 33 bp, Homo sapien
gaatgagactgacccaaggagtttgttaaaatg

SEQ ID NO: 162002 - DNA, 33 bp, Homo sapien
gaatgagactgacccagggagtttgttaaaatg

SEQ ID NO: 162003 - DNA, 33 bp, Homo sapien
ttaaccagcttttacactaatgtcccttttcta

SEQ ID NO: 162004 - DNA, 33 bp, Homo sapien
ttaaccagcttttacattaatgtcccttttcta

SEQ ID NO: 162005 - DNA, 33 bp, Homo sapien
tttatctgcacacagaataatgattatatgccc

SEQ ID NO: 162006 - DNA, 33 bp, Homo sapien
tttatctgcacacagagtaatgattatatgccc

SEQ ID NO: 162007 - DNA, 33 bp, Homo sapien
ggaaaagacacacataaaggactgattaggaaa

SEQ ID NO: 162008 - DNA, 33 bp, Homo sapien
ggaaaagacacacatataggactgattaggaaa

SEQ ID NO: 162009 - DNA, 33 bp, Homo sapien
tatttattttccaatcagaggcattgagtcggg

SEQ ID NO: 162010 - DNA, 33 bp, Homo sapien
tatttattttccaatcggaggcattgagtcggg

SEQ ID NO: 162011 - DNA, 33 bp, Homo sapien
tgagctcctggggacacattcatcttgctacca

SEQ ID NO: 162012 - DNA, 33 bp, Homo sapien
tgagctcctggggacatattcatcttgctacca

SEQ ID NO: 162013 - DNA, 33 bp, Homo sapien
gtggttgagagaacaccggaatcttaatgtctt

SEQ ID NO: 162014 - DNA, 33 bp, Homo sapien
gtggttgagagaacactggaatcttaatgtctt

SEQ ID NO: 162015 - DNA, 33 bp, Homo sapien
agctgaggcttgacaaggaattattacaaaatc

SEQ ID NO: 162016 - DNA, 33 bp, Homo sapien
agctgaggcttgacaatgaattattacaaaatc

SEQ ID NO: 162017 - DNA, 33 bp, Homo sapien
tgtacatcttttgccacccgaggaatgcaaaat

SEQ ID NO: 162018 - DNA, 33 bp, Homo sapien
tgtacatcttttgccatccgaggaatgcaaaat

SEQ ID NO: 162019 - DNA, 33 bp, Homo sapien
aagtagacaaaaaacactgcagttgcattttct

SEQ ID NO: 162020 - DNA, 33 bp, Homo sapien
aagtagacaaaaaacattgcagttgcattttct

SEQ ID NO: 162021 - DNA, 33 bp, Homo sapien
gttgcaaaggagaaaacggcgctgtggtgcaac

SEQ ID NO: 162022 - DNA, 33 bp, Homo sapien
gttgcaaaggagaaaagggcgctgtggtgcaac

SEQ ID NO: 162023 - DNA, 33 bp, Homo sapien
gattttttaagggcaaacttgggcattatttgc

SEQ ID NO: 162024 - DNA, 33 bp, Homo sapien
gattttttaagggcaaccttgggcattatttgc

SEQ ID NO: 162025 - DNA, 33 bp, Homo sapien
atagtttatcaggaaaacaaggctgaatatgtg

SEQ ID NO: 162026 - DNA, 33 bp, Homo sapien
atagtttatcaggaaagcaaggctgaatatgtg

SEQ ID NO: 162027 - DNA, 33 bp, Homo sapien
caagagggaatcatcacgttggctctttttaat

SEQ ID NO: 162028 - DNA, 33 bp, Homo sapien
caagagggaatcatcatgttggctctttttaat

SEQ ID NO: 162029 - DNA, 33 bp, Homo sapien
ttgatatttgctgccaagacccttgtttaccaa

SEQ ID NO: 162030 - DNA, 33 bp, Homo sapien
ttgatatttgctgccaggacccttgtttaccaa

SEQ ID NO: 162031 - DNA, 33 bp, Homo sapien
atagattaaaagaaataagtaagtttgtgtcct

SEQ ID NO: 162032 - DNA, 33 bp, Homo sapien
atagattaaaagaaatgagtaagtttgtgtcct

SEQ ID NO: 162033 - DNA, 33 bp, Homo sapien
ggacagcaaatatgcaagaacaatagtagaatc

SEQ ID NO: 162034 - DNA, 33 bp, Homo sapien
ggacagcaaatatgcaggaacaatagtagaatc

SEQ ID NO: 162035 - DNA, 33 bp, Homo sapien
atgttgctgttcccaaatgaaagaaatccattc

SEQ ID NO: 162036 - DNA, 33 bp, Homo sapien
atgttgctgttcccaagtgaaagaaatccattc

SEQ ID NO: 162037 - DNA, 33 bp, Homo sapien
ggcccatgattccaaaaaaccccatgatgagct

SEQ ID NO: 162038 - DNA, 33 bp, Homo sapien
ggcccatgattccaaacaaccccatgatgagct

SEQ ID NO: 162039 - DNA, 33 bp, Homo sapien
gactctgaaattgaaaatgtttggcttaaaaaa

SEQ ID NO: 162040 - DNA, 33 bp, Homo sapien
gactctgaaattgaaagtgtttggcttaaaaaa

SEQ ID NO: 162041 - DNA, 33 bp, Homo sapien
gaaattactgttagccaaagtatccataagcat

SEQ ID NO: 162042 - DNA, 33 bp, Homo sapien
gaaattactgttagccgaagtatccataagcat

SEQ ID NO: 162043 - DNA, 33 bp, Homo sapien
gctgtggacactgagaacaccctggcagtggtt

SEQ ID NO: 162044 - DNA, 33 bp, Homo sapien
gctgtggacactgagatcaccctggcagtggtt

SEQ ID NO: 162045 - DNA, 33 bp, Homo sapien
tagtcatcttcagacacatttccaattgtggta

SEQ ID NO: 162046 - DNA, 33 bp, Homo sapien
tagtcatcttcagacatatttccaattgtggta

SEQ ID NO: 162047 - DNA, 33 bp, Homo sapien
acatcctattgcccatgactaataacagctctt

SEQ ID NO: 162048 - DNA, 33 bp, Homo sapien
acatcctattgcccattactaataacagctctt

SEQ ID NO: 162049 - DNA, 33 bp, Homo sapien
agatagatcccgagcaaggtggccaggcatggc

SEQ ID NO: 162050 - DNA, 33 bp, Homo sapien
agatagatcccgagcacggtggccaggcatggc

SEQ ID NO: 162051 - DNA, 33 bp, Homo sapien
ttctctcatcctcataaaaatttctatctcctt

SEQ ID NO: 162052 - DNA, 33 bp, Homo sapien
ttctctcatcctcatacaaatttctatctcctt

SEQ ID NO: 162053 - DNA, 33 bp, Homo sapien
gtcagcagtgccatgaacccttgagcattcggc

SEQ ID NO: 162054 - DNA, 33 bp, Homo sapien
gtcagcagtgccatgagcccttgagcattcggc

SEQ ID NO: 162055 - DNA, 33 bp, Homo sapien
gggattaatataaaaacacgtccaagatagatt

SEQ ID NO: 162056 - DNA, 33 bp, Homo sapien
gggattaatataaaaagacgtccaagatagatt

SEQ ID NO: 162057 - DNA, 33 bp, Homo sapien
agttggaatttgaaccaaaacagttgggcttca

SEQ ID NO: 162058 - DNA, 33 bp, Homo sapien
agttggaatttgaaccgaaacagttgggcttca

SEQ ID NO: 162059 - DNA, 33 bp, Homo sapien
caataaatgggaggagcattatcgctaggctgt

SEQ ID NO: 162060 - DNA, 33 bp, Homo sapien
caataaatgggaggagtattatcgctaggctgt

SEQ ID NO: 162061 - DNA, 33 bp, Homo sapien
gaaggaatgaataagccccagggcggccctgtg

SEQ ID NO: 162062 - DNA, 33 bp, Homo sapien
gaaggaatgaataagctccagggcggccctgtg

SEQ ID NO: 162063 - DNA, 33 bp, Homo sapien
tacaatttttaaatgacgtgtgtgaaattatat

SEQ ID NO: 162064 - DNA, 33 bp, Homo sapien
tacaatttttaaatgatgtgtgtgaaattatat

SEQ ID NO: 162065 - DNA, 33 bp, Homo sapien
ttaccatcagaagggacgtaatgagttctccac

SEQ ID NO: 162066 - DNA, 33 bp, Homo sapien
ttaccatcagaagggatgtaatgagttctccac

SEQ ID NO: 162067 - DNA, 33 bp, Homo sapien
gagtagctgagtcagacagttaacctgaagctg

SEQ ID NO: 162068 - DNA, 33 bp, Homo sapien
gagtagctgagtcagagagttaacctgaagctg

SEQ ID NO: 162069 - DNA, 33 bp, Homo sapien
actaggtgtgactaacaataatatgattacatg

SEQ ID NO: 162070 - DNA, 33 bp, Homo sapien
actaggtgtgactaactataatatgattacatg

SEQ ID NO: 162071 - DNA, 33 bp, Homo sapien
gtagacctggccttgacattgctggttcattta

SEQ ID NO: 162072 - DNA, 33 bp, Homo sapien
gtagacctggccttgatattgctggttcattta

SEQ ID NO: 162073 - DNA, 33 bp, Homo sapien
cattcccagatcataggccaaacaaattctgcc

SEQ ID NO: 162074 - DNA, 33 bp, Homo sapien
cattcccagatcatagtccaaacaaattctgcc

SEQ ID NO: 162075 - DNA, 33 bp, Homo sapien
attaccgtaagcctccaccaactcatgttataa

SEQ ID NO: 162076 - DNA, 33 bp, Homo sapien
attaccgtaagcctccgccaactcatgttataa

SEQ ID NO: 162077 - DNA, 33 bp, Homo sapien
tgagtaatgggatctgcaattcactggggaagt

SEQ ID NO: 162078 - DNA, 33 bp, Homo sapien
tgagtaatgggatctgtaattcactggggaagt

SEQ ID NO: 162079 - DNA, 33 bp, Homo sapien
acaacatattttcacaatagggtgctatgaacc

SEQ ID NO: 162080 - DNA, 33 bp, Homo sapien
acaacatattttcacagtagggtgctatgaacc

SEQ ID NO: 162081 - DNA, 33 bp, Homo sapien
attagctactgacgtactaccttatttcatgaa

SEQ ID NO: 162082 - DNA, 33 bp, Homo sapien
attagctactgacgtattaccttatttcatgaa

SEQ ID NO: 162083 - DNA, 33 bp, Homo sapien
atttagaggaaagatgaaatgctaagaataggt

SEQ ID NO: 162084 - DNA, 33 bp, Homo sapien
atttagaggaaagatggaatgctaagaataggt

SEQ ID NO: 162085 - DNA, 33 bp, Homo sapien
ccatccacttaatgaacgtactgtgccaaatgc

SEQ ID NO: 162086 - DNA, 33 bp, Homo sapien
ccatccacttaatgaatgtactgtgccaaatgc

SEQ ID NO: 162087 - DNA, 33 bp, Homo sapien
aagctctgtggcaccacggactggttgtatgtc

SEQ ID NO: 162088 - DNA, 33 bp, Homo sapien
aagctctgtggcaccatggactggttgtatgtc

SEQ ID NO: 162089 - DNA, 33 bp, Homo sapien
atcattgttgcctcataaatagctagcattttt

SEQ ID NO: 162090 - DNA, 33 bp, Homo sapien
atcattgttgcctcatgaatagctagcattttt

SEQ ID NO: 162091 - DNA, 33 bp, Homo sapien
agcaaaatcttttcacaaatgagttcacttcag

SEQ ID NO: 162092 - DNA, 33 bp, Homo sapien
agcaaaatcttttcacgaatgagttcacttcag

SEQ ID NO: 162093 - DNA, 33 bp, Homo sapien
cagaacatggcattcccctggccacctgagttg

SEQ ID NO: 162094 - DNA, 33 bp, Homo sapien
cagaacatggcattccgctggccacctgagttg

SEQ ID NO: 162095 - DNA, 33 bp, Homo sapien
ggacgtggtgctgagacagctttgaccttatgg

SEQ ID NO: 162096 - DNA, 33 bp, Homo sapien
ggacgtggtgctgagatagctttgaccttatgg

SEQ ID NO: 162097 - DNA, 33 bp, Homo sapien
gaggcagatacaagacacaataagcatttcaaa

SEQ ID NO: 162098 - DNA, 33 bp, Homo sapien
gaggcagatacaagacgcaataagcatttcaaa

SEQ ID NO: 162099 - DNA, 33 bp, Homo sapien
cacagaacaccctgagagcattttgagtgggtc

SEQ ID NO: 162100 - DNA, 33 bp, Homo sapien
cacagaacaccctgagtgcattttgagtgggtc

SEQ ID NO: 162101 - DNA, 33 bp, Homo sapien
cagaccacctttaaaacgtctgcaaacaacctc

SEQ ID NO: 162102 - DNA, 33 bp, Homo sapien
cagaccacctttaaaatgtctgcaaacaacctc

SEQ ID NO: 162103 - DNA, 33 bp, Homo sapien
gaaaattaaaaacttaacagtgatcccactacc

SEQ ID NO: 162104 - DNA, 33 bp, Homo sapien
gaaaattaaaaacttaccagtgatcccactacc

SEQ ID NO: 162105 - DNA, 33 bp, Homo sapien
accctaagaaatagccagaataaaagagcagtg

SEQ ID NO: 162106 - DNA, 33 bp, Homo sapien
accctaagaaatagccggaataaaagagcagtg

SEQ ID NO: 162107 - DNA, 33 bp, Homo sapien
caagtgttgaaaaagcggccatcagcctgagtc

SEQ ID NO: 162108 - DNA, 33 bp, Homo sapien
caagtgttgaaaaagctgccatcagcctgagtc

SEQ ID NO: 162109 - DNA, 33 bp, Homo sapien
aaaaagtgtatgtctcacgcacgtgacaatttg

SEQ ID NO: 162110 - DNA, 33 bp, Homo sapien
aaaaagtgtatgtctcgcgcacgtgacaatttg

SEQ ID NO: 162111 - DNA, 33 bp, Homo sapien
ggctaaagtttgtgcacagctaactctgggcca

SEQ ID NO: 162112 - DNA, 33 bp, Homo sapien
ggctaaagtttgtgcagagctaactctgggcca

SEQ ID NO: 162113 - DNA, 33 bp, Homo sapien
aaagagtaacacctgccatttctagaatgtttt

SEQ ID NO: 162114 - DNA, 33 bp, Homo sapien
aaagagtaacacctgcgatttctagaatgtttt

SEQ ID NO: 162115 - DNA, 33 bp, Homo sapien
gaaactggtcacatcacagcaaattgtagaact

SEQ ID NO: 162116 - DNA, 33 bp, Homo sapien
gaaactggtcacatcatagcaaattgtagaact

SEQ ID NO: 162117 - DNA, 33 bp, Homo sapien
ccagattcaatccgcacggcttattttacacaa

SEQ ID NO: 162118 - DNA, 33 bp, Homo sapien
ccagattcaatccgcatggcttattttacacaa

SEQ ID NO: 162119 - DNA, 33 bp, Homo sapien
aagggagagacacatgcagttacttccagatcc

SEQ ID NO: 162120 - DNA, 33 bp, Homo sapien
aagggagagacacatgtagttacttccagatcc

SEQ ID NO: 162121 - DNA, 33 bp, Homo sapien
tccatggagaaggttcgaattgattcagtagaa

SEQ ID NO: 162122 - DNA, 33 bp, Homo sapien
tccatggagaaggttctaattgattcagtagaa

SEQ ID NO: 162123 - DNA, 33 bp, Homo sapien
ctggaggacctcaagacggagcaaatttgtccc

SEQ ID NO: 162124 - DNA, 33 bp, Homo sapien
ctggaggacctcaagatggagcaaatttgtccc

SEQ ID NO: 162125 - DNA, 33 bp, Homo sapien
cttatctgtaaaaaggaatatgaacagtaagta

SEQ ID NO: 162126 - DNA, 33 bp, Homo sapien
cttatctgtaaaaagggatatgaacagtaagta

SEQ ID NO: 162127 - DNA, 33 bp, Homo sapien
ctcaattctggcttgacgtcaatgacctttagt

SEQ ID NO: 162128 - DNA, 33 bp, Homo sapien
ctcaattctggcttgatgtcaatgacctttagt

SEQ ID NO: 162129 - DNA, 33 bp, Homo sapien
tgctgtaggatttttacgtgaaggttgggacga

SEQ ID NO: 162130 - DNA, 33 bp, Homo sapien
tgctgtaggatttttatgtgaaggttgggacga

SEQ ID NO: 162131 - DNA, 33 bp, Homo sapien
tatttcaaaaatcagaaaatttactgaggtgct

SEQ ID NO: 162132 - DNA, 33 bp, Homo sapien
tatttcaaaaatcagataatttactgaggtgct

SEQ ID NO: 162133 - DNA, 33 bp, Homo sapien
tctcctagggaaatccaattcatccatctgtct

SEQ ID NO: 162134 - DNA, 33 bp, Homo sapien
tctcctagggaaatccgattcatccatctgtct

SEQ ID NO: 162135 - DNA, 33 bp, Homo sapien
gctgcaaggtattgcaccattcctcaattgctg

SEQ ID NO: 162136 - DNA, 33 bp, Homo sapien
gctgcaaggtattgcagcattcctcaattgctg

SEQ ID NO: 162137 - DNA, 33 bp, Homo sapien
cttgaaatgttcacaacagactgataaattgta

SEQ ID NO: 162138 - DNA, 33 bp, Homo sapien
cttgaaatgttcacaatagactgataaattgta

SEQ ID NO: 162139 - DNA, 33 bp, Homo sapien
tgaagatttgtggatcaccttcagggcctcatg

SEQ ID NO: 162140 - DNA, 33 bp, Homo sapien
tgaagatttgtggatcgccttcagggcctcatg

SEQ ID NO: 162141 - DNA, 33 bp, Homo sapien
gtaaatccagggcctaccatatttactgccttc

SEQ ID NO: 162142 - DNA, 33 bp, Homo sapien
gtaaatccagggcctagcatatttactgccttc

SEQ ID NO: 162143 - DNA, 33 bp, Homo sapien
tgtagcatcctctgaaacacatgattagggttc

SEQ ID NO: 162144 - DNA, 33 bp, Homo sapien
tgtagcatcctctgaagcacatgattagggttc

SEQ ID NO: 162145 - DNA, 33 bp, Homo sapien
cccacctgtaacttcactcagtgtaagcaactc

SEQ ID NO: 162146 - DNA, 33 bp, Homo sapien
cccacctgtaacttcattcagtgtaagcaactc

SEQ ID NO: 162147 - DNA, 33 bp, Homo sapien
ggagaagaaagcagaaaggaagtgtgtctgtgg

SEQ ID NO: 162148 - DNA, 33 bp, Homo sapien
ggagaagaaagcagaacggaagtgtgtctgtgg

SEQ ID NO: 162149 - DNA, 33 bp, Homo sapien
aagtgtgtctgtggtacattttcaaaatgctgc

SEQ ID NO: 162150 - DNA, 33 bp, Homo sapien
aagtgtgtctgtggtatattttcaaaatgctgc

SEQ ID NO: 162151 - DNA, 33 bp, Homo sapien
tttgtccagcttttacggctgaatgcttggtga

SEQ ID NO: 162152 - DNA, 33 bp, Homo sapien
tttgtccagcttttactgctgaatgcttggtga

SEQ ID NO: 162153 - DNA, 33 bp, Homo sapien
gtaaaagctggacaaaggaggacaatagaattc

SEQ ID NO: 162154 - DNA, 33 bp, Homo sapien
gtaaaagctggacaaatgaggacaatagaattc

SEQ ID NO: 162155 - DNA, 33 bp, Homo sapien
gacatgaacatcatacagaactagtacagttac

SEQ ID NO: 162156 - DNA, 33 bp, Homo sapien
gacatgaacatcatacggaactagtacagttac

SEQ ID NO: 162157 - DNA, 33 bp, Homo sapien
tggtagcttggcttccaacaaacatgttccagt

SEQ ID NO: 162158 - DNA, 33 bp, Homo sapien
tggtagcttggcttccgacaaacatgttccagt

SEQ ID NO: 162159 - DNA, 33 bp, Homo sapien; identical to SEQ ID NO: 162157

SEQ ID NO: 162160 - DNA, 33 bp, Homo sapien; identical to SEQ ID NO: 162158

SEQ ID NO: 162161 - DNA, 33 bp, Homo sapien; identical to SEQ ID NO: 162157

SEQ ID NO: 162162 - DNA, 33 bp, Homo sapien; identical to SEQ ID NO: 162158

SEQ ID NO: 162163 - DNA, 33 bp, Homo sapien
gcatggaggtttcatacacaccacttacagtaa

SEQ ID NO: 162164 - DNA, 33 bp, Homo sapien
gcatggaggtttcatatacaccacttacagtaa

SEQ ID NO: 162165 - DNA, 33 bp, Homo sapien
ggtatagttcctggtacagagctattagtgttt

SEQ ID NO: 162166 - DNA, 33 bp, Homo sapien
ggtatagttcctggtatagagctattagtgttt

SEQ ID NO: 162167 - DNA, 33 bp, Homo sapien
tcgctctgccacaaggaaaagttaagccgaaag

SEQ ID NO: 162168 - DNA, 33 bp, Homo sapien
tcgctctgccacaagggaaagttaagccgaaag

SEQ ID NO: 162169 - DNA, 33 bp, Homo sapien
tagaattattcctgtgaagcatttttaaaaccc

SEQ ID NO: 162170 - DNA, 33 bp, Homo sapien
tagaattattcctgtggagcatttttaaaaccc

SEQ ID NO: 162171 - DNA, 33 bp, Homo sapien
gaacattctcactcagaagcctattgttactgc

SEQ ID NO: 162172 - DNA, 33 bp, Homo sapien
gaacattctcactcaggagcctattgttactgc

SEQ ID NO: 162173 - DNA, 33 bp, Homo sapien
ttcattaaataaatgacgctctgcccatacaag

SEQ ID NO: 162174 - DNA, 33 bp, Homo sapien
ttcattaaataaatgatgctctgcccatacaag

SEQ ID NO: 162175 - DNA, 33 bp, Homo sapien
agaacatctaaaattaagaaggtagacaagatg

SEQ ID NO: 162176 - DNA, 33 bp, Homo sapien
agaacatctaaaattaggaaggtagacaagatg

SEQ ID NO: 162177 - DNA, 33 bp, Homo sapien
tggaccagatggattcacagcaaaattctacca

SEQ ID NO: 162178 - DNA, 33 bp, Homo sapien
tggaccagatggattcgcagcaaaattctacca

SEQ ID NO: 162179 - DNA, 33 bp, Homo sapien
tgtgcatcttattttacgtcagctatacctcag

SEQ ID NO: 162180 - DNA, 33 bp, Homo sapien
tgtgcatcttattttatgtcagctatacctcag

SEQ ID NO: 162181 - DNA, 33 bp, Homo sapien
tttttactctcaaaggaaagtctaggcacatgc

SEQ ID NO: 162182 - DNA, 33 bp, Homo sapien
tttttactctcaaagggaagtctaggcacatgc

SEQ ID NO: 162183 - DNA, 33 bp, Homo sapien
agtgaagctcatacaactaactgtgatggtgga

SEQ ID NO: 162184 - DNA, 33 bp, Homo sapien
agtgaagctcatacaattaactgtgatggtgga

SEQ ID NO: 162185 - DNA, 33 bp, Homo sapien
ctggccctgattaacgacctcctatattcatgc

SEQ ID NO: 162186 - DNA, 33 bp, Homo sapien
ctggccctgattaacggcctcctatattcatgc

SEQ ID NO: 162187 - DNA, 33 bp, Homo sapien
taacatgcacacaaaaatatcaacgaacattca

SEQ ID NO: 162188 - DNA, 33 bp, Homo sapien
taacatgcacacaaaagtatcaacgaacattca

SEQ ID NO: 162189 - DNA, 33 bp, Homo sapien
tgcttttcaagcggtacgcagtcagagattaat

SEQ ID NO: 162190 - DNA, 33 bp, Homo sapien
tgcttttcaagcggtatgcagtcagagattaat

SEQ ID NO: 162191 - DNA, 33 bp, Homo sapien
ttgtctttgtctgtgacctgaatgactgtgaag

SEQ ID NO: 162192 - DNA, 33 bp, Homo sapien
ttgtctttgtctgtgatctgaatgactgtgaag

SEQ ID NO: 162193 - DNA, 33 bp, Homo sapien
gacccctgaagaatgaagatgacatatctctag

SEQ ID NO: 162194 - DNA, 33 bp, Homo sapien
gacccctgaagaatgaggatgacatatctctag

SEQ ID NO: 162195 - DNA, 33 bp, Homo sapien
cacattaggagcaaaaagccctctcctgcctct

SEQ ID NO: 162196 - DNA, 33 bp, Homo sapien
cacattaggagcaaaacgccctctcctgcctct

SEQ ID NO: 162197 - DNA, 33 bp, Homo sapien
aatattttaggcttcaaggcaatatgaccattt

SEQ ID NO: 162198 - DNA, 33 bp, Homo sapien
aatattttaggcttcatggcaatatgaccattt

SEQ ID NO: 162199 - DNA, 33 bp, Homo sapien
aaaatgggtgatatgacaaatgaaataggagtc

SEQ ID NO: 162200 - DNA, 33 bp, Homo sapien
aaaatgggtgatatgataaatgaaataggagtc

SEQ ID NO: 162201 - DNA, 33 bp, Homo sapien
aaggcatgacaggataagattggccacgtctgt

SEQ ID NO: 162202 - DNA, 33 bp, Homo sapien
aaggcatgacaggataggattggccacgtctgt

SEQ ID NO: 162203 - DNA, 33 bp, Homo sapien
gtatagataatcttccaaggattgtttagtgaa

SEQ ID NO: 162204 - DNA, 33 bp, Homo sapien
gtatagataatcttcccaggattgtttagtgaa

SEQ ID NO: 162205 - DNA, 33 bp, Homo sapien
gctagtggtgtagattaaaatgcctcaaagaag

SEQ ID NO: 162206 - DNA, 33 bp, Homo sapien
gctagtggtgtagattgaaatgcctcaaagaag

SEQ ID NO: 162207 - DNA, 33 bp, Homo sapien
ctagcgccaggtacacagaagaggcggcaaagc

SEQ ID NO: 162208 - DNA, 33 bp, Homo sapien
ctagcgccaggtacacggaagaggcggcaaagc

SEQ ID NO: 162209 - DNA, 33 bp, Homo sapien
tggggagactcccctacgtggactgattatgat

SEQ ID NO: 162210 - DNA, 33 bp, Homo sapien
tggggagactcccctatgtggactgattatgat

SEQ ID NO: 162211 - DNA, 33 bp, Homo sapien
caagtgtagtaaattacgcaatagtgttatggt

SEQ ID NO: 162212 - DNA, 33 bp, Homo sapien
caagtgtagtaaattatgcaatagtgttatggt

SEQ ID NO: 162213 - DNA, 33 bp, Homo sapien
gagacactgtgaaatacggaaatgggaagagag

SEQ ID NO: 162214 - DNA, 33 bp, Homo sapien
gagacactgtgaaatatggaaatgggaagagag

SEQ ID NO: 162215 - DNA, 33 bp, Homo sapien
aaggaacccatgtctcactaatgtccagaaagc

SEQ ID NO: 162216 - DNA, 33 bp, Homo sapien
aaggaacccatgtctctctaatgtccagaaagc

SEQ ID NO: 162217 - DNA, 33 bp, Homo sapien
agagctttagttagaacgtcagttaggctgctg

SEQ ID NO: 162218 - DNA, 33 bp, Homo sapien
agagctttagttagaatgtcagttaggctgctg

SEQ ID NO: 162219 - DNA, 33 bp, Homo sapien
ccaagaagttttgagcaataaaaccagaagaat

SEQ ID NO: 162220 - DNA, 33 bp, Homo sapien
ccaagaagttttgagcgataaaaccagaagaat

SEQ ID NO: 162221 - DNA, 33 bp, Homo sapien
tgaatgagacagatgacgaccaacctagcactc

SEQ ID NO: 162222 - DNA, 33 bp, Homo sapien
tgaatgagacagatgaggaccaacctagcactc

SEQ ID NO: 162223 - DNA, 33 bp, Homo sapien
attgtggcgatagttgcatagcattgtgaatat

SEQ ID NO: 162224 - DNA, 33 bp, Homo sapien
attgtggcgatagttgtatagcattgtgaatat

SEQ ID NO: 162225 - DNA, 33 bp, Homo sapien
accagaagttccgaggaatgaatgcccctagaa

SEQ ID NO: 162226 - DNA, 33 bp, Homo sapien
accagaagttccgagggatgaatgcccctagaa

SEQ ID NO: 162227 - DNA, 33 bp, Homo sapien
agaattgctgagtcaaagggcaagtgaattgtt

SEQ ID NO: 162228 - DNA, 33 bp, Homo sapien
agaattgctgagtcaacgggcaagtgaattgtt

SEQ ID NO: 162229 - DNA, 33 bp, Homo sapien
tgctactcttgagggacattttaattctgtctg

SEQ ID NO: 162230 - DNA, 33 bp, Homo sapien
tgctactcttgagggatattttaattctgtctg

SEQ ID NO: 162231 - DNA, 33 bp, Homo sapien
agctgcccactgtgaccgggaattcatctatta

SEQ ID NO: 162232 - DNA, 33 bp, Homo sapien
agctgcccactgtgactgggaattcatctatta

SEQ ID NO: 162233 - DNA, 33 bp, Homo sapien
gcttttgaaagtaacacaggacatattcttaac

SEQ ID NO: 162234 - DNA, 33 bp, Homo sapien
gcttttgaaagtaacataggacatattcttaac

SEQ ID NO: 162235 - DNA, 33 bp, Homo sapien
aatttatgtttatcaacagactataaagctatg

SEQ ID NO: 162236 - DNA, 33 bp, Homo sapien
aatttatgtttatcaagagactataaagctatg

SEQ ID NO: 162237 - DNA, 33 bp, Homo sapien
tcattcaggataatgtaacagcggattaatact

SEQ ID NO: 162238 - DNA, 33 bp, Homo sapien
tcattcaggataatgttacagcggattaatact

SEQ ID NO: 162239 - DNA, 33 bp, Homo sapien
atagcttggaggttacaaagccaggttgaagaa

SEQ ID NO: 162240 - DNA, 33 bp, Homo sapien
atagcttggaggttacgaagccaggttgaagaa

SEQ ID NO: 162241 - DNA, 33 bp, Homo sapien
acttaggttgaacacactgggcttcttcttacc

SEQ ID NO: 162242 - DNA, 33 bp, Homo sapien
acttaggttgaacacattgggcttcttcttacc

SEQ ID NO: 162243 - DNA, 33 bp, Homo sapien
gtttgggaagagtagcaattaaaagcaggggtt

SEQ ID NO: 162244 - DNA, 33 bp, Homo sapien
gtttgggaagagtagcgattaaaagcaggggtt

SEQ ID NO: 162245 - DNA, 33 bp, Homo sapien
gtggggagaggtagtacgaaacgttgagaggcc

SEQ ID NO: 162246 - DNA, 33 bp, Homo sapien
gtggggagaggtagtatgaaacgttgagaggcc

SEQ ID NO: 162247 - DNA, 33 bp, Homo sapien
gggactaagtgagttacctttttgtttccagta

SEQ ID NO: 162248 - DNA, 33 bp, Homo sapien
gggactaagtgagttatctttttgtttccagta

SEQ ID NO: 162249 - DNA, 33 bp, Homo sapien
aatagaatataatctacggcttgattgacactc

SEQ ID NO: 162250 - DNA, 33 bp, Homo sapien
aatagaatataatctatggcttgattgacactc

SEQ ID NO: 162251 - DNA, 33 bp, Homo sapien
cctatattggtgaaacaaaagctgtccctgaaa

SEQ ID NO: 162252 - DNA, 33 bp, Homo sapien
cctatattggtgaaacgaaagctgtccctgaaa

SEQ ID NO: 162253 - DNA, 33 bp, Homo sapien
aagagccgtctgtaagccaaccctctctcctgc

SEQ ID NO: 162254 - DNA, 33 bp, Homo sapien
aagagccgtctgtaagtcaaccctctctcctgc

SEQ ID NO: 162255 - DNA, 33 bp, Homo sapien
agacatccaatccttaggaaagcctttagacca

SEQ ID NO: 162256 - DNA, 33 bp, Homo sapien
agacatccaatccttatgaaagcctttagacca

SEQ ID NO: 162257 - DNA, 33 bp, Homo sapien
tttttcctgttcattactaaaaagtttggcaca

SEQ ID NO: 162258 - DNA, 33 bp, Homo sapien
tttttcctgttcattattaaaaagtttggcaca

SEQ ID NO: 162259 - DNA, 33 bp, Homo sapien
ttgctctagacacttacgtgagtacagccttat

SEQ ID NO: 162260 - DNA, 33 bp, Homo sapien
ttgctctagacacttatgtgagtacagccttat

SEQ ID NO: 162261 - DNA, 33 bp, Homo sapien
tgctgggctagagaagaaagtatgaaactgaca

SEQ ID NO: 162262 - DNA, 33 bp, Homo sapien
tgctgggctagagaaggaagtatgaaactgaca

SEQ ID NO: 162263 - DNA, 33 bp, Homo sapien
gcaaaggcagagccagaattttaactcaatcag

SEQ ID NO: 162264 - DNA, 33 bp, Homo sapien
gcaaaggcagagccaggattttaactcaatcag

SEQ ID NO: 162265 - DNA, 33 bp, Homo sapien
cttctgtttactaggagtaaggatggcatctac

SEQ ID NO: 162266 - DNA, 33 bp, Homo sapien
cttctgtttactaggattaaggatggcatctac

SEQ ID NO: 162267 - DNA, 33 bp, Homo sapien
atctcatttgatcctcacagtaacctcacaata

SEQ ID NO: 162268 - DNA, 33 bp, Homo sapien
atctcatttgatcctcgcagtaacctcacaata

SEQ ID NO: 162269 - DNA, 33 bp, Homo sapien
ggtgttcagaaagccacatgacccagttcagag

SEQ ID NO: 162270 - DNA, 33 bp, Homo sapien
ggtgttcagaaagccagatgacccagttcagag

SEQ ID NO: 162271 - DNA, 33 bp, Homo sapien
ctcctttgcaagagggaatacacagctctatgg

SEQ ID NO: 162272 - DNA, 33 bp, Homo sapien
ctcctttgcaagaggggatacacagctctatgg

SEQ ID NO: 162273 - DNA, 33 bp, Homo sapien
tcctgaacctaaaaaacctttgacatgctgctg

SEQ ID NO: 162274 - DNA, 33 bp, Homo sapien
tcctgaacctaaaaaatctttgacatgctgctg

SEQ ID NO: 162275 - DNA, 33 bp, Homo sapien
cacacaaaagttcttaaccaaatgttcacagca

SEQ ID NO: 162276 - DNA, 33 bp, Homo sapien
cacacaaaagttcttacccaaatgttcacagca

SEQ ID NO: 162277 - DNA, 33 bp, Homo sapien
tatgatctctggtatacctacaaaacaaacttt

SEQ ID NO: 162278 - DNA, 33 bp, Homo sapien
tatgatctctggtatagctacaaaacaaacttt

SEQ ID NO: 162279 - DNA, 33 bp, Homo sapien
aatttaaaagctgaaaaagtcttggatattact

SEQ ID NO: 162280 - DNA, 33 bp, Homo sapien
aatttaaaagctgaaagagtcttggatattact

SEQ ID NO: 162281 - DNA, 33 bp, Homo sapien
acaccagtcaccaaaaagatcgtgggtgtgatg

SEQ ID NO: 162282 - DNA, 33 bp, Homo sapien
acaccagtcaccaaaacgatcgtgggtgtgatg

SEQ ID NO: 162283 - DNA, 33 bp, Homo sapien
ttatttatgtgaaatgccaatcagtagtagcat

SEQ ID NO: 162284 - DNA, 33 bp, Homo sapien
ttatttatgtgaaatgtcaatcagtagtagcat

SEQ ID NO: 162285 - DNA, 33 bp, Homo sapien
ttcatttaattttaacagaacagcaatttttgt

SEQ ID NO: 162286 - DNA, 33 bp, Homo sapien
ttcatttaattttaacggaacagcaatttttgt

SEQ ID NO: 162287 - DNA, 33 bp, Homo sapien
catttcatgagtggtacgatgctttgaagttat

SEQ ID NO: 162288 - DNA, 33 bp, Homo sapien
catttcatgagtggtatgatgctttgaagttat

SEQ ID NO: 162289 - DNA, 33 bp, Homo sapien
gaggttgttgttaggaccctaatgagctatggg

SEQ ID NO: 162290 - DNA, 33 bp, Homo sapien
gaggttgttgttaggatcctaatgagctatggg

SEQ ID NO: 162291 - DNA, 33 bp, Homo sapien
gtggactggagggagacggaaaccagagtcctt

SEQ ID NO: 162292 - DNA, 33 bp, Homo sapien
gtggactggagggagatggaaaccagagtcctt

SEQ ID NO: 162293 - DNA, 33 bp, Homo sapien
caccaatctgctcttcacttctaatctgttctt

SEQ ID NO: 162294 - DNA, 33 bp, Homo sapien
caccaatctgctcttcgcttctaatctgttctt

SEQ ID NO: 162295 - DNA, 33 bp, Homo sapien
tttctctaaagtttgacggatccaatttcacat

SEQ ID NO: 162296 - DNA, 33 bp, Homo sapien
tttctctaaagtttgatggatccaatttcacat

SEQ ID NO: 162297 - DNA, 33 bp, Homo sapien
ttctatgtcaaaaatcagagaagtcctacagtg

SEQ ID NO: 162298 - DNA, 33 bp, Homo sapien
ttctatgtcaaaaatcggagaagtcctacagtg

SEQ ID NO: 162299 - DNA, 33 bp, Homo sapien
gttgacagaagaggaaatcagaaaagactctat

SEQ ID NO: 162300 - DNA, 33 bp, Homo sapien
gttgacagaagaggaactcagaaaagactctat

SEQ ID NO: 162301 - DNA, 33 bp, Homo sapien
gggaacctgggctgaaatattctctataagaga

SEQ ID NO: 162302 - DNA, 33 bp, Homo sapien
gggaacctgggctgaattattctctataagaga

SEQ ID NO: 162303 - DNA, 33 bp, Homo sapien
cctctttgacccacacaaggaggattgacagag

SEQ ID NO: 162304 - DNA, 33 bp, Homo sapien
cctctttgacccacactaggaggattgacagag

SEQ ID NO: 162305 - DNA, 33 bp, Homo sapien
gattagcaagtagggaggccagttcaggagtca

SEQ ID NO: 162306 - DNA, 33 bp, Homo sapien
gattagcaagtagggatgccagttcaggagtca

SEQ ID NO: 162307 - DNA, 33 bp, Homo sapien
ctgattacattgtcgcaccaattttgtaggtca

SEQ ID NO: 162308 - DNA, 33 bp, Homo sapien
ctgattacattgtcgcgccaattttgtaggtca

SEQ ID NO: 162309 - DNA, 33 bp, Homo sapien
agcaattcaacaatgacgtctaaaagtattacc

SEQ ID NO: 162310 - DNA, 33 bp, Homo sapien
agcaattcaacaatgatgtctaaaagtattacc

SEQ ID NO: 162311 - DNA, 33 bp, Homo sapien
catatttattaagtacagactatgtgccagcca

SEQ ID NO: 162312 - DNA, 33 bp, Homo sapien
catatttattaagtacggactatgtgccagcca

SEQ ID NO: 162313 - DNA, 33 bp, Homo sapien
ctccaaatggctctcaaggcataatttgataag

SEQ ID NO: 162314 - DNA, 33 bp, Homo sapien
ctccaaatggctctcagggcataatttgataag

SEQ ID NO: 162315 - DNA, 33 bp, Homo sapien
ttagcctgtgggactcgcgtgagaacacagata

SEQ ID NO: 162316 - DNA, 33 bp, Homo sapien
ttagcctgtgggactctcgtgagaacacagata

SEQ ID NO: 162317 - DNA, 33 bp, Homo sapien
tgcaattctaggatcacacatcccaggtgagga

SEQ ID NO: 162318 - DNA, 33 bp, Homo sapien
tgcaattctaggatcagacatcccaggtgagga

SEQ ID NO: 162319 - DNA, 33 bp, Homo sapien
ctggccagttaaaaaaactcatttgcataacaa

SEQ ID NO: 162320 - DNA, 33 bp, Homo sapien
ctggccagttaaaaaacctcatttgcataacaa

SEQ ID NO: 162321 - DNA, 33 bp, Homo sapien
cctgtgaactgagcccaattccttgatactgtc

SEQ ID NO: 162322 - DNA, 33 bp, Homo sapien
cctgtgaactgagcccgattccttgatactgtc

SEQ ID NO: 162323 - DNA, 33 bp, Homo sapien
aggagaggggaaagccactggtctcaaccaacc

SEQ ID NO: 162324 - DNA, 33 bp, Homo sapien
aggagaggggaaagccgctggtctcaaccaacc

SEQ ID NO: 162325 - DNA, 33 bp, Homo sapien
aggattttgcttgaaaaatggaggaaagcccag

SEQ ID NO: 162326 - DNA, 33 bp, Homo sapien
aggattttgcttgaaacatggaggaaagcccag

SEQ ID NO: 162327 - DNA, 33 bp, Homo sapien
tgaggagttagtgggtcaaagtaggtcagtggg

SEQ ID NO: 162328 - DNA, 33 bp, Homo sapien
tgaggagttagtgggtgaaagtaggtcagtggg

SEQ ID NO: 162329 - DNA, 33 bp, Homo sapien
actcgctgacgtttgccatgcttgtcctgagct

SEQ ID NO: 162330 - DNA, 33 bp, Homo sapien
actcgctgacgtttgctatgcttgtcctgagct

SEQ ID NO: 162331 - DNA, 33 bp, Homo sapien
tacagtagaaaatccacaccaaatggcaatggg

SEQ ID NO: 162332 - DNA, 33 bp, Homo sapien
tacagtagaaaatccagaccaaatggcaatggg

SEQ ID NO: 162333 - DNA, 33 bp, Homo sapien
caggccctggagaagcagctaacaatgtctggt

SEQ ID NO: 162334 - DNA, 33 bp, Homo sapien
caggccctggagaagcggctaacaatgtctggt

SEQ ID NO: 162335 - DNA, 33 bp, Homo sapien
cactcctcctcactaaaaaggaaacttcagttg

SEQ ID NO: 162336 - DNA, 33 bp, Homo sapien
cactcctcctcactaagaaggaaacttcagttg

SEQ ID NO: 162337 - DNA, 33 bp, Homo sapien
caacaaagagacaggcacaagttcaactatcaa

SEQ ID NO: 162338 - DNA, 33 bp, Homo sapien
caacaaagagacaggcgcaagttcaactatcaa

SEQ ID NO: 162339 - DNA, 33 bp, Homo sapien
ttgttgagtaagttggaaactgagatgaactgg

SEQ ID NO: 162340 - DNA, 33 bp, Homo sapien
ttgttgagtaagttgggaactgagatgaactgg

SEQ ID NO: 162341 - DNA, 33 bp, Homo sapien
cagtgatttattttaaagtatccagcccatcca

SEQ ID NO: 162342 - DNA, 33 bp, Homo sapien
cagtgatttattttaatgtatccagcccatcca

SEQ ID NO: 162343 - DNA, 33 bp, Homo sapien
cagccatgtcacagaacgtttactctgggcctt

SEQ ID NO: 162344 - DNA, 33 bp, Homo sapien
cagccatgtcacagaatgtttactctgggcctt

SEQ ID NO: 162345 - DNA, 33 bp, Homo sapien
ccacagcctctttacaacacctggatcagacct

SEQ ID NO: 162346 - DNA, 33 bp, Homo sapien
ccacagcctctttacatcacctggatcagacct

SEQ ID NO: 162347 - DNA, 33 bp, Homo sapien
accctaaagaatgagacgatattgaactcacag

SEQ ID NO: 162348 - DNA, 33 bp, Homo sapien
accctaaagaatgagatgatattgaactcacag

SEQ ID NO: 162349 - DNA, 33 bp, Homo sapien
acctcctgctgcaaggaccaattcctaactggc

SEQ ID NO: 162350 - DNA, 33 bp, Homo sapien
acctcctgctgcaaggcccaattcctaactggc

SEQ ID NO: 162351 - DNA, 33 bp, Homo sapien
ttctgatctgatcttacaacacccccaggacac

SEQ ID NO: 162352 - DNA, 33 bp, Homo sapien
ttctgatctgatcttataacacccccaggacac

SEQ ID NO: 162353 - DNA, 33 bp, Homo sapien
aaaggtaaataaagaacaagcaagttaagactg

SEQ ID NO: 162354 - DNA, 33 bp, Homo sapien
aaaggtaaataaagaagaagcaagttaagactg

SEQ ID NO: 162355 - DNA, 33 bp, Homo sapien
ctgttagatcagtcaaagctttcagtcttaact

SEQ ID NO: 162356 - DNA, 33 bp, Homo sapien
ctgttagatcagtcaaggctttcagtcttaact

SEQ ID NO: 162357 - DNA, 33 bp, Homo sapien
accaaagaaagttcctcaattataaagaaagaa

SEQ ID NO: 162358 - DNA, 33 bp, Homo sapien
accaaagaaagttcctgaattataaagaaagaa

SEQ ID NO: 162359 - DNA, 33 bp, Homo sapien
gctcgcagaaccctaacgcatgattaggcctgg

SEQ ID NO: 162360 - DNA, 33 bp, Homo sapien
gctcgcagaaccctaaggcatgattaggcctgg

SEQ ID NO: 162361 - DNA, 33 bp, Homo sapien
gcctgaccaagtaggcaattgatgtttgctaaa

SEQ ID NO: 162362 - DNA, 33 bp, Homo sapien
gcctgaccaagtaggcgattgatgtttgctaaa

SEQ ID NO: 162363 - DNA, 33 bp, Homo sapien
aacttgacttatccgagtccaagctatgcggga

SEQ ID NO: 162364 - DNA, 33 bp, Homo sapien
aacttgacttatccgattccaagctatgcggga

SEQ ID NO: 162365 - DNA, 33 bp, Homo sapien
cagacgtctgaaaagcgctacgcttggtgacaa

SEQ ID NO: 162366 - DNA, 33 bp, Homo sapien
cagacgtctgaaaagctctacgcttggtgacaa

SEQ ID NO: 162367 - DNA, 33 bp, Homo sapien
ggcgacaacgtttatgcaatgcaagctaaaaac

SEQ ID NO: 162368 - DNA, 33 bp, Homo sapien
ggcgacaacgtttatgtaatgcaagctaaaaac

SEQ ID NO: 162369 - DNA, 33 bp, Homo sapien
ttctgagtggagacgaagcaaagtcaagcagca

SEQ ID NO: 162370 - DNA, 33 bp, Homo sapien
ttctgagtggagacgacgcaaagtcaagcagca

SEQ ID NO: 162371 - DNA, 33 bp, Homo sapien
tgtgaagctaaactgacctttgggggacaaatg

SEQ ID NO: 162372 - DNA, 33 bp, Homo sapien
tgtgaagctaaactgatctttgggggacaaatg

SEQ ID NO: 162373 - DNA, 33 bp, Homo sapien
tagctcttctctactgcataatccgttatctgt

SEQ ID NO: 162374 - DNA, 33 bp, Homo sapien
tagctcttctctactggataatccgttatctgt

SEQ ID NO: 162375 - DNA, 33 bp, Homo sapien
gaaatctgacactggtcaatagtacatttattc

SEQ ID NO: 162376 - DNA, 33 bp, Homo sapien
gaaatctgacactggttaatagtacatttattc

SEQ ID NO: 162377 - DNA, 33 bp, Homo sapien
gtcttcagtatccctgaataacatagagaggta

SEQ ID NO: 162378 - DNA, 33 bp, Homo sapien
gtcttcagtatccctgtataacatagagaggta

SEQ ID NO: 162379 - DNA, 33 bp, Homo sapien
aggaggacctgacataaaaagatacctaaagta

SEQ ID NO: 162380 - DNA, 33 bp, Homo sapien
aggaggacctgacatataaagatacctaaagta

SEQ ID NO: 162381 - DNA, 33 bp, Homo sapien
gttcatttatgaccttaaaaaaaatcgtttaca

SEQ ID NO: 162382 - DNA, 33 bp, Homo sapien
gttcatttatgaccttgaaaaaaatcgtttaca

SEQ ID NO: 162383 - DNA, 33 bp, Homo sapien
atggaagatgctgggaagaaggggtgagaaatg

SEQ ID NO: 162384 - DNA, 33 bp, Homo sapien
atggaagatgctgggacgaaggggtgagaaatg

SEQ ID NO: 162385 - DNA, 33 bp, Homo sapien
gatgtaagagagtgacaccataaagaacaaata

SEQ ID NO: 162386 - DNA, 33 bp, Homo sapien
gatgtaagagagtgacgccataaagaacaaata

SEQ ID NO: 162387 - DNA, 33 bp, Homo sapien
actgatgatattttgacatattgctttctcaat

SEQ ID NO: 162388 - DNA, 33 bp, Homo sapien
actgatgatattttgatatattgctttctcaat

SEQ ID NO: 162389 - DNA, 33 bp, Homo sapien
gtgtctcatgcaatgaacaatctaggggtcact

SEQ ID NO: 162390 - DNA, 33 bp, Homo sapien
gtgtctcatgcaatgagcaatctaggggtcact

SEQ ID NO: 162391 - DNA, 33 bp, Homo sapien
ggtgtccaagagaagaacccttagcatccttag

SEQ ID NO: 162392 - DNA, 33 bp, Homo sapien
ggtgtccaagagaagagcccttagcatccttag

SEQ ID NO: 162393 - DNA, 33 bp, Homo sapien
aagggtgcattaacaaacaggtacagctttggg

SEQ ID NO: 162394 - DNA, 33 bp, Homo sapien
aagggtgcattaacaagcaggtacagctttggg

SEQ ID NO: 162395 - DNA, 33 bp, Homo sapien
tccagcctgtaggaaacggtctgccactattgc

SEQ ID NO: 162396 - DNA, 33 bp, Homo sapien
tccagcctgtaggaaagggtctgccactattgc

SEQ ID NO: 162397 - DNA, 33 bp, Homo sapien
caaattttggagttaacggcctccacaattatg

SEQ ID NO: 162398 - DNA, 33 bp, Homo sapien
caaattttggagttaatggcctccacaattatg

SEQ ID NO: 162399 - DNA, 33 bp, Homo sapien
ttgttagacgctaaccaggggaaagagtgcaga

SEQ ID NO: 162400 - DNA, 33 bp, Homo sapien
ttgttagacgctaaccgggggaaagagtgcaga

SEQ ID NO: 162401 - DNA, 33 bp, Homo sapien
atctgcactcttccctaaccaggtttcgcttct

SEQ ID NO: 162402 - DNA, 33 bp, Homo sapien
atctgcactcttccctgaccaggtttcgcttct

SEQ ID NO: 162403 - DNA, 33 bp, Homo sapien
tgaacatttttcagccagaaggtaacataaatt

SEQ ID NO: 162404 - DNA, 33 bp, Homo sapien
tgaacatttttcagccggaaggtaacataaatt

SEQ ID NO: 162405 - DNA, 33 bp, Homo sapien
gcttcctctcacctgcaccgtctgtctatggcc

SEQ ID NO: 162406 - DNA, 33 bp, Homo sapien
gcttcctctcacctgcgccgtctgtctatggcc

SEQ ID NO: 162407 - DNA, 33 bp, Homo sapien
ttatgctcaaaccttcaaaaacagaccagagct

SEQ ID NO: 162408 - DNA, 33 bp, Homo sapien
ttatgctcaaaccttcgaaaacagaccagagct

SEQ ID NO: 162409 - DNA, 33 bp, Homo sapien
attttcacattgtcgactcacttttttggtcac

SEQ ID NO: 162410 - DNA, 33 bp, Homo sapien
attttcacattgtcgattcacttttttggtcac

SEQ ID NO: 162411 - DNA, 33 bp, Homo sapien
tagtttacagaaataacgttaagaaattcgaag

SEQ ID NO: 162412 - DNA, 33 bp, Homo sapien
tagtttacagaaataatgttaagaaattcgaag

SEQ ID NO: 162413 - DNA, 33 bp, Homo sapien
tttgacatcagaactacggcctttgcataaggt

SEQ ID NO: 162414 - DNA, 33 bp, Homo sapien
tttgacatcagaactatggcctttgcataaggt

SEQ ID NO: 162415 - DNA, 33 bp, Homo sapien
aagacttagaggtagacgtgaggcctgtgcttc

SEQ ID NO: 162416 - DNA, 33 bp, Homo sapien
aagacttagaggtagatgtgaggcctgtgcttc

SEQ ID NO: 162417 - DNA, 33 bp, Homo sapien
atgggatagactattacaagtaggactgttttt

SEQ ID NO: 162418 - DNA, 33 bp, Homo sapien
atgggatagactattataagtaggactgttttt

SEQ ID NO: 162419 - DNA, 33 bp, Homo sapien
taccaatgaggcttacactttgcataaactctg

SEQ ID NO: 162420 - DNA, 33 bp, Homo sapien
taccaatgaggcttacgctttgcataaactctg

SEQ ID NO: 162421 - DNA, 33 bp, Homo sapien
tccagtctttccattacggtcaaatctacctct

SEQ ID NO: 162422 - DNA, 33 bp, Homo sapien
tccagtctttccattatggtcaaatctacctct

SEQ ID NO: 162423 - DNA, 33 bp, Homo sapien
cataaaacatttagtacgctgatagaacttctt

SEQ ID NO: 162424 - DNA, 33 bp, Homo sapien
cataaaacatttagtaggctgatagaacttctt

SEQ ID NO: 162425 - DNA, 33 bp, Homo sapien
tttgaagcaagtaaaccatgttttggactgttg

SEQ ID NO: 162426 - DNA, 33 bp, Homo sapien
tttgaagcaagtaaactatgttttggactgttg

SEQ ID NO: 162427 - DNA, 33 bp, Homo sapien
aattatcttcctcaaaataaatataaacatgtc

SEQ ID NO: 162428 - DNA, 33 bp, Homo sapien
aattatcttcctcaaagtaaatataaacatgtc

SEQ ID NO: 162429 - DNA, 33 bp, Homo sapien
ctatgccctgaggaaacacatctggatctgcac

SEQ ID NO: 162430 - DNA, 33 bp, Homo sapien
ctatgccctgaggaaatacatctggatctgcac

SEQ ID NO: 162431 - DNA, 33 bp, Homo sapien
ttttggcagagagaataaggaatccttgccttg

SEQ ID NO: 162432 - DNA, 33 bp, Homo sapien
ttttggcagagagaatgaggaatccttgccttg

SEQ ID NO: 162433 - DNA, 33 bp, Homo sapien
ttgacagtctttgccacgcttaaaaaaaatctt

SEQ ID NO: 162434 - DNA, 33 bp, Homo sapien
ttgacagtctttgccatgcttaaaaaaaatctt

SEQ ID NO: 162435 - DNA, 33 bp, Homo sapien
attagattacttgaaactgtatcccatttgatg

SEQ ID NO: 162436 - DNA, 33 bp, Homo sapien
attagattacttgaaattgtatcccatttgatg

SEQ ID NO: 162437 - DNA, 33 bp, Homo sapien
tcggcagcacatatacaaaaaaattagattaaa

SEQ ID NO: 162438 - DNA, 33 bp, Homo sapien
tcggcagcacatatacgaaaaaattagattaaa

SEQ ID NO: 162439 - DNA, 33 bp, Homo sapien
atacaaagagaaaactcagaaaatctgcagttg

SEQ ID NO: 162440 - DNA, 33 bp, Homo sapien
atacaaagagaaaacttagaaaatctgcagttg

SEQ ID NO: 162441 - DNA, 33 bp, Homo sapien
tttgttgaatctgtgccaaataggaagcctgta

SEQ ID NO: 162442 - DNA, 33 bp, Homo sapien
tttgttgaatctgtgctaaataggaagcctgta

SEQ ID NO: 162443 - DNA, 33 bp, Homo sapien
aattggacttggtcaacgattggatgtgaaggc

SEQ ID NO: 162444 - DNA, 33 bp, Homo sapien
aattggacttggtcaatgattggatgtgaaggc

SEQ ID NO: 162445 - DNA, 33 bp, Homo sapien
ctgtacaccaaacctacgtgagactcaatttac

SEQ ID NO: 162446 - DNA, 33 bp, Homo sapien
ctgtacaccaaacctatgtgagactcaatttac

SEQ ID NO: 162447 - DNA, 33 bp, Homo sapien
taaccatttttaggtgcataattcagtggcact

SEQ ID NO: 162448 - DNA, 33 bp, Homo sapien
taaccatttttaggtgtataattcagtggcact

SEQ ID NO: 162449 - DNA, 33 bp, Homo sapien
gcaacatttccactgacgtagcataaaaagcta

SEQ ID NO: 162450 - DNA, 33 bp, Homo sapien
gcaacatttccactgatgtagcataaaaagcta

SEQ ID NO: 162451 - DNA, 33 bp, Homo sapien
gacagggaacctggtagctggtggctctcactc

SEQ ID NO: 162452 - DNA, 33 bp, Homo sapien
gacagggaacctggtatctggtggctctcactc

SEQ ID NO: 162453 - DNA, 33 bp, Homo sapien
ttttccaccttgcctcactttgttttgcataat

SEQ ID NO: 162454 - DNA, 33 bp, Homo sapien
ttttccaccttgcctcgctttgttttgcataat

SEQ ID NO: 162455 - DNA, 33 bp, Homo sapien
agactgggtgaattaacgtcaagcagcttataa

SEQ ID NO: 162456 - DNA, 33 bp, Homo sapien
agactgggtgaattaatgtcaagcagcttataa

SEQ ID NO: 162457 - DNA, 33 bp, Homo sapien
aaagcagcagaatatcaaataccttcaaggtgg

SEQ ID NO: 162458 - DNA, 33 bp, Homo sapien
aaagcagcagaatatcgaataccttcaaggtgg

SEQ ID NO: 162459 - DNA, 33 bp, Homo sapien
ctctgacctatggatggagatgaggctcatgta

SEQ ID NO: 162460 - DNA, 33 bp, Homo sapien
ctctgacctatggatgtagatgaggctcatgta

SEQ ID NO: 162461 - DNA, 33 bp, Homo sapien
gaagagaaaaacaatacgacaatggtttgataa

SEQ ID NO: 162462 - DNA, 33 bp, Homo sapien
gaagagaaaaacaatatgacaatggtttgataa

SEQ ID NO: 162463 - DNA, 33 bp, Homo sapien
gagatccaagcagagacggcaaatagttaatgt

SEQ ID NO: 162464 - DNA, 33 bp, Homo sapien
gagatccaagcagagatggcaaatagttaatgt

SEQ ID NO: 162465 - DNA, 33 bp, Homo sapien
ttttttcctactaaaaggttgtcagtaagagaa

SEQ ID NO: 162466 - DNA, 33 bp, Homo sapien
ttttttcctactaaaatgttgtcagtaagagaa

SEQ ID NO: 162467 - DNA, 33 bp, Homo sapien
attcatgccatttcaaacagataacattaatta

SEQ ID NO: 162468 - DNA, 33 bp, Homo sapien
attcatgccatttcaagcagataacattaatta

SEQ ID NO: 162469 - DNA, 33 bp, Homo sapien
gaaaagctacagaattcaaatgagctgaaggta

SEQ ID NO: 162470 - DNA, 33 bp, Homo sapien
gaaaagctacagaattgaaatgagctgaaggta

SEQ ID NO: 162471 - DNA, 33 bp, Homo sapien
ctccataaatatcaatcatcagtaactaagaaa

SEQ ID NO: 162472 - DNA, 33 bp, Homo sapien
ctccataaatatcaatgatcagtaactaagaaa

SEQ ID NO: 162473 - DNA, 33 bp, Homo sapien
aactgccagcacagtacctaacccctggggaat

SEQ ID NO: 162474 - DNA, 33 bp, Homo sapien
aactgccagcacagtagctaacccctggggaat

SEQ ID NO: 162475 - DNA, 33 bp, Homo sapien
accatggcacaagaacgatgtgaaaaatgtgca

SEQ ID NO: 162476 - DNA, 33 bp, Homo sapien
accatggcacaagaactatgtgaaaaatgtgca

SEQ ID NO: 162477 - DNA, 33 bp, Homo sapien
actgttcagacttaatgatcgtgaaattttaaa

SEQ ID NO: 162478 - DNA, 33 bp, Homo sapien
actgttcagacttaattatcgtgaaattttaaa

SEQ ID NO: 162479 - DNA, 33 bp, Homo sapien
ttagtcttgttttctacccattgttctttgatg

SEQ ID NO: 162480 - DNA, 33 bp, Homo sapien
ttagtcttgttttctatccattgttctttgatg

SEQ ID NO: 162481 - DNA, 33 bp, Homo sapien
taggacaccttgaataacattggtcctcaaaga

SEQ ID NO: 162482 - DNA, 33 bp, Homo sapien
taggacaccttgaatagcattggtcctcaaaga

SEQ ID NO: 162483 - DNA, 33 bp, Homo sapien
agtggaactaaataccactgttcaatccactat

SEQ ID NO: 162484 - DNA, 33 bp, Homo sapien
agtggaactaaatacctctgttcaatccactat

SEQ ID NO: 162485 - DNA, 33 bp, Homo sapien
cagagatccagatggaagcctcagtgtggctgc

SEQ ID NO: 162486 - DNA, 33 bp, Homo sapien
cagagatccagatggatgcctcagtgtggctgc

SEQ ID NO: 162487 - DNA, 33 bp, Homo sapien
ggtcgggagcgtggaaaattctagacacagccc

SEQ ID NO: 162488 - DNA, 33 bp, Homo sapien
ggtcgggagcgtggaagattctagacacagccc

SEQ ID NO: 162489 - DNA, 33 bp, Homo sapien
cttcctaaacagcccaactacacgcttgtgact

SEQ ID NO: 162490 - DNA, 33 bp, Homo sapien
cttcctaaacagcccagctacacgcttgtgact

SEQ ID NO: 162491 - DNA, 33 bp, Homo sapien
atgtacaaagaaaggcaaagtgaactgctggtt

SEQ ID NO: 162492 - DNA, 33 bp, Homo sapien
atgtacaaagaaaggcgaagtgaactgctggtt

SEQ ID NO: 162493 - DNA, 33 bp, Homo sapien
aataacttatatgcacaaagtaaatgaataggt

SEQ ID NO: 162494 - DNA, 33 bp, Homo sapien
aataacttatatgcacgaagtaaatgaataggt

SEQ ID NO: 162495 - DNA, 33 bp, Homo sapien
tctgttatttgcagccaaggcatcctgataaca

SEQ ID NO: 162496 - DNA, 33 bp, Homo sapien
tctgttatttgcagccgaggcatcctgataaca

SEQ ID NO: 162497 - DNA, 33 bp, Homo sapien
gaaacaaatatacgagaatatatgacatcaaga

SEQ ID NO: 162498 - DNA, 33 bp, Homo sapien
gaaacaaatatacgaggatatatgacatcaaga

SEQ ID NO: 162499 - DNA, 33 bp, Homo sapien
tgaaggttgaacaaaacgccgtatatccacaca

SEQ ID NO: 162500 - DNA, 33 bp, Homo sapien
tgaaggttgaacaaaatgccgtatatccacaca

SEQ ID NO: 162501 - DNA, 33 bp, Homo sapien
atactttttaaaacaactatcaccaattatccc

SEQ ID NO: 162502 - DNA, 33 bp, Homo sapien
atactttttaaaacaattatcaccaattatccc

SEQ ID NO: 162503 - DNA, 33 bp, Homo sapien
taaagcattgggggaaattattgcattagagag

SEQ ID NO: 162504 - DNA, 33 bp, Homo sapien
taaagcattgggggaagttattgcattagagag

SEQ ID NO: 162505 - DNA, 33 bp, Homo sapien
ccaatagaattttagaaccactacagaattaag

SEQ ID NO: 162506 - DNA, 33 bp, Homo sapien
ccaatagaattttagatccactacagaattaag

SEQ ID NO: 162507 - DNA, 33 bp, Homo sapien
ataggcctataagaaactggaagactttaatca

SEQ ID NO: 162508 - DNA, 33 bp, Homo sapien
ataggcctataagaaattggaagactttaatca

SEQ ID NO: 162509 - DNA, 33 bp, Homo sapien
atataccgaaacctataaacattgctgagataa

SEQ ID NO: 162510 - DNA, 33 bp, Homo sapien
atataccgaaacctatgaacattgctgagataa

SEQ ID NO: 162511 - DNA, 33 bp, Homo sapien
acaaaatagacgtaacacctatataccgaaacc

SEQ ID NO: 162512 - DNA, 33 bp, Homo sapien
acaaaatagacgtaactcctatataccgaaacc

SEQ ID NO: 162513 - DNA, 33 bp, Homo sapien
aagaggtcagaactagaacaatattaaagaagt

SEQ ID NO: 162514 - DNA, 33 bp, Homo sapien
aagaggtcagaactaggacaatattaaagaagt

SEQ ID NO: 162515 - DNA, 33 bp, Homo sapien
ctgagacagctctaaacctacttcacactcaca

SEQ ID NO: 162516 - DNA, 33 bp, Homo sapien
ctgagacagctctaaatctacttcacactcaca

SEQ ID NO: 162517 - DNA, 33 bp, Homo sapien
agaggctgaatttcaacgtttccactgaacaca

SEQ ID NO: 162518 - DNA, 33 bp, Homo sapien
agaggctgaatttcaatgtttccactgaacaca

SEQ ID NO: 162519 - DNA, 33 bp, Homo sapien
agctgaagacatattgcacaagagactgtaagc

SEQ ID NO: 162520 - DNA, 33 bp, Homo sapien
agctgaagacatattggacaagagactgtaagc

SEQ ID NO: 162521 - DNA, 33 bp, Homo sapien
taaccacgagtataacaatgtgtctgagttctt

SEQ ID NO: 162522 - DNA, 33 bp, Homo sapien
taaccacgagtataactatgtgtctgagttctt

SEQ ID NO: 162523 - DNA, 33 bp, Homo sapien
ctataaatgttttatgacacttagtttgagata

SEQ ID NO: 162524 - DNA, 33 bp, Homo sapien
ctataaatgttttatggcacttagtttgagata

SEQ ID NO: 162525 - DNA, 33 bp, Homo sapien
ggaatagtctggcaagaattaatagcagttatt

SEQ ID NO: 162526 - DNA, 33 bp, Homo sapien
ggaatagtctggcaagtattaatagcagttatt

SEQ ID NO: 162527 - DNA, 33 bp, Homo sapien
cttacattcccagaataaaccttttgaaatctc

SEQ ID NO: 162528 - DNA, 33 bp, Homo sapien
cttacattcccagaatgaaccttttgaaatctc

SEQ ID NO: 162529 - DNA, 33 bp, Homo sapien
tcactcttaacctctaaagcaaatcactaactg

SEQ ID NO: 162530 - DNA, 33 bp, Homo sapien
tcactcttaacctctagagcaaatcactaactg

SEQ ID NO: 162531 - DNA, 33 bp, Homo sapien
gaagtggaattcctcaatcatatatctgcatgg

SEQ ID NO: 162532 - DNA, 33 bp, Homo sapien
gaagtggaattcctcagtcatatatctgcatgg

SEQ ID NO: 162533 - DNA, 33 bp, Homo sapien
tttttttaattgaaacaatgtcccactatgttg

SEQ ID NO: 162534 - DNA, 33 bp, Homo sapien
tttttttaattgaaacgatgtcccactatgttg

SEQ ID NO: 162535 - DNA, 33 bp, Homo sapien
atcttcatttggatcaatcattcaaggtatttc

SEQ ID NO: 162536 - DNA, 33 bp, Homo sapien
atcttcatttggatcagtcattcaaggtatttc

SEQ ID NO: 162537 - DNA, 33 bp, Homo sapien
gtattttctctggatcaacagcaaactcctata

SEQ ID NO: 162538 - DNA, 33 bp, Homo sapien
gtattttctctggatcgacagcaaactcctata

SEQ ID NO: 162539 - DNA, 33 bp, Homo sapien
agagctgactggtttcaaataaaaggaagatac

SEQ ID NO: 162540 - DNA, 33 bp, Homo sapien
agagctgactggtttctaataaaaggaagatac

SEQ ID NO: 162541 - DNA, 33 bp, Homo sapien
catccacctagttctacacattcactgagcacc

SEQ ID NO: 162542 - DNA, 33 bp, Homo sapien
catccacctagttctatacattcactgagcacc

SEQ ID NO: 162543 - DNA, 33 bp, Homo sapien
aggtgctgcagaagaaagaagtgaagatgaagg

SEQ ID NO: 162544 - DNA, 33 bp, Homo sapien
aggtgctgcagaagaaggaagtgaagatgaagg

SEQ ID NO: 162545 - DNA, 33 bp, Homo sapien
cactgtacacatgtccagaaaaaaacctgagaa

SEQ ID NO: 162546 - DNA, 33 bp, Homo sapien
cactgtacacatgtccggaaaaaaacctgagaa

SEQ ID NO: 162547 - DNA, 33 bp, Homo sapien
atcaacccctaacttaaaggaataatgagaggc

SEQ ID NO: 162548 - DNA, 33 bp, Homo sapien
atcaacccctaacttagaggaataatgagaggc

SEQ ID NO: 162549 - DNA, 33 bp, Homo sapien
ctcttctccctgcctagtaatgttgaagtgtcc

SEQ ID NO: 162550 - DNA, 33 bp, Homo sapien
ctcttctccctgcctattaatgttgaagtgtcc

SEQ ID NO: 162551 - DNA, 33 bp, Homo sapien
ttaaacctctgtaaaccgctaggaaatctgaaa

SEQ ID NO: 162552 - DNA, 33 bp, Homo sapien
ttaaacctctgtaaactgctaggaaatctgaaa

SEQ ID NO: 162553 - DNA, 33 bp, Homo sapien
agtggaataatctgcaaccaatagtttcaaaca

SEQ ID NO: 162554 - DNA, 33 bp, Homo sapien
agtggaataatctgcagccaatagtttcaaaca

SEQ ID NO: 162555 - DNA, 33 bp, Homo sapien
cttaatgtgcaagttacatgtgaaacaaaaatg

SEQ ID NO: 162556 - DNA, 33 bp, Homo sapien
cttaatgtgcaagttatatgtgaaacaaaaatg

SEQ ID NO: 162557 - DNA, 33 bp, Homo sapien
gtcctcctctgtaaaacacagctacctacctgc

SEQ ID NO: 162558 - DNA, 33 bp, Homo sapien
gtcctcctctgtaaaatacagctacctacctgc

SEQ ID NO: 162559 - DNA, 33 bp, Homo sapien
cttccacagcatcttcaaggccttcctcagaat

SEQ ID NO: 162560 - DNA, 33 bp, Homo sapien
cttccacagcatcttcgaggccttcctcagaat

SEQ ID NO: 162561 - DNA, 33 bp, Homo sapien
atctttactgctaccccaagaaatattgtattt

SEQ ID NO: 162562 - DNA, 33 bp, Homo sapien
atctttactgctaccctaagaaatattgtattt

SEQ ID NO: 162563 - DNA, 33 bp, Homo sapien
catttattacctgtgaagcactgttctaagtgc

SEQ ID NO: 162564 - DNA, 33 bp, Homo sapien
catttattacctgtgacgcactgttctaagtgc

SEQ ID NO: 162565 - DNA, 33 bp, Homo sapien
gtaataaatgcttaataaacattagttgttgtt

SEQ ID NO: 162566 - DNA, 33 bp, Homo sapien
gtaataaatgcttaatgaacattagttgttgtt

SEQ ID NO: 162567 - DNA, 33 bp, Homo sapien
ataatgttagtagcaacagtagtaacaacaact

SEQ ID NO: 162568 - DNA, 33 bp, Homo sapien
ataatgttagtagcaatagtagtaacaacaact

SEQ ID NO: 162569 - DNA, 33 bp, Homo sapien
acatgatagctttacaacctatagtttctgcta

SEQ ID NO: 162570 - DNA, 33 bp, Homo sapien
acatgatagctttacagcctatagtttctgcta

SEQ ID NO: 162571 - DNA, 33 bp, Homo sapien
ttgtttcatcaccaataaatagtgcaggcttcc

SEQ ID NO: 162572 - DNA, 33 bp, Homo sapien
ttgtttcatcaccaatgaatagtgcaggcttcc

SEQ ID NO: 162573 - DNA, 33 bp, Homo sapien
gtaaggaagcattattaaacacatagagcataa

SEQ ID NO: 162574 - DNA, 33 bp, Homo sapien
gtaaggaagcattattgaacacatagagcataa

SEQ ID NO: 162575 - DNA, 33 bp, Homo sapien
tatgcaattttatgcaatccttaccaagttttc

SEQ ID NO: 162576 - DNA, 33 bp, Homo sapien
tatgcaattttatgcagtccttaccaagttttc

SEQ ID NO: 162577 - DNA, 33 bp, Homo sapien
gttaccgatgtacatacagaggaattattcact

SEQ ID NO: 162578 - DNA, 33 bp, Homo sapien
gttaccgatgtacatatagaggaattattcact

SEQ ID NO: 162579 - DNA, 33 bp, Homo sapien
accatcaagtcctttaaggtgccgatggtgctg

SEQ ID NO: 162580 - DNA, 33 bp, Homo sapien
accatcaagtcctttagggtgccgatggtgctg

SEQ ID NO: 162581 - DNA, 33 bp, Homo sapien
taatttataactatccaaataagggcttctcaa

SEQ ID NO: 162582 - DNA, 33 bp, Homo sapien
taatttataactatccgaataagggcttctcaa

SEQ ID NO: 162583 - DNA, 33 bp, Homo sapien
caagagaacacagctaagtttaatcaaaattct

SEQ ID NO: 162584 - DNA, 33 bp, Homo sapien
caagagaacacagctacgtttaatcaaaattct

SEQ ID NO: 162585 - DNA, 33 bp, Homo sapien
gcgctagacatttccaagctggcagaattcatt

SEQ ID NO: 162586 - DNA, 33 bp, Homo sapien
gcgctagacatttccaggctggcagaattcatt

SEQ ID NO: 162587 - DNA, 33 bp, Homo sapien
ctgcatccccctgccccagtgaagagcaaacca

SEQ ID NO: 162588 - DNA, 33 bp, Homo sapien
ctgcatccccctgccctagtgaagagcaaacca

SEQ ID NO: 162589 - DNA, 33 bp, Homo sapien
gttacatggtgactctaaagtttaacattttga

SEQ ID NO: 162590 - DNA, 33 bp, Homo sapien
gttacatggtgactcttaagtttaacattttga

SEQ ID NO: 162591 - DNA, 33 bp, Homo sapien
aattgctttcataaccaactaacagtgaaaagc

SEQ ID NO: 162592 - DNA, 33 bp, Homo sapien
aattgctttcataaccgactaacagtgaaaagc

SEQ ID NO: 162593 - DNA, 33 bp, Homo sapien
tacccagcacgagtccacatctgcacgcgtgca

SEQ ID NO: 162594 - DNA, 33 bp, Homo sapien
tacccagcacgagtccgcatctgcacgcgtgca

SEQ ID NO: 162595 - DNA, 33 bp, Homo sapien
ttgtaatagccagttaccgacagattgaaaacc

SEQ ID NO: 162596 - DNA, 33 bp, Homo sapien
ttgtaatagccagttatcgacagattgaaaacc

SEQ ID NO: 162597 - DNA, 33 bp, Homo sapien
catgtcttcatcatgggaacacttgccatccag

SEQ ID NO: 162598 - DNA, 33 bp, Homo sapien
catgtcttcatcatggtaacacttgccatccag

SEQ ID NO: 162599 - DNA, 33 bp, Homo sapien; identical to SEQ ID NO: 162597

SEQ ID NO: 162600 - DNA, 33 bp, Homo sapien; identical to SEQ ID NO: 162598

SEQ ID NO: 162601 - DNA, 33 bp, Homo sapien
tagttctttgactgtgacaatgagcaagtgaac

SEQ ID NO: 162602 - DNA, 33 bp, Homo sapien
tagttctttgactgtggcaatgagcaagtgaac

SEQ ID NO: 162603 - DNA, 33 bp, Homo sapien
aagatgcagggaacaaattaggaatgcgactgc

SEQ ID NO: 162604 - DNA, 33 bp, Homo sapien
aagatgcagggaacaagttaggaatgcgactgc

SEQ ID NO: 162605 - DNA, 33 bp, Homo sapien
attcccagtatattaaagcagatgacttgtggc

SEQ ID NO: 162606 - DNA, 33 bp, Homo sapien
attcccagtatattaaggcagatgacttgtggc

SEQ ID NO: 162607 - DNA, 33 bp, Homo sapien
tatttgtttacaaagcaaaagatggcattattt

SEQ ID NO: 162608 - DNA, 33 bp, Homo sapien
tatttgtttacaaagcgaaagatggcattattt

SEQ ID NO: 162609 - DNA, 33 bp, Homo sapien
tagcaacttggtagcaaaaaacaaatagttggt

SEQ ID NO: 162610 - DNA, 33 bp, Homo sapien
tagcaacttggtagcagaaaacaaatagttggt

SEQ ID NO: 162611 - DNA, 33 bp, Homo sapien
tagtttcatatatgggaagagccaatagtccct

SEQ ID NO: 162612 - DNA, 33 bp, Homo sapien
tagtttcatatatgggtagagccaatagtccct

SEQ ID NO: 162613 - DNA, 33 bp, Homo sapien
gaaaccatttattgaaaaattcaccattctgat

SEQ ID NO: 162614 - DNA, 33 bp, Homo sapien
gaaaccatttattgaacaattcaccattctgat

SEQ ID NO: 162615 - DNA, 33 bp, Homo sapien
cttacctgatttggtaagttaatttgagcaagt

SEQ ID NO: 162616 - DNA, 33 bp, Homo sapien
cttacctgatttggtaggttaatttgagcaagt

SEQ ID NO: 162617 - DNA, 33 bp, Homo sapien
aatctgtaaaagagacaaactgaagagcataga

SEQ ID NO: 162618 - DNA, 33 bp, Homo sapien
aatctgtaaaagagaccaactgaagagcataga

SEQ ID NO: 162619 - DNA, 33 bp, Homo sapien
aataaggtggcaacaaacctgtcattccaagtg

SEQ ID NO: 162620 - DNA, 33 bp, Homo sapien
aataaggtggcaacaaccctgtcattccaagtg

SEQ ID NO: 162621 - DNA, 33 bp, Homo sapien
tcactcgctctcattaagtcttaattctccaga

SEQ ID NO: 162622 - DNA, 33 bp, Homo sapien
tcactcgctctcattaggtcttaattctccaga

SEQ ID NO: 162623 - DNA, 33 bp, Homo sapien
ttcatgcttaggtaaacaacctgttctagttgt

SEQ ID NO: 162624 - DNA, 33 bp, Homo sapien
ttcatgcttaggtaaataacctgttctagttgt

SEQ ID NO: 162625 - DNA, 33 bp, Homo sapien
cagcgttgggcagagacctccatgtgagtccac

SEQ ID NO: 162626 - DNA, 33 bp, Homo sapien
cagcgttgggcagagatctccatgtgagtccac

SEQ ID NO: 162627 - DNA, 33 bp, Homo sapien
aaaaacaggtgttcaccgtaagtcagatcgtta

SEQ ID NO: 162628 - DNA, 33 bp, Homo sapien
aaaaacaggtgttcacggtaagtcagatcgtta

SEQ ID NO: 162629 - DNA, 33 bp, Homo sapien
ctgttgaatttaagaacataatgtttgacacat

SEQ ID NO: 162630 - DNA, 33 bp, Homo sapien
ctgttgaatttaagaatataatgtttgacacat

SEQ ID NO: 162631 - DNA, 33 bp, Homo sapien
aaattaccaaattacccattttcacagccatct

SEQ ID NO: 162632 - DNA, 33 bp, Homo sapien
aaattaccaaattacctattttcacagccatct

SEQ ID NO: 162633 - DNA, 33 bp, Homo sapien
tatggaacagtaaagaagttaatgtggttgggt

SEQ ID NO: 162634 - DNA, 33 bp, Homo sapien
tatggaacagtaaagatgttaatgtggttgggt

SEQ ID NO: 162635 - DNA, 33 bp, Homo sapien
agaggctctggtaatacgctttcttaatttctc

SEQ ID NO: 162636 - DNA, 33 bp, Homo sapien
agaggctctggtaatatgctttcttaatttctc

SEQ ID NO: 162637 - DNA, 33 bp, Homo sapien
acactaaaatctgagaaccaatgatctcgtcta

SEQ ID NO: 162638 - DNA, 33 bp, Homo sapien
acactaaaatctgagacccaatgatctcgtcta

SEQ ID NO: 162639 - DNA, 33 bp, Homo sapien
aacagtctacaaaataactggccagtacgcttc

SEQ ID NO: 162640 - DNA, 33 bp, Homo sapien
aacagtctacaaaatagctggccagtacgcttc

SEQ ID NO: 162641 - DNA, 33 bp, Homo sapien
caatttgtaaaaagcacgtatatgtgaaatgca

SEQ ID NO: 162642 - DNA, 33 bp, Homo sapien
caatttgtaaaaagcatgtatatgtgaaatgca

SEQ ID NO: 162643 - DNA, 33 bp, Homo sapien
tttgttccttttaatgacaaagtttagcacata

SEQ ID NO: 162644 - DNA, 33 bp, Homo sapien
tttgttccttttaatgtcaaagtttagcacata

SEQ ID NO: 162645 - DNA, 33 bp, Homo sapien
cacaattctgataataaccctcaactagattcc

SEQ ID NO: 162646 - DNA, 33 bp, Homo sapien
cacaattctgataatacccctcaactagattcc

SEQ ID NO: 162647 - DNA, 33 bp, Homo sapien
atgaagagaggaatggaaaaaagtgaatcggag

SEQ ID NO: 162648 - DNA, 33 bp, Homo sapien
atgaagagaggaatggcaaaaagtgaatcggag

SEQ ID NO: 162649 - DNA, 33 bp, Homo sapien
tttgggtagataataaaatgcaaaatgctcatt

SEQ ID NO: 162650 - DNA, 33 bp, Homo sapien
tttgggtagataataagatgcaaaatgctcatt

SEQ ID NO: 162651 - DNA, 33 bp, Homo sapien
tatgaatgaaactggcacattgtcatctctgtc

SEQ ID NO: 162652 - DNA, 33 bp, Homo sapien
tatgaatgaaactggcgcattgtcatctctgtc

SEQ ID NO: 162653 - DNA, 33 bp, Homo sapien
tgtcctggccctgagaaaaatgcttatcatatg

SEQ ID NO: 162654 - DNA, 33 bp, Homo sapien
tgtcctggccctgagacaaatgcttatcatatg

SEQ ID NO: 162655 - DNA, 33 bp, Homo sapien
ttgattggtgggtgaccgtatagactctgaaac

SEQ ID NO: 162656 - DNA, 33 bp, Homo sapien
ttgattggtgggtgactgtatagactctgaaac

SEQ ID NO: 162657 - DNA, 33 bp, Homo sapien
gcacagccaatgacacaatagaaagccatgaaa

SEQ ID NO: 162658 - DNA, 33 bp, Homo sapien
gcacagccaatgacacgatagaaagccatgaaa

SEQ ID NO: 162659 - DNA, 33 bp, Homo sapien
aggcagaaatagccaccccttgctcacattccc

SEQ ID NO: 162660 - DNA, 33 bp, Homo sapien
aggcagaaatagccactccttgctcacattccc

SEQ ID NO: 162661 - DNA, 33 bp, Homo sapien
cagggagacgaattcactgaaacaccagtgcaa

SEQ ID NO: 162662 - DNA, 33 bp, Homo sapien
cagggagacgaattcattgaaacaccagtgcaa

SEQ ID NO: 162663 - DNA, 33 bp, Homo sapien
atgagaagtcctctaaatcaggctctggcggtc

SEQ ID NO: 162664 - DNA, 33 bp, Homo sapien
atgagaagtcctctaagtcaggctctggcggtc

SEQ ID NO: 162665 - DNA, 33 bp, Homo sapien
ctagtaggcactcagcaatgctttataaaaaat

SEQ ID NO: 162666 - DNA, 33 bp, Homo sapien
ctagtaggcactcagcgatgctttataaaaaat

SEQ ID NO: 162667 - DNA, 33 bp, Homo sapien
ctggcacggaaaggtgaaatttttctttgcttc

SEQ ID NO: 162668 - DNA, 33 bp, Homo sapien
ctggcacggaaaggtgtaatttttctttgcttc

SEQ ID NO: 162669 - DNA, 33 bp, Homo sapien
cagatgtgcaaatgaaaagagccaatcagacag

SEQ ID NO: 162670 - DNA, 33 bp, Homo sapien
cagatgtgcaaatgaacagagccaatcagacag

SEQ ID NO: 162671 - DNA, 33 bp, Homo sapien
agttaaaaaacaaccaaattgccagttttcttt

SEQ ID NO: 162672 - DNA, 33 bp, Homo sapien
agttaaaaaacaaccagattgccagttttcttt

SEQ ID NO: 162673 - DNA, 33 bp, Homo sapien
cttgcttagagaaagaaggaggaagatactata

SEQ ID NO: 162674 - DNA, 33 bp, Homo sapien
cttgcttagagaaagagggaggaagatactata

SEQ ID NO: 162675 - DNA, 33 bp, Homo sapien
gaaaatgtggtagcaaatattgcagagctctat

SEQ ID NO: 162676 - DNA, 33 bp, Homo sapien
gaaaatgtggtagcaagtattgcagagctctat

SEQ ID NO: 162677 - DNA, 33 bp, Homo sapien
attgttatgctaccacaatatctcaatgtttaa

SEQ ID NO: 162678 - DNA, 33 bp, Homo sapien
attgttatgctaccacgatatctcaatgtttaa

SEQ ID NO: 162679 - DNA, 33 bp, Homo sapien
tcatggcaattgcatgacacttgtttgtgctat

SEQ ID NO: 162680 - DNA, 33 bp, Homo sapien
tcatggcaattgcatggcacttgtttgtgctat

SEQ ID NO: 162681 - DNA, 33 bp, Homo sapien
aatgaaaaggtttcagaagtggatagatgtagt

SEQ ID NO: 162682 - DNA, 33 bp, Homo sapien
aatgaaaaggtttcagtagtggatagatgtagt

SEQ ID NO: 162683 - DNA, 33 bp, Homo sapien
tttgtggttgccaaacactgcaggggagagaag

SEQ ID NO: 162684 - DNA, 33 bp, Homo sapien
tttgtggttgccaaacgctgcaggggagagaag

SEQ ID NO: 162685 - DNA, 33 bp, Homo sapien
tcaattatctccaccacatcagatacccagtag

SEQ ID NO: 162686 - DNA, 33 bp, Homo sapien
tcaattatctccaccatatcagatacccagtag

SEQ ID NO: 162687 - DNA, 33 bp, Homo sapien
aggaaataaaatgatcaagctacattttacatt

SEQ ID NO: 162688 - DNA, 33 bp, Homo sapien
aggaaataaaatgatcgagctacattttacatt

SEQ ID NO: 162689 - DNA, 33 bp, Homo sapien
aactcaaaatgtacccaatgcatagaattgata

SEQ ID NO: 162690 - DNA, 33 bp, Homo sapien
aactcaaaatgtacccgatgcatagaattgata

SEQ ID NO: 162691 - DNA, 33 bp, Homo sapien
gggatatgctcagaaaagaaggtctgagatgcc

SEQ ID NO: 162692 - DNA, 33 bp, Homo sapien
gggatatgctcagaaaggaaggtctgagatgcc

SEQ ID NO: 162693 - DNA, 33 bp, Homo sapien
aagctttcctcaaatgaaaatacctaatgcatg

SEQ ID NO: 162694 - DNA, 33 bp, Homo sapien
aagctttcctcaaatgtaaatacctaatgcatg

SEQ ID NO: 162695 - DNA, 33 bp, Homo sapien
agtagccatttcctgaagttcacaaaaagcaga

SEQ ID NO: 162696 - DNA, 33 bp, Homo sapien
agtagccatttcctgaggttcacaaaaagcaga

SEQ ID NO: 162697 - DNA, 33 bp, Homo sapien
tccccctcagtgactcactttggtttgatgatt

SEQ ID NO: 162698 - DNA, 33 bp, Homo sapien
tccccctcagtgactcgctttggtttgatgatt

SEQ ID NO: 162699 - DNA, 33 bp, Homo sapien
caaatttataaatacaatccatcaacaaagccc

SEQ ID NO: 162700 - DNA, 33 bp, Homo sapien
caaatttataaatacagtccatcaacaaagccc

SEQ ID NO: 162701 - DNA, 33 bp, Homo sapien
gaagaaggtcccatgcaagttgaatgtggagtg

SEQ ID NO: 162702 - DNA, 33 bp, Homo sapien
gaagaaggtcccatgcgagttgaatgtggagtg

SEQ ID NO: 162703 - DNA, 33 bp, Homo sapien
ggtttgtcgaagatccaatggttgtagatatgt

SEQ ID NO: 162704 - DNA, 33 bp, Homo sapien
ggtttgtcgaagatccgatggttgtagatatgt

SEQ ID NO: 162705 - DNA, 33 bp, Homo sapien
ttttaatacagctccacgtacgttcaataactg

SEQ ID NO: 162706 - DNA, 33 bp, Homo sapien
ttttaatacagctccatgtacgttcaataactg

SEQ ID NO: 162707 - DNA, 33 bp, Homo sapien
tgagagttgtctttccaactgaggaattagctt

SEQ ID NO: 162708 - DNA, 33 bp, Homo sapien
tgagagttgtctttcccactgaggaattagctt

SEQ ID NO: 162709 - DNA, 33 bp, Homo sapien
gtttccaagtgccttacattttccagttggcat

SEQ ID NO: 162710 - DNA, 33 bp, Homo sapien
gtttccaagtgccttagattttccagttggcat

SEQ ID NO: 162711 - DNA, 33 bp, Homo sapien
atagatgaggagataaagttcagagaaactcca

SEQ ID NO: 162712 - DNA, 33 bp, Homo sapien
atagatgaggagataaggttcagagaaactcca

SEQ ID NO: 162713 - DNA, 33 bp, Homo sapien
gatggttttctaactccagcgccttgcagcccc

SEQ ID NO: 162714 - DNA, 33 bp, Homo sapien
gatggttttctaactcgagcgccttgcagcccc

SEQ ID NO: 162715 - DNA, 33 bp, Homo sapien
ctctctagaggtaaaaggcacaaattaaaacag

SEQ ID NO: 162716 - DNA, 33 bp, Homo sapien
ctctctagaggtaaaatgcacaaattaaaacag

SEQ ID NO: 162717 - DNA, 33 bp, Homo sapien
gcataaacactatgaaaattttatggctccttc

SEQ ID NO: 162718 - DNA, 33 bp, Homo sapien
gcataaacactatgaagattttatggctccttc

SEQ ID NO: 162719 - DNA, 33 bp, Homo sapien
gcacacttggaaagaaggtagaggaaacaattt

SEQ ID NO: 162720 - DNA, 33 bp, Homo sapien
gcacacttggaaagaatgtagaggaaacaattt

SEQ ID NO: 162721 - DNA, 33 bp, Homo sapien
atctcacccaaagtcacagcagaaaattgggat

SEQ ID NO: 162722 - DNA, 33 bp, Homo sapien
atctcacccaaagtcatagcagaaaattgggat

SEQ ID NO: 162723 - DNA, 33 bp, Homo sapien
gaccagatgctagaagaaacctcagagatcacc

SEQ ID NO: 162724 - DNA, 33 bp, Homo sapien
gaccagatgctagaaggaacctcagagatcacc

SEQ ID NO: 162725 - DNA, 33 bp, Homo sapien
gacagaactagggacagtgggaagaaggtataa

SEQ ID NO: 162726 - DNA, 33 bp, Homo sapien
gacagaactagggacattgggaagaaggtataa

SEQ ID NO: 162727 - DNA, 33 bp, Homo sapien
aggaaaccaaaatgcacgaaactaaagaagaac

SEQ ID NO: 162728 - DNA, 33 bp, Homo sapien
aggaaaccaaaatgcatgaaactaaagaagaac

SEQ ID NO: 162729 - DNA, 33 bp, Homo sapien
agactgacaaatcacaatctaagagagatcatg

SEQ ID NO: 162730 - DNA, 33 bp, Homo sapien
agactgacaaatcacagtctaagagagatcatg

SEQ ID NO: 162731 - DNA, 33 bp, Homo sapien
tcttgaacatttaaacagctcttgaaatgaatg

SEQ ID NO: 162732 - DNA, 33 bp, Homo sapien
tcttgaacatttaaacggctcttgaaatgaatg

SEQ ID NO: 162733 - DNA, 33 bp, Homo sapien
aatcccactggagcccaaggaagcctacaaagt

SEQ ID NO: 162734 - DNA, 33 bp, Homo sapien
aatcccactggagcccgaggaagcctacaaagt

SEQ ID NO: 162735 - DNA, 33 bp, Homo sapien
ctttgtgtttttcaaaagccagacagtagtttc

SEQ ID NO: 162736 - DNA, 33 bp, Homo sapien
ctttgtgtttttcaaaggccagacagtagtttc

SEQ ID NO: 162737 - DNA, 33 bp, Homo sapien
ttgaatcttctggacaaagcttcattgaacaca

SEQ ID NO: 162738 - DNA, 33 bp, Homo sapien
ttgaatcttctggacagagcttcattgaacaca

SEQ ID NO: 162739 - DNA, 33 bp, Homo sapien
aagtctgagttaaatacggcagcattcgcagtg

SEQ ID NO: 162740 - DNA, 33 bp, Homo sapien
aagtctgagttaaatatggcagcattcgcagtg

SEQ ID NO: 162741 - DNA, 33 bp, Homo sapien
ccaagccctaacatgacgtaggacacagtggcc

SEQ ID NO: 162742 - DNA, 33 bp, Homo sapien
ccaagccctaacatgaggtaggacacagtggcc

SEQ ID NO: 162743 - DNA, 33 bp, Homo sapien
tccaggatgatggtccagaccttgtattgtctt

SEQ ID NO: 162744 - DNA, 33 bp, Homo sapien
tccaggatgatggtcctgaccttgtattgtctt

SEQ ID NO: 162745 - DNA, 33 bp, Homo sapien
atatgaaggagagaaacgcaggccacacggctg

SEQ ID NO: 162746 - DNA, 33 bp, Homo sapien
atatgaaggagagaaatgcaggccacacggctg

SEQ ID NO: 162747 - DNA, 33 bp, Homo sapien
tctcaagtaaatcataggatgagctttggcaaa

SEQ ID NO: 162748 - DNA, 33 bp, Homo sapien
tctcaagtaaatcatatgatgagctttggcaaa

SEQ ID NO: 162749 - DNA, 33 bp, Homo sapien
ccgtggtcacggtcatcatcatcatcatcactg

SEQ ID NO: 162750 - DNA, 33 bp, Homo sapien
ccgtggtcacggtcattatcatcatcatcactg

SEQ ID NO: 162751 - DNA, 33 bp, Homo sapien
ctgggtggccagaaaacccccgttcagtggctc

SEQ ID NO: 162752 - DNA, 33 bp, Homo sapien
ctgggtggccagaaaatccccgttcagtggctc

SEQ ID NO: 162753 - DNA, 33 bp, Homo sapien
gtccctgggttgtaacagcagaagaactgcagt

SEQ ID NO: 162754 - DNA, 33 bp, Homo sapien
gtccctgggttgtaacggcagaagaactgcagt

SEQ ID NO: 162755 - DNA, 33 bp, Homo sapien
attgctaactccaacaaggcttttttatttgag

SEQ ID NO: 162756 - DNA, 33 bp, Homo sapien
attgctaactccaacatggcttttttatttgag

SEQ ID NO: 162757 - DNA, 33 bp, Homo sapien
tggctaggcacttatccaaatgctgaacttgaa

SEQ ID NO: 162758 - DNA, 33 bp, Homo sapien
tggctaggcacttatctaaatgctgaacttgaa

SEQ ID NO: 162759 - DNA, 33 bp, Homo sapien
tcggacgaaggaacaaaacctgtgaatactggg

SEQ ID NO: 162760 - DNA, 33 bp, Homo sapien
tcggacgaaggaacaacacctgtgaatactggg

SEQ ID NO: 162761 - DNA, 33 bp, Homo sapien
atttttacctgcaagaagtgggagatttccaaa

SEQ ID NO: 162762 - DNA, 33 bp, Homo sapien
atttttacctgcaagaggtgggagatttccaaa

SEQ ID NO: 162763 - DNA, 33 bp, Homo sapien
aagcagctgctcccaacgcctttccacactgtc

SEQ ID NO: 162764 - DNA, 33 bp, Homo sapien
aagcagctgctcccaatgcctttccacactgtc

SEQ ID NO: 162765 - DNA, 33 bp, Homo sapien
gtctgaccgaaagaaaaaagatgtatgaaaaag

SEQ ID NO: 162766 - DNA, 33 bp, Homo sapien
gtctgaccgaaagaaagaagatgtatgaaaaag

SEQ ID NO: 162767 - DNA, 33 bp, Homo sapien
tcttagaatagagacactacataggcggtgttg

SEQ ID NO: 162768 - DNA, 33 bp, Homo sapien
tcttagaatagagacattacataggcggtgttg

SEQ ID NO: 162769 - DNA, 33 bp, Homo sapien
atgaattttttagcagcagctgagtggagtccc

SEQ ID NO: 162770 - DNA, 33 bp, Homo sapien
atgaattttttagcagtagctgagtggagtccc

SEQ ID NO: 162771 - DNA, 33 bp, Homo sapien
ccttaaccaccatgcaatatggcctctgtattc

SEQ ID NO: 162772 - DNA, 33 bp, Homo sapien
ccttaaccaccatgcagtatggcctctgtattc

SEQ ID NO: 162773 - DNA, 33 bp, Homo sapien
aaaaatgcacctcttcaacattgatctgttttt

SEQ ID NO: 162774 - DNA, 33 bp, Homo sapien
aaaaatgcacctcttcgacattgatctgttttt

SEQ ID NO: 162775 - DNA, 33 bp, Homo sapien
ttctcagagctcagtccacaacagcctgctgag

SEQ ID NO: 162776 - DNA, 33 bp, Homo sapien
ttctcagagctcagtctacaacagcctgctgag

SEQ ID NO: 162777 - DNA, 33 bp, Homo sapien
ttccaatgcactcaataaatgtttgctagaaga

SEQ ID NO: 162778 - DNA, 33 bp, Homo sapien
ttccaatgcactcaattaatgtttgctagaaga

SEQ ID NO: 162779 - DNA, 33 bp, Homo sapien
atgtcttttctactgaactgaaacacagaaaca

SEQ ID NO: 162780 - DNA, 33 bp, Homo sapien
atgtcttttctactgacctgaaacacagaaaca

SEQ ID NO: 162781 - DNA, 33 bp, Homo sapien
tatgaacaaagctggaataagtatccttgtgtt

SEQ ID NO: 162782 - DNA, 33 bp, Homo sapien
tatgaacaaagctggagtaagtatccttgtgtt

SEQ ID NO: 162783 - DNA, 33 bp, Homo sapien
tgcaaaaatcaatgacaagtgtggtaccagtcc

SEQ ID NO: 162784 - DNA, 33 bp, Homo sapien
tgcaaaaatcaatgacgagtgtggtaccagtcc

SEQ ID NO: 162785 - DNA, 33 bp, Homo sapien
atattcaagttctcatcagagcctggaagatgt

SEQ ID NO: 162786 - DNA, 33 bp, Homo sapien
atattcaagttctcattagagcctggaagatgt

SEQ ID NO: 162787 - DNA, 33 bp, Homo sapien
tgacttcgattctgccacaacacttggattcaa

SEQ ID NO: 162788 - DNA, 33 bp, Homo sapien
tgacttcgattctgccgcaacacttggattcaa

SEQ ID NO: 162789 - DNA, 33 bp, Homo sapien
ggatttggagtgaggacgtatgtgtgaaggtcc

SEQ ID NO: 162790 - DNA, 33 bp, Homo sapien
ggatttggagtgaggaggtatgtgtgaaggtcc

SEQ ID NO: 162791 - DNA, 33 bp, Homo sapien
cttattaaaaacatgcactcgttagattttcct

SEQ ID NO: 162792 - DNA, 33 bp, Homo sapien
cttattaaaaacatgccctcgttagattttcct

SEQ ID NO: 162793 - DNA, 33 bp, Homo sapien
taggcccctgtgctcacgttacagatagagaaa

SEQ ID NO: 162794 - DNA, 33 bp, Homo sapien
taggcccctgtgctcatgttacagatagagaaa

SEQ ID NO: 162795 - DNA, 33 bp, Homo sapien
tctctggtcagcctgaagtcactgatgcttcct

SEQ ID NO: 162796 - DNA, 33 bp, Homo sapien
tctctggtcagcctgaggtcactgatgcttcct

SEQ ID NO: 162797 - DNA, 33 bp, Homo sapien
aaatcatagacaacaaggacaataacagcaact

SEQ ID NO: 162798 - DNA, 33 bp, Homo sapien
aaatcatagacaacaatgacaataacagcaact

SEQ ID NO: 162799 - DNA, 33 bp, Homo sapien
tgtacaagtacttacaaatcctccaaatcatag

SEQ ID NO: 162800 - DNA, 33 bp, Homo sapien
tgtacaagtacttacatatcctccaaatcatag

SEQ ID NO: 162801 - DNA, 33 bp, Homo sapien
gttattttaatgcttcactttctaatgaacttt

SEQ ID NO: 162802 - DNA, 33 bp, Homo sapien
gttattttaatgcttcgctttctaatgaacttt

SEQ ID NO: 162803 - DNA, 33 bp, Homo sapien
atattctgccttcttaaaactttgctttgaata

SEQ ID NO: 162804 - DNA, 33 bp, Homo sapien
atattctgccttcttagaactttgctttgaata

SEQ ID NO: 162805 - DNA, 33 bp, Homo sapien
gttaaaaatgaagtgccgaactgtgcaagccag

SEQ ID NO: 162806 - DNA, 33 bp, Homo sapien
gttaaaaatgaagtgctgaactgtgcaagccag

SEQ ID NO: 162807 - DNA, 33 bp, Homo sapien
ggtggtgaaactgttacgctaatgagactattt

SEQ ID NO: 162808 - DNA, 33 bp, Homo sapien
ggtggtgaaactgttatgctaatgagactattt

SEQ ID NO: 162809 - DNA, 33 bp, Homo sapien
atgtcaacacaacccaatgaaaaatcaggcaac

SEQ ID NO: 162810 - DNA, 33 bp, Homo sapien
atgtcaacacaacccagtgaaaaatcaggcaac

SEQ ID NO: 162811 - DNA, 33 bp, Homo sapien
tattctcagaatattacacattgccacatgatg

SEQ ID NO: 162812 - DNA, 33 bp, Homo sapien
tattctcagaatattagacattgccacatgatg

SEQ ID NO: 162813 - DNA, 33 bp, Homo sapien
aaaagctctcttttcccgatcttctcctctctc

SEQ ID NO: 162814 - DNA, 33 bp, Homo sapien
aaaagctctcttttcctgatcttctcctctctc

SEQ ID NO: 162815 - DNA, 33 bp, Homo sapien
ggaggttgtccatagcagatgagtcggatgagg

SEQ ID NO: 162816 - DNA, 33 bp, Homo sapien
ggaggttgtccatagcggatgagtcggatgagg

SEQ ID NO: 162817 - DNA, 33 bp, Homo sapien
tactgatcttgccagaacagttttggttgagtg

SEQ ID NO: 162818 - DNA, 33 bp, Homo sapien
tactgatcttgccagagcagttttggttgagtg

SEQ ID NO: 162819 - DNA, 33 bp, Homo sapien
agagccttatagtcacagtaaggactctgggct

SEQ ID NO: 162820 - DNA, 33 bp, Homo sapien
agagccttatagtcacggtaaggactctgggct

SEQ ID NO: 162821 - DNA, 33 bp, Homo sapien
tggggtttcttgaagacgtattatttaaacaag

SEQ ID NO: 162822 - DNA, 33 bp, Homo sapien
tggggtttcttgaagaggtattatttaaacaag

SEQ ID NO: 162823 - DNA, 33 bp, Homo sapien
ctgatatctggtcttacgtctgaagtcttaggg

SEQ ID NO: 162824 - DNA, 33 bp, Homo sapien
ctgatatctggtcttaggtctgaagtcttaggg

SEQ ID NO: 162825 - DNA, 33 bp, Homo sapien
aacttgcctgagggtcaccgattagcatcagag

SEQ ID NO: 162826 - DNA, 33 bp, Homo sapien
aacttgcctgagggtcgccgattagcatcagag

SEQ ID NO: 162827 - DNA, 33 bp, Homo sapien
tattttcctatgttcagggaacggcatcaacag

SEQ ID NO: 162828 - DNA, 33 bp, Homo sapien
tattttcctatgttcatggaacggcatcaacag

SEQ ID NO: 162829 - DNA, 33 bp, Homo sapien
gcaaagctggtcttcccaagagcaaaggaggaa

SEQ ID NO: 162830 - DNA, 33 bp, Homo sapien
gcaaagctggtcttcctaagagcaaaggaggaa

SEQ ID NO: 162831 - DNA, 33 bp, Homo sapien
aataaaattagcttgaccaacctggctaagata

SEQ ID NO: 162832 - DNA, 33 bp, Homo sapien
aataaaattagcttgagcaacctggctaagata

SEQ ID NO: 162833 - DNA, 33 bp, Homo sapien
cttagtgtccaaggtaaaaccctcaggcttaga

SEQ ID NO: 162834 - DNA, 33 bp, Homo sapien
cttagtgtccaaggtacaaccctcaggcttaga

SEQ ID NO: 162835 - DNA, 33 bp, Homo sapien
gacttgtgcatgttagcattgcccatccccaaa

SEQ ID NO: 162836 - DNA, 33 bp, Homo sapien
gacttgtgcatgttagtattgcccatccccaaa

SEQ ID NO: 162837 - DNA, 33 bp, Homo sapien
gacagatgggttcttgcaagggtgagtcatcta

SEQ ID NO: 162838 - DNA, 33 bp, Homo sapien
gacagatgggttcttggaagggtgagtcatcta

SEQ ID NO: 162839 - DNA, 33 bp, Homo sapien
gtttaacttttaataacagaagcaagtctcagt

SEQ ID NO: 162840 - DNA, 33 bp, Homo sapien
gtttaacttttaataatagaagcaagtctcagt

SEQ ID NO: 162841 - DNA, 33 bp, Homo sapien
cagagtcaaagtgtaaccccaggctggacacgg

SEQ ID NO: 162842 - DNA, 33 bp, Homo sapien
cagagtcaaagtgtaatcccaggctggacacgg

SEQ ID NO: 162843 - DNA, 33 bp, Homo sapien
cttgaagctttaatgacgactacaacttagtgg

SEQ ID NO: 162844 - DNA, 33 bp, Homo sapien
cttgaagctttaatgatgactacaacttagtgg

SEQ ID NO: 162845 - DNA, 33 bp, Homo sapien
tccaaacaagccaagacgggataaatagcaaag

SEQ ID NO: 162846 - DNA, 33 bp, Homo sapien
tccaaacaagccaagatgggataaatagcaaag

SEQ ID NO: 162847 - DNA, 33 bp, Homo sapien
taattttgaaaaaagccagtccatatacaatct

SEQ ID NO: 162848 - DNA, 33 bp, Homo sapien
taattttgaaaaaagctagtccatatacaatct

SEQ ID NO: 162849 - DNA, 33 bp, Homo sapien
aatagaaaggtccagcagacagttgtgcaaaca

SEQ ID NO: 162850 - DNA, 33 bp, Homo sapien
aatagaaaggtccagcggacagttgtgcaaaca

SEQ ID NO: 162851 - DNA, 33 bp, Homo sapien
tttaagaagaggtgccaaaaaactgaataatca

SEQ ID NO: 162852 - DNA, 33 bp, Homo sapien
tttaagaagaggtgccgaaaaactgaataatca

SEQ ID NO: 162853 - DNA, 33 bp, Homo sapien
catgtggctgggcttacagcttctgccatgcgc

SEQ ID NO: 162854 - DNA, 33 bp, Homo sapien
catgtggctgggcttatagcttctgccatgcgc

SEQ ID NO: 162855 - DNA, 33 bp, Homo sapien
tcttatttatgatgaggagctcctagcaacaac

SEQ ID NO: 162856 - DNA, 33 bp, Homo sapien
tcttatttatgatgagtagctcctagcaacaac

SEQ ID NO: 162857 - DNA, 33 bp, Homo sapien
gtttcatcggctttgaagttcccactggctgtt

SEQ ID NO: 162858 - DNA, 33 bp, Homo sapien
gtttcatcggctttgaggttcccactggctgtt

SEQ ID NO: 162859 - DNA, 33 bp, Homo sapien
gcgagttgctaaaccacgaaaacaggtgagaaa

SEQ ID NO: 162860 - DNA, 33 bp, Homo sapien
gcgagttgctaaaccatgaaaacaggtgagaaa

SEQ ID NO: 162861 - DNA, 33 bp, Homo sapien
ctcacggctaacgggaagcctggaccagatata

SEQ ID NO: 162862 - DNA, 33 bp, Homo sapien
ctcacggctaacgggatgcctggaccagatata

SEQ ID NO: 162863 - DNA, 33 bp, Homo sapien
atgcagtattcttatccgagacgtaatagaggc

SEQ ID NO: 162864 - DNA, 33 bp, Homo sapien
atgcagtattcttatctgagacgtaatagaggc

SEQ ID NO: 162865 - DNA, 33 bp, Homo sapien
tgcattgggtcctgtccgaactgagatacccag

SEQ ID NO: 162866 - DNA, 33 bp, Homo sapien
tgcattgggtcctgtctgaactgagatacccag

SEQ ID NO: 162867 - DNA, 33 bp, Homo sapien
aaagaggccccaatagaccaacagcttaggttt

SEQ ID NO: 162868 - DNA, 33 bp, Homo sapien
aaagaggccccaataggccaacagcttaggttt

SEQ ID NO: 162869 - DNA, 33 bp, Homo sapien
ttactgtggtgagttacagcatagattcaatgg

SEQ ID NO: 162870 - DNA, 33 bp, Homo sapien
ttactgtggtgagttagagcatagattcaatgg

SEQ ID NO: 162871 - DNA, 33 bp, Homo sapien
ttatttggtccaagtcccaagtcatgaacaagt

SEQ ID NO: 162872 - DNA, 33 bp, Homo sapien
ttatttggtccaagtctcaagtcatgaacaagt

SEQ ID NO: 162873 - DNA, 33 bp, Homo sapien
tcttgtcatgtactcaagtgagaaaattcacac

SEQ ID NO: 162874 - DNA, 33 bp, Homo sapien
tcttgtcatgtactcaggtgagaaaattcacac

SEQ ID NO: 162875 - DNA, 33 bp, Homo sapien
gtgtaggatttcagcaataagaataatttgatg

SEQ ID NO: 162876 - DNA, 33 bp, Homo sapien
gtgtaggatttcagcagtaagaataatttgatg

SEQ ID NO: 162877 - DNA, 33 bp, Homo sapien
tagccagacacatgcacagctggaatttgaatc

SEQ ID NO: 162878 - DNA, 33 bp, Homo sapien
tagccagacacatgcatagctggaatttgaatc

SEQ ID NO: 162879 - DNA, 33 bp, Homo sapien
tgggcagagttctagaaactatcaaaaactgag

SEQ ID NO: 162880 - DNA, 33 bp, Homo sapien
tgggcagagttctagatactatcaaaaactgag

SEQ ID NO: 162881 - DNA, 33 bp, Homo sapien
aaagatgcccggggacacgggcctatatcatcc

SEQ ID NO: 162882 - DNA, 33 bp, Homo sapien
aaagatgcccggggactcgggcctatatcatcc

SEQ ID NO: 162883 - DNA, 33 bp, Homo sapien
gcagtctgtgcgttaacgaacacttccggggga

SEQ ID NO: 162884 - DNA, 33 bp, Homo sapien
gcagtctgtgcgttaatgaacacttccggggga

SEQ ID NO: 162885 - DNA, 33 bp, Homo sapien
ggctgacatttgagaagcaacagcaaaagtgca

SEQ ID NO: 162886 - DNA, 33 bp, Homo sapien
ggctgacatttgagaatcaacagcaaaagtgca

SEQ ID NO: 162887 - DNA, 33 bp, Homo sapien
ataggaactcgacaacaccaagtaagacaggag

SEQ ID NO: 162888 - DNA, 33 bp, Homo sapien
ataggaactcgacaacgccaagtaagacaggag

SEQ ID NO: 162889 - DNA, 33 bp, Homo sapien
tggaaaataatgattacgtaagagcagctaaca

SEQ ID NO: 162890 - DNA, 33 bp, Homo sapien
tggaaaataatgattatgtaagagcagctaaca

SEQ ID NO: 162891 - DNA, 33 bp, Homo sapien
ggaagtagcggtccccaatgttctgctggcagc

SEQ ID NO: 162892 - DNA, 33 bp, Homo sapien
ggaagtagcggtccccgatgttctgctggcagc

SEQ ID NO: 162893 - DNA, 33 bp, Homo sapien
agagtgagaccagcaccgagggtccgagatcgt

SEQ ID NO: 162894 - DNA, 33 bp, Homo sapien
agagtgagaccagcactgagggtccgagatcgt

SEQ ID NO: 162895 - DNA, 33 bp, Homo sapien
catctgtagtaaagagaaaatagtgatgatgct

SEQ ID NO: 162896 - DNA, 33 bp, Homo sapien
catctgtagtaaagagcaaatagtgatgatgct

SEQ ID NO: 162897 - DNA, 33 bp, Homo sapien
ctttgagataaataaaactggcttcaagtctct

SEQ ID NO: 162898 - DNA, 33 bp, Homo sapien
ctttgagataaataaacctggcttcaagtctct

SEQ ID NO: 162899 - DNA, 33 bp, Homo sapien
tcctgtctgagaatccaatacttagagtatagc

SEQ ID NO: 162900 - DNA, 33 bp, Homo sapien
tcctgtctgagaatcccatacttagagtatagc

SEQ ID NO: 162901 - DNA, 33 bp, Homo sapien
cttgccattgtatgcacctgccggtctgagaaa

SEQ ID NO: 162902 - DNA, 33 bp, Homo sapien
cttgccattgtatgcatctgccggtctgagaaa

SEQ ID NO: 162903 - DNA, 33 bp, Homo sapien
actcagagggataagagatttgcaaagcgtgag

SEQ ID NO: 162904 - DNA, 33 bp, Homo sapien
actcagagggataagatatttgcaaagcgtgag

SEQ ID NO: 162905 - DNA, 33 bp, Homo sapien
ctgagtctcagaaatcccccatgagtgaaaaag

SEQ ID NO: 162906 - DNA, 33 bp, Homo sapien
ctgagtctcagaaatctcccatgagtgaaaaag

SEQ ID NO: 162907 - DNA, 33 bp, Homo sapien
tattcaatcctgataaaaaacctcctgagatca

SEQ ID NO: 162908 - DNA, 33 bp, Homo sapien
tattcaatcctgataagaaacctcctgagatca

SEQ ID NO: 162909 - DNA, 33 bp, Homo sapien
ctttcttctccactaaaggatgagttccataag

SEQ ID NO: 162910 - DNA, 33 bp, Homo sapien
ctttcttctccactaagggatgagttccataag

SEQ ID NO: 162911 - DNA, 33 bp, Homo sapien
taggcccttgcaacaccctaatgaagtaagtat

SEQ ID NO: 162912 - DNA, 33 bp, Homo sapien
taggcccttgcaacactctaatgaagtaagtat

SEQ ID NO: 162913 - DNA, 33 bp, Homo sapien
ctagctccagatgataagccagcttcccagaag

SEQ ID NO: 162914 - DNA, 33 bp, Homo sapien
ctagctccagatgatatgccagcttcccagaag

SEQ ID NO: 162915 - DNA, 33 bp, Homo sapien
acaaagatgcacaaagaagaaggggtgcttgag

SEQ ID NO: 162916 - DNA, 33 bp, Homo sapien
acaaagatgcacaaagcagaaggggtgcttgag

SEQ ID NO: 162917 - DNA, 33 bp, Homo sapien
atcacatcatcctgagaagccatcaggacaaac

SEQ ID NO: 162918 - DNA, 33 bp, Homo sapien
atcacatcatcctgagcagccatcaggacaaac

SEQ ID NO: 162919 - DNA, 33 bp, Homo sapien
tgtggaacaagcttaacattagccagcctttaa

SEQ ID NO: 162920 - DNA, 33 bp, Homo sapien
tgtggaacaagcttaatattagccagcctttaa

SEQ ID NO: 162921 - DNA, 33 bp, Homo sapien
tatccacaattcacaaagcatcggtgtcagacc

SEQ ID NO: 162922 - DNA, 33 bp, Homo sapien
tatccacaattcacaaggcatcggtgtcagacc

SEQ ID NO: 162923 - DNA, 33 bp, Homo sapien
ccacagatattcaatacgtttgggatagcagtt

SEQ ID NO: 162924 - DNA, 33 bp, Homo sapien
ccacagatattcaatatgtttgggatagcagtt

SEQ ID NO: 162925 - DNA, 33 bp, Homo sapien
tgggggtatttccttcccaattctgctcaaggc

SEQ ID NO: 162926 - DNA, 33 bp, Homo sapien
tgggggtatttccttctcaattctgctcaaggc

SEQ ID NO: 162927 - DNA, 33 bp, Homo sapien
ccaggagagcagctgacaagagctttatggtaa

SEQ ID NO: 162928 - DNA, 33 bp, Homo sapien
ccaggagagcagctgataagagctttatggtaa

SEQ ID NO: 162929 - DNA, 33 bp, Homo sapien
gcctttttgatttacacgtgtttatttatgagt

SEQ ID NO: 162930 - DNA, 33 bp, Homo sapien
gcctttttgatttacatgtgtttatttatgagt

SEQ ID NO: 162931 - DNA, 33 bp, Homo sapien
ggaatcttcttcttccacatgtgccctgtccct

SEQ ID NO: 162932 - DNA, 33 bp, Homo sapien
ggaatcttcttcttccgcatgtgccctgtccct

SEQ ID NO: 162933 - DNA, 33 bp, Homo sapien
gtcagtcttattattaccatcagtagtatcttc

SEQ ID NO: 162934 - DNA, 33 bp, Homo sapien
gtcagtcttattattatcatcagtagtatcttc

SEQ ID NO: 162935 - DNA, 33 bp, Homo sapien
gagagactccaggtataacaatgaagcagccag

SEQ ID NO: 162936 - DNA, 33 bp, Homo sapien
gagagactccaggtatgacaatgaagcagccag

SEQ ID NO: 162937 - DNA, 33 bp, Homo sapien
tggtactttcccttccgctagagctttctagca

SEQ ID NO: 162938 - DNA, 33 bp, Homo sapien
tggtactttcccttcctctagagctttctagca

SEQ ID NO: 162939 - DNA, 33 bp, Homo sapien
cctatgaatacagaaaggaagggcatggtttct

SEQ ID NO: 162940 - DNA, 33 bp, Homo sapien
cctatgaatacagaaatgaagggcatggtttct

SEQ ID NO: 162941 - DNA, 33 bp, Homo sapien
cagcaaaataaaaggaatatctagttttggcgg

SEQ ID NO: 162942 - DNA, 33 bp, Homo sapien
cagcaaaataaaaggagtatctagttttggcgg

SEQ ID NO: 162943 - DNA, 33 bp, Homo sapien
ggtttacatagataaaagatacaggaataacga

SEQ ID NO: 162944 - DNA, 33 bp, Homo sapien
ggtttacatagataaaggatacaggaataacga

SEQ ID NO: 162945 - DNA, 33 bp, Homo sapien
cgtcacaagaacatcacaggagaaaccactccc

SEQ ID NO: 162946 - DNA, 33 bp, Homo sapien
cgtcacaagaacatcataggagaaaccactccc

SEQ ID NO: 162947 - DNA, 33 bp, Homo sapien
tgcaatctttcaccaacgggatggctttagttt

SEQ ID NO: 162948 - DNA, 33 bp, Homo sapien
tgcaatctttcaccaatgggatggctttagttt

SEQ ID NO: 162949 - DNA, 33 bp, Homo sapien
tatcctctagaactgcaaggaaacagatttctg

SEQ ID NO: 162950 - DNA, 33 bp, Homo sapien
tatcctctagaactgcgaggaaacagatttctg

SEQ ID NO: 162951 - DNA, 33 bp, Homo sapien
tgggttgcccacattcacctcaatatatctaac

SEQ ID NO: 162952 - DNA, 33 bp, Homo sapien
tgggttgcccacattcgcctcaatatatctaac

SEQ ID NO: 162953 - DNA, 33 bp, Homo sapien
tttgctttgctgtctaagaacccaactgccatg

SEQ ID NO: 162954 - DNA, 33 bp, Homo sapien
tttgctttgctgtctaggaacccaactgccatg

SEQ ID NO: 162955 - DNA, 33 bp, Homo sapien
atggaggatgattacacgagacaatgcaaataa

SEQ ID NO: 162956 - DNA, 33 bp, Homo sapien
atggaggatgattacatgagacaatgcaaataa

SEQ ID NO: 162957 - DNA, 33 bp, Homo sapien
gtgagaagaaaatgaaccaataatgatgtcaga

SEQ ID NO: 162958 - DNA, 33 bp, Homo sapien
gtgagaagaaaatgaagcaataatgatgtcaga

SEQ ID NO: 162959 - DNA, 33 bp, Homo sapien
ttacgtcatctcaatacaccttcctggagttga

SEQ ID NO: 162960 - DNA, 33 bp, Homo sapien
ttacgtcatctcaatataccttcctggagttga

SEQ ID NO: 162961 - DNA, 33 bp, Homo sapien
aagctgctaccacctgcaatgagtggagccaag

SEQ ID NO: 162962 - DNA, 33 bp, Homo sapien
aagctgctaccacctgtaatgagtggagccaag

SEQ ID NO: 162963 - DNA, 33 bp, Homo sapien
aaattgatttttctgcccaagtctactccagca

SEQ ID NO: 162964 - DNA, 33 bp, Homo sapien
aaattgatttttctgctcaagtctactccagca

SEQ ID NO: 162965 - DNA, 33 bp, Homo sapien
tcaatacatatagttccacaggaggccagcagt

SEQ ID NO: 162966 - DNA, 33 bp, Homo sapien
tcaatacatatagttctacaggaggccagcagt

SEQ ID NO: 162967 - DNA, 33 bp, Homo sapien
ccggtacataaaaatcaaccttgcctaagttta

SEQ ID NO: 162968 - DNA, 33 bp, Homo sapien
ccggtacataaaaatcgaccttgcctaagttta

SEQ ID NO: 162969 - DNA, 33 bp, Homo sapien
tagattcatgctgatgacatatctcaagtgttg

SEQ ID NO: 162970 - DNA, 33 bp, Homo sapien
tagattcatgctgatgccatatctcaagtgttg

SEQ ID NO: 162971 - DNA, 33 bp, Homo sapien
tcagtactagctcaaacgtcagtaaggctttcc

SEQ ID NO: 162972 - DNA, 33 bp, Homo sapien
tcagtactagctcaaatgtcagtaaggctttcc

SEQ ID NO: 162973 - DNA, 33 bp, Homo sapien
tgatttggccaaactaccaagtacttattcagc

SEQ ID NO: 162974 - DNA, 33 bp, Homo sapien
tgatttggccaaactagcaagtacttattcagc

SEQ ID NO: 162975 - DNA, 33 bp, Homo sapien
cactctgaagtctaaactgtcctaacactgtca

SEQ ID NO: 162976 - DNA, 33 bp, Homo sapien
cactctgaagtctaaattgtcctaacactgtca

SEQ ID NO: 162977 - DNA, 33 bp, Homo sapien
ttccaggacaggggaaacttgaacactgaagaa

SEQ ID NO: 162978 - DNA, 33 bp, Homo sapien
ttccaggacaggggaagcttgaacactgaagaa

SEQ ID NO: 162979 - DNA, 33 bp, Homo sapien
ggaattgtaagttggacaaaacacatgaagagc

SEQ ID NO: 162980 - DNA, 33 bp, Homo sapien
ggaattgtaagttggataaaacacatgaagagc

SEQ ID NO: 162981 - DNA, 33 bp, Homo sapien
gaattagaatgttctacaatggaggattacagc

SEQ ID NO: 162982 - DNA, 33 bp, Homo sapien
gaattagaatgttctagaatggaggattacagc

SEQ ID NO: 162983 - DNA, 33 bp, Homo sapien
caattgcctgaataataactcctgtgagcagta

SEQ ID NO: 162984 - DNA, 33 bp, Homo sapien
caattgcctgaataatgactcctgtgagcagta

SEQ ID NO: 162985 - DNA, 33 bp, Homo sapien
ttttatatgccaaaaacgggtctcttattagag

SEQ ID NO: 162986 - DNA, 33 bp, Homo sapien
ttttatatgccaaaaatgggtctcttattagag

SEQ ID NO: 162987 - DNA, 33 bp, Homo sapien
agagggccaaaccctcaaatatacgaatacctg

SEQ ID NO: 162988 - DNA, 33 bp, Homo sapien
agagggccaaaccctcgaatatacgaatacctg

SEQ ID NO: 162989 - DNA, 33 bp, Homo sapien
agaaaaaggcgacaaaatgtttcttctgagcaa

SEQ ID NO: 162990 - DNA, 33 bp, Homo sapien
agaaaaaggcgacaaagtgtttcttctgagcaa

SEQ ID NO: 162991 - DNA, 33 bp, Homo sapien
aggccaaaatccaagtaaaaagtgggcagagga

SEQ ID NO: 162992 - DNA, 33 bp, Homo sapien
aggccaaaatccaagttaaaagtgggcagagga

SEQ ID NO: 162993 - DNA, 33 bp, Homo sapien
ataatgcacaaaggcaaacacagtaagttctag

SEQ ID NO: 162994 - DNA, 33 bp, Homo sapien
ataatgcacaaaggcagacacagtaagttctag

SEQ ID NO: 162995 - DNA, 33 bp, Homo sapien
caaagatacataataactgtgtgagaggataca

SEQ ID NO: 162996 - DNA, 33 bp, Homo sapien
caaagatacataataagtgtgtgagaggataca

SEQ ID NO: 162997 - DNA, 33 bp, Homo sapien
ttaggttgtggttttagaacatggccagtcctg

SEQ ID NO: 162998 - DNA, 33 bp, Homo sapien
ttaggttgtggttttataacatggccagtcctg

SEQ ID NO: 162999 - DNA, 33 bp, Homo sapien
ccacctctgctatatccgaactgttcagccccc

SEQ ID NO: 163000 - DNA, 33 bp, Homo sapien
ccacctctgctatatctgaactgttcagccccc

SEQ ID NO: 163001 - DNA, 33 bp, Homo sapien
aggacaagggtttccacgccctggcaagtagtt

SEQ ID NO: 163002 - DNA, 33 bp, Homo sapien
aggacaagggtttccatgccctggcaagtagtt

SEQ ID NO: 163003 - DNA, 33 bp, Homo sapien
caatgcacagaaggaaattccatcatgggccat

SEQ ID NO: 163004 - DNA, 33 bp, Homo sapien
caatgcacagaaggaatttccatcatgggccat

SEQ ID NO: 163005 - DNA, 33 bp, Homo sapien
agtctgtgaaataaaagcaaaagggctctcaca

SEQ ID NO: 163006 - DNA, 33 bp, Homo sapien
agtctgtgaaataaaatcaaaagggctctcaca

SEQ ID NO: 163007 - DNA, 33 bp, Homo sapien
gctggactttcagaaaactggagctgaggcatt

SEQ ID NO: 163008 - DNA, 33 bp, Homo sapien
gctggactttcagaaagctggagctgaggcatt

SEQ ID NO: 163009 - DNA, 33 bp, Homo sapien
gttctggcctgagaaacgaggcagatgtcctgg

SEQ ID NO: 163010 - DNA, 33 bp, Homo sapien
gttctggcctgagaaatgaggcagatgtcctgg

SEQ ID NO: 163011 - DNA, 33 bp, Homo sapien
agggtgtgtcatcacccgagatcaagcttagaa

SEQ ID NO: 163012 - DNA, 33 bp, Homo sapien
agggtgtgtcatcaccggagatcaagcttagaa

SEQ ID NO: 163013 - DNA, 33 bp, Homo sapien
ttgttataaaatgagacagtcacacccacctag

SEQ ID NO: 163014 - DNA, 33 bp, Homo sapien
ttgttataaaatgagatagtcacacccacctag

SEQ ID NO: 163015 - DNA, 33 bp, Homo sapien
ttcatggcacttcaccagccaaattaaaacctg

SEQ ID NO: 163016 - DNA, 33 bp, Homo sapien
ttcatggcacttcaccggccaaattaaaacctg

SEQ ID NO: 163017 - DNA, 33 bp, Homo sapien
ctgaactccaacggtagggatgagtagtcagga

SEQ ID NO: 163018 - DNA, 33 bp, Homo sapien
ctgaactccaacggtatggatgagtagtcagga

SEQ ID NO: 163019 - DNA, 33 bp, Homo sapien
tgttcagccctaccaaatacttactctgtgcca

SEQ ID NO: 163020 - DNA, 33 bp, Homo sapien
tgttcagccctaccaagtacttactctgtgcca

SEQ ID NO: 163021 - DNA, 33 bp, Homo sapien
tattcctctatcctacaggccgcctcctgtgga

SEQ ID NO: 163022 - DNA, 33 bp, Homo sapien
tattcctctatcctacgggccgcctcctgtgga

SEQ ID NO: 163023 - DNA, 33 bp, Homo sapien
aagttcagaaaaaccacgaaggcagctggagat

SEQ ID NO: 163024 - DNA, 33 bp, Homo sapien
aagttcagaaaaaccatgaaggcagctggagat

SEQ ID NO: 163025 - DNA, 33 bp, Homo sapien
tcctcagggccaaaggaagaagcctccttacag

SEQ ID NO: 163026 - DNA, 33 bp, Homo sapien
tcctcagggccaaagggagaagcctccttacag

SEQ ID NO: 163027 - DNA, 33 bp, Homo sapien
cattctgctccaaagccctgtctgctgtacctg

SEQ ID NO: 163028 - DNA, 33 bp, Homo sapien
cattctgctccaaagctctgtctgctgtacctg

SEQ ID NO: 163029 - DNA, 33 bp, Homo sapien
atgcagaataaatgagccatctgtggtgagtaa

SEQ ID NO: 163030 - DNA, 33 bp, Homo sapien
atgcagaataaatgagtcatctgtggtgagtaa

SEQ ID NO: 163031 - DNA, 33 bp, Homo sapien
cagtgtgtccagaataacagcttagaggcagtt

SEQ ID NO: 163032 - DNA, 33 bp, Homo sapien
cagtgtgtccagaatagcagcttagaggcagtt

SEQ ID NO: 163033 - DNA, 33 bp, Homo sapien
caacaatatgcaataccagagggactgaagggg

SEQ ID NO: 163034 - DNA, 33 bp, Homo sapien
caacaatatgcaatacgagagggactgaagggg

SEQ ID NO: 163035 - DNA, 33 bp, Homo sapien
ataggttttagaagcccctatcaagccaggtgc

SEQ ID NO: 163036 - DNA, 33 bp, Homo sapien
ataggttttagaagccgctatcaagccaggtgc

SEQ ID NO: 163037 - DNA, 33 bp, Homo sapien
gctgactgccacttaacgtggtttgggaacttc

SEQ ID NO: 163038 - DNA, 33 bp, Homo sapien
gctgactgccacttaatgtggtttgggaacttc

SEQ ID NO: 163039 - DNA, 33 bp, Homo sapien
gggattaggttaggccacgtgatggtgcttctg

SEQ ID NO: 163040 - DNA, 33 bp, Homo sapien
gggattaggttaggcctcgtgatggtgcttctg

SEQ ID NO: 163041 - DNA, 33 bp, Homo sapien
gtaaatgagtagataccaagtggtctgtgagag

SEQ ID NO: 163042 - DNA, 33 bp, Homo sapien
gtaaatgagtagatactaagtggtctgtgagag

SEQ ID NO: 163043 - DNA, 33 bp, Homo sapien
acacctgggcttggtgaatgaggatttttcttt

SEQ ID NO: 163044 - DNA, 33 bp, Homo sapien
acacctgggcttggtgcatgaggatttttcttt

SEQ ID NO: 163045 - DNA, 33 bp, Homo sapien
gagcttgaccccactaccccacttgaacatcta

SEQ ID NO: 163046 - DNA, 33 bp, Homo sapien
gagcttgaccccactatcccacttgaacatcta

SEQ ID NO: 163047 - DNA, 33 bp, Homo sapien
tcatatactcagatgaatcaggtagcctctaga

SEQ ID NO: 163048 - DNA, 33 bp, Homo sapien
tcatatactcagatgagtcaggtagcctctaga

SEQ ID NO: 163049 - DNA, 33 bp, Homo sapien
taccgattggatgcttcaagaaaacctgtgaga

SEQ ID NO: 163050 - DNA, 33 bp, Homo sapien
taccgattggatgctttaagaaaacctgtgaga

SEQ ID NO: 163051 - DNA, 33 bp, Homo sapien
ccagattggaaatcataagagtccaagcccctt

SEQ ID NO: 163052 - DNA, 33 bp, Homo sapien
ccagattggaaatcatgagagtccaagcccctt

SEQ ID NO: 163053 - DNA, 33 bp, Homo sapien
cacctggttggccaagcccttgtgtaacaaaca

SEQ ID NO: 163054 - DNA, 33 bp, Homo sapien
cacctggttggccaagtccttgtgtaacaaaca

SEQ ID NO: 163055 - DNA, 33 bp, Homo sapien
tgggacacagccttaccatttggttgcaagttg

SEQ ID NO: 163056 - DNA, 33 bp, Homo sapien
tgggacacagccttactatttggttgcaagttg

SEQ ID NO: 163057 - DNA, 33 bp, Homo sapien
agaaaagcatttagaacagtcactggctgtaaa

SEQ ID NO: 163058 - DNA, 33 bp, Homo sapien
agaaaagcatttagaatagtcactggctgtaaa

SEQ ID NO: 163059 - DNA, 33 bp, Homo sapien
ctactgctaacataataagcatgtctgggatct

SEQ ID NO: 163060 - DNA, 33 bp, Homo sapien
ctactgctaacataatgagcatgtctgggatct

SEQ ID NO: 163061 - DNA, 33 bp, Homo sapien
catacagaggctctccacacaagctagggcttc

SEQ ID NO: 163062 - DNA, 33 bp, Homo sapien
catacagaggctctccgcacaagctagggcttc

SEQ ID NO: 163063 - DNA, 33 bp, Homo sapien
tgaccagatgcaggaacgtccagaggaaggcta

SEQ ID NO: 163064 - DNA, 33 bp, Homo sapien
tgaccagatgcaggaatgtccagaggaaggcta

SEQ ID NO: 163065 - DNA, 33 bp, Homo sapien
atttaagaccaactgacgaaaaacagcatttta

SEQ ID NO: 163066 - DNA, 33 bp, Homo sapien
atttaagaccaactgaggaaaaacagcatttta

SEQ ID NO: 163067 - DNA, 33 bp, Homo sapien
aaccagtaggcaaaggcaagatgactgactgga

SEQ ID NO: 163068 - DNA, 33 bp, Homo sapien
aaccagtaggcaaaggtaagatgactgactgga

SEQ ID NO: 163069 - DNA, 33 bp, Homo sapien
gttagcaaatgaaaaaatccgtcctcctgaagg

SEQ ID NO: 163070 - DNA, 33 bp, Homo sapien
gttagcaaatgaaaaagtccgtcctcctgaagg

SEQ ID NO: 163071 - DNA, 33 bp, Homo sapien
ttttaattcttcgagaacaaagcatttgaaaag

SEQ ID NO: 163072 - DNA, 33 bp, Homo sapien
ttttaattcttcgagaccaaagcatttgaaaag

SEQ ID NO: 163073 - DNA, 33 bp, Homo sapien
acattaaagagcataacctccatgcagtccacc

SEQ ID NO: 163074 - DNA, 33 bp, Homo sapien
acattaaagagcataatctccatgcagtccacc

SEQ ID NO: 163075 - DNA, 33 bp, Homo sapien
ctgagatactcccatgcaggtggctttaattcc

SEQ ID NO: 163076 - DNA, 33 bp, Homo sapien
ctgagatactcccatgtaggtggctttaattcc

SEQ ID NO: 163077 - DNA, 33 bp, Homo sapien
gctgagcctgtcctaactgactacattaagggt

SEQ ID NO: 163078 - DNA, 33 bp, Homo sapien
gctgagcctgtcctaattgactacattaagggt

SEQ ID NO: 163079 - DNA, 33 bp, Homo sapien
ggtcaagtcattgcaacggagaatgaacagctg

SEQ ID NO: 163080 - DNA, 33 bp, Homo sapien
ggtcaagtcattgcaagggagaatgaacagctg

SEQ ID NO: 163081 - DNA, 33 bp, Homo sapien
tttctctgctgacccagaggtgagtcccgactg

SEQ ID NO: 163082 - DNA, 33 bp, Homo sapien
tttctctgctgacccataggtgagtcccgactg

SEQ ID NO: 163083 - DNA, 33 bp, Homo sapien
cttcagggcttctaaccatctaagctacatatc

SEQ ID NO: 163084 - DNA, 33 bp, Homo sapien
cttcagggcttctaacgatctaagctacatatc

SEQ ID NO: 163085 - DNA, 33 bp, Homo sapien
caagaaagcacaaagacgcacaaagacaccaaa

SEQ ID NO: 163086 - DNA, 33 bp, Homo sapien
caagaaagcacaaagatgcacaaagacaccaaa

SEQ ID NO: 163087 - DNA, 33 bp, Homo sapien
taaagtcttcagttgacaaatgaatcttcccat

SEQ ID NO: 163088 - DNA, 33 bp, Homo sapien
taaagtcttcagttgataaatgaatcttcccat

SEQ ID NO: 163089 - DNA, 33 bp, Homo sapien
agcccacccatatgcaagcattaaccctgagtc

SEQ ID NO: 163090 - DNA, 33 bp, Homo sapien
agcccacccatatgcatgcattaaccctgagtc

SEQ ID NO: 163091 - DNA, 33 bp, Homo sapien
acatacgggagactcacacaccaggtcctgttc

SEQ ID NO: 163092 - DNA, 33 bp, Homo sapien
acatacgggagactcagacaccaggtcctgttc

SEQ ID NO: 163093 - DNA, 33 bp, Homo sapien
tccacaactatcatatgagggaaacaggattat

SEQ ID NO: 163094 - DNA, 33 bp, Homo sapien
tccacaactatcatattagggaaacaggattat

SEQ ID NO: 163095 - DNA, 33 bp, Homo sapien
gtgagccgccattcccaaccagaacatctgtat

SEQ ID NO: 163096 - DNA, 33 bp, Homo sapien
gtgagccgccattcccgaccagaacatctgtat

SEQ ID NO: 163097 - DNA, 33 bp, Homo sapien
gcaggaacagtggagacaacacaggaaaaagga

SEQ ID NO: 163098 - DNA, 33 bp, Homo sapien
gcaggaacagtggagataacacaggaaaaagga

SEQ ID NO: 163099 - DNA, 33 bp, Homo sapien
gctttaaggtccccaactatgggatggaagtta

SEQ ID NO: 163100 - DNA, 33 bp, Homo sapien
gctttaaggtccccaagtatgggatggaagtta

SEQ ID NO: 163101 - DNA, 33 bp, Homo sapien
ggtgccctgtgatcaacgaagaaactaaggcac

SEQ ID NO: 163102 - DNA, 33 bp, Homo sapien
ggtgccctgtgatcaaggaagaaactaaggcac

SEQ ID NO: 163103 - DNA, 33 bp, Homo sapien
gcactgagtatgcataaggcacaaccgcatgtg

SEQ ID NO: 163104 - DNA, 33 bp, Homo sapien
gcactgagtatgcatacggcacaaccgcatgtg

SEQ ID NO: 163105 - DNA, 33 bp, Homo sapien
ctttaaaatcagtggcacctctagggtggggag

SEQ ID NO: 163106 - DNA, 33 bp, Homo sapien
ctttaaaatcagtggcgcctctagggtggggag

SEQ ID NO: 163107 - DNA, 33 bp, Homo sapien
cactgacctgtcggacaaaggatgaatactgat

SEQ ID NO: 163108 - DNA, 33 bp, Homo sapien
cactgacctgtcggacgaaggatgaatactgat

SEQ ID NO: 163109 - DNA, 33 bp, Homo sapien
aatgtcttcagtgtacaatacccaagaggaagg

SEQ ID NO: 163110 - DNA, 33 bp, Homo sapien
aatgtcttcagtgtacgatacccaagaggaagg

SEQ ID NO: 163111 - DNA, 33 bp, Homo sapien
gacctttaggccaaaaatagtgactgaggactt

SEQ ID NO: 163112 - DNA, 33 bp, Homo sapien
gacctttaggccaaaattagtgactgaggactt

SEQ ID NO: 163113 - DNA, 33 bp, Homo sapien
aatattttaaacaacactcattaccaagagaaa

SEQ ID NO: 163114 - DNA, 33 bp, Homo sapien
aatattttaaacaacattcattaccaagagaaa

SEQ ID NO: 163115 - DNA, 33 bp, Homo sapien
aaacaggtagtttgcacaaaatagaaacttttc

SEQ ID NO: 163116 - DNA, 33 bp, Homo sapien
aaacaggtagtttgcagaaaatagaaacttttc

SEQ ID NO: 163117 - DNA, 33 bp, Homo sapien
taagggtggaactgtaaatgcaaaacaaaacaa

SEQ ID NO: 163118 - DNA, 33 bp, Homo sapien
taagggtggaactgtagatgcaaaacaaaacaa

SEQ ID NO: 163119 - DNA, 33 bp, Homo sapien
ccaccagcatctagaaccttaaaggggcctacc

SEQ ID NO: 163120 - DNA, 33 bp, Homo sapien
ccaccagcatctagaatcttaaaggggcctacc

SEQ ID NO: 163121 - DNA, 33 bp, Homo sapien
tcacacgcacgtgcgcaaacggacctgtgcccc

SEQ ID NO: 163122 - DNA, 33 bp, Homo sapien
tcacacgcacgtgcgcgaacggacctgtgcccc

SEQ ID NO: 163123 - DNA, 33 bp, Homo sapien
aactaacaaaggagaacgcagtcacactttaca

SEQ ID NO: 163124 - DNA, 33 bp, Homo sapien
aactaacaaaggagaatgcagtcacactttaca

SEQ ID NO: 163125 - DNA, 33 bp, Homo sapien
cacctgtgggagttaaagatctacatctgccaa

SEQ ID NO: 163126 - DNA, 33 bp, Homo sapien
cacctgtgggagttaacgatctacatctgccaa

SEQ ID NO: 163127 - DNA, 33 bp, Homo sapien
tttgtatttcttgtaaaccatgctatcctggtc

SEQ ID NO: 163128 - DNA, 33 bp, Homo sapien
tttgtatttcttgtaacccatgctatcctggtc

SEQ ID NO: 163129 - DNA, 33 bp, Homo sapien
atcaagcctacaaatacagtggagatatgtctt

SEQ ID NO: 163130 - DNA, 33 bp, Homo sapien
atcaagcctacaaatatagtggagatatgtctt

SEQ ID NO: 163131 - DNA, 33 bp, Homo sapien
tgttccctgctgcaaacttgtacatgatcttgg

SEQ ID NO: 163132 - DNA, 33 bp, Homo sapien
tgttccctgctgcaaatttgtacatgatcttgg

SEQ ID NO: 163133 - DNA, 33 bp, Homo sapien
tttttaaggctttgataagtgtgcttcaattga

SEQ ID NO: 163134 - DNA, 33 bp, Homo sapien
tttttaaggctttgatgagtgtgcttcaattga

SEQ ID NO: 163135 - DNA, 33 bp, Homo sapien
gtataaagattaaggcaccagaggcaggtagga

SEQ ID NO: 163136 - DNA, 33 bp, Homo sapien
gtataaagattaaggctccagaggcaggtagga

SEQ ID NO: 163137 - DNA, 33 bp, Homo sapien
ctttcactttcagccaaagcattcctaattgat

SEQ ID NO: 163138 - DNA, 33 bp, Homo sapien
ctttcactttcagccagagcattcctaattgat

SEQ ID NO: 163139 - DNA, 33 bp, Homo sapien
cagaaatgctatgaacaggtacccacaattggg

SEQ ID NO: 163140 - DNA, 33 bp, Homo sapien
cagaaatgctatgaacgggtacccacaattggg

SEQ ID NO: 163141 - DNA, 33 bp, Homo sapien
aggtttggtcatttaacgtaatctcagacctct

SEQ ID NO: 163142 - DNA, 33 bp, Homo sapien
aggtttggtcatttaatgtaatctcagacctct

SEQ ID NO: 163143 - DNA, 33 bp, Homo sapien
aatatgacaaaacaagcctcgttaacatccccc

SEQ ID NO: 163144 - DNA, 33 bp, Homo sapien
aatatgacaaaacaaggctcgttaacatccccc

SEQ ID NO: 163145 - DNA, 33 bp, Homo sapien
ttttcgccctattcaaatcgtttcacagttcag

SEQ ID NO: 163146 - DNA, 33 bp, Homo sapien
ttttcgccctattcaagtcgtttcacagttcag

SEQ ID NO: 163147 - DNA, 33 bp, Homo sapien
gtgatagaaagtaatgacatcagcagctgtact

SEQ ID NO: 163148 - DNA, 33 bp, Homo sapien
gtgatagaaagtaatgccatcagcagctgtact

SEQ ID NO: 163149 - DNA, 33 bp, Homo sapien
accgaaataatatctgacaattacctggttttt

SEQ ID NO: 163150 - DNA, 33 bp, Homo sapien
accgaaataatatctggcaattacctggttttt

SEQ ID NO: 163151 - DNA, 33 bp, Homo sapien
tattccttgctatccaaatgaattcagttcctg

SEQ ID NO: 163152 - DNA, 33 bp, Homo sapien
tattccttgctatccagatgaattcagttcctg

SEQ ID NO: 163153 - DNA, 33 bp, Homo sapien
tctgtttggcagttcaaagtcaagctgatttaa

SEQ ID NO: 163154 - DNA, 33 bp, Homo sapien
tctgtttggcagttcatagtcaagctgatttaa

SEQ ID NO: 163155 - DNA, 33 bp, Homo sapien
aataggtattaggtacaaatgtgagagcattgc

SEQ ID NO: 163156 - DNA, 33 bp, Homo sapien
aataggtattaggtacgaatgtgagagcattgc

SEQ ID NO: 163157 - DNA, 33 bp, Homo sapien
tcctgggaaaattacaatgatgactcccaactt

SEQ ID NO: 163158 - DNA, 33 bp, Homo sapien
tcctgggaaaattacagtgatgactcccaactt

SEQ ID NO: 163159 - DNA, 33 bp, Homo sapien
tatttgattcttgtagccaactagttctgctct

SEQ ID NO: 163160 - DNA, 33 bp, Homo sapien
tatttgattcttgtaggcaactagttctgctct

SEQ ID NO: 163161 - DNA, 33 bp, Homo sapien
gtgacagggtgacaacaaatgtaaatagactaa

SEQ ID NO: 163162 - DNA, 33 bp, Homo sapien
gtgacagggtgacaacgaatgtaaatagactaa

SEQ ID NO: 163163 - DNA, 33 bp, Homo sapien
tgggagaagagcaaaaacacaaataccacatta

SEQ ID NO: 163164 - DNA, 33 bp, Homo sapien
tgggagaagagcaaaaccacaaataccacatta

SEQ ID NO: 163165 - DNA, 33 bp, Homo sapien
tccagagagcccagaacaatcttttaatagttc

SEQ ID NO: 163166 - DNA, 33 bp, Homo sapien
tccagagagcccagaagaatcttttaatagttc

SEQ ID NO: 163167 - DNA, 33 bp, Homo sapien
ctttagctttctcatacgtgagtcagacatcta

SEQ ID NO: 163168 - DNA, 33 bp, Homo sapien
ctttagctttctcatatgtgagtcagacatcta

SEQ ID NO: 163169 - DNA, 33 bp, Homo sapien
tttccttgctatagtacgtctttgagtagttct

SEQ ID NO: 163170 - DNA, 33 bp, Homo sapien
tttccttgctatagtatgtctttgagtagttct

SEQ ID NO: 163171 - DNA, 33 bp, Homo sapien
ttcttttatcaagcatcagtggagttttgtagg

SEQ ID NO: 163172 - DNA, 33 bp, Homo sapien
ttcttttatcaagcattagtggagttttgtagg

SEQ ID NO: 163173 - DNA, 33 bp, Homo sapien
ttatcctttcgttccacaactgtgctacctttg

SEQ ID NO: 163174 - DNA, 33 bp, Homo sapien
ttatcctttcgttccataactgtgctacctttg

SEQ ID NO: 163175 - DNA, 33 bp, Homo sapien
cattctgtctcagatcaatcatattactactca

SEQ ID NO: 163176 - DNA, 33 bp, Homo sapien
cattctgtctcagatcgatcatattactactca

SEQ ID NO: 163177 - DNA, 33 bp, Homo sapien
agaatagctggtgtccacttgctgagcagcatt

SEQ ID NO: 163178 - DNA, 33 bp, Homo sapien
agaatagctggtgtccgcttgctgagcagcatt

SEQ ID NO: 163179 - DNA, 33 bp, Homo sapien
taaagtggtatctaaactggccaggactgctgc

SEQ ID NO: 163180 - DNA, 33 bp, Homo sapien
taaagtggtatctaaattggccaggactgctgc

SEQ ID NO: 163181 - DNA, 33 bp, Homo sapien
gaccttcaccacacaacctgaggaaggcaaact

SEQ ID NO: 163182 - DNA, 33 bp, Homo sapien
gaccttcaccacacaatctgaggaaggcaaact

SEQ ID NO: 163183 - DNA, 33 bp, Homo sapien
tcctatgaaacagtgccagggcagcttttactt

SEQ ID NO: 163184 - DNA, 33 bp, Homo sapien
tcctatgaaacagtgctagggcagcttttactt

SEQ ID NO: 163185 - DNA, 33 bp, Homo sapien
ttggatttcctggttacaacagcagtgggaaaa

SEQ ID NO: 163186 - DNA, 33 bp, Homo sapien
ttggatttcctggttataacagcagtgggaaaa

SEQ ID NO: 163187 - DNA, 33 bp, Homo sapien
acaggacttgttttaaccaacatacaggcctgt

SEQ ID NO: 163188 - DNA, 33 bp, Homo sapien
acaggacttgttttaagcaacatacaggcctgt

SEQ ID NO: 163189 - DNA, 33 bp, Homo sapien
gctgtggctgattaggaccataaattttgagtg

SEQ ID NO: 163190 - DNA, 33 bp, Homo sapien
gctgtggctgattaggcccataaattttgagtg

SEQ ID NO: 163191 - DNA, 33 bp, Homo sapien
gagtgtcctcagtaataatcaaccctaaagtaa

SEQ ID NO: 163192 - DNA, 33 bp, Homo sapien
gagtgtcctcagtaatcatcaaccctaaagtaa

SEQ ID NO: 163193 - DNA, 33 bp, Homo sapien
tacacagagaaatgacaaaactattttcttaac

SEQ ID NO: 163194 - DNA, 33 bp, Homo sapien
tacacagagaaatgaccaaactattttcttaac

SEQ ID NO: 163195 - DNA, 33 bp, Homo sapien
tgaagtttgaatttaacgtcttccacttcttcc

SEQ ID NO: 163196 - DNA, 33 bp, Homo sapien
tgaagtttgaatttaatgtcttccacttcttcc

SEQ ID NO: 163197 - DNA, 33 bp, Homo sapien
gggtcttggaacagacagaaaagacttcagaaa

SEQ ID NO: 163198 - DNA, 33 bp, Homo sapien
gggtcttggaacagacggaaaagacttcagaaa

SEQ ID NO: 163199 - DNA, 33 bp, Homo sapien
aaatggagatagtaacaccttctatattaggta

SEQ ID NO: 163200 - DNA, 33 bp, Homo sapien
aaatggagatagtaacgccttctatattaggta

SEQ ID NO: 163201 - DNA, 33 bp, Homo sapien
atcaacacattcattacggactgagagcacaca

SEQ ID NO: 163202 - DNA, 33 bp, Homo sapien
atcaacacattcattatggactgagagcacaca

SEQ ID NO: 163203 - DNA, 33 bp, Homo sapien
atagacaaataatcagacaataacacggggaaa

SEQ ID NO: 163204 - DNA, 33 bp, Homo sapien
atagacaaataatcaggcaataacacggggaaa

SEQ ID NO: 163205 - DNA, 33 bp, Homo sapien
gggctctgggagtacaacagcaaaggacgtgga

SEQ ID NO: 163206 - DNA, 33 bp, Homo sapien
gggctctgggagtacagcagcaaaggacgtgga

SEQ ID NO: 163207 - DNA, 33 bp, Homo sapien
cagaagaatgtgatgaaatatgcaattgatgaa

SEQ ID NO: 163208 - DNA, 33 bp, Homo sapien
cagaagaatgtgatgagatatgcaattgatgaa

SEQ ID NO: 163209 - DNA, 33 bp, Homo sapien
agtgcaattttcaagacaggtgaatatctggat

SEQ ID NO: 163210 - DNA, 33 bp, Homo sapien
agtgcaattttcaagataggtgaatatctggat

SEQ ID NO: 163211 - DNA, 33 bp, Homo sapien
tagtttatactgtcacaggcactgagagtgtgg

SEQ ID NO: 163212 - DNA, 33 bp, Homo sapien
tagtttatactgtcacgggcactgagagtgtgg

SEQ ID NO: 163213 - DNA, 33 bp, Homo sapien
gttttctgcaatgctcaagctagtttatactgt

SEQ ID NO: 163214 - DNA, 33 bp, Homo sapien
gttttctgcaatgctcgagctagtttatactgt

SEQ ID NO: 163215 - DNA, 33 bp, Homo sapien
cactgcacacccaacaactaaatgtaaaagact

SEQ ID NO: 163216 - DNA, 33 bp, Homo sapien
cactgcacacccaacagctaaatgtaaaagact

SEQ ID NO: 163217 - DNA, 33 bp, Homo sapien
atctaggagagctttacggtttgggactactat

SEQ ID NO: 163218 - DNA, 33 bp, Homo sapien
atctaggagagctttatggtttgggactactat

SEQ ID NO: 163219 - DNA, 33 bp, Homo sapien
cttctctatggctggacaattttaagacctctc

SEQ ID NO: 163220 - DNA, 33 bp, Homo sapien
cttctctatggctggataattttaagacctctc

SEQ ID NO: 163221 - DNA, 33 bp, Homo sapien
gggtggggctagaaaacggaccacgcaagttat

SEQ ID NO: 163222 - DNA, 33 bp, Homo sapien
gggtggggctagaaaatggaccacgcaagttat

SEQ ID NO: 163223 - DNA, 33 bp, Homo sapien
atataaatgaggacaaatgatctaactgttaga

SEQ ID NO: 163224 - DNA, 33 bp, Homo sapien
atataaatgaggacaattgatctaactgttaga

SEQ ID NO: 163225 - DNA, 33 bp, Homo sapien
ccatatcaccctgacccggtaaccagaagggaa

SEQ ID NO: 163226 - DNA, 33 bp, Homo sapien
ccatatcaccctgacctggtaaccagaagggaa

SEQ ID NO: 163227 - DNA, 33 bp, Homo sapien
acataagaatttaagacgagtgccttagttaaa

SEQ ID NO: 163228 - DNA, 33 bp, Homo sapien
acataagaatttaagatgagtgccttagttaaa

SEQ ID NO: 163229 - DNA, 33 bp, Homo sapien
cagtctgcatggaggacaagctaagattccgtt

SEQ ID NO: 163230 - DNA, 33 bp, Homo sapien
cagtctgcatggaggataagctaagattccgtt

SEQ ID NO: 163231 - DNA, 33 bp, Homo sapien
ctctgcattttgccaagagttggagaagttggg

SEQ ID NO: 163232 - DNA, 33 bp, Homo sapien
ctctgcattttgccaatagttggagaagttggg

SEQ ID NO: 163233 - DNA, 33 bp, Homo sapien
aattcttcaaataagcacttccaactgggcaca

SEQ ID NO: 163234 - DNA, 33 bp, Homo sapien
aattcttcaaataagctcttccaactgggcaca

SEQ ID NO: 163235 - DNA, 33 bp, Homo sapien
tggatgctgtgctccaaggcagaaggctgttgt

SEQ ID NO: 163236 - DNA, 33 bp, Homo sapien
tggatgctgtgctccagggcagaaggctgttgt

SEQ ID NO: 163237 - DNA, 33 bp, Homo sapien
aatcgaaaatgtctgactaactttggtatcagg

SEQ ID NO: 163238 - DNA, 33 bp, Homo sapien
aatcgaaaatgtctgattaactttggtatcagg

SEQ ID NO: 163239 - DNA, 33 bp, Homo sapien
aaaatgaaaaataggaacttagtatcagatatg

SEQ ID NO: 163240 - DNA, 33 bp, Homo sapien
aaaatgaaaaataggagcttagtatcagatatg

SEQ ID NO: 163241 - DNA, 33 bp, Homo sapien
agtgagagggcttcacgcagctcgatgagcggc

SEQ ID NO: 163242 - DNA, 33 bp, Homo sapien
agtgagagggcttcactcagctcgatgagcggc

SEQ ID NO: 163243 - DNA, 33 bp, Homo sapien
aatgtgtgtgtagaaaacaattgctatgtgctg

SEQ ID NO: 163244 - DNA, 33 bp, Homo sapien
aatgtgtgtgtagaaagcaattgctatgtgctg

SEQ ID NO: 163245 - DNA, 33 bp, Homo sapien
ttgatttcttctcataagagtgggtgagattaa

SEQ ID NO: 163246 - DNA, 33 bp, Homo sapien
ttgatttcttctcatacgagtgggtgagattaa

SEQ ID NO: 163247 - DNA, 33 bp, Homo sapien
tggcttcaggctctccagaaacgtgcaggcaca

SEQ ID NO: 163248 - DNA, 33 bp, Homo sapien
tggcttcaggctctccggaaacgtgcaggcaca

SEQ ID NO: 163249 - DNA, 33 bp, Homo sapien
gaacaacgtgcaggacaagtggaagagcaactg

SEQ ID NO: 163250 - DNA, 33 bp, Homo sapien
gaacaacgtgcaggacgagtggaagagcaactg

SEQ ID NO: 163251 - DNA, 33 bp, Homo sapien
tcacttgggcagatgaagaaggctcgggaaagg

SEQ ID NO: 163252 - DNA, 33 bp, Homo sapien
tcacttgggcagatgaggaaggctcgggaaagg

SEQ ID NO: 163253 - DNA, 33 bp, Homo sapien
gtttataattataagaagatggaggatctcaaa

SEQ ID NO: 163254 - DNA, 33 bp, Homo sapien
gtttataattataagacgatggaggatctcaaa

SEQ ID NO: 163255 - DNA, 33 bp, Homo sapien
accaagtacctaatacagcacctcttccatacc

SEQ ID NO: 163256 - DNA, 33 bp, Homo sapien
accaagtacctaataccgcacctcttccatacc

SEQ ID NO: 163257 - DNA, 33 bp, Homo sapien
ctggctaagtagccaacgtcttttgtggagagc

SEQ ID NO: 163258 - DNA, 33 bp, Homo sapien
ctggctaagtagccaaggtcttttgtggagagc

SEQ ID NO: 163259 - DNA, 33 bp, Homo sapien
atgttatcaagctgcacgtgcgatcattcacac

SEQ ID NO: 163260 - DNA, 33 bp, Homo sapien
atgttatcaagctgcatgtgcgatcattcacac

SEQ ID NO: 163261 - DNA, 33 bp, Homo sapien
caagccaaattttgaactaggggctgtaggact

SEQ ID NO: 163262 - DNA, 33 bp, Homo sapien
caagccaaattttgaattaggggctgtaggact

SEQ ID NO: 163263 - DNA, 33 bp, Homo sapien
ctctgcctcccaggccaagcgttccataaaaag

SEQ ID NO: 163264 - DNA, 33 bp, Homo sapien
ctctgcctcccaggccgagcgttccataaaaag

SEQ ID NO: 163265 - DNA, 33 bp, Homo sapien
agagaaagataggtgacgcagtgaatgtagatt

SEQ ID NO: 163266 - DNA, 33 bp, Homo sapien
agagaaagataggtgatgcagtgaatgtagatt

SEQ ID NO: 163267 - DNA, 33 bp, Homo sapien
caagtgctaagctaagactcttgtatacacaat

SEQ ID NO: 163268 - DNA, 33 bp, Homo sapien
caagtgctaagctaaggctcttgtatacacaat

SEQ ID NO: 163269 - DNA, 33 bp, Homo sapien
ccctggatcttattgaagccttctgttttagct

SEQ ID NO: 163270 - DNA, 33 bp, Homo sapien
ccctggatcttattgacgccttctgttttagct

SEQ ID NO: 163271 - DNA, 33 bp, Homo sapien
ctgggactttcatcaccacccagtggtaacaag

SEQ ID NO: 163272 - DNA, 33 bp, Homo sapien
ctgggactttcatcactacccagtggtaacaag

SEQ ID NO: 163273 - DNA, 33 bp, Homo sapien
agatctagggctgccacgaatggttgtgtagtg

SEQ ID NO: 163274 - DNA, 33 bp, Homo sapien
agatctagggctgccatgaatggttgtgtagtg

SEQ ID NO: 163275 - DNA, 33 bp, Homo sapien
ctatgaaggcaggaatcaagccttgtttgctat

SEQ ID NO: 163276 - DNA, 33 bp, Homo sapien
ctatgaaggcaggaattaagccttgtttgctat

SEQ ID NO: 163277 - DNA, 33 bp, Homo sapien
acaataatcactactaccatttattgagcattg

SEQ ID NO: 163278 - DNA, 33 bp, Homo sapien
acaataatcactactatcatttattgagcattg

SEQ ID NO: 163279 - DNA, 33 bp, Homo sapien
aaataattttcataaaaggactgtcttttgagt

SEQ ID NO: 163280 - DNA, 33 bp, Homo sapien
aaataattttcataaagggactgtcttttgagt

SEQ ID NO: 163281 - DNA, 33 bp, Homo sapien
tagactcccttcactaaaatgcaaatgtcacag

SEQ ID NO: 163282 - DNA, 33 bp, Homo sapien
tagactcccttcactagaatgcaaatgtcacag

SEQ ID NO: 163283 - DNA, 33 bp, Homo sapien
attgagcatacgcagcaagaacaaagactgcac

SEQ ID NO: 163284 - DNA, 33 bp, Homo sapien
attgagcatacgcagccagaacaaagactgcac

SEQ ID NO: 163285 - DNA, 33 bp, Homo sapien
gcagaggaatatagacaaggctctccctacctc

SEQ ID NO: 163286 - DNA, 33 bp, Homo sapien
gcagaggaatatagactaggctctccctacctc

SEQ ID NO: 163287 - DNA, 33 bp, Homo sapien
gtaattaaggaacaacacctcattagtaacaga

SEQ ID NO: 163288 - DNA, 33 bp, Homo sapien
gtaattaaggaacaacgcctcattagtaacaga

SEQ ID NO: 163289 - DNA, 33 bp, Homo sapien
atcctcctgtacataccccaatttgcagaccac

SEQ ID NO: 163290 - DNA, 33 bp, Homo sapien
atcctcctgtacatactccaatttgcagaccac

SEQ ID NO: 163291 - DNA, 33 bp, Homo sapien
gatgaatagcatgatgcatattgtcactcattt

SEQ ID NO: 163292 - DNA, 33 bp, Homo sapien
gatgaatagcatgatgtatattgtcactcattt

SEQ ID NO: 163293 - DNA, 33 bp, Homo sapien
tggtgaatggctaaacaaaatgaggtatataca

SEQ ID NO: 163294 - DNA, 33 bp, Homo sapien
tggtgaatggctaaaccaaatgaggtatataca

SEQ ID NO: 163295 - DNA, 33 bp, Homo sapien
ggtagtggggaaaatacacaaggagacctagat

SEQ ID NO: 163296 - DNA, 33 bp, Homo sapien
ggtagtggggaaaatatacaaggagacctagat

SEQ ID NO: 163297 - DNA, 33 bp, Homo sapien
attgagactcagaaaaagttaggtaatttgccc

SEQ ID NO: 163298 - DNA, 33 bp, Homo sapien
attgagactcagaaaaggttaggtaatttgccc

SEQ ID NO: 163299 - DNA, 33 bp, Homo sapien
gaatctgcagcagaaaagttttaaacaagggat

SEQ ID NO: 163300 - DNA, 33 bp, Homo sapien
gaatctgcagcagaaaggttttaaacaagggat

SEQ ID NO: 163301 - DNA, 33 bp, Homo sapien
gttattggtagttgccactggaagccattctaa

SEQ ID NO: 163302 - DNA, 33 bp, Homo sapien
gttattggtagttgccgctggaagccattctaa

SEQ ID NO: 163303 - DNA, 33 bp, Homo sapien
tcgtcatgttggccacactaaactcgaattccc

SEQ ID NO: 163304 - DNA, 33 bp, Homo sapien
tcgtcatgttggccacgctaaactcgaattccc

SEQ ID NO: 163305 - DNA, 33 bp, Homo sapien
taagcaagatcctaaccggggcctccttcctat

SEQ ID NO: 163306 - DNA, 33 bp, Homo sapien
taagcaagatcctaactggggcctccttcctat

SEQ ID NO: 163307 - DNA, 33 bp, Homo sapien
tgtggctggtcccacaacctggttctatcaggc

SEQ ID NO: 163308 - DNA, 33 bp, Homo sapien
tgtggctggtcccacatcctggttctatcaggc

SEQ ID NO: 163309 - DNA, 33 bp, Homo sapien
tcctgttgcaggacaacgcgaaggatcatgact

SEQ ID NO: 163310 - DNA, 33 bp, Homo sapien
tcctgttgcaggacaatgcgaaggatcatgact

SEQ ID NO: 163311 - DNA, 33 bp, Homo sapien
tatgccctcctatcaccctttttgagaatactg

SEQ ID NO: 163312 - DNA, 33 bp, Homo sapien
tatgccctcctatcactctttttgagaatactg

SEQ ID NO: 163313 - DNA, 33 bp, Homo sapien
ggtccagggagatttaaattctgatgaaggcaa

SEQ ID NO: 163314 - DNA, 33 bp, Homo sapien
ggtccagggagatttagattctgatgaaggcaa

SEQ ID NO: 163315 - DNA, 33 bp, Homo sapien
gaaatttgaattacaaaatcttacatggacatg

SEQ ID NO: 163316 - DNA, 33 bp, Homo sapien
gaaatttgaattacaagatcttacatggacatg

SEQ ID NO: 163317 - DNA, 33 bp, Homo sapien
aagtagctggagctcaaaccagacagcgtcatt

SEQ ID NO: 163318 - DNA, 33 bp, Homo sapien
aagtagctggagctcagaccagacagcgtcatt

SEQ ID NO: 163319 - DNA, 33 bp, Homo sapien
gactcagattccttaacgcttgatacttggctt

SEQ ID NO: 163320 - DNA, 33 bp, Homo sapien
gactcagattccttaatgcttgatacttggctt

SEQ ID NO: 163321 - DNA, 33 bp, Homo sapien
gaaggttcaacagagaaagttaatggttggggg

SEQ ID NO: 163322 - DNA, 33 bp, Homo sapien
gaaggttcaacagagagagttaatggttggggg

SEQ ID NO: 163323 - DNA, 33 bp, Homo sapien
attaacttcttgttggcaaatatcaggctgagg

SEQ ID NO: 163324 - DNA, 33 bp, Homo sapien
attaacttcttgttggtaaatatcaggctgagg

SEQ ID NO: 163325 - DNA, 33 bp, Homo sapien
aatgtggtttctagagcctatttgaattgaaca

SEQ ID NO: 163326 - DNA, 33 bp, Homo sapien
aatgtggtttctagaggctatttgaattgaaca

SEQ ID NO: 163327 - DNA, 33 bp, Homo sapien
ttaatttgtcaatgtcacatgataagctaagtc

SEQ ID NO: 163328 - DNA, 33 bp, Homo sapien
ttaatttgtcaatgtcgcatgataagctaagtc

SEQ ID NO: 163329 - DNA, 33 bp, Homo sapien
gcatttttacctctgaagccaaaggagcaatta

SEQ ID NO: 163330 - DNA, 33 bp, Homo sapien
gcatttttacctctgacgccaaaggagcaatta

SEQ ID NO: 163331 - DNA, 33 bp, Homo sapien
aatgctcaaatactgcaaagaataaggtttgct

SEQ ID NO: 163332 - DNA, 33 bp, Homo sapien
aatgctcaaatactgcgaagaataaggtttgct

SEQ ID NO: 163333 - DNA, 33 bp, Homo sapien
gcagcatgtctaaaacacaagctcctgatagag

SEQ ID NO: 163334 - DNA, 33 bp, Homo sapien
gcagcatgtctaaaacgcaagctcctgatagag

SEQ ID NO: 163335 - DNA, 33 bp, Homo sapien
gctgcttttgtttcgcaatgaggtacgaggagc

SEQ ID NO: 163336 - DNA, 33 bp, Homo sapien
gctgcttttgtttcgccatgaggtacgaggagc

SEQ ID NO: 163337 - DNA, 33 bp, Homo sapien
ttctgagaactatgggaatcctgaaaagtagca

SEQ ID NO: 163338 - DNA, 33 bp, Homo sapien
ttctgagaactatgggcatcctgaaaagtagca

SEQ ID NO: 163339 - DNA, 33 bp, Homo sapien
cttaatctcaattccacaagcatttacattggc

SEQ ID NO: 163340 - DNA, 33 bp, Homo sapien
cttaatctcaattccagaagcatttacattggc

SEQ ID NO: 163341 - DNA, 33 bp, Homo sapien
gagctgcagcaaacaaagatcagaagggtaagg

SEQ ID NO: 163342 - DNA, 33 bp, Homo sapien
gagctgcagcaaacaaggatcagaagggtaagg

SEQ ID NO: 163343 - DNA, 33 bp, Homo sapien
gataaagtaagcatagcaatgtagcaggaacta

SEQ ID NO: 163344 - DNA, 33 bp, Homo sapien
gataaagtaagcatagtaatgtagcaggaacta

SEQ ID NO: 163345 - DNA, 33 bp, Homo sapien
ttgaatggaaaggttgaagaaagagccaaagcc

SEQ ID NO: 163346 - DNA, 33 bp, Homo sapien
ttgaatggaaaggttgcagaaagagccaaagcc

SEQ ID NO: 163347 - DNA, 33 bp, Homo sapien
gactgtgtcttatgaaactctgaaacgtacaag

SEQ ID NO: 163348 - DNA, 33 bp, Homo sapien
gactgtgtcttatgaacctctgaaacgtacaag

SEQ ID NO: 163349 - DNA, 33 bp, Homo sapien
tttctctagtttctcaagacgctaatgttttac

SEQ ID NO: 163350 - DNA, 33 bp, Homo sapien
tttctctagtttctcaggacgctaatgttttac

SEQ ID NO: 163351 - DNA, 33 bp, Homo sapien
tgaactgagactgcatgactaaaaggaaccagc

SEQ ID NO: 163352 - DNA, 33 bp, Homo sapien
tgaactgagactgcattactaaaaggaaccagc

SEQ ID NO: 163353 - DNA, 33 bp, Homo sapien
tcaacactttcaactacgaattgatgacaatca

SEQ ID NO: 163354 - DNA, 33 bp, Homo sapien
tcaacactttcaactatgaattgatgacaatca

SEQ ID NO: 163355 - DNA, 33 bp, Homo sapien
tctgtctggtgcaataaggcagcacctagtgcc

SEQ ID NO: 163356 - DNA, 33 bp, Homo sapien
tctgtctggtgcaatatggcagcacctagtgcc

SEQ ID NO: 163357 - DNA, 33 bp, Homo sapien
ggtgagatggtaaaaagaattttcagaaaatat

SEQ ID NO: 163358 - DNA, 33 bp, Homo sapien
ggtgagatggtaaaaataattttcagaaaatat

SEQ ID NO: 163359 - DNA, 33 bp, Homo sapien
atttagtgagcatctactacatatcaggagctc

SEQ ID NO: 163360 - DNA, 33 bp, Homo sapien
atttagtgagcatctattacatatcaggagctc

SEQ ID NO: 163361 - DNA, 33 bp, Homo sapien
tacctatgaaaaggccaaagcaaagaggagatt

SEQ ID NO: 163362 - DNA, 33 bp, Homo sapien
tacctatgaaaaggccgaagcaaagaggagatt

SEQ ID NO: 163363 - DNA, 33 bp, Homo sapien
aaactccactagaagacagcaggcatctgttcc

SEQ ID NO: 163364 - DNA, 33 bp, Homo sapien
aaactccactagaagatagcaggcatctgttcc

SEQ ID NO: 163365 - DNA, 33 bp, Homo sapien
gtaatgcatagaacaacggctggaaagaaatat

SEQ ID NO: 163366 - DNA, 33 bp, Homo sapien
gtaatgcatagaacaagggctggaaagaaatat

SEQ ID NO: 163367 - DNA, 33 bp, Homo sapien
atgacagtatttaaaacgaaagtgagagagcac

SEQ ID NO: 163368 - DNA, 33 bp, Homo sapien
atgacagtatttaaaaggaaagtgagagagcac

SEQ ID NO: 163369 - DNA, 33 bp, Homo sapien
caacagaagagaaaaaattagtgtcggacaaat

SEQ ID NO: 163370 - DNA, 33 bp, Homo sapien
caacagaagagaaaaacttagtgtcggacaaat

SEQ ID NO: 163371 - DNA, 33 bp, Homo sapien
ctctcgggtagatgcaacgctgactgggtgccc

SEQ ID NO: 163372 - DNA, 33 bp, Homo sapien
ctctcgggtagatgcagcgctgactgggtgccc

SEQ ID NO: 163373 - DNA, 33 bp, Homo sapien
ggaaacagagttacaacgaaagatacaattgga

SEQ ID NO: 163374 - DNA, 33 bp, Homo sapien
ggaaacagagttacaatgaaagatacaattgga

SEQ ID NO: 163375 - DNA, 33 bp, Homo sapien
gtaataatgtccattgcagctgttttcctggga

SEQ ID NO: 163376 - DNA, 33 bp, Homo sapien
gtaataatgtccattggagctgttttcctggga

SEQ ID NO: 163377 - DNA, 33 bp, Homo sapien
cctaggtttgatgcaactatctgatccaaacct

SEQ ID NO: 163378 - DNA, 33 bp, Homo sapien
cctaggtttgatgcaagtatctgatccaaacct

SEQ ID NO: 163379 - DNA, 33 bp, Homo sapien
agtgtatttctgtgtcaatagatgtattttctg

SEQ ID NO: 163380 - DNA, 33 bp, Homo sapien
agtgtatttctgtgtcgatagatgtattttctg

SEQ ID NO: 163381 - DNA, 33 bp, Homo sapien
agatttcaggagagccaaagtgagtaccttcta

SEQ ID NO: 163382 - DNA, 33 bp, Homo sapien
agatttcaggagagccgaagtgagtaccttcta

SEQ ID NO: 163383 - DNA, 33 bp, Homo sapien
caagtatatcaggaaccatgtggatatggccct

SEQ ID NO: 163384 - DNA, 33 bp, Homo sapien
caagtatatcaggaactatgtggatatggccct

SEQ ID NO: 163385 - DNA, 33 bp, Homo sapien
tagatctcatagtgaaacactagctcaggttct

SEQ ID NO: 163386 - DNA, 33 bp, Homo sapien
tagatctcatagtgaaccactagctcaggttct

SEQ ID NO: 163387 - DNA, 33 bp, Homo sapien
ttaccttggcattaaacagacagctgtttttta

SEQ ID NO: 163388 - DNA, 33 bp, Homo sapien
ttaccttggcattaaatagacagctgtttttta

SEQ ID NO: 163389 - DNA, 33 bp, Homo sapien
agagactgatggatgaatataagtatggataga

SEQ ID NO: 163390 - DNA, 33 bp, Homo sapien
agagactgatggatgactataagtatggataga

SEQ ID NO: 163391 - DNA, 33 bp, Homo sapien
caaacactgccgtgggacaagtaagatgataag

SEQ ID NO: 163392 - DNA, 33 bp, Homo sapien
caaacactgccgtggggcaagtaagatgataag

SEQ ID NO: 163393 - DNA, 33 bp, Homo sapien
caaatgcctggaattccaccattagaaattcat

SEQ ID NO: 163394 - DNA, 33 bp, Homo sapien
caaatgcctggaattctaccattagaaattcat

SEQ ID NO: 163395 - DNA, 33 bp, Homo sapien
aaacttatgactcatgaaagctgaatgcatgta

SEQ ID NO: 163396 - DNA, 33 bp, Homo sapien
aaacttatgactcatggaagctgaatgcatgta

SEQ ID NO: 163397 - DNA, 33 bp, Homo sapien
ttgatttccaatcccaatcaattcctttttaat

SEQ ID NO: 163398 - DNA, 33 bp, Homo sapien
ttgatttccaatcccagtcaattcctttttaat

SEQ ID NO: 163399 - DNA, 33 bp, Homo sapien
cccacaccatctaaaacgttgccaggtagcatg

SEQ ID NO: 163400 - DNA, 33 bp, Homo sapien
cccacaccatctaaaatgttgccaggtagcatg

SEQ ID NO: 163401 - DNA, 33 bp, Homo sapien
tcatctcccatcagcaacctttacaaagatgct

SEQ ID NO: 163402 - DNA, 33 bp, Homo sapien
tcatctcccatcagcagcctttacaaagatgct

SEQ ID NO: 163403 - DNA, 33 bp, Homo sapien
ctggtgttcattgttacgtccttttcctggcag

SEQ ID NO: 163404 - DNA, 33 bp, Homo sapien
ctggtgttcattgttatgtccttttcctggcag

SEQ ID NO: 163405 - DNA, 33 bp, Homo sapien
gtgagggaaaagtctaaggcttggagctaatac

SEQ ID NO: 163406 - DNA, 33 bp, Homo sapien
gtgagggaaaagtctatggcttggagctaatac

SEQ ID NO: 163407 - DNA, 33 bp, Homo sapien
agatggtgaaggaagtcaagttcatcagaataa

SEQ ID NO: 163408 - DNA, 33 bp, Homo sapien
agatggtgaaggaagttaagttcatcagaataa

SEQ ID NO: 163409 - DNA, 33 bp, Homo sapien
tatttattactcaataagagatggtgaaggaag

SEQ ID NO: 163410 - DNA, 33 bp, Homo sapien
tatttattactcaataggagatggtgaaggaag

SEQ ID NO: 163411 - DNA, 33 bp, Homo sapien
actctgctattcctcaaatgacctcttcattcc

SEQ ID NO: 163412 - DNA, 33 bp, Homo sapien
actctgctattcctcagatgacctcttcattcc

SEQ ID NO: 163413 - DNA, 33 bp, Homo sapien
cttacatctcagtccaactgtgtgagcctgggc

SEQ ID NO: 163414 - DNA, 33 bp, Homo sapien
cttacatctcagtccagctgtgtgagcctgggc

SEQ ID NO: 163415 - DNA, 33 bp, Homo sapien
gaggaagagagatccacattaattaagtcaagt

SEQ ID NO: 163416 - DNA, 33 bp, Homo sapien
gaggaagagagatccatattaattaagtcaagt

SEQ ID NO: 163417 - DNA, 33 bp, Homo sapien
tttattctgccactaacgatagctccaacccag

SEQ ID NO: 163418 - DNA, 33 bp, Homo sapien
tttattctgccactaatgatagctccaacccag

SEQ ID NO: 163419 - DNA, 33 bp, Homo sapien
actgaggaaaacaaacaagattggtgtgaagac

SEQ ID NO: 163420 - DNA, 33 bp, Homo sapien
actgaggaaaacaaacgagattggtgtgaagac

SEQ ID NO: 163421 - DNA, 33 bp, Homo sapien
ctctgaacaaacctgaaaaggtgttgccattaa

SEQ ID NO: 163422 - DNA, 33 bp, Homo sapien
ctctgaacaaacctgagaaggtgttgccattaa

SEQ ID NO: 163423 - DNA, 33 bp, Homo sapien
tatctgacacacaggaaaactcggtaaatatta

SEQ ID NO: 163424 - DNA, 33 bp, Homo sapien
tatctgacacacaggagaactcggtaaatatta

SEQ ID NO: 163425 - DNA, 33 bp, Homo sapien
cccagacttgtgggccaatatcagatggcagaa

SEQ ID NO: 163426 - DNA, 33 bp, Homo sapien
cccagacttgtgggccgatatcagatggcagaa

SEQ ID NO: 163427 - DNA, 33 bp, Homo sapien
ttgactatcatgagtaaaactataatgaacatt

SEQ ID NO: 163428 - DNA, 33 bp, Homo sapien
ttgactatcatgagtacaactataatgaacatt

SEQ ID NO: 163429 - DNA, 33 bp, Homo sapien
tagaaaactgaagtcaagtaggtaggtaggttc

SEQ ID NO: 163430 - DNA, 33 bp, Homo sapien
tagaaaactgaagtcaggtaggtaggtaggttc

SEQ ID NO: 163431 - DNA, 33 bp, Homo sapien
gattcaagtgggcttcgctttaaactagttctt

SEQ ID NO: 163432 - DNA, 33 bp, Homo sapien
gattcaagtgggcttctctttaaactagttctt

SEQ ID NO: 163433 - DNA, 33 bp, Homo sapien
aaaggtaatcctagaacgcattaagatgaggaa

SEQ ID NO: 163434 - DNA, 33 bp, Homo sapien
aaaggtaatcctagaatgcattaagatgaggaa

SEQ ID NO: 163435 - DNA, 33 bp, Homo sapien
ctggtgataatctttgaactctatatttgtttt

SEQ ID NO: 163436 - DNA, 33 bp, Homo sapien
ctggtgataatctttgcactctatatttgtttt

SEQ ID NO: 163437 - DNA, 33 bp, Homo sapien
cagagaaagaagccaacttgcctgatgtgttgc

SEQ ID NO: 163438 - DNA, 33 bp, Homo sapien
cagagaaagaagccaagttgcctgatgtgttgc

SEQ ID NO: 163439 - DNA, 33 bp, Homo sapien
gtggaatgctatctacagaacgtgaatcctgtg

SEQ ID NO: 163440 - DNA, 33 bp, Homo sapien
gtggaatgctatctacggaacgtgaatcctgtg

SEQ ID NO: 163441 - DNA, 33 bp, Homo sapien
ctgtcttttcctgccaccgtctgacatggagcc

SEQ ID NO: 163442 - DNA, 33 bp, Homo sapien
ctgtcttttcctgccagcgtctgacatggagcc

SEQ ID NO: 163443 - DNA, 33 bp, Homo sapien
ctgaagccagccctccactttcaggaaagacat

SEQ ID NO: 163444 - DNA, 33 bp, Homo sapien
ctgaagccagccctccgctttcaggaaagacat

SEQ ID NO: 163445 - DNA, 33 bp, Homo sapien
atccagcctcttgaggaagataagctgtgtgcc

SEQ ID NO: 163446 - DNA, 33 bp, Homo sapien
atccagcctcttgagggagataagctgtgtgcc

SEQ ID NO: 163447 - DNA, 33 bp, Homo sapien
gccagcttgcatcttcactgtgtggttgctggt

SEQ ID NO: 163448 - DNA, 33 bp, Homo sapien
gccagcttgcatcttcgctgtgtggttgctggt

SEQ ID NO: 163449 - DNA, 33 bp, Homo sapien
cagcataatcatttcccaaatagcagccaacat

SEQ ID NO: 163450 - DNA, 33 bp, Homo sapien
cagcataatcatttcctaaatagcagccaacat

SEQ ID NO: 163451 - DNA, 33 bp, Homo sapien
tctctattctgccacaatcttttgccatcccct

SEQ ID NO: 163452 - DNA, 33 bp, Homo sapien
tctctattctgccacagtcttttgccatcccct

SEQ ID NO: 163453 - DNA, 33 bp, Homo sapien
aacaacagcaacaaaacaaatgcaaaacaaatc

SEQ ID NO: 163454 - DNA, 33 bp, Homo sapien
aacaacagcaacaaaataaatgcaaaacaaatc

SEQ ID NO: 163455 - DNA, 33 bp, Homo sapien
caacattgatcctgaaaaacacagcccttccca

SEQ ID NO: 163456 - DNA, 33 bp, Homo sapien
caacattgatcctgaagaacacagcccttccca

SEQ ID NO: 163457 - DNA, 33 bp, Homo sapien
ggacatttaatgagagacaactcacataggata

SEQ ID NO: 163458 - DNA, 33 bp, Homo sapien
ggacatttaatgagaggcaactcacataggata

SEQ ID NO: 163459 - DNA, 33 bp, Homo sapien
gcagcagatgggctcaatcttacttaaacctga

SEQ ID NO: 163460 - DNA, 33 bp, Homo sapien
gcagcagatgggctcagtcttacttaaacctga

SEQ ID NO: 163461 - DNA, 33 bp, Homo sapien
catttcagatttctccaaaccttcttggcaggc

SEQ ID NO: 163462 - DNA, 33 bp, Homo sapien
catttcagatttctccgaaccttcttggcaggc

SEQ ID NO: 163463 - DNA, 33 bp, Homo sapien
taagactaagacctcaaataaggcaggtgcttt

SEQ ID NO: 163464 - DNA, 33 bp, Homo sapien
taagactaagacctcagataaggcaggtgcttt

SEQ ID NO: 163465 - DNA, 33 bp, Homo sapien
atcacattctcttctgaacacaagacttaaggt

SEQ ID NO: 163466 - DNA, 33 bp, Homo sapien
atcacattctcttctggacacaagacttaaggt

SEQ ID NO: 163467 - DNA, 33 bp, Homo sapien
cccatcagtatattagacatctttcctgaggtc

SEQ ID NO: 163468 - DNA, 33 bp, Homo sapien
cccatcagtatattaggcatctttcctgaggtc

SEQ ID NO: 163469 - DNA, 33 bp, Homo sapien
actgctaataaggacacgctcgagactgggtaa

SEQ ID NO: 163470 - DNA, 33 bp, Homo sapien
actgctaataaggacatgctcgagactgggtaa

SEQ ID NO: 163471 - DNA, 33 bp, Homo sapien
agggtgaagttttgggaattttcacacggcctt

SEQ ID NO: 163472 - DNA, 33 bp, Homo sapien
agggtgaagttttggggattttcacacggcctt

SEQ ID NO: 163473 - DNA, 33 bp, Homo sapien
gccagatgagaagtggaaaattatctgaatgcc

SEQ ID NO: 163474 - DNA, 33 bp, Homo sapien
gccagatgagaagtggcaaattatctgaatgcc

SEQ ID NO: 163475 - DNA, 33 bp, Homo sapien
aaaaagcaaactagaaaatattcaaggttgtcc

SEQ ID NO: 163476 - DNA, 33 bp, Homo sapien
aaaaagcaaactagaacatattcaaggttgtcc

SEQ ID NO: 163477 - DNA, 33 bp, Homo sapien
caaactacttgggaacaactgaaagctaatatt

SEQ ID NO: 163478 - DNA, 33 bp, Homo sapien
caaactacttgggaaccactgaaagctaatatt

SEQ ID NO: 163479 - DNA, 33 bp, Homo sapien
ttttctaagcttttctaaagaggctggaacatt

SEQ ID NO: 163480 - DNA, 33 bp, Homo sapien
ttttctaagcttttctgaagaggctggaacatt

SEQ ID NO: 163481 - DNA, 33 bp, Homo sapien
ctgctttggtttaatacgcttatgtaacctcat

SEQ ID NO: 163482 - DNA, 33 bp, Homo sapien
ctgctttggtttaatatgcttatgtaacctcat

SEQ ID NO: 163483 - DNA, 33 bp, Homo sapien
caagaataagactgacaggaaaaagtgcagtat

SEQ ID NO: 163484 - DNA, 33 bp, Homo sapien
caagaataagactgacgggaaaaagtgcagtat

SEQ ID NO: 163485 - DNA, 33 bp, Homo sapien
ctcagatactctcctgaagtccagatacatatt

SEQ ID NO: 163486 - DNA, 33 bp, Homo sapien
ctcagatactctcctgcagtccagatacatatt

SEQ ID NO: 163487 - DNA, 33 bp, Homo sapien
agagtcacaatcctagaagggcctccagatctg

SEQ ID NO: 163488 - DNA, 33 bp, Homo sapien
agagtcacaatcctagcagggcctccagatctg

SEQ ID NO: 163489 - DNA, 33 bp, Homo sapien
cgctccccattaggaaaaaggaagcacaattcc

SEQ ID NO: 163490 - DNA, 33 bp, Homo sapien
cgctccccattaggaagaaggaagcacaattcc

SEQ ID NO: 163491 - DNA, 33 bp, Homo sapien
atcacctcatattctacgtccaacagtaatcac

SEQ ID NO: 163492 - DNA, 33 bp, Homo sapien
atcacctcatattctatgtccaacagtaatcac

SEQ ID NO: 163493 - DNA, 33 bp, Homo sapien
ttgagtgccaggcctcggaatatttgtaaggtt

SEQ ID NO: 163494 - DNA, 33 bp, Homo sapien
ttgagtgccaggcctctgaatatttgtaaggtt

SEQ ID NO: 163495 - DNA, 33 bp, Homo sapien
gatggggaaaccagcactgatggctctgaaaat

SEQ ID NO: 163496 - DNA, 33 bp, Homo sapien
gatggggaaaccagcattgatggctctgaaaat

SEQ ID NO: 163497 - DNA, 33 bp, Homo sapien
ggaagagaaaacaccaatacacaccatatatca

SEQ ID NO: 163498 - DNA, 33 bp, Homo sapien
ggaagagaaaacaccagtacacaccatatatca

SEQ ID NO: 163499 - DNA, 33 bp, Homo sapien
tacacacatgaatttaagctgaaaaatcaataa

SEQ ID NO: 163500 - DNA, 33 bp, Homo sapien
tacacacatgaatttaggctgaaaaatcaataa

SEQ ID NO: 163501 - DNA, 33 bp, Homo sapien
gtgagccactgcagcaagctaattaaacccaag

SEQ ID NO: 163502 - DNA, 33 bp, Homo sapien
gtgagccactgcagcaggctaattaaacccaag

SEQ ID NO: 163503 - DNA, 33 bp, Homo sapien
aacaaaccacaatgctgaatccagtgtagatgt

SEQ ID NO: 163504 - DNA, 33 bp, Homo sapien
aacaaaccacaatgcttaatccagtgtagatgt

SEQ ID NO: 163505 - DNA, 33 bp, Homo sapien
gtacctttaagagttacctccagaacattcttg

SEQ ID NO: 163506 - DNA, 33 bp, Homo sapien
gtacctttaagagttatctccagaacattcttg

SEQ ID NO: 163507 - DNA, 33 bp, Homo sapien
ctacagtagcaattgcagaatactttagctaga

SEQ ID NO: 163508 - DNA, 33 bp, Homo sapien
ctacagtagcaattgctgaatactttagctaga

SEQ ID NO: 163509 - DNA, 33 bp, Homo sapien
ttcactgtaccatagacacattgcttctgaaag

SEQ ID NO: 163510 - DNA, 33 bp, Homo sapien
ttcactgtaccatagagacattgcttctgaaag

SEQ ID NO: 163511 - DNA, 33 bp, Homo sapien
ctttataagcattgtacgtttaggctacacgaa

SEQ ID NO: 163512 - DNA, 33 bp, Homo sapien
ctttataagcattgtatgtttaggctacacgaa

SEQ ID NO: 163513 - DNA, 33 bp, Homo sapien
ccaggaaaaataagcccataaccatatgtaaat

SEQ ID NO: 163514 - DNA, 33 bp, Homo sapien
ccaggaaaaataagcctataaccatatgtaaat

SEQ ID NO: 163515 - DNA, 33 bp, Homo sapien
gtgggtatccaagaaaagttaactgaaataata

SEQ ID NO: 163516 - DNA, 33 bp, Homo sapien
gtgggtatccaagaaatgttaactgaaataata

SEQ ID NO: 163517 - DNA, 33 bp, Homo sapien
acaactaatattctacaatgccaccagcactac

SEQ ID NO: 163518 - DNA, 33 bp, Homo sapien
acaactaatattctactatgccaccagcactac

SEQ ID NO: 163519 - DNA, 33 bp, Homo sapien
tccagcgagaagagaaaaaacctgatatgtgag

SEQ ID NO: 163520 - DNA, 33 bp, Homo sapien
tccagcgagaagagaagaaacctgatatgtgag

SEQ ID NO: 163521 - DNA, 33 bp, Homo sapien
ctttgatttcaccttacatttttatcggttcca

SEQ ID NO: 163522 - DNA, 33 bp, Homo sapien
ctttgatttcaccttagatttttatcggttcca

SEQ ID NO: 163523 - DNA, 33 bp, Homo sapien
gagttctgcaacataaagataacataaagggac

SEQ ID NO: 163524 - DNA, 33 bp, Homo sapien
gagttctgcaacataaggataacataaagggac

SEQ ID NO: 163525 - DNA, 33 bp, Homo sapien
gtgtttaggttgggtcactatcattcaaattta

SEQ ID NO: 163526 - DNA, 33 bp, Homo sapien
gtgtttaggttgggtcgctatcattcaaattta

SEQ ID NO: 163527 - DNA, 33 bp, Homo sapien
ataaatttggaataaaatgcaaacgcaataaat

SEQ ID NO: 163528 - DNA, 33 bp, Homo sapien
ataaatttggaataaagtgcaaacgcaataaat

SEQ ID NO: 163529 - DNA, 33 bp, Homo sapien
gtaactgtgagtaagaagtaacttgctatcaat

SEQ ID NO: 163530 - DNA, 33 bp, Homo sapien
gtaactgtgagtaagatgtaacttgctatcaat

SEQ ID NO: 163531 - DNA, 33 bp, Homo sapien
ttatcctttctgcttcaatttaagtccagtaca

SEQ ID NO: 163532 - DNA, 33 bp, Homo sapien
ttatcctttctgcttcgatttaagtccagtaca

SEQ ID NO: 163533 - DNA, 33 bp, Homo sapien
ctaaagactgaagatccacaatttcaaatcaca

SEQ ID NO: 163534 - DNA, 33 bp, Homo sapien
ctaaagactgaagatctacaatttcaaatcaca

SEQ ID NO: 163535 - DNA, 33 bp, Homo sapien
agtctaatgtgttatacccaaagaacaactgat

SEQ ID NO: 163536 - DNA, 33 bp, Homo sapien
agtctaatgtgttatatccaaagaacaactgat

SEQ ID NO: 163537 - DNA, 33 bp, Homo sapien
agaaagagtacagtgaaggaaaaaactattaca

SEQ ID NO: 163538 - DNA, 33 bp, Homo sapien
agaaagagtacagtgagggaaaaaactattaca

SEQ ID NO: 163539 - DNA, 33 bp, Homo sapien
actctggtgaccttgaacttcaattttgatagc

SEQ ID NO: 163540 - DNA, 33 bp, Homo sapien
actctggtgaccttgagcttcaattttgatagc

SEQ ID NO: 163541 - DNA, 33 bp, Homo sapien
tatgtgctcgccagagaagtagtagagagacct

SEQ ID NO: 163542 - DNA, 33 bp, Homo sapien
tatgtgctcgccagagtagtagtagagagacct

SEQ ID NO: 163543 - DNA, 33 bp, Homo sapien
actctaaatgacgtcaccaaaagtgcatctctc

SEQ ID NO: 163544 - DNA, 33 bp, Homo sapien
actctaaatgacgtcatcaaaagtgcatctctc

SEQ ID NO: 163545 - DNA, 33 bp, Homo sapien
gttaaggccatgggaagaagagtgacccaagga

SEQ ID NO: 163546 - DNA, 33 bp, Homo sapien
gttaaggccatgggaataagagtgacccaagga

SEQ ID NO: 163547 - DNA, 33 bp, Homo sapien
aggtttcccaatctaacagaaaatcattggtaa

SEQ ID NO: 163548 - DNA, 33 bp, Homo sapien
aggtttcccaatctaatagaaaatcattggtaa

SEQ ID NO: 163549 - DNA, 33 bp, Homo sapien
agaatacctcaggaaaaagtgaaagtatctact

SEQ ID NO: 163550 - DNA, 33 bp, Homo sapien
agaatacctcaggaaacagtgaaagtatctact

SEQ ID NO: 163551 - DNA, 33 bp, Homo sapien
gcatcaaagagagcctgaagggacccgagaata

SEQ ID NO: 163552 - DNA, 33 bp, Homo sapien
gcatcaaagagagccttaagggacccgagaata

SEQ ID NO: 163553 - DNA, 33 bp, Homo sapien
gaactagacgaataagcagtttcagcacaatat

SEQ ID NO: 163554 - DNA, 33 bp, Homo sapien
gaactagacgaataagtagtttcagcacaatat

SEQ ID NO: 163555 - DNA, 33 bp, Homo sapien
aagtcagaagcggatacattttggctcggtatt

SEQ ID NO: 163556 - DNA, 33 bp, Homo sapien
aagtcagaagcggatatattttggctcggtatt

SEQ ID NO: 163557 - DNA, 33 bp, Homo sapien
tgccaacttggaatcccactgtaggctctagtg

SEQ ID NO: 163558 - DNA, 33 bp, Homo sapien
tgccaacttggaatcctactgtaggctctagtg

SEQ ID NO: 163559 - DNA, 33 bp, Homo sapien
ttttcttgtactcttacctctacggaaggcaga

SEQ ID NO: 163560 - DNA, 33 bp, Homo sapien
ttttcttgtactcttatctctacggaaggcaga

SEQ ID NO: 163561 - DNA, 33 bp, Homo sapien
atttctgccaaaacacagatactcttttaggcc

SEQ ID NO: 163562 - DNA, 33 bp, Homo sapien
atttctgccaaaacacggatactcttttaggcc

SEQ ID NO: 163563 - DNA, 33 bp, Homo sapien
ttcctgtacagacttgcaattatcaatctgttt

SEQ ID NO: 163564 - DNA, 33 bp, Homo sapien
ttcctgtacagacttggaattatcaatctgttt

SEQ ID NO: 163565 - DNA, 33 bp, Homo sapien
tcagctgagtagcctacaagtgctttgcttaga

SEQ ID NO: 163566 - DNA, 33 bp, Homo sapien
tcagctgagtagcctagaagtgctttgcttaga

SEQ ID NO: 163567 - DNA, 33 bp, Homo sapien
cactgtgtgaaaaatggatagactttggctaat

SEQ ID NO: 163568 - DNA, 33 bp, Homo sapien
cactgtgtgaaaaatgtatagactttggctaat

SEQ ID NO: 163569 - DNA, 33 bp, Homo sapien
caaactgcctaggctcaaatttcagatccacca

SEQ ID NO: 163570 - DNA, 33 bp, Homo sapien
caaactgcctaggctctaatttcagatccacca

SEQ ID NO: 163571 - DNA, 33 bp, Homo sapien
aggatcgtttgtcatacaagtcttctttgttca

SEQ ID NO: 163572 - DNA, 33 bp, Homo sapien
aggatcgtttgtcatataagtcttctttgttca

SEQ ID NO: 163573 - DNA, 33 bp, Homo sapien
tattagagaagaagcaaattaatgttagagaca

SEQ ID NO: 163574 - DNA, 33 bp, Homo sapien
tattagagaagaagcacattaatgttagagaca

SEQ ID NO: 163575 - DNA, 33 bp, Homo sapien
ctaaaacagaaagttcaaagtctaaagtggggt

SEQ ID NO: 163576 - DNA, 33 bp, Homo sapien
ctaaaacagaaagttcgaagtctaaagtggggt

SEQ ID NO: 163577 - DNA, 33 bp, Homo sapien
tattccatatagattcaaaatcattttgcctgt

SEQ ID NO: 163578 - DNA, 33 bp, Homo sapien
tattccatatagattcgaaatcattttgcctgt

SEQ ID NO: 163579 - DNA, 33 bp, Homo sapien
ccaaaagtcacaatccaacatttaataacgtat

SEQ ID NO: 163580 - DNA, 33 bp, Homo sapien
ccaaaagtcacaatcccacatttaataacgtat

SEQ ID NO: 163581 - DNA, 33 bp, Homo sapien
acattaatgtttgttgaatgatctggtagaaat

SEQ ID NO: 163582 - DNA, 33 bp, Homo sapien
acattaatgtttgttggatgatctggtagaaat

SEQ ID NO: 163583 - DNA, 33 bp, Homo sapien
cagaatatggaataaacgtgtcctgattctggt

SEQ ID NO: 163584 - DNA, 33 bp, Homo sapien
cagaatatggaataaatgtgtcctgattctggt

SEQ ID NO: 163585 - DNA, 33 bp, Homo sapien
gcagagtagttacaagaaacctctcctaattca

SEQ ID NO: 163586 - DNA, 33 bp, Homo sapien
gcagagtagttacaaggaacctctcctaattca

SEQ ID NO: 163587 - DNA, 33 bp, Homo sapien
atttacatttatgtaacgtttgcaatgtattta

SEQ ID NO: 163588 - DNA, 33 bp, Homo sapien
atttacatttatgtaatgtttgcaatgtattta

SEQ ID NO: 163589 - DNA, 33 bp, Homo sapien
tgaaatagttatgacacattgtgaggaaagata

SEQ ID NO: 163590 - DNA, 33 bp, Homo sapien
tgaaatagttatgacagattgtgaggaaagata

SEQ ID NO: 163591 - DNA, 33 bp, Homo sapien
acaggaattccaagctcaaatgtctatctgata

SEQ ID NO: 163592 - DNA, 33 bp, Homo sapien
acaggaattccaagctgaaatgtctatctgata

SEQ ID NO: 163593 - DNA, 33 bp, Homo sapien
tgtaccaaagaatatacacttgactttgcttgt

SEQ ID NO: 163594 - DNA, 33 bp, Homo sapien
tgtaccaaagaatatagacttgactttgcttgt

SEQ ID NO: 163595 - DNA, 33 bp, Homo sapien
ctgtatcgttaatgcccgaatacatctatttaa

SEQ ID NO: 163596 - DNA, 33 bp, Homo sapien
ctgtatcgttaatgcctgaatacatctatttaa

SEQ ID NO: 163597 - DNA, 33 bp, Homo sapien
aatttctacttgcatcacttacaagcatctcaa

SEQ ID NO: 163598 - DNA, 33 bp, Homo sapien
aatttctacttgcatcgcttacaagcatctcaa

SEQ ID NO: 163599 - DNA, 33 bp, Homo sapien
aatgagggagatcaaacgataggatatttttag

SEQ ID NO: 163600 - DNA, 33 bp, Homo sapien
aatgagggagatcaaatgataggatatttttag

SEQ ID NO: 163601 - DNA, 33 bp, Homo sapien
atgaaggggaacccaaatacatgaggccttgtt

SEQ ID NO: 163602 - DNA, 33 bp, Homo sapien
atgaaggggaacccaagtacatgaggccttgtt

SEQ ID NO: 163603 - DNA, 33 bp, Homo sapien
tgcctcctttctgtaacgaggctattttctggg

SEQ ID NO: 163604 - DNA, 33 bp, Homo sapien
tgcctcctttctgtaatgaggctattttctggg

SEQ ID NO: 163605 - DNA, 33 bp, Homo sapien
catcagaatttcttcaaacttgcttcaaaaagg

SEQ ID NO: 163606 - DNA, 33 bp, Homo sapien
catcagaatttcttcatacttgcttcaaaaagg

SEQ ID NO: 163607 - DNA, 33 bp, Homo sapien
atttaaaaattaagcacggtaagagattaacaa

SEQ ID NO: 163608 - DNA, 33 bp, Homo sapien
atttaaaaattaagcatggtaagagattaacaa

SEQ ID NO: 163609 - DNA, 33 bp, Homo sapien
aatttatttggaaatacgaaaagccagaagaca

SEQ ID NO: 163610 - DNA, 33 bp, Homo sapien
aatttatttggaaatatgaaaagccagaagaca

SEQ ID NO: 163611 - DNA, 33 bp, Homo sapien
tgctgcctagtggcatcatagctgtcataacat

SEQ ID NO: 163612 - DNA, 33 bp, Homo sapien
tgctgcctagtggcatgatagctgtcataacat

SEQ ID NO: 163613 - DNA, 33 bp, Homo sapien
tcaaaaatcagtaaaaatttcccactaatagca

SEQ ID NO: 163614 - DNA, 33 bp, Homo sapien
tcaaaaatcagtaaaagtttcccactaatagca

SEQ ID NO: 163615 - DNA, 33 bp, Homo sapien
ctttacatatcttgacactcattgttttgttct

SEQ ID NO: 163616 - DNA, 33 bp, Homo sapien
ctttacatatcttgacgctcattgttttgttct

SEQ ID NO: 163617 - DNA, 33 bp, Homo sapien
ctgtagaagatgctcccgagaagttcaacaggc

SEQ ID NO: 163618 - DNA, 33 bp, Homo sapien
ctgtagaagatgctcctgagaagttcaacaggc

SEQ ID NO: 163619 - DNA, 33 bp, Homo sapien
ttttaaagtaattgtacgcaaagctgtgatgtt

SEQ ID NO: 163620 - DNA, 33 bp, Homo sapien
ttttaaagtaattgtatgcaaagctgtgatgtt

SEQ ID NO: 163621 - DNA, 33 bp, Homo sapien
tggccagatcatgaagaattttgttcctcgggc

SEQ ID NO: 163622 - DNA, 33 bp, Homo sapien
tggccagatcatgaaggattttgttcctcgggc

SEQ ID NO: 163623 - DNA, 33 bp, Homo sapien
ctgatatgtaccattgcaacttggaaggaattc

SEQ ID NO: 163624 - DNA, 33 bp, Homo sapien
ctgatatgtaccattgtaacttggaaggaattc

SEQ ID NO: 163625 - DNA, 33 bp, Homo sapien
aatcaatggtatatacagaaaatcaggacaggg

SEQ ID NO: 163626 - DNA, 33 bp, Homo sapien
aatcaatggtatataccgaaaatcaggacaggg

SEQ ID NO: 163627 - DNA, 33 bp, Homo sapien
atgaggcttggtatgaaaatgaacagcttgtga

SEQ ID NO: 163628 - DNA, 33 bp, Homo sapien
atgaggcttggtatgagaatgaacagcttgtga

SEQ ID NO: 163629 - DNA, 33 bp, Homo sapien
tgccgaagtctttgtaaacaaccaccctaaaga

SEQ ID NO: 163630 - DNA, 33 bp, Homo sapien
tgccgaagtctttgtacacaaccaccctaaaga

SEQ ID NO: 163631 - DNA, 33 bp, Homo sapien
cccactaaaaaaataccggaatctctgggagta

SEQ ID NO: 163632 - DNA, 33 bp, Homo sapien
cccactaaaaaaatactggaatctctgggagta

SEQ ID NO: 163633 - DNA, 33 bp, Homo sapien
gtcacagacccttgaccacatttgctcagctag

SEQ ID NO: 163634 - DNA, 33 bp, Homo sapien
gtcacagacccttgactacatttgctcagctag

SEQ ID NO: 163635 - DNA, 33 bp, Homo sapien
atgaagagtgaaccagaaaaagggcaagagggg

SEQ ID NO: 163636 - DNA, 33 bp, Homo sapien
atgaagagtgaaccaggaaaagggcaagagggg

SEQ ID NO: 163637 - DNA, 33 bp, Homo sapien
cagaacagaaagcaaaaaaggagggtctaggga

SEQ ID NO: 163638 - DNA, 33 bp, Homo sapien
cagaacagaaagcaaagaaggagggtctaggga

SEQ ID NO: 163639 - DNA, 33 bp, Homo sapien
agtgtgagcactagaaaggaaatctctttgcag

SEQ ID NO: 163640 - DNA, 33 bp, Homo sapien
agtgtgagcactagaatggaaatctctttgcag

SEQ ID NO: 163641 - DNA, 33 bp, Homo sapien
agcatcccctccagcagtcaggctcaaaacaca

SEQ ID NO: 163642 - DNA, 33 bp, Homo sapien
agcatcccctccagcattcaggctcaaaacaca

SEQ ID NO: 163643 - DNA, 33 bp, Homo sapien
cttgcattgggtgatccgagaaagtctctccat

SEQ ID NO: 163644 - DNA, 33 bp, Homo sapien
cttgcattgggtgatctgagaaagtctctccat

SEQ ID NO: 163645 - DNA, 33 bp, Homo sapien
aaagtccattgtagcccggaatgattctctaag

SEQ ID NO: 163646 - DNA, 33 bp, Homo sapien
aaagtccattgtagcctggaatgattctctaag

SEQ ID NO: 163647 - DNA, 33 bp, Homo sapien
tcacatcctggttcaaccacttactaatgatgt

SEQ ID NO: 163648 - DNA, 33 bp, Homo sapien
tcacatcctggttcaatcacttactaatgatgt

SEQ ID NO: 163649 - DNA, 33 bp, Homo sapien
cattgtcagtagtaacacaagatctaacatgat

SEQ ID NO: 163650 - DNA, 33 bp, Homo sapien
cattgtcagtagtaacgcaagatctaacatgat

SEQ ID NO: 163651 - DNA, 33 bp, Homo sapien
atctcatacaaagtaacagcagcaatggcagtg

SEQ ID NO: 163652 - DNA, 33 bp, Homo sapien
atctcatacaaagtaagagcagcaatggcagtg

SEQ ID NO: 163653 - DNA, 33 bp, Homo sapien
aagatctgcccaagacaacgggaacctaccttt

SEQ ID NO: 163654 - DNA, 33 bp, Homo sapien
aagatctgcccaagaccacgggaacctaccttt

SEQ ID NO: 163655 - DNA, 33 bp, Homo sapien
aaaggtccactgaacccgaagtagatgtcctcc

SEQ ID NO: 163656 - DNA, 33 bp, Homo sapien
aaaggtccactgaacctgaagtagatgtcctcc

SEQ ID NO: 163657 - DNA, 33 bp, Homo sapien
agtgccttcctcttcacgcctcgtccaccctac

SEQ ID NO: 163658 - DNA, 33 bp, Homo sapien
agtgccttcctcttcatgcctcgtccaccctac

SEQ ID NO: 163659 - DNA, 33 bp, Homo sapien
catctgagccaaactaaggatggaacatcagtc

SEQ ID NO: 163660 - DNA, 33 bp, Homo sapien
catctgagccaaactagggatggaacatcagtc

SEQ ID NO: 163661 - DNA, 33 bp, Homo sapien
aaaagcatacatgaacaatgagggaatgccaca

SEQ ID NO: 163662 - DNA, 33 bp, Homo sapien
aaaagcatacatgaacgatgagggaatgccaca

SEQ ID NO: 163663 - DNA, 33 bp, Homo sapien
cagggaaggtctcacccaaaggcaagggacctg

SEQ ID NO: 163664 - DNA, 33 bp, Homo sapien
cagggaaggtctcacctaaaggcaagggacctg

SEQ ID NO: 163665 - DNA, 33 bp, Homo sapien
ctctacattttcagcaatctcccttgaatttcc

SEQ ID NO: 163666 - DNA, 33 bp, Homo sapien
ctctacattttcagcagtctcccttgaatttcc

SEQ ID NO: 163667 - DNA, 33 bp, Homo sapien
gaccagacttacacaaccagggactcttggtct

SEQ ID NO: 163668 - DNA, 33 bp, Homo sapien
gaccagacttacacaatcagggactcttggtct

SEQ ID NO: 163669 - DNA, 33 bp, Homo sapien
acactctcagctgtgcaaaaatatgcagcttct

SEQ ID NO: 163670 - DNA, 33 bp, Homo sapien
acactctcagctgtgcgaaaatatgcagcttct

SEQ ID NO: 163671 - DNA, 33 bp, Homo sapien
tgtggtctagagaaaggccaaacgttcaccaca

SEQ ID NO: 163672 - DNA, 33 bp, Homo sapien
tgtggtctagagaaagtccaaacgttcaccaca

SEQ ID NO: 163673 - DNA, 33 bp, Homo sapien
tcttggttatcaccagcagttcatttcccactg

SEQ ID NO: 163674 - DNA, 33 bp, Homo sapien
tcttggttatcaccagtagttcatttcccactg

SEQ ID NO: 163675 - DNA, 33 bp, Homo sapien
tcctctcctgactccacgaataattgcctggaa

SEQ ID NO: 163676 - DNA, 33 bp, Homo sapien
tcctctcctgactccatgaataattgcctggaa

SEQ ID NO: 163677 - DNA, 33 bp, Homo sapien
acatgctgagtgtgcaatgattggttcaatgct

SEQ ID NO: 163678 - DNA, 33 bp, Homo sapien
acatgctgagtgtgcagtgattggttcaatgct

SEQ ID NO: 163679 - DNA, 33 bp, Homo sapien
ttgggcccttagtgtcccaggctccactctacc

SEQ ID NO: 163680 - DNA, 33 bp, Homo sapien
ttgggcccttagtgtctcaggctccactctacc

SEQ ID NO: 163681 - DNA, 33 bp, Homo sapien
aatcaatcaagagaacacaagagaaaaagtata

SEQ ID NO: 163682 - DNA, 33 bp, Homo sapien
aatcaatcaagagaacgcaagagaaaaagtata

SEQ ID NO: 163683 - DNA, 33 bp, Homo sapien
gagactacaggacttgcaggagaatatgtaggt

SEQ ID NO: 163684 - DNA, 33 bp, Homo sapien
gagactacaggacttggaggagaatatgtaggt

SEQ ID NO: 163685 - DNA, 33 bp, Homo sapien
ttactattccatcctcccttgtagttgggctat

SEQ ID NO: 163686 - DNA, 33 bp, Homo sapien
ttactattccatcctctcttgtagttgggctat

SEQ ID NO: 163687 - DNA, 33 bp, Homo sapien
tctcaaagtgtcactcaagtatttctgagcatt

SEQ ID NO: 163688 - DNA, 33 bp, Homo sapien
tctcaaagtgtcactcgagtatttctgagcatt

SEQ ID NO: 163689 - DNA, 33 bp, Homo sapien
tggaactctaaggagagaatttcagcagagaag

SEQ ID NO: 163690 - DNA, 33 bp, Homo sapien
tggaactctaaggagataatttcagcagagaag

SEQ ID NO: 163691 - DNA, 33 bp, Homo sapien
attggctttctagccaagagctgctccctggag

SEQ ID NO: 163692 - DNA, 33 bp, Homo sapien
attggctttctagccatgagctgctccctggag

SEQ ID NO: 163693 - DNA, 33 bp, Homo sapien
tactaagtgtaaagataactgtgtcctatgtac

SEQ ID NO: 163694 - DNA, 33 bp, Homo sapien
tactaagtgtaaagatgactgtgtcctatgtac

SEQ ID NO: 163695 - DNA, 33 bp, Homo sapien
tttttgcttcctctaaagaggtctatacttttg

SEQ ID NO: 163696 - DNA, 33 bp, Homo sapien
tttttgcttcctctaaggaggtctatacttttg

SEQ ID NO: 163697 - DNA, 33 bp, Homo sapien
cactagtcttatctatcagagttttagcacaaa

SEQ ID NO: 163698 - DNA, 33 bp, Homo sapien
cactagtcttatctattagagttttagcacaaa

SEQ ID NO: 163699 - DNA, 33 bp, Homo sapien
catgtcagctgaaacccaatattagctatatct

SEQ ID NO: 163700 - DNA, 33 bp, Homo sapien
catgtcagctgaaacctaatattagctatatct

SEQ ID NO: 163701 - DNA, 33 bp, Homo sapien
gccatataagcatggaccacctacttctggaag

SEQ ID NO: 163702 - DNA, 33 bp, Homo sapien
gccatataagcatggatcacctacttctggaag

SEQ ID NO: 163703 - DNA, 33 bp, Homo sapien
agggggacttgatgaaacctgaagatgacttcc

SEQ ID NO: 163704 - DNA, 33 bp, Homo sapien
agggggacttgatgaagcctgaagatgacttcc

SEQ ID NO: 163705 - DNA, 33 bp, Homo sapien
atgtatgaagaatcctcaaaacattaaaaatag

SEQ ID NO: 163706 - DNA, 33 bp, Homo sapien
atgtatgaagaatcctgaaaacattaaaaatag

SEQ ID NO: 163707 - DNA, 33 bp, Homo sapien
caggcttcaagttggaagaccaaattgcagagg

SEQ ID NO: 163708 - DNA, 33 bp, Homo sapien
caggcttcaagttggaggaccaaattgcagagg

SEQ ID NO: 163709 - DNA, 33 bp, Homo sapien
cttgtcaccagtaccacagagctggggcaatga

SEQ ID NO: 163710 - DNA, 33 bp, Homo sapien
cttgtcaccagtaccagagagctggggcaatga

SEQ ID NO: 163711 - DNA, 33 bp, Homo sapien
atctatgaataggaaaaggactgacgtgaggtg

SEQ ID NO: 163712 - DNA, 33 bp, Homo sapien
atctatgaataggaaagggactgacgtgaggtg

SEQ ID NO: 163713 - DNA, 33 bp, Homo sapien
aattacattcccttaaataatagtgcataaaat

SEQ ID NO: 163714 - DNA, 33 bp, Homo sapien
aattacattcccttaagtaatagtgcataaaat

SEQ ID NO: 163715 - DNA, 33 bp, Homo sapien
gggctgggatttgcgccaaaccgttggagaatg

SEQ ID NO: 163716 - DNA, 33 bp, Homo sapien
gggctgggatttgcgctaaaccgttggagaatg

SEQ ID NO: 163717 - DNA, 33 bp, Homo sapien
ggactctggacaaccacgaggaaactttggaaa

SEQ ID NO: 163718 - DNA, 33 bp, Homo sapien
ggactctggacaaccatgaggaaactttggaaa

SEQ ID NO: 163719 - DNA, 33 bp, Homo sapien
agacagggttactagacagttgggctgagaagg

SEQ ID NO: 163720 - DNA, 33 bp, Homo sapien
agacagggttactagatagttgggctgagaagg

SEQ ID NO: 163721 - DNA, 33 bp, Homo sapien
aggagctgtgatctgacgaaggacattcagtga

SEQ ID NO: 163722 - DNA, 33 bp, Homo sapien
aggagctgtgatctgatgaaggacattcagtga

SEQ ID NO: 163723 - DNA, 33 bp, Homo sapien
aataaagtttattctcccaatgacgatgataac

SEQ ID NO: 163724 - DNA, 33 bp, Homo sapien
aataaagtttattctctcaatgacgatgataac

SEQ ID NO: 163725 - DNA, 33 bp, Homo sapien
taggaaaaaaaaaatcaatatttagcagcagaa

SEQ ID NO: 163726 - DNA, 33 bp, Homo sapien
taggaaaaaaaaaatccatatttagcagcagaa

SEQ ID NO: 163727 - DNA, 33 bp, Homo sapien
cccatacaggaggccaataatgccaaccacgat

SEQ ID NO: 163728 - DNA, 33 bp, Homo sapien
cccatacaggaggccagtaatgccaaccacgat

SEQ ID NO: 163729 - DNA, 33 bp, Homo sapien
caaatcctgaatttgcactaattagctgtgatc

SEQ ID NO: 163730 - DNA, 33 bp, Homo sapien
caaatcctgaatttgcgctaattagctgtgatc

SEQ ID NO: 163731 - DNA, 33 bp, Homo sapien
attctcctatgaaggacatttgttcttcccagg

SEQ ID NO: 163732 - DNA, 33 bp, Homo sapien
attctcctatgaaggatatttgttcttcccagg

SEQ ID NO: 163733 - DNA, 33 bp, Homo sapien
tcttttgccagaaagactctgttggatccagga

SEQ ID NO: 163734 - DNA, 33 bp, Homo sapien
tcttttgccagaaagattctgttggatccagga

SEQ ID NO: 163735 - DNA, 33 bp, Homo sapien
ttgcttgcagctgttaactctaatccctataac

SEQ ID NO: 163736 - DNA, 33 bp, Homo sapien
ttgcttgcagctgttatctctaatccctataac

SEQ ID NO: 163737 - DNA, 33 bp, Homo sapien
gttcaaatagactcaaaactgctgaacacaaat

SEQ ID NO: 163738 - DNA, 33 bp, Homo sapien
gttcaaatagactcaacactgctgaacacaaat

SEQ ID NO: 163739 - DNA, 33 bp, Homo sapien
ccatacctgtaagagaaaaacaacaggatattg

SEQ ID NO: 163740 - DNA, 33 bp, Homo sapien
ccatacctgtaagagagaaacaacaggatattg

SEQ ID NO: 163741 - DNA, 33 bp, Homo sapien
tggtggaatggtgctacgtggcttacttcagcc

SEQ ID NO: 163742 - DNA, 33 bp, Homo sapien
tggtggaatggtgctatgtggcttacttcagcc

SEQ ID NO: 163743 - DNA, 33 bp, Homo sapien
cttttggttactgataagagcattgggattcaa

SEQ ID NO: 163744 - DNA, 33 bp, Homo sapien
cttttggttactgataggagcattgggattcaa

SEQ ID NO: 163745 - DNA, 33 bp, Homo sapien
aatagtgaagagaggaacgaagataatttattc

SEQ ID NO: 163746 - DNA, 33 bp, Homo sapien
aatagtgaagagaggaccgaagataatttattc

SEQ ID NO: 163747 - DNA, 33 bp, Homo sapien
ctctggtgtagtgcaaggttaaattgggacact

SEQ ID NO: 163748 - DNA, 33 bp, Homo sapien
ctctggtgtagtgcaatgttaaattgggacact

SEQ ID NO: 163749 - DNA, 33 bp, Homo sapien
agtagcaagttccacaaagaggagcacttgata

SEQ ID NO: 163750 - DNA, 33 bp, Homo sapien
agtagcaagttccacagagaggagcacttgata

SEQ ID NO: 163751 - DNA, 33 bp, Homo sapien
tcaccatccagaaataacatggttaccatttta

SEQ ID NO: 163752 - DNA, 33 bp, Homo sapien
tcaccatccagaaataccatggttaccatttta

SEQ ID NO: 163753 - DNA, 33 bp, Homo sapien
taatattataccaaagacatctacaagattcaa

SEQ ID NO: 163754 - DNA, 33 bp, Homo sapien
taatattataccaaaggcatctacaagattcaa

SEQ ID NO: 163755 - DNA, 33 bp, Homo sapien
tcaaatgatgctgttacaataattacgctggta

SEQ ID NO: 163756 - DNA, 33 bp, Homo sapien
tcaaatgatgctgttataataattacgctggta

SEQ ID NO: 163757 - DNA, 33 bp, Homo sapien
tatgttgctatctataacattgagggcatagtt

SEQ ID NO: 163758 - DNA, 33 bp, Homo sapien
tatgttgctatctataccattgagggcatagtt

SEQ ID NO: 163759 - DNA, 33 bp, Homo sapien
ctagggcttggcaataaagggctgattgcacac

SEQ ID NO: 163760 - DNA, 33 bp, Homo sapien
ctagggcttggcaatagagggctgattgcacac

SEQ ID NO: 163761 - DNA, 33 bp, Homo sapien
ccaattatcagggccagtagtgtgatcaagatc

SEQ ID NO: 163762 - DNA, 33 bp, Homo sapien
ccaattatcagggccattagtgtgatcaagatc

SEQ ID NO: 163763 - DNA, 33 bp, Homo sapien
agggagtccaggaagcaaataactggcattcgt

SEQ ID NO: 163764 - DNA, 33 bp, Homo sapien
agggagtccaggaagctaataactggcattcgt

SEQ ID NO: 163765 - DNA, 33 bp, Homo sapien
gaaaataaaaagtaaagctctcactgaactcta

SEQ ID NO: 163766 - DNA, 33 bp, Homo sapien
gaaaataaaaagtaaatctctcactgaactcta

SEQ ID NO: 163767 - DNA, 33 bp, Homo sapien
aataagtataaagtaaactcaaaagcgtctcaa

SEQ ID NO: 163768 - DNA, 33 bp, Homo sapien
aataagtataaagtaacctcaaaagcgtctcaa

SEQ ID NO: 163769 - DNA, 33 bp, Homo sapien
gatctagcaggtgtaggaagatgtcacctaagt

SEQ ID NO: 163770 - DNA, 33 bp, Homo sapien
gatctagcaggtgtagtaagatgtcacctaagt

SEQ ID NO: 163771 - DNA, 33 bp, Homo sapien
tcctttgtgatcctcacccccgtctctgaccac

SEQ ID NO: 163772 - DNA, 33 bp, Homo sapien
tcctttgtgatcctcatccccgtctctgaccac

SEQ ID NO: 163773 - DNA, 33 bp, Homo sapien
aaacatcattttcataagcacaatttgttacta

SEQ ID NO: 163774 - DNA, 33 bp, Homo sapien
aaacatcattttcataggcacaatttgttacta

SEQ ID NO: 163775 - DNA, 33 bp, Homo sapien
tttgcttaatgttaccaggcagttgtttgcagt

SEQ ID NO: 163776 - DNA, 33 bp, Homo sapien
tttgcttaatgttacccggcagttgtttgcagt

SEQ ID NO: 163777 - DNA, 33 bp, Homo sapien
ctaactttagattgcacgatgtaattccaatag

SEQ ID NO: 163778 - DNA, 33 bp, Homo sapien
ctaactttagattgcatgatgtaattccaatag

SEQ ID NO: 163779 - DNA, 33 bp, Homo sapien
cttctgctaaatagagaagtgttggtatttgtt

SEQ ID NO: 163780 - DNA, 33 bp, Homo sapien
cttctgctaaatagagtagtgttggtatttgtt

SEQ ID NO: 163781 - DNA, 33 bp, Homo sapien
cttcaactttttcctaactatcctattagcctg

SEQ ID NO: 163782 - DNA, 33 bp, Homo sapien
cttcaactttttcctagctatcctattagcctg

SEQ ID NO: 163783 - DNA, 33 bp, Homo sapien
agaataggctgtattacatgaaaccagcggagg

SEQ ID NO: 163784 - DNA, 33 bp, Homo sapien
agaataggctgtattatatgaaaccagcggagg

SEQ ID NO: 163785 - DNA, 33 bp, Homo sapien
acttgaggccccaaacccgaggaaggctggcac

SEQ ID NO: 163786 - DNA, 33 bp, Homo sapien
acttgaggccccaaacgcgaggaaggctggcac

SEQ ID NO: 163787 - DNA, 33 bp, Homo sapien
tggtatccggacttcacgctcttagccaatgct

SEQ ID NO: 163788 - DNA, 33 bp, Homo sapien
tggtatccggacttcaggctcttagccaatgct

SEQ ID NO: 163789 - DNA, 33 bp, Homo sapien
agaggtcctccaccaacgctgttttatataaaa

SEQ ID NO: 163790 - DNA, 33 bp, Homo sapien
agaggtcctccaccaaggctgttttatataaaa

SEQ ID NO: 163791 - DNA, 33 bp, Homo sapien
ataagtaaatgaaacaaagtctcagtcctcaag

SEQ ID NO: 163792 - DNA, 33 bp, Homo sapien
ataagtaaatgaaacatagtctcagtcctcaag

SEQ ID NO: 163793 - DNA, 33 bp, Homo sapien
gctttcaagtcttaaactcacaatccatcctgg

SEQ ID NO: 163794 - DNA, 33 bp, Homo sapien
gctttcaagtcttaaattcacaatccatcctgg

SEQ ID NO: 163795 - DNA, 33 bp, Homo sapien
gggaatatagttgagacggcacttagaaggaag

SEQ ID NO: 163796 - DNA, 33 bp, Homo sapien
gggaatatagttgagatggcacttagaaggaag

SEQ ID NO: 163797 - DNA, 33 bp, Homo sapien
ggggttggtgcattataaaagggtgaattcagc

SEQ ID NO: 163798 - DNA, 33 bp, Homo sapien
ggggttggtgcattatgaaagggtgaattcagc

SEQ ID NO: 163799 - DNA, 33 bp, Homo sapien
gagacaaacttcaaaacggtgctgggtgtggcc

SEQ ID NO: 163800 - DNA, 33 bp, Homo sapien
gagacaaacttcaaaatggtgctgggtgtggcc

SEQ ID NO: 163801 - DNA, 33 bp, Homo sapien
tcttcaggactgctgggcatgttcaaagcaatg

SEQ ID NO: 163802 - DNA, 33 bp, Homo sapien
tcttcaggactgctggtcatgttcaaagcaatg

SEQ ID NO: 163803 - DNA, 33 bp, Homo sapien
ctataaagatggcggccaccgcttcataaaggg

SEQ ID NO: 163804 - DNA, 33 bp, Homo sapien
ctataaagatggcggctaccgcttcataaaggg

SEQ ID NO: 163805 - DNA, 33 bp, Homo sapien
ttggccactgtttccaccttggattcgatattg

SEQ ID NO: 163806 - DNA, 33 bp, Homo sapien
ttggccactgtttccatcttggattcgatattg

SEQ ID NO: 163807 - DNA, 33 bp, Homo sapien
gcaagtccagctcaggacaatttcccagggcta

SEQ ID NO: 163808 - DNA, 33 bp, Homo sapien
gcaagtccagctcagggcaatttcccagggcta

SEQ ID NO: 163809 - DNA, 33 bp, Homo sapien
caaaagctgtaagtgcaagagagaaaacacctc

SEQ ID NO: 163810 - DNA, 33 bp, Homo sapien
caaaagctgtaagtgcgagagagaaaacacctc

SEQ ID NO: 163811 - DNA, 33 bp, Homo sapien
cacaactgagcagtcacctcataccagtcctgg

SEQ ID NO: 163812 - DNA, 33 bp, Homo sapien
cacaactgagcagtcatctcataccagtcctgg

SEQ ID NO: 163813 - DNA, 33 bp, Homo sapien
ttctcaaatctaaggacacttctggaattgctg

SEQ ID NO: 163814 - DNA, 33 bp, Homo sapien
ttctcaaatctaaggatacttctggaattgctg

SEQ ID NO: 163815 - DNA, 33 bp, Homo sapien
gcttggctcttctgtacaaaaaaagacttttgc

SEQ ID NO: 163816 - DNA, 33 bp, Homo sapien
gcttggctcttctgtataaaaaaagacttttgc

SEQ ID NO: 163817 - DNA, 33 bp, Homo sapien
tagaactcaccttagccacaaaatttgcctttg

SEQ ID NO: 163818 - DNA, 33 bp, Homo sapien
tagaactcaccttagcgacaaaatttgcctttg

SEQ ID NO: 163819 - DNA, 33 bp, Homo sapien
ctacacatttctttaaatctttcactgcctcgt

SEQ ID NO: 163820 - DNA, 33 bp, Homo sapien
ctacacatttctttaattctttcactgcctcgt

SEQ ID NO: 163821 - DNA, 33 bp, Homo sapien
atatccagaaatctagaattgcctgagaagctg

SEQ ID NO: 163822 - DNA, 33 bp, Homo sapien
atatccagaaatctagcattgcctgagaagctg

SEQ ID NO: 163823 - DNA, 33 bp, Homo sapien
gtatcaaaacccttgacgcataagcaggtaggt

SEQ ID NO: 163824 - DNA, 33 bp, Homo sapien
gtatcaaaacccttgatgcataagcaggtaggt

SEQ ID NO: 163825 - DNA, 33 bp, Homo sapien
tgggttaagactttagacataactggacaccat

SEQ ID NO: 163826 - DNA, 33 bp, Homo sapien
tgggttaagactttaggcataactggacaccat

SEQ ID NO: 163827 - DNA, 33 bp, Homo sapien
ggccagctccacaaaaattcactccaagaccag

SEQ ID NO: 163828 - DNA, 33 bp, Homo sapien
ggccagctccacaaaagttcactccaagaccag

SEQ ID NO: 163829 - DNA, 33 bp, Homo sapien
ttagtgtgagagacacaattgggtgctatccat

SEQ ID NO: 163830 - DNA, 33 bp, Homo sapien
ttagtgtgagagacacgattgggtgctatccat

SEQ ID NO: 163831 - DNA, 33 bp, Homo sapien
gaaggattaattctatcacgtttgtgctaatga

SEQ ID NO: 163832 - DNA, 33 bp, Homo sapien
gaaggattaattctattacgtttgtgctaatga

SEQ ID NO: 163833 - DNA, 33 bp, Homo sapien
tgacgttagcttcatagtactcaaatgtgttaa

SEQ ID NO: 163834 - DNA, 33 bp, Homo sapien
tgacgttagcttcatattactcaaatgtgttaa

SEQ ID NO: 163835 - DNA, 33 bp, Homo sapien
ctgcagctctcacttaagtttcacagagaagca

SEQ ID NO: 163836 - DNA, 33 bp, Homo sapien
ctgcagctctcacttaggtttcacagagaagca

SEQ ID NO: 163837 - DNA, 33 bp, Homo sapien
agcctgagaacaaccagcgcctgggtgaggcct

SEQ ID NO: 163838 - DNA, 33 bp, Homo sapien
agcctgagaacaaccatcgcctgggtgaggcct

SEQ ID NO: 163839 - DNA, 33 bp, Homo sapien
agaatccaaaggagaacgaatggctagaggagg

SEQ ID NO: 163840 - DNA, 33 bp, Homo sapien
agaatccaaaggagaatgaatggctagaggagg

SEQ ID NO: 163841 - DNA, 33 bp, Homo sapien
tggcactcagaaaagacaagatgagaaatcgaa

SEQ ID NO: 163842 - DNA, 33 bp, Homo sapien
tggcactcagaaaagataagatgagaaatcgaa

SEQ ID NO: 163843 - DNA, 33 bp, Homo sapien
ttgagggaagatggaacgaggaaccactctagg

SEQ ID NO: 163844 - DNA, 33 bp, Homo sapien
ttgagggaagatggaatgaggaaccactctagg

SEQ ID NO: 163845 - DNA, 33 bp, Homo sapien
ctaagatatccttcacagacaagtgcatcttcc

SEQ ID NO: 163846 - DNA, 33 bp, Homo sapien
ctaagatatccttcacggacaagtgcatcttcc

SEQ ID NO: 163847 - DNA, 33 bp, Homo sapien
tcagaggctagaagaaactcccaggcctgaggg

SEQ ID NO: 163848 - DNA, 33 bp, Homo sapien
tcagaggctagaagaacctcccaggcctgaggg

SEQ ID NO: 163849 - DNA, 33 bp, Homo sapien
tgctcaatgtcacaaaagtaatggatggtagag

SEQ ID NO: 163850 - DNA, 33 bp, Homo sapien
tgctcaatgtcacaaatgtaatggatggtagag

SEQ ID NO: 163851 - DNA, 33 bp, Homo sapien
gctaccgggtcatcaacaccacttaattcctta

SEQ ID NO: 163852 - DNA, 33 bp, Homo sapien
gctaccgggtcatcaataccacttaattcctta

SEQ ID NO: 163853 - DNA, 33 bp, Homo sapien
ggcgagaaactatcctcagcataaatttgagac

SEQ ID NO: 163854 - DNA, 33 bp, Homo sapien
ggcgagaaactatccttagcataaatttgagac

SEQ ID NO: 163855 - DNA, 33 bp, Homo sapien
ggatggagtatttgaactggctgcctagttact

SEQ ID NO: 163856 - DNA, 33 bp, Homo sapien
ggatggagtatttgaattggctgcctagttact

SEQ ID NO: 163857 - DNA, 33 bp, Homo sapien
tttattgattgaaagagacaacagaaaactaaa

SEQ ID NO: 163858 - DNA, 33 bp, Homo sapien
tttattgattgaaagatacaacagaaaactaaa

SEQ ID NO: 163859 - DNA, 33 bp, Homo sapien
tttgtttgtcaatttcccaggattatgcttaca

SEQ ID NO: 163860 - DNA, 33 bp, Homo sapien
tttgtttgtcaatttctcaggattatgcttaca

SEQ ID NO: 163861 - DNA, 33 bp, Homo sapien
tcaatatgccaaactacctgaatagaggctgga

SEQ ID NO: 163862 - DNA, 33 bp, Homo sapien
tcaatatgccaaactatctgaatagaggctgga

SEQ ID NO: 163863 - DNA, 33 bp, Homo sapien
acattttcgtgaatacaactatttcagaaatgc

SEQ ID NO: 163864 - DNA, 33 bp, Homo sapien
acattttcgtgaatacgactatttcagaaatgc

SEQ ID NO: 163865 - DNA, 33 bp, Homo sapien
tagaacatcacaagcaacatgcaaaaaacactc

SEQ ID NO: 163866 - DNA, 33 bp, Homo sapien
tagaacatcacaagcagcatgcaaaaaacactc

SEQ ID NO: 163867 - DNA, 33 bp, Homo sapien
tataaaggaagttatccaggatgtactaagctc

SEQ ID NO: 163868 - DNA, 33 bp, Homo sapien
tataaaggaagttatcgaggatgtactaagctc

SEQ ID NO: 163869 - DNA, 33 bp, Homo sapien
attcaaacagtgagcaagtaactgagaaatatt

SEQ ID NO: 163870 - DNA, 33 bp, Homo sapien
attcaaacagtgagcacgtaactgagaaatatt

SEQ ID NO: 163871 - DNA, 33 bp, Homo sapien
ccctttatgagcctccccaagaatcacacactc

SEQ ID NO: 163872 - DNA, 33 bp, Homo sapien
ccctttatgagcctcctcaagaatcacacactc

SEQ ID NO: 163873 - DNA, 33 bp, Homo sapien
gccctcaaagagcctacagtctgtttacatttc

SEQ ID NO: 163874 - DNA, 33 bp, Homo sapien
gccctcaaagagcctagagtctgtttacatttc

SEQ ID NO: 163875 - DNA, 33 bp, Homo sapien
gatggatatgacagacaaaacagagaagagggg

SEQ ID NO: 163876 - DNA, 33 bp, Homo sapien
gatggatatgacagaccaaacagagaagagggg

SEQ ID NO: 163877 - DNA, 33 bp, Homo sapien
aagtggctgttttgcaaggttaaactcttatcc

SEQ ID NO: 163878 - DNA, 33 bp, Homo sapien
aagtggctgttttgcagggttaaactcttatcc

SEQ ID NO: 163879 - DNA, 33 bp, Homo sapien
tgacattcttcactcaacatcagaagcaggctg

SEQ ID NO: 163880 - DNA, 33 bp, Homo sapien
tgacattcttcactcagcatcagaagcaggctg

SEQ ID NO: 163881 - DNA, 33 bp, Homo sapien
cagggatggataaagaactaacctgccctgcct

SEQ ID NO: 163882 - DNA, 33 bp, Homo sapien
cagggatggataaagagctaacctgccctgcct

SEQ ID NO: 163883 - DNA, 33 bp, Homo sapien
caacatggtctgttgacggtagaaaggtgacaa

SEQ ID NO: 163884 - DNA, 33 bp, Homo sapien
caacatggtctgttgatggtagaaaggtgacaa

SEQ ID NO: 163885 - DNA, 33 bp, Homo sapien
tttggcctgtaattgaaataggagtaaggagtc

SEQ ID NO: 163886 - DNA, 33 bp, Homo sapien
tttggcctgtaattgagataggagtaaggagtc

SEQ ID NO: 163887 - DNA, 33 bp, Homo sapien
agaaggcctcttgtcccagtatgccactaatag

SEQ ID NO: 163888 - DNA, 33 bp, Homo sapien
agaaggcctcttgtcctagtatgccactaatag

SEQ ID NO: 163889 - DNA, 33 bp, Homo sapien
tagggcaaaagagaaacgttggaagaggtgggc

SEQ ID NO: 163890 - DNA, 33 bp, Homo sapien
tagggcaaaagagaaatgttggaagaggtgggc

SEQ ID NO: 163891 - DNA, 33 bp, Homo sapien
aaatgtataattagaaaggaggaaattcaggaa

SEQ ID NO: 163892 - DNA, 33 bp, Homo sapien
aaatgtataattagaacggaggaaattcaggaa

SEQ ID NO: 163893 - DNA, 33 bp, Homo sapien
tggctgaagacactaaaattagaacctgtagaa

SEQ ID NO: 163894 - DNA, 33 bp, Homo sapien
tggctgaagacactaacattagaacctgtagaa

SEQ ID NO: 163895 - DNA, 33 bp, Homo sapien
ggaggagaaatgaaaacgcagaaaaataggtta

SEQ ID NO: 163896 - DNA, 33 bp, Homo sapien
ggaggagaaatgaaaaggcagaaaaataggtta

SEQ ID NO: 163897 - DNA, 33 bp, Homo sapien
aaccaagtagaaattcacaaaacgtgggaggga

SEQ ID NO: 163898 - DNA, 33 bp, Homo sapien
aaccaagtagaaattctcaaaacgtgggaggga

SEQ ID NO: 163899 - DNA, 33 bp, Homo sapien
gttggatttagtcttagggtagaaaggaataaa

SEQ ID NO: 163900 - DNA, 33 bp, Homo sapien
gttggatttagtcttatggtagaaaggaataaa

SEQ ID NO: 163901 - DNA, 33 bp, Homo sapien
ttttggagcaccacctaagattccaatcctact

SEQ ID NO: 163902 - DNA, 33 bp, Homo sapien
ttttggagcaccacctgagattccaatcctact

SEQ ID NO: 163903 - DNA, 33 bp, Homo sapien
tatcactttaggacaacgatactagctaatctt

SEQ ID NO: 163904 - DNA, 33 bp, Homo sapien
tatcactttaggacaatgatactagctaatctt

SEQ ID NO: 163905 - DNA, 33 bp, Homo sapien
ggggtgacttttcccccaggaacacgtggcaac

SEQ ID NO: 163906 - DNA, 33 bp, Homo sapien
ggggtgacttttcccctaggaacacgtggcaac

SEQ ID NO: 163907 - DNA, 33 bp, Homo sapien
cactccagccaacttgcaactgctagcatctat

SEQ ID NO: 163908 - DNA, 33 bp, Homo sapien
cactccagccaacttgtaactgctagcatctat

SEQ ID NO: 163909 - DNA, 33 bp, Homo sapien
gatataggaaacatcaatcagggaatggagaaa

SEQ ID NO: 163910 - DNA, 33 bp, Homo sapien
gatataggaaacatcagtcagggaatggagaaa

SEQ ID NO: 163911 - DNA, 33 bp, Homo sapien
taggagcagattttacaacacggcttcaaactc

SEQ ID NO: 163912 - DNA, 33 bp, Homo sapien
taggagcagattttacgacacggcttcaaactc

SEQ ID NO: 163913 - DNA, 33 bp, Homo sapien
aactggtagatttgaccctgagctatctgggtt

SEQ ID NO: 163914 - DNA, 33 bp, Homo sapien
aactggtagatttgactctgagctatctgggtt

SEQ ID NO: 163915 - DNA, 33 bp, Homo sapien
cagtgagacagcctctcacataagatggaaaga

SEQ ID NO: 163916 - DNA, 33 bp, Homo sapien
cagtgagacagcctcttacataagatggaaaga

SEQ ID NO: 163917 - DNA, 33 bp, Homo sapien
aatgaaacaatgggaaacaaggaaatggggctt

SEQ ID NO: 163918 - DNA, 33 bp, Homo sapien
aatgaaacaatgggaagcaaggaaatggggctt

SEQ ID NO: 163919 - DNA, 33 bp, Homo sapien
ggcttaagttctgacacagccacttagctctct

SEQ ID NO: 163920 - DNA, 33 bp, Homo sapien
ggcttaagttctgacatagccacttagctctct

SEQ ID NO: 163921 - DNA, 33 bp, Homo sapien
gctggagtgaaaggccacttttcaaaaatatgg

SEQ ID NO: 163922 - DNA, 33 bp, Homo sapien
gctggagtgaaaggccgcttttcaaaaatatgg

SEQ ID NO: 163923 - DNA, 33 bp, Homo sapien
agttctctcctggatcagaaaaaaagacctgga

SEQ ID NO: 163924 - DNA, 33 bp, Homo sapien
agttctctcctggatccgaaaaaaagacctgga

SEQ ID NO: 163925 - DNA, 33 bp, Homo sapien
ttcctcagatatcccacggtcttgcccacattt

SEQ ID NO: 163926 - DNA, 33 bp, Homo sapien
ttcctcagatatcccatggtcttgcccacattt

SEQ ID NO: 163927 - DNA, 33 bp, Homo sapien
agattcatatatcctacaacctaactgatgtct

SEQ ID NO: 163928 - DNA, 33 bp, Homo sapien
agattcatatatcctataacctaactgatgtct

SEQ ID NO: 163929 - DNA, 33 bp, Homo sapien
gaatgattcactattcactgtcagataaattat

SEQ ID NO: 163930 - DNA, 33 bp, Homo sapien
gaatgattcactattcgctgtcagataaattat

SEQ ID NO: 163931 - DNA, 33 bp, Homo sapien
gttcaactttgtttgacccagaatgtttgggga

SEQ ID NO: 163932 - DNA, 33 bp, Homo sapien
gttcaactttgtttgatccagaatgtttgggga

SEQ ID NO: 163933 - DNA, 33 bp, Homo sapien
ggcaggacacgactccagatcctcgggctgaat

SEQ ID NO: 163934 - DNA, 33 bp, Homo sapien
ggcaggacacgactccggatcctcgggctgaat

SEQ ID NO: 163935 - DNA, 33 bp, Homo sapien
cagggacaaggaccgaacggagcgggcccagca

SEQ ID NO: 163936 - DNA, 33 bp, Homo sapien
cagggacaaggaccgatcggagcgggcccagca

SEQ ID NO: 163937 - DNA, 33 bp, Homo sapien
gaaaggcatggatggaagatgacgtttggattc

SEQ ID NO: 163938 - DNA, 33 bp, Homo sapien
gaaaggcatggatggaggatgacgtttggattc

SEQ ID NO: 163939 - DNA, 33 bp, Homo sapien
atgcaacttggagtgaagatgttatacttgttg

SEQ ID NO: 163940 - DNA, 33 bp, Homo sapien
atgcaacttggagtgaggatgttatacttgttg

SEQ ID NO: 163941 - DNA, 33 bp, Homo sapien
cgctgtcatttagtaacgtcccagaaatatgaa

SEQ ID NO: 163942 - DNA, 33 bp, Homo sapien
cgctgtcatttagtaatgtcccagaaatatgaa

SEQ ID NO: 163943 - DNA, 33 bp, Homo sapien
cacacagtgtattcacactacatgccaggacct

SEQ ID NO: 163944 - DNA, 33 bp, Homo sapien
cacacagtgtattcacgctacatgccaggacct

SEQ ID NO: 163945 - DNA, 33 bp, Homo sapien
cttctcttgtgtcacactgattatgatacattg

SEQ ID NO: 163946 - DNA, 33 bp, Homo sapien
cttctcttgtgtcacattgattatgatacattg

SEQ ID NO: 163947 - DNA, 33 bp, Homo sapien
ggtcatcatgcccatacagttcacctttccaga

SEQ ID NO: 163948 - DNA, 33 bp, Homo sapien
ggtcatcatgcccatagagttcacctttccaga

SEQ ID NO: 163949 - DNA, 33 bp, Homo sapien
aatgaagattgaagtaaacaagagaatttgctc

SEQ ID NO: 163950 - DNA, 33 bp, Homo sapien
aatgaagattgaagtatacaagagaatttgctc

SEQ ID NO: 163951 - DNA, 33 bp, Homo sapien
aaaaggggatattaaaggagccctgaagttgga

SEQ ID NO: 163952 - DNA, 33 bp, Homo sapien
aaaaggggatattaaatgagccctgaagttgga

SEQ ID NO: 163953 - DNA, 33 bp, Homo sapien
aatagatttcttgtgacgatatattggtattgg

SEQ ID NO: 163954 - DNA, 33 bp, Homo sapien
aatagatttcttgtgatgatatattggtattgg

SEQ ID NO: 163955 - DNA, 33 bp, Homo sapien
agatgatcctaatctacgatgccattgtcccaa

SEQ ID NO: 163956 - DNA, 33 bp, Homo sapien
agatgatcctaatctatgatgccattgtcccaa

SEQ ID NO: 163957 - DNA, 33 bp, Homo sapien
cagcagagaaagaacacggaggaatcagttttc

SEQ ID NO: 163958 - DNA, 33 bp, Homo sapien
cagcagagaaagaacatggaggaatcagttttc

SEQ ID NO: 163959 - DNA, 33 bp, Homo sapien
cctatgatgctttttacgtgaattctaagactt

SEQ ID NO: 163960 - DNA, 33 bp, Homo sapien
cctatgatgctttttatgtgaattctaagactt

SEQ ID NO: 163961 - DNA, 33 bp, Homo sapien
acttccatatccatcagtcattgcctacaggca

SEQ ID NO: 163962 - DNA, 33 bp, Homo sapien
acttccatatccatcattcattgcctacaggca

SEQ ID NO: 163963 - DNA, 33 bp, Homo sapien
ttctatgccctccagtaaaatcaataatattaa

SEQ ID NO: 163964 - DNA, 33 bp, Homo sapien
ttctatgccctccagtgaaatcaataatattaa

SEQ ID NO: 163965 - DNA, 33 bp, Homo sapien
aaatgattaatgacaagtggtaggtaataactc

SEQ ID NO: 163966 - DNA, 33 bp, Homo sapien
aaatgattaatgacaattggtaggtaataactc

SEQ ID NO: 163967 - DNA, 33 bp, Homo sapien
aaggatgggtgctgagaaaatgttgttcacttc

SEQ ID NO: 163968 - DNA, 33 bp, Homo sapien
aaggatgggtgctgaggaaatgttgttcacttc

SEQ ID NO: 163969 - DNA, 33 bp, Homo sapien
gtccagattgtagaaactagtgttgttgcccta

SEQ ID NO: 163970 - DNA, 33 bp, Homo sapien
gtccagattgtagaaagtagtgttgttgcccta

SEQ ID NO: 163971 - DNA, 33 bp, Homo sapien
cagaagtatgcttaacactcctatagtctgaag

SEQ ID NO: 163972 - DNA, 33 bp, Homo sapien
cagaagtatgcttaacgctcctatagtctgaag

SEQ ID NO: 163973 - DNA, 33 bp, Homo sapien
tgtagtcaaactccagactcaacatgacaaatc

SEQ ID NO: 163974 - DNA, 33 bp, Homo sapien
tgtagtcaaactccaggctcaacatgacaaatc

SEQ ID NO: 163975 - DNA, 33 bp, Homo sapien
tctaaaatagcaaaacagtggaggattgagaag

SEQ ID NO: 163976 - DNA, 33 bp, Homo sapien
tctaaaatagcaaaacggtggaggattgagaag

SEQ ID NO: 163977 - DNA, 33 bp, Homo sapien
ttactgcaggagaagaagggtataggtgtgtgg

SEQ ID NO: 163978 - DNA, 33 bp, Homo sapien
ttactgcaggagaagaggggtataggtgtgtgg

SEQ ID NO: 163979 - DNA, 33 bp, Homo sapien
gtaagacagctggaaaaggctctcaacaaaaat

SEQ ID NO: 163980 - DNA, 33 bp, Homo sapien
gtaagacagctggaaacggctctcaacaaaaat

SEQ ID NO: 163981 - DNA, 33 bp, Homo sapien
gcttgtctattgttgacgtataggaatgtttgt

SEQ ID NO: 163982 - DNA, 33 bp, Homo sapien
gcttgtctattgttgatgtataggaatgtttgt

SEQ ID NO: 163983 - DNA, 33 bp, Homo sapien
tgggctcacagcttcccagtcttgtagtcacag

SEQ ID NO: 163984 - DNA, 33 bp, Homo sapien
tgggctcacagcttcctagtcttgtagtcacag

SEQ ID NO: 163985 - DNA, 33 bp, Homo sapien
attgtaaactcattgcagaatcattgtgttccc

SEQ ID NO: 163986 - DNA, 33 bp, Homo sapien
attgtaaactcattgcggaatcattgtgttccc

SEQ ID NO: 163987 - DNA, 33 bp, Homo sapien
taaagcatatccaagcaagacggaggacccagt

SEQ ID NO: 163988 - DNA, 33 bp, Homo sapien
taaagcatatccaagcgagacggaggacccagt

SEQ ID NO: 163989 - DNA, 33 bp, Homo sapien
actcattctcagcagagatttcactccctactt

SEQ ID NO: 163990 - DNA, 33 bp, Homo sapien
actcattctcagcagatatttcactccctactt

SEQ ID NO: 163991 - DNA, 33 bp, Homo sapien
gaagaatggggtaaggaatctcaagagtttgcc

SEQ ID NO: 163992 - DNA, 33 bp, Homo sapien
gaagaatggggtaaggcatctcaagagtttgcc

SEQ ID NO: 163993 - DNA, 33 bp, Homo sapien
agaaattgatctgacacacgtaaaaaaccatat

SEQ ID NO: 163994 - DNA, 33 bp, Homo sapien
agaaattgatctgacatacgtaaaaaaccatat

SEQ ID NO: 163995 - DNA, 33 bp, Homo sapien
caggagccacatcaaaactgttcaccactgcca

SEQ ID NO: 163996 - DNA, 33 bp, Homo sapien
caggagccacatcaaacctgttcaccactgcca

SEQ ID NO: 163997 - DNA, 33 bp, Homo sapien
agtaaacagtaatggaataaagagggctgaggt

SEQ ID NO: 163998 - DNA, 33 bp, Homo sapien
agtaaacagtaatggagtaaagagggctgaggt

SEQ ID NO: 163999 - DNA, 33 bp, Homo sapien
tcagtgctttgagtagcattgctttgagtataa

SEQ ID NO: 164000 - DNA, 33 bp, Homo sapien
tcagtgctttgagtagtattgctttgagtataa

SEQ ID NO: 164001 - DNA, 33 bp, Homo sapien
atgaaagagctatacaaggaaaactatgaaaca

SEQ ID NO: 164002 - DNA, 33 bp, Homo sapien
atgaaagagctatacatggaaaactatgaaaca

SEQ ID NO: 164003 - DNA, 33 bp, Homo sapien
aacatagtccaaaataataaaggccatatgtga

SEQ ID NO: 164004 - DNA, 33 bp, Homo sapien
aacatagtccaaaatagtaaaggccatatgtga

SEQ ID NO: 164005 - DNA, 33 bp, Homo sapien
agcccagatgcaaataacttcaacaaaatgcta

SEQ ID NO: 164006 - DNA, 33 bp, Homo sapien
agcccagatgcaaatatcttcaacaaaatgcta

SEQ ID NO: 164007 - DNA, 33 bp, Homo sapien
acagcaaaaaagataactagaggcgaatatcac

SEQ ID NO: 164008 - DNA, 33 bp, Homo sapien
acagcaaaaaagataagtagaggcgaatatcac

SEQ ID NO: 164009 - DNA, 33 bp, Homo sapien
ttgaataagctttctacgctttgctcttgttca

SEQ ID NO: 164010 - DNA, 33 bp, Homo sapien
ttgaataagctttctatgctttgctcttgttca

SEQ ID NO: 164011 - DNA, 33 bp, Homo sapien
aacagaaatcttggaactgagaaatacatctgc

SEQ ID NO: 164012 - DNA, 33 bp, Homo sapien
aacagaaatcttggaagtgagaaatacatctgc

SEQ ID NO: 164013 - DNA, 33 bp, Homo sapien
accattttggaagcagaaacctccatttttttt

SEQ ID NO: 164014 - DNA, 33 bp, Homo sapien
accattttggaagcaggaacctccatttttttt

SEQ ID NO: 164015 - DNA, 33 bp, Homo sapien
caaacacttctctcaacttccatggttatgggc

SEQ ID NO: 164016 - DNA, 33 bp, Homo sapien
caaacacttctctcaatttccatggttatgggc

SEQ ID NO: 164017 - DNA, 33 bp, Homo sapien
ggaataagacttttaaacaagcatcccaggtag

SEQ ID NO: 164018 - DNA, 33 bp, Homo sapien
ggaataagacttttaagcaagcatcccaggtag

SEQ ID NO: 164019 - DNA, 33 bp, Homo sapien
ttagtgagaacagtacaagaaggaaggggagga

SEQ ID NO: 164020 - DNA, 33 bp, Homo sapien
ttagtgagaacagtacgagaaggaaggggagga

SEQ ID NO: 164021 - DNA, 33 bp, Homo sapien
actggattcaaaaacacggatatccagctatat

SEQ ID NO: 164022 - DNA, 33 bp, Homo sapien
actggattcaaaaacatggatatccagctatat

SEQ ID NO: 164023 - DNA, 33 bp, Homo sapien
gcctgcccaggtaggagcttccttaatgattta

SEQ ID NO: 164024 - DNA, 33 bp, Homo sapien
gcctgcccaggtaggatcttccttaatgattta

SEQ ID NO: 164025 - DNA, 33 bp, Homo sapien
caatccccaggtcaaacgggcttctggggacaa

SEQ ID NO: 164026 - DNA, 33 bp, Homo sapien
caatccccaggtcaaatgggcttctggggacaa

SEQ ID NO: 164027 - DNA, 33 bp, Homo sapien
atctatagtcagtcccagctgtaatgcaagtag

SEQ ID NO: 164028 - DNA, 33 bp, Homo sapien
atctatagtcagtcccggctgtaatgcaagtag

SEQ ID NO: 164029 - DNA, 33 bp, Homo sapien
agtgaaatggactgaagagttggagccaagaaa

SEQ ID NO: 164030 - DNA, 33 bp, Homo sapien
agtgaaatggactgaatagttggagccaagaaa

SEQ ID NO: 164031 - DNA, 33 bp, Homo sapien
cccatatgcccatccacgtgcctgtactataga

SEQ ID NO: 164032 - DNA, 33 bp, Homo sapien
cccatatgcccatccatgtgcctgtactataga

SEQ ID NO: 164033 - DNA, 33 bp, Homo sapien
gggctgggagcctcaaagtaaaattgagaagta

SEQ ID NO: 164034 - DNA, 33 bp, Homo sapien
gggctgggagcctcaaggtaaaattgagaagta

SEQ ID NO: 164035 - DNA, 33 bp, Homo sapien
tctttgctagtgctacaggctccagctcccttc

SEQ ID NO: 164036 - DNA, 33 bp, Homo sapien
tctttgctagtgctacgggctccagctcccttc

SEQ ID NO: 164037 - DNA, 33 bp, Homo sapien
ctagagacaacagtagacccttataagcccaga

SEQ ID NO: 164038 - DNA, 33 bp, Homo sapien
ctagagacaacagtagtcccttataagcccaga

SEQ ID NO: 164039 - DNA, 33 bp, Homo sapien
agctggcatcttgaccacaacctgatgagagaa

SEQ ID NO: 164040 - DNA, 33 bp, Homo sapien
agctggcatcttgaccgcaacctgatgagagaa

SEQ ID NO: 164041 - DNA, 33 bp, Homo sapien
tctgttgctgctcttacgtattagttacctatt

SEQ ID NO: 164042 - DNA, 33 bp, Homo sapien
tctgttgctgctcttatgtattagttacctatt

SEQ ID NO: 164043 - DNA, 33 bp, Homo sapien
taaatcaactgtaaaagtgtgttatgaaaacca

SEQ ID NO: 164044 - DNA, 33 bp, Homo sapien
taaatcaactgtaaaattgtgttatgaaaacca

SEQ ID NO: 164045 - DNA, 33 bp, Homo sapien
ctcctgatgaccttacaagaacatctaagaagg

SEQ ID NO: 164046 - DNA, 33 bp, Homo sapien
ctcctgatgaccttacgagaacatctaagaagg

SEQ ID NO: 164047 - DNA, 33 bp, Homo sapien
gatgaatgcacacttacatgtagacgtatagct

SEQ ID NO: 164048 - DNA, 33 bp, Homo sapien
gatgaatgcacacttatatgtagacgtatagct

SEQ ID NO: 164049 - DNA, 33 bp, Homo sapien
cctgcaatttggaaaacccgtccttgtgatata

SEQ ID NO: 164050 - DNA, 33 bp, Homo sapien
cctgcaatttggaaaatccgtccttgtgatata

SEQ ID NO: 164051 - DNA, 33 bp, Homo sapien
aaacgttgtaacagtacctagaagtcctttgca

SEQ ID NO: 164052 - DNA, 33 bp, Homo sapien
aaacgttgtaacagtatctagaagtcctttgca

SEQ ID NO: 164053 - DNA, 33 bp, Homo sapien
ttgttttctgtcttaacggagagcagatcttta

SEQ ID NO: 164054 - DNA, 33 bp, Homo sapien
ttgttttctgtcttaatggagagcagatcttta

SEQ ID NO: 164055 - DNA, 33 bp, Homo sapien
ctggaagtcaatttccactgccccagagcacca

SEQ ID NO: 164056 - DNA, 33 bp, Homo sapien
ctggaagtcaatttccgctgccccagagcacca

SEQ ID NO: 164057 - DNA, 33 bp, Homo sapien
aagtcagagtcctttaacttcaaattcagaggc

SEQ ID NO: 164058 - DNA, 33 bp, Homo sapien
aagtcagagtcctttagcttcaaattcagaggc

SEQ ID NO: 164059 - DNA, 33 bp, Homo sapien
atttccaatccacatcaaaaatgagagagagag

SEQ ID NO: 164060 - DNA, 33 bp, Homo sapien
atttccaatccacatccaaaatgagagagagag

SEQ ID NO: 164061 - DNA, 33 bp, Homo sapien
gatgcattaagctgaagggtgagatgtagctgt

SEQ ID NO: 164062 - DNA, 33 bp, Homo sapien
gatgcattaagctgaatggtgagatgtagctgt

SEQ ID NO: 164063 - DNA, 33 bp, Homo sapien
taggagtggctatgacacaacccataggaaacc

SEQ ID NO: 164064 - DNA, 33 bp, Homo sapien
taggagtggctatgactcaacccataggaaacc

SEQ ID NO: 164065 - DNA, 33 bp, Homo sapien
cctctaaagtgtcggacaaaaggctggcagcct

SEQ ID NO: 164066 - DNA, 33 bp, Homo sapien
cctctaaagtgtcggataaaaggctggcagcct

SEQ ID NO: 164067 - DNA, 33 bp, Homo sapien
tgttatttgaaagctcaaccctggttatatcta

SEQ ID NO: 164068 - DNA, 33 bp, Homo sapien
tgttatttgaaagctcgaccctggttatatcta

SEQ ID NO: 164069 - DNA, 33 bp, Homo sapien
gttttggaaccagatcacttagacaaatatttt

SEQ ID NO: 164070 - DNA, 33 bp, Homo sapien
gttttggaaccagatcgcttagacaaatatttt

SEQ ID NO: 164071 - DNA, 33 bp, Homo sapien
ataataaaataaaaaaacctcatcatctaactc

SEQ ID NO: 164072 - DNA, 33 bp, Homo sapien
ataataaaataaaaaatcctcatcatctaactc

SEQ ID NO: 164073 - DNA, 33 bp, Homo sapien
tcttggatttcaagtacagttgccaagagtcgc

SEQ ID NO: 164074 - DNA, 33 bp, Homo sapien
tcttggatttcaagtatagttgccaagagtcgc

SEQ ID NO: 164075 - DNA, 33 bp, Homo sapien
aatggcaaatatgtggcaattgtgacaaataat

SEQ ID NO: 164076 - DNA, 33 bp, Homo sapien
aatggcaaatatgtggtaattgtgacaaataat

SEQ ID NO: 164077 - DNA, 33 bp, Homo sapien
gtgtggtcaagaattacatttgttacttggtct

SEQ ID NO: 164078 - DNA, 33 bp, Homo sapien
gtgtggtcaagaattatatttgttacttggtct

SEQ ID NO: 164079 - DNA, 33 bp, Homo sapien
cctgtccctccacaggaatactaaatcgaaaaa

SEQ ID NO: 164080 - DNA, 33 bp, Homo sapien
cctgtccctccacaggcatactaaatcgaaaaa

SEQ ID NO: 164081 - DNA, 33 bp, Homo sapien
aaattcaactggcaaaccgaaaaatgcatcaga

SEQ ID NO: 164082 - DNA, 33 bp, Homo sapien
aaattcaactggcaaagcgaaaaatgcatcaga

SEQ ID NO: 164083 - DNA, 33 bp, Homo sapien
agcagatataatctaaataagagtacctcaagg

SEQ ID NO: 164084 - DNA, 33 bp, Homo sapien
agcagatataatctaagtaagagtacctcaagg

SEQ ID NO: 164085 - DNA, 33 bp, Homo sapien
agcagagcctcccaacagaattcgattgttata

SEQ ID NO: 164086 - DNA, 33 bp, Homo sapien
agcagagcctcccaacggaattcgattgttata

SEQ ID NO: 164087 - DNA, 33 bp, Homo sapien
taatttttatgctacaatgatgtattatggacc

SEQ ID NO: 164088 - DNA, 33 bp, Homo sapien
taatttttatgctacagtgatgtattatggacc

SEQ ID NO: 164089 - DNA, 33 bp, Homo sapien
agtgttttatcactgacgtggtttagaattgca

SEQ ID NO: 164090 - DNA, 33 bp, Homo sapien
agtgttttatcactgatgtggtttagaattgca

SEQ ID NO: 164091 - DNA, 33 bp, Homo sapien
aaacaataatacaaagaattaaaagttgttctg

SEQ ID NO: 164092 - DNA, 33 bp, Homo sapien
aaacaataatacaaaggattaaaagttgttctg

SEQ ID NO: 164093 - DNA, 33 bp, Homo sapien
tccttcattgaacagacattattaagagcctac

SEQ ID NO: 164094 - DNA, 33 bp, Homo sapien
tccttcattgaacagatattattaagagcctac

SEQ ID NO: 164095 - DNA, 33 bp, Homo sapien
ttcttttctgaattcactctctagtcttcaact

SEQ ID NO: 164096 - DNA, 33 bp, Homo sapien
ttcttttctgaattcagtctctagtcttcaact

SEQ ID NO: 164097 - DNA, 33 bp, Homo sapien
atagcatagtcaaggacactttcttaccaaagt

SEQ ID NO: 164098 - DNA, 33 bp, Homo sapien
atagcatagtcaaggatactttcttaccaaagt

SEQ ID NO: 164099 - DNA, 33 bp, Homo sapien
gacaccaaatatccccagcctcaagttgactct

SEQ ID NO: 164100 - DNA, 33 bp, Homo sapien
gacaccaaatatccccggcctcaagttgactct

SEQ ID NO: 164101 - DNA, 33 bp, Homo sapien
accttcatatggaatcaagtcttctgccctttc

SEQ ID NO: 164102 - DNA, 33 bp, Homo sapien
accttcatatggaatccagtcttctgccctttc

SEQ ID NO: 164103 - DNA, 33 bp, Homo sapien
gcagctgtcattgtgaaaagagaagggagctgg

SEQ ID NO: 164104 - DNA, 33 bp, Homo sapien
gcagctgtcattgtgagaagagaagggagctgg

SEQ ID NO: 164105 - DNA, 33 bp, Homo sapien
ggcactggattcaaaacgggatggtgcttggga

SEQ ID NO: 164106 - DNA, 33 bp, Homo sapien
ggcactggattcaaaatgggatggtgcttggga

SEQ ID NO: 164107 - DNA, 33 bp, Homo sapien
taataaactcccctgcaagaaaaagtgagcttt

SEQ ID NO: 164108 - DNA, 33 bp, Homo sapien
taataaactcccctgcgagaaaaagtgagcttt

SEQ ID NO: 164109 - DNA, 33 bp, Homo sapien
atagtttcccctttcccagaacatgaatcacac

SEQ ID NO: 164110 - DNA, 33 bp, Homo sapien
atagtttcccctttcctagaacatgaatcacac

SEQ ID NO: 164111 - DNA, 33 bp, Homo sapien
attataggagcagaaaaaagatttccaaccaag

SEQ ID NO: 164112 - DNA, 33 bp, Homo sapien
attataggagcagaaacaagatttccaaccaag

SEQ ID NO: 164113 - DNA, 33 bp, Homo sapien
tccaaaatgacaaaagaattataggagcagaaa

SEQ ID NO: 164114 - DNA, 33 bp, Homo sapien
tccaaaatgacaaaaggattataggagcagaaa

SEQ ID NO: 164115 - DNA, 33 bp, Homo sapien
ccccagcttctggcctcaatagccttccttgcc

SEQ ID NO: 164116 - DNA, 33 bp, Homo sapien
ccccagcttctggccttaatagccttccttgcc

SEQ ID NO: 164117 - DNA, 33 bp, Homo sapien
caatccattactaaaacaaaagaagctcctttc

SEQ ID NO: 164118 - DNA, 33 bp, Homo sapien
caatccattactaaaataaaagaagctcctttc

SEQ ID NO: 164119 - DNA, 33 bp, Homo sapien
aatctttcctcttgtcaacttggcaagcctggg

SEQ ID NO: 164120 - DNA, 33 bp, Homo sapien
aatctttcctcttgtcgacttggcaagcctggg

SEQ ID NO: 164121 - DNA, 33 bp, Homo sapien
ggcctagcagttggctaaagtgtcagctggggc

SEQ ID NO: 164122 - DNA, 33 bp, Homo sapien
ggcctagcagttggctgaagtgtcagctggggc

SEQ ID NO: 164123 - DNA, 33 bp, Homo sapien
ctctacaggaattttacgaggaatctacgagga

SEQ ID NO: 164124 - DNA, 33 bp, Homo sapien
ctctacaggaattttatgaggaatctacgagga

SEQ ID NO: 164125 - DNA, 33 bp, Homo sapien
cactagaaaggactctcacaggctgaccggagg

SEQ ID NO: 164126 - DNA, 33 bp, Homo sapien
cactagaaaggactcttacaggctgaccggagg

SEQ ID NO: 164127 - DNA, 33 bp, Homo sapien
ttgactccaatggttaccagatccagaatttcc

SEQ ID NO: 164128 - DNA, 33 bp, Homo sapien
ttgactccaatggttagcagatccagaatttcc

SEQ ID NO: 164129 - DNA, 33 bp, Homo sapien
acggttcactaaagaagctgagaagagccattt

SEQ ID NO: 164130 - DNA, 33 bp, Homo sapien
acggttcactaaagaatctgagaagagccattt

SEQ ID NO: 164131 - DNA, 33 bp, Homo sapien
aggaccctcttctagcactatgcaaggcactgg

SEQ ID NO: 164132 - DNA, 33 bp, Homo sapien
aggaccctcttctagcgctatgcaaggcactgg

SEQ ID NO: 164133 - DNA, 33 bp, Homo sapien
ctgtcacttggcagaaagaatagggaagagggt

SEQ ID NO: 164134 - DNA, 33 bp, Homo sapien
ctgtcacttggcagaaggaatagggaagagggt

SEQ ID NO: 164135 - DNA, 33 bp, Homo sapien
tgtgtgtcaagtcaccagatttaggaaaacaaa

SEQ ID NO: 164136 - DNA, 33 bp, Homo sapien
tgtgtgtcaagtcaccggatttaggaaaacaaa

SEQ ID NO: 164137 - DNA, 33 bp, Homo sapien
acctgtttataattggcacccatccaaagtctc

SEQ ID NO: 164138 - DNA, 33 bp, Homo sapien
acctgtttataattgggacccatccaaagtctc

SEQ ID NO: 164139 - DNA, 33 bp, Homo sapien
gtgtggttattaccaacgtcatggaggcatggc

SEQ ID NO: 164140 - DNA, 33 bp, Homo sapien
gtgtggttattaccaatgtcatggaggcatggc

SEQ ID NO: 164141 - DNA, 33 bp, Homo sapien
agtgtccaacacataaccaatttcaaaatatcg

SEQ ID NO: 164142 - DNA, 33 bp, Homo sapien
agtgtccaacacataatcaatttcaaaatatcg

SEQ ID NO: 164143 - DNA, 33 bp, Homo sapien
ccatctacaatgagaaccctgaagttggactaa

SEQ ID NO: 164144 - DNA, 33 bp, Homo sapien
ccatctacaatgagaatcctgaagttggactaa

SEQ ID NO: 164145 - DNA, 33 bp, Homo sapien
tcactgaagagtcaacagtagcaatcacagagt

SEQ ID NO: 164146 - DNA, 33 bp, Homo sapien
tcactgaagagtcaacggtagcaatcacagagt

SEQ ID NO: 164147 - DNA, 33 bp, Homo sapien
aagcagagttatacaacttaagaagaactcaat

SEQ ID NO: 164148 - DNA, 33 bp, Homo sapien
aagcagagttatacaatttaagaagaactcaat

SEQ ID NO: 164149 - DNA, 33 bp, Homo sapien
tccatatagaccctaaagcacatttgagacctg

SEQ ID NO: 164150 - DNA, 33 bp, Homo sapien
tccatatagaccctaaggcacatttgagacctg

SEQ ID NO: 164151 - DNA, 33 bp, Homo sapien; identical to SEQ ID NO: 164149

SEQ ID NO: 164152 - DNA, 33 bp, Homo sapien; identical to SEQ ID NO: 164150

SEQ ID NO: 164153 - DNA, 33 bp, Homo sapien
agtaatagcttgcaccaaatgagtgtttattat

SEQ ID NO: 164154 - DNA, 33 bp, Homo sapien
agtaatagcttgcaccgaatgagtgtttattat

SEQ ID NO: 164155 - DNA, 33 bp, Homo sapien
ctgaaatccatatagaacctaaggcacatttga

SEQ ID NO: 164156 - DNA, 33 bp, Homo sapien
ctgaaatccatatagaccctaaggcacatttga

SEQ ID NO: 164157 - DNA, 33 bp, Homo sapien
caggtgtggatgaagcactttggtgtagtgttt

SEQ ID NO: 164158 - DNA, 33 bp, Homo sapien
caggtgtggatgaagcgctttggtgtagtgttt

SEQ ID NO: 164159 - DNA, 33 bp, Homo sapien
ttacaaaagaagctagaaatctttatttttatg

SEQ ID NO: 164160 - DNA, 33 bp, Homo sapien
ttacaaaagaagctagcaatctttatttttatg

SEQ ID NO: 164161 - DNA, 33 bp, Homo sapien
cagaaaagatagtggaacagaacagctgcctct

SEQ ID NO: 164162 - DNA, 33 bp, Homo sapien
cagaaaagatagtggagcagaacagctgcctct

SEQ ID NO: 164163 - DNA, 33 bp, Homo sapien
ggcagacggactcaagaagaggctctgcaggcc

SEQ ID NO: 164164 - DNA, 33 bp, Homo sapien
ggcagacggactcaaggagaggctctgcaggcc

SEQ ID NO: 164165 - DNA, 33 bp, Homo sapien
ctttagtttgtcaaaacgattagtaggaaatgg

SEQ ID NO: 164166 - DNA, 33 bp, Homo sapien
ctttagtttgtcaaaatgattagtaggaaatgg

SEQ ID NO: 164167 - DNA, 33 bp, Homo sapien
aacttcaatgaaaagacggactggtttataaaa

SEQ ID NO: 164168 - DNA, 33 bp, Homo sapien
aacttcaatgaaaagatggactggtttataaaa

SEQ ID NO: 164169 - DNA, 33 bp, Homo sapien
gttgtgcaactatcatcaccattggttttaaaa

SEQ ID NO: 164170 - DNA, 33 bp, Homo sapien
gttgtgcaactatcattaccattggttttaaaa

SEQ ID NO: 164171 - DNA, 33 bp, Homo sapien
agggcaccttcctccccacaaagttccagaaac

SEQ ID NO: 164172 - DNA, 33 bp, Homo sapien
agggcaccttcctccctacaaagttccagaaac

SEQ ID NO: 164173 - DNA, 33 bp, Homo sapien
attttgcgccatttataaggtccaatttcagac

SEQ ID NO: 164174 - DNA, 33 bp, Homo sapien
attttgcgccatttatgaggtccaatttcagac

SEQ ID NO: 164175 - DNA, 33 bp, Homo sapien
acccaaaatagaggcacgtcttagacaaaagct

SEQ ID NO: 164176 - DNA, 33 bp, Homo sapien
acccaaaatagaggcaggtcttagacaaaagct

SEQ ID NO: 164177 - DNA, 33 bp, Homo sapien
ttcttgattggaattagattgatttttttaatg

SEQ ID NO: 164178 - DNA, 33 bp, Homo sapien
ttcttgattggaattatattgatttttttaatg

SEQ ID NO: 164179 - DNA, 33 bp, Homo sapien
ttgtatcattttgacaagataatggaaaggcat

SEQ ID NO: 164180 - DNA, 33 bp, Homo sapien
ttgtatcattttgacaggataatggaaaggcat

SEQ ID NO: 164181 - DNA, 33 bp, Homo sapien
agcactttggacataacgaactgtcaataaatg

SEQ ID NO: 164182 - DNA, 33 bp, Homo sapien
agcactttggacataatgaactgtcaataaatg

SEQ ID NO: 164183 - DNA, 33 bp, Homo sapien
tgaaaaattctacagaagttccaagtgtggtgt

SEQ ID NO: 164184 - DNA, 33 bp, Homo sapien
tgaaaaattctacagaggttccaagtgtggtgt

SEQ ID NO: 164185 - DNA, 33 bp, Homo sapien
aacagacctgctacaacagacttgttatagaga

SEQ ID NO: 164186 - DNA, 33 bp, Homo sapien
aacagacctgctacaatagacttgttatagaga

SEQ ID NO: 164187 - DNA, 33 bp, Homo sapien
tctgcaaaatgctacacatggaagaagtagaat

SEQ ID NO: 164188 - DNA, 33 bp, Homo sapien
tctgcaaaatgctacatatggaagaagtagaat

SEQ ID NO: 164189 - DNA, 33 bp, Homo sapien
gctcatccaagtcaaggcatggttttaggcaag

SEQ ID NO: 164190 - DNA, 33 bp, Homo sapien
gctcatccaagtcaagtcatggttttaggcaag

SEQ ID NO: 164191 - DNA, 33 bp, Homo sapien
gtaactcttattactacggctggacatacagtt

SEQ ID NO: 164192 - DNA, 33 bp, Homo sapien
gtaactcttattactagggctggacatacagtt

SEQ ID NO: 164193 - DNA, 33 bp, Homo sapien
ctaaaaagcaatgtagaatccctaagaaagtgg

SEQ ID NO: 164194 - DNA, 33 bp, Homo sapien
ctaaaaagcaatgtaggatccctaagaaagtgg

SEQ ID NO: 164195 - DNA, 33 bp, Homo sapien
actgaggcctagatgtgaaatagctttgccaaa

SEQ ID NO: 164196 - DNA, 33 bp, Homo sapien
actgaggcctagatgttaaatagctttgccaaa

SEQ ID NO: 164197 - DNA, 33 bp, Homo sapien
tagtacctatcacacaataagtgctcaaaacat

SEQ ID NO: 164198 - DNA, 33 bp, Homo sapien
tagtacctatcacacagtaagtgctcaaaacat

SEQ ID NO: 164199 - DNA, 33 bp, Homo sapien
aagctgggaaccgcgaccagcaaacttgtcccc

SEQ ID NO: 164200 - DNA, 33 bp, Homo sapien
aagctgggaaccgcgatcagcaaacttgtcccc

SEQ ID NO: 164201 - DNA, 33 bp, Homo sapien
aggaaactcttggcaaagctgtgtgttttatct

SEQ ID NO: 164202 - DNA, 33 bp, Homo sapien
aggaaactcttggcaaggctgtgtgttttatct

SEQ ID NO: 164203 - DNA, 33 bp, Homo sapien
gcacttcaggttgttacgtgattaaaacagttt

SEQ ID NO: 164204 - DNA, 33 bp, Homo sapien
gcacttcaggttgttatgtgattaaaacagttt

SEQ ID NO: 164205 - DNA, 33 bp, Homo sapien
tatttcattgttaaagccctgagatgcatcctt

SEQ ID NO: 164206 - DNA, 33 bp, Homo sapien
tatttcattgttaaagtcctgagatgcatcctt

SEQ ID NO: 164207 - DNA, 33 bp, Homo sapien
tttcaggccttgctcacattcctcgctacttca

SEQ ID NO: 164208 - DNA, 33 bp, Homo sapien
tttcaggccttgctcagattcctcgctacttca

SEQ ID NO: 164209 - DNA, 33 bp, Homo sapien
gggaagcatcttcaagcaacaaaaacaaacaaa

SEQ ID NO: 164210 - DNA, 33 bp, Homo sapien
gggaagcatcttcaagtaacaaaaacaaacaaa

SEQ ID NO: 164211 - DNA, 33 bp, Homo sapien
attgggctcaaagccaaaagataaagtcgttaa

SEQ ID NO: 164212 - DNA, 33 bp, Homo sapien
attgggctcaaagccacaagataaagtcgttaa

SEQ ID NO: 164213 - DNA, 33 bp, Homo sapien
tgctcattttgttctgcaacttccaatttagtg

SEQ ID NO: 164214 - DNA, 33 bp, Homo sapien
tgctcattttgttctgtaacttccaatttagtg

SEQ ID NO: 164215 - DNA, 33 bp, Homo sapien
aaagctactgtcagaccacaggaaggcagagag

SEQ ID NO: 164216 - DNA, 33 bp, Homo sapien
aaagctactgtcagactacaggaaggcagagag

SEQ ID NO: 164217 - DNA, 33 bp, Homo sapien
cacaaagggaggaccacgtgaagatgcagggag

SEQ ID NO: 164218 - DNA, 33 bp, Homo sapien
cacaaagggaggaccatgtgaagatgcagggag

SEQ ID NO: 164219 - DNA, 33 bp, Homo sapien
gttctctgggctttacccaagaacacgtttgca

SEQ ID NO: 164220 - DNA, 33 bp, Homo sapien
gttctctgggctttactcaagaacacgtttgca

SEQ ID NO: 164221 - DNA, 33 bp, Homo sapien
aaattcaggcaaattaagtttgtaaagtggtgc

SEQ ID NO: 164222 - DNA, 33 bp, Homo sapien
aaattcaggcaaattatgtttgtaaagtggtgc

SEQ ID NO: 164223 - DNA, 33 bp, Homo sapien
tctaatgactcgtgcaacaacaaatgtgcctga

SEQ ID NO: 164224 - DNA, 33 bp, Homo sapien
tctaatgactcgtgcagcaacaaatgtgcctga

SEQ ID NO: 164225 - DNA, 33 bp, Homo sapien
cacaccactgaaggaaacaccgtagacatagat

SEQ ID NO: 164226 - DNA, 33 bp, Homo sapien
cacaccactgaaggaagcaccgtagacatagat

SEQ ID NO: 164227 - DNA, 33 bp, Homo sapien
ggctgtcaggaactaaagcctagaaccaaaaga

SEQ ID NO: 164228 - DNA, 33 bp, Homo sapien
ggctgtcaggaactaaggcctagaaccaaaaga

SEQ ID NO: 164229 - DNA, 33 bp, Homo sapien
tctctggtagggcagccacttcactattcctgg

SEQ ID NO: 164230 - DNA, 33 bp, Homo sapien
tctctggtagggcagctacttcactattcctgg

SEQ ID NO: 164231 - DNA, 33 bp, Homo sapien
tctcacatatatcccacgtctacgagttgacct

SEQ ID NO: 164232 - DNA, 33 bp, Homo sapien
tctcacatatatcccatgtctacgagttgacct

SEQ ID NO: 164233 - DNA, 33 bp, Homo sapien
gaggtgcagagtcctacgggaacacacggcagg

SEQ ID NO: 164234 - DNA, 33 bp, Homo sapien
gaggtgcagagtcctatgggaacacacggcagg

SEQ ID NO: 164235 - DNA, 33 bp, Homo sapien
tcagacataaaactagacagaggataattggca

SEQ ID NO: 164236 - DNA, 33 bp, Homo sapien
tcagacataaaactagtcagaggataattggca

SEQ ID NO: 164237 - DNA, 33 bp, Homo sapien
tgctcctcgaacctaactattttactagagctt

SEQ ID NO: 164238 - DNA, 33 bp, Homo sapien
tgctcctcgaacctaattattttactagagctt

SEQ ID NO: 164239 - DNA, 33 bp, Homo sapien
agtgatcaccttagaaattataccatgcattcc

SEQ ID NO: 164240 - DNA, 33 bp, Homo sapien
agtgatcaccttagaatttataccatgcattcc

SEQ ID NO: 164241 - DNA, 33 bp, Homo sapien
agaagaaaagagaatacgctgttaggtaggcaa

SEQ ID NO: 164242 - DNA, 33 bp, Homo sapien
agaagaaaagagaataggctgttaggtaggcaa

SEQ ID NO: 164243 - DNA, 33 bp, Homo sapien
gcatctgtgtctgctacaattgacatgaaaggt

SEQ ID NO: 164244 - DNA, 33 bp, Homo sapien
gcatctgtgtctgctataattgacatgaaaggt

SEQ ID NO: 164245 - DNA, 33 bp, Homo sapien
tatgtttagtgctgcaatgaaagtctctataca

SEQ ID NO: 164246 - DNA, 33 bp, Homo sapien
tatgtttagtgctgcagtgaaagtctctataca

SEQ ID NO: 164247 - DNA, 33 bp, Homo sapien
ctgcctgcaaacaataagtaatacaaaggatga

SEQ ID NO: 164248 - DNA, 33 bp, Homo sapien
ctgcctgcaaacaataggtaatacaaaggatga

SEQ ID NO: 164249 - DNA, 33 bp, Homo sapien
ggcatgcgatgtagcccattagattctccgcgg

SEQ ID NO: 164250 - DNA, 33 bp, Homo sapien
ggcatgcgatgtagccgattagattctccgcgg

SEQ ID NO: 164251 - DNA, 33 bp, Homo sapien
agaagacaaagttgaaatcgatactgatgtggg

SEQ ID NO: 164252 - DNA, 33 bp, Homo sapien
agaagacaaagttgaagtcgatactgatgtggg

SEQ ID NO: 164253 - DNA, 33 bp, Homo sapien
caagtgttttcacaagacttcatggaatgtcga

SEQ ID NO: 164254 - DNA, 33 bp, Homo sapien
caagtgttttcacaaggcttcatggaatgtcga

SEQ ID NO: 164255 - DNA, 33 bp, Homo sapien
ctgttcatgccatgcccctgcttaaaactgacc

SEQ ID NO: 164256 - DNA, 33 bp, Homo sapien
ctgttcatgccatgcctctgcttaaaactgacc

SEQ ID NO: 164257 - DNA, 33 bp, Homo sapien
cctgttctaagccactaactttcaggataattc

SEQ ID NO: 164258 - DNA, 33 bp, Homo sapien
cctgttctaagccactgactttcaggataattc

SEQ ID NO: 164259 - DNA, 33 bp, Homo sapien
gagatgctttgctcatcactttaagcacatgat

SEQ ID NO: 164260 - DNA, 33 bp, Homo sapien
gagatgctttgctcattactttaagcacatgat

SEQ ID NO: 164261 - DNA, 33 bp, Homo sapien
ctgaagcctagattctaacttaagcttctcttt

SEQ ID NO: 164262 - DNA, 33 bp, Homo sapien
ctgaagcctagattctgacttaagcttctcttt

SEQ ID NO: 164263 - DNA, 33 bp, Homo sapien
agaatgaaaacgaacccccatgtaactacaatt

SEQ ID NO: 164264 - DNA, 33 bp, Homo sapien
agaatgaaaacgaaccgccatgtaactacaatt

SEQ ID NO: 164265 - DNA, 33 bp, Homo sapien
ctgaacaagtaggagaagtcaccaagaggaaat

SEQ ID NO: 164266 - DNA, 33 bp, Homo sapien
ctgaacaagtaggagaggtcaccaagaggaaat

SEQ ID NO: 164267 - DNA, 33 bp, Homo sapien
tgtaaaggttactgagaagaaggtgtatttttg

SEQ ID NO: 164268 - DNA, 33 bp, Homo sapien
tgtaaaggttactgaggagaaggtgtatttttg

SEQ ID NO: 164269 - DNA, 33 bp, Homo sapien
tctgaatatagcatagacgttttcccatgttac

SEQ ID NO: 164270 - DNA, 33 bp, Homo sapien
tctgaatatagcataggcgttttcccatgttac

SEQ ID NO: 164271 - DNA, 33 bp, Homo sapien
tttcttctgttcagtccaatctggccgtagtag

SEQ ID NO: 164272 - DNA, 33 bp, Homo sapien
tttcttctgttcagtctaatctggccgtagtag

SEQ ID NO: 164273 - DNA, 33 bp, Homo sapien
gtacaaaccaaagcacaactgagaagtcactaa

SEQ ID NO: 164274 - DNA, 33 bp, Homo sapien
gtacaaaccaaagcacgactgagaagtcactaa

SEQ ID NO: 164275 - DNA, 33 bp, Homo sapien
cgtgcatgaactcaacacacctcgggaaaaaga

SEQ ID NO: 164276 - DNA, 33 bp, Homo sapien
cgtgcatgaactcaacgcacctcgggaaaaaga

SEQ ID NO: 164277 - DNA, 33 bp, Homo sapien
ggctctcctggtctccagatttcagccaggctc

SEQ ID NO: 164278 - DNA, 33 bp, Homo sapien
ggctctcctggtctcccgatttcagccaggctc

SEQ ID NO: 164279 - DNA, 33 bp, Homo sapien
tgtctttaaaataacaatgtgatggaaattatt

SEQ ID NO: 164280 - DNA, 33 bp, Homo sapien
tgtctttaaaataacagtgtgatggaaattatt

SEQ ID NO: 164281 - DNA, 33 bp, Homo sapien
tgggatgggcgttatacggcttattggctcctg

SEQ ID NO: 164282 - DNA, 33 bp, Homo sapien
tgggatgggcgttatatggcttattggctcctg

SEQ ID NO: 164283 - DNA, 33 bp, Homo sapien
taaaacatgaatgaaagacagatatagctatga

SEQ ID NO: 164284 - DNA, 33 bp, Homo sapien
taaaacatgaatgaaatacagatatagctatga

SEQ ID NO: 164285 - DNA, 33 bp, Homo sapien
agtagcctactcatgaagccatggacttactgt

SEQ ID NO: 164286 - DNA, 33 bp, Homo sapien
agtagcctactcatgacgccatggacttactgt

SEQ ID NO: 164287 - DNA, 33 bp, Homo sapien
atgcacatgggtataacgaattcagaagaaaag

SEQ ID NO: 164288 - DNA, 33 bp, Homo sapien
atgcacatgggtataatgaattcagaagaaaag

SEQ ID NO: 164289 - DNA, 33 bp, Homo sapien
ttaattatacatctgaagtgttgaaggaccacc

SEQ ID NO: 164290 - DNA, 33 bp, Homo sapien
ttaattatacatctgaggtgttgaaggaccacc

SEQ ID NO: 164291 - DNA, 33 bp, Homo sapien
gcacaaggactttgcaagtgataacatgtgctg

SEQ ID NO: 164292 - DNA, 33 bp, Homo sapien
gcacaaggactttgcatgtgataacatgtgctg

SEQ ID NO: 164293 - DNA, 33 bp, Homo sapien
ctctgaaggctgttaaaggagggaaaggagctt

SEQ ID NO: 164294 - DNA, 33 bp, Homo sapien
ctctgaaggctgttaagggagggaaaggagctt

SEQ ID NO: 164295 - DNA, 33 bp, Homo sapien
gatgcaaacttgacaggctccctgggtaatcaa

SEQ ID NO: 164296 - DNA, 33 bp, Homo sapien
gatgcaaacttgacagtctccctgggtaatcaa

SEQ ID NO: 164297 - DNA, 33 bp, Homo sapien
gtctacacagtttcagacctttaaaacagattt

SEQ ID NO: 164298 - DNA, 33 bp, Homo sapien
gtctacacagtttcagccctttaaaacagattt

SEQ ID NO: 164299 - DNA, 33 bp, Homo sapien
attcaaggcgaatccaaagtaacgtgagagcaa

SEQ ID NO: 164300 - DNA, 33 bp, Homo sapien
attcaaggcgaatccagagtaacgtgagagcaa

SEQ ID NO: 164301 - DNA, 33 bp, Homo sapien
caaaaatttgaagcctcacattcttaagtggca

SEQ ID NO: 164302 - DNA, 33 bp, Homo sapien
caaaaatttgaagcctgacattcttaagtggca

SEQ ID NO: 164303 - DNA, 33 bp, Homo sapien
gaacaggtactttcaccgatgaggaaactcaaa

SEQ ID NO: 164304 - DNA, 33 bp, Homo sapien
gaacaggtactttcactgatgaggaaactcaaa

SEQ ID NO: 164305 - DNA, 33 bp, Homo sapien
agtgttcttcaccccaatctcatttatccattg

SEQ ID NO: 164306 - DNA, 33 bp, Homo sapien
agtgttcttcaccccagtctcatttatccattg

SEQ ID NO: 164307 - DNA, 33 bp, Homo sapien
tcccatccttgccttcactttatgtacgagcca

SEQ ID NO: 164308 - DNA, 33 bp, Homo sapien
tcccatccttgccttcgctttatgtacgagcca

SEQ ID NO: 164309 - DNA, 33 bp, Homo sapien
aaatggaagctgggggaagaactcagtactgtc

SEQ ID NO: 164310 - DNA, 33 bp, Homo sapien
aaatggaagctggggggagaactcagtactgtc

SEQ ID NO: 164311 - DNA, 33 bp, Homo sapien
cacctgttagaaaggaaaatctatggagaatca

SEQ ID NO: 164312 - DNA, 33 bp, Homo sapien
cacctgttagaaaggagaatctatggagaatca

SEQ ID NO: 164313 - DNA, 33 bp, Homo sapien
acattagtcaaaattaacacctcctcttccctg

SEQ ID NO: 164314 - DNA, 33 bp, Homo sapien
acattagtcaaaattagcacctcctcttccctg

SEQ ID NO: 164315 - DNA, 33 bp, Homo sapien
cagcagagatatgtgacaggagacttaactaaa

SEQ ID NO: 164316 - DNA, 33 bp, Homo sapien
cagcagagatatgtgataggagacttaactaaa

SEQ ID NO: 164317 - DNA, 33 bp, Homo sapien
tgcaggatctgaagaccatcttggctcctgctg

SEQ ID NO: 164318 - DNA, 33 bp, Homo sapien
tgcaggatctgaagactatcttggctcctgctg

SEQ ID NO: 164319 - DNA, 33 bp, Homo sapien
gaaaacaaagcagctacaagtctattttgtaaa

SEQ ID NO: 164320 - DNA, 33 bp, Homo sapien
gaaaacaaagcagctataagtctattttgtaaa

SEQ ID NO: 164321 - DNA, 33 bp, Homo sapien
caaactcactttatgccacacacagaaccaagt

SEQ ID NO: 164322 - DNA, 33 bp, Homo sapien
caaactcactttatgctacacacagaaccaagt

SEQ ID NO: 164323 - DNA, 33 bp, Homo sapien
agaagaggaggtctacagcctagggttaagagg

SEQ ID NO: 164324 - DNA, 33 bp, Homo sapien
agaagaggaggtctacggcctagggttaagagg

SEQ ID NO: 164325 - DNA, 33 bp, Homo sapien
agagcaacagaccatacgctaactggaatataa

SEQ ID NO: 164326 - DNA, 33 bp, Homo sapien
agagcaacagaccatatgctaactggaatataa

SEQ ID NO: 164327 - DNA, 33 bp, Homo sapien
cattttcaaaggaaccacagtttgaccttttac

SEQ ID NO: 164328 - DNA, 33 bp, Homo sapien
cattttcaaaggaaccgcagtttgaccttttac

SEQ ID NO: 164329 - DNA, 33 bp, Homo sapien
tctgggttgcaggaataatggcaaaatgcagca

SEQ ID NO: 164330 - DNA, 33 bp, Homo sapien
tctgggttgcaggaatcatggcaaaatgcagca

SEQ ID NO: 164331 - DNA, 33 bp, Homo sapien
ccgggtacagggcatcaatctttgctggaattg

SEQ ID NO: 164332 - DNA, 33 bp, Homo sapien
ccgggtacagggcatcgatctttgctggaattg

SEQ ID NO: 164333 - DNA, 33 bp, Homo sapien
caaaaacaggtttcagaatagcatatattttaa

SEQ ID NO: 164334 - DNA, 33 bp, Homo sapien
caaaaacaggtttcaggatagcatatattttaa

SEQ ID NO: 164335 - DNA, 33 bp, Homo sapien
caccaacactacagtcccttcatataagatgct

SEQ ID NO: 164336 - DNA, 33 bp, Homo sapien
caccaacactacagtcgcttcatataagatgct

SEQ ID NO: 164337 - DNA, 33 bp, Homo sapien
tcttccactcatgctgcacaaacagttttagca

SEQ ID NO: 164338 - DNA, 33 bp, Homo sapien
tcttccactcatgctgtacaaacagttttagca

SEQ ID NO: 164339 - DNA, 33 bp, Homo sapien
taagtaaatggatgacgagtagatgaaggtgct

SEQ ID NO: 164340 - DNA, 33 bp, Homo sapien
taagtaaatggatgactagtagatgaaggtgct

SEQ ID NO: 164341 - DNA, 33 bp, Homo sapien
tctttcccgccagccaaacttgtccacattggt

SEQ ID NO: 164342 - DNA, 33 bp, Homo sapien
tctttcccgccagccagacttgtccacattggt

SEQ ID NO: 164343 - DNA, 33 bp, Homo sapien
aatctgggtaacagaacagaatgcctgagcctc

SEQ ID NO: 164344 - DNA, 33 bp, Homo sapien
aatctgggtaacagaagagaatgcctgagcctc

SEQ ID NO: 164345 - DNA, 33 bp, Homo sapien
ctctgaacaaacttacacgtttattttctgtgc

SEQ ID NO: 164346 - DNA, 33 bp, Homo sapien
ctctgaacaaacttacgcgtttattttctgtgc

SEQ ID NO: 164347 - DNA, 33 bp, Homo sapien
cagtgcaaaggaatacacatcaccattatgaga

SEQ ID NO: 164348 - DNA, 33 bp, Homo sapien
cagtgcaaaggaatacgcatcaccattatgaga

SEQ ID NO: 164349 - DNA, 33 bp, Homo sapien
ggcttagagaagttgaataatttttccaacatc

SEQ ID NO: 164350 - DNA, 33 bp, Homo sapien
ggcttagagaagttgagtaatttttccaacatc

SEQ ID NO: 164351 - DNA, 33 bp, Homo sapien
tctggctgagccaagtaaatagctgcagagggt

SEQ ID NO: 164352 - DNA, 33 bp, Homo sapien
tctggctgagccaagtgaatagctgcagagggt

SEQ ID NO: 164353 - DNA, 33 bp, Homo sapien
aggaatctatctgagacgtatcgaatcttggct

SEQ ID NO: 164354 - DNA, 33 bp, Homo sapien
aggaatctatctgagatgtatcgaatcttggct

SEQ ID NO: 164355 - DNA, 33 bp, Homo sapien
aaaggatacaaacatacagtgagataaaaggaa

SEQ ID NO: 164356 - DNA, 33 bp, Homo sapien
aaaggatacaaacatagagtgagataaaaggaa

SEQ ID NO: 164357 - DNA, 33 bp, Homo sapien
ctaaaaagcaacctcaagaattccaaaagctaa

SEQ ID NO: 164358 - DNA, 33 bp, Homo sapien
ctaaaaagcaacctcaggaattccaaaagctaa

SEQ ID NO: 164359 - DNA, 33 bp, Homo sapien
ggcattctaagtgctccaagacggggcgttcat

SEQ ID NO: 164360 - DNA, 33 bp, Homo sapien
ggcattctaagtgctctaagacggggcgttcat

SEQ ID NO: 164361 - DNA, 33 bp, Homo sapien
tgagatgtattagagaacaaagaaggttgtggt

SEQ ID NO: 164362 - DNA, 33 bp, Homo sapien
tgagatgtattagagaccaaagaaggttgtggt

SEQ ID NO: 164363 - DNA, 33 bp, Homo sapien
gtggagccaggatgggaactcggctcatcacac

SEQ ID NO: 164364 - DNA, 33 bp, Homo sapien
gtggagccaggatggggactcggctcatcacac

SEQ ID NO: 164365 - DNA, 33 bp, Homo sapien
agaatgcatacactctcacaaccacacacaccg

SEQ ID NO: 164366 - DNA, 33 bp, Homo sapien
agaatgcatacactcttacaaccacacacaccg

SEQ ID NO: 164367 - DNA, 33 bp, Homo sapien
tagctgagaggcgcccactactatgtctcacta

SEQ ID NO: 164368 - DNA, 33 bp, Homo sapien
tagctgagaggcgcccgctactatgtctcacta

SEQ ID NO: 164369 - DNA, 33 bp, Homo sapien
gttcttcccccgtccacgacaaagattctctcc

SEQ ID NO: 164370 - DNA, 33 bp, Homo sapien
gttcttcccccgtccatgacaaagattctctcc

SEQ ID NO: 164371 - DNA, 33 bp, Homo sapien
atttcaggctagaatcaccaagatttgatgaca

SEQ ID NO: 164372 - DNA, 33 bp, Homo sapien
atttcaggctagaatcgccaagatttgatgaca

SEQ ID NO: 164373 - DNA, 33 bp, Homo sapien
ctgtgagcaactttgagctgatctataatagtt

SEQ ID NO: 164374 - DNA, 33 bp, Homo sapien
ctgtgagcaactttgatctgatctataatagtt

SEQ ID NO: 164375 - DNA, 33 bp, Homo sapien
tatgtgatttctacgaataggatataaaaggcg

SEQ ID NO: 164376 - DNA, 33 bp, Homo sapien
tatgtgatttctacgactaggatataaaaggcg

SEQ ID NO: 164377 - DNA, 33 bp, Homo sapien
tagaaactgtgagagacgataaagatggtgtta

SEQ ID NO: 164378 - DNA, 33 bp, Homo sapien
tagaaactgtgagagatgataaagatggtgtta

SEQ ID NO: 164379 - DNA, 33 bp, Homo sapien
tggggatgatttgttacgtagtagttgctgatt

SEQ ID NO: 164380 - DNA, 33 bp, Homo sapien
tggggatgatttgttatgtagtagttgctgatt

SEQ ID NO: 164381 - DNA, 33 bp, Homo sapien
attggaacctcagtcaataaaaaggcatctcct

SEQ ID NO: 164382 - DNA, 33 bp, Homo sapien
attggaacctcagtcagtaaaaaggcatctcct

SEQ ID NO: 164383 - DNA, 33 bp, Homo sapien
gggaggccttgcaaaactagcttactcctgaga

SEQ ID NO: 164384 - DNA, 33 bp, Homo sapien
gggaggccttgcaaaattagcttactcctgaga

SEQ ID NO: 164385 - DNA, 33 bp, Homo sapien
atcactatctgtggagcagaaaatattctggtg

SEQ ID NO: 164386 - DNA, 33 bp, Homo sapien
atcactatctgtggagtagaaaatattctggtg

SEQ ID NO: 164387 - DNA, 33 bp, Homo sapien
actctggacactgtgaacaataatactaagggt

SEQ ID NO: 164388 - DNA, 33 bp, Homo sapien
actctggacactgtgatcaataatactaagggt

SEQ ID NO: 164389 - DNA, 33 bp, Homo sapien
gatcagagtgcagacccacaatcataaaggcac

SEQ ID NO: 164390 - DNA, 33 bp, Homo sapien
gatcagagtgcagacctacaatcataaaggcac

SEQ ID NO: 164391 - DNA, 33 bp, Homo sapien
tatggtgaaagttacaaaataaaacagtactga

SEQ ID NO: 164392 - DNA, 33 bp, Homo sapien
tatggtgaaagttacacaataaaacagtactga

SEQ ID NO: 164393 - DNA, 33 bp, Homo sapien
actctgccatcaatacacaacagttgagttatg

SEQ ID NO: 164394 - DNA, 33 bp, Homo sapien
actctgccatcaatacgcaacagttgagttatg

SEQ ID NO: 164395 - DNA, 33 bp, Homo sapien
tgtcagggaagtagaaatacaggtctcaatact

SEQ ID NO: 164396 - DNA, 33 bp, Homo sapien
tgtcagggaagtagaagtacaggtctcaatact

SEQ ID NO: 164397 - DNA, 33 bp, Homo sapien
ttaggagtgtacaatgcatttcaatgtatcccc

SEQ ID NO: 164398 - DNA, 33 bp, Homo sapien
ttaggagtgtacaatgtatttcaatgtatcccc

SEQ ID NO: 164399 - DNA, 33 bp, Homo sapien
tttgtttatgattagtaaaaaatgggaatcata

SEQ ID NO: 164400 - DNA, 33 bp, Homo sapien
tttgtttatgattagttaaaaatgggaatcata

SEQ ID NO: 164401 - DNA, 33 bp, Homo sapien
atggagagtgtaaatcactgcaaactctcccaa

SEQ ID NO: 164402 - DNA, 33 bp, Homo sapien
atggagagtgtaaatccctgcaaactctcccaa

SEQ ID NO: 164403 - DNA, 33 bp, Homo sapien
tgcacatcctgtctgaaattcagggaaaggtcc

SEQ ID NO: 164404 - DNA, 33 bp, Homo sapien
tgcacatcctgtctgagattcagggaaaggtcc

SEQ ID NO: 164405 - DNA, 33 bp, Homo sapien
tttttaagccaccaaagctgtagtaatttatgc

SEQ ID NO: 164406 - DNA, 33 bp, Homo sapien
tttttaagccaccaaatctgtagtaatttatgc

SEQ ID NO: 164407 - DNA, 33 bp, Homo sapien
ttggtcaaaatccccaatcctgtctagtgccag

SEQ ID NO: 164408 - DNA, 33 bp, Homo sapien
ttggtcaaaatccccagtcctgtctagtgccag

SEQ ID NO: 164409 - DNA, 33 bp, Homo sapien
gagaacttttaattgaacacagttgggggtatc

SEQ ID NO: 164410 - DNA, 33 bp, Homo sapien
gagaacttttaattgagcacagttgggggtatc

SEQ ID NO: 164411 - DNA, 33 bp, Homo sapien
acagggtctacctttacgacaaatttacagaca

SEQ ID NO: 164412 - DNA, 33 bp, Homo sapien
acagggtctacctttatgacaaatttacagaca

SEQ ID NO: 164413 - DNA, 33 bp, Homo sapien
agactttggcataaaccgcttgacttcctcggc

SEQ ID NO: 164414 - DNA, 33 bp, Homo sapien
agactttggcataaactgcttgacttcctcggc

SEQ ID NO: 164415 - DNA, 33 bp, Homo sapien
cggggtttttggtcaactaagttcaggaaacac

SEQ ID NO: 164416 - DNA, 33 bp, Homo sapien
cggggtttttggtcaattaagttcaggaaacac

SEQ ID NO: 164417 - DNA, 33 bp, Homo sapien
gataagacatgaaacaaattcctaattaagtta

SEQ ID NO: 164418 - DNA, 33 bp, Homo sapien
gataagacatgaaacagattcctaattaagtta

SEQ ID NO: 164419 - DNA, 33 bp, Homo sapien
gctcatagtaggtgcgcagcaagatttttttca

SEQ ID NO: 164420 - DNA, 33 bp, Homo sapien
gctcatagtaggtgcgtagcaagatttttttca

SEQ ID NO: 164421 - DNA, 33 bp, Homo sapien
gttttcagaagatctacgtccttgaaatataca

SEQ ID NO: 164422 - DNA, 33 bp, Homo sapien
gttttcagaagatctatgtccttgaaatataca

SEQ ID NO: 164423 - DNA, 33 bp, Homo sapien
cagggccagcataaaacgaaaagaagggaatag

SEQ ID NO: 164424 - DNA, 33 bp, Homo sapien
cagggccagcataaaatgaaaagaagggaatag

SEQ ID NO: 164425 - DNA, 33 bp, Homo sapien
gtgcagaatgacatataaggaatgactgtattc

SEQ ID NO: 164426 - DNA, 33 bp, Homo sapien
gtgcagaatgacatatgaggaatgactgtattc

SEQ ID NO: 164427 - DNA, 33 bp, Homo sapien
aaggaaattcaaattacggtgcagaatcacctt

SEQ ID NO: 164428 - DNA, 33 bp, Homo sapien
aaggaaattcaaattatggtgcagaatcacctt

SEQ ID NO: 164429 - DNA, 33 bp, Homo sapien
gaataaatgaactgaaagatagctcaagaagaa

SEQ ID NO: 164430 - DNA, 33 bp, Homo sapien
gaataaatgaactgaatgatagctcaagaagaa

SEQ ID NO: 164431 - DNA, 33 bp, Homo sapien
agtactggaggatccaagataccatgagtagac

SEQ ID NO: 164432 - DNA, 33 bp, Homo sapien
agtactggaggatccaggataccatgagtagac

SEQ ID NO: 164433 - DNA, 33 bp, Homo sapien
catcctgcatacagtcaccagaacaattttaca

SEQ ID NO: 164434 - DNA, 33 bp, Homo sapien
catcctgcatacagtcgccagaacaattttaca

SEQ ID NO: 164435 - DNA, 33 bp, Homo sapien
caagcatcacctgattcaaggacatactaagcc

SEQ ID NO: 164436 - DNA, 33 bp, Homo sapien
caagcatcacctgattgaaggacatactaagcc

SEQ ID NO: 164437 - DNA, 33 bp, Homo sapien
tctgtcataagcatgaaggtcatcaaatgcttt

SEQ ID NO: 164438 - DNA, 33 bp, Homo sapien
tctgtcataagcatgacggtcatcaaatgcttt

SEQ ID NO: 164439 - DNA, 33 bp, Homo sapien
tgaaggctcagatcacaaaagtcacctttatag

SEQ ID NO: 164440 - DNA, 33 bp, Homo sapien
tgaaggctcagatcacgaaagtcacctttatag

SEQ ID NO: 164441 - DNA, 33 bp, Homo sapien
gcttcctgctactcctaacattatataacaggg

SEQ ID NO: 164442 - DNA, 33 bp, Homo sapien
gcttcctgctactcctcacattatataacaggg

SEQ ID NO: 164443 - DNA, 33 bp, Homo sapien
aggtcatctaataaaactgtggaatgatctcac

SEQ ID NO: 164444 - DNA, 33 bp, Homo sapien
aggtcatctaataaaattgtggaatgatctcac

SEQ ID NO: 164445 - DNA, 33 bp, Homo sapien
gctgttactttctggaatagtgtgtgatttctg

SEQ ID NO: 164446 - DNA, 33 bp, Homo sapien
gctgttactttctggattagtgtgtgatttctg

SEQ ID NO: 164447 - DNA, 33 bp, Homo sapien
cagtgaatgctggttcaacggcacttttccaat

SEQ ID NO: 164448 - DNA, 33 bp, Homo sapien
cagtgaatgctggttccacggcacttttccaat

SEQ ID NO: 164449 - DNA, 33 bp, Homo sapien
gcaagggggtcaggtcaaagccatctcttcctg

SEQ ID NO: 164450 - DNA, 33 bp, Homo sapien
gcaagggggtcaggtccaagccatctcttcctg

SEQ ID NO: 164451 - DNA, 33 bp, Homo sapien
tgttttaaatttgagccgagtgaagcgactgtg

SEQ ID NO: 164452 - DNA, 33 bp, Homo sapien
tgttttaaatttgagctgagtgaagcgactgtg

SEQ ID NO: 164453 - DNA, 33 bp, Homo sapien
ggggaacgggctgatacagaatcactgtaagca

SEQ ID NO: 164454 - DNA, 33 bp, Homo sapien
ggggaacgggctgatagagaatcactgtaagca

SEQ ID NO: 164455 - DNA, 33 bp, Homo sapien
tttatagttaagtctcaaaatgaggtagtgtgt

SEQ ID NO: 164456 - DNA, 33 bp, Homo sapien
tttatagttaagtctcgaaatgaggtagtgtgt

SEQ ID NO: 164457 - DNA, 33 bp, Homo sapien
gaaacacattgacttcccttcttttctgatata

SEQ ID NO: 164458 - DNA, 33 bp, Homo sapien
gaaacacattgacttctcttcttttctgatata

SEQ ID NO: 164459 - DNA, 33 bp, Homo sapien
gatattgacacatcctaactttcaggtatagac

SEQ ID NO: 164460 - DNA, 33 bp, Homo sapien
gatattgacacatcctcactttcaggtatagac

SEQ ID NO: 164461 - DNA, 33 bp, Homo sapien
agctgaacaacccagacactagaaactgtaggg

SEQ ID NO: 164462 - DNA, 33 bp, Homo sapien
agctgaacaacccagagactagaaactgtaggg

SEQ ID NO: 164463 - DNA, 33 bp, Homo sapien
ataaatccagaggtcccgatgagattgtgttga

SEQ ID NO: 164464 - DNA, 33 bp, Homo sapien
ataaatccagaggtcctgatgagattgtgttga

SEQ ID NO: 164465 - DNA, 33 bp, Homo sapien
ccaagctagccctgagaactgcgagttggaggt

SEQ ID NO: 164466 - DNA, 33 bp, Homo sapien
ccaagctagccctgaggactgcgagttggaggt

SEQ ID NO: 164467 - DNA, 33 bp, Homo sapien
gcttcagggcagcttacacaaagatttgaattt

SEQ ID NO: 164468 - DNA, 33 bp, Homo sapien
gcttcagggcagcttagacaaagatttgaattt

SEQ ID NO: 164469 - DNA, 33 bp, Homo sapien
aatctgtttgctgcacacttgtttgagatgcat

SEQ ID NO: 164470 - DNA, 33 bp, Homo sapien
aatctgtttgctgcacgcttgtttgagatgcat

SEQ ID NO: 164471 - DNA, 33 bp, Homo sapien
tctcctcaaactggacaaatcagccatcagagc

SEQ ID NO: 164472 - DNA, 33 bp, Homo sapien
tctcctcaaactggacgaatcagccatcagagc

SEQ ID NO: 164473 - DNA, 33 bp, Homo sapien
tgctgcctctccaccccatcagttagttcttct

SEQ ID NO: 164474 - DNA, 33 bp, Homo sapien
tgctgcctctccacccgatcagttagttcttct

SEQ ID NO: 164475 - DNA, 33 bp, Homo sapien
cagagcacagggttcacaaactttaacgtgcat

SEQ ID NO: 164476 - DNA, 33 bp, Homo sapien
cagagcacagggttcataaactttaacgtgcat

SEQ ID NO: 164477 - DNA, 33 bp, Homo sapien
atgaacctctatgtgtcaaaccactgagatttc

SEQ ID NO: 164478 - DNA, 33 bp, Homo sapien
atgaacctctatgtgttaaaccactgagatttc

SEQ ID NO: 164479 - DNA, 33 bp, Homo sapien
actaatagaatgatcaataatctctatgaattc

SEQ ID NO: 164480 - DNA, 33 bp, Homo sapien
actaatagaatgatcagtaatctctatgaattc

SEQ ID NO: 164481 - DNA, 33 bp, Homo sapien
gacctaccacgtgccaaagactaagcactgggg

SEQ ID NO: 164482 - DNA, 33 bp, Homo sapien
gacctaccacgtgccagagactaagcactgggg

SEQ ID NO: 164483 - DNA, 33 bp, Homo sapien
ccccccaaagattggacagaaaattaggaagcc

SEQ ID NO: 164484 - DNA, 33 bp, Homo sapien
ccccccaaagattggagagaaaattaggaagcc

SEQ ID NO: 164485 - DNA, 33 bp, Homo sapien
gcaccctggatgaccacgggggttccctggggc

SEQ ID NO: 164486 - DNA, 33 bp, Homo sapien
gcaccctggatgaccatgggggttccctggggc

SEQ ID NO: 164487 - DNA, 33 bp, Homo sapien
gaactaatcacaaataacccacttctcttccat

SEQ ID NO: 164488 - DNA, 33 bp, Homo sapien
gaactaatcacaaatatcccacttctcttccat

SEQ ID NO: 164489 - DNA, 33 bp, Homo sapien
aaatgccttaaatgatcacgaggtgaagggtag

SEQ ID NO: 164490 - DNA, 33 bp, Homo sapien
aaatgccttaaatgatgacgaggtgaagggtag

SEQ ID NO: 164491 - DNA, 33 bp, Homo sapien
ctacacatttcctaagcctcaggccatgatttc

SEQ ID NO: 164492 - DNA, 33 bp, Homo sapien
ctacacatttcctaaggctcaggccatgatttc

SEQ ID NO: 164493 - DNA, 33 bp, Homo sapien
caggtgctaccacttacctaacctctgagcttc

SEQ ID NO: 164494 - DNA, 33 bp, Homo sapien
caggtgctaccacttatctaacctctgagcttc

SEQ ID NO: 164495 - DNA, 33 bp, Homo sapien
gcaagtcaatgaaagaagatgttaagagcaatt

SEQ ID NO: 164496 - DNA, 33 bp, Homo sapien
gcaagtcaatgaaagaggatgttaagagcaatt

SEQ ID NO: 164497 - DNA, 33 bp, Homo sapien
cctgcttctaaatgcagtcacattctaaggtcc

SEQ ID NO: 164498 - DNA, 33 bp, Homo sapien
cctgcttctaaatgcattcacattctaaggtcc

SEQ ID NO: 164499 - DNA, 33 bp, Homo sapien
gatcagctggagtggaaagaacgtggtagcttt

SEQ ID NO: 164500 - DNA, 33 bp, Homo sapien
gatcagctggagtggagagaacgtggtagcttt

SEQ ID NO: 164501 - DNA, 33 bp, Homo sapien
cattttagcagcacagaccaaactccagtaggt

SEQ ID NO: 164502 - DNA, 33 bp, Homo sapien
cattttagcagcacagtccaaactccagtaggt

SEQ ID NO: 164503 - DNA, 33 bp, Homo sapien
tgctcataaaaaaatcaagaagacattatcaga

SEQ ID NO: 164504 - DNA, 33 bp, Homo sapien
tgctcataaaaaaatcgagaagacattatcaga

SEQ ID NO: 164505 - DNA, 33 bp, Homo sapien
caatacaagaaaaggaagaagaagttcacacct

SEQ ID NO: 164506 - DNA, 33 bp, Homo sapien
caatacaagaaaaggacgaagaagttcacacct

SEQ ID NO: 164507 - DNA, 33 bp, Homo sapien
tttctccttggaatgacgaaatttttcttgaaa

SEQ ID NO: 164508 - DNA, 33 bp, Homo sapien
tttctccttggaatgatgaaatttttcttgaaa

SEQ ID NO: 164509 - DNA, 33 bp, Homo sapien
ttttatgatgtgtgtacaaggactatagggcac

SEQ ID NO: 164510 - DNA, 33 bp, Homo sapien
ttttatgatgtgtgtataaggactatagggcac

SEQ ID NO: 164511 - DNA, 33 bp, Homo sapien
agtcagtagagtaatacgctgtacacgtttgta

SEQ ID NO: 164512 - DNA, 33 bp, Homo sapien
agtcagtagagtaatatgctgtacacgtttgta

SEQ ID NO: 164513 - DNA, 33 bp, Homo sapien
ttgaagaactgagacccagagacatttcttatc

SEQ ID NO: 164514 - DNA, 33 bp, Homo sapien
ttgaagaactgagacctagagacatttcttatc

SEQ ID NO: 164515 - DNA, 33 bp, Homo sapien
ttctggattgaaccaacgtacaccttacactta

SEQ ID NO: 164516 - DNA, 33 bp, Homo sapien
ttctggattgaaccaatgtacaccttacactta

SEQ ID NO: 164517 - DNA, 33 bp, Homo sapien
ataggaaaacaggcatcaatgaactgtacagta

SEQ ID NO: 164518 - DNA, 33 bp, Homo sapien
ataggaaaacaggcattaatgaactgtacagta

SEQ ID NO: 164519 - DNA, 33 bp, Homo sapien
gtctacttaagtgggaactttgacaggataatt

SEQ ID NO: 164520 - DNA, 33 bp, Homo sapien
gtctacttaagtgggagctttgacaggataatt

SEQ ID NO: 164521 - DNA, 33 bp, Homo sapien
tttagagactgtgaacaaaggagctcaatgggg

SEQ ID NO: 164522 - DNA, 33 bp, Homo sapien
tttagagactgtgaacgaaggagctcaatgggg

SEQ ID NO: 164523 - DNA, 33 bp, Homo sapien
actttgtttagagcaacaaagaaaaacagtctt

SEQ ID NO: 164524 - DNA, 33 bp, Homo sapien
actttgtttagagcaataaagaaaaacagtctt

SEQ ID NO: 164525 - DNA, 33 bp, Homo sapien
agacgttatgcagagacgggcttgtagatggaa

SEQ ID NO: 164526 - DNA, 33 bp, Homo sapien
agacgttatgcagagatgggcttgtagatggaa

SEQ ID NO: 164527 - DNA, 33 bp, Homo sapien
taatgaatcacagagaaatatgctgtgtcttaa

SEQ ID NO: 164528 - DNA, 33 bp, Homo sapien
taatgaatcacagagagatatgctgtgtcttaa

SEQ ID NO: 164529 - DNA, 33 bp, Homo sapien
aaacttcagcttttgcgctgcctaatagttgtg

SEQ ID NO: 164530 - DNA, 33 bp, Homo sapien
aaacttcagcttttgctctgcctaatagttgtg

SEQ ID NO: 164531 - DNA, 33 bp, Homo sapien
agtcattttcattcaccgggcccaagataccta

SEQ ID NO: 164532 - DNA, 33 bp, Homo sapien
agtcattttcattcactgggcccaagataccta

SEQ ID NO: 164533 - DNA, 33 bp, Homo sapien
tgaggaagagccttaggaactataaagtgctgt

SEQ ID NO: 164534 - DNA, 33 bp, Homo sapien
tgaggaagagccttagtaactataaagtgctgt

SEQ ID NO: 164535 - DNA, 33 bp, Homo sapien
catctacttttcctgccagtgtttatttgctag

SEQ ID NO: 164536 - DNA, 33 bp, Homo sapien
catctacttttcctgctagtgtttatttgctag

SEQ ID NO: 164537 - DNA, 33 bp, Homo sapien
aagttgggctctagcaatgacagttcattcatt

SEQ ID NO: 164538 - DNA, 33 bp, Homo sapien
aagttgggctctagcagtgacagttcattcatt

SEQ ID NO: 164539 - DNA, 33 bp, Homo sapien
cttgcaagaagtgctgcaggttagccaagatga

SEQ ID NO: 164540 - DNA, 33 bp, Homo sapien
cttgcaagaagtgctgtaggttagccaagatga

SEQ ID NO: 164541 - DNA, 33 bp, Homo sapien
gcacagggaggtgaaacagcttgcccactcagc

SEQ ID NO: 164542 - DNA, 33 bp, Homo sapien
gcacagggaggtgaaatagcttgcccactcagc

SEQ ID NO: 164543 - DNA, 33 bp, Homo sapien
ctgcattgtcatcaccactaaaacattaaaagg

SEQ ID NO: 164544 - DNA, 33 bp, Homo sapien
ctgcattgtcatcaccgctaaaacattaaaagg

SEQ ID NO: 164545 - DNA, 33 bp, Homo sapien
caggaattctgtaaacactaaggctgctagcta

SEQ ID NO: 164546 - DNA, 33 bp, Homo sapien
caggaattctgtaaacgctaaggctgctagcta

SEQ ID NO: 164547 - DNA, 33 bp, Homo sapien
acttgactgtgtccaaattcatttatggggtgg

SEQ ID NO: 164548 - DNA, 33 bp, Homo sapien
acttgactgtgtccaagttcatttatggggtgg

SEQ ID NO: 164549 - DNA, 33 bp, Homo sapien
agtgggcgagaggtccccattgagtcagcagca

SEQ ID NO: 164550 - DNA, 33 bp, Homo sapien
agtgggcgagaggtcctcattgagtcagcagca

SEQ ID NO: 164551 - DNA, 33 bp, Homo sapien
ctgatcttagagtttaaagtccaactgacagga

SEQ ID NO: 164552 - DNA, 33 bp, Homo sapien
ctgatcttagagtttacagtccaactgacagga

SEQ ID NO: 164553 - DNA, 33 bp, Homo sapien
gccaggtatggtgttacgccactcatgtgcctt

SEQ ID NO: 164554 - DNA, 33 bp, Homo sapien
gccaggtatggtgttatgccactcatgtgcctt

SEQ ID NO: 164555 - DNA, 33 bp, Homo sapien
gactagaagagactcacagaatatgccaggcct

SEQ ID NO: 164556 - DNA, 33 bp, Homo sapien
gactagaagagactcagagaatatgccaggcct

SEQ ID NO: 164557 - DNA, 33 bp, Homo sapien
gataaagaaaacatcaataatatgatctacaca

SEQ ID NO: 164558 - DNA, 33 bp, Homo sapien
gataaagaaaacatcagtaatatgatctacaca

SEQ ID NO: 164559 - DNA, 33 bp, Homo sapien
ccaatacaagcgcccaatctccaagttttctcc

SEQ ID NO: 164560 - DNA, 33 bp, Homo sapien
ccaatacaagcgcccagtctccaagttttctcc

SEQ ID NO: 164561 - DNA, 33 bp, Homo sapien
aacatttccagtaagacagtacagatagaagct

SEQ ID NO: 164562 - DNA, 33 bp, Homo sapien
aacatttccagtaagatagtacagatagaagct

SEQ ID NO: 164563 - DNA, 33 bp, Homo sapien
tcatcagccatcagtaagtcttgtctcaggaag

SEQ ID NO: 164564 - DNA, 33 bp, Homo sapien
tcatcagccatcagtaggtcttgtctcaggaag

SEQ ID NO: 164565 - DNA, 33 bp, Homo sapien
gaacaaagtggttcaaagcatgagctgcagagt

SEQ ID NO: 164566 - DNA, 33 bp, Homo sapien
gaacaaagtggttcaacgcatgagctgcagagt

SEQ ID NO: 164567 - DNA, 33 bp, Homo sapien
cactctattagtatgacagagctagttgtttca

SEQ ID NO: 164568 - DNA, 33 bp, Homo sapien
cactctattagtatgagagagctagttgtttca

SEQ ID NO: 164569 - DNA, 33 bp, Homo sapien
gatgaagttgagaaaacggccttgaatgtaggg

SEQ ID NO: 164570 - DNA, 33 bp, Homo sapien
gatgaagttgagaaaatggccttgaatgtaggg

SEQ ID NO: 164571 - DNA, 33 bp, Homo sapien
ctttatggtaccattacactgagatgggtgcgg

SEQ ID NO: 164572 - DNA, 33 bp, Homo sapien
ctttatggtaccattatactgagatgggtgcgg

SEQ ID NO: 164573 - DNA, 33 bp, Homo sapien
tggcagttttcaccaccctgctcatgtttttct

SEQ ID NO: 164574 - DNA, 33 bp, Homo sapien
tggcagttttcaccactctgctcatgtttttct

SEQ ID NO: 164575 - DNA, 33 bp, Homo sapien
cccccagcagatgctacacaagaagctgacact

SEQ ID NO: 164576 - DNA, 33 bp, Homo sapien
cccccagcagatgctagacaagaagctgacact

SEQ ID NO: 164577 - DNA, 33 bp, Homo sapien
tgctgccctcagaagacatgttccttgaagcag

SEQ ID NO: 164578 - DNA, 33 bp, Homo sapien
tgctgccctcagaagatatgttccttgaagcag

SEQ ID NO: 164579 - DNA, 33 bp, Homo sapien
atagagtaagcaccataacaaggctgggtccct

SEQ ID NO: 164580 - DNA, 33 bp, Homo sapien
atagagtaagcaccatgacaaggctgggtccct

SEQ ID NO: 164581 - DNA, 33 bp, Homo sapien
ccaaaaaactcagataactgaagcctcgggagt

SEQ ID NO: 164582 - DNA, 33 bp, Homo sapien
ccaaaaaactcagatagctgaagcctcgggagt

SEQ ID NO: 164583 - DNA, 33 bp, Homo sapien
gagctctgtgacctaacagccctgcccaccatg

SEQ ID NO: 164584 - DNA, 33 bp, Homo sapien
gagctctgtgacctaagagccctgcccaccatg

SEQ ID NO: 164585 - DNA, 33 bp, Homo sapien
ttttgtttgtttgaaactctcagcagatcagca

SEQ ID NO: 164586 - DNA, 33 bp, Homo sapien
ttttgtttgtttgaaattctcagcagatcagca

SEQ ID NO: 164587 - DNA, 33 bp, Homo sapien
caagcatcacaactaccaaacaacactggatga

SEQ ID NO: 164588 - DNA, 33 bp, Homo sapien
caagcatcacaactactaaacaacactggatga

SEQ ID NO: 164589 - DNA, 33 bp, Homo sapien
tgaagctcttctgaaagtccttaaatgtccttg

SEQ ID NO: 164590 - DNA, 33 bp, Homo sapien
tgaagctcttctgaaattccttaaatgtccttg

SEQ ID NO: 164591 - DNA, 33 bp, Homo sapien
tggggactcacacaagaatcaagtatgctccac

SEQ ID NO: 164592 - DNA, 33 bp, Homo sapien
tggggactcacacaaggatcaagtatgctccac

SEQ ID NO: 164593 - DNA, 33 bp, Homo sapien
agctcaagggtagatacaaggctccatccccag

SEQ ID NO: 164594 - DNA, 33 bp, Homo sapien
agctcaagggtagatataaggctccatccccag

SEQ ID NO: 164595 - DNA, 33 bp, Homo sapien
tggttagtaacatacaacataaagcccaaaggc

SEQ ID NO: 164596 - DNA, 33 bp, Homo sapien
tggttagtaacatacatcataaagcccaaaggc

SEQ ID NO: 164597 - DNA, 33 bp, Homo sapien
atctcctgtcttgtaaacattaaacaaatgaag

SEQ ID NO: 164598 - DNA, 33 bp, Homo sapien
atctcctgtcttgtaagcattaaacaaatgaag

SEQ ID NO: 164599 - DNA, 33 bp, Homo sapien
gacaaaaagggttacacagcataacaatgagca

SEQ ID NO: 164600 - DNA, 33 bp, Homo sapien
gacaaaaagggttacatagcataacaatgagca

SEQ ID NO: 164601 - DNA, 33 bp, Homo sapien
tcataatatatccaaaatccagtcccttctcac

SEQ ID NO: 164602 - DNA, 33 bp, Homo sapien
tcataatatatccaaagtccagtcccttctcac

SEQ ID NO: 164603 - DNA, 33 bp, Homo sapien
taaaagtagtgtattacaaagtgcaaagctcca

SEQ ID NO: 164604 - DNA, 33 bp, Homo sapien
taaaagtagtgtattagaaagtgcaaagctcca

SEQ ID NO: 164605 - DNA, 33 bp, Homo sapien
ctataccgtattttacaacccagctgtagtgac

SEQ ID NO: 164606 - DNA, 33 bp, Homo sapien
ctataccgtattttacgacccagctgtagtgac

SEQ ID NO: 164607 - DNA, 33 bp, Homo sapien
tttgttatttggtgtaggacatatatccaagtg

SEQ ID NO: 164608 - DNA, 33 bp, Homo sapien
tttgttatttggtgtatgacatatatccaagtg

SEQ ID NO: 164609 - DNA, 33 bp, Homo sapien
ttcacattactttccacgctttaagatgcaatc

SEQ ID NO: 164610 - DNA, 33 bp, Homo sapien
ttcacattactttccatgctttaagatgcaatc

SEQ ID NO: 164611 - DNA, 33 bp, Homo sapien
gtagacacattgattgcaaaacagtcacaattc

SEQ ID NO: 164612 - DNA, 33 bp, Homo sapien
gtagacacattgattgtaaaacagtcacaattc

SEQ ID NO: 164613 - DNA, 33 bp, Homo sapien
agggctatggaagaacacagcgagaaggcagtc

SEQ ID NO: 164614 - DNA, 33 bp, Homo sapien
agggctatggaagaacgcagcgagaaggcagtc

SEQ ID NO: 164615 - DNA, 33 bp, Homo sapien
gaacgagtcactactgaatcttcttcccccatc

SEQ ID NO: 164616 - DNA, 33 bp, Homo sapien
gaacgagtcactactggatcttcttcccccatc

SEQ ID NO: 164617 - DNA, 33 bp, Homo sapien
gatttgccttaacctaagccttctgaatttagt

SEQ ID NO: 164618 - DNA, 33 bp, Homo sapien
gatttgccttaacctaggccttctgaatttagt

SEQ ID NO: 164619 - DNA, 33 bp, Homo sapien
ttaacatagaagggtcaacaaggagactactga

SEQ ID NO: 164620 - DNA, 33 bp, Homo sapien
ttaacatagaagggtcgacaaggagactactga

SEQ ID NO: 164621 - DNA, 33 bp, Homo sapien
ctatggaactgcatcacgctgagagcagagcca

SEQ ID NO: 164622 - DNA, 33 bp, Homo sapien
ctatggaactgcatcatgctgagagcagagcca

SEQ ID NO: 164623 - DNA, 33 bp, Homo sapien
ggcctgtcggcacttcaaggactaaccacagct

SEQ ID NO: 164624 - DNA, 33 bp, Homo sapien
ggcctgtcggcacttccaggactaaccacagct

SEQ ID NO: 164625 - DNA, 33 bp, Homo sapien
tttgaccaggttgaaacgttctgagattgtttg

SEQ ID NO: 164626 - DNA, 33 bp, Homo sapien
tttgaccaggttgaaaggttctgagattgtttg

SEQ ID NO: 164627 - DNA, 33 bp, Homo sapien
ggtattgagtaatatcaaccaaattgcagacat

SEQ ID NO: 164628 - DNA, 33 bp, Homo sapien
ggtattgagtaatatcgaccaaattgcagacat

SEQ ID NO: 164629 - DNA, 33 bp, Homo sapien
cccagggtttatcaaaatgtgatctgattaagg

SEQ ID NO: 164630 - DNA, 33 bp, Homo sapien
cccagggtttatcaaagtgtgatctgattaagg

SEQ ID NO: 164631 - DNA, 33 bp, Homo sapien
caagttttcctgccaagccactcaggtgcattg

SEQ ID NO: 164632 - DNA, 33 bp, Homo sapien
caagttttcctgccaatccactcaggtgcattg

SEQ ID NO: 164633 - DNA, 33 bp, Homo sapien
atggtttggatagagaagtgaatattccacact

SEQ ID NO: 164634 - DNA, 33 bp, Homo sapien
atggtttggatagagaggtgaatattccacact

SEQ ID NO: 164635 - DNA, 33 bp, Homo sapien
tgattttataatattcactggcagcaatctcca

SEQ ID NO: 164636 - DNA, 33 bp, Homo sapien
tgattttataatattcgctggcagcaatctcca

SEQ ID NO: 164637 - DNA, 33 bp, Homo sapien
aataacagtcatcacaagtgtttgaaacaagca

SEQ ID NO: 164638 - DNA, 33 bp, Homo sapien
aataacagtcatcacaggtgtttgaaacaagca

SEQ ID NO: 164639 - DNA, 33 bp, Homo sapien
cacttacgagaagccaaaattcctacagcaacc

SEQ ID NO: 164640 - DNA, 33 bp, Homo sapien
cacttacgagaagccacaattcctacagcaacc

SEQ ID NO: 164641 - DNA, 33 bp, Homo sapien
tggacaatcctccttacgtcttgcccaagaaaa

SEQ ID NO: 164642 - DNA, 33 bp, Homo sapien
tggacaatcctccttatgtcttgcccaagaaaa

SEQ ID NO: 164643 - DNA, 33 bp, Homo sapien
attactcactttaaccagatgatgtatgcattt

SEQ ID NO: 164644 - DNA, 33 bp, Homo sapien
attactcactttaaccggatgatgtatgcattt

SEQ ID NO: 164645 - DNA, 33 bp, Homo sapien
gttgtctcttgacaagactagaaattagtagca

SEQ ID NO: 164646 - DNA, 33 bp, Homo sapien
gttgtctcttgacaaggctagaaattagtagca

SEQ ID NO: 164647 - DNA, 33 bp, Homo sapien
cacatccatcctaaaaactgcatataattttta

SEQ ID NO: 164648 - DNA, 33 bp, Homo sapien
cacatccatcctaaaagctgcatataattttta

SEQ ID NO: 164649 - DNA, 33 bp, Homo sapien
taatattcacagcaaaaggctatacctagggca

SEQ ID NO: 164650 - DNA, 33 bp, Homo sapien
taatattcacagcaaagggctatacctagggca

SEQ ID NO: 164651 - DNA, 33 bp, Homo sapien
gcataagccataaccaatgctttttcgtgtatc

SEQ ID NO: 164652 - DNA, 33 bp, Homo sapien
gcataagccataaccagtgctttttcgtgtatc

SEQ ID NO: 164653 - DNA, 33 bp, Homo sapien
tcgaacaaagcaggtagcttcctaaacccaggt

SEQ ID NO: 164654 - DNA, 33 bp, Homo sapien
tcgaacaaagcaggtatcttcctaaacccaggt

SEQ ID NO: 164655 - DNA, 33 bp, Homo sapien
taaagtcagccttacaaatgatttccaaaataa

SEQ ID NO: 164656 - DNA, 33 bp, Homo sapien
taaagtcagccttacagatgatttccaaaataa

SEQ ID NO: 164657 - DNA, 33 bp, Homo sapien
atgtcaacaacataacaatgtctttaccaatta

SEQ ID NO: 164658 - DNA, 33 bp, Homo sapien
atgtcaacaacataacgatgtctttaccaatta

SEQ ID NO: 164659 - DNA, 33 bp, Homo sapien
cacagagaaactgagacacaaaagattgaaact

SEQ ID NO: 164660 - DNA, 33 bp, Homo sapien
cacagagaaactgagatacaaaagattgaaact

SEQ ID NO: 164661 - DNA, 33 bp, Homo sapien
cctgtgtttggagggacggcaataaagtctagt

SEQ ID NO: 164662 - DNA, 33 bp, Homo sapien
cctgtgtttggagggagggcaataaagtctagt

SEQ ID NO: 164663 - DNA, 33 bp, Homo sapien
caaaagcctggaaatccatactttcataaaagt

SEQ ID NO: 164664 - DNA, 33 bp, Homo sapien
caaaagcctggaaatctatactttcataaaagt

SEQ ID NO: 164665 - DNA, 33 bp, Homo sapien
gaaagtcattgtagataaaataatttgcctgag

SEQ ID NO: 164666 - DNA, 33 bp, Homo sapien
gaaagtcattgtagattaaataatttgcctgag

SEQ ID NO: 164667 - DNA, 33 bp, Homo sapien
agggagagcctgagaaagaggctgtgtaatgat

SEQ ID NO: 164668 - DNA, 33 bp, Homo sapien
agggagagcctgagaaggaggctgtgtaatgat

SEQ ID NO: 164669 - DNA, 33 bp, Homo sapien
cagtgtttttaatgcacagtattttgttccaat

SEQ ID NO: 164670 - DNA, 33 bp, Homo sapien
cagtgtttttaatgcatagtattttgttccaat

SEQ ID NO: 164671 - DNA, 33 bp, Homo sapien
tattcgttgttgctaaatgtatcattacttgaa

SEQ ID NO: 164672 - DNA, 33 bp, Homo sapien
tattcgttgttgctaagtgtatcattacttgaa

SEQ ID NO: 164673 - DNA, 33 bp, Homo sapien
aaagattttccttcaccgtaagatcatgtccta

SEQ ID NO: 164674 - DNA, 33 bp, Homo sapien
aaagattttccttcactgtaagatcatgtccta

SEQ ID NO: 164675 - DNA, 33 bp, Homo sapien
atgctttgaccaaagacgaagtatcagattctt

SEQ ID NO: 164676 - DNA, 33 bp, Homo sapien
atgctttgaccaaagatgaagtatcagattctt

SEQ ID NO: 164677 - DNA, 33 bp, Homo sapien
agttctggcagcaataaacagaagtagcaagga

SEQ ID NO: 164678 - DNA, 33 bp, Homo sapien
agttctggcagcaatagacagaagtagcaagga

SEQ ID NO: 164679 - DNA, 33 bp, Homo sapien
aaaaaaaagagttcgcaagtgagttctcttttg

SEQ ID NO: 164680 - DNA, 33 bp, Homo sapien
aaaaaaaagagttcgcgagtgagttctcttttg

SEQ ID NO: 164681 - DNA, 33 bp, Homo sapien
acacacatttttccagaccagggttgtgcattt

SEQ ID NO: 164682 - DNA, 33 bp, Homo sapien
acacacatttttccaggccagggttgtgcattt

SEQ ID NO: 164683 - DNA, 33 bp, Homo sapien
ttctttccttctagcaatatattcaatatctcc

SEQ ID NO: 164684 - DNA, 33 bp, Homo sapien
ttctttccttctagcagtatattcaatatctcc

SEQ ID NO: 164685 - DNA, 33 bp, Homo sapien
gcacactattaaccagcagatgttgcagattct

SEQ ID NO: 164686 - DNA, 33 bp, Homo sapien
gcacactattaaccagtagatgttgcagattct

SEQ ID NO: 164687 - DNA, 33 bp, Homo sapien
tacacaatagaaaggacggacagttttcttgcc

SEQ ID NO: 164688 - DNA, 33 bp, Homo sapien
tacacaatagaaaggatggacagttttcttgcc

SEQ ID NO: 164689 - DNA, 33 bp, Homo sapien
acaggagacacataagcaattcaaagtgagccc

SEQ ID NO: 164690 - DNA, 33 bp, Homo sapien
acaggagacacataagtaattcaaagtgagccc

SEQ ID NO: 164691 - DNA, 33 bp, Homo sapien
atttcctgaatgttaactgttcttgctgtctcc

SEQ ID NO: 164692 - DNA, 33 bp, Homo sapien
atttcctgaatgttaagtgttcttgctgtctcc

SEQ ID NO: 164693 - DNA, 33 bp, Homo sapien
accgtaatgttactcccctgcaatatttccatg

SEQ ID NO: 164694 - DNA, 33 bp, Homo sapien
accgtaatgttactcctctgcaatatttccatg

SEQ ID NO: 164695 - DNA, 33 bp, Homo sapien
ctaagtctctatgtaaatggactctttcttttt

SEQ ID NO: 164696 - DNA, 33 bp, Homo sapien
ctaagtctctatgtaagtggactctttcttttt

SEQ ID NO: 164697 - DNA, 33 bp, Homo sapien
tggagaattgaactgacgagccgtgatagagta

SEQ ID NO: 164698 - DNA, 33 bp, Homo sapien
tggagaattgaactgatgagccgtgatagagta

SEQ ID NO: 164699 - DNA, 33 bp, Homo sapien
tcagtctctaaaacccggagcatttacccaggt

SEQ ID NO: 164700 - DNA, 33 bp, Homo sapien
tcagtctctaaaaccctgagcatttacccaggt

SEQ ID NO: 164701 - DNA, 33 bp, Homo sapien
tttctgttgccatcaaatgggtgaaagcctgtg

SEQ ID NO: 164702 - DNA, 33 bp, Homo sapien
tttctgttgccatcaactgggtgaaagcctgtg

SEQ ID NO: 164703 - DNA, 33 bp, Homo sapien
gtataaagtgaaacgccgagttggaattcatgc

SEQ ID NO: 164704 - DNA, 33 bp, Homo sapien
gtataaagtgaaacgctgagttggaattcatgc

SEQ ID NO: 164705 - DNA, 33 bp, Homo sapien
aagcaggaagtacagacataaaacaggtgaggt

SEQ ID NO: 164706 - DNA, 33 bp, Homo sapien
aagcaggaagtacagatataaaacaggtgaggt

SEQ ID NO: 164707 - DNA, 33 bp, Homo sapien
tttaataggacagaaacagcatatccttccatc

SEQ ID NO: 164708 - DNA, 33 bp, Homo sapien
tttaataggacagaaatagcatatccttccatc

SEQ ID NO: 164709 - DNA, 33 bp, Homo sapien
aggatccctattgcccaacaggtatatttttta

SEQ ID NO: 164710 - DNA, 33 bp, Homo sapien
aggatccctattgcccgacaggtatatttttta

SEQ ID NO: 164711 - DNA, 33 bp, Homo sapien
actttagaatggctaaaataaagaaacagacat

SEQ ID NO: 164712 - DNA, 33 bp, Homo sapien
actttagaatggctaagataaagaaacagacat

SEQ ID NO: 164713 - DNA, 33 bp, Homo sapien
gacctcttaagtgccaccgtagttcagttaaat

SEQ ID NO: 164714 - DNA, 33 bp, Homo sapien
gacctcttaagtgccatcgtagttcagttaaat

SEQ ID NO: 164715 - DNA, 33 bp, Homo sapien
tacaccaggtaccaaaatagaattgtccacttt

SEQ ID NO: 164716 - DNA, 33 bp, Homo sapien
tacaccaggtaccaaagtagaattgtccacttt

SEQ ID NO: 164717 - DNA, 33 bp, Homo sapien
tttctctgatttataacaccagcagtttttttt

SEQ ID NO: 164718 - DNA, 33 bp, Homo sapien
tttctctgatttataataccagcagtttttttt

SEQ ID NO: 164719 - DNA, 33 bp, Homo sapien
atttattttgacagcaaagagaaaacatctgaa

SEQ ID NO: 164720 - DNA, 33 bp, Homo sapien
atttattttgacagcagagagaaaacatctgaa

SEQ ID NO: 164721 - DNA, 33 bp, Homo sapien
accctgtcttgagggcaaaatgtcttcccagaa

SEQ ID NO: 164722 - DNA, 33 bp, Homo sapien
accctgtcttgagggcgaaatgtcttcccagaa

SEQ ID NO: 164723 - DNA, 33 bp, Homo sapien
ctcagatttcccattaccattccagtacccctg

SEQ ID NO: 164724 - DNA, 33 bp, Homo sapien
ctcagatttcccattatcattccagtacccctg

SEQ ID NO: 164725 - DNA, 33 bp, Homo sapien
gtgcccatcacccagacatgcagtattccctgg

SEQ ID NO: 164726 - DNA, 33 bp, Homo sapien
gtgcccatcacccagatatgcagtattccctgg

SEQ ID NO: 164727 - DNA, 33 bp, Homo sapien
ggaacagggaggattaccaggatgtcttaacag

SEQ ID NO: 164728 - DNA, 33 bp, Homo sapien
ggaacagggaggattatcaggatgtcttaacag

SEQ ID NO: 164729 - DNA, 33 bp, Homo sapien
cagatttatagagcaacgaaataattctgcttt

SEQ ID NO: 164730 - DNA, 33 bp, Homo sapien
cagatttatagagcaatgaaataattctgcttt

SEQ ID NO: 164731 - DNA, 33 bp, Homo sapien
actctagtatgggagacgtgaatgtgataataa

SEQ ID NO: 164732 - DNA, 33 bp, Homo sapien
actctagtatgggagatgtgaatgtgataataa

SEQ ID NO: 164733 - DNA, 33 bp, Homo sapien
catactagagtatccacgccacaggaggacaag

SEQ ID NO: 164734 - DNA, 33 bp, Homo sapien
catactagagtatccatgccacaggaggacaag

SEQ ID NO: 164735 - DNA, 33 bp, Homo sapien
aattcatatgttgtagccctaagctccagtaga

SEQ ID NO: 164736 - DNA, 33 bp, Homo sapien
aattcatatgttgtagtcctaagctccagtaga

SEQ ID NO: 164737 - DNA, 33 bp, Homo sapien
cagacattagttcttacggttcttgctctgttg

SEQ ID NO: 164738 - DNA, 33 bp, Homo sapien
cagacattagttcttatggttcttgctctgttg

SEQ ID NO: 164739 - DNA, 33 bp, Homo sapien
gctgcaatttgctacaatggcccctctccaatg

SEQ ID NO: 164740 - DNA, 33 bp, Homo sapien
gctgcaatttgctacagtggcccctctccaatg

SEQ ID NO: 164741 - DNA, 33 bp, Homo sapien
cattcatgtaaaatgcacagaataattcaagta

SEQ ID NO: 164742 - DNA, 33 bp, Homo sapien
cattcatgtaaaatgcgcagaataattcaagta

SEQ ID NO: 164743 - DNA, 33 bp, Homo sapien
acagctttacattatcaagcaccttaagcacac

SEQ ID NO: 164744 - DNA, 33 bp, Homo sapien
acagctttacattatcgagcaccttaagcacac

SEQ ID NO: 164745 - DNA, 33 bp, Homo sapien
tgcttgcattaactctcaatccttatagtgatc

SEQ ID NO: 164746 - DNA, 33 bp, Homo sapien
tgcttgcattaactcttaatccttatagtgatc

SEQ ID NO: 164747 - DNA, 33 bp, Homo sapien
gtggtagttcttggagcaaaattcatgatgtgg

SEQ ID NO: 164748 - DNA, 33 bp, Homo sapien
gtggtagttcttggagtaaaattcatgatgtgg

SEQ ID NO: 164749 - DNA, 33 bp, Homo sapien
cattttggacacagcacgtctagatggagaccc

SEQ ID NO: 164750 - DNA, 33 bp, Homo sapien
cattttggacacagcaggtctagatggagaccc

SEQ ID NO: 164751 - DNA, 33 bp, Homo sapien
tgctaaagtcttcaaaatcagtgtgcattttat

SEQ ID NO: 164752 - DNA, 33 bp, Homo sapien
tgctaaagtcttcaaagtcagtgtgcattttat

SEQ ID NO: 164753 - DNA, 33 bp, Homo sapien
atatccaaaatgttaactcaatgtgtaatcagt

SEQ ID NO: 164754 - DNA, 33 bp, Homo sapien
atatccaaaatgttaattcaatgtgtaatcagt

SEQ ID NO: 164755 - DNA, 33 bp, Homo sapien
tttttctagtcctccacggtgattttgatgtca

SEQ ID NO: 164756 - DNA, 33 bp, Homo sapien
tttttctagtcctccatggtgattttgatgtca

SEQ ID NO: 164757 - DNA, 33 bp, Homo sapien
ttcttttcctgcgacgcactcccaccgctccat

SEQ ID NO: 164758 - DNA, 33 bp, Homo sapien
ttcttttcctgcgacgtactcccaccgctccat

SEQ ID NO: 164759 - DNA, 33 bp, Homo sapien
attgcaacatggtatacctcattataaagcaat

SEQ ID NO: 164760 - DNA, 33 bp, Homo sapien
attgcaacatggtatagctcattataaagcaat

SEQ ID NO: 164761 - DNA, 33 bp, Homo sapien
ccacacagtgagtaaacggcaaaattcagggct

SEQ ID NO: 164762 - DNA, 33 bp, Homo sapien
ccacacagtgagtaaatggcaaaattcagggct

SEQ ID NO: 164763 - DNA, 33 bp, Homo sapien
gagacccttagtggaaagaagacttgccaaagt

SEQ ID NO: 164764 - DNA, 33 bp, Homo sapien
gagacccttagtggaaggaagacttgccaaagt

SEQ ID NO: 164765 - DNA, 33 bp, Homo sapien
ggcccagagaggctaagcaactcacccaaggtc

SEQ ID NO: 164766 - DNA, 33 bp, Homo sapien
ggcccagagaggctaatcaactcacccaaggtc

SEQ ID NO: 164767 - DNA, 33 bp, Homo sapien
ctggccaacctgctaaatatatccagaataaga

SEQ ID NO: 164768 - DNA, 33 bp, Homo sapien
ctggccaacctgctaagtatatccagaataaga

SEQ ID NO: 164769 - DNA, 33 bp, Homo sapien
atctatattctcttcacagtgattccttgaggg

SEQ ID NO: 164770 - DNA, 33 bp, Homo sapien
atctatattctcttcatagtgattccttgaggg

SEQ ID NO: 164771 - DNA, 33 bp, Homo sapien
ggtaatttgctcaaggcagttagtagcagagcc

SEQ ID NO: 164772 - DNA, 33 bp, Homo sapien
ggtaatttgctcaaggtagttagtagcagagcc

SEQ ID NO: 164773 - DNA, 33 bp, Homo sapien
caaaatccacactctccacatctatgttatact

SEQ ID NO: 164774 - DNA, 33 bp, Homo sapien
caaaatccacactctctacatctatgttatact

SEQ ID NO: 164775 - DNA, 33 bp, Homo sapien
tggctttgataattcccaggttctccataaatc

SEQ ID NO: 164776 - DNA, 33 bp, Homo sapien
tggctttgataattcctaggttctccataaatc

SEQ ID NO: 164777 - DNA, 33 bp, Homo sapien
cagctgtgttattctacgcatgtaagtccctat

SEQ ID NO: 164778 - DNA, 33 bp, Homo sapien
cagctgtgttattctatgcatgtaagtccctat

SEQ ID NO: 164779 - DNA, 33 bp, Homo sapien
gctgctgctagtcccaaagtttttggaagcatt

SEQ ID NO: 164780 - DNA, 33 bp, Homo sapien
gctgctgctagtcccatagtttttggaagcatt

SEQ ID NO: 164781 - DNA, 33 bp, Homo sapien
ctcagtctctttatacactttgatctcttgctg

SEQ ID NO: 164782 - DNA, 33 bp, Homo sapien
ctcagtctctttatacgctttgatctcttgctg

SEQ ID NO: 164783 - DNA, 33 bp, Homo sapien
tgaagtatgtgatggaagaagcaaatgtataac

SEQ ID NO: 164784 - DNA, 33 bp, Homo sapien
tgaagtatgtgatggaggaagcaaatgtataac

SEQ ID NO: 164785 - DNA, 33 bp, Homo sapien
atttttctggtgtacacactgagactcaaagag

SEQ ID NO: 164786 - DNA, 33 bp, Homo sapien
atttttctggtgtacatactgagactcaaagag

SEQ ID NO: 164787 - DNA, 33 bp, Homo sapien
taaaaatacttaagccacttaactataaacatc

SEQ ID NO: 164788 - DNA, 33 bp, Homo sapien
taaaaatacttaagcctcttaactataaacatc

SEQ ID NO: 164789 - DNA, 33 bp, Homo sapien
cctctttcccttctcaccttcttggttgctccc

SEQ ID NO: 164790 - DNA, 33 bp, Homo sapien
cctctttcccttctcatcttcttggttgctccc

SEQ ID NO: 164791 - DNA, 33 bp, Homo sapien
cttctttatcgccacacagactctactcttgcc

SEQ ID NO: 164792 - DNA, 33 bp, Homo sapien
cttctttatcgccacagagactctactcttgcc

SEQ ID NO: 164793 - DNA, 33 bp, Homo sapien
agcaacaaaataacagaatccgatctgcatttc

SEQ ID NO: 164794 - DNA, 33 bp, Homo sapien
agcaacaaaataacaggatccgatctgcatttc

SEQ ID NO: 164795 - DNA, 33 bp, Homo sapien
caggaaaacaaagacacgaggctgagtgtttac

SEQ ID NO: 164796 - DNA, 33 bp, Homo sapien
caggaaaacaaagacaggaggctgagtgtttac

SEQ ID NO: 164797 - DNA, 33 bp, Homo sapien
tatttgccaaagcccaagtcgagaagggaaatt

SEQ ID NO: 164798 - DNA, 33 bp, Homo sapien
tatttgccaaagcccatgtcgagaagggaaatt

SEQ ID NO: 164799 - DNA, 33 bp, Homo sapien
ctagaagtaactggtacgtgccgctctcacaga

SEQ ID NO: 164800 - DNA, 33 bp, Homo sapien
ctagaagtaactggtatgtgccgctctcacaga

SEQ ID NO: 164801 - DNA, 33 bp, Homo sapien
gcatacccaaatccaacaatgtgcagagcataa

SEQ ID NO: 164802 - DNA, 33 bp, Homo sapien
gcatacccaaatccaataatgtgcagagcataa

SEQ ID NO: 164803 - DNA, 33 bp, Homo sapien
tggaggtggggcaagagtaggtatgattctgca

SEQ ID NO: 164804 - DNA, 33 bp, Homo sapien
tggaggtggggcaagattaggtatgattctgca

SEQ ID NO: 164805 - DNA, 33 bp, Homo sapien
tgtaatataaagtggaaagagtagtaatgaaat

SEQ ID NO: 164806 - DNA, 33 bp, Homo sapien
tgtaatataaagtggagagagtagtaatgaaat

SEQ ID NO: 164807 - DNA, 33 bp, Homo sapien
catatttcaaattagcaccagagaagctgtgaa

SEQ ID NO: 164808 - DNA, 33 bp, Homo sapien
catatttcaaattagcgccagagaagctgtgaa

SEQ ID NO: 164809 - DNA, 33 bp, Homo sapien
ctgttcctccttcttcactctctgtagcaccat

SEQ ID NO: 164810 - DNA, 33 bp, Homo sapien
ctgttcctccttcttcgctctctgtagcaccat

SEQ ID NO: 164811 - DNA, 33 bp, Homo sapien
tgatgccgtcttttaaatggccaaagtttgggc

SEQ ID NO: 164812 - DNA, 33 bp, Homo sapien
tgatgccgtcttttaattggccaaagtttgggc

SEQ ID NO: 164813 - DNA, 33 bp, Homo sapien
ttttcagacattcttcacaaaaaacactgaaca

SEQ ID NO: 164814 - DNA, 33 bp, Homo sapien
ttttcagacattcttcgcaaaaaacactgaaca

SEQ ID NO: 164815 - DNA, 33 bp, Homo sapien
tgtgactagctagcacgctatgccttgactaaa

SEQ ID NO: 164816 - DNA, 33 bp, Homo sapien
tgtgactagctagcactctatgccttgactaaa

SEQ ID NO: 164817 - DNA, 33 bp, Homo sapien
cccttcctcagtgtccaggaactgctttgggtt

SEQ ID NO: 164818 - DNA, 33 bp, Homo sapien
cccttcctcagtgtccgggaactgctttgggtt

SEQ ID NO: 164819 - DNA, 33 bp, Homo sapien
atccaggaggtagcacacgatcaagtggagaag

SEQ ID NO: 164820 - DNA, 33 bp, Homo sapien
atccaggaggtagcacgcgatcaagtggagaag

SEQ ID NO: 164821 - DNA, 33 bp, Homo sapien
gatgtttaatttagaacattttgaagccaaaga

SEQ ID NO: 164822 - DNA, 33 bp, Homo sapien
gatgtttaatttagaagattttgaagccaaaga

SEQ ID NO: 164823 - DNA, 33 bp, Homo sapien
ttttttagggcagataaacgtcatttgacaggg

SEQ ID NO: 164824 - DNA, 33 bp, Homo sapien
ttttttagggcagatagacgtcatttgacaggg

SEQ ID NO: 164825 - DNA, 33 bp, Homo sapien
ttttgatgtttggatacctttgaaccttagagg

SEQ ID NO: 164826 - DNA, 33 bp, Homo sapien
ttttgatgtttggatatctttgaaccttagagg

SEQ ID NO: 164827 - DNA, 33 bp, Homo sapien
gagaagtaatgactccaagccccaatgatatta

SEQ ID NO: 164828 - DNA, 33 bp, Homo sapien
gagaagtaatgactcccagccccaatgatatta

SEQ ID NO: 164829 - DNA, 33 bp, Homo sapien
aatgcacttcaattaaagcagtatagcaccgtg

SEQ ID NO: 164830 - DNA, 33 bp, Homo sapien
aatgcacttcaattaaggcagtatagcaccgtg

SEQ ID NO: 164831 - DNA, 33 bp, Homo sapien
caagtattgaacaagcacttcctggtgggaata

SEQ ID NO: 164832 - DNA, 33 bp, Homo sapien
caagtattgaacaagcgcttcctggtgggaata

SEQ ID NO: 164833 - DNA, 33 bp, Homo sapien
tggtatgttctagacacataaatctacattccc

SEQ ID NO: 164834 - DNA, 33 bp, Homo sapien
tggtatgttctagacagataaatctacattccc

SEQ ID NO: 164835 - DNA, 33 bp, Homo sapien
tgtgggcaattcccaacgcactggctaaaatgt

SEQ ID NO: 164836 - DNA, 33 bp, Homo sapien
tgtgggcaattcccaatgcactggctaaaatgt

SEQ ID NO: 164837 - DNA, 33 bp, Homo sapien
caacattttgttggagaaatggggtttgaggaa

SEQ ID NO: 164838 - DNA, 33 bp, Homo sapien
caacattttgttggagcaatggggtttgaggaa

SEQ ID NO: 164839 - DNA, 33 bp, Homo sapien
aatgccatgaaaacataagtagatacgtgattg

SEQ ID NO: 164840 - DNA, 33 bp, Homo sapien
aatgccatgaaaacatgagtagatacgtgattg

SEQ ID NO: 164841 - DNA, 33 bp, Homo sapien
ctggtgtgcctgcaataatatgacccagtggag

SEQ ID NO: 164842 - DNA, 33 bp, Homo sapien
ctggtgtgcctgcaattatatgacccagtggag

SEQ ID NO: 164843 - DNA, 33 bp, Homo sapien
aatagccaatgcaaacaaggaataattattggc

SEQ ID NO: 164844 - DNA, 33 bp, Homo sapien
aatagccaatgcaaaccaggaataattattggc

SEQ ID NO: 164845 - DNA, 33 bp, Homo sapien
ctttcaaaatattaccactcactgacaacacat

SEQ ID NO: 164846 - DNA, 33 bp, Homo sapien
ctttcaaaatattaccgctcactgacaacacat

SEQ ID NO: 164847 - DNA, 33 bp, Homo sapien
tccatccataaatcacacagtacctaagatgta

SEQ ID NO: 164848 - DNA, 33 bp, Homo sapien
tccatccataaatcacgcagtacctaagatgta

SEQ ID NO: 164849 - DNA, 33 bp, Homo sapien
cccatcttcaacacaaccctcaactcaacatat

SEQ ID NO: 164850 - DNA, 33 bp, Homo sapien
cccatcttcaacacaatcctcaactcaacatat

SEQ ID NO: 164851 - DNA, 33 bp, Homo sapien
tggaggtgggagactacatccttcacaggtgta

SEQ ID NO: 164852 - DNA, 33 bp, Homo sapien
tggaggtgggagactagatccttcacaggtgta

SEQ ID NO: 164853 - DNA, 33 bp, Homo sapien
atatagtaagagacaacgtaacttcagtggtta

SEQ ID NO: 164854 - DNA, 33 bp, Homo sapien
atatagtaagagacaatgtaacttcagtggtta

SEQ ID NO: 164855 - DNA, 33 bp, Homo sapien
tacgttgttcccttacagatgaattaaaaaatg

SEQ ID NO: 164856 - DNA, 33 bp, Homo sapien
tacgttgttcccttacggatgaattaaaaaatg

SEQ ID NO: 164857 - DNA, 33 bp, Homo sapien
cctcttgctgtcctaaataataatgacttaatg

SEQ ID NO: 164858 - DNA, 33 bp, Homo sapien
cctcttgctgtcctaagtaataatgacttaatg

SEQ ID NO: 164859 - DNA, 33 bp, Homo sapien
agaccagttaattgccaggatctgaaagtcagc

SEQ ID NO: 164860 - DNA, 33 bp, Homo sapien
agaccagttaattgccgggatctgaaagtcagc

SEQ ID NO: 164861 - DNA, 33 bp, Homo sapien
catcaaattgcttatacaacttcatcgaaacaa

SEQ ID NO: 164862 - DNA, 33 bp, Homo sapien
catcaaattgcttatataacttcatcgaaacaa

SEQ ID NO: 164863 - DNA, 33 bp, Homo sapien
tatctagctgtttataagcatgaactcttgggt

SEQ ID NO: 164864 - DNA, 33 bp, Homo sapien
tatctagctgtttataggcatgaactcttgggt

SEQ ID NO: 164865 - DNA, 33 bp, Homo sapien
gcttcttaaatgtttcaactgaagaacccagag

SEQ ID NO: 164866 - DNA, 33 bp, Homo sapien
gcttcttaaatgtttccactgaagaacccagag

SEQ ID NO: 164867 - DNA, 33 bp, Homo sapien
ctagattattcattatgaagagcttatttcagc

SEQ ID NO: 164868 - DNA, 33 bp, Homo sapien
ctagattattcattattaagagcttatttcagc

SEQ ID NO: 164869 - DNA, 33 bp, Homo sapien
agtatttccttaatagacatatagacagcccta

SEQ ID NO: 164870 - DNA, 33 bp, Homo sapien
agtatttccttaataggcatatagacagcccta

SEQ ID NO: 164871 - DNA, 33 bp, Homo sapien
ggataggagctaataaactggagagtgagaaga

SEQ ID NO: 164872 - DNA, 33 bp, Homo sapien
ggataggagctaataagctggagagtgagaaga

SEQ ID NO: 164873 - DNA, 33 bp, Homo sapien
caatttccaggccataaactctgatatcagaat

SEQ ID NO: 164874 - DNA, 33 bp, Homo sapien
caatttccaggccatagactctgatatcagaat

SEQ ID NO: 164875 - DNA, 33 bp, Homo sapien
ttagatgtttgttttacgccctgtcctttaagt

SEQ ID NO: 164876 - DNA, 33 bp, Homo sapien
ttagatgtttgttttatgccctgtcctttaagt

SEQ ID NO: 164877 - DNA, 33 bp, Homo sapien
gcttctggtgacaatacagacaggatggttgag

SEQ ID NO: 164878 - DNA, 33 bp, Homo sapien
gcttctggtgacaatatagacaggatggttgag

SEQ ID NO: 164879 - DNA, 33 bp, Homo sapien
aagaataagcaaaagaaacaaagagagcaagca

SEQ ID NO: 164880 - DNA, 33 bp, Homo sapien
aagaataagcaaaagagacaaagagagcaagca

SEQ ID NO: 164881 - DNA, 33 bp, Homo sapien
gtaatgtcagtagatacacagaaattctaagta

SEQ ID NO: 164882 - DNA, 33 bp, Homo sapien
gtaatgtcagtagatagacagaaattctaagta

SEQ ID NO: 164883 - DNA, 33 bp, Homo sapien
ccgaagggtgctggccaataatccctgaatcat

SEQ ID NO: 164884 - DNA, 33 bp, Homo sapien
ccgaagggtgctggccgataatccctgaatcat

SEQ ID NO: 164885 - DNA, 33 bp, Homo sapien
gcgatttcattaggcgcatgctgacttagccca

SEQ ID NO: 164886 - DNA, 33 bp, Homo sapien
gcgatttcattaggcgtatgctgacttagccca

SEQ ID NO: 164887 - DNA, 33 bp, Homo sapien
attccagcatatattccgaaacagctaaaaaag

SEQ ID NO: 164888 - DNA, 33 bp, Homo sapien
attccagcatatattctgaaacagctaaaaaag

SEQ ID NO: 164889 - DNA, 33 bp, Homo sapien
aagttaatttgcttaactgaagtaatcctttca

SEQ ID NO: 164890 - DNA, 33 bp, Homo sapien
aagttaatttgcttaattgaagtaatcctttca

SEQ ID NO: 164891 - DNA, 33 bp, Homo sapien
tagcacctagaggttgcaactaaccagaagcga

SEQ ID NO: 164892 - DNA, 33 bp, Homo sapien
tagcacctagaggttggaactaaccagaagcga

SEQ ID NO: 164893 - DNA, 33 bp, Homo sapien
atctgcctttctataactggcttatttcactta

SEQ ID NO: 164894 - DNA, 33 bp, Homo sapien
atctgcctttctataattggcttatttcactta

SEQ ID NO: 164895 - DNA, 33 bp, Homo sapien
acttatatatctcaagcagtcaaaatcataaga

SEQ ID NO: 164896 - DNA, 33 bp, Homo sapien
acttatatatctcaagtagtcaaaatcataaga

SEQ ID NO: 164897 - DNA, 33 bp, Homo sapien
agtggaactggttacaagaatgctcagggatcc

SEQ ID NO: 164898 - DNA, 33 bp, Homo sapien
agtggaactggttacaggaatgctcagggatcc

SEQ ID NO: 164899 - DNA, 33 bp, Homo sapien
gcatacaggtgagaacaattgtgttaaataaag

SEQ ID NO: 164900 - DNA, 33 bp, Homo sapien
gcatacaggtgagaactattgtgttaaataaag

SEQ ID NO: 164901 - DNA, 33 bp, Homo sapien
tgtaagtataacaaaacggtttgattccccact

SEQ ID NO: 164902 - DNA, 33 bp, Homo sapien
tgtaagtataacaaaatggtttgattccccact

SEQ ID NO: 164903 - DNA, 33 bp, Homo sapien
ggaggattcaagactaagatgcagaatcatctg

SEQ ID NO: 164904 - DNA, 33 bp, Homo sapien
ggaggattcaagactaggatgcagaatcatctg

SEQ ID NO: 164905 - DNA, 33 bp, Homo sapien
tctgtttcatctggtaataaggccttgtcactg

SEQ ID NO: 164906 - DNA, 33 bp, Homo sapien
tctgtttcatctggtactaaggccttgtcactg

SEQ ID NO: 164907 - DNA, 33 bp, Homo sapien
acttcctctttttatcccatccctgtcaagcaa

SEQ ID NO: 164908 - DNA, 33 bp, Homo sapien
acttcctctttttatctcatccctgtcaagcaa

SEQ ID NO: 164909 - DNA, 33 bp, Homo sapien
aaaaagaggaagtacaaaagttgcctgctcagc

SEQ ID NO: 164910 - DNA, 33 bp, Homo sapien
aaaaagaggaagtacagaagttgcctgctcagc

SEQ ID NO: 164911 - DNA, 33 bp, Homo sapien
atttttatagccttataaattcagaaccattat

SEQ ID NO: 164912 - DNA, 33 bp, Homo sapien
atttttatagccttatgaattcagaaccattat

SEQ ID NO: 164913 - DNA, 33 bp, Homo sapien
tgacaaacacaagcaaggaggaatggactccct

SEQ ID NO: 164914 - DNA, 33 bp, Homo sapien
tgacaaacacaagcaatgaggaatggactccct

SEQ ID NO: 164915 - DNA, 33 bp, Homo sapien
aaaatgctgttcaaatgagtaggagttttaaaa

SEQ ID NO: 164916 - DNA, 33 bp, Homo sapien
aaaatgctgttcaaattagtaggagttttaaaa

SEQ ID NO: 164917 - DNA, 33 bp, Homo sapien
attcagtgtttgaatacgtgaaccacaccaata

SEQ ID NO: 164918 - DNA, 33 bp, Homo sapien
attcagtgtttgaatatgtgaaccacaccaata

SEQ ID NO: 164919 - DNA, 33 bp, Homo sapien
tttctaacaggataaactctaatcaccaatggt

SEQ ID NO: 164920 - DNA, 33 bp, Homo sapien
tttctaacaggataaattctaatcaccaatggt

SEQ ID NO: 164921 - DNA, 33 bp, Homo sapien
tacatatttatatgaagtgttgactacctttca

SEQ ID NO: 164922 - DNA, 33 bp, Homo sapien
tacatatttatatgaattgttgactacctttca

SEQ ID NO: 164923 - DNA, 33 bp, Homo sapien
ggggtgtaaactctgccattttcttcctaatca

SEQ ID NO: 164924 - DNA, 33 bp, Homo sapien
ggggtgtaaactctgctattttcttcctaatca

SEQ ID NO: 164925 - DNA, 33 bp, Homo sapien
atattttcccttataactatgtaggaaacttag

SEQ ID NO: 164926 - DNA, 33 bp, Homo sapien
atattttcccttataagtatgtaggaaacttag

SEQ ID NO: 164927 - DNA, 33 bp, Homo sapien
aaaactcagaagctacagccaatagtaatatgt

SEQ ID NO: 164928 - DNA, 33 bp, Homo sapien
aaaactcagaagctacggccaatagtaatatgt

SEQ ID NO: 164929 - DNA, 33 bp, Homo sapien
gacaaattcactattacagttagagacaacacc

SEQ ID NO: 164930 - DNA, 33 bp, Homo sapien
gacaaattcactattagagttagagacaacacc

SEQ ID NO: 164931 - DNA, 33 bp, Homo sapien
accagccttcttgagacatgagggaggcatact

SEQ ID NO: 164932 - DNA, 33 bp, Homo sapien
accagccttcttgagatatgagggaggcatact

SEQ ID NO: 164933 - DNA, 33 bp, Homo sapien
gtgactttacaatgatcaatttaccttacttca

SEQ ID NO: 164934 - DNA, 33 bp, Homo sapien
gtgactttacaatgattaatttaccttacttca

SEQ ID NO: 164935 - DNA, 33 bp, Homo sapien
gaagagaggaaagaaacggcatcaaatgagata

SEQ ID NO: 164936 - DNA, 33 bp, Homo sapien
gaagagaggaaagaaatggcatcaaatgagata

SEQ ID NO: 164937 - DNA, 33 bp, Homo sapien
tgttcttgtttcaatggactctttttacagtaa

SEQ ID NO: 164938 - DNA, 33 bp, Homo sapien
tgttcttgtttcaatgtactctttttacagtaa

SEQ ID NO: 164939 - DNA, 33 bp, Homo sapien
gaatagcaaatgtagaacacataccacaaccag

SEQ ID NO: 164940 - DNA, 33 bp, Homo sapien
gaatagcaaatgtagaccacataccacaaccag

SEQ ID NO: 164941 - DNA, 33 bp, Homo sapien
ctgggtgtgtaaacggcagagctgaagactggg

SEQ ID NO: 164942 - DNA, 33 bp, Homo sapien
ctgggtgtgtaaacggtagagctgaagactggg

SEQ ID NO: 164943 - DNA, 33 bp, Homo sapien
gaactgctgattgcagcaaaggtccgcacaggc

SEQ ID NO: 164944 - DNA, 33 bp, Homo sapien
gaactgctgattgcaggaaaggtccgcacaggc

SEQ ID NO: 164945 - DNA, 33 bp, Homo sapien
gactgccttttgataccatttacaggaactggc

SEQ ID NO: 164946 - DNA, 33 bp, Homo sapien
gactgccttttgatacgatttacaggaactggc

SEQ ID NO: 164947 - DNA, 33 bp, Homo sapien
acttcacccatatccccaggatcactgtactca

SEQ ID NO: 164948 - DNA, 33 bp, Homo sapien
acttcacccatatccctaggatcactgtactca

SEQ ID NO: 164949 - DNA, 33 bp, Homo sapien
caagagggtttagactaacaaatagtcatcagc

SEQ ID NO: 164950 - DNA, 33 bp, Homo sapien
caagagggtttagactgacaaatagtcatcagc

SEQ ID NO: 164951 - DNA, 33 bp, Homo sapien
tacacgcgattttcttaaaaatatgagcttgta

SEQ ID NO: 164952 - DNA, 33 bp, Homo sapien
tacacgcgattttcttgaaaatatgagcttgta

SEQ ID NO: 164953 - DNA, 33 bp, Homo sapien
cttctgctatgagaaaaagtgctcttgggctag

SEQ ID NO: 164954 - DNA, 33 bp, Homo sapien
cttctgctatgagaaagagtgctcttgggctag

SEQ ID NO: 164955 - DNA, 33 bp, Homo sapien
gcctgtaattccagcaactcggcagtctgagga

SEQ ID NO: 164956 - DNA, 33 bp, Homo sapien
gcctgtaattccagcatctcggcagtctgagga

SEQ ID NO: 164957 - DNA, 33 bp, Homo sapien
ataccatataaaactacgagactggccaaccaa

SEQ ID NO: 164958 - DNA, 33 bp, Homo sapien
ataccatataaaactatgagactggccaaccaa

SEQ ID NO: 164959 - DNA, 33 bp, Homo sapien
tttgaagaaagatagaactggcttttgaaaaaa

SEQ ID NO: 164960 - DNA, 33 bp, Homo sapien
tttgaagaaagatagacctggcttttgaaaaaa

SEQ ID NO: 164961 - DNA, 33 bp, Homo sapien
gctgcagggggaagatcagcagggatgagatat

SEQ ID NO: 164962 - DNA, 33 bp, Homo sapien
gctgcagggggaagatgagcagggatgagatat

SEQ ID NO: 164963 - DNA, 33 bp, Homo sapien
tagctttacaaacacaactctatgactcctttg

SEQ ID NO: 164964 - DNA, 33 bp, Homo sapien
tagctttacaaacacagctctatgactcctttg

SEQ ID NO: 164965 - DNA, 33 bp, Homo sapien
tgcagctaatctaaaacggagaatagagagcaa

SEQ ID NO: 164966 - DNA, 33 bp, Homo sapien
tgcagctaatctaaaatggagaatagagagcaa

SEQ ID NO: 164967 - DNA, 33 bp, Homo sapien
gatatttctgaaaacaatgtcagatttttcacc

SEQ ID NO: 164968 - DNA, 33 bp, Homo sapien
gatatttctgaaaacagtgtcagatttttcacc

SEQ ID NO: 164969 - DNA, 33 bp, Homo sapien
attcactaattccaataatggtttgatttttta

SEQ ID NO: 164970 - DNA, 33 bp, Homo sapien
attcactaattccaatcatggtttgatttttta

SEQ ID NO: 164971 - DNA, 33 bp, Homo sapien
agatggtcatcttgtacagtctcactggaattc

SEQ ID NO: 164972 - DNA, 33 bp, Homo sapien
agatggtcatcttgtatagtctcactggaattc

SEQ ID NO: 164973 - DNA, 33 bp, Homo sapien
ttaagggagtgctaagcacagaaatgaaagaat

SEQ ID NO: 164974 - DNA, 33 bp, Homo sapien
ttaagggagtgctaagtacagaaatgaaagaat

SEQ ID NO: 164975 - DNA, 33 bp, Homo sapien
aaagcaacaatgattaaaaaggacaaagaaaga

SEQ ID NO: 164976 - DNA, 33 bp, Homo sapien
aaagcaacaatgattacaaaggacaaagaaaga

SEQ ID NO: 164977 - DNA, 33 bp, Homo sapien
caacaagatgatttaactaacctacatatatac

SEQ ID NO: 164978 - DNA, 33 bp, Homo sapien
caacaagatgatttaattaacctacatatatac

SEQ ID NO: 164979 - DNA, 33 bp, Homo sapien
acatttttgttatccaatacagagttgggttta

SEQ ID NO: 164980 - DNA, 33 bp, Homo sapien
acatttttgttatccagtacagagttgggttta

SEQ ID NO: 164981 - DNA, 33 bp, Homo sapien
tacctattgggtattacgcttactaccctggag

SEQ ID NO: 164982 - DNA, 33 bp, Homo sapien
tacctattgggtattatgcttactaccctggag

SEQ ID NO: 164983 - DNA, 33 bp, Homo sapien
gtgagcatattaaaaacgatgattctgaggaaa

SEQ ID NO: 164984 - DNA, 33 bp, Homo sapien
gtgagcatattaaaaaggatgattctgaggaaa

SEQ ID NO: 164985 - DNA, 33 bp, Homo sapien
acaaaaataccgcacaatcttaactattccatt

SEQ ID NO: 164986 - DNA, 33 bp, Homo sapien
acaaaaataccgcacagtcttaactattccatt

SEQ ID NO: 164987 - DNA, 33 bp, Homo sapien
atcttgtccttgaaaaaaattccacctcttatt

SEQ ID NO: 164988 - DNA, 33 bp, Homo sapien
atcttgtccttgaaaacaattccacctcttatt

SEQ ID NO: 164989 - DNA, 33 bp, Homo sapien
ccccaaccaccagacccgagtaggaagaagaaa

SEQ ID NO: 164990 - DNA, 33 bp, Homo sapien
ccccaaccaccagaccggagtaggaagaagaaa

SEQ ID NO: 164991 - DNA, 33 bp, Homo sapien
gattgaatcctagttacgcttgtctgagttaga

SEQ ID NO: 164992 - DNA, 33 bp, Homo sapien
gattgaatcctagttatgcttgtctgagttaga

SEQ ID NO: 164993 - DNA, 33 bp, Homo sapien
atttaatgagattttacggtttgtacattgtga

SEQ ID NO: 164994 - DNA, 33 bp, Homo sapien
atttaatgagattttatggtttgtacattgtga

SEQ ID NO: 164995 - DNA, 33 bp, Homo sapien
tacacaaattgcctggaatatagtagtcattgt

SEQ ID NO: 164996 - DNA, 33 bp, Homo sapien
tacacaaattgcctggcatatagtagtcattgt

SEQ ID NO: 164997 - DNA, 33 bp, Homo sapien
acagtgacttaggtaactcaggtctcttccact

SEQ ID NO: 164998 - DNA, 33 bp, Homo sapien
acagtgacttaggtaattcaggtctcttccact

SEQ ID NO: 164999 - DNA, 33 bp, Homo sapien
gaaagtctcagccaaaccatatggagtggatct

SEQ ID NO: 165000 - DNA, 33 bp, Homo sapien
gaaagtctcagccaaatcatatggagtggatct

SEQ ID NO: 165001 - DNA, 33 bp, Homo sapien
ctacaactgtctgggcaccggatttcctgacca

SEQ ID NO: 165002 - DNA, 33 bp, Homo sapien
ctacaactgtctgggcgccggatttcctgacca

SEQ ID NO: 165003 - DNA, 33 bp, Homo sapien
tatgctatattttgaaactgagagtaggaatat

SEQ ID NO: 165004 - DNA, 33 bp, Homo sapien
tatgctatattttgaagctgagagtaggaatat

SEQ ID NO: 165005 - DNA, 33 bp, Homo sapien
ctgctgaaacaaaatgacagagagcttttaaga

SEQ ID NO: 165006 - DNA, 33 bp, Homo sapien
ctgctgaaacaaaatgccagagagcttttaaga

SEQ ID NO: 165007 - DNA, 33 bp, Homo sapien
cactgtggcaaaagaaactctaggtaacgtgac

SEQ ID NO: 165008 - DNA, 33 bp, Homo sapien
cactgtggcaaaagaagctctaggtaacgtgac

SEQ ID NO: 165009 - DNA, 33 bp, Homo sapien
taacattatttaatgcactttgaacgaagattt

SEQ ID NO: 165010 - DNA, 33 bp, Homo sapien
taacattatttaatgctctttgaacgaagattt

SEQ ID NO: 165011 - DNA, 33 bp, Homo sapien
ataaataggtaaataacagtacagccactatgt

SEQ ID NO: 165012 - DNA, 33 bp, Homo sapien
ataaataggtaaataatagtacagccactatgt

SEQ ID NO: 165013 - DNA, 33 bp, Homo sapien
aagaaaagtagctgcaatacttatttagggcct

SEQ ID NO: 165014 - DNA, 33 bp, Homo sapien
aagaaaagtagctgcattacttatttagggcct

SEQ ID NO: 165015 - DNA, 33 bp, Homo sapien
tcaaaaactacttcacaatgtgcctgattcata

SEQ ID NO: 165016 - DNA, 33 bp, Homo sapien
tcaaaaactacttcaccatgtgcctgattcata

SEQ ID NO: 165017 - DNA, 33 bp, Homo sapien
tgcatttaaaatatcacgtatcaagaccaagtg

SEQ ID NO: 165018 - DNA, 33 bp, Homo sapien
tgcatttaaaatatcatgtatcaagaccaagtg

SEQ ID NO: 165019 - DNA, 33 bp, Homo sapien
atgagacaactattacactgctactaaaaccag

SEQ ID NO: 165020 - DNA, 33 bp, Homo sapien
atgagacaactattaccctgctactaaaaccag

SEQ ID NO: 165021 - DNA, 33 bp, Homo sapien
tggcaacaattatgaaacaatacatactattcc

SEQ ID NO: 165022 - DNA, 33 bp, Homo sapien
tggcaacaattatgaagcaatacatactattcc

SEQ ID NO: 165023 - DNA, 33 bp, Homo sapien
ctagtatggatgctacaatgaggacaaaatatt

SEQ ID NO: 165024 - DNA, 33 bp, Homo sapien
ctagtatggatgctactatgaggacaaaatatt

SEQ ID NO: 165025 - DNA, 33 bp, Homo sapien
gaaaagatttagggccagagcaatactgcataa

SEQ ID NO: 165026 - DNA, 33 bp, Homo sapien
gaaaagatttagggccggagcaatactgcataa

SEQ ID NO: 165027 - DNA, 33 bp, Homo sapien
tgccattatcatacaaccaccccctgaaagaaa

SEQ ID NO: 165028 - DNA, 33 bp, Homo sapien
tgccattatcatacaatcaccccctgaaagaaa

SEQ ID NO: 165029 - DNA, 33 bp, Homo sapien
aactttgtcaaaataacgttgcaaaattcagaa

SEQ ID NO: 165030 - DNA, 33 bp, Homo sapien
aactttgtcaaaataaggttgcaaaattcagaa

SEQ ID NO: 165031 - DNA, 33 bp, Homo sapien
ggtctaatagtgaagcaacagataccttaagag

SEQ ID NO: 165032 - DNA, 33 bp, Homo sapien
ggtctaatagtgaagctacagataccttaagag

SEQ ID NO: 165033 - DNA, 33 bp, Homo sapien
ctgtttgtctcagggaacttaaaatatcctcaa

SEQ ID NO: 165034 - DNA, 33 bp, Homo sapien
ctgtttgtctcagggagcttaaaatatcctcaa

SEQ ID NO: 165035 - DNA, 33 bp, Homo sapien
atggctactgtcataactgaaactgacaagatg

SEQ ID NO: 165036 - DNA, 33 bp, Homo sapien
atggctactgtcataattgaaactgacaagatg

SEQ ID NO: 165037 - DNA, 33 bp, Homo sapien
gatctccctgctttcaaactgactctttcagct

SEQ ID NO: 165038 - DNA, 33 bp, Homo sapien
gatctccctgctttcagactgactctttcagct

SEQ ID NO: 165039 - DNA, 33 bp, Homo sapien
ccaatgcatgaaaaagacaactacattctgagc

SEQ ID NO: 165040 - DNA, 33 bp, Homo sapien
ccaatgcatgaaaaagtcaactacattctgagc

SEQ ID NO: 165041 - DNA, 33 bp, Homo sapien
acaaaatatagctggactaagagaagattcaaa

SEQ ID NO: 165042 - DNA, 33 bp, Homo sapien
acaaaatatagctggattaagagaagattcaaa

SEQ ID NO: 165043 - DNA, 33 bp, Homo sapien
gataccattatatcttaaacctcacaaatgttt

SEQ ID NO: 165044 - DNA, 33 bp, Homo sapien
gataccattatatctttaacctcacaaatgttt

SEQ ID NO: 165045 - DNA, 33 bp, Homo sapien
tacaggatcttgcataaaacccaagaatgatgt

SEQ ID NO: 165046 - DNA, 33 bp, Homo sapien
tacaggatcttgcatagaacccaagaatgatgt

SEQ ID NO: 165047 - DNA, 33 bp, Homo sapien
tgagacatagacattggagtggagcctcttcaa

SEQ ID NO: 165048 - DNA, 33 bp, Homo sapien
tgagacatagacattgtagtggagcctcttcaa

SEQ ID NO: 165049 - DNA, 33 bp, Homo sapien
aacaagaaagctgcacaattttatgaacaagat

SEQ ID NO: 165050 - DNA, 33 bp, Homo sapien
aacaagaaagctgcacgattttatgaacaagat

SEQ ID NO: 165051 - DNA, 33 bp, Homo sapien
tcagctctcacaaaagccttaagggctaagcac

SEQ ID NO: 165052 - DNA, 33 bp, Homo sapien
tcagctctcacaaaagtcttaagggctaagcac

SEQ ID NO: 165053 - DNA, 33 bp, Homo sapien
taatgcagaaataaacagaatttggaggtttat

SEQ ID NO: 165054 - DNA, 33 bp, Homo sapien
taatgcagaaataaaccgaatttggaggtttat

SEQ ID NO: 165055 - DNA, 33 bp, Homo sapien
tcagggagcagcacaactgcctctgttgtccag

SEQ ID NO: 165056 - DNA, 33 bp, Homo sapien
tcagggagcagcacaagtgcctctgttgtccag

SEQ ID NO: 165057 - DNA, 33 bp, Homo sapien
tataggtatgcactgaagcaaaattcatgaata

SEQ ID NO: 165058 - DNA, 33 bp, Homo sapien
tataggtatgcactgatgcaaaattcatgaata

SEQ ID NO: 165059 - DNA, 33 bp, Homo sapien
atgaatcactgtcctacggaaagctatcaaatg

SEQ ID NO: 165060 - DNA, 33 bp, Homo sapien
atgaatcactgtcctatggaaagctatcaaatg

SEQ ID NO: 165061 - DNA, 33 bp, Homo sapien
gatgcttattccttgacagctaccttattttct

SEQ ID NO: 165062 - DNA, 33 bp, Homo sapien
gatgcttattccttgatagctaccttattttct

SEQ ID NO: 165063 - DNA, 33 bp, Homo sapien
tgcataactaccacgcacagtgcccagaaagct

SEQ ID NO: 165064 - DNA, 33 bp, Homo sapien
tgcataactaccacgcgcagtgcccagaaagct

SEQ ID NO: 165065 - DNA, 33 bp, Homo sapien
aatataaagatggcaacactttcttggcaatca

SEQ ID NO: 165066 - DNA, 33 bp, Homo sapien
aatataaagatggcaatactttcttggcaatca

SEQ ID NO: 165067 - DNA, 33 bp, Homo sapien
tggcctgtctctataaacccagaccaatctata

SEQ ID NO: 165068 - DNA, 33 bp, Homo sapien
tggcctgtctctataatcccagaccaatctata

SEQ ID NO: 165069 - DNA, 33 bp, Homo sapien
ttcacagcgtaaccaccgtacttcattactgaa

SEQ ID NO: 165070 - DNA, 33 bp, Homo sapien
ttcacagcgtaaccactgtacttcattactgaa

SEQ ID NO: 165071 - DNA, 33 bp, Homo sapien
agccaatcatttcttcaccttccacctttcacc

SEQ ID NO: 165072 - DNA, 33 bp, Homo sapien
agccaatcatttcttcgccttccacctttcacc

SEQ ID NO: 165073 - DNA, 33 bp, Homo sapien
acagagatacatacataatgatggctttgggca

SEQ ID NO: 165074 - DNA, 33 bp, Homo sapien
acagagatacatacatgatgatggctttgggca

SEQ ID NO: 165075 - DNA, 33 bp, Homo sapien
catattatttatgccaaaattgctgataaattg

SEQ ID NO: 165076 - DNA, 33 bp, Homo sapien
catattatttatgccagaattgctgataaattg

SEQ ID NO: 165077 - DNA, 33 bp, Homo sapien
atcatgttgataaaagaagcaaaatagcagcat

SEQ ID NO: 165078 - DNA, 33 bp, Homo sapien
atcatgttgataaaaggagcaaaatagcagcat

SEQ ID NO: 165079 - DNA, 33 bp, Homo sapien
gttttttttcttgggccccattctcactcacat

SEQ ID NO: 165080 - DNA, 33 bp, Homo sapien
gttttttttcttgggctccattctcactcacat

SEQ ID NO: 165081 - DNA, 33 bp, Homo sapien
tgctttttgcactgtaactcgtttctttagtct

SEQ ID NO: 165082 - DNA, 33 bp, Homo sapien
tgctttttgcactgtacctcgtttctttagtct

SEQ ID NO: 165083 - DNA, 33 bp, Homo sapien
cgcatgaaacgttttgcaatgaagcattctgag

SEQ ID NO: 165084 - DNA, 33 bp, Homo sapien
cgcatgaaacgttttgtaatgaagcattctgag

SEQ ID NO: 165085 - DNA, 33 bp, Homo sapien
caactttctcagcaaacagcagtctgtctctga

SEQ ID NO: 165086 - DNA, 33 bp, Homo sapien
caactttctcagcaaagagcagtctgtctctga

SEQ ID NO: 165087 - DNA, 33 bp, Homo sapien
aagttgaggaaataacaaagttccaggctgata

SEQ ID NO: 165088 - DNA, 33 bp, Homo sapien
aagttgaggaaataacgaagttccaggctgata

SEQ ID NO: 165089 - DNA, 33 bp, Homo sapien
tagctcttgtaagcacacttgcttcttttttat

SEQ ID NO: 165090 - DNA, 33 bp, Homo sapien
tagctcttgtaagcacgcttgcttcttttttat

SEQ ID NO: 165091 - DNA, 33 bp, Homo sapien
ttgaatgaactttctaaacctatcttttttcta

SEQ ID NO: 165092 - DNA, 33 bp, Homo sapien
ttgaatgaactttctacacctatcttttttcta

SEQ ID NO: 165093 - DNA, 33 bp, Homo sapien
tatgtggagtcatactcaatatacttttccttc

SEQ ID NO: 165094 - DNA, 33 bp, Homo sapien
tatgtggagtcatacttaatatacttttccttc

SEQ ID NO: 165095 - DNA, 33 bp, Homo sapien
aagaaaaatagcacagcataaggaaataaaagt

SEQ ID NO: 165096 - DNA, 33 bp, Homo sapien
aagaaaaatagcacagtataaggaaataaaagt

SEQ ID NO: 165097 - DNA, 33 bp, Homo sapien
aacataatcacttgtccaaataagaagttgaat

SEQ ID NO: 165098 - DNA, 33 bp, Homo sapien
aacataatcacttgtctaaataagaagttgaat

SEQ ID NO: 165099 - DNA, 33 bp, Homo sapien
aattattgcaatgagaaagaaggaaccagcttg

SEQ ID NO: 165100 - DNA, 33 bp, Homo sapien
aattattgcaatgagagagaaggaaccagcttg

SEQ ID NO: 165101 - DNA, 33 bp, Homo sapien
ctgacaacttacatacagaaggagagaaaatat

SEQ ID NO: 165102 - DNA, 33 bp, Homo sapien
ctgacaacttacatactgaaggagagaaaatat

SEQ ID NO: 165103 - DNA, 33 bp, Homo sapien
tggaagcacgtttagtcaaattcattgtctatt

SEQ ID NO: 165104 - DNA, 33 bp, Homo sapien
tggaagcacgtttagttaaattcattgtctatt

SEQ ID NO: 165105 - DNA, 33 bp, Homo sapien
ttattagtattcagcagcatagattttggctgg

SEQ ID NO: 165106 - DNA, 33 bp, Homo sapien
ttattagtattcagcatcatagattttggctgg

SEQ ID NO: 165107 - DNA, 33 bp, Homo sapien
gatttaggtagaaacactgttcttcatttaaaa

SEQ ID NO: 165108 - DNA, 33 bp, Homo sapien
gatttaggtagaaacagtgttcttcatttaaaa

SEQ ID NO: 165109 - DNA, 33 bp, Homo sapien
tggtcctattcgcaaactgattttggggggtaa

SEQ ID NO: 165110 - DNA, 33 bp, Homo sapien
tggtcctattcgcaaattgattttggggggtaa

SEQ ID NO: 165111 - DNA, 33 bp, Homo sapien
ttccattttccataaacgtcggccagctgagaa

SEQ ID NO: 165112 - DNA, 33 bp, Homo sapien
ttccattttccataaatgtcggccagctgagaa

SEQ ID NO: 165113 - DNA, 33 bp, Homo sapien
gcagaattgcttggtaacttaacaaaacttaac

SEQ ID NO: 165114 - DNA, 33 bp, Homo sapien
gcagaattgcttggtagcttaacaaaacttaac

SEQ ID NO: 165115 - DNA, 33 bp, Homo sapien
gccctcttattacatcgaagccaaaattattga

SEQ ID NO: 165116 - DNA, 33 bp, Homo sapien
gccctcttattacatctaagccaaaattattga

SEQ ID NO: 165117 - DNA, 33 bp, Homo sapien
tcatcattttcctgcaatccaacttaggaatgt

SEQ ID NO: 165118 - DNA, 33 bp, Homo sapien
tcatcattttcctgcagtccaacttaggaatgt

SEQ ID NO: 165119 - DNA, 33 bp, Homo sapien
ctgctataaaatgagaaggaaatggatacaaaa

SEQ ID NO: 165120 - DNA, 33 bp, Homo sapien
ctgctataaaatgagagggaaatggatacaaaa

SEQ ID NO: 165121 - DNA, 33 bp, Homo sapien
agaagtactaaatgtcacaattatcagtccaaa

SEQ ID NO: 165122 - DNA, 33 bp, Homo sapien
agaagtactaaatgtcgcaattatcagtccaaa

SEQ ID NO: 165123 - DNA, 33 bp, Homo sapien
ttacacagagacccacagtgacaggcgttactt

SEQ ID NO: 165124 - DNA, 33 bp, Homo sapien
ttacacagagacccactgtgacaggcgttactt

SEQ ID NO: 165125 - DNA, 33 bp, Homo sapien
tccaatatatgcaaacagtacctctcacaccct

SEQ ID NO: 165126 - DNA, 33 bp, Homo sapien
tccaatatatgcaaacggtacctctcacaccct

SEQ ID NO: 165127 - DNA, 33 bp, Homo sapien
tattcaatgctactaagcaccactctaaatgga

SEQ ID NO: 165128 - DNA, 33 bp, Homo sapien
tattcaatgctactaatcaccactctaaatgga

SEQ ID NO: 165129 - DNA, 33 bp, Homo sapien
ccactctaaatggataacaatagaaacttatca

SEQ ID NO: 165130 - DNA, 33 bp, Homo sapien
ccactctaaatggatagcaatagaaacttatca

SEQ ID NO: 165131 - DNA, 33 bp, Homo sapien
aagcatatctttaaaacggttctctgtgtttat

SEQ ID NO: 165132 - DNA, 33 bp, Homo sapien
aagcatatctttaaaagggttctctgtgtttat

SEQ ID NO: 165133 - DNA, 33 bp, Homo sapien
gcccagatctttggagaccatctcttgtattgg

SEQ ID NO: 165134 - DNA, 33 bp, Homo sapien
gcccagatctttggagtccatctcttgtattgg

SEQ ID NO: 165135 - DNA, 33 bp, Homo sapien
ctcaagaagggacccaactttagcctgagggcc

SEQ ID NO: 165136 - DNA, 33 bp, Homo sapien
ctcaagaagggacccacctttagcctgagggcc

SEQ ID NO: 165137 - DNA, 33 bp, Homo sapien
gaggagcagaggatagaacaataaatcttgttc

SEQ ID NO: 165138 - DNA, 33 bp, Homo sapien
gaggagcagaggataggacaataaatcttgttc

SEQ ID NO: 165139 - DNA, 33 bp, Homo sapien
aatgtttaacaataaacagagacatttagagga

SEQ ID NO: 165140 - DNA, 33 bp, Homo sapien
aatgtttaacaataaagagagacatttagagga

SEQ ID NO: 165141 - DNA, 33 bp, Homo sapien
aacccaaacctgttataaaaaacatgtctttat

SEQ ID NO: 165142 - DNA, 33 bp, Homo sapien
aacccaaacctgttatgaaaaacatgtctttat

SEQ ID NO: 165143 - DNA, 33 bp, Homo sapien
tatgtcttacatttaacgtcagttttccttcta

SEQ ID NO: 165144 - DNA, 33 bp, Homo sapien
tatgtcttacatttaatgtcagttttccttcta

SEQ ID NO: 165145 - DNA, 33 bp, Homo sapien
taagcacattagaccaactctattcagaaaata

SEQ ID NO: 165146 - DNA, 33 bp, Homo sapien
taagcacattagaccacctctattcagaaaata

SEQ ID NO: 165147 - DNA, 33 bp, Homo sapien
atattttataatcaaaccctatgttgtactatt

SEQ ID NO: 165148 - DNA, 33 bp, Homo sapien
atattttataatcaaatcctatgttgtactatt

SEQ ID NO: 165149 - DNA, 33 bp, Homo sapien
taagtttgtaaaataggattcttgagtatctgg

SEQ ID NO: 165150 - DNA, 33 bp, Homo sapien
taagtttgtaaaatagtattcttgagtatctgg

SEQ ID NO: 165151 - DNA, 33 bp, Homo sapien
tttaagctgatagacccagccctacaacacaaa

SEQ ID NO: 165152 - DNA, 33 bp, Homo sapien
tttaagctgatagaccgagccctacaacacaaa

SEQ ID NO: 165153 - DNA, 33 bp, Homo sapien
gaaatatttgaaaacacgcaatagaaaaatgtg

SEQ ID NO: 165154 - DNA, 33 bp, Homo sapien
gaaatatttgaaaacaggcaatagaaaaatgtg

SEQ ID NO: 165155 - DNA, 33 bp, Homo sapien
ccaggattcccaagaaaattctgtctaggggga

SEQ ID NO: 165156 - DNA, 33 bp, Homo sapien
ccaggattcccaagaagattctgtctaggggga

SEQ ID NO: 165157 - DNA, 33 bp, Homo sapien
tgccagttgacaattcacagttgtcagccttcc

SEQ ID NO: 165158 - DNA, 33 bp, Homo sapien
tgccagttgacaattcgcagttgtcagccttcc

SEQ ID NO: 165159 - DNA, 33 bp, Homo sapien
cttcagttaaggtgcccgaggaaggctgacaac

SEQ ID NO: 165160 - DNA, 33 bp, Homo sapien
cttcagttaaggtgcctgaggaaggctgacaac

SEQ ID NO: 165161 - DNA, 33 bp, Homo sapien
tagacctttcacaaaaccaacagttgctcaata

SEQ ID NO: 165162 - DNA, 33 bp, Homo sapien
tagacctttcacaaaagcaacagttgctcaata

SEQ ID NO: 165163 - DNA, 33 bp, Homo sapien
ttatttcacttagcacaacctctagatgcatcc

SEQ ID NO: 165164 - DNA, 33 bp, Homo sapien
ttatttcacttagcaccacctctagatgcatcc

SEQ ID NO: 165165 - DNA, 33 bp, Homo sapien
cagtgtcttcaacttgaactttttaatactggc

SEQ ID NO: 165166 - DNA, 33 bp, Homo sapien
cagtgtcttcaacttgcactttttaatactggc

SEQ ID NO: 165167 - DNA, 33 bp, Homo sapien
tgatagaaggaggacaaaatcgtgcatataaac

SEQ ID NO: 165168 - DNA, 33 bp, Homo sapien
tgatagaaggaggacataatcgtgcatataaac

SEQ ID NO: 165169 - DNA, 33 bp, Homo sapien
cctattaaactacatccatcaaaccatggtaag

SEQ ID NO: 165170 - DNA, 33 bp, Homo sapien
cctattaaactacatctatcaaaccatggtaag

SEQ ID NO: 165171 - DNA, 33 bp, Homo sapien
ctctagagtctggaataagttcactatagatat

SEQ ID NO: 165172 - DNA, 33 bp, Homo sapien
ctctagagtctggaatgagttcactatagatat

SEQ ID NO: 165173 - DNA, 33 bp, Homo sapien
ttttatattgcatatcacaccgattttataata

SEQ ID NO: 165174 - DNA, 33 bp, Homo sapien
ttttatattgcatatcgcaccgattttataata

SEQ ID NO: 165175 - DNA, 33 bp, Homo sapien
acacctaacacctaacaaatgctagctattatt

SEQ ID NO: 165176 - DNA, 33 bp, Homo sapien
acacctaacacctaacgaatgctagctattatt

SEQ ID NO: 165177 - DNA, 33 bp, Homo sapien
gataaactgggttacaagaagaaaatatatcat

SEQ ID NO: 165178 - DNA, 33 bp, Homo sapien
gataaactgggttacacgaagaaaatatatcat

SEQ ID NO: 165179 - DNA, 33 bp, Homo sapien
tttatcacgttaagaaacccttggatatatgca

SEQ ID NO: 165180 - DNA, 33 bp, Homo sapien
tttatcacgttaagaaccccttggatatatgca

SEQ ID NO: 165181 - DNA, 33 bp, Homo sapien
cttgaattttggattcacctagggctgtatctc

SEQ ID NO: 165182 - DNA, 33 bp, Homo sapien
cttgaattttggattcgcctagggctgtatctc

SEQ ID NO: 165183 - DNA, 33 bp, Homo sapien
tagcatctttttatgaagactctcaaatcattt

SEQ ID NO: 165184 - DNA, 33 bp, Homo sapien
tagcatctttttatgaggactctcaaatcattt

SEQ ID NO: 165185 - DNA, 33 bp, Homo sapien
aatcttaaatctagccagagaaaacaccagcca

SEQ ID NO: 165186 - DNA, 33 bp, Homo sapien
aatcttaaatctagcccgagaaaacaccagcca

SEQ ID NO: 165187 - DNA, 33 bp, Homo sapien
gcaatcaatcaatcagacatcaataaaacttag

SEQ ID NO: 165188 - DNA, 33 bp, Homo sapien
gcaatcaatcaatcagtcatcaataaaacttag

SEQ ID NO: 165189 - DNA, 33 bp, Homo sapien
tgtggatagacacatacgttatttccagtcagg

SEQ ID NO: 165190 - DNA, 33 bp, Homo sapien
tgtggatagacacataggttatttccagtcagg

SEQ ID NO: 165191 - DNA, 33 bp, Homo sapien
tgtaaatcaagagaaacaggtgcataaatattc

SEQ ID NO: 165192 - DNA, 33 bp, Homo sapien
tgtaaatcaagagaaataggtgcataaatattc

SEQ ID NO: 165193 - DNA, 33 bp, Homo sapien
gtgttcacaggcatagccatgaccaaggtagta

SEQ ID NO: 165194 - DNA, 33 bp, Homo sapien
gtgttcacaggcatagtcatgaccaaggtagta

SEQ ID NO: 165195 - DNA, 33 bp, Homo sapien
tatttgggttaaactaaagcaaacttacagcat

SEQ ID NO: 165196 - DNA, 33 bp, Homo sapien
tatttgggttaaactagagcaaacttacagcat

SEQ ID NO: 165197 - DNA, 33 bp, Homo sapien
gcttctgtttacatcccagggtgatcattggca

SEQ ID NO: 165198 - DNA, 33 bp, Homo sapien
gcttctgtttacatcctagggtgatcattggca

SEQ ID NO: 165199 - DNA, 33 bp, Homo sapien
aacaaataaatgttcaagcaaaaaagtatattt

SEQ ID NO: 165200 - DNA, 33 bp, Homo sapien
aacaaataaatgttcatgcaaaaaagtatattt

SEQ ID NO: 165201 - DNA, 33 bp, Homo sapien
tattctctggacatcacaaaagaatagtggtac

SEQ ID NO: 165202 - DNA, 33 bp, Homo sapien
tattctctggacatcagaaaagaatagtggtac

SEQ ID NO: 165203 - DNA, 33 bp, Homo sapien
agagaccttagtgatagcattcatgtgtctgat

SEQ ID NO: 165204 - DNA, 33 bp, Homo sapien
agagaccttagtgatatcattcatgtgtctgat

SEQ ID NO: 165205 - DNA, 33 bp, Homo sapien
agctgagaacaatagacactggtgactacttga

SEQ ID NO: 165206 - DNA, 33 bp, Homo sapien
agctgagaacaatagatactggtgactacttga

SEQ ID NO: 165207 - DNA, 33 bp, Homo sapien
ttctatggtttgttaaaggagattataatggaa

SEQ ID NO: 165208 - DNA, 33 bp, Homo sapien
ttctatggtttgttaagggagattataatggaa

SEQ ID NO: 165209 - DNA, 33 bp, Homo sapien
tttaaatactagtaccaaacttactttgactat

SEQ ID NO: 165210 - DNA, 33 bp, Homo sapien
tttaaatactagtacccaacttactttgactat

SEQ ID NO: 165211 - DNA, 33 bp, Homo sapien
tcctttctaagcaagacgtaaaggtaaacaaaa

SEQ ID NO: 165212 - DNA, 33 bp, Homo sapien
tcctttctaagcaagatgtaaaggtaaacaaaa

SEQ ID NO: 165213 - DNA, 33 bp, Homo sapien
agttcttttacctggacagaatagtgtgggatc

SEQ ID NO: 165214 - DNA, 33 bp, Homo sapien
agttcttttacctggagagaatagtgtgggatc

SEQ ID NO: 165215 - DNA, 33 bp, Homo sapien
tgtacaaactgctagaccagatttggaaccact

SEQ ID NO: 165216 - DNA, 33 bp, Homo sapien
tgtacaaactgctagatcagatttggaaccact

SEQ ID NO: 165217 - DNA, 33 bp, Homo sapien
tcaggtgtcaagtcagacccagattttaagttt

SEQ ID NO: 165218 - DNA, 33 bp, Homo sapien
tcaggtgtcaagtcagtcccagattttaagttt

SEQ ID NO: 165219 - DNA, 33 bp, Homo sapien
cagctacttggcaaagaatctagcggagcaaaa

SEQ ID NO: 165220 - DNA, 33 bp, Homo sapien
cagctacttggcaaagcatctagcggagcaaaa

SEQ ID NO: 165221 - DNA, 33 bp, Homo sapien
caattgctccttgaaagaatcattttttctttt

SEQ ID NO: 165222 - DNA, 33 bp, Homo sapien
caattgctccttgaaataatcattttttctttt

SEQ ID NO: 165223 - DNA, 33 bp, Homo sapien
atggtgtgagaagataaccccagagtataagtt

SEQ ID NO: 165224 - DNA, 33 bp, Homo sapien
atggtgtgagaagatatccccagagtataagtt

SEQ ID NO: 165225 - DNA, 33 bp, Homo sapien
ttcagaatgactcctgaaacagtgttcatctgc

SEQ ID NO: 165226 - DNA, 33 bp, Homo sapien
ttcagaatgactcctggaacagtgttcatctgc

SEQ ID NO: 165227 - DNA, 33 bp, Homo sapien
tgcaactagccagagacgacacaagccatggaa

SEQ ID NO: 165228 - DNA, 33 bp, Homo sapien
tgcaactagccagagatgacacaagccatggaa

SEQ ID NO: 165229 - DNA, 33 bp, Homo sapien
cttttagcaccaagaaaaatgatgcctggaaca

SEQ ID NO: 165230 - DNA, 33 bp, Homo sapien
cttttagcaccaagaagaatgatgcctggaaca

SEQ ID NO: 165231 - DNA, 33 bp, Homo sapien
ggaaataagccataacagattaacaataggtta

SEQ ID NO: 165232 - DNA, 33 bp, Homo sapien
ggaaataagccataacggattaacaataggtta

SEQ ID NO: 165233 - DNA, 33 bp, Homo sapien
tcataaaggtaacgcaacttagacaaacttcat

SEQ ID NO: 165234 - DNA, 33 bp, Homo sapien
tcataaaggtaacgcagcttagacaaacttcat

SEQ ID NO: 165235 - DNA, 33 bp, Homo sapien
tctccaagatagtagaaaaaatgatcaataaat

SEQ ID NO: 165236 - DNA, 33 bp, Homo sapien
tctccaagatagtagagaaaatgatcaataaat

SEQ ID NO: 165237 - DNA, 33 bp, Homo sapien
tatgagaagtgaaataaaatatatgagaagtca

SEQ ID NO: 165238 - DNA, 33 bp, Homo sapien
tatgagaagtgaaatagaatatatgagaagtca

SEQ ID NO: 165239 - DNA, 33 bp, Homo sapien
gaggtcctcagcagaagttaacttattagttag

SEQ ID NO: 165240 - DNA, 33 bp, Homo sapien
gaggtcctcagcagaatttaacttattagttag

SEQ ID NO: 165241 - DNA, 33 bp, Homo sapien
tcacatgaagaaaccaaggttgtcaatttacat

SEQ ID NO: 165242 - DNA, 33 bp, Homo sapien
tcacatgaagaaaccagggttgtcaatttacat

SEQ ID NO: 165243 - DNA, 33 bp, Homo sapien
gtttttctcctaagaacgtcagtcataatcaat

SEQ ID NO: 165244 - DNA, 33 bp, Homo sapien
gtttttctcctaagaatgtcagtcataatcaat

SEQ ID NO: 165245 - DNA, 33 bp, Homo sapien
gctactttaaaagcaacggttagaagaataatt

SEQ ID NO: 165246 - DNA, 33 bp, Homo sapien
gctactttaaaagcaagggttagaagaataatt

SEQ ID NO: 165247 - DNA, 33 bp, Homo sapien
tacctttgtttgcaaacagttatcattatgcca

SEQ ID NO: 165248 - DNA, 33 bp, Homo sapien
tacctttgtttgcaaatagttatcattatgcca

SEQ ID NO: 165249 - DNA, 33 bp, Homo sapien
agacacctggagtcagaataatgaataactaga

SEQ ID NO: 165250 - DNA, 33 bp, Homo sapien
agacacctggagtcaggataatgaataactaga

SEQ ID NO: 165251 - DNA, 33 bp, Homo sapien
taatttcagacctataaagtggaggcaaatatg

SEQ ID NO: 165252 - DNA, 33 bp, Homo sapien
taatttcagacctatagagtggaggcaaatatg

SEQ ID NO: 165253 - DNA, 33 bp, Homo sapien
ttatagattgaatgtacgttgtaagaaattaaa

SEQ ID NO: 165254 - DNA, 33 bp, Homo sapien
ttatagattgaatgtaggttgtaagaaattaaa

SEQ ID NO: 165255 - DNA, 33 bp, Homo sapien
aactaggacaatcaacggctaaattttattttt

SEQ ID NO: 165256 - DNA, 33 bp, Homo sapien
aactaggacaatcaactgctaaattttattttt

SEQ ID NO: 165257 - DNA, 33 bp, Homo sapien
tgatagctactagtacccaacagagggacaacg

SEQ ID NO: 165258 - DNA, 33 bp, Homo sapien
tgatagctactagtactcaacagagggacaacg

SEQ ID NO: 165259 - DNA, 33 bp, Homo sapien
gccactgattgtgacactggaaaaattactaaa

SEQ ID NO: 165260 - DNA, 33 bp, Homo sapien
gccactgattgtgacattggaaaaattactaaa

SEQ ID NO: 165261 - DNA, 33 bp, Homo sapien
atgccaaccaatttacagaccaaataactctat

SEQ ID NO: 165262 - DNA, 33 bp, Homo sapien
atgccaaccaatttacggaccaaataactctat

SEQ ID NO: 165263 - DNA, 33 bp, Homo sapien
attctcacatacaggcagatattcacacacaca

SEQ ID NO: 165264 - DNA, 33 bp, Homo sapien
attctcacatacaggcggatattcacacacaca

SEQ ID NO: 165265 - DNA, 33 bp, Homo sapien
caatgactgagcaccaagaaaaaacaaaacatc

SEQ ID NO: 165266 - DNA, 33 bp, Homo sapien
caatgactgagcaccatgaaaaaacaaaacatc

SEQ ID NO: 165267 - DNA, 33 bp, Homo sapien
aacttttctgtcataagtgtattgcataagcct

SEQ ID NO: 165268 - DNA, 33 bp, Homo sapien
aacttttctgtcataattgtattgcataagcct

SEQ ID NO: 165269 - DNA, 33 bp, Homo sapien
acatttaagttaatggaaaaaatgtaacgcttt

SEQ ID NO: 165270 - DNA, 33 bp, Homo sapien
acatttaagttaatggcaaaaatgtaacgcttt

SEQ ID NO: 165271 - DNA, 33 bp, Homo sapien
aagtagaaaagtaaacgccaaggtaagattgtc

SEQ ID NO: 165272 - DNA, 33 bp, Homo sapien
aagtagaaaagtaaactccaaggtaagattgtc

SEQ ID NO: 165273 - DNA, 33 bp, Homo sapien
atacttaattcagcccagagatttccaaataaa

SEQ ID NO: 165274 - DNA, 33 bp, Homo sapien
atacttaattcagcccggagatttccaaataaa

SEQ ID NO: 165275 - DNA, 33 bp, Homo sapien
tgttaaattgactgagaccacattgacttttca

SEQ ID NO: 165276 - DNA, 33 bp, Homo sapien
tgttaaattgactgagtccacattgacttttca

SEQ ID NO: 165277 - DNA, 33 bp, Homo sapien
cccaaactgacttttagatccgcttgtcaattt

SEQ ID NO: 165278 - DNA, 33 bp, Homo sapien
cccaaactgacttttatatccgcttgtcaattt

SEQ ID NO: 165279 - DNA, 33 bp, Homo sapien
atggactcctcctctccattgaagaatgtcagt

SEQ ID NO: 165280 - DNA, 33 bp, Homo sapien
atggactcctcctctctattgaagaatgtcagt

SEQ ID NO: 165281 - DNA, 33 bp, Homo sapien
ttcttgagagtacaaccgattatttgaattgaa

SEQ ID NO: 165282 - DNA, 33 bp, Homo sapien
ttcttgagagtacaactgattatttgaattgaa

SEQ ID NO: 165283 - DNA, 33 bp, Homo sapien
ctgaacctgcaataaaattctaaattcagagca

SEQ ID NO: 165284 - DNA, 33 bp, Homo sapien
ctgaacctgcaataaagttctaaattcagagca

SEQ ID NO: 165285 - DNA, 33 bp, Homo sapien
tttggcatattgcttaccatcaaatgtttttcc

SEQ ID NO: 165286 - DNA, 33 bp, Homo sapien
tttggcatattgcttatcatcaaatgtttttcc

SEQ ID NO: 165287 - DNA, 33 bp, Homo sapien
tgatgtcttgggaatgcagtggtccaaaccatg

SEQ ID NO: 165288 - DNA, 33 bp, Homo sapien
tgatgtcttgggaatggagtggtccaaaccatg

SEQ ID NO: 165289 - DNA, 33 bp, Homo sapien
gcaccaagccagctgacgtggagccaaaagagt

SEQ ID NO: 165290 - DNA, 33 bp, Homo sapien
gcaccaagccagctgatgtggagccaaaagagt

SEQ ID NO: 165291 - DNA, 33 bp, Homo sapien
ggtgttgacttattaaatagatgctgagtaaaa

SEQ ID NO: 165292 - DNA, 33 bp, Homo sapien
ggtgttgacttattaattagatgctgagtaaaa

SEQ ID NO: 165293 - DNA, 33 bp, Homo sapien
taggctcctgtggttacgtatctccctccttca

SEQ ID NO: 165294 - DNA, 33 bp, Homo sapien
taggctcctgtggttaggtatctccctccttca

SEQ ID NO: 165295 - DNA, 33 bp, Homo sapien
ggaagaaggtgatgacagatgatagtgttattg

SEQ ID NO: 165296 - DNA, 33 bp, Homo sapien
ggaagaaggtgatgaccgatgatagtgttattg

SEQ ID NO: 165297 - DNA, 33 bp, Homo sapien
tggaataccatgaaaaaaaagaaggtgctctgt

SEQ ID NO: 165298 - DNA, 33 bp, Homo sapien
tggaataccatgaaaagaaagaaggtgctctgt

SEQ ID NO: 165299 - DNA, 33 bp, Homo sapien
tatcatccatcattgaagttaaatgtagtcaca

SEQ ID NO: 165300 - DNA, 33 bp, Homo sapien
tatcatccatcattgaggttaaatgtagtcaca

SEQ ID NO: 165301 - DNA, 33 bp, Homo sapien
tgtgaaaaaacatggcaatgaattacatgagaa

SEQ ID NO: 165302 - DNA, 33 bp, Homo sapien
tgtgaaaaaacatggcgatgaattacatgagaa

SEQ ID NO: 165303 - DNA, 33 bp, Homo sapien
tgtgcttcacaggatacgtagaagcatctctga

SEQ ID NO: 165304 - DNA, 33 bp, Homo sapien
tgtgcttcacaggatatgtagaagcatctctga

SEQ ID NO: 165305 - DNA, 33 bp, Homo sapien
tactcttaaccctacaaagttggtcatctagaa

SEQ ID NO: 165306 - DNA, 33 bp, Homo sapien
tactcttaaccctacacagttggtcatctagaa

SEQ ID NO: 165307 - DNA, 33 bp, Homo sapien
ggtgacatttataaacaaaactgcggttctgtt

SEQ ID NO: 165308 - DNA, 33 bp, Homo sapien
ggtgacatttataaacgaaactgcggttctgtt

SEQ ID NO: 165309 - DNA, 33 bp, Homo sapien
aaataataataatgcccgcttttctacttccca

SEQ ID NO: 165310 - DNA, 33 bp, Homo sapien
aaataataataatgcctgcttttctacttccca

SEQ ID NO: 165311 - DNA, 33 bp, Homo sapien
gaatcttggtttggaacttcactagatgaacac

SEQ ID NO: 165312 - DNA, 33 bp, Homo sapien
gaatcttggtttggaatttcactagatgaacac

SEQ ID NO: 165313 - DNA, 33 bp, Homo sapien
cagccctgtgaagggacgtatgccacactccaa

SEQ ID NO: 165314 - DNA, 33 bp, Homo sapien
cagccctgtgaagggaggtatgccacactccaa

SEQ ID NO: 165315 - DNA, 33 bp, Homo sapien
attctgaaaacataaaatgcctaagtagaaaag

SEQ ID NO: 165316 - DNA, 33 bp, Homo sapien
attctgaaaacataaagtgcctaagtagaaaag

SEQ ID NO: 165317 - DNA, 33 bp, Homo sapien
gatatagacactagaaaaaagaatatatggctt

SEQ ID NO: 165318 - DNA, 33 bp, Homo sapien
gatatagacactagaacaaagaatatatggctt

SEQ ID NO: 165319 - DNA, 33 bp, Homo sapien
caactgagaacgataaaggaagtcacatgaaag

SEQ ID NO: 165320 - DNA, 33 bp, Homo sapien
caactgagaacgataacggaagtcacatgaaag

SEQ ID NO: 165321 - DNA, 33 bp, Homo sapien
aagtagacacaaggaaacagaacacagtgaaca

SEQ ID NO: 165322 - DNA, 33 bp, Homo sapien
aagtagacacaaggaatcagaacacagtgaaca

SEQ ID NO: 165323 - DNA, 33 bp, Homo sapien
ttcttgattgtgataaacttgacaattgtggaa

SEQ ID NO: 165324 - DNA, 33 bp, Homo sapien
ttcttgattgtgataaccttgacaattgtggaa

SEQ ID NO: 165325 - DNA, 33 bp, Homo sapien
tcttgctcttactcctcaaacagttgcttttgt

SEQ ID NO: 165326 - DNA, 33 bp, Homo sapien
tcttgctcttactcctgaaacagttgcttttgt

SEQ ID NO: 165327 - DNA, 33 bp, Homo sapien
caacagataatattcaacagtgggagacccatc

SEQ ID NO: 165328 - DNA, 33 bp, Homo sapien
caacagataatattcatcagtgggagacccatc

SEQ ID NO: 165329 - DNA, 33 bp, Homo sapien
ttagatatatcaagaacgtaagccatgaaaaaa

SEQ ID NO: 165330 - DNA, 33 bp, Homo sapien
ttagatatatcaagaatgtaagccatgaaaaaa

SEQ ID NO: 165331 - DNA, 33 bp, Homo sapien
tagtttggtcaggtaccgggcaaagtaattttc

SEQ ID NO: 165332 - DNA, 33 bp, Homo sapien
tagtttggtcaggtactgggcaaagtaattttc

SEQ ID NO: 165333 - DNA, 33 bp, Homo sapien
tctgttaccttaaaaacttctcagacactaaaa

SEQ ID NO: 165334 - DNA, 33 bp, Homo sapien
tctgttaccttaaaaatttctcagacactaaaa

SEQ ID NO: 165335 - DNA, 33 bp, Homo sapien
attgtaatcctgccgtcaatttcttttcacttc

SEQ ID NO: 165336 - DNA, 33 bp, Homo sapien
attgtaatcctgccgttaatttcttttcacttc

SEQ ID NO: 165337 - DNA, 33 bp, Homo sapien
cttttaaactattagaactcatgagaactcact

SEQ ID NO: 165338 - DNA, 33 bp, Homo sapien
cttttaaactattagacctcatgagaactcact

SEQ ID NO: 165339 - DNA, 33 bp, Homo sapien
tggtaattacagttcaatataaggcttgggtga

SEQ ID NO: 165340 - DNA, 33 bp, Homo sapien
tggtaattacagttcagtataaggcttgggtga

SEQ ID NO: 165341 - DNA, 33 bp, Homo sapien
ggtaaggataagcctacgttatgctgcattttc

SEQ ID NO: 165342 - DNA, 33 bp, Homo sapien
ggtaaggataagcctatgttatgctgcattttc

SEQ ID NO: 165343 - DNA, 33 bp, Homo sapien
aaaaatcaaacaaacagacttttggcaaaataa

SEQ ID NO: 165344 - DNA, 33 bp, Homo sapien
aaaaatcaaacaaacatacttttggcaaaataa

SEQ ID NO: 165345 - DNA, 33 bp, Homo sapien
acacagccagattcacacagacattgggactaa

SEQ ID NO: 165346 - DNA, 33 bp, Homo sapien
acacagccagattcacgcagacattgggactaa

SEQ ID NO: 165347 - DNA, 33 bp, Homo sapien
ttagcataataagaaaagattcattaaagaggg

SEQ ID NO: 165348 - DNA, 33 bp, Homo sapien
ttagcataataagaaatgattcattaaagaggg

SEQ ID NO: 165349 - DNA, 33 bp, Homo sapien
tgagctgttttagtccactctcacactgttata

SEQ ID NO: 165350 - DNA, 33 bp, Homo sapien
tgagctgttttagtccgctctcacactgttata

SEQ ID NO: 165351 - DNA, 33 bp, Homo sapien
atagaaaccagagatgaagtcaagagattgcat

SEQ ID NO: 165352 - DNA, 33 bp, Homo sapien
atagaaaccagagatgcagtcaagagattgcat

SEQ ID NO: 165353 - DNA, 33 bp, Homo sapien
agaaagcactatgccaagcaacaaaatgatgac

SEQ ID NO: 165354 - DNA, 33 bp, Homo sapien
agaaagcactatgccaggcaacaaaatgatgac

SEQ ID NO: 165355 - DNA, 33 bp, Homo sapien
gatattcaaattcaccaaagcatttaatatgta

SEQ ID NO: 165356 - DNA, 33 bp, Homo sapien
gatattcaaattcaccgaagcatttaatatgta

SEQ ID NO: 165357 - DNA, 33 bp, Homo sapien
gggttgtctcctgtgacgtcgtgtaggacatgc

SEQ ID NO: 165358 - DNA, 33 bp, Homo sapien
gggttgtctcctgtgatgtcgtgtaggacatgc

SEQ ID NO: 165359 - DNA, 33 bp, Homo sapien
ccattttgttatttaaatcttgcttagtttgca

SEQ ID NO: 165360 - DNA, 33 bp, Homo sapien
ccattttgttatttaagtcttgcttagtttgca

SEQ ID NO: 165361 - DNA, 33 bp, Homo sapien
tttgctggatctatgacgggcctaaaagacacc

SEQ ID NO: 165362 - DNA, 33 bp, Homo sapien
tttgctggatctatgatgggcctaaaagacacc

SEQ ID NO: 165363 - DNA, 33 bp, Homo sapien
aatagctcacggtgtaaattcaaaaagcaaata

SEQ ID NO: 165364 - DNA, 33 bp, Homo sapien
aatagctcacggtgtagattcaaaaagcaaata

SEQ ID NO: 165365 - DNA, 33 bp, Homo sapien
tgtttacatagatgcacgaacaaaagatattcc

SEQ ID NO: 165366 - DNA, 33 bp, Homo sapien
tgtttacatagatgcatgaacaaaagatattcc

SEQ ID NO: 165367 - DNA, 33 bp, Homo sapien
aagtgaagataatatgcacaagatagcagacac

SEQ ID NO: 165368 - DNA, 33 bp, Homo sapien
aagtgaagataatatggacaagatagcagacac

SEQ ID NO: 165369 - DNA, 33 bp, Homo sapien
tctgttcacagttttaaaaaattgctttcatac

SEQ ID NO: 165370 - DNA, 33 bp, Homo sapien
tctgttcacagttttagaaaattgctttcatac

SEQ ID NO: 165371 - DNA, 33 bp, Homo sapien
tgaaacaacttcatcaagcacctggaattggtt

SEQ ID NO: 165372 - DNA, 33 bp, Homo sapien
tgaaacaacttcatcaggcacctggaattggtt

SEQ ID NO: 165373 - DNA, 33 bp, Homo sapien
tacaatgtctaacattaaataggttttcaaggc

SEQ ID NO: 165374 - DNA, 33 bp, Homo sapien
tacaatgtctaacatttaataggttttcaaggc

SEQ ID NO: 165375 - DNA, 33 bp, Homo sapien
acctgagatgcatttgaacaagaaactaaaagg

SEQ ID NO: 165376 - DNA, 33 bp, Homo sapien
acctgagatgcatttggacaagaaactaaaagg

SEQ ID NO: 165377 - DNA, 33 bp, Homo sapien
ctaggcttataaagccaataaggtgaccaacta

SEQ ID NO: 165378 - DNA, 33 bp, Homo sapien
ctaggcttataaagccgataaggtgaccaacta

SEQ ID NO: 165379 - DNA, 33 bp, Homo sapien
ttttagaaagtttcacagagacagcaatatctt

SEQ ID NO: 165380 - DNA, 33 bp, Homo sapien
ttttagaaagtttcacggagacagcaatatctt

SEQ ID NO: 165381 - DNA, 33 bp, Homo sapien
ttctgttgctcatggactattatagtttcttaa

SEQ ID NO: 165382 - DNA, 33 bp, Homo sapien
ttctgttgctcatggattattatagtttcttaa

SEQ ID NO: 165383 - DNA, 33 bp, Homo sapien
ggacgaatagcgagaacctgtacagaactgaaa

SEQ ID NO: 165384 - DNA, 33 bp, Homo sapien
ggacgaatagcgagaatctgtacagaactgaaa

SEQ ID NO: 165385 - DNA, 33 bp, Homo sapien
ttaaaaacctatgtgaactacaaagagagtaag

SEQ ID NO: 165386 - DNA, 33 bp, Homo sapien
ttaaaaacctatgtgagctacaaagagagtaag

SEQ ID NO: 165387 - DNA, 33 bp, Homo sapien
atctattataaggaaagatgagtcagagtaggc

SEQ ID NO: 165388 - DNA, 33 bp, Homo sapien
atctattataaggaaatatgagtcagagtaggc

SEQ ID NO: 165389 - DNA, 33 bp, Homo sapien
agatttgaccactatacgctggagtggcagtaa

SEQ ID NO: 165390 - DNA, 33 bp, Homo sapien
agatttgaccactatatgctggagtggcagtaa

SEQ ID NO: 165391 - DNA, 33 bp, Homo sapien
aacaggtggaaacaaacgtggattcctaagaca

SEQ ID NO: 165392 - DNA, 33 bp, Homo sapien
aacaggtggaaacaaatgtggattcctaagaca

SEQ ID NO: 165393 - DNA, 33 bp, Homo sapien
tgtgtttgatttccctcaattccttgaaagctc

SEQ ID NO: 165394 - DNA, 33 bp, Homo sapien
tgtgtttgatttcccttaattccttgaaagctc

SEQ ID NO: 165395 - DNA, 33 bp, Homo sapien
tgtcacataagttatcactcaacattaagtagc

SEQ ID NO: 165396 - DNA, 33 bp, Homo sapien
tgtcacataagttatcgctcaacattaagtagc

SEQ ID NO: 165397 - DNA, 33 bp, Homo sapien
acaacaagtgccatgacgaggattctcatgaga

SEQ ID NO: 165398 - DNA, 33 bp, Homo sapien
acaacaagtgccatgatgaggattctcatgaga

SEQ ID NO: 165399 - DNA, 33 bp, Homo sapien
tttttagccaataggaaaacagtgaggggcaat

SEQ ID NO: 165400 - DNA, 33 bp, Homo sapien
tttttagccaataggagaacagtgaggggcaat

SEQ ID NO: 165401 - DNA, 33 bp, Homo sapien
ctgttcatcaaaaatcaaatgattcaagtgcac

SEQ ID NO: 165402 - DNA, 33 bp, Homo sapien
ctgttcatcaaaaatccaatgattcaagtgcac

SEQ ID NO: 165403 - DNA, 33 bp, Homo sapien
acttactgtatggaaaatgctgtggtcaaatta

SEQ ID NO: 165404 - DNA, 33 bp, Homo sapien
acttactgtatggaaagtgctgtggtcaaatta

SEQ ID NO: 165405 - DNA, 33 bp, Homo sapien
aaattttccacttgtaactttgtgccagcaccc

SEQ ID NO: 165406 - DNA, 33 bp, Homo sapien
aaattttccacttgtagctttgtgccagcaccc

SEQ ID NO: 165407 - DNA, 33 bp, Homo sapien
tccagggtaataatgccaaaataggttgttcat

SEQ ID NO: 165408 - DNA, 33 bp, Homo sapien
tccagggtaataatgctaaaataggttgttcat

SEQ ID NO: 165409 - DNA, 33 bp, Homo sapien
ctggaatgctggtgaccacaaagtgggagtgat

SEQ ID NO: 165410 - DNA, 33 bp, Homo sapien
ctggaatgctggtgactacaaagtgggagtgat

SEQ ID NO: 165411 - DNA, 33 bp, Homo sapien
agctgttttgtgaatccctgagtacaacctgtg

SEQ ID NO: 165412 - DNA, 33 bp, Homo sapien
agctgttttgtgaatctctgagtacaacctgtg

SEQ ID NO: 165413 - DNA, 33 bp, Homo sapien
aacccagctccagcaacagcttcaatagtggat

SEQ ID NO: 165414 - DNA, 33 bp, Homo sapien
aacccagctccagcaatagcttcaatagtggat

SEQ ID NO: 165415 - DNA, 33 bp, Homo sapien
cctagaaatatagctaaccaatgggatgaaaga

SEQ ID NO: 165416 - DNA, 33 bp, Homo sapien
cctagaaatatagctagccaatgggatgaaaga

SEQ ID NO: 165417 - DNA, 33 bp, Homo sapien
ttgataagtctgccaaatctctagaagtcctaa

SEQ ID NO: 165418 - DNA, 33 bp, Homo sapien
ttgataagtctgccaagtctctagaagtcctaa

SEQ ID NO: 165419 - DNA, 33 bp, Homo sapien
cccaactgaacataacacaatccaataaagaaa

SEQ ID NO: 165420 - DNA, 33 bp, Homo sapien
cccaactgaacataacccaatccaataaagaaa

SEQ ID NO: 165421 - DNA, 33 bp, Homo sapien
aggaaacttttatctacggctactactgtcatc

SEQ ID NO: 165422 - DNA, 33 bp, Homo sapien
aggaaacttttatctatggctactactgtcatc

SEQ ID NO: 165423 - DNA, 33 bp, Homo sapien
tagttgtttctccaaactaaagaagggagatta

SEQ ID NO: 165424 - DNA, 33 bp, Homo sapien
tagttgtttctccaaattaaagaagggagatta

SEQ ID NO: 165425 - DNA, 33 bp, Homo sapien
ttcctatcaaattatcaaactaccaatggcatt

SEQ ID NO: 165426 - DNA, 33 bp, Homo sapien
ttcctatcaaattatcgaactaccaatggcatt

SEQ ID NO: 165427 - DNA, 33 bp, Homo sapien
ttttacgttctgtaacactacaaattttccact

SEQ ID NO: 165428 - DNA, 33 bp, Homo sapien
ttttacgttctgtaactctacaaattttccact

SEQ ID NO: 165429 - DNA, 33 bp, Homo sapien
tctttaggaattaggacgtaacaaacaaggaga

SEQ ID NO: 165430 - DNA, 33 bp, Homo sapien
tctttaggaattaggatgtaacaaacaaggaga

SEQ ID NO: 165431 - DNA, 33 bp, Homo sapien
atggactaatgcaataagtaagcctttttagta

SEQ ID NO: 165432 - DNA, 33 bp, Homo sapien
atggactaatgcaatatgtaagcctttttagta

SEQ ID NO: 165433 - DNA, 33 bp, Homo sapien
cacaaaacttcatatgccaattgggagaaggtg

SEQ ID NO: 165434 - DNA, 33 bp, Homo sapien
cacaaaacttcatatgtcaattgggagaaggtg

SEQ ID NO: 165435 - DNA, 33 bp, Homo sapien
taattttatctcattgaagtcagagaagatact

SEQ ID NO: 165436 - DNA, 33 bp, Homo sapien
taattttatctcattgcagtcagagaagatact

SEQ ID NO: 165437 - DNA, 33 bp, Homo sapien
gaatttcagccgtgaagcatatagataatataa

SEQ ID NO: 165438 - DNA, 33 bp, Homo sapien
gaatttcagccgtgaatcatatagataatataa

SEQ ID NO: 165439 - DNA, 33 bp, Homo sapien
ttctattgaatttaaccattccttctgtgaatt

SEQ ID NO: 165440 - DNA, 33 bp, Homo sapien
ttctattgaatttaacgattccttctgtgaatt

SEQ ID NO: 165441 - DNA, 33 bp, Homo sapien
tgtagcaactggaaaacgagacaaggaaacatg

SEQ ID NO: 165442 - DNA, 33 bp, Homo sapien
tgtagcaactggaaaatgagacaaggaaacatg

SEQ ID NO: 165443 - DNA, 33 bp, Homo sapien
agtgtgtgtattttccaacaattttccaaggta

SEQ ID NO: 165444 - DNA, 33 bp, Homo sapien
agtgtgtgtattttccgacaattttccaaggta

SEQ ID NO: 165445 - DNA, 33 bp, Homo sapien
aattagtttctctttacgtctgttgaaaccgcg

SEQ ID NO: 165446 - DNA, 33 bp, Homo sapien
aattagtttctctttaggtctgttgaaaccgcg

SEQ ID NO: 165447 - DNA, 33 bp, Homo sapien
ataggcattgtatccacgggagcaatatcaaaa

SEQ ID NO: 165448 - DNA, 33 bp, Homo sapien
ataggcattgtatccaggggagcaatatcaaaa

SEQ ID NO: 165449 - DNA, 33 bp, Homo sapien
tgggtccaaattacagcaaatacttcatctcat

SEQ ID NO: 165450 - DNA, 33 bp, Homo sapien
tgggtccaaattacaggaaatacttcatctcat

SEQ ID NO: 165451 - DNA, 33 bp, Homo sapien
attctgtttcacatcaactaattttattttgtt

SEQ ID NO: 165452 - DNA, 33 bp, Homo sapien
attctgtttcacatcacctaattttattttgtt

SEQ ID NO: 165453 - DNA, 33 bp, Homo sapien
taccttagaaccactcaaacttagagaatggaa

SEQ ID NO: 165454 - DNA, 33 bp, Homo sapien
taccttagaaccactcgaacttagagaatggaa

SEQ ID NO: 165455 - DNA, 33 bp, Homo sapien
agatggtgaaaacctcaattactgttttagtcc

SEQ ID NO: 165456 - DNA, 33 bp, Homo sapien
agatggtgaaaacctccattactgttttagtcc

SEQ ID NO: 165457 - DNA, 33 bp, Homo sapien
tgcctcaatctcccaaatagtggaactacaggc

SEQ ID NO: 165458 - DNA, 33 bp, Homo sapien
tgcctcaatctcccaactagtggaactacaggc

SEQ ID NO: 165459 - DNA, 33 bp, Homo sapien
ttgtacagattgcatcccattgtgttgcccagg

SEQ ID NO: 165460 - DNA, 33 bp, Homo sapien
ttgtacagattgcatctcattgtgttgcccagg

SEQ ID NO: 165461 - DNA, 33 bp, Homo sapien
gaaagcgaattgagtaaattaaagggatggccc

SEQ ID NO: 165462 - DNA, 33 bp, Homo sapien
gaaagcgaattgagtatattaaagggatggccc

SEQ ID NO: 165463 - DNA, 33 bp, Homo sapien
gtcacctgactctatcaaaggtcaactaatctt

SEQ ID NO: 165464 - DNA, 33 bp, Homo sapien
gtcacctgactctatcgaaggtcaactaatctt

SEQ ID NO: 165465 - DNA, 33 bp, Homo sapien
ctcttttgaacaaccacctcttttgtgaactaa

SEQ ID NO: 165466 - DNA, 33 bp, Homo sapien
ctcttttgaacaaccatctcttttgtgaactaa

SEQ ID NO: 165467 - DNA, 33 bp, Homo sapien
gtactatgagtttgcaaatgttaggaatacaac

SEQ ID NO: 165468 - DNA, 33 bp, Homo sapien
gtactatgagtttgcatatgttaggaatacaac

SEQ ID NO: 165469 - DNA, 33 bp, Homo sapien
taagcaaagaggaagacgaccatgtctgtgata

SEQ ID NO: 165470 - DNA, 33 bp, Homo sapien
taagcaaagaggaagatgaccatgtctgtgata

SEQ ID NO: 165471 - DNA, 33 bp, Homo sapien
gaatgagtgcattatgaagcattcgtatctgga

SEQ ID NO: 165472 - DNA, 33 bp, Homo sapien
gaatgagtgcattatgcagcattcgtatctgga

SEQ ID NO: 165473 - DNA, 33 bp, Homo sapien
gtactctgcatgagaccaaagtttaaaaattga

SEQ ID NO: 165474 - DNA, 33 bp, Homo sapien
gtactctgcatgagactaaagtttaaaaattga

SEQ ID NO: 165475 - DNA, 33 bp, Homo sapien
gttcactcaaggaactcacactctacaatcagc

SEQ ID NO: 165476 - DNA, 33 bp, Homo sapien
gttcactcaaggaactgacactctacaatcagc

SEQ ID NO: 165477 - DNA, 33 bp, Homo sapien
tttgtttaatatctaactagccctaaggttaat

SEQ ID NO: 165478 - DNA, 33 bp, Homo sapien
tttgtttaatatctaagtagccctaaggttaat

SEQ ID NO: 165479 - DNA, 33 bp, Homo sapien
ggcaggcgaaacaacaaattacaccttcatatg

SEQ ID NO: 165480 - DNA, 33 bp, Homo sapien
ggcaggcgaaacaacagattacaccttcatatg

SEQ ID NO: 165481 - DNA, 33 bp, Homo sapien
tggctatttagccttgcaaagttatctaccctc

SEQ ID NO: 165482 - DNA, 33 bp, Homo sapien
tggctatttagccttggaaagttatctaccctc

SEQ ID NO: 165483 - DNA, 33 bp, Homo sapien
ctgaaagaatatgaataagagaatccaaataag

SEQ ID NO: 165484 - DNA, 33 bp, Homo sapien
ctgaaagaatatgaatcagagaatccaaataag

SEQ ID NO: 165485 - DNA, 33 bp, Homo sapien
taccacaagagaagtcaacacgtcaaaaaactg

SEQ ID NO: 165486 - DNA, 33 bp, Homo sapien
taccacaagagaagtccacacgtcaaaaaactg

SEQ ID NO: 165487 - DNA, 33 bp, Homo sapien
ggtaatatctttttccccatccatcacgaagtt

SEQ ID NO: 165488 - DNA, 33 bp, Homo sapien
ggtaatatctttttcctcatccatcacgaagtt

SEQ ID NO: 165489 - DNA, 33 bp, Homo sapien
catttcatcgctactcaattatgtcatttctgt

SEQ ID NO: 165490 - DNA, 33 bp, Homo sapien
catttcatcgctactcgattatgtcatttctgt

SEQ ID NO: 165491 - DNA, 33 bp, Homo sapien
attatgagttcatcaacaaatagcttttacagt

SEQ ID NO: 165492 - DNA, 33 bp, Homo sapien
attatgagttcatcaataaatagcttttacagt

SEQ ID NO: 165493 - DNA, 33 bp, Homo sapien
acccaaagggatgaaaattgttcaattataaag

SEQ ID NO: 165494 - DNA, 33 bp, Homo sapien
acccaaagggatgaaatttgttcaattataaag

SEQ ID NO: 165495 - DNA, 33 bp, Homo sapien
aatttcagtgaagtccagctcaattgtttcctt

SEQ ID NO: 165496 - DNA, 33 bp, Homo sapien
aatttcagtgaagtccggctcaattgtttcctt

SEQ ID NO: 165497 - DNA, 33 bp, Homo sapien
caataccacatgagaaacttaatattttgctgt

SEQ ID NO: 165498 - DNA, 33 bp, Homo sapien
caataccacatgagaagcttaatattttgctgt

SEQ ID NO: 165499 - DNA, 33 bp, Homo sapien
ttaggtcagagtacacaaattgaagaatatgag

SEQ ID NO: 165500 - DNA, 33 bp, Homo sapien
ttaggtcagagtacacgaattgaagaatatgag

SEQ ID NO: 165501 - DNA, 33 bp, Homo sapien
ctcaacagccatgatagagaaatgtttttattt

SEQ ID NO: 165502 - DNA, 33 bp, Homo sapien
ctcaacagccatgatatagaaatgtttttattt

SEQ ID NO: 165503 - DNA, 33 bp, Homo sapien
caaatcaaaaccataaccaaaaccataaccaga

SEQ ID NO: 165504 - DNA, 33 bp, Homo sapien
caaatcaaaaccataatcaaaaccataaccaga

SEQ ID NO: 165505 - DNA, 33 bp, Homo sapien
atcaaaaccataatagccgttagagaaatgcaa

SEQ ID NO: 165506 - DNA, 33 bp, Homo sapien
atcaaaaccataatagtcgttagagaaatgcaa

SEQ ID NO: 165507 - DNA, 33 bp, Homo sapien
aaagacaataattgaaaaacgtagaagtggtcc

SEQ ID NO: 165508 - DNA, 33 bp, Homo sapien
aaagacaataattgaataacgtagaagtggtcc

SEQ ID NO: 165509 - DNA, 33 bp, Homo sapien
tggtacatagcatgagaatttatcttaaaccgg

SEQ ID NO: 165510 - DNA, 33 bp, Homo sapien
tggtacatagcatgaggatttatcttaaaccgg

SEQ ID NO: 165511 - DNA, 33 bp, Homo sapien
gaagaagaatggatgcagaaggcttctacgttt

SEQ ID NO: 165512 - DNA, 33 bp, Homo sapien
gaagaagaatggatgcggaaggcttctacgttt

SEQ ID NO: 165513 - DNA, 33 bp, Homo sapien
agtatgggattaccataagagatttctgcaaag

SEQ ID NO: 165514 - DNA, 33 bp, Homo sapien
agtatgggattaccatgagagatttctgcaaag

SEQ ID NO: 165515 - DNA, 33 bp, Homo sapien
gccttgtcatcactcaccaagccctgtcaagtt

SEQ ID NO: 165516 - DNA, 33 bp, Homo sapien
gccttgtcatcactcatcaagccctgtcaagtt

SEQ ID NO: 165517 - DNA, 33 bp, Homo sapien
ttcataaataagttgaaggaaagcataaattaa

SEQ ID NO: 165518 - DNA, 33 bp, Homo sapien
ttcataaataagttgagggaaagcataaattaa

SEQ ID NO: 165519 - DNA, 33 bp, Homo sapien
aaagaggaagccaacaccttgagtgcattttaa

SEQ ID NO: 165520 - DNA, 33 bp, Homo sapien
aaagaggaagccaacatcttgagtgcattttaa

SEQ ID NO: 165521 - DNA, 33 bp, Homo sapien
attccatagcctgggaagatcaggacaatacca

SEQ ID NO: 165522 - DNA, 33 bp, Homo sapien
attccatagcctgggaggatcaggacaatacca

SEQ ID NO: 165523 - DNA, 33 bp, Homo sapien
ggtctcactaggtatcaaagaatggcaaagact

SEQ ID NO: 165524 - DNA, 33 bp, Homo sapien
ggtctcactaggtatcgaagaatggcaaagact

SEQ ID NO: 165525 - DNA, 33 bp, Homo sapien
aattaaaataaatagaccatcttgaggcagtgt

SEQ ID NO: 165526 - DNA, 33 bp, Homo sapien
aattaaaataaatagagcatcttgaggcagtgt

SEQ ID NO: 165527 - DNA, 33 bp, Homo sapien
tgaggtaactcagtgaaattgaggagaaagctg

SEQ ID NO: 165528 - DNA, 33 bp, Homo sapien
tgaggtaactcagtgagattgaggagaaagctg

SEQ ID NO: 165529 - DNA, 33 bp, Homo sapien
aagactgcaaagcaaccagctaaaaacaccaag

SEQ ID NO: 165530 - DNA, 33 bp, Homo sapien
aagactgcaaagcaactagctaaaaacaccaag

SEQ ID NO: 165531 - DNA, 33 bp, Homo sapien
gagcactctaacacaacgctatttggaggccag

SEQ ID NO: 165532 - DNA, 33 bp, Homo sapien
gagcactctaacacaatgctatttggaggccag

SEQ ID NO: 165533 - DNA, 33 bp, Homo sapien
tacttgatgattgacacggatttttggctgaga

SEQ ID NO: 165534 - DNA, 33 bp, Homo sapien
tacttgatgattgacatggatttttggctgaga

SEQ ID NO: 165535 - DNA, 33 bp, Homo sapien
tttgcacacagttatgcaaaagtatatttgaca

SEQ ID NO: 165536 - DNA, 33 bp, Homo sapien
tttgcacacagttatgtaaaagtatatttgaca

SEQ ID NO: 165537 - DNA, 33 bp, Homo sapien
tattatttcagaacaaattaaaagtctggaaac

SEQ ID NO: 165538 - DNA, 33 bp, Homo sapien
tattatttcagaacaatttaaaagtctggaaac

SEQ ID NO: 165539 - DNA, 33 bp, Homo sapien
aaaattattttgaagacggattgagatacactg

SEQ ID NO: 165540 - DNA, 33 bp, Homo sapien
aaaattattttgaagatggattgagatacactg

SEQ ID NO: 165541 - DNA, 33 bp, Homo sapien
tctcatgatgcaagtcaaaataattgcctgcaa

SEQ ID NO: 165542 - DNA, 33 bp, Homo sapien
tctcatgatgcaagtcgaaataattgcctgcaa

SEQ ID NO: 165543 - DNA, 33 bp, Homo sapien
catatttatgctggtaccaatcagaatttcttt

SEQ ID NO: 165544 - DNA, 33 bp, Homo sapien
catatttatgctggtatcaatcagaatttcttt

SEQ ID NO: 165545 - DNA, 33 bp, Homo sapien
tcaataactagctctacaacactgaaaaaggta

SEQ ID NO: 165546 - DNA, 33 bp, Homo sapien
tcaataactagctctataacactgaaaaaggta

SEQ ID NO: 165547 - DNA, 33 bp, Homo sapien
atttcaaggcagcctacgtggagtcaagaggat

SEQ ID NO: 165548 - DNA, 33 bp, Homo sapien
atttcaaggcagcctatgtggagtcaagaggat

SEQ ID NO: 165549 - DNA, 33 bp, Homo sapien
gacatgtgaatgaagacgctttgtatactacca

SEQ ID NO: 165550 - DNA, 33 bp, Homo sapien
gacatgtgaatgaagatgctttgtatactacca

SEQ ID NO: 165551 - DNA, 33 bp, Homo sapien
taaacttcaagtctcacgctctactagggtgag

SEQ ID NO: 165552 - DNA, 33 bp, Homo sapien
taaacttcaagtctcatgctctactagggtgag

SEQ ID NO: 165553 - DNA, 33 bp, Homo sapien
ggtggaaaaactggcaaagttgctcattaaatt

SEQ ID NO: 165554 - DNA, 33 bp, Homo sapien
ggtggaaaaactggcatagttgctcattaaatt

SEQ ID NO: 165555 - DNA, 33 bp, Homo sapien
ttttaagtttctgttacgcagtgctccactgct

SEQ ID NO: 165556 - DNA, 33 bp, Homo sapien
ttttaagtttctgttatgcagtgctccactgct

SEQ ID NO: 165557 - DNA, 33 bp, Homo sapien
atcttgaaatattgcacgaatttctaaaatgtt

SEQ ID NO: 165558 - DNA, 33 bp, Homo sapien
atcttgaaatattgcatgaatttctaaaatgtt

SEQ ID NO: 165559 - DNA, 33 bp, Homo sapien
ctatgttgattaggaacggtaagagtgggcctc

SEQ ID NO: 165560 - DNA, 33 bp, Homo sapien
ctatgttgattaggaatggtaagagtgggcctc

SEQ ID NO: 165561 - DNA, 33 bp, Homo sapien
tattctaaatctaacccgcttcattttctcgtg

SEQ ID NO: 165562 - DNA, 33 bp, Homo sapien
tattctaaatctaacctgcttcattttctcgtg

SEQ ID NO: 165563 - DNA, 33 bp, Homo sapien
tagcaggtactcacataacattgttttactcaa

SEQ ID NO: 165564 - DNA, 33 bp, Homo sapien
tagcaggtactcacatgacattgttttactcaa

SEQ ID NO: 165565 - DNA, 33 bp, Homo sapien
ttgggcaacaaagtgacatgctatttcaaaaac

SEQ ID NO: 165566 - DNA, 33 bp, Homo sapien
ttgggcaacaaagtgagatgctatttcaaaaac

SEQ ID NO: 165567 - DNA, 33 bp, Homo sapien
gatgggagaagtattccgaaaaatgaaacaagt

SEQ ID NO: 165568 - DNA, 33 bp, Homo sapien
gatgggagaagtattctgaaaaatgaaacaagt

SEQ ID NO: 165569 - DNA, 33 bp, Homo sapien
ttcctaatacactccactatattgtgtttggtg

SEQ ID NO: 165570 - DNA, 33 bp, Homo sapien
ttcctaatacactccattatattgtgtttggtg

SEQ ID NO: 165571 - DNA, 33 bp, Homo sapien
gaaaattctagatagaagtgatataaagtgctt

SEQ ID NO: 165572 - DNA, 33 bp, Homo sapien
gaaaattctagatagaggtgatataaagtgctt

SEQ ID NO: 165573 - DNA, 33 bp, Homo sapien
tgcacccaactctgacccaggtcttctggattc

SEQ ID NO: 165574 - DNA, 33 bp, Homo sapien
tgcacccaactctgactcaggtcttctggattc

SEQ ID NO: 165575 - DNA, 33 bp, Homo sapien
aatatcgctcacattaacttttaatttattagt

SEQ ID NO: 165576 - DNA, 33 bp, Homo sapien
aatatcgctcacattatcttttaatttattagt

SEQ ID NO: 165577 - DNA, 33 bp, Homo sapien
cctaaaatgcataaaacgaagctgtaacacgac

SEQ ID NO: 165578 - DNA, 33 bp, Homo sapien
cctaaaatgcataaaatgaagctgtaacacgac

SEQ ID NO: 165579 - DNA, 33 bp, Homo sapien; identical to SEQ ID NO: 165577

SEQ ID NO: 165580 - DNA, 33 bp, Homo sapien; identical to SEQ ID NO: 165578

SEQ ID NO: 165581 - DNA, 33 bp, Homo sapien
tgtaccaaaagagacccgcttttgcccaaaatt

SEQ ID NO: 165582 - DNA, 33 bp, Homo sapien
tgtaccaaaagagacctgcttttgcccaaaatt

SEQ ID NO: 165583 - DNA, 33 bp, Homo sapien
atttcctggggtttcactcgtttgcatcaaata

SEQ ID NO: 165584 - DNA, 33 bp, Homo sapien
atttcctggggtttcattcgtttgcatcaaata

SEQ ID NO: 165585 - DNA, 33 bp, Homo sapien
ttttcacacgaattgaccccaaacagtattgat

SEQ ID NO: 165586 - DNA, 33 bp, Homo sapien
ttttcacacgaattgatcccaaacagtattgat

SEQ ID NO: 165587 - DNA, 33 bp, Homo sapien
aaaatggcagtttcatcatctataatatgctat

SEQ ID NO: 165588 - DNA, 33 bp, Homo sapien
aaaatggcagtttcatgatctataatatgctat

SEQ ID NO: 165589 - DNA, 33 bp, Homo sapien
aaagcaagaggaagtacgtgaaagagctctgca

SEQ ID NO: 165590 - DNA, 33 bp, Homo sapien
aaagcaagaggaagtatgtgaaagagctctgca

SEQ ID NO: 165591 - DNA, 33 bp, Homo sapien
tctagtaacaacagtgcagtctgtatcctcatt

SEQ ID NO: 165592 - DNA, 33 bp, Homo sapien
tctagtaacaacagtggagtctgtatcctcatt

SEQ ID NO: 165593 - DNA, 33 bp, Homo sapien
ctttttccaaagttacacgaaatgtcaagtaaa

SEQ ID NO: 165594 - DNA, 33 bp, Homo sapien
ctttttccaaagttacgcgaaatgtcaagtaaa

SEQ ID NO: 165595 - DNA, 33 bp, Homo sapien
tggctactttcggtaaaacctggccagaagaag

SEQ ID NO: 165596 - DNA, 33 bp, Homo sapien
tggctactttcggtaagacctggccagaagaag

SEQ ID NO: 165597 - DNA, 33 bp, Homo sapien
atccctgaattcagcaaggtaatttggggatag

SEQ ID NO: 165598 - DNA, 33 bp, Homo sapien
atccctgaattcagcatggtaatttggggatag

SEQ ID NO: 165599 - DNA, 33 bp, Homo sapien
tctgagaaaactttcacacttaagatggagaaa

SEQ ID NO: 165600 - DNA, 33 bp, Homo sapien
tctgagaaaactttcatacttaagatggagaaa

SEQ ID NO: 165601 - DNA, 33 bp, Homo sapien
ctattattttgactacactgaatataaatttat

SEQ ID NO: 165602 - DNA, 33 bp, Homo sapien
ctattattttgactactctgaatataaatttat

SEQ ID NO: 165603 - DNA, 33 bp, Homo sapien
ttcaaacatagtgttacgcttgggaacttgaga

SEQ ID NO: 165604 - DNA, 33 bp, Homo sapien
ttcaaacatagtgttatgcttgggaacttgaga

SEQ ID NO: 165605 - DNA, 33 bp, Homo sapien
gctaactgaattggaaatcatacagcctgttca

SEQ ID NO: 165606 - DNA, 33 bp, Homo sapien
gctaactgaattggaagtcatacagcctgttca

SEQ ID NO: 165607 - DNA, 33 bp, Homo sapien
gaaactgctcagtaaactgctattctcatgcat

SEQ ID NO: 165608 - DNA, 33 bp, Homo sapien
gaaactgctcagtaaattgctattctcatgcat

SEQ ID NO: 165609 - DNA, 33 bp, Homo sapien
gacttccttctaaagactacagtattaaaagag

SEQ ID NO: 165610 - DNA, 33 bp, Homo sapien
gacttccttctaaagagtacagtattaaaagag

SEQ ID NO: 165611 - DNA, 33 bp, Homo sapien
gtaattagagaatcaaattccagaaaggatcta

SEQ ID NO: 165612 - DNA, 33 bp, Homo sapien
gtaattagagaatcaagttccagaaaggatcta

SEQ ID NO: 165613 - DNA, 33 bp, Homo sapien
cccatcaaccggaaaacatataaacaaattgtg

SEQ ID NO: 165614 - DNA, 33 bp, Homo sapien
cccatcaaccggaaaatatataaacaaattgtg

SEQ ID NO: 165615 - DNA, 33 bp, Homo sapien
aaaatgtttgagtaaggctatttgctcacgagg

SEQ ID NO: 165616 - DNA, 33 bp, Homo sapien
aaaatgtttgagtaagtctatttgctcacgagg

SEQ ID NO: 165617 - DNA, 33 bp, Homo sapien
gcattctgtacctaaacatggtaacttgaaaaa

SEQ ID NO: 165618 - DNA, 33 bp, Homo sapien
gcattctgtacctaaatatggtaacttgaaaaa

SEQ ID NO: 165619 - DNA, 33 bp, Homo sapien
ctacttggcattacataaatgtttacgaggctc

SEQ ID NO: 165620 - DNA, 33 bp, Homo sapien
ctacttggcattacatgaatgtttacgaggctc

SEQ ID NO: 165621 - DNA, 33 bp, Homo sapien
cgtgcaaattctttaacctctttgtgcttcaat

SEQ ID NO: 165622 - DNA, 33 bp, Homo sapien
cgtgcaaattctttaatctctttgtgcttcaat

SEQ ID NO: 165623 - DNA, 33 bp, Homo sapien
ttatttgaatattgtgcattatctcagaagatg

SEQ ID NO: 165624 - DNA, 33 bp, Homo sapien
ttatttgaatattgtgtattatctcagaagatg

SEQ ID NO: 165625 - DNA, 33 bp, Homo sapien
tgttaagacttccaaccgaattttgaagttctt

SEQ ID NO: 165626 - DNA, 33 bp, Homo sapien
tgttaagacttccaactgaattttgaagttctt

SEQ ID NO: 165627 - DNA, 33 bp, Homo sapien
catagaaaaccaggtcaacttctaaggttttta

SEQ ID NO: 165628 - DNA, 33 bp, Homo sapien
catagaaaaccaggtcgacttctaaggttttta

SEQ ID NO: 165629 - DNA, 33 bp, Homo sapien
tgctactaggctagagaatggtaaacttgttct

SEQ ID NO: 165630 - DNA, 33 bp, Homo sapien
tgctactaggctagaggatggtaaacttgttct

SEQ ID NO: 165631 - DNA, 33 bp, Homo sapien
aatgccaggtattaaaagctggttatccatcca

SEQ ID NO: 165632 - DNA, 33 bp, Homo sapien
aatgccaggtattaaaggctggttatccatcca

SEQ ID NO: 165633 - DNA, 33 bp, Homo sapien
gaggatatgcattatcaatgactcgaattcaat

SEQ ID NO: 165634 - DNA, 33 bp, Homo sapien
gaggatatgcattatcgatgactcgaattcaat

SEQ ID NO: 165635 - DNA, 33 bp, Homo sapien
taggactgaaattataaactggagtcagattgc

SEQ ID NO: 165636 - DNA, 33 bp, Homo sapien
taggactgaaattatagactggagtcagattgc

SEQ ID NO: 165637 - DNA, 33 bp, Homo sapien
gattggaaataatgagactatgtgaatggagac

SEQ ID NO: 165638 - DNA, 33 bp, Homo sapien
gattggaaataatgagtctatgtgaatggagac

SEQ ID NO: 165639 - DNA, 33 bp, Homo sapien
aggaccagtggtaaaaacacctgcctgggagga

SEQ ID NO: 165640 - DNA, 33 bp, Homo sapien
aggaccagtggtaaaatcacctgcctgggagga

SEQ ID NO: 165641 - DNA, 33 bp, Homo sapien
ccctaacagtagcaaaagaaattgtattatagc

SEQ ID NO: 165642 - DNA, 33 bp, Homo sapien
ccctaacagtagcaaaggaaattgtattatagc

SEQ ID NO: 165643 - DNA, 33 bp, Homo sapien
tcctaaagtctctttaacctttcaaaatgttat

SEQ ID NO: 165644 - DNA, 33 bp, Homo sapien
tcctaaagtctctttagcctttcaaaatgttat

SEQ ID NO: 165645 - DNA, 33 bp, Homo sapien
actatccgtctgagtccagtcaaaccacaaaag

SEQ ID NO: 165646 - DNA, 33 bp, Homo sapien
actatccgtctgagtctagtcaaaccacaaaag

SEQ ID NO: 165647 - DNA, 33 bp, Homo sapien
tgaggcactcttaagcagaccaaagagatgggc

SEQ ID NO: 165648 - DNA, 33 bp, Homo sapien
tgaggcactcttaagcggaccaaagagatgggc

SEQ ID NO: 165649 - DNA, 33 bp, Homo sapien
ctctttgcctttaccactgcccatctctttggt

SEQ ID NO: 165650 - DNA, 33 bp, Homo sapien
ctctttgcctttaccattgcccatctctttggt

SEQ ID NO: 165651 - DNA, 33 bp, Homo sapien
tacaaccatgctattaagtgaaacctttttata

SEQ ID NO: 165652 - DNA, 33 bp, Homo sapien
tacaaccatgctattatgtgaaacctttttata

SEQ ID NO: 165653 - DNA, 33 bp, Homo sapien
ttcttttcattgagacacttattatctgcaact

SEQ ID NO: 165654 - DNA, 33 bp, Homo sapien
ttcttttcattgagacgcttattatctgcaact

SEQ ID NO: 165655 - DNA, 33 bp, Homo sapien
acaacaatcaattgtacatttggccttttcaca

SEQ ID NO: 165656 - DNA, 33 bp, Homo sapien
acaacaatcaattgtatatttggccttttcaca

SEQ ID NO: 165657 - DNA, 33 bp, Homo sapien
tttaaaaattcacaggaaagactgagaaaatgt

SEQ ID NO: 165658 - DNA, 33 bp, Homo sapien
tttaaaaattcacagggaagactgagaaaatgt

SEQ ID NO: 165659 - DNA, 33 bp, Homo sapien
aaaagggtttaaagacaatgtaatggagaaaag

SEQ ID NO: 165660 - DNA, 33 bp, Homo sapien
aaaagggtttaaagacgatgtaatggagaaaag

SEQ ID NO: 165661 - DNA, 33 bp, Homo sapien
tcaacaaatagtgctgcaaaattactacttttg

SEQ ID NO: 165662 - DNA, 33 bp, Homo sapien
tcaacaaatagtgctggaaaattactacttttg

SEQ ID NO: 165663 - DNA, 33 bp, Homo sapien
ctttctaaatatccaaactttcatctgttcatt

SEQ ID NO: 165664 - DNA, 33 bp, Homo sapien
ctttctaaatatccaagctttcatctgttcatt

SEQ ID NO: 165665 - DNA, 33 bp, Homo sapien
tcagtcaaaattggcaaacccctctagggaaca

SEQ ID NO: 165666 - DNA, 33 bp, Homo sapien
tcagtcaaaattggcagacccctctagggaaca

SEQ ID NO: 165667 - DNA, 33 bp, Homo sapien
taaccactttgaaatacggcctaaatttaatca

SEQ ID NO: 165668 - DNA, 33 bp, Homo sapien
taaccactttgaaatatggcctaaatttaatca

SEQ ID NO: 165669 - DNA, 33 bp, Homo sapien
aaaagctatttagccacggaattcaatcttcat

SEQ ID NO: 165670 - DNA, 33 bp, Homo sapien
aaaagctatttagccatggaattcaatcttcat

SEQ ID NO: 165671 - DNA, 33 bp, Homo sapien
ttgcatttctcacattcaacattttacagtaca

SEQ ID NO: 165672 - DNA, 33 bp, Homo sapien
ttgcatttctcacatttaacattttacagtaca

SEQ ID NO: 165673 - DNA, 33 bp, Homo sapien
atattaaatgtttaaacagtcaaaatatgagga

SEQ ID NO: 165674 - DNA, 33 bp, Homo sapien
atattaaatgtttaaagagtcaaaatatgagga

SEQ ID NO: 165675 - DNA, 33 bp, Homo sapien
tttctttataactgaaacatcactgtattaatg

SEQ ID NO: 165676 - DNA, 33 bp, Homo sapien
tttctttataactgaagcatcactgtattaatg

SEQ ID NO: 165677 - DNA, 33 bp, Homo sapien
ttccatatgatggaaaatgtagccctagaccca

SEQ ID NO: 165678 - DNA, 33 bp, Homo sapien
ttccatatgatggaaattgtagccctagaccca

SEQ ID NO: 165679 - DNA, 33 bp, Homo sapien
ccagaaataaaggatcaatgccaatagaatgag

SEQ ID NO: 165680 - DNA, 33 bp, Homo sapien
ccagaaataaaggatcgatgccaatagaatgag

SEQ ID NO: 165681 - DNA, 33 bp, Homo sapien
ttaaagtaatgaggtcaccagtattttttaata

SEQ ID NO: 165682 - DNA, 33 bp, Homo sapien
ttaaagtaatgaggtcgccagtattttttaata

SEQ ID NO: 165683 - DNA, 33 bp, Homo sapien
aacccaaggctctaaccggagtggagcatatta

SEQ ID NO: 165684 - DNA, 33 bp, Homo sapien
aacccaaggctctaactggagtggagcatatta

SEQ ID NO: 165685 - DNA, 33 bp, Homo sapien
gcagtgcttcttctggcataacattcccccatt

SEQ ID NO: 165686 - DNA, 33 bp, Homo sapien
gcagtgcttcttctggtataacattcccccatt

SEQ ID NO: 165687 - DNA, 33 bp, Homo sapien
catgctgttcataacacgtctgtcataaagaaa

SEQ ID NO: 165688 - DNA, 33 bp, Homo sapien
catgctgttcataacatgtctgtcataaagaaa

SEQ ID NO: 165689 - DNA, 33 bp, Homo sapien
acaatactctaaatacacttataacctgaaatg

SEQ ID NO: 165690 - DNA, 33 bp, Homo sapien
acaatactctaaatactcttataacctgaaatg

SEQ ID NO: 165691 - DNA, 33 bp, Homo sapien
cagtcattagaatacccgcaaatttttatctct

SEQ ID NO: 165692 - DNA, 33 bp, Homo sapien
cagtcattagaatacctgcaaatttttatctct

SEQ ID NO: 165693 - DNA, 33 bp, Homo sapien
tgtgatagggctactgaaaggaaaatctgtggt

SEQ ID NO: 165694 - DNA, 33 bp, Homo sapien
tgtgatagggctactggaaggaaaatctgtggt

SEQ ID NO: 165695 - DNA, 33 bp, Homo sapien
gggaacaccatatgaagacacaaagacaaagag

SEQ ID NO: 165696 - DNA, 33 bp, Homo sapien
gggaacaccatatgaatacacaaagacaaagag

SEQ ID NO: 165697 - DNA, 33 bp, Homo sapien
ggaaagttaaggaagacagaggaccaagtttaa

SEQ ID NO: 165698 - DNA, 33 bp, Homo sapien
ggaaagttaaggaagagagaggaccaagtttaa

SEQ ID NO: 165699 - DNA, 33 bp, Homo sapien
agcagttttattcagacagccggaaaaatgaga

SEQ ID NO: 165700 - DNA, 33 bp, Homo sapien
agcagttttattcagagagccggaaaaatgaga

SEQ ID NO: 165701 - DNA, 33 bp, Homo sapien
gtggagataaacctcaataattcaatgttactt

SEQ ID NO: 165702 - DNA, 33 bp, Homo sapien
gtggagataaacctcagtaattcaatgttactt

SEQ ID NO: 165703 - DNA, 33 bp, Homo sapien
attgaataataaatgcacattgtatgtctgggt

SEQ ID NO: 165704 - DNA, 33 bp, Homo sapien
attgaataataaatgctcattgtatgtctgggt

SEQ ID NO: 165705 - DNA, 33 bp, Homo sapien
acttttacaattccccactgtccaaaggctcat

SEQ ID NO: 165706 - DNA, 33 bp, Homo sapien
acttttacaattccccgctgtccaaaggctcat

SEQ ID NO: 165707 - DNA, 33 bp, Homo sapien
taacattttgacatacaacataaaaggtaaaat

SEQ ID NO: 165708 - DNA, 33 bp, Homo sapien
taacattttgacatacgacataaaaggtaaaat

SEQ ID NO: 165709 - DNA, 33 bp, Homo sapien
tatttatttcataagcaagagaagtctagatgt

SEQ ID NO: 165710 - DNA, 33 bp, Homo sapien
tatttatttcataagcgagagaagtctagatgt

SEQ ID NO: 165711 - DNA, 33 bp, Homo sapien
ttcttcagctacccaccactcacccactgactc

SEQ ID NO: 165712 - DNA, 33 bp, Homo sapien
ttcttcagctacccacgactcacccactgactc

SEQ ID NO: 165713 - DNA, 33 bp, Homo sapien
acactccaccccctagaccaacggtgtcctctg

SEQ ID NO: 165714 - DNA, 33 bp, Homo sapien
acactccaccccctaggccaacggtgtcctctg

SEQ ID NO: 165715 - DNA, 33 bp, Homo sapien
cctgctctgtcatttcaatcatagtttaacatg

SEQ ID NO: 165716 - DNA, 33 bp, Homo sapien
cctgctctgtcatttcgatcatagtttaacatg

SEQ ID NO: 165717 - DNA, 33 bp, Homo sapien
tgatcactatccatacggctctaagttcagacc

SEQ ID NO: 165718 - DNA, 33 bp, Homo sapien
tgatcactatccatactgctctaagttcagacc

SEQ ID NO: 165719 - DNA, 33 bp, Homo sapien
gaactgggagtaccaccaggtagtcgacttggc

SEQ ID NO: 165720 - DNA, 33 bp, Homo sapien
gaactgggagtaccactaggtagtcgacttggc

SEQ ID NO: 165721 - DNA, 33 bp, Homo sapien
taacgcaattcttgtcaaatctcagcaagtatt

SEQ ID NO: 165722 - DNA, 33 bp, Homo sapien
taacgcaattcttgtctaatctcagcaagtatt

SEQ ID NO: 165723 - DNA, 33 bp, Homo sapien
ctcatttgaccctatcaccaaaggcagtcatat

SEQ ID NO: 165724 - DNA, 33 bp, Homo sapien
ctcatttgaccctatcgccaaaggcagtcatat

SEQ ID NO: 165725 - DNA, 33 bp, Homo sapien
actttgtcccaagctacagtctgttcttagatt

SEQ ID NO: 165726 - DNA, 33 bp, Homo sapien
actttgtcccaagctatagtctgttcttagatt

SEQ ID NO: 165727 - DNA, 33 bp, Homo sapien
tgggctttatccaatcaaggacccgaataaaac

SEQ ID NO: 165728 - DNA, 33 bp, Homo sapien
tgggctttatccaatcgaggacccgaataaaac

SEQ ID NO: 165729 - DNA, 33 bp, Homo sapien
attgcccttcctaacacgagtgggctttatcca

SEQ ID NO: 165730 - DNA, 33 bp, Homo sapien
attgcccttcctaacatgagtgggctttatcca

SEQ ID NO: 165731 - DNA, 33 bp, Homo sapien
ttggtcatcccttgaacgcattggcttagttat

SEQ ID NO: 165732 - DNA, 33 bp, Homo sapien
ttggtcatcccttgaaggcattggcttagttat

SEQ ID NO: 165733 - DNA, 33 bp, Homo sapien
caagggatgaccaatccattcccgaacaaccat

SEQ ID NO: 165734 - DNA, 33 bp, Homo sapien
caagggatgaccaatctattcccgaacaaccat

SEQ ID NO: 165735 - DNA, 33 bp, Homo sapien
ggagtacatgtggcacaaaaggaaaagtctagg

SEQ ID NO: 165736 - DNA, 33 bp, Homo sapien
ggagtacatgtggcactaaaggaaaagtctagg

SEQ ID NO: 165737 - DNA, 33 bp, Homo sapien
acgacatccttattccaagtttctttaatataa

SEQ ID NO: 165738 - DNA, 33 bp, Homo sapien
acgacatccttattcccagtttctttaatataa

SEQ ID NO: 165739 - DNA, 33 bp, Homo sapien
tttacacttctaccaacagtatatatgtgtttc

SEQ ID NO: 165740 - DNA, 33 bp, Homo sapien
tttacacttctaccaagagtatatatgtgtttc

SEQ ID NO: 165741 - DNA, 33 bp, Homo sapien
gatggttaaatgtgggacaaaacattagaatta

SEQ ID NO: 165742 - DNA, 33 bp, Homo sapien
gatggttaaatgtggggcaaaacattagaatta

SEQ ID NO: 165743 - DNA, 33 bp, Homo sapien
cagtagcaccttataacgttgaggtttcaggtt

SEQ ID NO: 165744 - DNA, 33 bp, Homo sapien
cagtagcaccttataatgttgaggtttcaggtt

SEQ ID NO: 165745 - DNA, 33 bp, Homo sapien
catggccatgatcaaacctcaatgagcctcagc

SEQ ID NO: 165746 - DNA, 33 bp, Homo sapien
catggccatgatcaaatctcaatgagcctcagc

SEQ ID NO: 165747 - DNA, 33 bp, Homo sapien
agctgtccatgagtataacgagattcttctgtg

SEQ ID NO: 165748 - DNA, 33 bp, Homo sapien
agctgtccatgagtattacgagattcttctgtg

SEQ ID NO: 165749 - DNA, 33 bp, Homo sapien
atttagagttcaacagaccaaacagtgtatttt

SEQ ID NO: 165750 - DNA, 33 bp, Homo sapien
atttagagttcaacagtccaaacagtgtatttt

SEQ ID NO: 165751 - DNA, 33 bp, Homo sapien
tatggtcaataatttacgtgttggaaagatatc

SEQ ID NO: 165752 - DNA, 33 bp, Homo sapien
tatggtcaataatttaggtgttggaaagatatc

SEQ ID NO: 165753 - DNA, 33 bp, Homo sapien
cgtgttttggcaatgggaatcgaaaaatgagat

SEQ ID NO: 165754 - DNA, 33 bp, Homo sapien
cgtgttttggcaatggtaatcgaaaaatgagat

SEQ ID NO: 165755 - DNA, 33 bp, Homo sapien
ccttcccacgggacaaatcttctctttgtatgt

SEQ ID NO: 165756 - DNA, 33 bp, Homo sapien
ccttcccacgggacaagtcttctctttgtatgt

SEQ ID NO: 165757 - DNA, 33 bp, Homo sapien
tgggtgtcccatcgaaaagagctaaggcattaa

SEQ ID NO: 165758 - DNA, 33 bp, Homo sapien
tgggtgtcccatcgaacagagctaaggcattaa

SEQ ID NO: 165759 - DNA, 33 bp, Homo sapien
tagtgtttcctactaacgataggattcaacaaa

SEQ ID NO: 165760 - DNA, 33 bp, Homo sapien
tagtgtttcctactaatgataggattcaacaaa

SEQ ID NO: 165761 - DNA, 33 bp, Homo sapien
gcttcctaggcctccactgagaaatcttcttga

SEQ ID NO: 165762 - DNA, 33 bp, Homo sapien
gcttcctaggcctccattgagaaatcttcttga

SEQ ID NO: 165763 - DNA, 33 bp, Homo sapien
aaagagtttcctttcccagatccttatggctcc

SEQ ID NO: 165764 - DNA, 33 bp, Homo sapien
aaagagtttcctttcctagatccttatggctcc

SEQ ID NO: 165765 - DNA, 33 bp, Homo sapien
attgaattacaggaaaagcagttaatgtctgca

SEQ ID NO: 165766 - DNA, 33 bp, Homo sapien
attgaattacaggaaaggcagttaatgtctgca

SEQ ID NO: 165767 - DNA, 33 bp, Homo sapien
taaggctagtggtaataaaattgtggcaagaag

SEQ ID NO: 165768 - DNA, 33 bp, Homo sapien
taaggctagtggtaatcaaattgtggcaagaag

SEQ ID NO: 165769 - DNA, 33 bp, Homo sapien
tgttcttagttgttcaaatatccacattgaaat

SEQ ID NO: 165770 - DNA, 33 bp, Homo sapien
tgttcttagttgttcagatatccacattgaaat

SEQ ID NO: 165771 - DNA, 33 bp, Homo sapien
tcttccatctacaattcaatgcctttcccatct

SEQ ID NO: 165772 - DNA, 33 bp, Homo sapien
tcttccatctacaatttaatgcctttcccatct

SEQ ID NO: 165773 - DNA, 33 bp, Homo sapien
tgagcccataaaagccacagaatcagccacgct

SEQ ID NO: 165774 - DNA, 33 bp, Homo sapien
tgagcccataaaagccgcagaatcagccacgct

SEQ ID NO: 165775 - DNA, 33 bp, Homo sapien
tggatggatggatgaaagggaattcactggggg

SEQ ID NO: 165776 - DNA, 33 bp, Homo sapien
tggatggatggatgaacgggaattcactggggg

SEQ ID NO: 165777 - DNA, 33 bp, Homo sapien
attacagccagtgttacagcctataaatatctc

SEQ ID NO: 165778 - DNA, 33 bp, Homo sapien
attacagccagtgttagagcctataaatatctc

SEQ ID NO: 165779 - DNA, 33 bp, Homo sapien
tctcttcccttttggcacgatttcctctgattg

SEQ ID NO: 165780 - DNA, 33 bp, Homo sapien
tctcttcccttttggcgcgatttcctctgattg

SEQ ID NO: 165781 - DNA, 33 bp, Homo sapien
gcaagaagaaagaaaccaggctattagaagaca

SEQ ID NO: 165782 - DNA, 33 bp, Homo sapien
gcaagaagaaagaaacgaggctattagaagaca

SEQ ID NO: 165783 - DNA, 33 bp, Homo sapien
tttgtcaccactggaaatgaaagaatacaaagt

SEQ ID NO: 165784 - DNA, 33 bp, Homo sapien
tttgtcaccactggaagtgaaagaatacaaagt

SEQ ID NO: 165785 - DNA, 33 bp, Homo sapien
tttgtggcctagtcaagatttgtgaagagttgc

SEQ ID NO: 165786 - DNA, 33 bp, Homo sapien
tttgtggcctagtcaatatttgtgaagagttgc

SEQ ID NO: 165787 - DNA, 33 bp, Homo sapien
tagcttttactacgaaacattgttttgcaggtt

SEQ ID NO: 165788 - DNA, 33 bp, Homo sapien
tagcttttactacgaagcattgttttgcaggtt

SEQ ID NO: 165789 - DNA, 33 bp, Homo sapien
ctctttgtcttagaaactaggcatcatggtgtg

SEQ ID NO: 165790 - DNA, 33 bp, Homo sapien
ctctttgtcttagaaattaggcatcatggtgtg

SEQ ID NO: 165791 - DNA, 33 bp, Homo sapien
ccttgaagaaattcaaggattgtctctcaatac

SEQ ID NO: 165792 - DNA, 33 bp, Homo sapien
ccttgaagaaattcaatgattgtctctcaatac

SEQ ID NO: 165793 - DNA, 33 bp, Homo sapien
ggattaatacaggtggaacacagcttcaaaaat

SEQ ID NO: 165794 - DNA, 33 bp, Homo sapien
ggattaatacaggtgggacacagcttcaaaaat

SEQ ID NO: 165795 - DNA, 33 bp, Homo sapien
tcaatattttcttcaacggcaaatgcaagttta

SEQ ID NO: 165796 - DNA, 33 bp, Homo sapien
tcaatattttcttcaatggcaaatgcaagttta

SEQ ID NO: 165797 - DNA, 33 bp, Homo sapien
gagaaaaggtccacaaataagaggaatttcaca

SEQ ID NO: 165798 - DNA, 33 bp, Homo sapien
gagaaaaggtccacaagtaagaggaatttcaca

SEQ ID NO: 165799 - DNA, 33 bp, Homo sapien
tgaggaatttaacaatgaataaagcagcaggtt

SEQ ID NO: 165800 - DNA, 33 bp, Homo sapien
tgaggaatttaacaattaataaagcagcaggtt

SEQ ID NO: 165801 - DNA, 33 bp, Homo sapien
tgacaaattttatgagacacgtaggtattcaag

SEQ ID NO: 165802 - DNA, 33 bp, Homo sapien
tgacaaattttatgaggcacgtaggtattcaag

SEQ ID NO: 165803 - DNA, 33 bp, Homo sapien
gcctaggtagtttctacatattttagctattcc

SEQ ID NO: 165804 - DNA, 33 bp, Homo sapien
gcctaggtagtttctatatattttagctattcc

SEQ ID NO: 165805 - DNA, 33 bp, Homo sapien
ccataccagtgtgctacagaaatgtaaatgtgg

SEQ ID NO: 165806 - DNA, 33 bp, Homo sapien
ccataccagtgtgctatagaaatgtaaatgtgg

SEQ ID NO: 165807 - DNA, 33 bp, Homo sapien
ttgggcttcctggtaacaaagcatctctatggg

SEQ ID NO: 165808 - DNA, 33 bp, Homo sapien
ttgggcttcctggtaataaagcatctctatggg

SEQ ID NO: 165809 - DNA, 33 bp, Homo sapien
ttcagtgcaaagacacaagagaactataatgag

SEQ ID NO: 165810 - DNA, 33 bp, Homo sapien
ttcagtgcaaagacaccagagaactataatgag

SEQ ID NO: 165811 - DNA, 33 bp, Homo sapien
taatgtccgtctggaaagaccatttaaattcca

SEQ ID NO: 165812 - DNA, 33 bp, Homo sapien
taatgtccgtctggaaggaccatttaaattcca

SEQ ID NO: 165813 - DNA, 33 bp, Homo sapien
aagttaatctctgttccctatccaatcattcta

SEQ ID NO: 165814 - DNA, 33 bp, Homo sapien
aagttaatctctgttctctatccaatcattcta

SEQ ID NO: 165815 - DNA, 33 bp, Homo sapien
tcccaatgagttacccagactttgacaccattt

SEQ ID NO: 165816 - DNA, 33 bp, Homo sapien
tcccaatgagttacccggactttgacaccattt

SEQ ID NO: 165817 - DNA, 33 bp, Homo sapien
gaccacaatgatcaaaccaaagtctggcactaa

SEQ ID NO: 165818 - DNA, 33 bp, Homo sapien
gaccacaatgatcaaagcaaagtctggcactaa

SEQ ID NO: 165819 - DNA, 33 bp, Homo sapien
atgtgatacctgcaaaaagccatttctgttggg

SEQ ID NO: 165820 - DNA, 33 bp, Homo sapien
atgtgatacctgcaaagagccatttctgttggg

SEQ ID NO: 165821 - DNA, 33 bp, Homo sapien
agtccgataacggaccagcttttactagtcaaa

SEQ ID NO: 165822 - DNA, 33 bp, Homo sapien
agtccgataacggaccggcttttactagtcaaa

SEQ ID NO: 165823 - DNA, 33 bp, Homo sapien
aagtaacatcttctgaaataaggcttcattata

SEQ ID NO: 165824 - DNA, 33 bp, Homo sapien
aagtaacatcttctgagataaggcttcattata

SEQ ID NO: 165825 - DNA, 33 bp, Homo sapien
aattgttgaaatgacaaaagaggctttacaata

SEQ ID NO: 165826 - DNA, 33 bp, Homo sapien
aattgttgaaatgacagaagaggctttacaata

SEQ ID NO: 165827 - DNA, 33 bp, Homo sapien
agattccacctcaaaaaaccactttctttgctc

SEQ ID NO: 165828 - DNA, 33 bp, Homo sapien
agattccacctcaaaagaccactttctttgctc

SEQ ID NO: 165829 - DNA, 33 bp, Homo sapien
ctagaagccctcaaaggattattaattggccta

SEQ ID NO: 165830 - DNA, 33 bp, Homo sapien
ctagaagccctcaaagtattattaattggccta

SEQ ID NO: 165831 - DNA, 33 bp, Homo sapien
tatttatccacttaacagatatttattgaatgg

SEQ ID NO: 165832 - DNA, 33 bp, Homo sapien
tatttatccacttaacggatatttattgaatgg

SEQ ID NO: 165833 - DNA, 33 bp, Homo sapien
ttaaaaactactatgagctgtgttttatattag

SEQ ID NO: 165834 - DNA, 33 bp, Homo sapien
ttaaaaactactatgatctgtgttttatattag

SEQ ID NO: 165835 - DNA, 33 bp, Homo sapien
taaagcacttagaagacgggaatagagtgtggg

SEQ ID NO: 165836 - DNA, 33 bp, Homo sapien
taaagcacttagaagatgggaatagagtgtggg

SEQ ID NO: 165837 - DNA, 33 bp, Homo sapien
aattcttctaggtagacgatattggcctgaaat

SEQ ID NO: 165838 - DNA, 33 bp, Homo sapien
aattcttctaggtagatgatattggcctgaaat

SEQ ID NO: 165839 - DNA, 33 bp, Homo sapien
aatattactctcgtcaacaagataagttatcac

SEQ ID NO: 165840 - DNA, 33 bp, Homo sapien
aatattactctcgtcagcaagataagttatcac

SEQ ID NO: 165841 - DNA, 33 bp, Homo sapien
gcttttgcttcaaaacagaaagtgctaacaatt

SEQ ID NO: 165842 - DNA, 33 bp, Homo sapien
gcttttgcttcaaaacggaaagtgctaacaatt

SEQ ID NO: 165843 - DNA, 33 bp, Homo sapien
atacatagagataggacgaagatggcagatcgg

SEQ ID NO: 165844 - DNA, 33 bp, Homo sapien
atacatagagataggatgaagatggcagatcgg

SEQ ID NO: 165845 - DNA, 33 bp, Homo sapien
actcacatatcaaaacagagtgattggtctttg

SEQ ID NO: 165846 - DNA, 33 bp, Homo sapien
actcacatatcaaaacggagtgattggtctttg

SEQ ID NO: 165847 - DNA, 33 bp, Homo sapien
gtaaaaaacatcaggacaacaaagtggaattca

SEQ ID NO: 165848 - DNA, 33 bp, Homo sapien
gtaaaaaacatcaggataacaaagtggaattca

SEQ ID NO: 165849 - DNA, 33 bp, Homo sapien
agttagatttggaataacacacattaatctaaa

SEQ ID NO: 165850 - DNA, 33 bp, Homo sapien
agttagatttggaatatcacacattaatctaaa

SEQ ID NO: 165851 - DNA, 33 bp, Homo sapien
acaatgtgtacaacaacaaacaataaaatttgt

SEQ ID NO: 165852 - DNA, 33 bp, Homo sapien
acaatgtgtacaacaagaaacaataaaatttgt

SEQ ID NO: 165853 - DNA, 33 bp, Homo sapien
gctgtaactgcagatacagatagtggaaagaat

SEQ ID NO: 165854 - DNA, 33 bp, Homo sapien
gctgtaactgcagatatagatagtggaaagaat

SEQ ID NO: 165855 - DNA, 33 bp, Homo sapien
gggagatgtttaaatgcataacctccagtgaac

SEQ ID NO: 165856 - DNA, 33 bp, Homo sapien
gggagatgtttaaatgtataacctccagtgaac

SEQ ID NO: 165857 - DNA, 33 bp, Homo sapien
aatgttttatctgtcccgacctctctctatatc

SEQ ID NO: 165858 - DNA, 33 bp, Homo sapien
aatgttttatctgtcctgacctctctctatatc

SEQ ID NO: 165859 - DNA, 33 bp, Homo sapien
ttaatgtagaattagcaatgtaaatgttcaagc

SEQ ID NO: 165860 - DNA, 33 bp, Homo sapien
ttaatgtagaattagctatgtaaatgttcaagc

SEQ ID NO: 165861 - DNA, 33 bp, Homo sapien
cagaagatatcaactgaatgagtcacacatccc

SEQ ID NO: 165862 - DNA, 33 bp, Homo sapien
cagaagatatcaactgcatgagtcacacatccc

SEQ ID NO: 165863 - DNA, 33 bp, Homo sapien
agcaagagatgtagaaaggtgctattaaatgag

SEQ ID NO: 165864 - DNA, 33 bp, Homo sapien
agcaagagatgtagaagggtgctattaaatgag

SEQ ID NO: 165865 - DNA, 33 bp, Homo sapien
ctgttttccttaatcaactctaagctgactgag

SEQ ID NO: 165866 - DNA, 33 bp, Homo sapien
ctgttttccttaatcacctctaagctgactgag

SEQ ID NO: 165867 - DNA, 33 bp, Homo sapien
tcataaaataaaattgaagagatgctcccaaaa

SEQ ID NO: 165868 - DNA, 33 bp, Homo sapien
tcataaaataaaattggagagatgctcccaaaa

SEQ ID NO: 165869 - DNA, 33 bp, Homo sapien
aaaaagccaagtagagcaaaccgaagccaagct

SEQ ID NO: 165870 - DNA, 33 bp, Homo sapien
aaaaagccaagtagaggaaaccgaagccaagct

SEQ ID NO: 165871 - DNA, 33 bp, Homo sapien
tctggccacaggcacccgcaatctcaatctgtt

SEQ ID NO: 165872 - DNA, 33 bp, Homo sapien
tctggccacaggcaccggcaatctcaatctgtt

SEQ ID NO: 165873 - DNA, 33 bp, Homo sapien
gttttaagaaaatataagtgacaggatgaaatg

SEQ ID NO: 165874 - DNA, 33 bp, Homo sapien
gttttaagaaaatatacgtgacaggatgaaatg

SEQ ID NO: 165875 - DNA, 33 bp, Homo sapien
ttaccaccatattgtcaaagagaaaatcgaagc

SEQ ID NO: 165876 - DNA, 33 bp, Homo sapien
ttaccaccatattgtccaagagaaaatcgaagc

SEQ ID NO: 165877 - DNA, 33 bp, Homo sapien
gagatagctgctttcccctcactctttccattg

SEQ ID NO: 165878 - DNA, 33 bp, Homo sapien
gagatagctgctttccgctcactctttccattg

SEQ ID NO: 165879 - DNA, 33 bp, Homo sapien
acttatttatgtgatacgattgtcatttgttct

SEQ ID NO: 165880 - DNA, 33 bp, Homo sapien
acttatttatgtgatatgattgtcatttgttct

SEQ ID NO: 165881 - DNA, 33 bp, Homo sapien
caagtcatttcacataacactacaaggcaaaga

SEQ ID NO: 165882 - DNA, 33 bp, Homo sapien
caagtcatttcacatagcactacaaggcaaaga

SEQ ID NO: 165883 - DNA, 33 bp, Homo sapien
gcatcccaatgtaaaactgaacaatgaatactg

SEQ ID NO: 165884 - DNA, 33 bp, Homo sapien
gcatcccaatgtaaaattgaacaatgaatactg

SEQ ID NO: 165885 - DNA, 33 bp, Homo sapien
atgtacttagtcaaaccaattgtatgcctgaac

SEQ ID NO: 165886 - DNA, 33 bp, Homo sapien
atgtacttagtcaaacgaattgtatgcctgaac

SEQ ID NO: 165887 - DNA, 33 bp, Homo sapien
atctattctctctttgaacctactgcatggtta

SEQ ID NO: 165888 - DNA, 33 bp, Homo sapien
atctattctctctttgcacctactgcatggtta

SEQ ID NO: 165889 - DNA, 33 bp, Homo sapien
aacaggattttatatgcatcactttggttttca

SEQ ID NO: 165890 - DNA, 33 bp, Homo sapien
aacaggattttatatggatcactttggttttca

SEQ ID NO: 165891 - DNA, 33 bp, Homo sapien
gaacttataagaacaaaatgttgcacttctaag

SEQ ID NO: 165892 - DNA, 33 bp, Homo sapien
gaacttataagaacaatatgttgcacttctaag

SEQ ID NO: 165893 - DNA, 33 bp, Homo sapien
aatttgctggagttcaccgtagagtctggatat

SEQ ID NO: 165894 - DNA, 33 bp, Homo sapien
aatttgctggagttcatcgtagagtctggatat

SEQ ID NO: 165895 - DNA, 33 bp, Homo sapien
tttgtgatgctacaacaaaaacccacagctgag

SEQ ID NO: 165896 - DNA, 33 bp, Homo sapien
tttgtgatgctacaacgaaaacccacagctgag

SEQ ID NO: 165897 - DNA, 33 bp, Homo sapien
cataaactgtttgaagaatgttttttcacacat

SEQ ID NO: 165898 - DNA, 33 bp, Homo sapien
cataaactgtttgaagtatgttttttcacacat

SEQ ID NO: 165899 - DNA, 33 bp, Homo sapien
agtgttctgaaattacaaaattatgcatgatac

SEQ ID NO: 165900 - DNA, 33 bp, Homo sapien
agtgttctgaaattacgaaattatgcatgatac

SEQ ID NO: 165901 - DNA, 33 bp, Homo sapien
tgtgtaggctaatgacacctggagtgtgactgg

SEQ ID NO: 165902 - DNA, 33 bp, Homo sapien
tgtgtaggctaatgactcctggagtgtgactgg

SEQ ID NO: 165903 - DNA, 33 bp, Homo sapien
caaattttatgcaccaatccgtttttattcttt

SEQ ID NO: 165904 - DNA, 33 bp, Homo sapien
caaattttatgcaccagtccgtttttattcttt

SEQ ID NO: 165905 - DNA, 33 bp, Homo sapien
acatgggtcatcaaaaattattgctacactagt

SEQ ID NO: 165906 - DNA, 33 bp, Homo sapien
acatgggtcatcaaaagttattgctacactagt

SEQ ID NO: 165907 - DNA, 33 bp, Homo sapien
ctaaaaagagaactaccatgttatgcagcaatt

SEQ ID NO: 165908 - DNA, 33 bp, Homo sapien
ctaaaaagagaactactatgttatgcagcaatt

SEQ ID NO: 165909 - DNA, 33 bp, Homo sapien
ttgtacagattatttcaccatccaggtatcaag

SEQ ID NO: 165910 - DNA, 33 bp, Homo sapien
ttgtacagattatttccccatccaggtatcaag

SEQ ID NO: 165911 - DNA, 33 bp, Homo sapien
tgaaactaggctctcaatatcaagaaatattgt

SEQ ID NO: 165912 - DNA, 33 bp, Homo sapien
tgaaactaggctctcagtatcaagaaatattgt

SEQ ID NO: 165913 - DNA, 33 bp, Homo sapien
tatagaaatactgatgcagtgagagaacagtca

SEQ ID NO: 165914 - DNA, 33 bp, Homo sapien
tatagaaatactgatgtagtgagagaacagtca

SEQ ID NO: 165915 - DNA, 33 bp, Homo sapien
tgtataatttgacaaactcattcaaaagctcca

SEQ ID NO: 165916 - DNA, 33 bp, Homo sapien
tgtataatttgacaaattcattcaaaagctcca

SEQ ID NO: 165917 - DNA, 33 bp, Homo sapien
gcaggaacataaatacagatgactatttactgg

SEQ ID NO: 165918 - DNA, 33 bp, Homo sapien
gcaggaacataaatacggatgactatttactgg

SEQ ID NO: 165919 - DNA, 33 bp, Homo sapien
ttgcagctccaatgccaatcagcataacaactg

SEQ ID NO: 165920 - DNA, 33 bp, Homo sapien
ttgcagctccaatgccgatcagcataacaactg

SEQ ID NO: 165921 - DNA, 33 bp, Homo sapien
atgccattttgatttcgagttgtcttgaagcag

SEQ ID NO: 165922 - DNA, 33 bp, Homo sapien
atgccattttgatttctagttgtcttgaagcag

SEQ ID NO: 165923 - DNA, 33 bp, Homo sapien
actggataatagtactcagaattgtctgtcata

SEQ ID NO: 165924 - DNA, 33 bp, Homo sapien
actggataatagtactgagaattgtctgtcata

SEQ ID NO: 165925 - DNA, 33 bp, Homo sapien
cacattgctttcctcaatcatcattgcttttca

SEQ ID NO: 165926 - DNA, 33 bp, Homo sapien
cacattgctttcctcagtcatcattgcttttca

SEQ ID NO: 165927 - DNA, 33 bp, Homo sapien
cttagatattttaaaccaaggcaaacaaaatta

SEQ ID NO: 165928 - DNA, 33 bp, Homo sapien
cttagatattttaaacgaaggcaaacaaaatta

SEQ ID NO: 165929 - DNA, 33 bp, Homo sapien
tccttgcattccaaaactaagctatcaatccaa

SEQ ID NO: 165930 - DNA, 33 bp, Homo sapien
tccttgcattccaaaattaagctatcaatccaa

SEQ ID NO: 165931 - DNA, 33 bp, Homo sapien
gtacacctttcagccaccatagtactaattttg

SEQ ID NO: 165932 - DNA, 33 bp, Homo sapien
gtacacctttcagccatcatagtactaattttg

SEQ ID NO: 165933 - DNA, 33 bp, Homo sapien
ttttgcctatagaaccagctctgttgaaactgc

SEQ ID NO: 165934 - DNA, 33 bp, Homo sapien
ttttgcctatagaaccggctctgttgaaactgc

SEQ ID NO: 165935 - DNA, 33 bp, Homo sapien
attgcaatagcttcctaaatagtctaccttctc

SEQ ID NO: 165936 - DNA, 33 bp, Homo sapien
attgcaatagcttcctgaatagtctaccttctc

SEQ ID NO: 165937 - DNA, 33 bp, Homo sapien
aagccagatacacgagacaattatttaaattct

SEQ ID NO: 165938 - DNA, 33 bp, Homo sapien
aagccagatacacgaggcaattatttaaattct

SEQ ID NO: 165939 - DNA, 33 bp, Homo sapien
aaagaaagatggcgtacataattaccgtttatt

SEQ ID NO: 165940 - DNA, 33 bp, Homo sapien
aaagaaagatggcgtatataattaccgtttatt

SEQ ID NO: 165941 - DNA, 33 bp, Homo sapien
tatacatataggcttacaaatgtaagagggtag

SEQ ID NO: 165942 - DNA, 33 bp, Homo sapien
tatacatataggcttataaatgtaagagggtag

SEQ ID NO: 165943 - DNA, 33 bp, Homo sapien
gaatagaataaaatgacgctgattagttttctt

SEQ ID NO: 165944 - DNA, 33 bp, Homo sapien
gaatagaataaaatgatgctgattagttttctt

SEQ ID NO: 165945 - DNA, 33 bp, Homo sapien
ttttatttattacaacagagattttacaaattg

SEQ ID NO: 165946 - DNA, 33 bp, Homo sapien
ttttatttattacaactgagattttacaaattg

SEQ ID NO: 165947 - DNA, 33 bp, Homo sapien
ttctggctgccataccaaaagacaacagactgg

SEQ ID NO: 165948 - DNA, 33 bp, Homo sapien
ttctggctgccataccgaaagacaacagactgg

SEQ ID NO: 165949 - DNA, 33 bp, Homo sapien
gctttgtaacctcttacgatctttactcatact

SEQ ID NO: 165950 - DNA, 33 bp, Homo sapien
gctttgtaacctcttatgatctttactcatact

SEQ ID NO: 165951 - DNA, 33 bp, Homo sapien
ttaaacacaaagaaaaagaactcttaaaagatt

SEQ ID NO: 165952 - DNA, 33 bp, Homo sapien
ttaaacacaaagaaaaggaactcttaaaagatt

SEQ ID NO: 165953 - DNA, 33 bp, Homo sapien
gggctgaatcaaagtaacacatggcctagacag

SEQ ID NO: 165954 - DNA, 33 bp, Homo sapien
gggctgaatcaaagtagcacatggcctagacag

SEQ ID NO: 165955 - DNA, 33 bp, Homo sapien
tgagttattctttaacaactgaatagttctgag

SEQ ID NO: 165956 - DNA, 33 bp, Homo sapien
tgagttattctttaacgactgaatagttctgag

SEQ ID NO: 165957 - DNA, 33 bp, Homo sapien
ataaagcttgttccatgacacaacagatttcag

SEQ ID NO: 165958 - DNA, 33 bp, Homo sapien
ataaagcttgttccattacacaacagatttcag

SEQ ID NO: 165959 - DNA, 33 bp, Homo sapien
tggtaaaccaaattcaatagcatgatgaaaaga

SEQ ID NO: 165960 - DNA, 33 bp, Homo sapien
tggtaaaccaaattcagtagcatgatgaaaaga

SEQ ID NO: 165961 - DNA, 33 bp, Homo sapien
attacctgagaaccacactaactttcagaagct

SEQ ID NO: 165962 - DNA, 33 bp, Homo sapien
attacctgagaaccacgctaactttcagaagct

SEQ ID NO: 165963 - DNA, 33 bp, Homo sapien
ttatttccttgtataacacacatgtttgatcca

SEQ ID NO: 165964 - DNA, 33 bp, Homo sapien
ttatttccttgtataatacacatgtttgatcca

SEQ ID NO: 165965 - DNA, 33 bp, Homo sapien
gaaccaattggtgatacattgaaaaaacagttt

SEQ ID NO: 165966 - DNA, 33 bp, Homo sapien
gaaccaattggtgatatattgaaaaaacagttt

SEQ ID NO: 165967 - DNA, 33 bp, Homo sapien
tacagtaatttagactcacatacaatcaataca

SEQ ID NO: 165968 - DNA, 33 bp, Homo sapien
tacagtaatttagactgacatacaatcaataca

SEQ ID NO: 165969 - DNA, 33 bp, Homo sapien
aattgcttttcctccaccattgtaacaatccat

SEQ ID NO: 165970 - DNA, 33 bp, Homo sapien
aattgcttttcctccagcattgtaacaatccat

SEQ ID NO: 165971 - DNA, 33 bp, Homo sapien
cctacacttggatgacaaatgccatacagttac

SEQ ID NO: 165972 - DNA, 33 bp, Homo sapien
cctacacttggatgacgaatgccatacagttac

SEQ ID NO: 165973 - DNA, 33 bp, Homo sapien
aatttgggaaaaattacaaggcactgatatgtt

SEQ ID NO: 165974 - DNA, 33 bp, Homo sapien
aatttgggaaaaattataaggcactgatatgtt

SEQ ID NO: 165975 - DNA, 33 bp, Homo sapien
gaaggaagccagagaacgtttcaatgtgaaagg

SEQ ID NO: 165976 - DNA, 33 bp, Homo sapien
gaaggaagccagagaatgtttcaatgtgaaagg

SEQ ID NO: 165977 - DNA, 33 bp, Homo sapien
attctgctataaaacgaaaactcttgtgtccag

SEQ ID NO: 165978 - DNA, 33 bp, Homo sapien
attctgctataaaacggaaactcttgtgtccag

SEQ ID NO: 165979 - DNA, 33 bp, Homo sapien
agacccattttgttggaaacaggcccccagatc

SEQ ID NO: 165980 - DNA, 33 bp, Homo sapien
agacccattttgttgggaacaggcccccagatc

SEQ ID NO: 165981 - DNA, 33 bp, Homo sapien
acatcaaagtattaaactgcttcactgaattgt

SEQ ID NO: 165982 - DNA, 33 bp, Homo sapien
acatcaaagtattaaagtgcttcactgaattgt

SEQ ID NO: 165983 - DNA, 33 bp, Homo sapien
tgactggttggttatgcagctcaatgatgtgac

SEQ ID NO: 165984 - DNA, 33 bp, Homo sapien
tgactggttggttatgtagctcaatgatgtgac

SEQ ID NO: 165985 - DNA, 33 bp, Homo sapien
ttgttgtttagcataaatgttgatttttaagaa

SEQ ID NO: 165986 - DNA, 33 bp, Homo sapien
ttgttgtttagcataattgttgatttttaagaa

SEQ ID NO: 165987 - DNA, 33 bp, Homo sapien
gtaaggtggagtccacagtcttggcttttatct

SEQ ID NO: 165988 - DNA, 33 bp, Homo sapien
gtaaggtggagtccacggtcttggcttttatct

SEQ ID NO: 165989 - DNA, 33 bp, Homo sapien
atctgttgtaacgccaatctattgacatcttta

SEQ ID NO: 165990 - DNA, 33 bp, Homo sapien
atctgttgtaacgccagtctattgacatcttta

SEQ ID NO: 165991 - DNA, 33 bp, Homo sapien
taggcaagtatataaccggagcattgacagaac

SEQ ID NO: 165992 - DNA, 33 bp, Homo sapien
taggcaagtatataactggagcattgacagaac

SEQ ID NO: 165993 - DNA, 33 bp, Homo sapien
atgtcccttattgcaaagtgagatattttaaaa

SEQ ID NO: 165994 - DNA, 33 bp, Homo sapien
atgtcccttattgcaaggtgagatattttaaaa

SEQ ID NO: 165995 - DNA, 33 bp, Homo sapien
gcaatgggtagaaatacgctccaaactgcaaat

SEQ ID NO: 165996 - DNA, 33 bp, Homo sapien
gcaatgggtagaaatatgctccaaactgcaaat

SEQ ID NO: 165997 - DNA, 33 bp, Homo sapien
ttcttacccatcttaaatgactgttgcagatca

SEQ ID NO: 165998 - DNA, 33 bp, Homo sapien
ttcttacccatcttaactgactgttgcagatca

SEQ ID NO: 165999 - DNA, 33 bp, Homo sapien
ggaaaagatgagtaaacactaggagcctgaagg

SEQ ID NO: 166000 - DNA, 33 bp, Homo sapien
ggaaaagatgagtaaagactaggagcctgaagg

SEQ ID NO: 166001 - DNA, 33 bp, Homo sapien
cacatattaactcagcactgtttactaagacag

SEQ ID NO: 166002 - DNA, 33 bp, Homo sapien
cacatattaactcagctctgtttactaagacag

SEQ ID NO: 166003 - DNA, 33 bp, Homo sapien
tgtgaaattatgttacagatttattaacggctc

SEQ ID NO: 166004 - DNA, 33 bp, Homo sapien
tgtgaaattatgttacggatttattaacggctc

SEQ ID NO: 166005 - DNA, 33 bp, Homo sapien
ttggagttagaaaagaggtaatggtttgatgat

SEQ ID NO: 166006 - DNA, 33 bp, Homo sapien
ttggagttagaaaagatgtaatggtttgatgat

SEQ ID NO: 166007 - DNA, 33 bp, Homo sapien
gcttcaagcacttgagacacttggaaatcctac

SEQ ID NO: 166008 - DNA, 33 bp, Homo sapien
gcttcaagcacttgaggcacttggaaatcctac

SEQ ID NO: 166009 - DNA, 33 bp, Homo sapien
cttaccacaaatttgaataagcgatattattgc

SEQ ID NO: 166010 - DNA, 33 bp, Homo sapien
cttaccacaaatttgagtaagcgatattattgc

SEQ ID NO: 166011 - DNA, 33 bp, Homo sapien
tctaggaaggtttttcaatgtagaaacttgttt

SEQ ID NO: 166012 - DNA, 33 bp, Homo sapien
tctaggaaggtttttcgatgtagaaacttgttt

SEQ ID NO: 166013 - DNA, 33 bp, Homo sapien
ttgaactgccagctccagattcattttccttcc

SEQ ID NO: 166014 - DNA, 33 bp, Homo sapien
ttgaactgccagctccggattcattttccttcc

SEQ ID NO: 166015 - DNA, 33 bp, Homo sapien
caggtgctgatattcacgactgagagacccata

SEQ ID NO: 166016 - DNA, 33 bp, Homo sapien
caggtgctgatattcatgactgagagacccata

SEQ ID NO: 166017 - DNA, 33 bp, Homo sapien; identical to SEQ ID NO: 166015

SEQ ID NO: 166018 - DNA, 33 bp, Homo sapien; identical to SEQ ID NO: 166016

SEQ ID NO: 166019 - DNA, 33 bp, Homo sapien
tataatatgtagcgagaaagtagatcaaggctc

SEQ ID NO: 166020 - DNA, 33 bp, Homo sapien
tataatatgtagcgaggaagtagatcaaggctc

SEQ ID NO: 166021 - DNA, 33 bp, Homo sapien
tttactgaatgcataaaataaaatcacgcttca

SEQ ID NO: 166022 - DNA, 33 bp, Homo sapien
tttactgaatgcataacataaaatcacgcttca

SEQ ID NO: 166023 - DNA, 33 bp, Homo sapien
attgggtaaaactaaaacatacaacctcataat

SEQ ID NO: 166024 - DNA, 33 bp, Homo sapien
attgggtaaaactaaagcatacaacctcataat

SEQ ID NO: 166025 - DNA, 33 bp, Homo sapien
aagctaactgcacttaacttttgggatgtttcc

SEQ ID NO: 166026 - DNA, 33 bp, Homo sapien
aagctaactgcacttagcttttgggatgtttcc

SEQ ID NO: 166027 - DNA, 33 bp, Homo sapien
actggccaaagctaagaaggcaaggaagtttat

SEQ ID NO: 166028 - DNA, 33 bp, Homo sapien
actggccaaagctaagcaggcaaggaagtttat

SEQ ID NO: 166029 - DNA, 33 bp, Homo sapien
agatcagtcttggttacgtacaagtattagtag

SEQ ID NO: 166030 - DNA, 33 bp, Homo sapien
agatcagtcttggttatgtacaagtattagtag

SEQ ID NO: 166031 - DNA, 33 bp, Homo sapien
acttgcttctttgtagcaacatttttacaacct

SEQ ID NO: 166032 - DNA, 33 bp, Homo sapien
acttgcttctttgtagtaacatttttacaacct

SEQ ID NO: 166033 - DNA, 33 bp, Homo sapien
caaacgaacttcacgactagcattcacgttcag

SEQ ID NO: 166034 - DNA, 33 bp, Homo sapien
caaacgaacttcacgattagcattcacgttcag

SEQ ID NO: 166035 - DNA, 33 bp, Homo sapien
gttaagtggaaatctaaaaaatgagtgggcatc

SEQ ID NO: 166036 - DNA, 33 bp, Homo sapien
gttaagtggaaatctataaaatgagtgggcatc

SEQ ID NO: 166037 - DNA, 33 bp, Homo sapien
gttagatgaactttaagtctagctgacaaaaaa

SEQ ID NO: 166038 - DNA, 33 bp, Homo sapien
gttagatgaactttaattctagctgacaaaaaa

SEQ ID NO: 166039 - DNA, 33 bp, Homo sapien
agcagagtcaaaaccccgagccccagatccact

SEQ ID NO: 166040 - DNA, 33 bp, Homo sapien
agcagagtcaaaaccctgagccccagatccact

SEQ ID NO: 166041 - DNA, 33 bp, Homo sapien
aaaaaagctctaagacccagatttggtttctaa

SEQ ID NO: 166042 - DNA, 33 bp, Homo sapien
aaaaaagctctaagacgcagatttggtttctaa

SEQ ID NO: 166043 - DNA, 33 bp, Homo sapien
cttaaagagacaagaagtgatttgcagatatca

SEQ ID NO: 166044 - DNA, 33 bp, Homo sapien
cttaaagagacaagaattgatttgcagatatca

SEQ ID NO: 166045 - DNA, 33 bp, Homo sapien
ttccatgaaagttacactggagtattggctggt

SEQ ID NO: 166046 - DNA, 33 bp, Homo sapien
ttccatgaaagttacattggagtattggctggt

SEQ ID NO: 166047 - DNA, 33 bp, Homo sapien
tgtatgggactgttacagataatggataacatt

SEQ ID NO: 166048 - DNA, 33 bp, Homo sapien
tgtatgggactgttaccgataatggataacatt

SEQ ID NO: 166049 - DNA, 33 bp, Homo sapien
gacattggaacttgacccagaagaatgagcctg

SEQ ID NO: 166050 - DNA, 33 bp, Homo sapien
gacattggaacttgactcagaagaatgagcctg

SEQ ID NO: 166051 - DNA, 33 bp, Homo sapien
tgtggagtatcaaataaaacttttgcaaaagaa

SEQ ID NO: 166052 - DNA, 33 bp, Homo sapien
tgtggagtatcaaatataacttttgcaaaagaa

SEQ ID NO: 166053 - DNA, 33 bp, Homo sapien
agaaacaccttggctccaataagttactttgat

SEQ ID NO: 166054 - DNA, 33 bp, Homo sapien
agaaacaccttggctctaataagttactttgat

SEQ ID NO: 166055 - DNA, 33 bp, Homo sapien
tattttcaaaaacgtaacacatgctaagactat

SEQ ID NO: 166056 - DNA, 33 bp, Homo sapien
tattttcaaaaacgtagcacatgctaagactat

SEQ ID NO: 166057 - DNA, 33 bp, Homo sapien
gaggtagttactgttacgctcattttacagtta

SEQ ID NO: 166058 - DNA, 33 bp, Homo sapien
gaggtagttactgttatgctcattttacagtta

SEQ ID NO: 166059 - DNA, 33 bp, Homo sapien
tcatttctgtaggcaactctgtcacactgttgt

SEQ ID NO: 166060 - DNA, 33 bp, Homo sapien
tcatttctgtaggcaattctgtcacactgttgt

SEQ ID NO: 166061 - DNA, 33 bp, Homo sapien
gagtggtctaaggcaccggattgagaaataaat

SEQ ID NO: 166062 - DNA, 33 bp, Homo sapien
gagtggtctaaggcactggattgagaaataaat

SEQ ID NO: 166063 - DNA, 33 bp, Homo sapien
gaaagactagttagagacaatctaggagagaaa

SEQ ID NO: 166064 - DNA, 33 bp, Homo sapien
gaaagactagttagaggcaatctaggagagaaa

SEQ ID NO: 166065 - DNA, 33 bp, Homo sapien
gtgactatagctggtgcaatcattagcaaacag

SEQ ID NO: 166066 - DNA, 33 bp, Homo sapien
gtgactatagctggtgtaatcattagcaaacag

SEQ ID NO: 166067 - DNA, 33 bp, Homo sapien
atctctcctgttgaaactgaaaactgcatgaga

SEQ ID NO: 166068 - DNA, 33 bp, Homo sapien
atctctcctgttgaaattgaaaactgcatgaga

SEQ ID NO: 166069 - DNA, 33 bp, Homo sapien
gaggtggccaaaatgaaggaaggtgaatctgta

SEQ ID NO: 166070 - DNA, 33 bp, Homo sapien
gaggtggccaaaatgatggaaggtgaatctgta

SEQ ID NO: 166071 - DNA, 33 bp, Homo sapien
gtccgatagtgatatacagcacaagaaattatt

SEQ ID NO: 166072 - DNA, 33 bp, Homo sapien
gtccgatagtgatatagagcacaagaaattatt

SEQ ID NO: 166073 - DNA, 33 bp, Homo sapien
tttttttctgttaccactgaaggatcggagaga

SEQ ID NO: 166074 - DNA, 33 bp, Homo sapien
tttttttctgttaccattgaaggatcggagaga

SEQ ID NO: 166075 - DNA, 33 bp, Homo sapien
gctatcatgactggcccggattcttaatttaga

SEQ ID NO: 166076 - DNA, 33 bp, Homo sapien
gctatcatgactggcctggattcttaatttaga

SEQ ID NO: 166077 - DNA, 33 bp, Homo sapien
cataaatcctcaggaaatgtacaatacctcaat

SEQ ID NO: 166078 - DNA, 33 bp, Homo sapien
cataaatcctcaggaagtgtacaatacctcaat

SEQ ID NO: 166079 - DNA, 33 bp, Homo sapien
ccagtggtcagatcaccgctaagcgatatgttt

SEQ ID NO: 166080 - DNA, 33 bp, Homo sapien
ccagtggtcagatcactgctaagcgatatgttt

SEQ ID NO: 166081 - DNA, 33 bp, Homo sapien
gcaacaactggtcatagctctcccttttctggg

SEQ ID NO: 166082 - DNA, 33 bp, Homo sapien
gcaacaactggtcatatctctcccttttctggg

SEQ ID NO: 166083 - DNA, 33 bp, Homo sapien
cttaaaatgagttcacggcagatgtatggattt

SEQ ID NO: 166084 - DNA, 33 bp, Homo sapien
cttaaaatgagttcactgcagatgtatggattt

SEQ ID NO: 166085 - DNA, 33 bp, Homo sapien
aaacatacccgacacactacataagggagaaac

SEQ ID NO: 166086 - DNA, 33 bp, Homo sapien
aaacatacccgacacattacataagggagaaac

SEQ ID NO: 166087 - DNA, 33 bp, Homo sapien
tcaggtttaattgaagcatagcctcctccgtga

SEQ ID NO: 166088 - DNA, 33 bp, Homo sapien
tcaggtttaattgaagtatagcctcctccgtga

SEQ ID NO: 166089 - DNA, 33 bp, Homo sapien
gttggttaatggccaacataatgggttgtattt

SEQ ID NO: 166090 - DNA, 33 bp, Homo sapien
gttggttaatggccaatataatgggttgtattt

SEQ ID NO: 166091 - DNA, 33 bp, Homo sapien
actaaaaaacttctccacagtatagaaaataat

SEQ ID NO: 166092 - DNA, 33 bp, Homo sapien
actaaaaaacttctccgcagtatagaaaataat

SEQ ID NO: 166093 - DNA, 33 bp, Homo sapien
ttactgggaggaaacactaagtcatctcaaggg

SEQ ID NO: 166094 - DNA, 33 bp, Homo sapien
ttactgggaggaaacattaagtcatctcaaggg

SEQ ID NO: 166095 - DNA, 33 bp, Homo sapien
ttcagcggggcatttcgcgagcactcagcaaat

SEQ ID NO: 166096 - DNA, 33 bp, Homo sapien
ttcagcggggcatttctcgagcactcagcaaat

SEQ ID NO: 166097 - DNA, 33 bp, Homo sapien
cccatttgaaaagatgaaacattgccagaatgt

SEQ ID NO: 166098 - DNA, 33 bp, Homo sapien
cccatttgaaaagatgcaacattgccagaatgt

SEQ ID NO: 166099 - DNA, 33 bp, Homo sapien
ttcctatcaaccttgacggccttaatggtaata

SEQ ID NO: 166100 - DNA, 33 bp, Homo sapien
ttcctatcaaccttgatggccttaatggtaata

SEQ ID NO: 166101 - DNA, 33 bp, Homo sapien
tgtgtgaacaagagccacttccataaaaacatg

SEQ ID NO: 166102 - DNA, 33 bp, Homo sapien
tgtgtgaacaagagccgcttccataaaaacatg

SEQ ID NO: 166103 - DNA, 33 bp, Homo sapien
cagctttaacgcaccaagggaattggtattaca

SEQ ID NO: 166104 - DNA, 33 bp, Homo sapien
cagctttaacgcaccatgggaattggtattaca

SEQ ID NO: 166105 - DNA, 33 bp, Homo sapien
taagagtaaaagaaaacgctccgaagacatatt

SEQ ID NO: 166106 - DNA, 33 bp, Homo sapien
taagagtaaaagaaaatgctccgaagacatatt

SEQ ID NO: 166107 - DNA, 33 bp, Homo sapien
cctcaccttccatattaaactatgcttctcgtc

SEQ ID NO: 166108 - DNA, 33 bp, Homo sapien
cctcaccttccatattgaactatgcttctcgtc

SEQ ID NO: 166109 - DNA, 33 bp, Homo sapien
caagcacttcagtttgaaagtaatggcaaaaga

SEQ ID NO: 166110 - DNA, 33 bp, Homo sapien
caagcacttcagtttggaagtaatggcaaaaga

SEQ ID NO: 166111 - DNA, 33 bp, Homo sapien
ttgtctagataaattcacctaaataaataggcc

SEQ ID NO: 166112 - DNA, 33 bp, Homo sapien
ttgtctagataaattcgcctaaataaataggcc

SEQ ID NO: 166113 - DNA, 33 bp, Homo sapien
taatttattcaagaggacctattactcgtaata

SEQ ID NO: 166114 - DNA, 33 bp, Homo sapien
taatttattcaagaggccctattactcgtaata

SEQ ID NO: 166115 - DNA, 33 bp, Homo sapien
ggaaagctgtccagaactcaccctgagaacatg

SEQ ID NO: 166116 - DNA, 33 bp, Homo sapien
ggaaagctgtccagaagtcaccctgagaacatg

SEQ ID NO: 166117 - DNA, 33 bp, Homo sapien
tttattgaacacccaacgtaattgccaaagtgg

SEQ ID NO: 166118 - DNA, 33 bp, Homo sapien
tttattgaacacccaatgtaattgccaaagtgg

SEQ ID NO: 166119 - DNA, 33 bp, Homo sapien
actacctaatctaaaaccactatgcctttaagg

SEQ ID NO: 166120 - DNA, 33 bp, Homo sapien
actacctaatctaaaatcactatgcctttaagg

SEQ ID NO: 166121 - DNA, 33 bp, Homo sapien
catatttaacaacaaaatcatgcagagtgccat

SEQ ID NO: 166122 - DNA, 33 bp, Homo sapien
catatttaacaacaaagtcatgcagagtgccat

SEQ ID NO: 166123 - DNA, 33 bp, Homo sapien
gactgagtagaacaaacattacctttctaattc

SEQ ID NO: 166124 - DNA, 33 bp, Homo sapien
gactgagtagaacaaatattacctttctaattc

SEQ ID NO: 166125 - DNA, 33 bp, Homo sapien
tcctgtaattctgtgaggcaaatatttaagaca

SEQ ID NO: 166126 - DNA, 33 bp, Homo sapien
tcctgtaattctgtgatgcaaatatttaagaca

SEQ ID NO: 166127 - DNA, 33 bp, Homo sapien
tattttatatttgctcaagttccccatcaaata

SEQ ID NO: 166128 - DNA, 33 bp, Homo sapien
tattttatatttgctctagttccccatcaaata

SEQ ID NO: 166129 - DNA, 33 bp, Homo sapien
aatagcttttctcacccaaacttgttttctttt

SEQ ID NO: 166130 - DNA, 33 bp, Homo sapien
aatagcttttctcacctaaacttgttttctttt

SEQ ID NO: 166131 - DNA, 33 bp, Homo sapien
taggcaaggattccaaaagtctactgaaagaat

SEQ ID NO: 166132 - DNA, 33 bp, Homo sapien
taggcaaggattccaacagtctactgaaagaat

SEQ ID NO: 166133 - DNA, 33 bp, Homo sapien
aagagtaataaactcaaagagaatgttttccta

SEQ ID NO: 166134 - DNA, 33 bp, Homo sapien
aagagtaataaactcagagagaatgttttccta

SEQ ID NO: 166135 - DNA, 33 bp, Homo sapien
caatggaccataacccagcaagaggtttccttc

SEQ ID NO: 166136 - DNA, 33 bp, Homo sapien
caatggaccataacccggcaagaggtttccttc

SEQ ID NO: 166137 - DNA, 33 bp, Homo sapien
tctgatactttccaaaatacttatgccaactta

SEQ ID NO: 166138 - DNA, 33 bp, Homo sapien
tctgatactttccaaattacttatgccaactta

SEQ ID NO: 166139 - DNA, 33 bp, Homo sapien
attttagagttctagcaaagtcagaaatgattc

SEQ ID NO: 166140 - DNA, 33 bp, Homo sapien
attttagagttctagcgaagtcagaaatgattc

SEQ ID NO: 166141 - DNA, 33 bp, Homo sapien
ttggcccaaatttttaactctgatacataatct

SEQ ID NO: 166142 - DNA, 33 bp, Homo sapien
ttggcccaaatttttacctctgatacataatct

SEQ ID NO: 166143 - DNA, 33 bp, Homo sapien
tttaaggatagttttacagtcaggaagatgaga

SEQ ID NO: 166144 - DNA, 33 bp, Homo sapien
tttaaggatagttttagagtcaggaagatgaga

SEQ ID NO: 166145 - DNA, 33 bp, Homo sapien
atcccaagcacagttacgtcattcctatatcaa

SEQ ID NO: 166146 - DNA, 33 bp, Homo sapien
atcccaagcacagttatgtcattcctatatcaa

SEQ ID NO: 166147 - DNA, 33 bp, Homo sapien
ttctggtagtttataaatgaagttctccagtcc

SEQ ID NO: 166148 - DNA, 33 bp, Homo sapien
ttctggtagtttataagtgaagttctccagtcc

SEQ ID NO: 166149 - DNA, 33 bp, Homo sapien
tgctccgggagggtgacaatgagttaaaccttt

SEQ ID NO: 166150 - DNA, 33 bp, Homo sapien
tgctccgggagggtgataatgagttaaaccttt

SEQ ID NO: 166151 - DNA, 33 bp, Homo sapien
ctaaagaggaaacaccaggattcacttaagtct

SEQ ID NO: 166152 - DNA, 33 bp, Homo sapien
ctaaagaggaaacaccgggattcacttaagtct

SEQ ID NO: 166153 - DNA, 33 bp, Homo sapien
ggttgccttagtgctcacaagattttgaggcac

SEQ ID NO: 166154 - DNA, 33 bp, Homo sapien
ggttgccttagtgctcccaagattttgaggcac

SEQ ID NO: 166155 - DNA, 33 bp, Homo sapien
catggcttagtgaagaaatgataatttgggtaa

SEQ ID NO: 166156 - DNA, 33 bp, Homo sapien
catggcttagtgaagacatgataatttgggtaa

SEQ ID NO: 166157 - DNA, 33 bp, Homo sapien
atgttattttaaaacaactgtgccagttcttaa

SEQ ID NO: 166158 - DNA, 33 bp, Homo sapien
atgttattttaaaacatctgtgccagttcttaa

SEQ ID NO: 166159 - DNA, 33 bp, Homo sapien
gaatttcacatagtaacggacaatttatcctaa

SEQ ID NO: 166160 - DNA, 33 bp, Homo sapien
gaatttcacatagtaatggacaatttatcctaa

SEQ ID NO: 166161 - DNA, 33 bp, Homo sapien
actgcttcaaaatgtacaaaagttttcaagcag

SEQ ID NO: 166162 - DNA, 33 bp, Homo sapien
actgcttcaaaatgtataaaagttttcaagcag

SEQ ID NO: 166163 - DNA, 33 bp, Homo sapien
ttttggaaaaagtacaataagttaggtgcaatg

SEQ ID NO: 166164 - DNA, 33 bp, Homo sapien
ttttggaaaaagtacagtaagttaggtgcaatg

SEQ ID NO: 166165 - DNA, 33 bp, Homo sapien
aaaagatttctggaaccaacttctgactccaaa

SEQ ID NO: 166166 - DNA, 33 bp, Homo sapien
aaaagatttctggaacgaacttctgactccaaa

SEQ ID NO: 166167 - DNA, 33 bp, Homo sapien
tgttacctgattttcaaacttgcattaaaatat

SEQ ID NO: 166168 - DNA, 33 bp, Homo sapien
tgttacctgattttcagacttgcattaaaatat

SEQ ID NO: 166169 - DNA, 33 bp, Homo sapien
gagaataggtcctataataaatttgttgcatta

SEQ ID NO: 166170 - DNA, 33 bp, Homo sapien
gagaataggtcctatagtaaatttgttgcatta

SEQ ID NO: 166171 - DNA, 33 bp, Homo sapien
gtctaagaaataagaaagctgtatgctcaattc

SEQ ID NO: 166172 - DNA, 33 bp, Homo sapien
gtctaagaaataagaaggctgtatgctcaattc

SEQ ID NO: 166173 - DNA, 33 bp, Homo sapien
aataagattattaaaagttggagcttcagagtc

SEQ ID NO: 166174 - DNA, 33 bp, Homo sapien
aataagattattaaaatttggagcttcagagtc

SEQ ID NO: 166175 - DNA, 33 bp, Homo sapien
gcagaagaataatgcaaaaaagtgcagtggaac

SEQ ID NO: 166176 - DNA, 33 bp, Homo sapien
gcagaagaataatgcagaaaagtgcagtggaac

SEQ ID NO: 166177 - DNA, 33 bp, Homo sapien
aaccaaggttcataacaagatctacttctaaag

SEQ ID NO: 166178 - DNA, 33 bp, Homo sapien
aaccaaggttcataaccagatctacttctaaag

SEQ ID NO: 166179 - DNA, 33 bp, Homo sapien
ttcatacaaggaactcaaagagaccaagtgacc

SEQ ID NO: 166180 - DNA, 33 bp, Homo sapien
ttcatacaaggaactcgaagagaccaagtgacc

SEQ ID NO: 166181 - DNA, 33 bp, Homo sapien
gagtgatggggattgcaccaaatgccaattcca

SEQ ID NO: 166182 - DNA, 33 bp, Homo sapien
gagtgatggggattgcgccaaatgccaattcca

SEQ ID NO: 166183 - DNA, 33 bp, Homo sapien
agtgttacattcttccagattagagggagtggt

SEQ ID NO: 166184 - DNA, 33 bp, Homo sapien
agtgttacattcttccggattagagggagtggt

SEQ ID NO: 166185 - DNA, 33 bp, Homo sapien
gactggcaagagataggaggacggctcatacta

SEQ ID NO: 166186 - DNA, 33 bp, Homo sapien
gactggcaagagatagtaggacggctcatacta

SEQ ID NO: 166187 - DNA, 33 bp, Homo sapien
tatcagttgctgctctcaaattaaactgcagtg

SEQ ID NO: 166188 - DNA, 33 bp, Homo sapien
tatcagttgctgctctgaaattaaactgcagtg

SEQ ID NO: 166189 - DNA, 33 bp, Homo sapien
tcctgaatgaataccacaatttccctccataac

SEQ ID NO: 166190 - DNA, 33 bp, Homo sapien
tcctgaatgaataccataatttccctccataac

SEQ ID NO: 166191 - DNA, 33 bp, Homo sapien
atagcaattgatcatacgggaatttgttattga

SEQ ID NO: 166192 - DNA, 33 bp, Homo sapien
atagcaattgatcatatgggaatttgttattga

SEQ ID NO: 166193 - DNA, 33 bp, Homo sapien
atgaataataaagctgaagaggctgtgcttggc

SEQ ID NO: 166194 - DNA, 33 bp, Homo sapien
atgaataataaagctgcagaggctgtgcttggc

SEQ ID NO: 166195 - DNA, 33 bp, Homo sapien
agatgctatgtaaataaatcaaacaaaggaaga

SEQ ID NO: 166196 - DNA, 33 bp, Homo sapien
agatgctatgtaaatacatcaaacaaaggaaga

SEQ ID NO: 166197 - DNA, 33 bp, Homo sapien
aactcaaaggtgacagaaacaagttaaatcaat

SEQ ID NO: 166198 - DNA, 33 bp, Homo sapien
aactcaaaggtgacaggaacaagttaaatcaat

SEQ ID NO: 166199 - DNA, 33 bp, Homo sapien
tcacagggctataccactgatgtctaggaagat

SEQ ID NO: 166200 - DNA, 33 bp, Homo sapien
tcacagggctataccattgatgtctaggaagat

SEQ ID NO: 166201 - DNA, 33 bp, Homo sapien
gaaattgggtgcagtgaaataaaataattttta

SEQ ID NO: 166202 - DNA, 33 bp, Homo sapien
gaaattgggtgcagtgcaataaaataattttta

SEQ ID NO: 166203 - DNA, 33 bp, Homo sapien
aaatttcagatcttagcacagccaggaaacaat

SEQ ID NO: 166204 - DNA, 33 bp, Homo sapien
aaatttcagatcttaggacagccaggaaacaat

SEQ ID NO: 166205 - DNA, 33 bp, Homo sapien
attcacaaagtctacaactgaggttaaaaacat

SEQ ID NO: 166206 - DNA, 33 bp, Homo sapien
attcacaaagtctacagctgaggttaaaaacat

SEQ ID NO: 166207 - DNA, 33 bp, Homo sapien
taggtatttgttttgaaaaagctggcccagact

SEQ ID NO: 166208 - DNA, 33 bp, Homo sapien
taggtatttgttttgagaaagctggcccagact

SEQ ID NO: 166209 - DNA, 33 bp, Homo sapien
ctccagtcccaaagatcatacaaaatatttatt

SEQ ID NO: 166210 - DNA, 33 bp, Homo sapien
ctccagtcccaaagatgatacaaaatatttatt

SEQ ID NO: 166211 - DNA, 33 bp, Homo sapien
atccagtgaccaagacagtatgtggcacttagt

SEQ ID NO: 166212 - DNA, 33 bp, Homo sapien
atccagtgaccaagacggtatgtggcacttagt

SEQ ID NO: 166213 - DNA, 33 bp, Homo sapien
caagttcaaagagagaagtcatctttgttcaca

SEQ ID NO: 166214 - DNA, 33 bp, Homo sapien
caagttcaaagagagacgtcatctttgttcaca

SEQ ID NO: 166215 - DNA, 33 bp, Homo sapien
atggctaattacaaaacatgtttactctttgac

SEQ ID NO: 166216 - DNA, 33 bp, Homo sapien
atggctaattacaaaatatgtttactctttgac

SEQ ID NO: 166217 - DNA, 33 bp, Homo sapien
atgcagttgtcttcaaatgctccatgtactccg

SEQ ID NO: 166218 - DNA, 33 bp, Homo sapien
atgcagttgtcttcaattgctccatgtactccg

SEQ ID NO: 166219 - DNA, 33 bp, Homo sapien
acaaagacattggtaacggtatctcagaaagta

SEQ ID NO: 166220 - DNA, 33 bp, Homo sapien
acaaagacattggtaatggtatctcagaaagta

SEQ ID NO: 166221 - DNA, 33 bp, Homo sapien
taatctctttcttacaacctgtctttaatcatc

SEQ ID NO: 166222 - DNA, 33 bp, Homo sapien
taatctctttcttacatcctgtctttaatcatc

SEQ ID NO: 166223 - DNA, 33 bp, Homo sapien
tatatatagaatccaaacagttcttaccacttt

SEQ ID NO: 166224 - DNA, 33 bp, Homo sapien
tatatatagaatccaaccagttcttaccacttt

SEQ ID NO: 166225 - DNA, 33 bp, Homo sapien
gactaagagagacttacgcacaaggttaagagc

SEQ ID NO: 166226 - DNA, 33 bp, Homo sapien
gactaagagagacttatgcacaaggttaagagc

SEQ ID NO: 166227 - DNA, 33 bp, Homo sapien
cctcatgatgctaaaccacttttgaagtcaaga

SEQ ID NO: 166228 - DNA, 33 bp, Homo sapien
cctcatgatgctaaactacttttgaagtcaaga

SEQ ID NO: 166229 - DNA, 33 bp, Homo sapien
cttcactctacttttcaagatcctcttaagcat

SEQ ID NO: 166230 - DNA, 33 bp, Homo sapien
cttcactctacttttcgagatcctcttaagcat

SEQ ID NO: 166231 - DNA, 33 bp, Homo sapien
gtcctttggccagaaacagtcaaatgttttttc

SEQ ID NO: 166232 - DNA, 33 bp, Homo sapien
gtcctttggccagaaagagtcaaatgttttttc

SEQ ID NO: 166233 - DNA, 33 bp, Homo sapien
catccacccatacataagagaaaaatgtatggc

SEQ ID NO: 166234 - DNA, 33 bp, Homo sapien
catccacccatacatacgagaaaaatgtatggc

SEQ ID NO: 166235 - DNA, 33 bp, Homo sapien
ctttattaaattttaaaagtggcatatgacagt

SEQ ID NO: 166236 - DNA, 33 bp, Homo sapien
ctttattaaattttaacagtggcatatgacagt

SEQ ID NO: 166237 - DNA, 33 bp, Homo sapien
acaatgcatggaaatcacttaactggtacctag

SEQ ID NO: 166238 - DNA, 33 bp, Homo sapien
acaatgcatggaaatcgcttaactggtacctag

SEQ ID NO: 166239 - DNA, 33 bp, Homo sapien
ttgattcaggtatgtgaaaagactacagagatt

SEQ ID NO: 166240 - DNA, 33 bp, Homo sapien
ttgattcaggtatgtggaaagactacagagatt

SEQ ID NO: 166241 - DNA, 33 bp, Homo sapien
tgtggcaatcgttgaccggtggaagagtgcagg

SEQ ID NO: 166242 - DNA, 33 bp, Homo sapien
tgtggcaatcgttgactggtggaagagtgcagg

SEQ ID NO: 166243 - DNA, 33 bp, Homo sapien
attcattaggtatctacaaatgctaagagtgaa

SEQ ID NO: 166244 - DNA, 33 bp, Homo sapien
attcattaggtatctataaatgctaagagtgaa

SEQ ID NO: 166245 - DNA, 33 bp, Homo sapien
ataccactactgcactaagacaaaatgaagaga

SEQ ID NO: 166246 - DNA, 33 bp, Homo sapien
ataccactactgcacttagacaaaatgaagaga

SEQ ID NO: 166247 - DNA, 33 bp, Homo sapien
atcccattggttagtaggagatttaaacaagat

SEQ ID NO: 166248 - DNA, 33 bp, Homo sapien
atcccattggttagtatgagatttaaacaagat

SEQ ID NO: 166249 - DNA, 33 bp, Homo sapien
aacaagattaataaacaaaagagcattcatccc

SEQ ID NO: 166250 - DNA, 33 bp, Homo sapien
aacaagattaataaaccaaagagcattcatccc

SEQ ID NO: 166251 - DNA, 33 bp, Homo sapien
gagctgagacaagatacatatgctactctcaga

SEQ ID NO: 166252 - DNA, 33 bp, Homo sapien
gagctgagacaagatatatatgctactctcaga

SEQ ID NO: 166253 - DNA, 33 bp, Homo sapien
cctgataagaacctgaccatcttccacatttac

SEQ ID NO: 166254 - DNA, 33 bp, Homo sapien
cctgataagaacctgatcatcttccacatttac

SEQ ID NO: 166255 - DNA, 33 bp, Homo sapien
gaataaaagtatatcacgggagttacctctgtc

SEQ ID NO: 166256 - DNA, 33 bp, Homo sapien
gaataaaagtatatcatgggagttacctctgtc

SEQ ID NO: 166257 - DNA, 33 bp, Homo sapien
tagtaggtcacagttaacaaaagtaaacagctt

SEQ ID NO: 166258 - DNA, 33 bp, Homo sapien
tagtaggtcacagttatcaaaagtaaacagctt

SEQ ID NO: 166259 - DNA, 33 bp, Homo sapien
aaggtccatgcaaacaactatttagtgtttata

SEQ ID NO: 166260 - DNA, 33 bp, Homo sapien
aaggtccatgcaaacatctatttagtgtttata

SEQ ID NO: 166261 - DNA, 33 bp, Homo sapien
taatttttggtgtcaaggtaacggaattaagga

SEQ ID NO: 166262 - DNA, 33 bp, Homo sapien
taatttttggtgtcaatgtaacggaattaagga

SEQ ID NO: 166263 - DNA, 33 bp, Homo sapien
gtcttgcattatgggggagttgtcccaagtaaa

SEQ ID NO: 166264 - DNA, 33 bp, Homo sapien
gtcttgcattatggggtagttgtcccaagtaaa

SEQ ID NO: 166265 - DNA, 33 bp, Homo sapien
attaacattggtcgtaactgtggtgaattgagt

SEQ ID NO: 166266 - DNA, 33 bp, Homo sapien
attaacattggtcgtacctgtggtgaattgagt

SEQ ID NO: 166267 - DNA, 33 bp, Homo sapien
agctgggtgtcgaaataaatgtcgaaattggtt

SEQ ID NO: 166268 - DNA, 33 bp, Homo sapien
agctgggtgtcgaaatgaatgtcgaaattggtt

SEQ ID NO: 166269 - DNA, 33 bp, Homo sapien
tattttcttaaatgcaccgaagtttgaaatatt

SEQ ID NO: 166270 - DNA, 33 bp, Homo sapien
tattttcttaaatgcagcgaagtttgaaatatt

SEQ ID NO: 166271 - DNA, 33 bp, Homo sapien
tgagacatggggagaaatactatgtggctcttc

SEQ ID NO: 166272 - DNA, 33 bp, Homo sapien
tgagacatggggagaactactatgtggctcttc

SEQ ID NO: 166273 - DNA, 33 bp, Homo sapien
aacaaacccggcaacacggattggagctagctg

SEQ ID NO: 166274 - DNA, 33 bp, Homo sapien
aacaaacccggcaacagggattggagctagctg

SEQ ID NO: 166275 - DNA, 33 bp, Homo sapien
tatgccaccgtggtgcagacacagcaggaagaa

SEQ ID NO: 166276 - DNA, 33 bp, Homo sapien
tatgccaccgtggtgcggacacagcaggaagaa

SEQ ID NO: 166277 - DNA, 33 bp, Homo sapien
ttgtttttctttatgcaagagtgattcattgtg

SEQ ID NO: 166278 - DNA, 33 bp, Homo sapien
ttgtttttctttatgcgagagtgattcattgtg

SEQ ID NO: 166279 - DNA, 33 bp, Homo sapien
tgacaacttatcagtccattggaaaaaactgtg

SEQ ID NO: 166280 - DNA, 33 bp, Homo sapien
tgacaacttatcagtctattggaaaaaactgtg

SEQ ID NO: 166281 - DNA, 33 bp, Homo sapien
catgctattctaattgaatgggatcttaagaca

SEQ ID NO: 166282 - DNA, 33 bp, Homo sapien
catgctattctaattgtatgggatcttaagaca

SEQ ID NO: 166283 - DNA, 33 bp, Homo sapien
cctctgcacaacggagcacagctggaaaaattc

SEQ ID NO: 166284 - DNA, 33 bp, Homo sapien
cctctgcacaacggagtacagctggaaaaattc

SEQ ID NO: 166285 - DNA, 33 bp, Homo sapien
cactggtaacctgaacaatagtgatttgagtaa

SEQ ID NO: 166286 - DNA, 33 bp, Homo sapien
cactggtaacctgaacgatagtgatttgagtaa

SEQ ID NO: 166287 - DNA, 33 bp, Homo sapien
atttaatgcgatttcacgaagtgagtaactgag

SEQ ID NO: 166288 - DNA, 33 bp, Homo sapien
atttaatgcgatttcatgaagtgagtaactgag

SEQ ID NO: 166289 - DNA, 33 bp, Homo sapien
aacatgatagtcaatacgtgtaaaacttataaa

SEQ ID NO: 166290 - DNA, 33 bp, Homo sapien
aacatgatagtcaatatgtgtaaaacttataaa

SEQ ID NO: 166291 - DNA, 33 bp, Homo sapien
ggcctcatctataaaacgaacagtttgatttga

SEQ ID NO: 166292 - DNA, 33 bp, Homo sapien
ggcctcatctataaaatgaacagtttgatttga

SEQ ID NO: 166293 - DNA, 33 bp, Homo sapien
tttacaacgttgtccaatcactgctactttcta

SEQ ID NO: 166294 - DNA, 33 bp, Homo sapien
tttacaacgttgtccagtcactgctactttcta

SEQ ID NO: 166295 - DNA, 33 bp, Homo sapien
cctcaaagcatgaataaccctatctcagaagaa

SEQ ID NO: 166296 - DNA, 33 bp, Homo sapien
cctcaaagcatgaatacccctatctcagaagaa

SEQ ID NO: 166297 - DNA, 33 bp, Homo sapien
agatgatccaaaataacgtgttccgtgttggag

SEQ ID NO: 166298 - DNA, 33 bp, Homo sapien
agatgatccaaaataatgtgttccgtgttggag

SEQ ID NO: 166299 - DNA, 33 bp, Homo sapien
taaggaggaaattaaaaggcaaatctgacagaa

SEQ ID NO: 166300 - DNA, 33 bp, Homo sapien
taaggaggaaattaaagggcaaatctgacagaa

SEQ ID NO: 166301 - DNA, 33 bp, Homo sapien
acctgacagattaaaaagtgtttctggtctgta

SEQ ID NO: 166302 - DNA, 33 bp, Homo sapien
acctgacagattaaaaggtgtttctggtctgta

SEQ ID NO: 166303 - DNA, 33 bp, Homo sapien
cccccagccgctggtaacctgtattctactttc

SEQ ID NO: 166304 - DNA, 33 bp, Homo sapien
cccccagccgctggtatcctgtattctactttc

SEQ ID NO: 166305 - DNA, 33 bp, Homo sapien
ccataatctccaaatccgaagtcatatatatta

SEQ ID NO: 166306 - DNA, 33 bp, Homo sapien
ccataatctccaaatctgaagtcatatatatta

SEQ ID NO: 166307 - DNA, 33 bp, Homo sapien
taaaacatttttcggccatcctttctgaatcag

SEQ ID NO: 166308 - DNA, 33 bp, Homo sapien
taaaacatttttcggctatcctttctgaatcag

SEQ ID NO: 166309 - DNA, 33 bp, Homo sapien
ggttaactgaagaccaggtataaattccactga

SEQ ID NO: 166310 - DNA, 33 bp, Homo sapien
ggttaactgaagaccatgtataaattccactga

SEQ ID NO: 166311 - DNA, 33 bp, Homo sapien
acctcgtagattgtaactagatgcgcatacctt

SEQ ID NO: 166312 - DNA, 33 bp, Homo sapien
acctcgtagattgtaagtagatgcgcatacctt

SEQ ID NO: 166313 - DNA, 33 bp, Homo sapien
gatcaaacattaccaacagcgtgagaagtggat

SEQ ID NO: 166314 - DNA, 33 bp, Homo sapien
gatcaaacattaccaatagcgtgagaagtggat

SEQ ID NO: 166315 - DNA, 33 bp, Homo sapien
ttcttgaatgaaaaatcactactcaataaaata

SEQ ID NO: 166316 - DNA, 33 bp, Homo sapien
ttcttgaatgaaaaattactactcaataaaata

SEQ ID NO: 166317 - DNA, 33 bp, Homo sapien
caaaatggcatacaacgcataatttaagtgccc

SEQ ID NO: 166318 - DNA, 33 bp, Homo sapien
caaaatggcatacaactcataatttaagtgccc

SEQ ID NO: 166319 - DNA, 33 bp, Homo sapien
ttgtagaagaaattgcacacttattatgaagta

SEQ ID NO: 166320 - DNA, 33 bp, Homo sapien
ttgtagaagaaattgcgcacttattatgaagta

SEQ ID NO: 166321 - DNA, 33 bp, Homo sapien
aaagcagagtaagggaccatttaaaccaaactg

SEQ ID NO: 166322 - DNA, 33 bp, Homo sapien
aaagcagagtaagggatcatttaaaccaaactg

SEQ ID NO: 166323 - DNA, 33 bp, Homo sapien
tcaaacagtacaaaccacaccatcagagcctcc

SEQ ID NO: 166324 - DNA, 33 bp, Homo sapien
tcaaacagtacaaacctcaccatcagagcctcc

SEQ ID NO: 166325 - DNA, 33 bp, Homo sapien
ttgcattgctgaaatacattacatttgcattgc

SEQ ID NO: 166326 - DNA, 33 bp, Homo sapien
ttgcattgctgaaatatattacatttgcattgc

SEQ ID NO: 166327 - DNA, 33 bp, Homo sapien
tggattggaatcatggacaaggatgtctctcct

SEQ ID NO: 166328 - DNA, 33 bp, Homo sapien
tggattggaatcatgggcaaggatgtctctcct

SEQ ID NO: 166329 - DNA, 33 bp, Homo sapien
gagcaatcactgagcaaatgtgcttaaaccttc

SEQ ID NO: 166330 - DNA, 33 bp, Homo sapien
gagcaatcactgagcagatgtgcttaaaccttc

SEQ ID NO: 166331 - DNA, 33 bp, Homo sapien
ttttgttaccaggaagaaagaagggctacaaac

SEQ ID NO: 166332 - DNA, 33 bp, Homo sapien
ttttgttaccaggaagcaagaagggctacaaac

SEQ ID NO: 166333 - DNA, 33 bp, Homo sapien
aagagatggtaattgaaaaggtttggatctgca

SEQ ID NO: 166334 - DNA, 33 bp, Homo sapien
aagagatggtaattgataaggtttggatctgca

SEQ ID NO: 166335 - DNA, 33 bp, Homo sapien
ttacagttggggaactaaccataacccgcaagt

SEQ ID NO: 166336 - DNA, 33 bp, Homo sapien
ttacagttggggaacttaccataacccgcaagt

SEQ ID NO: 166337 - DNA, 33 bp, Homo sapien
ttataccaatcatggcaacttattctgcctcag

SEQ ID NO: 166338 - DNA, 33 bp, Homo sapien
ttataccaatcatggccacttattctgcctcag

SEQ ID NO: 166339 - DNA, 33 bp, Homo sapien
cagagcaaaaaggagccgaaagtaacagtagta

SEQ ID NO: 166340 - DNA, 33 bp, Homo sapien
cagagcaaaaaggagctgaaagtaacagtagta

SEQ ID NO: 166341 - DNA, 33 bp, Homo sapien
aaactagacacgcattcaaattctatcagcttt

SEQ ID NO: 166342 - DNA, 33 bp, Homo sapien
aaactagacacgcatttaaattctatcagcttt

SEQ ID NO: 166343 - DNA, 33 bp, Homo sapien
tcctgtaagcctttcaaaatcttttcattctcc

SEQ ID NO: 166344 - DNA, 33 bp, Homo sapien
tcctgtaagcctttcagaatcttttcattctcc

SEQ ID NO: 166345 - DNA, 33 bp, Homo sapien
ctgacaagctaagagaactctacataattaaaa

SEQ ID NO: 166346 - DNA, 33 bp, Homo sapien
ctgacaagctaagagacctctacataattaaaa

SEQ ID NO: 166347 - DNA, 33 bp, Homo sapien
tctgctgaattttaacacaacccttagttgacc

SEQ ID NO: 166348 - DNA, 33 bp, Homo sapien
tctgctgaattttaacgcaacccttagttgacc

SEQ ID NO: 166349 - DNA, 33 bp, Homo sapien
tagccaagctaagctacgctaaatcatctcatc

SEQ ID NO: 166350 - DNA, 33 bp, Homo sapien
tagccaagctaagctatgctaaatcatctcatc

SEQ ID NO: 166351 - DNA, 33 bp, Homo sapien
aaagagctaaaaatcaccaaattaaggccagaa

SEQ ID NO: 166352 - DNA, 33 bp, Homo sapien
aaagagctaaaaatcatcaaattaaggccagaa

SEQ ID NO: 166353 - DNA, 33 bp, Homo sapien
gatcctcttgcaatttaaaaaccagtagtgctc

SEQ ID NO: 166354 - DNA, 33 bp, Homo sapien
gatcctcttgcaattttaaaaccagtagtgctc

SEQ ID NO: 166355 - DNA, 33 bp, Homo sapien
aagacatttgtagcaaataagatcgcaaaaggg

SEQ ID NO: 166356 - DNA, 33 bp, Homo sapien
aagacatttgtagcaagtaagatcgcaaaaggg

SEQ ID NO: 166357 - DNA, 33 bp, Homo sapien
aacatctacaaaattgcaatgctgagaaacttc

SEQ ID NO: 166358 - DNA, 33 bp, Homo sapien
aacatctacaaaattgtaatgctgagaaacttc

SEQ ID NO: 166359 - DNA, 33 bp, Homo sapien
gcctggtaattgacacggattaaacaattgttc

SEQ ID NO: 166360 - DNA, 33 bp, Homo sapien
gcctggtaattgacactgattaaacaattgttc

SEQ ID NO: 166361 - DNA, 33 bp, Homo sapien
tttaggagtacacatccataagcatttacaaac

SEQ ID NO: 166362 - DNA, 33 bp, Homo sapien
tttaggagtacacatctataagcatttacaaac

SEQ ID NO: 166363 - DNA, 33 bp, Homo sapien
gactcccagaacctaacgtcaaccaatgttaat

SEQ ID NO: 166364 - DNA, 33 bp, Homo sapien
gactcccagaacctaatgtcaaccaatgttaat

SEQ ID NO: 166365 - DNA, 33 bp, Homo sapien
ttgtgaacaaagaataaaatgcccaatgcctgg

SEQ ID NO: 166366 - DNA, 33 bp, Homo sapien
ttgtgaacaaagaatacaatgcccaatgcctgg

SEQ ID NO: 166367 - DNA, 33 bp, Homo sapien
gtagacaagagaaaataaaattgcaataattct

SEQ ID NO: 166368 - DNA, 33 bp, Homo sapien
gtagacaagagaaaatgaaattgcaataattct

SEQ ID NO: 166369 - DNA, 33 bp, Homo sapien
ctgtatcaaaagcctagacagaattgcaggagg

SEQ ID NO: 166370 - DNA, 33 bp, Homo sapien
ctgtatcaaaagcctatacagaattgcaggagg

SEQ ID NO: 166371 - DNA, 33 bp, Homo sapien
agagaccttgtgtaaacctcccaaccaaaagtc

SEQ ID NO: 166372 - DNA, 33 bp, Homo sapien
agagaccttgtgtaaatctcccaaccaaaagtc

SEQ ID NO: 166373 - DNA, 33 bp, Homo sapien
tggaatttacgtttagaagaaattggctaaaac

SEQ ID NO: 166374 - DNA, 33 bp, Homo sapien
tggaatttacgtttaggagaaattggctaaaac

SEQ ID NO: 166375 - DNA, 33 bp, Homo sapien
ctcaagataacacatacagtaggtgagtggact

SEQ ID NO: 166376 - DNA, 33 bp, Homo sapien
ctcaagataacacatatagtaggtgagtggact

SEQ ID NO: 166377 - DNA, 33 bp, Homo sapien
tggcacatttaggtacacagagcaaatatagtc

SEQ ID NO: 166378 - DNA, 33 bp, Homo sapien
tggcacatttaggtacgcagagcaaatatagtc

SEQ ID NO: 166379 - DNA, 33 bp, Homo sapien
aaaaatctcatcccccaaaagtgttttaattaa

SEQ ID NO: 166380 - DNA, 33 bp, Homo sapien
aaaaatctcatccccctaaagtgttttaattaa

SEQ ID NO: 166381 - DNA, 33 bp, Homo sapien
gcatttgaaaaaacaacaggaaagagaaggtca

SEQ ID NO: 166382 - DNA, 33 bp, Homo sapien
gcatttgaaaaaacaagaggaaagagaaggtca

SEQ ID NO: 166383 - DNA, 33 bp, Homo sapien
aggctcgatatcaagacgggtattcctaggttt

SEQ ID NO: 166384 - DNA, 33 bp, Homo sapien
aggctcgatatcaagatgggtattcctaggttt

SEQ ID NO: 166385 - DNA, 33 bp, Homo sapien
ctaattatgctcttataagtcattggaaaattc

SEQ ID NO: 166386 - DNA, 33 bp, Homo sapien
ctaattatgctcttatgagtcattggaaaattc

SEQ ID NO: 166387 - DNA, 33 bp, Homo sapien
actgcaaagaggtgaacgatgaatacaatatca

SEQ ID NO: 166388 - DNA, 33 bp, Homo sapien
actgcaaagaggtgaatgatgaatacaatatca

SEQ ID NO: 166389 - DNA, 33 bp, Homo sapien
atgccaatctgaaaaacagtgagtaggtgacta

SEQ ID NO: 166390 - DNA, 33 bp, Homo sapien
atgccaatctgaaaaatagtgagtaggtgacta

SEQ ID NO: 166391 - DNA, 33 bp, Homo sapien
ttgaactgaaaagtcaactttctgaaaatcaag

SEQ ID NO: 166392 - DNA, 33 bp, Homo sapien
ttgaactgaaaagtcacctttctgaaaatcaag

SEQ ID NO: 166393 - DNA, 33 bp, Homo sapien
atgaggagagagaaatcattgggagtcatctga

SEQ ID NO: 166394 - DNA, 33 bp, Homo sapien
atgaggagagagaaattattgggagtcatctga

SEQ ID NO: 166395 - DNA, 33 bp, Homo sapien
gtaatttggaaagcaacttatcttttgggttga

SEQ ID NO: 166396 - DNA, 33 bp, Homo sapien
gtaatttggaaagcaagttatcttttgggttga

SEQ ID NO: 166397 - DNA, 33 bp, Homo sapien
ctcattcttccttttcacaggacaagaacttgg

SEQ ID NO: 166398 - DNA, 33 bp, Homo sapien
ctcattcttccttttcgcaggacaagaacttgg

SEQ ID NO: 166399 - DNA, 33 bp, Homo sapien
catatgaaacagactgaacttaaaactgcatga

SEQ ID NO: 166400 - DNA, 33 bp, Homo sapien
catatgaaacagactgcacttaaaactgcatga

SEQ ID NO: 166401 - DNA, 33 bp, Homo sapien
tgcaactgcgtatttacaagtccagcaggagaa

SEQ ID NO: 166402 - DNA, 33 bp, Homo sapien
tgcaactgcgtatttagaagtccagcaggagaa

SEQ ID NO: 166403 - DNA, 33 bp, Homo sapien
cttgaaccagaggtctcaaaaaatagctaggtt

SEQ ID NO: 166404 - DNA, 33 bp, Homo sapien
cttgaaccagaggtctgaaaaaatagctaggtt

SEQ ID NO: 166405 - DNA, 33 bp, Homo sapien
tgttgattgtcctctgaatgcctaaatgccaat

SEQ ID NO: 166406 - DNA, 33 bp, Homo sapien
tgttgattgtcctctggatgcctaaatgccaat

SEQ ID NO: 166407 - DNA, 33 bp, Homo sapien
gacttatttcctaaatcacaccaagaccactgt

SEQ ID NO: 166408 - DNA, 33 bp, Homo sapien
gacttatttcctaaatgacaccaagaccactgt

SEQ ID NO: 166409 - DNA, 33 bp, Homo sapien
gatacaaacatttgaacagttttgctattgatc

SEQ ID NO: 166410 - DNA, 33 bp, Homo sapien
gatacaaacatttgaagagttttgctattgatc

SEQ ID NO: 166411 - DNA, 33 bp, Homo sapien
ttgtaaagagtatgtaagggctttggaaacagc

SEQ ID NO: 166412 - DNA, 33 bp, Homo sapien
ttgtaaagagtatgtaggggctttggaaacagc

SEQ ID NO: 166413 - DNA, 33 bp, Homo sapien
gtatagtgctcacttaagctgaatacgtactaa

SEQ ID NO: 166414 - DNA, 33 bp, Homo sapien
gtatagtgctcacttaggctgaatacgtactaa

SEQ ID NO: 166415 - DNA, 33 bp, Homo sapien
atactcaagactgctaggaaatatttagtatag

SEQ ID NO: 166416 - DNA, 33 bp, Homo sapien
atactcaagactgctatgaaatatttagtatag

SEQ ID NO: 166417 - DNA, 33 bp, Homo sapien
tatagtactaactccaaaagaaccatacttcct

SEQ ID NO: 166418 - DNA, 33 bp, Homo sapien
tatagtactaactccagaagaaccatacttcct

SEQ ID NO: 166419 - DNA, 33 bp, Homo sapien
tgctggtgtcgccttaactttctcatggaatta

SEQ ID NO: 166420 - DNA, 33 bp, Homo sapien
tgctggtgtcgccttagctttctcatggaatta

SEQ ID NO: 166421 - DNA, 33 bp, Homo sapien
tattttgtttaccaggacattatgaaacttaga

SEQ ID NO: 166422 - DNA, 33 bp, Homo sapien
tattttgtttaccaggtcattatgaaacttaga

SEQ ID NO: 166423 - DNA, 33 bp, Homo sapien
tttagaaaagcaaaagaaggatgcagttaataa

SEQ ID NO: 166424 - DNA, 33 bp, Homo sapien
tttagaaaagcaaaagtaggatgcagttaataa

SEQ ID NO: 166425 - DNA, 33 bp, Homo sapien
gatttcaaggacctaaacacagatatcttaaaa

SEQ ID NO: 166426 - DNA, 33 bp, Homo sapien
gatttcaaggacctaaccacagatatcttaaaa

SEQ ID NO: 166427 - DNA, 33 bp, Homo sapien
ctctgaccgtgataaacgcagtgaaaggaaaca

SEQ ID NO: 166428 - DNA, 33 bp, Homo sapien
ctctgaccgtgataaatgcagtgaaaggaaaca

SEQ ID NO: 166429 - DNA, 33 bp, Homo sapien
ctaaaccgctgagtcacaagtttacctatataa

SEQ ID NO: 166430 - DNA, 33 bp, Homo sapien
ctaaaccgctgagtcataagtttacctatataa

SEQ ID NO: 166431 - DNA, 33 bp, Homo sapien
atgaataaaaaaagatgagttggcctctttgca

SEQ ID NO: 166432 - DNA, 33 bp, Homo sapien
atgaataaaaaaagattagttggcctctttgca

SEQ ID NO: 166433 - DNA, 33 bp, Homo sapien
tttcctgctcaaaaaacgtaatgtgatcactct

SEQ ID NO: 166434 - DNA, 33 bp, Homo sapien
tttcctgctcaaaaaatgtaatgtgatcactct

SEQ ID NO: 166435 - DNA, 33 bp, Homo sapien
gtttaaataattgaagcccactttgcattcctt

SEQ ID NO: 166436 - DNA, 33 bp, Homo sapien
gtttaaataattgaagtccactttgcattcctt

SEQ ID NO: 166437 - DNA, 33 bp, Homo sapien
gctaaacttcaattcaaggatgaatccaaatgg

SEQ ID NO: 166438 - DNA, 33 bp, Homo sapien
gctaaacttcaattcagggatgaatccaaatgg

SEQ ID NO: 166439 - DNA, 33 bp, Homo sapien
tagatcaaagtaactacgcaaatggaaaggacc

SEQ ID NO: 166440 - DNA, 33 bp, Homo sapien
tagatcaaagtaactatgcaaatggaaaggacc

SEQ ID NO: 166441 - DNA, 33 bp, Homo sapien
taaatcaggtcataccactagaaaacaatgtgg

SEQ ID NO: 166442 - DNA, 33 bp, Homo sapien
taaatcaggtcataccgctagaaaacaatgtgg

SEQ ID NO: 166443 - DNA, 33 bp, Homo sapien
tgagttgaaagcatagcaacaaggccattgtag

SEQ ID NO: 166444 - DNA, 33 bp, Homo sapien
tgagttgaaagcatagtaacaaggccattgtag

SEQ ID NO: 166445 - DNA, 33 bp, Homo sapien
agcaagggcatgaggaataggttgaataaagtt

SEQ ID NO: 166446 - DNA, 33 bp, Homo sapien
agcaagggcatgaggattaggttgaataaagtt

SEQ ID NO: 166447 - DNA, 33 bp, Homo sapien
acttctcactatagccactgttatctccctggt

SEQ ID NO: 166448 - DNA, 33 bp, Homo sapien
acttctcactatagccgctgttatctccctggt

SEQ ID NO: 166449 - DNA, 33 bp, Homo sapien
aggaaacgtattgaccaacctctcctcgacatt

SEQ ID NO: 166450 - DNA, 33 bp, Homo sapien
aggaaacgtattgacccacctctcctcgacatt

SEQ ID NO: 166451 - DNA, 33 bp, Homo sapien
cttcctctgaggcaggcattactaactaatttc

SEQ ID NO: 166452 - DNA, 33 bp, Homo sapien
cttcctctgaggcaggtattactaactaatttc

SEQ ID NO: 166453 - DNA, 33 bp, Homo sapien
aatagtgataacctcactcataccacagaactt

SEQ ID NO: 166454 - DNA, 33 bp, Homo sapien
aatagtgataacctcattcataccacagaactt

SEQ ID NO: 166455 - DNA, 33 bp, Homo sapien
tgaccagctgcatgaaacaattaagagtcacag

SEQ ID NO: 166456 - DNA, 33 bp, Homo sapien
tgaccagctgcatgaagcaattaagagtcacag

SEQ ID NO: 166457 - DNA, 33 bp, Homo sapien
aatgcatggaaaattcacctgaatgagttaaag

SEQ ID NO: 166458 - DNA, 33 bp, Homo sapien
aatgcatggaaaattcgcctgaatgagttaaag

SEQ ID NO: 166459 - DNA, 33 bp, Homo sapien
gtcacaatgagtccacagctaaggcaggggatt

SEQ ID NO: 166460 - DNA, 33 bp, Homo sapien
gtcacaatgagtccacggctaaggcaggggatt

SEQ ID NO: 166461 - DNA, 33 bp, Homo sapien
tccgggactcaacaaacgatactttctaatgga

SEQ ID NO: 166462 - DNA, 33 bp, Homo sapien
tccgggactcaacaaaggatactttctaatgga

SEQ ID NO: 166463 - DNA, 33 bp, Homo sapien
atgtttctgctccaaacattactttcctgttaa

SEQ ID NO: 166464 - DNA, 33 bp, Homo sapien
atgtttctgctccaaatattactttcctgttaa

SEQ ID NO: 166465 - DNA, 33 bp, Homo sapien
cagtgaataggctacaaatacgtgttgtagggt

SEQ ID NO: 166466 - DNA, 33 bp, Homo sapien
cagtgaataggctacatatacgtgttgtagggt

SEQ ID NO: 166467 - DNA, 33 bp, Homo sapien
tgtttaagcctcaaaaacaaaaaatcacttgag

SEQ ID NO: 166468 - DNA, 33 bp, Homo sapien
tgtttaagcctcaaaagcaaaaaatcacttgag

SEQ ID NO: 166469 - DNA, 33 bp, Homo sapien
ctctatcatattatccaatttctttaatgttaa

SEQ ID NO: 166470 - DNA, 33 bp, Homo sapien
ctctatcatattatcccatttctttaatgttaa

SEQ ID NO: 166471 - DNA, 33 bp, Homo sapien
ggataaatatgcttccagatctatctatacatt

SEQ ID NO: 166472 - DNA, 33 bp, Homo sapien
ggataaatatgcttcctgatctatctatacatt

SEQ ID NO: 166473 - DNA, 33 bp, Homo sapien
taattccatctttttacgactttcatgacttag

SEQ ID NO: 166474 - DNA, 33 bp, Homo sapien
taattccatctttttatgactttcatgacttag

SEQ ID NO: 166475 - DNA, 33 bp, Homo sapien
aaggctgtaagggtgacggtaaaaggcagaata

SEQ ID NO: 166476 - DNA, 33 bp, Homo sapien
aaggctgtaagggtgatggtaaaaggcagaata

SEQ ID NO: 166477 - DNA, 33 bp, Homo sapien
gagactggatttagagaatcagactgcctgggt

SEQ ID NO: 166478 - DNA, 33 bp, Homo sapien
gagactggatttagagtatcagactgcctgggt

SEQ ID NO: 166479 - DNA, 33 bp, Homo sapien
tgtacacctatgaatgaatcttttcttgaatct

SEQ ID NO: 166480 - DNA, 33 bp, Homo sapien
tgtacacctatgaatgcatcttttcttgaatct

SEQ ID NO: 166481 - DNA, 33 bp, Homo sapien
gagctctgactaaacagtcctaacagaatcttt

SEQ ID NO: 166482 - DNA, 33 bp, Homo sapien
gagctctgactaaacattcctaacagaatcttt

SEQ ID NO: 166483 - DNA, 33 bp, Homo sapien
tgtgatagagtatcgggagttataggtattgag

SEQ ID NO: 166484 - DNA, 33 bp, Homo sapien
tgtgatagagtatcggtagttataggtattgag

SEQ ID NO: 166485 - DNA, 33 bp, Homo sapien
tagaactatgttggaccctctgcttattcagct

SEQ ID NO: 166486 - DNA, 33 bp, Homo sapien
tagaactatgttggactctctgcttattcagct

SEQ ID NO: 166487 - DNA, 33 bp, Homo sapien
atctgatgaataattcctaaaatacgcaaatat

SEQ ID NO: 166488 - DNA, 33 bp, Homo sapien
atctgatgaataattcttaaaatacgcaaatat

SEQ ID NO: 166489 - DNA, 33 bp, Homo sapien
atcactgaataaaaggccatttagctcacttgc

SEQ ID NO: 166490 - DNA, 33 bp, Homo sapien
atcactgaataaaaggtcatttagctcacttgc

SEQ ID NO: 166491 - DNA, 33 bp, Homo sapien
cccacagtaccaatgacgaaccaaatgtagatg

SEQ ID NO: 166492 - DNA, 33 bp, Homo sapien
cccacagtaccaatgatgaaccaaatgtagatg

SEQ ID NO: 166493 - DNA, 33 bp, Homo sapien
taatactggcagtttacactggatcctacaaac

SEQ ID NO: 166494 - DNA, 33 bp, Homo sapien
taatactggcagtttagactggatcctacaaac

SEQ ID NO: 166495 - DNA, 33 bp, Homo sapien
aaaatgtaaagcaatgacaccagaattgtttct

SEQ ID NO: 166496 - DNA, 33 bp, Homo sapien
aaaatgtaaagcaatgccaccagaattgtttct

SEQ ID NO: 166497 - DNA, 33 bp, Homo sapien
actcatagtcctttcactatgtgtagctggtat

SEQ ID NO: 166498 - DNA, 33 bp, Homo sapien
actcatagtcctttcattatgtgtagctggtat

SEQ ID NO: 166499 - DNA, 33 bp, Homo sapien
atggatgttagcaatacaaaaggaatcagagat

SEQ ID NO: 166500 - DNA, 33 bp, Homo sapien
atggatgttagcaatataaaaggaatcagagat

SEQ ID NO: 166501 - DNA, 33 bp, Homo sapien
cgaagatctttcattaccaaaattgtatgtaaa

SEQ ID NO: 166502 - DNA, 33 bp, Homo sapien
cgaagatctttcattagcaaaattgtatgtaaa

SEQ ID NO: 166503 - DNA, 33 bp, Homo sapien
caatcttatcttgtcaaaactgttacagttaaa

SEQ ID NO: 166504 - DNA, 33 bp, Homo sapien
caatcttatcttgtcagaactgttacagttaaa

SEQ ID NO: 166505 - DNA, 33 bp, Homo sapien
caaatttgctaggacacaactctttctgacaaa

SEQ ID NO: 166506 - DNA, 33 bp, Homo sapien
caaatttgctaggacataactctttctgacaaa

SEQ ID NO: 166507 - DNA, 33 bp, Homo sapien
atacatgaaatataggccaaggactcagaaatc

SEQ ID NO: 166508 - DNA, 33 bp, Homo sapien
atacatgaaatataggtcaaggactcagaaatc

SEQ ID NO: 166509 - DNA, 33 bp, Homo sapien
tcctttgtcctgaaaaatctagtgggatagaga

SEQ ID NO: 166510 - DNA, 33 bp, Homo sapien
tcctttgtcctgaaaagtctagtgggatagaga

SEQ ID NO: 166511 - DNA, 33 bp, Homo sapien
cagacagagtaaatacaaagaaacagggctcaa

SEQ ID NO: 166512 - DNA, 33 bp, Homo sapien
cagacagagtaaataccaagaaacagggctcaa

SEQ ID NO: 166513 - DNA, 33 bp, Homo sapien
tgaacaagagtgctgaaaactatggtgaggagg

SEQ ID NO: 166514 - DNA, 33 bp, Homo sapien
tgaacaagagtgctgacaactatggtgaggagg

SEQ ID NO: 166515 - DNA, 33 bp, Homo sapien
tatacaccacttttccaattaacacaactgcta

SEQ ID NO: 166516 - DNA, 33 bp, Homo sapien
tatacaccacttttcccattaacacaactgcta

SEQ ID NO: 166517 - DNA, 33 bp, Homo sapien
aaaggaagagagaaaaggagagcgaaaaagcac

SEQ ID NO: 166518 - DNA, 33 bp, Homo sapien
aaaggaagagagaaaatgagagcgaaaaagcac

SEQ ID NO: 166519 - DNA, 33 bp, Homo sapien
ttgcagttcttttagacgacatactcctagacc

SEQ ID NO: 166520 - DNA, 33 bp, Homo sapien
ttgcagttcttttagatgacatactcctagacc

SEQ ID NO: 166521 - DNA, 33 bp, Homo sapien
tgacaaataaccatgcaattctcatgtgagcat

SEQ ID NO: 166522 - DNA, 33 bp, Homo sapien
tgacaaataaccatgcgattctcatgtgagcat

SEQ ID NO: 166523 - DNA, 33 bp, Homo sapien
ttgctatgaaatggtacagcttatacttttgat

SEQ ID NO: 166524 - DNA, 33 bp, Homo sapien
ttgctatgaaatggtagagcttatacttttgat

SEQ ID NO: 166525 - DNA, 33 bp, Homo sapien
aggttggatttgcacccatgttgaagcaaaaaa

SEQ ID NO: 166526 - DNA, 33 bp, Homo sapien
aggttggatttgcacctatgttgaagcaaaaaa

SEQ ID NO: 166527 - DNA, 33 bp, Homo sapien
tttgaattagaagtaactgcatgaaaatctcta

SEQ ID NO: 166528 - DNA, 33 bp, Homo sapien
tttgaattagaagtaagtgcatgaaaatctcta

SEQ ID NO: 166529 - DNA, 33 bp, Homo sapien
agactaagttaagaaaagaaagtcatccaggag

SEQ ID NO: 166530 - DNA, 33 bp, Homo sapien
agactaagttaagaaaggaaagtcatccaggag

SEQ ID NO: 166531 - DNA, 33 bp, Homo sapien
acataatgagtctcaaaagatttttttcttaac

SEQ ID NO: 166532 - DNA, 33 bp, Homo sapien
acataatgagtctcaagagatttttttcttaac

SEQ ID NO: 166533 - DNA, 33 bp, Homo sapien
ttcaattacacctttcaattctaagtcagatat

SEQ ID NO: 166534 - DNA, 33 bp, Homo sapien
ttcaattacacctttctattctaagtcagatat

SEQ ID NO: 166535 - DNA, 33 bp, Homo sapien
ataaaataatgaaaggacagttaaatgtatatt

SEQ ID NO: 166536 - DNA, 33 bp, Homo sapien
ataaaataatgaaagggcagttaaatgtatatt

SEQ ID NO: 166537 - DNA, 33 bp, Homo sapien
attttccgactaatcccgagttattaatgtcta

SEQ ID NO: 166538 - DNA, 33 bp, Homo sapien
attttccgactaatcctgagttattaatgtcta

SEQ ID NO: 166539 - DNA, 33 bp, Homo sapien
atgatcatttgaattacgacccttcaacactga

SEQ ID NO: 166540 - DNA, 33 bp, Homo sapien
atgatcatttgaattatgacccttcaacactga

SEQ ID NO: 166541 - DNA, 33 bp, Homo sapien
ggttattacccactgactagttccctcttattc

SEQ ID NO: 166542 - DNA, 33 bp, Homo sapien
ggttattacccactgattagttccctcttattc

SEQ ID NO: 166543 - DNA, 33 bp, Homo sapien
aacagagtcgatcttaagttttctcgtttaaaa

SEQ ID NO: 166544 - DNA, 33 bp, Homo sapien
aacagagtcgatcttacgttttctcgtttaaaa

SEQ ID NO: 166545 - DNA, 33 bp, Homo sapien
ttgtcttggtgtttacgcactattgcattgcag

SEQ ID NO: 166546 - DNA, 33 bp, Homo sapien
ttgtcttggtgtttactcactattgcattgcag

SEQ ID NO: 166547 - DNA, 33 bp, Homo sapien
aattttaatataaccacgtggaaacatcaggca

SEQ ID NO: 166548 - DNA, 33 bp, Homo sapien
aattttaatataaccatgtggaaacatcaggca

SEQ ID NO: 166549 - DNA, 33 bp, Homo sapien
acttaatttctgtgagcccaaaggcaattaatg

SEQ ID NO: 166550 - DNA, 33 bp, Homo sapien
acttaatttctgtgagtccaaaggcaattaatg

SEQ ID NO: 166551 - DNA, 33 bp, Homo sapien
acttctgaaagtaacccggatagtcctatactg

SEQ ID NO: 166552 - DNA, 33 bp, Homo sapien
acttctgaaagtaacctggatagtcctatactg

SEQ ID NO: 166553 - DNA, 33 bp, Homo sapien
ttagacatggtcaatcaatcttatggctcctct

SEQ ID NO: 166554 - DNA, 33 bp, Homo sapien
ttagacatggtcaatcgatcttatggctcctct

SEQ ID NO: 166555 - DNA, 33 bp, Homo sapien
caactactcttgttcacgcctgggctatcagtc

SEQ ID NO: 166556 - DNA, 33 bp, Homo sapien
caactactcttgttcatgcctgggctatcagtc

SEQ ID NO: 166557 - DNA, 33 bp, Homo sapien
ccagcttaaattcaacagtcaatcattataatt

SEQ ID NO: 166558 - DNA, 33 bp, Homo sapien
ccagcttaaattcaacggtcaatcattataatt

SEQ ID NO: 166559 - DNA, 33 bp, Homo sapien
tcctccggaattaacactctatcagcagcagaa

SEQ ID NO: 166560 - DNA, 33 bp, Homo sapien
tcctccggaattaacattctatcagcagcagaa

SEQ ID NO: 166561 - DNA, 33 bp, Homo sapien
aagatctggtattccacgcctgtgacaagtatc

SEQ ID NO: 166562 - DNA, 33 bp, Homo sapien
aagatctggtattccatgcctgtgacaagtatc

SEQ ID NO: 166563 - DNA, 33 bp, Homo sapien
ttaagtggcacaaaaaataatggtaaccaaatt

SEQ ID NO: 166564 - DNA, 33 bp, Homo sapien
ttaagtggcacaaaaagtaatggtaaccaaatt

SEQ ID NO: 166565 - DNA, 33 bp, Homo sapien
aataaataaattcccaacaatgaggcagatctc

SEQ ID NO: 166566 - DNA, 33 bp, Homo sapien
aataaataaattcccagcaatgaggcagatctc

SEQ ID NO: 166567 - DNA, 33 bp, Homo sapien
aagaaaaattgctttaaaaactactatgctata

SEQ ID NO: 166568 - DNA, 33 bp, Homo sapien
aagaaaaattgctttagaaactactatgctata

SEQ ID NO: 166569 - DNA, 33 bp, Homo sapien
ctttcaggcattgacaacagagtttacacactc

SEQ ID NO: 166570 - DNA, 33 bp, Homo sapien
ctttcaggcattgacaccagagtttacacactc

SEQ ID NO: 166571 - DNA, 33 bp, Homo sapien
gggtctccaaagcctaaacaaaaaatgcacgag

SEQ ID NO: 166572 - DNA, 33 bp, Homo sapien
gggtctccaaagcctagacaaaaaatgcacgag

SEQ ID NO: 166573 - DNA, 33 bp, Homo sapien
gctacaaggagtgtaactgaccaggggcaaagc

SEQ ID NO: 166574 - DNA, 33 bp, Homo sapien
gctacaaggagtgtaattgaccaggggcaaagc

SEQ ID NO: 166575 - DNA, 33 bp, Homo sapien
cttccagttgactcacagacatataagtaaaaa

SEQ ID NO: 166576 - DNA, 33 bp, Homo sapien
cttccagttgactcacggacatataagtaaaaa

SEQ ID NO: 166577 - DNA, 33 bp, Homo sapien
gagactcctctttacaaaaggccaaacatcctt

SEQ ID NO: 166578 - DNA, 33 bp, Homo sapien
gagactcctctttacacaaggccaaacatcctt

SEQ ID NO: 166579 - DNA, 33 bp, Homo sapien
ttcttcttgccataaaactatcagcagattttt

SEQ ID NO: 166580 - DNA, 33 bp, Homo sapien
ttcttcttgccataaagctatcagcagattttt

SEQ ID NO: 166581 - DNA, 33 bp, Homo sapien
ctaatctgtccatgaagtgttgtaaaatcattg

SEQ ID NO: 166582 - DNA, 33 bp, Homo sapien
ctaatctgtccatgaattgttgtaaaatcattg

SEQ ID NO: 166583 - DNA, 33 bp, Homo sapien
taacattttgaacctaacactgtcctgcttgaa

SEQ ID NO: 166584 - DNA, 33 bp, Homo sapien
taacattttgaacctaccactgtcctgcttgaa

SEQ ID NO: 166585 - DNA, 33 bp, Homo sapien
ggaagtcctaccagacagctctgcattacagtt

SEQ ID NO: 166586 - DNA, 33 bp, Homo sapien
ggaagtcctaccagactgctctgcattacagtt

SEQ ID NO: 166587 - DNA, 33 bp, Homo sapien
tagaatactccttccccaagtcagagctcatgc

SEQ ID NO: 166588 - DNA, 33 bp, Homo sapien
tagaatactccttccctaagtcagagctcatgc

SEQ ID NO: 166589 - DNA, 33 bp, Homo sapien
taccacaaagaagttaagtcttgtgtgaaactg

SEQ ID NO: 166590 - DNA, 33 bp, Homo sapien
taccacaaagaagttacgtcttgtgtgaaactg

SEQ ID NO: 166591 - DNA, 33 bp, Homo sapien
aagccacaagctttcaaatatgcctttctctgc

SEQ ID NO: 166592 - DNA, 33 bp, Homo sapien
aagccacaagctttcagatatgcctttctctgc

SEQ ID NO: 166593 - DNA, 33 bp, Homo sapien
ccagtgtatatgacaacgaaaaggtgcaattta

SEQ ID NO: 166594 - DNA, 33 bp, Homo sapien
ccagtgtatatgacaatgaaaaggtgcaattta

SEQ ID NO: 166595 - DNA, 33 bp, Homo sapien
acataacattttaaagcccatgtgatacaatgt

SEQ ID NO: 166596 - DNA, 33 bp, Homo sapien
acataacattttaaaggccatgtgatacaatgt

SEQ ID NO: 166597 - DNA, 33 bp, Homo sapien
ctggaaaaaacatcacaactctaaattataaac

SEQ ID NO: 166598 - DNA, 33 bp, Homo sapien
ctggaaaaaacatcacgactctaaattataaac

SEQ ID NO: 166599 - DNA, 33 bp, Homo sapien
catacaggtatagagaagagaaatatgaaccaa

SEQ ID NO: 166600 - DNA, 33 bp, Homo sapien
catacaggtatagagacgagaaatatgaaccaa

SEQ ID NO: 166601 - DNA, 33 bp, Homo sapien
cctttcctgttagaaaagtataactcacttcct

SEQ ID NO: 166602 - DNA, 33 bp, Homo sapien
cctttcctgttagaaatgtataactcacttcct

SEQ ID NO: 166603 - DNA, 33 bp, Homo sapien
aatatgtgtcagataaatgtgttcataacttcc

SEQ ID NO: 166604 - DNA, 33 bp, Homo sapien
aatatgtgtcagataagtgtgttcataacttcc

SEQ ID NO: 166605 - DNA, 33 bp, Homo sapien
agaatgagatagtaaacatttgttgagttgaat

SEQ ID NO: 166606 - DNA, 33 bp, Homo sapien
agaatgagatagtaaagatttgttgagttgaat

SEQ ID NO: 166607 - DNA, 33 bp, Homo sapien
ggagactgtagagaaacggtataatgactagat

SEQ ID NO: 166608 - DNA, 33 bp, Homo sapien
ggagactgtagagaaatggtataatgactagat

SEQ ID NO: 166609 - DNA, 33 bp, Homo sapien
cttcttacatagcggcaagcaaaaggagagaat

SEQ ID NO: 166610 - DNA, 33 bp, Homo sapien
cttcttacatagcggcgagcaaaaggagagaat

SEQ ID NO: 166611 - DNA, 33 bp, Homo sapien
gcatatatttcagagacacaaaaacttgcatcc

SEQ ID NO: 166612 - DNA, 33 bp, Homo sapien
gcatatatttcagagagacaaaaacttgcatcc

SEQ ID NO: 166613 - DNA, 33 bp, Homo sapien
tacccctctatcacacagtaagaacaatatttt

SEQ ID NO: 166614 - DNA, 33 bp, Homo sapien
tacccctctatcacacggtaagaacaatatttt

SEQ ID NO: 166615 - DNA, 33 bp, Homo sapien
gagtacagagtagataccaataaaatttgttga

SEQ ID NO: 166616 - DNA, 33 bp, Homo sapien
gagtacagagtagatatcaataaaatttgttga

SEQ ID NO: 166617 - DNA, 33 bp, Homo sapien
tctatctcataaacaaatccagatacacaataa

SEQ ID NO: 166618 - DNA, 33 bp, Homo sapien
tctatctcataaacaattccagatacacaataa

SEQ ID NO: 166619 - DNA, 33 bp, Homo sapien
actgacacttgtctcacgaaaaagctctctctt

SEQ ID NO: 166620 - DNA, 33 bp, Homo sapien
actgacacttgtctcatgaaaaagctctctctt

SEQ ID NO: 166621 - DNA, 33 bp, Homo sapien
ttaaaattgtgtagaacgttacatcggtataaa

SEQ ID NO: 166622 - DNA, 33 bp, Homo sapien
ttaaaattgtgtagaatgttacatcggtataaa

SEQ ID NO: 166623 - DNA, 33 bp, Homo sapien
aaaacctgtagcaaagcctgaagaaaatatgtg

SEQ ID NO: 166624 - DNA, 33 bp, Homo sapien
aaaacctgtagcaaaggctgaagaaaatatgtg

SEQ ID NO: 166625 - DNA, 33 bp, Homo sapien
gtagctacacattttaccatacaggctgagtta

SEQ ID NO: 166626 - DNA, 33 bp, Homo sapien
gtagctacacattttatcatacaggctgagtta

SEQ ID NO: 166627 - DNA, 33 bp, Homo sapien
tttgttgttctcaactaagattcacctcttccc

SEQ ID NO: 166628 - DNA, 33 bp, Homo sapien
tttgttgttctcaactcagattcacctcttccc

SEQ ID NO: 166629 - DNA, 33 bp, Homo sapien
aaacaacaacaaaagaataaggaagagacgtga

SEQ ID NO: 166630 - DNA, 33 bp, Homo sapien
aaacaacaacaaaagagtaaggaagagacgtga

SEQ ID NO: 166631 - DNA, 33 bp, Homo sapien
ggaaatttttgtgtctaagaagaaagagatacg

SEQ ID NO: 166632 - DNA, 33 bp, Homo sapien
ggaaatttttgtgtctgagaagaaagagatacg

SEQ ID NO: 166633 - DNA, 33 bp, Homo sapien
ttcatcactactcctccgaagatgactcttgag

SEQ ID NO: 166634 - DNA, 33 bp, Homo sapien
ttcatcactactcctctgaagatgactcttgag

SEQ ID NO: 166635 - DNA, 33 bp, Homo sapien
ccctcagccatagtcaccttgagagttttgaat

SEQ ID NO: 166636 - DNA, 33 bp, Homo sapien
ccctcagccatagtcatcttgagagttttgaat

SEQ ID NO: 166637 - DNA, 33 bp, Homo sapien
ataacacttcctctaccgaaagataggttctat

SEQ ID NO: 166638 - DNA, 33 bp, Homo sapien
ataacacttcctctactgaaagataggttctat

SEQ ID NO: 166639 - DNA, 33 bp, Homo sapien
caatgcccaagaaaagaagaaattaagcctcag

SEQ ID NO: 166640 - DNA, 33 bp, Homo sapien
caatgcccaagaaaaggagaaattaagcctcag

SEQ ID NO: 166641 - DNA, 33 bp, Homo sapien
aagcaggtgagctttgaaacatgctacatgatt

SEQ ID NO: 166642 - DNA, 33 bp, Homo sapien
aagcaggtgagctttggaacatgctacatgatt

SEQ ID NO: 166643 - DNA, 33 bp, Homo sapien
caaaagtacaagattaaagcattttctgatatt

SEQ ID NO: 166644 - DNA, 33 bp, Homo sapien
caaaagtacaagattacagcattttctgatatt

SEQ ID NO: 166645 - DNA, 33 bp, Homo sapien
gtcttgcaggcagctacagaatgaagacagctg

SEQ ID NO: 166646 - DNA, 33 bp, Homo sapien
gtcttgcaggcagctagagaatgaagacagctg

SEQ ID NO: 166647 - DNA, 33 bp, Homo sapien
ccaggctgtgagttcacgtgtctaataaattgc

SEQ ID NO: 166648 - DNA, 33 bp, Homo sapien
ccaggctgtgagttcatgtgtctaataaattgc

SEQ ID NO: 166649 - DNA, 33 bp, Homo sapien
aaaggagactcttttaactcagaagagatgaca

SEQ ID NO: 166650 - DNA, 33 bp, Homo sapien
aaaggagactcttttagctcagaagagatgaca

SEQ ID NO: 166651 - DNA, 33 bp, Homo sapien
ttgaatctctccgtgaactggaaacacccctca

SEQ ID NO: 166652 - DNA, 33 bp, Homo sapien
ttgaatctctccgtgacctggaaacacccctca

SEQ ID NO: 166653 - DNA, 33 bp, Homo sapien
ctgctttataatgctacgaacttatgagatatt

SEQ ID NO: 166654 - DNA, 33 bp, Homo sapien
ctgctttataatgctatgaacttatgagatatt

SEQ ID NO: 166655 - DNA, 33 bp, Homo sapien
tgacaactgaaatatgaaggtgctttctcttct

SEQ ID NO: 166656 - DNA, 33 bp, Homo sapien
tgacaactgaaatatgtaggtgctttctcttct

SEQ ID NO: 166657 - DNA, 33 bp, Homo sapien
atctgccaggtaatccccttctctccaaagcct

SEQ ID NO: 166658 - DNA, 33 bp, Homo sapien
atctgccaggtaatcctcttctctccaaagcct

SEQ ID NO: 166659 - DNA, 33 bp, Homo sapien
agggacttctctctcccacctttactcatctat

SEQ ID NO: 166660 - DNA, 33 bp, Homo sapien
agggacttctctctcctacctttactcatctat

SEQ ID NO: 166661 - DNA, 33 bp, Homo sapien
tgcaataagaactgtaaagaggcttgaggcagt

SEQ ID NO: 166662 - DNA, 33 bp, Homo sapien
tgcaataagaactgtagagaggcttgaggcagt

SEQ ID NO: 166663 - DNA, 33 bp, Homo sapien
tggtggttggttgaaaatctggagattaagaaa

SEQ ID NO: 166664 - DNA, 33 bp, Homo sapien
tggtggttggttgaaactctggagattaagaaa

SEQ ID NO: 166665 - DNA, 33 bp, Homo sapien
gctgagattttcagtgcatttttcagttctcta

SEQ ID NO: 166666 - DNA, 33 bp, Homo sapien
gctgagattttcagtgtatttttcagttctcta

SEQ ID NO: 166667 - DNA, 33 bp, Homo sapien
acttgatgttgatagcaacaggagacaggcaaa

SEQ ID NO: 166668 - DNA, 33 bp, Homo sapien
acttgatgttgatagcgacaggagacaggcaaa

SEQ ID NO: 166669 - DNA, 33 bp, Homo sapien
cttctttcagctaacactcagcgtgtgatggag

SEQ ID NO: 166670 - DNA, 33 bp, Homo sapien
cttctttcagctaacattcagcgtgtgatggag

SEQ ID NO: 166671 - DNA, 33 bp, Homo sapien
ctagaatttcactaaaatatttgaactctcctt

SEQ ID NO: 166672 - DNA, 33 bp, Homo sapien
ctagaatttcactaaagtatttgaactctcctt

SEQ ID NO: 166673 - DNA, 33 bp, Homo sapien
acaacttattataaccgagaggctttgtcttag

SEQ ID NO: 166674 - DNA, 33 bp, Homo sapien
acaacttattataacctagaggctttgtcttag

SEQ ID NO: 166675 - DNA, 33 bp, Homo sapien
gttataataagttgtccatgatcgaccagggat

SEQ ID NO: 166676 - DNA, 33 bp, Homo sapien
gttataataagttgtctatgatcgaccagggat

SEQ ID NO: 166677 - DNA, 33 bp, Homo sapien
acatttcaaaaagagcccatggaaccctaagag

SEQ ID NO: 166678 - DNA, 33 bp, Homo sapien
acatttcaaaaagagcgcatggaaccctaagag

SEQ ID NO: 166679 - DNA, 33 bp, Homo sapien
aagcatattaggcttacctgagatgttaacatc

SEQ ID NO: 166680 - DNA, 33 bp, Homo sapien
aagcatattaggcttatctgagatgttaacatc

SEQ ID NO: 166681 - DNA, 33 bp, Homo sapien
gtaacttcttgcaaaactgtatcaaaatataac

SEQ ID NO: 166682 - DNA, 33 bp, Homo sapien
gtaacttcttgcaaaattgtatcaaaatataac

SEQ ID NO: 166683 - DNA, 33 bp, Homo sapien
gtttcattataaagtacacaagcatgagaacct

SEQ ID NO: 166684 - DNA, 33 bp, Homo sapien
gtttcattataaagtatacaagcatgagaacct

SEQ ID NO: 166685 - DNA, 33 bp, Homo sapien
ctcaagaacctttagacgctaagaaaaatctaa

SEQ ID NO: 166686 - DNA, 33 bp, Homo sapien
ctcaagaacctttagatgctaagaaaaatctaa

SEQ ID NO: 166687 - DNA, 33 bp, Homo sapien
ggagtttgcagccttacagtaagtaaaaagtgt

SEQ ID NO: 166688 - DNA, 33 bp, Homo sapien
ggagtttgcagccttatagtaagtaaaaagtgt

SEQ ID NO: 166689 - DNA, 33 bp, Homo sapien
cttttagagaactcaaaacaataactgtgcatg

SEQ ID NO: 166690 - DNA, 33 bp, Homo sapien
cttttagagaactcaagacaataactgtgcatg

SEQ ID NO: 166691 - DNA, 33 bp, Homo sapien
gaaaatgtatttttgaaaagaaaggctaaaatg

SEQ ID NO: 166692 - DNA, 33 bp, Homo sapien
gaaaatgtatttttgataagaaaggctaaaatg

SEQ ID NO: 166693 - DNA, 33 bp, Homo sapien
acatctctctctcctacgtttggtttctttctc

SEQ ID NO: 166694 - DNA, 33 bp, Homo sapien
acatctctctctcctatgtttggtttctttctc

SEQ ID NO: 166695 - DNA, 33 bp, Homo sapien
taaaaatttttacttaggtgaacagctaatatt

SEQ ID NO: 166696 - DNA, 33 bp, Homo sapien
taaaaatttttacttatgtgaacagctaatatt

SEQ ID NO: 166697 - DNA, 33 bp, Homo sapien
tacacaaagatcattccattttaggctagatgt

SEQ ID NO: 166698 - DNA, 33 bp, Homo sapien
tacacaaagatcattctattttaggctagatgt

SEQ ID NO: 166699 - DNA, 33 bp, Homo sapien
taataaagcctgtagactaaaattttgggtaaa

SEQ ID NO: 166700 - DNA, 33 bp, Homo sapien
taataaagcctgtagattaaaattttgggtaaa

SEQ ID NO: 166701 - DNA, 33 bp, Homo sapien
ggctctctggtcaaaaccttgagcttagcacaa

SEQ ID NO: 166702 - DNA, 33 bp, Homo sapien
ggctctctggtcaaaatcttgagcttagcacaa

SEQ ID NO: 166703 - DNA, 33 bp, Homo sapien
gatagacaaactacatcaaggataattcagaac

SEQ ID NO: 166704 - DNA, 33 bp, Homo sapien
gatagacaaactacatgaaggataattcagaac

SEQ ID NO: 166705 - DNA, 33 bp, Homo sapien
atatttgtagataaaaacaagggaatgcagtca

SEQ ID NO: 166706 - DNA, 33 bp, Homo sapien
atatttgtagataaaagcaagggaatgcagtca

SEQ ID NO: 166707 - DNA, 33 bp, Homo sapien
tttgcatgcctagttcaatattttgtttcattt

SEQ ID NO: 166708 - DNA, 33 bp, Homo sapien
tttgcatgcctagttcgatattttgtttcattt

SEQ ID NO: 166709 - DNA, 33 bp, Homo sapien
tgtctatttggaaatacggcattgcaaagggac

SEQ ID NO: 166710 - DNA, 33 bp, Homo sapien
tgtctatttggaaatatggcattgcaaagggac

SEQ ID NO: 166711 - DNA, 33 bp, Homo sapien
caaaatctcttttaggacaaaatatgctatgtt

SEQ ID NO: 166712 - DNA, 33 bp, Homo sapien
caaaatctcttttaggtcaaaatatgctatgtt

SEQ ID NO: 166713 - DNA, 33 bp, Homo sapien
attaaaaagttgcataccactctaagtcagaag

SEQ ID NO: 166714 - DNA, 33 bp, Homo sapien
attaaaaagttgcatatcactctaagtcagaag

SEQ ID NO: 166715 - DNA, 33 bp, Homo sapien
tatataacaccgctacaagttagggagacagat

SEQ ID NO: 166716 - DNA, 33 bp, Homo sapien
tatataacaccgctacgagttagggagacagat

SEQ ID NO: 166717 - DNA, 33 bp, Homo sapien
gcccacatgtaacatggaattgcttccctgttt

SEQ ID NO: 166718 - DNA, 33 bp, Homo sapien
gcccacatgtaacatgtaattgcttccctgttt

SEQ ID NO: 166719 - DNA, 33 bp, Homo sapien
ttccttgtttgttacaaccaactccataatctt

SEQ ID NO: 166720 - DNA, 33 bp, Homo sapien
ttccttgtttgttacacccaactccataatctt

SEQ ID NO: 166721 - DNA, 33 bp, Homo sapien
gtttggaaatcaaggactagaacaaagcccaaa

SEQ ID NO: 166722 - DNA, 33 bp, Homo sapien
gtttggaaatcaaggattagaacaaagcccaaa

SEQ ID NO: 166723 - DNA, 33 bp, Homo sapien
ataggacaaactgactaaagctaaaatgtcaag

SEQ ID NO: 166724 - DNA, 33 bp, Homo sapien
ataggacaaactgactgaagctaaaatgtcaag

SEQ ID NO: 166725 - DNA, 33 bp, Homo sapien
tccctaaatccggatcaaataagagactaaggg

SEQ ID NO: 166726 - DNA, 33 bp, Homo sapien
tccctaaatccggatcgaataagagactaaggg

SEQ ID NO: 166727 - DNA, 33 bp, Homo sapien
caggaaataagccacaataaactgatattattt

SEQ ID NO: 166728 - DNA, 33 bp, Homo sapien
caggaaataagccacagtaaactgatattattt

SEQ ID NO: 166729 - DNA, 33 bp, Homo sapien
gcttgacttcagagaaaagtcccgccggagacc

SEQ ID NO: 166730 - DNA, 33 bp, Homo sapien
gcttgacttcagagaagagtcccgccggagacc

SEQ ID NO: 166731 - DNA, 33 bp, Homo sapien
gggcaggctgagtaaacgaggcgcccttgtcgt

SEQ ID NO: 166732 - DNA, 33 bp, Homo sapien
gggcaggctgagtaaatgaggcgcccttgtcgt

SEQ ID NO: 166733 - DNA, 33 bp, Homo sapien
tgcttataaatttgtaggaagtttctgccttgc

SEQ ID NO: 166734 - DNA, 33 bp, Homo sapien
tgcttataaatttgtatgaagtttctgccttgc

SEQ ID NO: 166735 - DNA, 33 bp, Homo sapien
tgtattaggttttctaaaatgccagtcaactta

SEQ ID NO: 166736 - DNA, 33 bp, Homo sapien
tgtattaggttttctagaatgccagtcaactta

SEQ ID NO: 166737 - DNA, 33 bp, Homo sapien
ttattgaagggtatgaagatcacttagtgggtg

SEQ ID NO: 166738 - DNA, 33 bp, Homo sapien
ttattgaagggtatgaggatcacttagtgggtg

SEQ ID NO: 166739 - DNA, 33 bp, Homo sapien
attagaactgttttccaattcatatctaagcac

SEQ ID NO: 166740 - DNA, 33 bp, Homo sapien
attagaactgttttccgattcatatctaagcac

SEQ ID NO: 166741 - DNA, 33 bp, Homo sapien
aattgtgttatagtgaaatagcatctgattttg

SEQ ID NO: 166742 - DNA, 33 bp, Homo sapien
aattgtgttatagtgagatagcatctgattttg

SEQ ID NO: 166743 - DNA, 33 bp, Homo sapien
tgcaacggacgtgtcaaatagctctaccctggg

SEQ ID NO: 166744 - DNA, 33 bp, Homo sapien
tgcaacggacgtgtcagatagctctaccctggg

SEQ ID NO: 166745 - DNA, 33 bp, Homo sapien
cctcatttatcctcacaagaatgtaaactttat

SEQ ID NO: 166746 - DNA, 33 bp, Homo sapien
cctcatttatcctcacgagaatgtaaactttat

SEQ ID NO: 166747 - DNA, 33 bp, Homo sapien
ttttatttatggaaaagttaggaggaagcataa

SEQ ID NO: 166748 - DNA, 33 bp, Homo sapien
ttttatttatggaaaatttaggaggaagcataa

SEQ ID NO: 166749 - DNA, 33 bp, Homo sapien
agtatcaactttagctaagacacttcccttccc

SEQ ID NO: 166750 - DNA, 33 bp, Homo sapien
agtatcaactttagcttagacacttcccttccc

SEQ ID NO: 166751 - DNA, 33 bp, Homo sapien
agaaacattcacataaacagaagaaatacatac

SEQ ID NO: 166752 - DNA, 33 bp, Homo sapien
agaaacattcacataaccagaagaaatacatac

SEQ ID NO: 166753 - DNA, 33 bp, Homo sapien
cctgctacccagaataactatttcactatccca

SEQ ID NO: 166754 - DNA, 33 bp, Homo sapien
cctgctacccagaatatctatttcactatccca

SEQ ID NO: 166755 - DNA, 33 bp, Homo sapien
gctcatggcaccaagacgattactgatgttttt

SEQ ID NO: 166756 - DNA, 33 bp, Homo sapien
gctcatggcaccaagatgattactgatgttttt

SEQ ID NO: 166757 - DNA, 33 bp, Homo sapien
agaatttctactggacacagaagtttttgtaaa

SEQ ID NO: 166758 - DNA, 33 bp, Homo sapien
agaatttctactggacgcagaagtttttgtaaa

SEQ ID NO: 166759 - DNA, 33 bp, Homo sapien
aaattcttgtcagaaacggagataatgacaagc

SEQ ID NO: 166760 - DNA, 33 bp, Homo sapien
aaattcttgtcagaaatggagataatgacaagc

SEQ ID NO: 166761 - DNA, 33 bp, Homo sapien
gttcctcaccacctcaaaattacccatcctgag

SEQ ID NO: 166762 - DNA, 33 bp, Homo sapien
gttcctcaccacctcagaattacccatcctgag

SEQ ID NO: 166763 - DNA, 33 bp, Homo sapien
aggccagacaggaatgcatatgggcagatactc

SEQ ID NO: 166764 - DNA, 33 bp, Homo sapien
aggccagacaggaatggatatgggcagatactc

SEQ ID NO: 166765 - DNA, 33 bp, Homo sapien
gtgtgttgggctatgacggatacctcttgggac

SEQ ID NO: 166766 - DNA, 33 bp, Homo sapien
gtgtgttgggctatgatggatacctcttgggac

SEQ ID NO: 166767 - DNA, 33 bp, Homo sapien
tattacctgtcagatcaattaagaataaaaagt

SEQ ID NO: 166768 - DNA, 33 bp, Homo sapien
tattacctgtcagatcgattaagaataaaaagt

SEQ ID NO: 166769 - DNA, 33 bp, Homo sapien
tgagcttcagggtatgacaatagaaacctccaa

SEQ ID NO: 166770 - DNA, 33 bp, Homo sapien
tgagcttcagggtatgtcaatagaaacctccaa

SEQ ID NO: 166771 - DNA, 33 bp, Homo sapien
gtgttgtatttgaaccaatgggcatataagtct

SEQ ID NO: 166772 - DNA, 33 bp, Homo sapien
gtgttgtatttgaacccatgggcatataagtct

SEQ ID NO: 166773 - DNA, 33 bp, Homo sapien
atcttgtccccatttacctcaccagggatagaa

SEQ ID NO: 166774 - DNA, 33 bp, Homo sapien
atcttgtccccatttatctcaccagggatagaa

SEQ ID NO: 166775 - DNA, 33 bp, Homo sapien
ggagctgaaagtgaccaaagtgactcaaatatt

SEQ ID NO: 166776 - DNA, 33 bp, Homo sapien
ggagctgaaagtgaccgaagtgactcaaatatt

SEQ ID NO: 166777 - DNA, 33 bp, Homo sapien
tgagcagttgtgacagaatggcccacaaagctg

SEQ ID NO: 166778 - DNA, 33 bp, Homo sapien
tgagcagttgtgacaggatggcccacaaagctg

SEQ ID NO: 166779 - DNA, 33 bp, Homo sapien
ttaagtgctttacatgcatgattttctttctat

SEQ ID NO: 166780 - DNA, 33 bp, Homo sapien
ttaagtgctttacatgtatgattttctttctat

SEQ ID NO: 166781 - DNA, 33 bp, Homo sapien
gactgacagcttgttacgcagaggtctaattga

SEQ ID NO: 166782 - DNA, 33 bp, Homo sapien
gactgacagcttgttaggcagaggtctaattga

SEQ ID NO: 166783 - DNA, 33 bp, Homo sapien
agttgactgagtctgaaaaaatctaggtcatcc

SEQ ID NO: 166784 - DNA, 33 bp, Homo sapien
agttgactgagtctgacaaaatctaggtcatcc

SEQ ID NO: 166785 - DNA, 33 bp, Homo sapien
attaactaaagcataactgaccatttcatattt

SEQ ID NO: 166786 - DNA, 33 bp, Homo sapien
attaactaaagcataattgaccatttcatattt

SEQ ID NO: 166787 - DNA, 33 bp, Homo sapien
gggaagttttgtaatacggctgagtagaagaag

SEQ ID NO: 166788 - DNA, 33 bp, Homo sapien
gggaagttttgtaatatggctgagtagaagaag

SEQ ID NO: 166789 - DNA, 33 bp, Homo sapien
taaagcatatctaaacaatgggaagtaccaaat

SEQ ID NO: 166790 - DNA, 33 bp, Homo sapien
taaagcatatctaaaccatgggaagtaccaaat

SEQ ID NO: 166791 - DNA, 33 bp, Homo sapien
aggtctaaggactagacgagttttgagataaat

SEQ ID NO: 166792 - DNA, 33 bp, Homo sapien
aggtctaaggactagatgagttttgagataaat

SEQ ID NO: 166793 - DNA, 33 bp, Homo sapien
ggcagtaaatgtgaagaaaaaccataggtcagt

SEQ ID NO: 166794 - DNA, 33 bp, Homo sapien
ggcagtaaatgtgaagcaaaaccataggtcagt

SEQ ID NO: 166795 - DNA, 33 bp, Homo sapien
gaagagtgtatttgaaaggagtttatagttttc

SEQ ID NO: 166796 - DNA, 33 bp, Homo sapien
gaagagtgtatttgaatggagtttatagttttc

SEQ ID NO: 166797 - DNA, 33 bp, Homo sapien
ggatggggcagttccaaaatttcccaaaagccc

SEQ ID NO: 166798 - DNA, 33 bp, Homo sapien
ggatggggcagttccagaatttcccaaaagccc

SEQ ID NO: 166799 - DNA, 33 bp, Homo sapien
ctagcagtgtctgccacagtggacaaccagtgt

SEQ ID NO: 166800 - DNA, 33 bp, Homo sapien
ctagcagtgtctgccatagtggacaaccagtgt

SEQ ID NO: 166801 - DNA, 33 bp, Homo sapien
gcttctatgttacagaatactgagccatggaat

SEQ ID NO: 166802 - DNA, 33 bp, Homo sapien
gcttctatgttacagagtactgagccatggaat

SEQ ID NO: 166803 - DNA, 33 bp, Homo sapien
ttttgagaagcttccacacagttttctacattg

SEQ ID NO: 166804 - DNA, 33 bp, Homo sapien
ttttgagaagcttccatacagttttctacattg

SEQ ID NO: 166805 - DNA, 33 bp, Homo sapien
tataccttgtatcaaacctggtagctcaataaa

SEQ ID NO: 166806 - DNA, 33 bp, Homo sapien
tataccttgtatcaaatctggtagctcaataaa

SEQ ID NO: 166807 - DNA, 33 bp, Homo sapien
atgattgcaaaactctaaatcactaatgatcca

SEQ ID NO: 166808 - DNA, 33 bp, Homo sapien
atgattgcaaaactctgaatcactaatgatcca

SEQ ID NO: 166809 - DNA, 33 bp, Homo sapien
tgtgtaaatctataagcctgaagaggtatttag

SEQ ID NO: 166810 - DNA, 33 bp, Homo sapien
tgtgtaaatctataaggctgaagaggtatttag

SEQ ID NO: 166811 - DNA, 33 bp, Homo sapien
atctaagcggcatgaaaaattctatacccctgg

SEQ ID NO: 166812 - DNA, 33 bp, Homo sapien
atctaagcggcatgaacaattctatacccctgg

SEQ ID NO: 166813 - DNA, 33 bp, Homo sapien
gcccagagcagagtgcaagatagaggtgcagcc

SEQ ID NO: 166814 - DNA, 33 bp, Homo sapien
gcccagagcagagtgcgagatagaggtgcagcc

SEQ ID NO: 166815 - DNA, 33 bp, Homo sapien
cctactttcatcagacacataaaacccaggaac

SEQ ID NO: 166816 - DNA, 33 bp, Homo sapien
cctactttcatcagacgcataaaacccaggaac

SEQ ID NO: 166817 - DNA, 33 bp, Homo sapien
acttacatagcagtccaaaatagaaagtcatat

SEQ ID NO: 166818 - DNA, 33 bp, Homo sapien
acttacatagcagtccgaaatagaaagtcatat

SEQ ID NO: 166819 - DNA, 33 bp, Homo sapien
gtaacttgctgttgtacctttctgtgttaggtg

SEQ ID NO: 166820 - DNA, 33 bp, Homo sapien
gtaacttgctgttgtatctttctgtgttaggtg

SEQ ID NO: 166821 - DNA, 33 bp, Homo sapien
agtgttataaagggataaagaaactaatgtcca

SEQ ID NO: 166822 - DNA, 33 bp, Homo sapien
agtgttataaagggatgaagaaactaatgtcca

SEQ ID NO: 166823 - DNA, 33 bp, Homo sapien
atcatgaccccaaatacggaagtgactcactca

SEQ ID NO: 166824 - DNA, 33 bp, Homo sapien
atcatgaccccaaatatggaagtgactcactca

SEQ ID NO: 166825 - DNA, 33 bp, Homo sapien
gacattgttcccaaagaaagtgttcaagatagg

SEQ ID NO: 166826 - DNA, 33 bp, Homo sapien
gacattgttcccaaaggaagtgttcaagatagg

SEQ ID NO: 166827 - DNA, 33 bp, Homo sapien
tgttacaaacaaaaagactacctgctatgtaga

SEQ ID NO: 166828 - DNA, 33 bp, Homo sapien
tgttacaaacaaaaagtctacctgctatgtaga

SEQ ID NO: 166829 - DNA, 33 bp, Homo sapien
aatataagcctttcaacactacaggagacaaaa

SEQ ID NO: 166830 - DNA, 33 bp, Homo sapien
aatataagcctttcaatactacaggagacaaaa

SEQ ID NO: 166831 - DNA, 33 bp, Homo sapien
agacatctgtagaaaacttagataatcaaaaaa

SEQ ID NO: 166832 - DNA, 33 bp, Homo sapien
agacatctgtagaaaatttagataatcaaaaaa

SEQ ID NO: 166833 - DNA, 33 bp, Homo sapien
ccattaaggaaagacaagggtggatgctcagct

SEQ ID NO: 166834 - DNA, 33 bp, Homo sapien
ccattaaggaaagacacgggtggatgctcagct

SEQ ID NO: 166835 - DNA, 33 bp, Homo sapien
aatatatagtgaatgaataagtgtaaaataaat

SEQ ID NO: 166836 - DNA, 33 bp, Homo sapien
aatatatagtgaatgagtaagtgtaaaataaat

SEQ ID NO: 166837 - DNA, 33 bp, Homo sapien
ggagagtagtgagaaacaatacttcggaaataa

SEQ ID NO: 166838 - DNA, 33 bp, Homo sapien
ggagagtagtgagaaataatacttcggaaataa

SEQ ID NO: 166839 - DNA, 33 bp, Homo sapien
ctacctacaaaagaaaatctatcaggtgccaag

SEQ ID NO: 166840 - DNA, 33 bp, Homo sapien
ctacctacaaaagaaagtctatcaggtgccaag

SEQ ID NO: 166841 - DNA, 33 bp, Homo sapien
tctcagtatccacaagccctaaacttcaccaat

SEQ ID NO: 166842 - DNA, 33 bp, Homo sapien
tctcagtatccacaagtcctaaacttcaccaat

SEQ ID NO: 166843 - DNA, 33 bp, Homo sapien
cactaaagattgggaaatgctgattcaatgcaa

SEQ ID NO: 166844 - DNA, 33 bp, Homo sapien
cactaaagattgggaagtgctgattcaatgcaa

SEQ ID NO: 166845 - DNA, 33 bp, Homo sapien
tataaactagtggtctcaaaggattgtgaaatt

SEQ ID NO: 166846 - DNA, 33 bp, Homo sapien
tataaactagtggtctgaaaggattgtgaaatt

SEQ ID NO: 166847 - DNA, 33 bp, Homo sapien
acataatatgcctgtaaaaagcataaagaaact

SEQ ID NO: 166848 - DNA, 33 bp, Homo sapien
acataatatgcctgtagaaagcataaagaaact

SEQ ID NO: 166849 - DNA, 33 bp, Homo sapien
caaaaataaatacctacatctggcaaaataaat

SEQ ID NO: 166850 - DNA, 33 bp, Homo sapien
caaaaataaatacctatatctggcaaaataaat

SEQ ID NO: 166851 - DNA, 33 bp, Homo sapien
tgttgccatgtgacataaaatcctactatatgt

SEQ ID NO: 166852 - DNA, 33 bp, Homo sapien
tgttgccatgtgacatgaaatcctactatatgt

SEQ ID NO: 166853 - DNA, 33 bp, Homo sapien
actatatgtctagaaacaggaggaccagattac

SEQ ID NO: 166854 - DNA, 33 bp, Homo sapien
actatatgtctagaaataggaggaccagattac

SEQ ID NO: 166855 - DNA, 33 bp, Homo sapien
ttatctcctctcgggggaatttggtgctcaatt

SEQ ID NO: 166856 - DNA, 33 bp, Homo sapien
ttatctcctctcggggtaatttggtgctcaatt

SEQ ID NO: 166857 - DNA, 33 bp, Homo sapien
gctataactctgaatactaaattaggacactga

SEQ ID NO: 166858 - DNA, 33 bp, Homo sapien
gctataactctgaatattaaattaggacactga

SEQ ID NO: 166859 - DNA, 33 bp, Homo sapien
cataattgagtaacacagaaaaaaatatttggc

SEQ ID NO: 166860 - DNA, 33 bp, Homo sapien
cataattgagtaacacggaaaaaaatatttggc

SEQ ID NO: 166861 - DNA, 33 bp, Homo sapien
tatcacgattcaaaaagaattgcaaatacatat

SEQ ID NO: 166862 - DNA, 33 bp, Homo sapien
tatcacgattcaaaaataattgcaaatacatat

SEQ ID NO: 166863 - DNA, 33 bp, Homo sapien
aaatacacacacttacgcagggtgcaagacatg

SEQ ID NO: 166864 - DNA, 33 bp, Homo sapien
aaatacacacacttactcagggtgcaagacatg

SEQ ID NO: 166865 - DNA, 33 bp, Homo sapien
tcatataaataatgtaagtttcctctctgattg

SEQ ID NO: 166866 - DNA, 33 bp, Homo sapien
tcatataaataatgtacgtttcctctctgattg

SEQ ID NO: 166867 - DNA, 33 bp, Homo sapien
caaattcttctcaaaccctttcaaaacattgaa

SEQ ID NO: 166868 - DNA, 33 bp, Homo sapien
caaattcttctcaaactctttcaaaacattgaa

SEQ ID NO: 166869 - DNA, 33 bp, Homo sapien
tacatgttattagggactatgaattttgaaaaa

SEQ ID NO: 166870 - DNA, 33 bp, Homo sapien
tacatgttattagggattatgaattttgaaaaa

SEQ ID NO: 166871 - DNA, 33 bp, Homo sapien
atactgccagtttttccatcggattacccaaga

SEQ ID NO: 166872 - DNA, 33 bp, Homo sapien
atactgccagtttttcgatcggattacccaaga

SEQ ID NO: 166873 - DNA, 33 bp, Homo sapien
gagggacttctgagtcacaacacattgacgtat

SEQ ID NO: 166874 - DNA, 33 bp, Homo sapien
gagggacttctgagtcgcaacacattgacgtat

SEQ ID NO: 166875 - DNA, 33 bp, Homo sapien
tgaatttcctaaacctcagctttatgcatttca

SEQ ID NO: 166876 - DNA, 33 bp, Homo sapien
tgaatttcctaaaccttagctttatgcatttca

SEQ ID NO: 166877 - DNA, 33 bp, Homo sapien
acaatctggcaagagagagaaaagtaacaaatt

SEQ ID NO: 166878 - DNA, 33 bp, Homo sapien
acaatctggcaagagatagaaaagtaacaaatt

SEQ ID NO: 166879 - DNA, 33 bp, Homo sapien
aggcaattgaaaatgggcaaagaaatcttttaa

SEQ ID NO: 166880 - DNA, 33 bp, Homo sapien
aggcaattgaaaatggtcaaagaaatcttttaa

SEQ ID NO: 166881 - DNA, 33 bp, Homo sapien
tagcaacgcaacaaaaaactatacaacaatata

SEQ ID NO: 166882 - DNA, 33 bp, Homo sapien
tagcaacgcaacaaaacactatacaacaatata

SEQ ID NO: 166883 - DNA, 33 bp, Homo sapien
atctagaaatgtacaacaagatgtggataggtt

SEQ ID NO: 166884 - DNA, 33 bp, Homo sapien
atctagaaatgtacaagaagatgtggataggtt

SEQ ID NO: 166885 - DNA, 33 bp, Homo sapien
aatcattactacggaaagctaacagactagaac

SEQ ID NO: 166886 - DNA, 33 bp, Homo sapien
aatcattactacggaaggctaacagactagaac

SEQ ID NO: 166887 - DNA, 33 bp, Homo sapien
tggtatttaaacactccgagtcttagttccatc

SEQ ID NO: 166888 - DNA, 33 bp, Homo sapien
tggtatttaaacactctgagtcttagttccatc

SEQ ID NO: 166889 - DNA, 33 bp, Homo sapien
cttacattcctgttaaaactcatacttgccaag

SEQ ID NO: 166890 - DNA, 33 bp, Homo sapien
cttacattcctgttaacactcatacttgccaag

SEQ ID NO: 166891 - DNA, 33 bp, Homo sapien
ttctagttttaaatcacagaagttgcaaacaaa

SEQ ID NO: 166892 - DNA, 33 bp, Homo sapien
ttctagttttaaatcatagaagttgcaaacaaa

SEQ ID NO: 166893 - DNA, 33 bp, Homo sapien
tactacaagaatatgaaagttgagattcatatt

SEQ ID NO: 166894 - DNA, 33 bp, Homo sapien
tactacaagaatatgagagttgagattcatatt

SEQ ID NO: 166895 - DNA, 33 bp, Homo sapien
ggctaggctcttaaaaacaaacacaccacatgt

SEQ ID NO: 166896 - DNA, 33 bp, Homo sapien
ggctaggctcttaaaagcaaacacaccacatgt

SEQ ID NO: 166897 - DNA, 33 bp, Homo sapien
ctcttaacatatgcaacgtagacttcagaagag

SEQ ID NO: 166898 - DNA, 33 bp, Homo sapien
ctcttaacatatgcaatgtagacttcagaagag

SEQ ID NO: 166899 - DNA, 33 bp, Homo sapien
tattttatgaggaacaagtgttacgatttgggt

SEQ ID NO: 166900 - DNA, 33 bp, Homo sapien
tattttatgaggaacaggtgttacgatttgggt

SEQ ID NO: 166901 - DNA, 33 bp, Homo sapien
tctatgttttctaaaactcgctatattttgacc

SEQ ID NO: 166902 - DNA, 33 bp, Homo sapien
tctatgttttctaaaagtcgctatattttgacc

SEQ ID NO: 166903 - DNA, 33 bp, Homo sapien
gggaagatggagtaaacgaaagtaaaagttgca

SEQ ID NO: 166904 - DNA, 33 bp, Homo sapien
gggaagatggagtaaatgaaagtaaaagttgca

SEQ ID NO: 166905 - DNA, 33 bp, Homo sapien
tgtttgcatttttagaactcaataccacctaca

SEQ ID NO: 166906 - DNA, 33 bp, Homo sapien
tgtttgcatttttagacctcaataccacctaca

SEQ ID NO: 166907 - DNA, 33 bp, Homo sapien
tattcacataagcaagaaaactaaactattcat

SEQ ID NO: 166908 - DNA, 33 bp, Homo sapien
tattcacataagcaagcaaactaaactattcat

SEQ ID NO: 166909 - DNA, 33 bp, Homo sapien
gggctgagacctttataactaagacaaattaac

SEQ ID NO: 166910 - DNA, 33 bp, Homo sapien
gggctgagacctttatcactaagacaaattaac

SEQ ID NO: 166911 - DNA, 33 bp, Homo sapien
cttcagccagatgatgaaagtcaacatcaacca

SEQ ID NO: 166912 - DNA, 33 bp, Homo sapien
cttcagccagatgatggaagtcaacatcaacca

SEQ ID NO: 166913 - DNA, 33 bp, Homo sapien
gtcctggactctgaaactctgatcttcttactg

SEQ ID NO: 166914 - DNA, 33 bp, Homo sapien
gtcctggactctgaaattctgatcttcttactg

SEQ ID NO: 166915 - DNA, 33 bp, Homo sapien
acatttagtgaataacagtctccaccagtagaa

SEQ ID NO: 166916 - DNA, 33 bp, Homo sapien
acatttagtgaataacggtctccaccagtagaa

SEQ ID NO: 166917 - DNA, 33 bp, Homo sapien
tacttccttcaaaaaaattagtggttacttaga

SEQ ID NO: 166918 - DNA, 33 bp, Homo sapien
tacttccttcaaaaaagttagtggttacttaga

SEQ ID NO: 166919 - DNA, 33 bp, Homo sapien
acattactgtcctttacatcattatccatatac

SEQ ID NO: 166920 - DNA, 33 bp, Homo sapien
acattactgtcctttatatcattatccatatac

SEQ ID NO: 166921 - DNA, 33 bp, Homo sapien
atacaaattaaagaaccgcatatgtcacagtca

SEQ ID NO: 166922 - DNA, 33 bp, Homo sapien
atacaaattaaagaactgcatatgtcacagtca

SEQ ID NO: 166923 - DNA, 33 bp, Homo sapien
tttaagcacctaaaagcctcctgaaagtaatat

SEQ ID NO: 166924 - DNA, 33 bp, Homo sapien
tttaagcacctaaaagtctcctgaaagtaatat

SEQ ID NO: 166925 - DNA, 33 bp, Homo sapien
agcaggagggtccttacctatggatgctttcaa

SEQ ID NO: 166926 - DNA, 33 bp, Homo sapien
agcaggagggtccttatctatggatgctttcaa

SEQ ID NO: 166927 - DNA, 33 bp, Homo sapien
ttcagtatatctactccgacgaccaatccttgg

SEQ ID NO: 166928 - DNA, 33 bp, Homo sapien
ttcagtatatctactctgacgaccaatccttgg

SEQ ID NO: 166929 - DNA, 33 bp, Homo sapien
tttatctgtcttggctgacaaaacttgtttatt

SEQ ID NO: 166930 - DNA, 33 bp, Homo sapien
tttatctgtcttggcttacaaaacttgtttatt

SEQ ID NO: 166931 - DNA, 33 bp, Homo sapien
tgtttattggcagttacgacgaaatagataatg

SEQ ID NO: 166932 - DNA, 33 bp, Homo sapien
tgtttattggcagttatgacgaaatagataatg

SEQ ID NO: 166933 - DNA, 33 bp, Homo sapien
ttgattgatcctcacacacatgaaaaagtagtc

SEQ ID NO: 166934 - DNA, 33 bp, Homo sapien
ttgattgatcctcacagacatgaaaaagtagtc

SEQ ID NO: 166935 - DNA, 33 bp, Homo sapien
agtagatactgggtagacacaaagccacaagtg

SEQ ID NO: 166936 - DNA, 33 bp, Homo sapien
agtagatactgggtagtcacaaagccacaagtg

SEQ ID NO: 166937 - DNA, 33 bp, Homo sapien
agagaatgcaaaagggcaaacagtagatatgag

SEQ ID NO: 166938 - DNA, 33 bp, Homo sapien
agagaatgcaaaagggtaaacagtagatatgag

SEQ ID NO: 166939 - DNA, 33 bp, Homo sapien
ttctatttgtaagccactgaatgagtcttacat

SEQ ID NO: 166940 - DNA, 33 bp, Homo sapien
ttctatttgtaagccattgaatgagtcttacat

SEQ ID NO: 166941 - DNA, 33 bp, Homo sapien
tatgggaagtgtgccagtcactatacttgacag

SEQ ID NO: 166942 - DNA, 33 bp, Homo sapien
tatgggaagtgtgccattcactatacttgacag

SEQ ID NO: 166943 - DNA, 33 bp, Homo sapien
ggaatccatccagatcacttcacgtactttgag

SEQ ID NO: 166944 - DNA, 33 bp, Homo sapien
ggaatccatccagatcgcttcacgtactttgag

SEQ ID NO: 166945 - DNA, 33 bp, Homo sapien
atgtaagagatgaaccacagttttacacaaaag

SEQ ID NO: 166946 - DNA, 33 bp, Homo sapien
atgtaagagatgaaccgcagttttacacaaaag

SEQ ID NO: 166947 - DNA, 33 bp, Homo sapien
cacaactgtcatggaaactatatcttcagttat

SEQ ID NO: 166948 - DNA, 33 bp, Homo sapien
cacaactgtcatggaagctatatcttcagttat

SEQ ID NO: 166949 - DNA, 33 bp, Homo sapien
tgagaggaagacacacaatttacttactcactt

SEQ ID NO: 166950 - DNA, 33 bp, Homo sapien
tgagaggaagacacacgatttacttactcactt

SEQ ID NO: 166951 - DNA, 33 bp, Homo sapien
ctctttgtcatatcaacaaaacgtatgtttcat

SEQ ID NO: 166952 - DNA, 33 bp, Homo sapien
ctctttgtcatatcaataaaacgtatgtttcat

SEQ ID NO: 166953 - DNA, 33 bp, Homo sapien
aatatcttccaaagaacagagctagttcacgga

SEQ ID NO: 166954 - DNA, 33 bp, Homo sapien
aatatcttccaaagaatagagctagttcacgga

SEQ ID NO: 166955 - DNA, 33 bp, Homo sapien
tggccatgtaggataacgggaaagagaactctt

SEQ ID NO: 166956 - DNA, 33 bp, Homo sapien
tggccatgtaggataatgggaaagagaactctt

SEQ ID NO: 166957 - DNA, 33 bp, Homo sapien
aattctatcaccactaccaccctggtccagata

SEQ ID NO: 166958 - DNA, 33 bp, Homo sapien
aattctatcaccactatcaccctggtccagata

SEQ ID NO: 166959 - DNA, 33 bp, Homo sapien
attaaaaattatctacaaagacttcaggaaaat

SEQ ID NO: 166960 - DNA, 33 bp, Homo sapien
attaaaaattatctaccaagacttcaggaaaat

SEQ ID NO: 166961 - DNA, 33 bp, Homo sapien
aggcaagggtcattagcagccatcttcaaggct

SEQ ID NO: 166962 - DNA, 33 bp, Homo sapien
aggcaagggtcattaggagccatcttcaaggct

SEQ ID NO: 166963 - DNA, 33 bp, Homo sapien
ttgactacaccaatcaaccctaattaacatgag

SEQ ID NO: 166964 - DNA, 33 bp, Homo sapien
ttgactacaccaatcagccctaattaacatgag

SEQ ID NO: 166965 - DNA, 33 bp, Homo sapien
ctaaaagcagactctgaaataaggacatgggca

SEQ ID NO: 166966 - DNA, 33 bp, Homo sapien
ctaaaagcagactctggaataaggacatgggca

SEQ ID NO: 166967 - DNA, 33 bp, Homo sapien
accttcttagtaccaaaagtcaaagtttgagtt

SEQ ID NO: 166968 - DNA, 33 bp, Homo sapien
accttcttagtaccaagagtcaaagtttgagtt

SEQ ID NO: 166969 - DNA, 33 bp, Homo sapien
gacaatggcaagaataggtcaattaactattca

SEQ ID NO: 166970 - DNA, 33 bp, Homo sapien
gacaatggcaagaatatgtcaattaactattca

SEQ ID NO: 166971 - DNA, 33 bp, Homo sapien
gatctctttgaattctaacacagatacctcctg

SEQ ID NO: 166972 - DNA, 33 bp, Homo sapien
gatctctttgaattctgacacagatacctcctg

SEQ ID NO: 166973 - DNA, 33 bp, Homo sapien
gctagtcttatttgtacgtactttccaaatcct

SEQ ID NO: 166974 - DNA, 33 bp, Homo sapien
gctagtcttatttgtatgtactttccaaatcct

SEQ ID NO: 166975 - DNA, 33 bp, Homo sapien
ttttaatgtgtgcctcaaaatttcatgtgttgg

SEQ ID NO: 166976 - DNA, 33 bp, Homo sapien
ttttaatgtgtgcctcgaaatttcatgtgttgg

SEQ ID NO: 166977 - DNA, 33 bp, Homo sapien
ttaatttttgctcacactggtatttcaagctgg

SEQ ID NO: 166978 - DNA, 33 bp, Homo sapien
ttaatttttgctcacagtggtatttcaagctgg

SEQ ID NO: 166979 - DNA, 33 bp, Homo sapien
tcagcgtattattctcaagatgattccttagct

SEQ ID NO: 166980 - DNA, 33 bp, Homo sapien
tcagcgtattattctcgagatgattccttagct

SEQ ID NO: 166981 - DNA, 33 bp, Homo sapien
tagtcactgtgaatgacgatgaaataggccaat

SEQ ID NO: 166982 - DNA, 33 bp, Homo sapien
tagtcactgtgaatgatgatgaaataggccaat

SEQ ID NO: 166983 - DNA, 33 bp, Homo sapien
ctgttccatgctttccgcttagtttatggtgtt

SEQ ID NO: 166984 - DNA, 33 bp, Homo sapien
ctgttccatgctttcctcttagtttatggtgtt

SEQ ID NO: 166985 - DNA, 33 bp, Homo sapien
ttgctcaggttggggaaaacttcatcaggagat

SEQ ID NO: 166986 - DNA, 33 bp, Homo sapien
ttgctcaggttggggataacttcatcaggagat

SEQ ID NO: 166987 - DNA, 33 bp, Homo sapien
cttggagaatgtagataaatgttgtgcttagtt

SEQ ID NO: 166988 - DNA, 33 bp, Homo sapien
cttggagaatgtagatgaatgttgtgcttagtt

SEQ ID NO: 166989 - DNA, 33 bp, Homo sapien
atcgtggctaatttaacgacctggcacaaatct

SEQ ID NO: 166990 - DNA, 33 bp, Homo sapien
atcgtggctaatttaatgacctggcacaaatct

SEQ ID NO: 166991 - DNA, 33 bp, Homo sapien
aggctgctacaggtcaactgaatcaccaacccc

SEQ ID NO: 166992 - DNA, 33 bp, Homo sapien
aggctgctacaggtcacctgaatcaccaacccc

SEQ ID NO: 166993 - DNA, 33 bp, Homo sapien
atcagaatgagatggcaaataaagcaaagtctg

SEQ ID NO: 166994 - DNA, 33 bp, Homo sapien
atcagaatgagatggccaataaagcaaagtctg

SEQ ID NO: 166995 - DNA, 33 bp, Homo sapien
gcctcccatgagaatacgctagcagtattgaca

SEQ ID NO: 166996 - DNA, 33 bp, Homo sapien
gcctcccatgagaatatgctagcagtattgaca

SEQ ID NO: 166997 - DNA, 33 bp, Homo sapien
aaaatgctaacacaccaataaagacagtgagaa

SEQ ID NO: 166998 - DNA, 33 bp, Homo sapien
aaaatgctaacacaccgataaagacagtgagaa

SEQ ID NO: 166999 - DNA, 33 bp, Homo sapien
gcctgttaatgctacaatccaaacctaggcccc

SEQ ID NO: 167000 - DNA, 33 bp, Homo sapien
gcctgttaatgctacagtccaaacctaggcccc

SEQ ID NO: 167001 - DNA, 33 bp, Homo sapien
acttctcaatattaaaactttgaacttctctct

SEQ ID NO: 167002 - DNA, 33 bp, Homo sapien
acttctcaatattaaagctttgaacttctctct

SEQ ID NO: 167003 - DNA, 33 bp, Homo sapien
gttgaacctaagaactaaaatcaaacggacttt

SEQ ID NO: 167004 - DNA, 33 bp, Homo sapien
gttgaacctaagaactgaaatcaaacggacttt

SEQ ID NO: 167005 - DNA, 33 bp, Homo sapien
acttaagaagtattcaccacagtaattacatat

SEQ ID NO: 167006 - DNA, 33 bp, Homo sapien
acttaagaagtattcatcacagtaattacatat

SEQ ID NO: 167007 - DNA, 33 bp, Homo sapien
tcaccttccacacctcaaaagaaaagctgagtt

SEQ ID NO: 167008 - DNA, 33 bp, Homo sapien
tcaccttccacacctcgaaagaaaagctgagtt

SEQ ID NO: 167009 - DNA, 33 bp, Homo sapien
aagcactcactccttaagctatgtcatgaggca

SEQ ID NO: 167010 - DNA, 33 bp, Homo sapien
aagcactcactccttatgctatgtcatgaggca

SEQ ID NO: 167011 - DNA, 33 bp, Homo sapien
agggtgcggtgaaaacaacaggaaagagatgtt

SEQ ID NO: 167012 - DNA, 33 bp, Homo sapien
agggtgcggtgaaaacgacaggaaagagatgtt

SEQ ID NO: 167013 - DNA, 33 bp, Homo sapien
agacaaggaataaaaaagtctgtttcatttaat

SEQ ID NO: 167014 - DNA, 33 bp, Homo sapien
agacaaggaataaaaaggtctgtttcatttaat

SEQ ID NO: 167015 - DNA, 33 bp, Homo sapien
tccaacatttatgatacgacaaatcaaagccat

SEQ ID NO: 167016 - DNA, 33 bp, Homo sapien
tccaacatttatgatatgacaaatcaaagccat

SEQ ID NO: 167017 - DNA, 33 bp, Homo sapien
ttatagaactacagcccctcactatttactaga

SEQ ID NO: 167018 - DNA, 33 bp, Homo sapien
ttatagaactacagcctctcactatttactaga

SEQ ID NO: 167019 - DNA, 33 bp, Homo sapien
tcctttgtcttacctacgagcaggaaaacagat

SEQ ID NO: 167020 - DNA, 33 bp, Homo sapien
tcctttgtcttacctatgagcaggaaaacagat

SEQ ID NO: 167021 - DNA, 33 bp, Homo sapien
catataatctgtcaaacagaatttcaaacccag

SEQ ID NO: 167022 - DNA, 33 bp, Homo sapien
catataatctgtcaaatagaatttcaaacccag

SEQ ID NO: 167023 - DNA, 33 bp, Homo sapien
tgaaattcctggaacacggtcagctttattttg

SEQ ID NO: 167024 - DNA, 33 bp, Homo sapien
tgaaattcctggaacatggtcagctttattttg

SEQ ID NO: 167025 - DNA, 33 bp, Homo sapien
tgaggaaataacaaaaattgaggataatctgta

SEQ ID NO: 167026 - DNA, 33 bp, Homo sapien
tgaggaaataacaaaatttgaggataatctgta

SEQ ID NO: 167027 - DNA, 33 bp, Homo sapien
tgattaaataaatcaacgaattccagcatcaaa

SEQ ID NO: 167028 - DNA, 33 bp, Homo sapien
tgattaaataaatcaatgaattccagcatcaaa

SEQ ID NO: 167029 - DNA, 33 bp, Homo sapien
atctgggagagaaactcaagtagaaagtgggag

SEQ ID NO: 167030 - DNA, 33 bp, Homo sapien
atctgggagagaaactgaagtagaaagtgggag

SEQ ID NO: 167031 - DNA, 33 bp, Homo sapien
ttataatgcaaaatctgaagcaaatttgtccaa

SEQ ID NO: 167032 - DNA, 33 bp, Homo sapien
ttataatgcaaaatcttaagcaaatttgtccaa

SEQ ID NO: 167033 - DNA, 33 bp, Homo sapien
gaaacttttaacatcaaactccaacgcagaata

SEQ ID NO: 167034 - DNA, 33 bp, Homo sapien
gaaacttttaacatcatactccaacgcagaata

SEQ ID NO: 167035 - DNA, 33 bp, Homo sapien
actggtggttaaaggcactgcatgtaagaggcc

SEQ ID NO: 167036 - DNA, 33 bp, Homo sapien
actggtggttaaaggcgctgcatgtaagaggcc

SEQ ID NO: 167037 - DNA, 33 bp, Homo sapien
taaaacttgaagcagaagtggaacatagagact

SEQ ID NO: 167038 - DNA, 33 bp, Homo sapien
taaaacttgaagcagaggtggaacatagagact

SEQ ID NO: 167039 - DNA, 33 bp, Homo sapien
tagctgcattaagggaaccaatttaagtggatt

SEQ ID NO: 167040 - DNA, 33 bp, Homo sapien
tagctgcattaagggacccaatttaagtggatt

SEQ ID NO: 167041 - DNA, 33 bp, Homo sapien
gggtagagcttcagcacgaattttgagaaatat

SEQ ID NO: 167042 - DNA, 33 bp, Homo sapien
gggtagagcttcagcatgaattttgagaaatat

SEQ ID NO: 167043 - DNA, 33 bp, Homo sapien
ttggccctcaggaacccggtataaattggcttc

SEQ ID NO: 167044 - DNA, 33 bp, Homo sapien
ttggccctcaggaacctggtataaattggcttc

SEQ ID NO: 167045 - DNA, 33 bp, Homo sapien
actgtgtgtaacttttcgggttggcatttttca

SEQ ID NO: 167046 - DNA, 33 bp, Homo sapien
actgtgtgtaactttttgggttggcatttttca

SEQ ID NO: 167047 - DNA, 33 bp, Homo sapien
tactatctaatctggccattactttcctagcta

SEQ ID NO: 167048 - DNA, 33 bp, Homo sapien
tactatctaatctggctattactttcctagcta

SEQ ID NO: 167049 - DNA, 33 bp, Homo sapien
ccctttcagttttgtcacatggtactggccaaa

SEQ ID NO: 167050 - DNA, 33 bp, Homo sapien
ccctttcagttttgtcgcatggtactggccaaa

SEQ ID NO: 167051 - DNA, 33 bp, Homo sapien
atggtgtccttgaaaacacttgcctgtgagttt

SEQ ID NO: 167052 - DNA, 33 bp, Homo sapien
atggtgtccttgaaaatacttgcctgtgagttt

SEQ ID NO: 167053 - DNA, 33 bp, Homo sapien
taatggctacctttaaatggaaagatcactagt

SEQ ID NO: 167054 - DNA, 33 bp, Homo sapien
taatggctacctttaagtggaaagatcactagt

SEQ ID NO: 167055 - DNA, 33 bp, Homo sapien
atgtgtataaagaacaacatctaatccatataa

SEQ ID NO: 167056 - DNA, 33 bp, Homo sapien
atgtgtataaagaacagcatctaatccatataa

SEQ ID NO: 167057 - DNA, 33 bp, Homo sapien
gttcttagcctcctaaacttaccatttagcatc

SEQ ID NO: 167058 - DNA, 33 bp, Homo sapien
gttcttagcctcctaagcttaccatttagcatc

SEQ ID NO: 167059 - DNA, 33 bp, Homo sapien
gccagcaagtctttgaagtgtaggtcgtagtat

SEQ ID NO: 167060 - DNA, 33 bp, Homo sapien
gccagcaagtctttgaggtgtaggtcgtagtat

SEQ ID NO: 167061 - DNA, 33 bp, Homo sapien
tttcaaaggcaggtacagatagaagaggtaact

SEQ ID NO: 167062 - DNA, 33 bp, Homo sapien
tttcaaaggcaggtacggatagaagaggtaact

SEQ ID NO: 167063 - DNA, 33 bp, Homo sapien
cttatttcagaaatcaatctaaagtactttgaa

SEQ ID NO: 167064 - DNA, 33 bp, Homo sapien
cttatttcagaaatcagtctaaagtactttgaa

SEQ ID NO: 167065 - DNA, 33 bp, Homo sapien
agacctttcctattcacggattcagtttgttag

SEQ ID NO: 167066 - DNA, 33 bp, Homo sapien
agacctttcctattcatggattcagtttgttag

SEQ ID NO: 167067 - DNA, 33 bp, Homo sapien
ttggattttaaagaccacaaggagagagactgg

SEQ ID NO: 167068 - DNA, 33 bp, Homo sapien
ttggattttaaagaccgcaaggagagagactgg

SEQ ID NO: 167069 - DNA, 33 bp, Homo sapien
ctcagctctggctttacgcttttaacacaagtc

SEQ ID NO: 167070 - DNA, 33 bp, Homo sapien
ctcagctctggctttatgcttttaacacaagtc

SEQ ID NO: 167071 - DNA, 33 bp, Homo sapien
tccaggtatagcaaacacccagttacccaaatg

SEQ ID NO: 167072 - DNA, 33 bp, Homo sapien
tccaggtatagcaaacgcccagttacccaaatg

SEQ ID NO: 167073 - DNA, 33 bp, Homo sapien
ttctacattctctgaaatgcgaatatgataatt

SEQ ID NO: 167074 - DNA, 33 bp, Homo sapien
ttctacattctctgaattgcgaatatgataatt

SEQ ID NO: 167075 - DNA, 33 bp, Homo sapien
atatgcagcattcttgaaaaactctgagatata

SEQ ID NO: 167076 - DNA, 33 bp, Homo sapien
atatgcagcattcttggaaaactctgagatata

SEQ ID NO: 167077 - DNA, 33 bp, Homo sapien
aagctcttctagtgccaatggacatcctaggat

SEQ ID NO: 167078 - DNA, 33 bp, Homo sapien
aagctcttctagtgcccatggacatcctaggat

SEQ ID NO: 167079 - DNA, 33 bp, Homo sapien
ttatctctattttataacttgtgcagttgaagc

SEQ ID NO: 167080 - DNA, 33 bp, Homo sapien
ttatctctattttatagcttgtgcagttgaagc

SEQ ID NO: 167081 - DNA, 33 bp, Homo sapien
ttactttaagtaaaataagaaatcagttacatt

SEQ ID NO: 167082 - DNA, 33 bp, Homo sapien
ttactttaagtaaaatgagaaatcagttacatt

SEQ ID NO: 167083 - DNA, 33 bp, Homo sapien
gtgacctatgtttagccaatcgtatgttacctc

SEQ ID NO: 167084 - DNA, 33 bp, Homo sapien
gtgacctatgtttagctaatcgtatgttacctc

SEQ ID NO: 167085 - DNA, 33 bp, Homo sapien
gtatttggactttgaaagaacaataaaatcttc

SEQ ID NO: 167086 - DNA, 33 bp, Homo sapien
gtatttggactttgaaggaacaataaaatcttc

SEQ ID NO: 167087 - DNA, 33 bp, Homo sapien
tctcctgctgacattcaaaaccattcagatgat

SEQ ID NO: 167088 - DNA, 33 bp, Homo sapien
tctcctgctgacattcgaaaccattcagatgat

SEQ ID NO: 167089 - DNA, 33 bp, Homo sapien
ccatgttataggtaagaaactcaagtatgcaag

SEQ ID NO: 167090 - DNA, 33 bp, Homo sapien
ccatgttataggtaaggaactcaagtatgcaag

SEQ ID NO: 167091 - DNA, 33 bp, Homo sapien
atggatgggcacatgaccaaagtctagccaatt

SEQ ID NO: 167092 - DNA, 33 bp, Homo sapien
atggatgggcacatgatcaaagtctagccaatt

SEQ ID NO: 167093 - DNA, 33 bp, Homo sapien
ctatccaccaattatagagagagagccaaatca

SEQ ID NO: 167094 - DNA, 33 bp, Homo sapien
ctatccaccaattatatagagagagccaaatca

SEQ ID NO: 167095 - DNA, 33 bp, Homo sapien
tcttcttatttttagacggtatcttgtgaaatt

SEQ ID NO: 167096 - DNA, 33 bp, Homo sapien
tcttcttatttttagatggtatcttgtgaaatt

SEQ ID NO: 167097 - DNA, 33 bp, Homo sapien
caaaactatcatgttgaaatatgaccttctttt

SEQ ID NO: 167098 - DNA, 33 bp, Homo sapien
caaaactatcatgttgcaatatgaccttctttt

SEQ ID NO: 167099 - DNA, 33 bp, Homo sapien
ttttgggcaaagacaaattcatcaatttaaagt

SEQ ID NO: 167100 - DNA, 33 bp, Homo sapien
ttttgggcaaagacaacttcatcaatttaaagt

SEQ ID NO: 167101 - DNA, 33 bp, Homo sapien
gaaaatcaggtggtaagcattttcttgttgttg

SEQ ID NO: 167102 - DNA, 33 bp, Homo sapien
gaaaatcaggtggtaatcattttcttgttgttg

SEQ ID NO: 167103 - DNA, 33 bp, Homo sapien
ggaaatgagggtctaaacattgaaaggattaat

SEQ ID NO: 167104 - DNA, 33 bp, Homo sapien
ggaaatgagggtctaagcattgaaaggattaat

SEQ ID NO: 167105 - DNA, 33 bp, Homo sapien
ctggaaaatggaaagggacttacaaattggaaa

SEQ ID NO: 167106 - DNA, 33 bp, Homo sapien
ctggaaaatggaaaggtacttacaaattggaaa

SEQ ID NO: 167107 - DNA, 33 bp, Homo sapien
cagtcctagcgtttgaagagtactgccaaaggt

SEQ ID NO: 167108 - DNA, 33 bp, Homo sapien
cagtcctagcgtttgaggagtactgccaaaggt

SEQ ID NO: 167109 - DNA, 33 bp, Homo sapien
ctctaaaacaatccaggctaattctatctgcta

SEQ ID NO: 167110 - DNA, 33 bp, Homo sapien
ctctaaaacaatccagtctaattctatctgcta

SEQ ID NO: 167111 - DNA, 33 bp, Homo sapien
gtcttgacatcttaacaaatttggattctgaca

SEQ ID NO: 167112 - DNA, 33 bp, Homo sapien
gtcttgacatcttaactaatttggattctgaca

SEQ ID NO: 167113 - DNA, 33 bp, Homo sapien
tcacatctactgttcaaaagaggtcctcccttc

SEQ ID NO: 167114 - DNA, 33 bp, Homo sapien
tcacatctactgttcacaagaggtcctcccttc

SEQ ID NO: 167115 - DNA, 33 bp, Homo sapien
atttttcaaaatacagacattcaacagcagctg

SEQ ID NO: 167116 - DNA, 33 bp, Homo sapien
atttttcaaaatacagtcattcaacagcagctg

SEQ ID NO: 167117 - DNA, 33 bp, Homo sapien
aggaaatatttggctaagattagagatgctatt

SEQ ID NO: 167118 - DNA, 33 bp, Homo sapien
aggaaatatttggctaggattagagatgctatt

SEQ ID NO: 167119 - DNA, 33 bp, Homo sapien
tagagcatatgttagaacctaaatgtgaaagga

SEQ ID NO: 167120 - DNA, 33 bp, Homo sapien
tagagcatatgttagaccctaaatgtgaaagga

SEQ ID NO: 167121 - DNA, 33 bp, Homo sapien
tgcagaactggataaacaaattccttaaacaaa

SEQ ID NO: 167122 - DNA, 33 bp, Homo sapien
tgcagaactggataaagaaattccttaaacaaa

SEQ ID NO: 167123 - DNA, 33 bp, Homo sapien
agctgtgaggcctctgcattaaaacaacagcaa

SEQ ID NO: 167124 - DNA, 33 bp, Homo sapien
agctgtgaggcctctggattaaaacaacagcaa

SEQ ID NO: 167125 - DNA, 33 bp, Homo sapien
ttttctgcttctaaagacatgctcatggttata

SEQ ID NO: 167126 - DNA, 33 bp, Homo sapien
ttttctgcttctaaaggcatgctcatggttata

SEQ ID NO: 167127 - DNA, 33 bp, Homo sapien
accttagcttctaggaatacgaaggggatcttt

SEQ ID NO: 167128 - DNA, 33 bp, Homo sapien
accttagcttctaggactacgaaggggatcttt

SEQ ID NO: 167129 - DNA, 33 bp, Homo sapien
catactggagtaaaaaactaaagctctcatcca

SEQ ID NO: 167130 - DNA, 33 bp, Homo sapien
catactggagtaaaaatctaaagctctcatcca

SEQ ID NO: 167131 - DNA, 33 bp, Homo sapien
ccctcgtcataactaaactgacacaacacattc

SEQ ID NO: 167132 - DNA, 33 bp, Homo sapien
ccctcgtcataactaacctgacacaacacattc

SEQ ID NO: 167133 - DNA, 33 bp, Homo sapien
agcttcaactccctatgagttcatctctaacct

SEQ ID NO: 167134 - DNA, 33 bp, Homo sapien
agcttcaactccctattagttcatctctaacct

SEQ ID NO: 167135 - DNA, 33 bp, Homo sapien
accatgaagcagtgtcaaaattgcctctgcaga

SEQ ID NO: 167136 - DNA, 33 bp, Homo sapien
accatgaagcagtgtcgaaattgcctctgcaga

SEQ ID NO: 167137 - DNA, 33 bp, Homo sapien
caacaaattcttgagaaaaactaggagagcatg

SEQ ID NO: 167138 - DNA, 33 bp, Homo sapien
caacaaattcttgagacaaactaggagagcatg

SEQ ID NO: 167139 - DNA, 33 bp, Homo sapien
gtagatgttggtattacgtggtaggagaacaat

SEQ ID NO: 167140 - DNA, 33 bp, Homo sapien
gtagatgttggtattatgtggtaggagaacaat

SEQ ID NO: 167141 - DNA, 33 bp, Homo sapien
gtccagaagtgaacacaaaacctatcagctagg

SEQ ID NO: 167142 - DNA, 33 bp, Homo sapien
gtccagaagtgaacacgaaacctatcagctagg

SEQ ID NO: 167143 - DNA, 33 bp, Homo sapien
gggacaaaacaccaagcagtttgccagcatgaa

SEQ ID NO: 167144 - DNA, 33 bp, Homo sapien
gggacaaaacaccaagtagtttgccagcatgaa

SEQ ID NO: 167145 - DNA, 33 bp, Homo sapien
aacaagggaatttagacaagtaagaagctctga

SEQ ID NO: 167146 - DNA, 33 bp, Homo sapien
aacaagggaatttagagaagtaagaagctctga

SEQ ID NO: 167147 - DNA, 33 bp, Homo sapien
tctgtaacaatacttgaatagacttgttgcctt

SEQ ID NO: 167148 - DNA, 33 bp, Homo sapien
tctgtaacaatacttggatagacttgttgcctt

SEQ ID NO: 167149 - DNA, 33 bp, Homo sapien
catacattattaactcagacaagtcatttaaca

SEQ ID NO: 167150 - DNA, 33 bp, Homo sapien
catacattattaactcggacaagtcatttaaca

SEQ ID NO: 167151 - DNA, 33 bp, Homo sapien
agcacatgactgtgaaaccagatccagcggacc

SEQ ID NO: 167152 - DNA, 33 bp, Homo sapien
agcacatgactgtgaatccagatccagcggacc

SEQ ID NO: 167153 - DNA, 33 bp, Homo sapien
gcttaggcaagcttctaaacttttctgagttac

SEQ ID NO: 167154 - DNA, 33 bp, Homo sapien
gcttaggcaagcttcttaacttttctgagttac

SEQ ID NO: 167155 - DNA, 33 bp, Homo sapien
cacaggttcattgtgccaggctgagtgttttct

SEQ ID NO: 167156 - DNA, 33 bp, Homo sapien
cacaggttcattgtgcgaggctgagtgttttct

SEQ ID NO: 167157 - DNA, 33 bp, Homo sapien
aatttcagttttccagcagctaggtatcccctg

SEQ ID NO: 167158 - DNA, 33 bp, Homo sapien
aatttcagttttccaggagctaggtatcccctg

SEQ ID NO: 167159 - DNA, 33 bp, Homo sapien
ggcgttttgtggagaacggacataccaatttct

SEQ ID NO: 167160 - DNA, 33 bp, Homo sapien
ggcgttttgtggagaatggacataccaatttct

SEQ ID NO: 167161 - DNA, 33 bp, Homo sapien
tctagttgagcaaacacaaacctacaaagacat

SEQ ID NO: 167162 - DNA, 33 bp, Homo sapien
tctagttgagcaaacagaaacctacaaagacat

SEQ ID NO: 167163 - DNA, 33 bp, Homo sapien
ctggcagtattttgtgaactatgcccatgtaat

SEQ ID NO: 167164 - DNA, 33 bp, Homo sapien
ctggcagtattttgtgtactatgcccatgtaat

SEQ ID NO: 167165 - DNA, 33 bp, Homo sapien
tcattaataatgagacaagcccgtcgtctgtta

SEQ ID NO: 167166 - DNA, 33 bp, Homo sapien
tcattaataatgagaccagcccgtcgtctgtta

SEQ ID NO: 167167 - DNA, 33 bp, Homo sapien
cctacagaattgtctagggtaagaaatttggat

SEQ ID NO: 167168 - DNA, 33 bp, Homo sapien
cctacagaattgtctatggtaagaaatttggat

SEQ ID NO: 167169 - DNA, 33 bp, Homo sapien
accaaaaatgttggcaccgttcttaagtttttt

SEQ ID NO: 167170 - DNA, 33 bp, Homo sapien
accaaaaatgttggcatcgttcttaagtttttt

SEQ ID NO: 167171 - DNA, 33 bp, Homo sapien
tatgtgcgtgtttatacgctttagttctgttta

SEQ ID NO: 167172 - DNA, 33 bp, Homo sapien
tatgtgcgtgtttatatgctttagttctgttta

SEQ ID NO: 167173 - DNA, 33 bp, Homo sapien
aattatcatttggtaaccatcatagtaattaat

SEQ ID NO: 167174 - DNA, 33 bp, Homo sapien
aattatcatttggtaatcatcatagtaattaat

SEQ ID NO: 167175 - DNA, 33 bp, Homo sapien
ttgtttcatgtagataccaagtttttccagcat

SEQ ID NO: 167176 - DNA, 33 bp, Homo sapien
ttgtttcatgtagatatcaagtttttccagcat

SEQ ID NO: 167177 - DNA, 33 bp, Homo sapien
tgtatggttttatgtcaaagtttgccagtgaga

SEQ ID NO: 167178 - DNA, 33 bp, Homo sapien
tgtatggttttatgtcgaagtttgccagtgaga

SEQ ID NO: 167179 - DNA, 33 bp, Homo sapien
cacggccaagtctagggaaggcaatcagactga

SEQ ID NO: 167180 - DNA, 33 bp, Homo sapien
cacggccaagtctaggtaaggcaatcagactga

SEQ ID NO: 167181 - DNA, 33 bp, Homo sapien
aactctcacctaaaccaataaatacttaagtca

SEQ ID NO: 167182 - DNA, 33 bp, Homo sapien
aactctcacctaaaccgataaatacttaagtca

SEQ ID NO: 167183 - DNA, 33 bp, Homo sapien
atgataaaaatgataacagctagcatttgtatc

SEQ ID NO: 167184 - DNA, 33 bp, Homo sapien
atgataaaaatgataagagctagcatttgtatc

SEQ ID NO: 167185 - DNA, 33 bp, Homo sapien
gttttaacatgatacacagtgtgacaattttca

SEQ ID NO: 167186 - DNA, 33 bp, Homo sapien
gttttaacatgatacatagtgtgacaattttca

SEQ ID NO: 167187 - DNA, 33 bp, Homo sapien
gtgtcagtcaaaataggctagattatgctgcag

SEQ ID NO: 167188 - DNA, 33 bp, Homo sapien
gtgtcagtcaaaatagtctagattatgctgcag

SEQ ID NO: 167189 - DNA, 33 bp, Homo sapien
aaataaatgaaggtcactagagttaagaaagtc

SEQ ID NO: 167190 - DNA, 33 bp, Homo sapien
aaataaatgaaggtcagtagagttaagaaagtc

SEQ ID NO: 167191 - DNA, 33 bp, Homo sapien
ctatctctctcttcaacagcttacttgctgata

SEQ ID NO: 167192 - DNA, 33 bp, Homo sapien
ctatctctctcttcaatagcttacttgctgata

SEQ ID NO: 167193 - DNA, 33 bp, Homo sapien
tttaaatggaatcacactatttgtaaccatcca

SEQ ID NO: 167194 - DNA, 33 bp, Homo sapien
tttaaatggaatcacattatttgtaaccatcca

SEQ ID NO: 167195 - DNA, 33 bp, Homo sapien
acaaggcagctcatgggaaactaatcactcaga

SEQ ID NO: 167196 - DNA, 33 bp, Homo sapien
acaaggcagctcatggtaaactaatcactcaga

SEQ ID NO: 167197 - DNA, 33 bp, Homo sapien
gtgtggttcataactacagtcatgtgctgctta

SEQ ID NO: 167198 - DNA, 33 bp, Homo sapien
gtgtggttcataactatagtcatgtgctgctta

SEQ ID NO: 167199 - DNA, 33 bp, Homo sapien
cctctctaatctataaccttgtgtctctagaag

SEQ ID NO: 167200 - DNA, 33 bp, Homo sapien
cctctctaatctataatcttgtgtctctagaag

SEQ ID NO: 167201 - DNA, 33 bp, Homo sapien
aacactgaaagttcacgaagtatcgggcattgc

SEQ ID NO: 167202 - DNA, 33 bp, Homo sapien
aacactgaaagttcactaagtatcgggcattgc

SEQ ID NO: 167203 - DNA, 33 bp, Homo sapien
ctaagacagaaatccagaagagtaaacaatgat

SEQ ID NO: 167204 - DNA, 33 bp, Homo sapien
ctaagacagaaatccataagagtaaacaatgat

SEQ ID NO: 167205 - DNA, 33 bp, Homo sapien
actcattattcttagccacatcactggcacaga

SEQ ID NO: 167206 - DNA, 33 bp, Homo sapien
actcattattcttagctacatcactggcacaga

SEQ ID NO: 167207 - DNA, 33 bp, Homo sapien
cgcttttggtcatgtggattgatttttagtctg

SEQ ID NO: 167208 - DNA, 33 bp, Homo sapien
cgcttttggtcatgtgtattgatttttagtctg

SEQ ID NO: 167209 - DNA, 33 bp, Homo sapien
gagcaggttggaaaagaataatttacagttgtg

SEQ ID NO: 167210 - DNA, 33 bp, Homo sapien
gagcaggttggaaaaggataatttacagttgtg

SEQ ID NO: 167211 - DNA, 33 bp, Homo sapien
tatatatataatcatcacagctgctaaatcaag

SEQ ID NO: 167212 - DNA, 33 bp, Homo sapien
tatatatataatcatctcagctgctaaatcaag

SEQ ID NO: 167213 - DNA, 33 bp, Homo sapien
tggctaccttccagaaagatttaccagacttct

SEQ ID NO: 167214 - DNA, 33 bp, Homo sapien
tggctaccttccagaaggatttaccagacttct

SEQ ID NO: 167215 - DNA, 33 bp, Homo sapien
gtttttgttgcatagcagataatattttaaata

SEQ ID NO: 167216 - DNA, 33 bp, Homo sapien
gtttttgttgcatagcggataatattttaaata

SEQ ID NO: 167217 - DNA, 33 bp, Homo sapien
aatttaggaatgtgccaagagttttgagaaaga

SEQ ID NO: 167218 - DNA, 33 bp, Homo sapien
aatttaggaatgtgcccagagttttgagaaaga

SEQ ID NO: 167219 - DNA, 33 bp, Homo sapien
cgtacccacctgattaacatgaccacaacctct

SEQ ID NO: 167220 - DNA, 33 bp, Homo sapien
cgtacccacctgattaccatgaccacaacctct

SEQ ID NO: 167221 - DNA, 33 bp, Homo sapien
gcacaaagatacagtcacaaggctactcatcac

SEQ ID NO: 167222 - DNA, 33 bp, Homo sapien
gcacaaagatacagtcgcaaggctactcatcac

SEQ ID NO: 167223 - DNA, 33 bp, Homo sapien
aaaaatgagaacaatccaagtgaatataaaaat

SEQ ID NO: 167224 - DNA, 33 bp, Homo sapien
aaaaatgagaacaatctaagtgaatataaaaat

SEQ ID NO: 167225 - DNA, 33 bp, Homo sapien
agagagctgatcctcacagacataatggtatta

SEQ ID NO: 167226 - DNA, 33 bp, Homo sapien
agagagctgatcctcatagacataatggtatta

SEQ ID NO: 167227 - DNA, 33 bp, Homo sapien
agattgataagtaactcaacagaaaatgtagaa

SEQ ID NO: 167228 - DNA, 33 bp, Homo sapien
agattgataagtaactgaacagaaaatgtagaa

SEQ ID NO: 167229 - DNA, 33 bp, Homo sapien
gtcataatccaatccactgaaactaaggtccaa

SEQ ID NO: 167230 - DNA, 33 bp, Homo sapien
gtcataatccaatccagtgaaactaaggtccaa

SEQ ID NO: 167231 - DNA, 33 bp, Homo sapien
tgaagggacccatgcaaaaaaggtagggacaga

SEQ ID NO: 167232 - DNA, 33 bp, Homo sapien
tgaagggacccatgcagaaaaggtagggacaga

SEQ ID NO: 167233 - DNA, 33 bp, Homo sapien
taaaggaagtcagtaaagtagccttgataaaac

SEQ ID NO: 167234 - DNA, 33 bp, Homo sapien
taaaggaagtcagtaatgtagccttgataaaac

SEQ ID NO: 167235 - DNA, 33 bp, Homo sapien
ataatgcaaatgggagcaaatttgtgtcatgtc

SEQ ID NO: 167236 - DNA, 33 bp, Homo sapien
ataatgcaaatgggagtaaatttgtgtcatgtc

SEQ ID NO: 167237 - DNA, 33 bp, Homo sapien
tttaaaatgatccttgcaagagcctgaaggaga

SEQ ID NO: 167238 - DNA, 33 bp, Homo sapien
tttaaaatgatccttgtaagagcctgaaggaga

SEQ ID NO: 167239 - DNA, 33 bp, Homo sapien
ataagagaagatgcacaagatgagaaattgaag

SEQ ID NO: 167240 - DNA, 33 bp, Homo sapien
ataagagaagatgcacgagatgagaaattgaag

SEQ ID NO: 167241 - DNA, 33 bp, Homo sapien
ctctttttggattaccaagttaaaagacacaaa

SEQ ID NO: 167242 - DNA, 33 bp, Homo sapien
ctctttttggattacctagttaaaagacacaaa

SEQ ID NO: 167243 - DNA, 33 bp, Homo sapien
agggaggcttcatcaaagaaaaaacattgctaa

SEQ ID NO: 167244 - DNA, 33 bp, Homo sapien
agggaggcttcatcaaggaaaaaacattgctaa

SEQ ID NO: 167245 - DNA, 33 bp, Homo sapien
gcattaaattaatcacgactctagaatgtgtat

SEQ ID NO: 167246 - DNA, 33 bp, Homo sapien
gcattaaattaatcactactctagaatgtgtat

SEQ ID NO: 167247 - DNA, 33 bp, Homo sapien
caagcacttgatatgaccacaggcctgtgctct

SEQ ID NO: 167248 - DNA, 33 bp, Homo sapien
caagcacttgatatgatcacaggcctgtgctct

SEQ ID NO: 167249 - DNA, 33 bp, Homo sapien
agcacattttgtgcagaccaattatctctattt

SEQ ID NO: 167250 - DNA, 33 bp, Homo sapien
agcacattttgtgcaggccaattatctctattt

SEQ ID NO: 167251 - DNA, 33 bp, Homo sapien
ttcagatacctgtaaacggatatgttttcactt

SEQ ID NO: 167252 - DNA, 33 bp, Homo sapien
ttcagatacctgtaaatggatatgttttcactt

SEQ ID NO: 167253 - DNA, 33 bp, Homo sapien
cctttaacatttcttacagtgatgatctgttaa

SEQ ID NO: 167254 - DNA, 33 bp, Homo sapien
cctttaacatttcttatagtgatgatctgttaa

SEQ ID NO: 167255 - DNA, 33 bp, Homo sapien
tttctttctgcaaaaagaacctcctttaacatt

SEQ ID NO: 167256 - DNA, 33 bp, Homo sapien
tttctttctgcaaaaataacctcctttaacatt

SEQ ID NO: 167257 - DNA, 33 bp, Homo sapien
gcaatgtgctgggcaaccttctaagttctttat

SEQ ID NO: 167258 - DNA, 33 bp, Homo sapien
gcaatgtgctgggcaatcttctaagttctttat

SEQ ID NO: 167259 - DNA, 33 bp, Homo sapien
atgtttactttgttgaacttcatttgagatgtc

SEQ ID NO: 167260 - DNA, 33 bp, Homo sapien
atgtttactttgttgagcttcatttgagatgtc

SEQ ID NO: 167261 - DNA, 33 bp, Homo sapien
taaaacaaacagctgcagattatcagaaccctg

SEQ ID NO: 167262 - DNA, 33 bp, Homo sapien
taaaacaaacagctgcggattatcagaaccctg

SEQ ID NO: 167263 - DNA, 33 bp, Homo sapien
aaagctccaaatgccaaattcaagatgctgact

SEQ ID NO: 167264 - DNA, 33 bp, Homo sapien
aaagctccaaatgccagattcaagatgctgact

SEQ ID NO: 167265 - DNA, 33 bp, Homo sapien
agggtttgcgtaagacaaaagagaaagagagag

SEQ ID NO: 167266 - DNA, 33 bp, Homo sapien
agggtttgcgtaagacgaaagagaaagagagag

SEQ ID NO: 167267 - DNA, 33 bp, Homo sapien
atttttttaagaaatacggtacagatcagttga

SEQ ID NO: 167268 - DNA, 33 bp, Homo sapien
atttttttaagaaatatggtacagatcagttga

SEQ ID NO: 167269 - DNA, 33 bp, Homo sapien
caacagaccgtgttgaatattgctttccattga

SEQ ID NO: 167270 - DNA, 33 bp, Homo sapien
caacagaccgtgttgagtattgctttccattga

SEQ ID NO: 167271 - DNA, 33 bp, Homo sapien
atctcttacaagccaacgtttgatgaggatgtg

SEQ ID NO: 167272 - DNA, 33 bp, Homo sapien
atctcttacaagccaaggtttgatgaggatgtg

SEQ ID NO: 167273 - DNA, 33 bp, Homo sapien
ttaaaaatcttcagaacagtaaggaaaggaggg

SEQ ID NO: 167274 - DNA, 33 bp, Homo sapien
ttaaaaatcttcagaatagtaaggaaaggaggg

SEQ ID NO: 167275 - DNA, 33 bp, Homo sapien
tttaacccagaaatgcaaaaatgctaagcaatt

SEQ ID NO: 167276 - DNA, 33 bp, Homo sapien
tttaacccagaaatgcgaaaatgctaagcaatt

SEQ ID NO: 167277 - DNA, 33 bp, Homo sapien
taagccccaagatataaccctcaagcatcagag

SEQ ID NO: 167278 - DNA, 33 bp, Homo sapien
taagccccaagatatagccctcaagcatcagag

SEQ ID NO: 167279 - DNA, 33 bp, Homo sapien
ttttatgagtcaaaaaccaaaactgtgtgaact

SEQ ID NO: 167280 - DNA, 33 bp, Homo sapien
ttttatgagtcaaaaatcaaaactgtgtgaact

SEQ ID NO: 167281 - DNA, 33 bp, Homo sapien
tccttgcaacaagtaaagaggactccaaagtga

SEQ ID NO: 167282 - DNA, 33 bp, Homo sapien
tccttgcaacaagtaaggaggactccaaagtga

SEQ ID NO: 167283 - DNA, 33 bp, Homo sapien
cactcttgaaattcagaaaaaaagtgcacaagg

SEQ ID NO: 167284 - DNA, 33 bp, Homo sapien
cactcttgaaattcaggaaaaaagtgcacaagg

SEQ ID NO: 167285 - DNA, 33 bp, Homo sapien
taacctgggttgtcgaagaacaggctggaggtt

SEQ ID NO: 167286 - DNA, 33 bp, Homo sapien
taacctgggttgtcgaggaacaggctggaggtt

SEQ ID NO: 167287 - DNA, 33 bp, Homo sapien
tcctttactataacagacattcaagaattaaaa

SEQ ID NO: 167288 - DNA, 33 bp, Homo sapien
tcctttactataacaggcattcaagaattaaaa

SEQ ID NO: 167289 - DNA, 33 bp, Homo sapien
gatactcttttcaaggaatgtcattaattacca

SEQ ID NO: 167290 - DNA, 33 bp, Homo sapien
gatactcttttcaaggtatgtcattaattacca

SEQ ID NO: 167291 - DNA, 33 bp, Homo sapien
ctatgtaatatttatacggctgaccctgtgtta

SEQ ID NO: 167292 - DNA, 33 bp, Homo sapien
ctatgtaatatttatatggctgaccctgtgtta

SEQ ID NO: 167293 - DNA, 33 bp, Homo sapien
tgattttgtttagagacctctgttaaaaatact

SEQ ID NO: 167294 - DNA, 33 bp, Homo sapien
tgattttgtttagagagctctgttaaaaatact

SEQ ID NO: 167295 - DNA, 33 bp, Homo sapien
ttttttatttttagaaactccaactggcaactt

SEQ ID NO: 167296 - DNA, 33 bp, Homo sapien
ttttttatttttagaagctccaactggcaactt

SEQ ID NO: 167297 - DNA, 33 bp, Homo sapien
tttattcattatgggaactcaagaaactgacaa

SEQ ID NO: 167298 - DNA, 33 bp, Homo sapien
tttattcattatgggagctcaagaaactgacaa

SEQ ID NO: 167299 - DNA, 33 bp, Homo sapien
tctatcttgtgatcttcaaaatgaaaaccgcac

SEQ ID NO: 167300 - DNA, 33 bp, Homo sapien
tctatcttgtgatcttgaaaatgaaaaccgcac

SEQ ID NO: 167301 - DNA, 33 bp, Homo sapien
caactttatggatcaaatgaattaagtattttt

SEQ ID NO: 167302 - DNA, 33 bp, Homo sapien
caactttatggatcaactgaattaagtattttt

SEQ ID NO: 167303 - DNA, 33 bp, Homo sapien
gagcttctcttacctcactggtgaaatggcaac

SEQ ID NO: 167304 - DNA, 33 bp, Homo sapien
gagcttctcttacctcgctggtgaaatggcaac

SEQ ID NO: 167305 - DNA, 33 bp, Homo sapien
tcttgactggtagaaagaatatgtgaacccaag

SEQ ID NO: 167306 - DNA, 33 bp, Homo sapien
tcttgactggtagaaataatatgtgaacccaag

SEQ ID NO: 167307 - DNA, 33 bp, Homo sapien
gagaaagaaatagagacgagtgtaggaaatgtt

SEQ ID NO: 167308 - DNA, 33 bp, Homo sapien
gagaaagaaatagagaggagtgtaggaaatgtt

SEQ ID NO: 167309 - DNA, 33 bp, Homo sapien
acacacccactttcacggcactattctatctca

SEQ ID NO: 167310 - DNA, 33 bp, Homo sapien
acacacccactttcactgcactattctatctca

SEQ ID NO: 167311 - DNA, 33 bp, Homo sapien
aaattgtagtaggatacccaatcaggtcatggc

SEQ ID NO: 167312 - DNA, 33 bp, Homo sapien
aaattgtagtaggatagccaatcaggtcatggc

SEQ ID NO: 167313 - DNA, 33 bp, Homo sapien
gatgttgctctcaataataagctttggatttgg

SEQ ID NO: 167314 - DNA, 33 bp, Homo sapien
gatgttgctctcaatactaagctttggatttgg

SEQ ID NO: 167315 - DNA, 33 bp, Homo sapien
ccttatgtcctacttaactgtgttgcaaattct

SEQ ID NO: 167316 - DNA, 33 bp, Homo sapien
ccttatgtcctacttacctgtgttgcaaattct

SEQ ID NO: 167317 - DNA, 33 bp, Homo sapien
atcgcttctgatatccactcagactggctgcca

SEQ ID NO: 167318 - DNA, 33 bp, Homo sapien
atcgcttctgatatccgctcagactggctgcca

SEQ ID NO: 167319 - DNA, 33 bp, Homo sapien
actagtctctacccaacatcaaagcctaatctc

SEQ ID NO: 167320 - DNA, 33 bp, Homo sapien
actagtctctacccaatatcaaagcctaatctc

SEQ ID NO: 167321 - DNA, 33 bp, Homo sapien
tatgttctaactgtcacaaggttttcattttcc

SEQ ID NO: 167322 - DNA, 33 bp, Homo sapien
tatgttctaactgtcagaaggttttcattttcc

SEQ ID NO: 167323 - DNA, 33 bp, Homo sapien
agcaaggacatgaaggaatccaataagcattct

SEQ ID NO: 167324 - DNA, 33 bp, Homo sapien
agcaaggacatgaaggcatccaataagcattct

SEQ ID NO: 167325 - DNA, 33 bp, Homo sapien
aagtcgatctcaggagacaaactggttctgggc

SEQ ID NO: 167326 - DNA, 33 bp, Homo sapien
aagtcgatctcaggaggcaaactggttctgggc

SEQ ID NO: 167327 - DNA, 33 bp, Homo sapien
gcacaaagtggaataaatatagtgctaggggaa

SEQ ID NO: 167328 - DNA, 33 bp, Homo sapien
gcacaaagtggaataattatagtgctaggggaa

SEQ ID NO: 167329 - DNA, 33 bp, Homo sapien
aacaaaggaagacaaacatgctcctctttcctg

SEQ ID NO: 167330 - DNA, 33 bp, Homo sapien
aacaaaggaagacaaatatgctcctctttcctg

SEQ ID NO: 167331 - DNA, 33 bp, Homo sapien
agggattgggacaagaaacatatacactccaga

SEQ ID NO: 167332 - DNA, 33 bp, Homo sapien
agggattgggacaagagacatatacactccaga

SEQ ID NO: 167333 - DNA, 33 bp, Homo sapien
cttgccatcacatctacagggtagctcctggca

SEQ ID NO: 167334 - DNA, 33 bp, Homo sapien
cttgccatcacatctagagggtagctcctggca

SEQ ID NO: 167335 - DNA, 33 bp, Homo sapien
ggaacaagttatagcaagaaataggccatgtaa

SEQ ID NO: 167336 - DNA, 33 bp, Homo sapien
ggaacaagttatagcaggaaataggccatgtaa

SEQ ID NO: 167337 - DNA, 33 bp, Homo sapien
agattaaaatactcaaacttacaccaaagatat

SEQ ID NO: 167338 - DNA, 33 bp, Homo sapien
agattaaaatactcaaccttacaccaaagatat

SEQ ID NO: 167339 - DNA, 33 bp, Homo sapien
agccattgaccctcaaataagacatagactctg

SEQ ID NO: 167340 - DNA, 33 bp, Homo sapien
agccattgaccctcaagtaagacatagactctg

SEQ ID NO: 167341 - DNA, 33 bp, Homo sapien
cactttgcataagagacattcctctggtatgtt

SEQ ID NO: 167342 - DNA, 33 bp, Homo sapien
cactttgcataagagagattcctctggtatgtt

SEQ ID NO: 167343 - DNA, 33 bp, Homo sapien
gcaggaagtgtgctgaaaaagtcgagtagctac

SEQ ID NO: 167344 - DNA, 33 bp, Homo sapien
gcaggaagtgtgctgagaaagtcgagtagctac

SEQ ID NO: 167345 - DNA, 33 bp, Homo sapien
cttcttaacagctttgaaatctatatgtcattc

SEQ ID NO: 167346 - DNA, 33 bp, Homo sapien
cttcttaacagctttggaatctatatgtcattc

SEQ ID NO: 167347 - DNA, 33 bp, Homo sapien
cacagaaaaggaactgccacatataaacactaa

SEQ ID NO: 167348 - DNA, 33 bp, Homo sapien
cacagaaaaggaactggcacatataaacactaa

SEQ ID NO: 167349 - DNA, 33 bp, Homo sapien
atgtaaaggccctgcaatcaaatgccaacaaat

SEQ ID NO: 167350 - DNA, 33 bp, Homo sapien
atgtaaaggccctgcagtcaaatgccaacaaat

SEQ ID NO: 167351 - DNA, 33 bp, Homo sapien
accctataccatgaaaagtcaacctgaatgaac

SEQ ID NO: 167352 - DNA, 33 bp, Homo sapien
accctataccatgaaaggtcaacctgaatgaac

SEQ ID NO: 167353 - DNA, 33 bp, Homo sapien
gaggactagttagcaacacctgtgaccgtcagt

SEQ ID NO: 167354 - DNA, 33 bp, Homo sapien
gaggactagttagcaagacctgtgaccgtcagt

SEQ ID NO: 167355 - DNA, 33 bp, Homo sapien
ggaaaaaaacatggacaagagcctttattatgg

SEQ ID NO: 167356 - DNA, 33 bp, Homo sapien
ggaaaaaaacatggacgagagcctttattatgg

SEQ ID NO: 167357 - DNA, 33 bp, Homo sapien
catgtggtcgtttcaacgcctaaaagtatgcat

SEQ ID NO: 167358 - DNA, 33 bp, Homo sapien
catgtggtcgtttcaatgcctaaaagtatgcat

SEQ ID NO: 167359 - DNA, 33 bp, Homo sapien
gtgcttaaagacatcaatatggtaactagcttg

SEQ ID NO: 167360 - DNA, 33 bp, Homo sapien
gtgcttaaagacatcagtatggtaactagcttg

SEQ ID NO: 167361 - DNA, 33 bp, Homo sapien
tagtgagtgattctaacctaggtccatttaact

SEQ ID NO: 167362 - DNA, 33 bp, Homo sapien
tagtgagtgattctaagctaggtccatttaact

SEQ ID NO: 167363 - DNA, 33 bp, Homo sapien
cttcttcatcttcaaaatgcagataaaagttgc

SEQ ID NO: 167364 - DNA, 33 bp, Homo sapien
cttcttcatcttcaaactgcagataaaagttgc

SEQ ID NO: 167365 - DNA, 33 bp, Homo sapien
actagccaaaccgtgacatctacgttagggcaa

SEQ ID NO: 167366 - DNA, 33 bp, Homo sapien
actagccaaaccgtgatatctacgttagggcaa

SEQ ID NO: 167367 - DNA, 33 bp, Homo sapien
ggactcacctctctcaaataatcactgcagctg

SEQ ID NO: 167368 - DNA, 33 bp, Homo sapien
ggactcacctctctcagataatcactgcagctg

SEQ ID NO: 167369 - DNA, 33 bp, Homo sapien
acaaaagacagtcttaccttgttgccatattaa

SEQ ID NO: 167370 - DNA, 33 bp, Homo sapien
acaaaagacagtcttatcttgttgccatattaa

SEQ ID NO: 167371 - DNA, 33 bp, Homo sapien
ttttgcagctaaattgcatatgatcttgaactc

SEQ ID NO: 167372 - DNA, 33 bp, Homo sapien
ttttgcagctaaattgtatatgatcttgaactc

SEQ ID NO: 167373 - DNA, 33 bp, Homo sapien
ggacattttagagcacggaatctgttcaaggaa

SEQ ID NO: 167374 - DNA, 33 bp, Homo sapien
ggacattttagagcactgaatctgttcaaggaa

SEQ ID NO: 167375 - DNA, 33 bp, Homo sapien
aaagctgttggaacttcaagttactttgagcct

SEQ ID NO: 167376 - DNA, 33 bp, Homo sapien
aaagctgttggaactttaagttactttgagcct

SEQ ID NO: 167377 - DNA, 33 bp, Homo sapien
tagcctagcactagaacaattaggcactgattg

SEQ ID NO: 167378 - DNA, 33 bp, Homo sapien
tagcctagcactagaagaattaggcactgattg

SEQ ID NO: 167379 - DNA, 33 bp, Homo sapien
aacctgtgttgttaaaaggccaactgtattttc

SEQ ID NO: 167380 - DNA, 33 bp, Homo sapien
aacctgtgttgttaaagggccaactgtattttc

SEQ ID NO: 167381 - DNA, 33 bp, Homo sapien
ccaggtgttaagtgtcaaaggaaatgtgccaag

SEQ ID NO: 167382 - DNA, 33 bp, Homo sapien
ccaggtgttaagtgtcgaaggaaatgtgccaag

SEQ ID NO: 167383 - DNA, 33 bp, Homo sapien
aaaaacgtctgttacacagttatgctcttttcg

SEQ ID NO: 167384 - DNA, 33 bp, Homo sapien
aaaaacgtctgttacatagttatgctcttttcg

SEQ ID NO: 167385 - DNA, 33 bp, Homo sapien
aagtaacatggttacaaatattgaagaaattaa

SEQ ID NO: 167386 - DNA, 33 bp, Homo sapien
aagtaacatggttacagatattgaagaaattaa

SEQ ID NO: 167387 - DNA, 33 bp, Homo sapien
ctaggtgacaaaataacctgcaaactcccatga

SEQ ID NO: 167388 - DNA, 33 bp, Homo sapien
ctaggtgacaaaataatctgcaaactcccatga

SEQ ID NO: 167389 - DNA, 33 bp, Homo sapien
gaaatagcttgctcaacgccaaataactaataa

SEQ ID NO: 167390 - DNA, 33 bp, Homo sapien
gaaatagcttgctcaatgccaaataactaataa

SEQ ID NO: 167391 - DNA, 33 bp, Homo sapien
aactccttcttacagacgagaaaacagcatcag

SEQ ID NO: 167392 - DNA, 33 bp, Homo sapien
aactccttcttacagatgagaaaacagcatcag

SEQ ID NO: 167393 - DNA, 33 bp, Homo sapien
ggctggttgcaaaagcaaggaggaaaaacagag

SEQ ID NO: 167394 - DNA, 33 bp, Homo sapien
ggctggttgcaaaagcgaggaggaaaaacagag

SEQ ID NO: 167395 - DNA, 33 bp, Homo sapien
aggatgaaatgagataacattggcaaggtgctg

SEQ ID NO: 167396 - DNA, 33 bp, Homo sapien
aggatgaaatgagatagcattggcaaggtgctg

SEQ ID NO: 167397 - DNA, 33 bp, Homo sapien
attctctggctaactaagacagtcactgctcaa

SEQ ID NO: 167398 - DNA, 33 bp, Homo sapien
attctctggctaactaggacagtcactgctcaa

SEQ ID NO: 167399 - DNA, 33 bp, Homo sapien
cagaatgatcaagcaagatcgcacaggtaaatt

SEQ ID NO: 167400 - DNA, 33 bp, Homo sapien
cagaatgatcaagcaatatcgcacaggtaaatt

SEQ ID NO: 167401 - DNA, 33 bp, Homo sapien
accgccttctcaaaaaagagtctccaattccta

SEQ ID NO: 167402 - DNA, 33 bp, Homo sapien
accgccttctcaaaaaggagtctccaattccta

SEQ ID NO: 167403 - DNA, 33 bp, Homo sapien
aagcccgtctatggacacaaaactggtgtgata

SEQ ID NO: 167404 - DNA, 33 bp, Homo sapien
aagcccgtctatggactcaaaactggtgtgata

SEQ ID NO: 167405 - DNA, 33 bp, Homo sapien; identical to SEQ ID NO: 167403

SEQ ID NO: 167406 - DNA, 33 bp, Homo sapien; identical to SEQ ID NO: 167404

SEQ ID NO: 167407 - DNA, 33 bp, Homo sapien
aggaaaaattatcccaaatggaatctctactgt

SEQ ID NO: 167408 - DNA, 33 bp, Homo sapien
aggaaaaattatcccagatggaatctctactgt

SEQ ID NO: 167409 - DNA, 33 bp, Homo sapien
ttaaagtaatctgtaaccttcctggccatttat

SEQ ID NO: 167410 - DNA, 33 bp, Homo sapien
ttaaagtaatctgtaatcttcctggccatttat

SEQ ID NO: 167411 - DNA, 33 bp, Homo sapien; identical to SEQ ID NO: 167409

SEQ ID NO: 167412 - DNA, 33 bp, Homo sapien; identical to SEQ ID NO: 167410

SEQ ID NO: 167413 - DNA, 33 bp, Homo sapien
atgtcccaggttgaacggtattcacacactccc

SEQ ID NO: 167414 - DNA, 33 bp, Homo sapien
atgtcccaggttgaactgtattcacacactccc

SEQ ID NO: 167415 - DNA, 33 bp, Homo sapien
ggaagccatgtgatgacagaggcgggaactgga

SEQ ID NO: 167416 - DNA, 33 bp, Homo sapien
ggaagccatgtgatgatagaggcgggaactgga

SEQ ID NO: 167417 - DNA, 33 bp, Homo sapien
agccagatgctataagcccttgttattccaagt

SEQ ID NO: 167418 - DNA, 33 bp, Homo sapien
agccagatgctataaggccttgttattccaagt

SEQ ID NO: 167419 - DNA, 33 bp, Homo sapien
agcctgccacgtagtacgcattcaatagagatc

SEQ ID NO: 167420 - DNA, 33 bp, Homo sapien
agcctgccacgtagtaggcattcaatagagatc

SEQ ID NO: 167421 - DNA, 33 bp, Homo sapien
ctccatgccagacaccaaggataggacaactaa

SEQ ID NO: 167422 - DNA, 33 bp, Homo sapien
ctccatgccagacaccgaggataggacaactaa

SEQ ID NO: 167423 - DNA, 33 bp, Homo sapien
atcccaggagggagacaaggatactaatggcaa

SEQ ID NO: 167424 - DNA, 33 bp, Homo sapien
atcccaggagggagacgaggatactaatggcaa

SEQ ID NO: 167425 - DNA, 33 bp, Homo sapien
actctgaccccctgacaattagaaacaatatca

SEQ ID NO: 167426 - DNA, 33 bp, Homo sapien
actctgaccccctgactattagaaacaatatca

SEQ ID NO: 167427 - DNA, 33 bp, Homo sapien
ttgttcctaatatccacggactgataggatgct

SEQ ID NO: 167428 - DNA, 33 bp, Homo sapien
ttgttcctaatatccagggactgataggatgct

SEQ ID NO: 167429 - DNA, 33 bp, Homo sapien
tagtattatcctctccccactgaatataagaaa

SEQ ID NO: 167430 - DNA, 33 bp, Homo sapien
tagtattatcctctcctcactgaatataagaaa

SEQ ID NO: 167431 - DNA, 33 bp, Homo sapien
gttattatgggacaatcacaatctaaacaccag

SEQ ID NO: 167432 - DNA, 33 bp, Homo sapien
gttattatgggacaatgacaatctaaacaccag

SEQ ID NO: 167433 - DNA, 33 bp, Homo sapien; identical to SEQ ID NO: 167431

SEQ ID NO: 167434 - DNA, 33 bp, Homo sapien; identical to SEQ ID NO: 167432

SEQ ID NO: 167435 - DNA, 33 bp, Homo sapien
ggtggatcagcagatcaagaaacaatagacaca

SEQ ID NO: 167436 - DNA, 33 bp, Homo sapien
ggtggatcagcagatcgagaaacaatagacaca

SEQ ID NO: 167437 - DNA, 33 bp, Homo sapien; identical to SEQ ID NO: 167435

SEQ ID NO: 167438 - DNA, 33 bp, Homo sapien; identical to SEQ ID NO: 167436

SEQ ID NO: 167439 - DNA, 33 bp, Homo sapien
tgtgactgtaacataccctataaatgttggaat

SEQ ID NO: 167440 - DNA, 33 bp, Homo sapien
tgtgactgtaacatactctataaatgttggaat

SEQ ID NO: 167441 - DNA, 33 bp, Homo sapien
ctgtaagatattaaaaagagcatcagaaggagt

SEQ ID NO: 167442 - DNA, 33 bp, Homo sapien
ctgtaagatattaaaaggagcatcagaaggagt

SEQ ID NO: 167443 - DNA, 33 bp, Homo sapien
cccttcagattataaacgggccaagtgcttgac

SEQ ID NO: 167444 - DNA, 33 bp, Homo sapien
cccttcagattataaatgggccaagtgcttgac

SEQ ID NO: 167445 - DNA, 33 bp, Homo sapien
attttgtcagccaataaaacaccacttgggtgt

SEQ ID NO: 167446 - DNA, 33 bp, Homo sapien
attttgtcagccaatagaacaccacttgggtgt

SEQ ID NO: 167447 - DNA, 33 bp, Homo sapien
caagctccaaggcaaaatgaagaataccattta

SEQ ID NO: 167448 - DNA, 33 bp, Homo sapien
caagctccaaggcaaagtgaagaataccattta

SEQ ID NO: 167449 - DNA, 33 bp, Homo sapien
ttctccagtggttgtgaagactctgtaagatac

SEQ ID NO: 167450 - DNA, 33 bp, Homo sapien
ttctccagtggttgtggagactctgtaagatac

SEQ ID NO: 167451 - DNA, 33 bp, Homo sapien
tctcttttcatctttacactcccagtgcctgat

SEQ ID NO: 167452 - DNA, 33 bp, Homo sapien
tctcttttcatctttatactcccagtgcctgat

SEQ ID NO: 167453 - DNA, 33 bp, Homo sapien
ctagcccattcctcaaacttgattttatgggtc

SEQ ID NO: 167454 - DNA, 33 bp, Homo sapien
ctagcccattcctcaatcttgattttatgggtc

SEQ ID NO: 167455 - DNA, 33 bp, Homo sapien
tgaggctgagaagtcccataatctgccatctac

SEQ ID NO: 167456 - DNA, 33 bp, Homo sapien
tgaggctgagaagtcctataatctgccatctac

SEQ ID NO: 167457 - DNA, 33 bp, Homo sapien
ttcctcatgataaatccatgtgtgtgtctgtgt

SEQ ID NO: 167458 - DNA, 33 bp, Homo sapien
ttcctcatgataaatctatgtgtgtgtctgtgt

SEQ ID NO: 167459 - DNA, 33 bp, Homo sapien
ctggaggtttctcacccggaatgtgcagttctc

SEQ ID NO: 167460 - DNA, 33 bp, Homo sapien
ctggaggtttctcacctggaatgtgcagttctc

SEQ ID NO: 167461 - DNA, 33 bp, Homo sapien
ttcattttttctttcaagtctgtgtagtattcc

SEQ ID NO: 167462 - DNA, 33 bp, Homo sapien
ttcattttttctttcatgtctgtgtagtattcc

SEQ ID NO: 167463 - DNA, 33 bp, Homo sapien
cttacctaactctgaaaagaaatgcctatcttg

SEQ ID NO: 167464 - DNA, 33 bp, Homo sapien
cttacctaactctgaagagaaatgcctatcttg

SEQ ID NO: 167465 - DNA, 33 bp, Homo sapien
attatagagctgaccacatgagattgtttggaa

SEQ ID NO: 167466 - DNA, 33 bp, Homo sapien
attatagagctgaccagatgagattgtttggaa

SEQ ID NO: 167467 - DNA, 33 bp, Homo sapien
tttattacaccttgaaaccatgtgttccctaga

SEQ ID NO: 167468 - DNA, 33 bp, Homo sapien
tttattacaccttgaagccatgtgttccctaga

SEQ ID NO: 167469 - DNA, 33 bp, Homo sapien
tcattgtgctttatgaaactctaatctattcag

SEQ ID NO: 167470 - DNA, 33 bp, Homo sapien
tcattgtgctttatgacactctaatctattcag

SEQ ID NO: 167471 - DNA, 33 bp, Homo sapien
tttaaatgtagcaaacactcaagagaagatgct

SEQ ID NO: 167472 - DNA, 33 bp, Homo sapien
tttaaatgtagcaaacgctcaagagaagatgct

SEQ ID NO: 167473 - DNA, 33 bp, Homo sapien
cagggataatgtctccagatgaattatgcacac

SEQ ID NO: 167474 - DNA, 33 bp, Homo sapien
cagggataatgtctcccgatgaattatgcacac

SEQ ID NO: 167475 - DNA, 33 bp, Homo sapien
ttagaaatgtgaactaacttgaccagatggcac

SEQ ID NO: 167476 - DNA, 33 bp, Homo sapien
ttagaaatgtgaactatcttgaccagatggcac

SEQ ID NO: 167477 - DNA, 33 bp, Homo sapien
aagaacttcatacctgcaaagagcagacctggt

SEQ ID NO: 167478 - DNA, 33 bp, Homo sapien
aagaacttcatacctgtaaagagcagacctggt

SEQ ID NO: 167479 - DNA, 33 bp, Homo sapien
tgaattgctcacatcaaaagtaatatgcaaaag

SEQ ID NO: 167480 - DNA, 33 bp, Homo sapien
tgaattgctcacatcagaagtaatatgcaaaag

SEQ ID NO: 167481 - DNA, 33 bp, Homo sapien
aaagaaagaggtcttgaatccattcacattttt

SEQ ID NO: 167482 - DNA, 33 bp, Homo sapien
aaagaaagaggtcttgtatccattcacattttt

SEQ ID NO: 167483 - DNA, 33 bp, Homo sapien
cagtgtctctaaagtgaagcctcaattaacacg

SEQ ID NO: 167484 - DNA, 33 bp, Homo sapien
cagtgtctctaaagtgcagcctcaattaacacg

SEQ ID NO: 167485 - DNA, 33 bp, Homo sapien
actcagggcctgataaatatttgtgaattaggg

SEQ ID NO: 167486 - DNA, 33 bp, Homo sapien
actcagggcctgataagtatttgtgaattaggg

SEQ ID NO: 167487 - DNA, 33 bp, Homo sapien
cctcttagcaaatgaccagtatgtgccaaattg

SEQ ID NO: 167488 - DNA, 33 bp, Homo sapien
cctcttagcaaatgactagtatgtgccaaattg

SEQ ID NO: 167489 - DNA, 33 bp, Homo sapien
attgttcagaaaccaaatatcatatgttctcac

SEQ ID NO: 167490 - DNA, 33 bp, Homo sapien
attgttcagaaaccaagtatcatatgttctcac

SEQ ID NO: 167491 - DNA, 33 bp, Homo sapien
ggatatgaacccaagaacttctcaccagctgtg

SEQ ID NO: 167492 - DNA, 33 bp, Homo sapien
ggatatgaacccaagaccttctcaccagctgtg

SEQ ID NO: 167493 - DNA, 33 bp, Homo sapien
agtgattaggtcgtgaaggctcttccctctttt

SEQ ID NO: 167494 - DNA, 33 bp, Homo sapien
agtgattaggtcgtgagggctcttccctctttt

SEQ ID NO: 167495 - DNA, 33 bp, Homo sapien
attcatggaccaaaaaagctcacaatcacgaca

SEQ ID NO: 167496 - DNA, 33 bp, Homo sapien
attcatggaccaaaaacgctcacaatcacgaca

SEQ ID NO: 167497 - DNA, 33 bp, Homo sapien
aagttttgataacactgaaatctcttttaaata

SEQ ID NO: 167498 - DNA, 33 bp, Homo sapien
aagttttgataacacttaaatctcttttaaata

SEQ ID NO: 167499 - DNA, 33 bp, Homo sapien
attcaaaaacattctagtaagccaaaagctatc

SEQ ID NO: 167500 - DNA, 33 bp, Homo sapien
attcaaaaacattctattaagccaaaagctatc

SEQ ID NO: 167501 - DNA, 33 bp, Homo sapien
tttgtggagtgtttaacgtcatgggcattttta

SEQ ID NO: 167502 - DNA, 33 bp, Homo sapien
tttgtggagtgtttaatgtcatgggcattttta

SEQ ID NO: 167503 - DNA, 33 bp, Homo sapien
cagtctcgcctctgaggaattagttcaggcata

SEQ ID NO: 167504 - DNA, 33 bp, Homo sapien
cagtctcgcctctgagtaattagttcaggcata

SEQ ID NO: 167505 - DNA, 33 bp, Homo sapien
acataccttttgagaaactttaatattaaacac

SEQ ID NO: 167506 - DNA, 33 bp, Homo sapien
acataccttttgagaacctttaatattaaacac

SEQ ID NO: 167507 - DNA, 33 bp, Homo sapien
tggagagaacattccaatcactaagttcctttt

SEQ ID NO: 167508 - DNA, 33 bp, Homo sapien
tggagagaacattccagtcactaagttcctttt

SEQ ID NO: 167509 - DNA, 33 bp, Homo sapien
tatataaactgtcagaaagttaaagagaggggg

SEQ ID NO: 167510 - DNA, 33 bp, Homo sapien
tatataaactgtcagatagttaaagagaggggg

SEQ ID NO: 167511 - DNA, 33 bp, Homo sapien
gtgtaggaactcagtcactgttgttaggaattt

SEQ ID NO: 167512 - DNA, 33 bp, Homo sapien
gtgtaggaactcagtcgctgttgttaggaattt

SEQ ID NO: 167513 - DNA, 33 bp, Homo sapien
tatgttatcttcgttcaatttagggcatactcg

SEQ ID NO: 167514 - DNA, 33 bp, Homo sapien
tatgttatcttcgttctatttagggcatactcg

SEQ ID NO: 167515 - DNA, 33 bp, Homo sapien
ggagattctgtgtctagataatcttcaggacta

SEQ ID NO: 167516 - DNA, 33 bp, Homo sapien
ggagattctgtgtctatataatcttcaggacta

SEQ ID NO: 167517 - DNA, 33 bp, Homo sapien
aaaagctgtcacttaaatgtttacaattttgac

SEQ ID NO: 167518 - DNA, 33 bp, Homo sapien
aaaagctgtcacttaagtgtttacaattttgac

SEQ ID NO: 167519 - DNA, 33 bp, Homo sapien
ttaaatgactacagcacggaaagcaaagtcagc

SEQ ID NO: 167520 - DNA, 33 bp, Homo sapien
ttaaatgactacagcatggaaagcaaagtcagc

SEQ ID NO: 167521 - DNA, 33 bp, Homo sapien
gattttcacctccagaagttgtaacagagtcta

SEQ ID NO: 167522 - DNA, 33 bp, Homo sapien
gattttcacctccagaggttgtaacagagtcta

SEQ ID NO: 167523 - DNA, 33 bp, Homo sapien
tatagcaagagaaaaccgggaactctgagtaga

SEQ ID NO: 167524 - DNA, 33 bp, Homo sapien
tatagcaagagaaaactgggaactctgagtaga

SEQ ID NO: 167525 - DNA, 33 bp, Homo sapien
tatgatgttcccacgacggcaaaatcacccaag

SEQ ID NO: 167526 - DNA, 33 bp, Homo sapien
tatgatgttcccacgatggcaaaatcacccaag

SEQ ID NO: 167527 - DNA, 33 bp, Homo sapien
tattatttaggtggctcaagtctcttacataaa

SEQ ID NO: 167528 - DNA, 33 bp, Homo sapien
tattatttaggtggctgaagtctcttacataaa

SEQ ID NO: 167529 - DNA, 33 bp, Homo sapien
aagccttcctaaataccaaaagataacctgaaa

SEQ ID NO: 167530 - DNA, 33 bp, Homo sapien
aagccttcctaaatacgaaaagataacctgaaa

SEQ ID NO: 167531 - DNA, 33 bp, Homo sapien
ttgcttaaattcctccaacatgcaaaatgacac

SEQ ID NO: 167532 - DNA, 33 bp, Homo sapien
ttgcttaaattcctccgacatgcaaaatgacac

SEQ ID NO: 167533 - DNA, 33 bp, Homo sapien
tcagaccataatcttacagttaacaccctggat

SEQ ID NO: 167534 - DNA, 33 bp, Homo sapien
tcagaccataatcttatagttaacaccctggat

SEQ ID NO: 167535 - DNA, 33 bp, Homo sapien
ttgtcagtagattacacggcttctgtccagcct

SEQ ID NO: 167536 - DNA, 33 bp, Homo sapien
ttgtcagtagattacatggcttctgtccagcct

SEQ ID NO: 167537 - DNA, 33 bp, Homo sapien
atcattagaagtacacacctataaagtagtttt

SEQ ID NO: 167538 - DNA, 33 bp, Homo sapien
atcattagaagtacacgcctataaagtagtttt

SEQ ID NO: 167539 - DNA, 33 bp, Homo sapien
tgttcttacaccattccatcctcacacactatt

SEQ ID NO: 167540 - DNA, 33 bp, Homo sapien
tgttcttacaccattctatcctcacacactatt

SEQ ID NO: 167541 - DNA, 33 bp, Homo sapien
atgaatattccagaaacgaccaccttactgaaa

SEQ ID NO: 167542 - DNA, 33 bp, Homo sapien
atgaatattccagaaatgaccaccttactgaaa

SEQ ID NO: 167543 - DNA, 33 bp, Homo sapien
ggagaaaaataggcaaacagtcacagcagaggg

SEQ ID NO: 167544 - DNA, 33 bp, Homo sapien
ggagaaaaataggcaagcagtcacagcagaggg

SEQ ID NO: 167545 - DNA, 33 bp, Homo sapien
tgcaggttctcaggaacagtcactgaatgatga

SEQ ID NO: 167546 - DNA, 33 bp, Homo sapien
tgcaggttctcaggaatagtcactgaatgatga

SEQ ID NO: 167547 - DNA, 33 bp, Homo sapien
aggcaagacatagtgaaaaaaagctgttgttgt

SEQ ID NO: 167548 - DNA, 33 bp, Homo sapien
aggcaagacatagtgataaaaagctgttgttgt

SEQ ID NO: 167549 - DNA, 33 bp, Homo sapien
caaagttacctggcaacggacaaggctacagag

SEQ ID NO: 167550 - DNA, 33 bp, Homo sapien
caaagttacctggcaatggacaaggctacagag

SEQ ID NO: 167551 - DNA, 33 bp, Homo sapien
gtaactttataaacgacgaattgtaaacataac

SEQ ID NO: 167552 - DNA, 33 bp, Homo sapien
gtaactttataaacgatgaattgtaaacataac

SEQ ID NO: 167553 - DNA, 33 bp, Homo sapien
ctttccttttggcacacaagggccaggccagag

SEQ ID NO: 167554 - DNA, 33 bp, Homo sapien
ctttccttttggcacagaagggccaggccagag

SEQ ID NO: 167555 - DNA, 33 bp, Homo sapien
attgcccctaatacaccgcatagttaccctgaa

SEQ ID NO: 167556 - DNA, 33 bp, Homo sapien
attgcccctaatacactgcatagttaccctgaa

SEQ ID NO: 167557 - DNA, 33 bp, Homo sapien
agaggagaaacaaggaagatagcttatgcatag

SEQ ID NO: 167558 - DNA, 33 bp, Homo sapien
agaggagaaacaaggaggatagcttatgcatag

SEQ ID NO: 167559 - DNA, 33 bp, Homo sapien
cctgctcgctataccaagtagtgtgaggaatgc

SEQ ID NO: 167560 - DNA, 33 bp, Homo sapien
cctgctcgctataccaggtagtgtgaggaatgc

SEQ ID NO: 167561 - DNA, 33 bp, Homo sapien; identical to SEQ ID NO: 167559

SEQ ID NO: 167562 - DNA, 33 bp, Homo sapien; identical to SEQ ID NO: 167560

SEQ ID NO: 167563 - DNA, 33 bp, Homo sapien
tagcagagaatgccgaaaagtaatcattcagat

SEQ ID NO: 167564 - DNA, 33 bp, Homo sapien
tagcagagaatgccgacaagtaatcattcagat

SEQ ID NO: 167565 - DNA, 33 bp, Homo sapien; identical to SEQ ID NO: 167563

SEQ ID NO: 167566 - DNA, 33 bp, Homo sapien; identical to SEQ ID NO: 167564

SEQ ID NO: 167567 - DNA, 33 bp, Homo sapien
agattaggtaaggaaacagatgaaaagaatctt

SEQ ID NO: 167568 - DNA, 33 bp, Homo sapien
agattaggtaaggaaagagatgaaaagaatctt

SEQ ID NO: 167569 - DNA, 33 bp, Homo sapien
tctcgtctttctgaaaaagcgtatcaggccaag

SEQ ID NO: 167570 - DNA, 33 bp, Homo sapien
tctcgtctttctgaaagagcgtatcaggccaag

SEQ ID NO: 167571 - DNA, 33 bp, Homo sapien
gaagaaaagagaaacaagggatgttgctctggg

SEQ ID NO: 167572 - DNA, 33 bp, Homo sapien
gaagaaaagagaaacaggggatgttgctctggg

SEQ ID NO: 167573 - DNA, 33 bp, Homo sapien
ccctctgccgggctaaactcaactgtcagtttc

SEQ ID NO: 167574 - DNA, 33 bp, Homo sapien
ccctctgccgggctaagctcaactgtcagtttc

SEQ ID NO: 167575 - DNA, 33 bp, Homo sapien
gtctctctgaaagtgacgaaaaggacgtggagc

SEQ ID NO: 167576 - DNA, 33 bp, Homo sapien
gtctctctgaaagtgaggaaaaggacgtggagc

SEQ ID NO: 167577 - DNA, 33 bp, Homo sapien
ctcacagcaattcaggaatcacctggctcctgg

SEQ ID NO: 167578 - DNA, 33 bp, Homo sapien
ctcacagcaattcagggatcacctggctcctgg

SEQ ID NO: 167579 - DNA, 33 bp, Homo sapien
ggggtgaagcctgaacaaaaccatacactagat

SEQ ID NO: 167580 - DNA, 33 bp, Homo sapien
ggggtgaagcctgaacgaaaccatacactagat

SEQ ID NO: 167581 - DNA, 33 bp, Homo sapien
ccgtgcgacttgttcaagccaaaggaatgtggc

SEQ ID NO: 167582 - DNA, 33 bp, Homo sapien
ccgtgcgacttgttcaggccaaaggaatgtggc

SEQ ID NO: 167583 - DNA, 33 bp, Homo sapien
ggaggacatggaatccaatggaatctgacccag

SEQ ID NO: 167584 - DNA, 33 bp, Homo sapien
ggaggacatggaatccgatggaatctgacccag

SEQ ID NO: 167585 - DNA, 33 bp, Homo sapien
tctcactcagcaatagaagtaggcataggtctc

SEQ ID NO: 167586 - DNA, 33 bp, Homo sapien
tctcactcagcaataggagtaggcataggtctc

SEQ ID NO: 167587 - DNA, 33 bp, Homo sapien
agagagtcactcaggaatacctagagttggttt

SEQ ID NO: 167588 - DNA, 33 bp, Homo sapien
agagagtcactcaggagtacctagagttggttt

SEQ ID NO: 167589 - DNA, 33 bp, Homo sapien
tggagatttgagggtgaaagttttaaggaccac

SEQ ID NO: 167590 - DNA, 33 bp, Homo sapien
tggagatttgagggtggaagttttaaggaccac

SEQ ID NO: 167591 - DNA, 33 bp, Homo sapien
caagcagtgggaagaccgaaggaaaggaaaagg

SEQ ID NO: 167592 - DNA, 33 bp, Homo sapien
caagcagtgggaagactgaaggaaaggaaaagg

SEQ ID NO: 167593 - DNA, 33 bp, Homo sapien
aatatgagcacagaagaagaaattataaacagg

SEQ ID NO: 167594 - DNA, 33 bp, Homo sapien
aatatgagcacagaagtagaaattataaacagg

SEQ ID NO: 167595 - DNA, 33 bp, Homo sapien
tcatggtcatggaaaagtacattcagatgccta

SEQ ID NO: 167596 - DNA, 33 bp, Homo sapien
tcatggtcatggaaaattacattcagatgccta

SEQ ID NO: 167597 - DNA, 33 bp, Homo sapien
gaagcattggtcttcaagttggaagagtcctca

SEQ ID NO: 167598 - DNA, 33 bp, Homo sapien
gaagcattggtcttcacgttggaagagtcctca

SEQ ID NO: 167599 - DNA, 33 bp, Homo sapien
taataactatgaaatacagatgatgtagataca

SEQ ID NO: 167600 - DNA, 33 bp, Homo sapien
taataactatgaaatagagatgatgtagataca

SEQ ID NO: 167601 - DNA, 33 bp, Homo sapien
aataatcaaaagacctaaagtcaacaccattga

SEQ ID NO: 167602 - DNA, 33 bp, Homo sapien
aataatcaaaagacctgaagtcaacaccattga

SEQ ID NO: 167603 - DNA, 33 bp, Homo sapien
ccttgttggaaagatacgtatttagtaagactc

SEQ ID NO: 167604 - DNA, 33 bp, Homo sapien
ccttgttggaaagataggtatttagtaagactc

SEQ ID NO: 167605 - DNA, 33 bp, Homo sapien
cttcatttagcctcaaatgttgaaacagtaccc

SEQ ID NO: 167606 - DNA, 33 bp, Homo sapien
cttcatttagcctcaagtgttgaaacagtaccc

SEQ ID NO: 167607 - DNA, 33 bp, Homo sapien
attatcatgtatattacgtgtttaagaaggata

SEQ ID NO: 167608 - DNA, 33 bp, Homo sapien
attatcatgtatattatgtgtttaagaaggata

SEQ ID NO: 167609 - DNA, 33 bp, Homo sapien
caattctgaaagagaaatgtctgacacagtgca

SEQ ID NO: 167610 - DNA, 33 bp, Homo sapien
caattctgaaagagaagtgtctgacacagtgca

SEQ ID NO: 167611 - DNA, 33 bp, Homo sapien
tgtgtcttaggtctaccgcaacaaggtgcacct

SEQ ID NO: 167612 - DNA, 33 bp, Homo sapien
tgtgtcttaggtctactgcaacaaggtgcacct

SEQ ID NO: 167613 - DNA, 33 bp, Homo sapien
ttccctccaggaccaaaaccttcattcccacat

SEQ ID NO: 167614 - DNA, 33 bp, Homo sapien
ttccctccaggaccaagaccttcattcccacat

SEQ ID NO: 167615 - DNA, 33 bp, Homo sapien
aaggattgttgaattccaaaagtgtgtgaccac

SEQ ID NO: 167616 - DNA, 33 bp, Homo sapien
aaggattgttgaattctaaaagtgtgtgaccac

SEQ ID NO: 167617 - DNA, 33 bp, Homo sapien
gaaagcaatcaacaccagaatgaaggctttgat

SEQ ID NO: 167618 - DNA, 33 bp, Homo sapien
gaaagcaatcaacaccggaatgaaggctttgat

SEQ ID NO: 167619 - DNA, 33 bp, Homo sapien
aaaagcctaaataatacaaaggagtgagccttg

SEQ ID NO: 167620 - DNA, 33 bp, Homo sapien
aaaagcctaaataatataaaggagtgagccttg

SEQ ID NO: 167621 - DNA, 33 bp, Homo sapien
agccttgggaagataggaagaggttccaggcag

SEQ ID NO: 167622 - DNA, 33 bp, Homo sapien
agccttgggaagatagtaagaggttccaggcag

SEQ ID NO: 167623 - DNA, 33 bp, Homo sapien
aatcatatattagagacgtaaagagagctgggg

SEQ ID NO: 167624 - DNA, 33 bp, Homo sapien
aatcatatattagagatgtaaagagagctgggg

SEQ ID NO: 167625 - DNA, 33 bp, Homo sapien
tttatctgaatacctacactgatctatctctgt

SEQ ID NO: 167626 - DNA, 33 bp, Homo sapien
tttatctgaatacctagactgatctatctctgt

SEQ ID NO: 167627 - DNA, 33 bp, Homo sapien
ggagttaccatgacaaagcaataacctagtttc

SEQ ID NO: 167628 - DNA, 33 bp, Homo sapien
ggagttaccatgacaacgcaataacctagtttc

SEQ ID NO: 167629 - DNA, 33 bp, Homo sapien
agattggaaatactgaataaatggggctaactg

SEQ ID NO: 167630 - DNA, 33 bp, Homo sapien
agattggaaatactgattaaatggggctaactg

SEQ ID NO: 167631 - DNA, 33 bp, Homo sapien
cgtcttgctagtcatgaagctccaaatcagaga

SEQ ID NO: 167632 - DNA, 33 bp, Homo sapien
cgtcttgctagtcatgcagctccaaatcagaga

SEQ ID NO: 167633 - DNA, 33 bp, Homo sapien
gatgtatagcacttgaagtttcagaagaaggag

SEQ ID NO: 167634 - DNA, 33 bp, Homo sapien
gatgtatagcacttgaggtttcagaagaaggag

SEQ ID NO: 167635 - DNA, 33 bp, Homo sapien
tagcctgttaccaatactattcaaggacatctt

SEQ ID NO: 167636 - DNA, 33 bp, Homo sapien
tagcctgttaccaatattattcaaggacatctt

SEQ ID NO: 167637 - DNA, 33 bp, Homo sapien
ggtcaagcagtttacccaaagtcacatagtaag

SEQ ID NO: 167638 - DNA, 33 bp, Homo sapien
ggtcaagcagtttacctaaagtcacatagtaag

SEQ ID NO: 167639 - DNA, 33 bp, Homo sapien
tcccctttataatagccacccatgaaattaaat

SEQ ID NO: 167640 - DNA, 33 bp, Homo sapien
tcccctttataatagctacccatgaaattaaat

SEQ ID NO: 167641 - DNA, 33 bp, Homo sapien
ctggaagtcctagctacagcagttggattagag

SEQ ID NO: 167642 - DNA, 33 bp, Homo sapien
ctggaagtcctagctagagcagttggattagag

SEQ ID NO: 167643 - DNA, 33 bp, Homo sapien
cagcttttcagtgacccggatggtacatttccc

SEQ ID NO: 167644 - DNA, 33 bp, Homo sapien
cagcttttcagtgacctggatggtacatttccc

SEQ ID NO: 167645 - DNA, 33 bp, Homo sapien
caggtctctcttgaaaaatagtaagctgttttt

SEQ ID NO: 167646 - DNA, 33 bp, Homo sapien
caggtctctcttgaaatatagtaagctgttttt

SEQ ID NO: 167647 - DNA, 33 bp, Homo sapien
ctctctgaagacatgacgttgagtggccttagt

SEQ ID NO: 167648 - DNA, 33 bp, Homo sapien
ctctctgaagacatgatgttgagtggccttagt

SEQ ID NO: 167649 - DNA, 33 bp, Homo sapien
caaggagaagtacagactaagggcagaggagag

SEQ ID NO: 167650 - DNA, 33 bp, Homo sapien
caaggagaagtacagagtaagggcagaggagag

SEQ ID NO: 167651 - DNA, 33 bp, Homo sapien; identical to SEQ ID NO: 167649

SEQ ID NO: 167652 - DNA, 33 bp, Homo sapien; identical to SEQ ID NO: 167650

SEQ ID NO: 167653 - DNA, 33 bp, Homo sapien
gtactgagtgactttacgtagtttcattcttca

SEQ ID NO: 167654 - DNA, 33 bp, Homo sapien
gtactgagtgactttatgtagtttcattcttca

SEQ ID NO: 167655 - DNA, 33 bp, Homo sapien
cactaaactgtcagctcacatttaccatgagag

SEQ ID NO: 167656 - DNA, 33 bp, Homo sapien
cactaaactgtcagcttacatttaccatgagag

SEQ ID NO: 167657 - DNA, 33 bp, Homo sapien
tatgcaataagtggtacgacagttcatcaaatt

SEQ ID NO: 167658 - DNA, 33 bp, Homo sapien
tatgcaataagtggtatgacagttcatcaaatt

SEQ ID NO: 167659 - DNA, 33 bp, Homo sapien
gaaagatattttgaaacttagcttatggtccaa

SEQ ID NO: 167660 - DNA, 33 bp, Homo sapien
gaaagatattttgaaatttagcttatggtccaa

SEQ ID NO: 167661 - DNA, 33 bp, Homo sapien
atattggcttaaaaaaacatgtgtgccaaaatt

SEQ ID NO: 167662 - DNA, 33 bp, Homo sapien
atattggcttaaaaaaccatgtgtgccaaaatt

SEQ ID NO: 167663 - DNA, 33 bp, Homo sapien
gcagtttacttcttcaaggtcaaaatatgagga

SEQ ID NO: 167664 - DNA, 33 bp, Homo sapien
gcagtttacttcttcagggtcaaaatatgagga

SEQ ID NO: 167665 - DNA, 33 bp, Homo sapien
gagggccccagtcttacaactgcaagaaactga

SEQ ID NO: 167666 - DNA, 33 bp, Homo sapien
gagggccccagtcttataactgcaagaaactga

SEQ ID NO: 167667 - DNA, 33 bp, Homo sapien
actgagttgtgaacaaacagtgaacttgaaagt

SEQ ID NO: 167668 - DNA, 33 bp, Homo sapien
actgagttgtgaacaaccagtgaacttgaaagt

SEQ ID NO: 167669 - DNA, 33 bp, Homo sapien
ttaataagagacaaaaattatcatcatcagtac

SEQ ID NO: 167670 - DNA, 33 bp, Homo sapien
ttaataagagacaaaagttatcatcatcagtac

SEQ ID NO: 167671 - DNA, 33 bp, Homo sapien
tttgtaaatgtaaaatcatgtggttgttctcac

SEQ ID NO: 167672 - DNA, 33 bp, Homo sapien
tttgtaaatgtaaaatgatgtggttgttctcac

SEQ ID NO: 167673 - DNA, 33 bp, Homo sapien
taaactgacttgccatcaattataaaacacctt

SEQ ID NO: 167674 - DNA, 33 bp, Homo sapien
taaactgacttgccatgaattataaaacacctt

SEQ ID NO: 167675 - DNA, 33 bp, Homo sapien
ttctataatgtgtataagacagccttccacagc

SEQ ID NO: 167676 - DNA, 33 bp, Homo sapien
ttctataatgtgtataggacagccttccacagc

SEQ ID NO: 167677 - DNA, 33 bp, Homo sapien
ttaaaattacaatccaagtgtaaaatatgtgct

SEQ ID NO: 167678 - DNA, 33 bp, Homo sapien
ttaaaattacaatccatgtgtaaaatatgtgct

SEQ ID NO: 167679 - DNA, 33 bp, Homo sapien
ctactgtcttctttcaagcaaatgccaagaaat

SEQ ID NO: 167680 - DNA, 33 bp, Homo sapien
ctactgtcttctttcaggcaaatgccaagaaat

SEQ ID NO: 167681 - DNA, 33 bp, Homo sapien
ttctgcttttctggaaaatagccatcgaacaag

SEQ ID NO: 167682 - DNA, 33 bp, Homo sapien
ttctgcttttctggaagatagccatcgaacaag

SEQ ID NO: 167683 - DNA, 33 bp, Homo sapien
cttttcagttgaggaacttaaatgttgtgataa

SEQ ID NO: 167684 - DNA, 33 bp, Homo sapien
cttttcagttgaggaatttaaatgttgtgataa

SEQ ID NO: 167685 - DNA, 33 bp, Homo sapien
caatacctgccaaaagaaggaatacttagcaag

SEQ ID NO: 167686 - DNA, 33 bp, Homo sapien
caatacctgccaaaaggaggaatacttagcaag

SEQ ID NO: 167687 - DNA, 33 bp, Homo sapien
cagggcatcgcataagacacttctggctaagtg

SEQ ID NO: 167688 - DNA, 33 bp, Homo sapien
cagggcatcgcataaggcacttctggctaagtg

SEQ ID NO: 167689 - DNA, 33 bp, Homo sapien
caaagttctgagatcaacagaaacagaataagg

SEQ ID NO: 167690 - DNA, 33 bp, Homo sapien
caaagttctgagatcaccagaaacagaataagg

SEQ ID NO: 167691 - DNA, 33 bp, Homo sapien
cgcccaactctataaaactcagtccctcacact

SEQ ID NO: 167692 - DNA, 33 bp, Homo sapien
cgcccaactctataaacctcagtccctcacact

SEQ ID NO: 167693 - DNA, 33 bp, Homo sapien
tgtagagagaatgtaccgatcttggtgtgagta

SEQ ID NO: 167694 - DNA, 33 bp, Homo sapien
tgtagagagaatgtactgatcttggtgtgagta

SEQ ID NO: 167695 - DNA, 33 bp, Homo sapien
ggccaagaaaaaaggacatcactgaaaaaatcg

SEQ ID NO: 167696 - DNA, 33 bp, Homo sapien
ggccaagaaaaaaggagatcactgaaaaaatcg

SEQ ID NO: 167697 - DNA, 33 bp, Homo sapien
cagttggttacctcaacagtcagatattctcca

SEQ ID NO: 167698 - DNA, 33 bp, Homo sapien
cagttggttacctcaatagtcagatattctcca

SEQ ID NO: 167699 - DNA, 33 bp, Homo sapien
atggagaacaggaaaaaaggcaacactttccaa

SEQ ID NO: 167700 - DNA, 33 bp, Homo sapien
atggagaacaggaaaataggcaacactttccaa

SEQ ID NO: 167701 - DNA, 33 bp, Homo sapien
ctccataagaatttgcaaaagattggaatgatc

SEQ ID NO: 167702 - DNA, 33 bp, Homo sapien
ctccataagaatttgcgaaagattggaatgatc

SEQ ID NO: 167703 - DNA, 33 bp, Homo sapien
aaagctatattgagataacagaaaacagatttt

SEQ ID NO: 167704 - DNA, 33 bp, Homo sapien
aaagctatattgagatcacagaaaacagatttt

SEQ ID NO: 167705 - DNA, 33 bp, Homo sapien
gaccctgtctcaaaaaatggaaataccaaacaa

SEQ ID NO: 167706 - DNA, 33 bp, Homo sapien
gaccctgtctcaaaaagtggaaataccaaacaa

SEQ ID NO: 167707 - DNA, 33 bp, Homo sapien
tttagtgcctcttaacaccttcatgatgtggct

SEQ ID NO: 167708 - DNA, 33 bp, Homo sapien
tttagtgcctcttaacgccttcatgatgtggct

SEQ ID NO: 167709 - DNA, 33 bp, Homo sapien
ttcttttttgaagtcaatgaaagacaccagcaa

SEQ ID NO: 167710 - DNA, 33 bp, Homo sapien
ttcttttttgaagtcactgaaagacaccagcaa

SEQ ID NO: 167711 - DNA, 33 bp, Homo sapien
tggggggccgaatgtcacatctgtagcttacaa

SEQ ID NO: 167712 - DNA, 33 bp, Homo sapien
tggggggccgaatgtcgcatctgtagcttacaa

SEQ ID NO: 167713 - DNA, 33 bp, Homo sapien
catccctgataacaaactagatgctgactacat

SEQ ID NO: 167714 - DNA, 33 bp, Homo sapien
catccctgataacaaattagatgctgactacat

SEQ ID NO: 167715 - DNA, 33 bp, Homo sapien
taaagtgatgtactacaccaaagtgataggctc

SEQ ID NO: 167716 - DNA, 33 bp, Homo sapien
taaagtgatgtactacgccaaagtgataggctc

SEQ ID NO: 167717 - DNA, 33 bp, Homo sapien
gctctctggaggggagaagaaacggggtatttc

SEQ ID NO: 167718 - DNA, 33 bp, Homo sapien
gctctctggaggggagtagaaacggggtatttc

SEQ ID NO: 167719 - DNA, 33 bp, Homo sapien
aaagtggcccaaaacaaacgcttttctgtctca

SEQ ID NO: 167720 - DNA, 33 bp, Homo sapien
aaagtggcccaaaacagacgcttttctgtctca

SEQ ID NO: 167721 - DNA, 33 bp, Homo sapien
agaaaacctttaataacgccagcctgatagaat

SEQ ID NO: 167722 - DNA, 33 bp, Homo sapien
agaaaacctttaataatgccagcctgatagaat

SEQ ID NO: 167723 - DNA, 33 bp, Homo sapien
caaatgaggactccaactcctaagggatctcaa

SEQ ID NO: 167724 - DNA, 33 bp, Homo sapien
caaatgaggactccaattcctaagggatctcaa

SEQ ID NO: 167725 - DNA, 33 bp, Homo sapien
tctaacaatgtcctaactggcctccttgtttct

SEQ ID NO: 167726 - DNA, 33 bp, Homo sapien
tctaacaatgtcctaattggcctccttgtttct

SEQ ID NO: 167727 - DNA, 33 bp, Homo sapien
gtgtcttcttagtacaaagatggaggtttttct

SEQ ID NO: 167728 - DNA, 33 bp, Homo sapien
gtgtcttcttagtacagagatggaggtttttct

SEQ ID NO: 167729 - DNA, 33 bp, Homo sapien
aagctgtctgtacacacgaagtatatttgtgta

SEQ ID NO: 167730 - DNA, 33 bp, Homo sapien
aagctgtctgtacacatgaagtatatttgtgta

SEQ ID NO: 167731 - DNA, 33 bp, Homo sapien
cagctgaaaaccaggaccattaaacaacttctg

SEQ ID NO: 167732 - DNA, 33 bp, Homo sapien
cagctgaaaaccaggagcattaaacaacttctg

SEQ ID NO: 167733 - DNA, 33 bp, Homo sapien
ctgtttacatctttgacgatggatcacgactcc

SEQ ID NO: 167734 - DNA, 33 bp, Homo sapien
ctgtttacatctttgaggatggatcacgactcc

SEQ ID NO: 167735 - DNA, 33 bp, Homo sapien
tacccttggatcatgggaccttgttaatcatgg

SEQ ID NO: 167736 - DNA, 33 bp, Homo sapien
tacccttggatcatggtaccttgttaatcatgg

SEQ ID NO: 167737 - DNA, 33 bp, Homo sapien
taaaatttgagcaccacaccaagctttcctgtg

SEQ ID NO: 167738 - DNA, 33 bp, Homo sapien
taaaatttgagcaccataccaagctttcctgtg

SEQ ID NO: 167739 - DNA, 33 bp, Homo sapien
ggtattgatcgtctccacgctgcaccagccagg

SEQ ID NO: 167740 - DNA, 33 bp, Homo sapien
ggtattgatcgtctccgcgctgcaccagccagg

SEQ ID NO: 167741 - DNA, 33 bp, Homo sapien
ggaggaaacaggcttgcaggctgactggtctga

SEQ ID NO: 167742 - DNA, 33 bp, Homo sapien
ggaggaaacaggcttggaggctgactggtctga

SEQ ID NO: 167743 - DNA, 33 bp, Homo sapien
aggtccagggacatccaccagctagtaagcata

SEQ ID NO: 167744 - DNA, 33 bp, Homo sapien
aggtccagggacatccgccagctagtaagcata

SEQ ID NO: 167745 - DNA, 33 bp, Homo sapien
ctccagcaaaattatcaaaacacttttatgctc

SEQ ID NO: 167746 - DNA, 33 bp, Homo sapien
ctccagcaaaattatcgaaacacttttatgctc

SEQ ID NO: 167747 - DNA, 33 bp, Homo sapien
cacttttatgctcccaatcgtaccagacgaagt

SEQ ID NO: 167748 - DNA, 33 bp, Homo sapien
cacttttatgctcccagtcgtaccagacgaagt

SEQ ID NO: 167749 - DNA, 33 bp, Homo sapien
tgcaccagagagaccacaggatggggtggtgca

SEQ ID NO: 167750 - DNA, 33 bp, Homo sapien
tgcaccagagagaccataggatggggtggtgca

SEQ ID NO: 167751 - DNA, 33 bp, Homo sapien
tgtgagtcaggcaggaaggtataagccaccaaa

SEQ ID NO: 167752 - DNA, 33 bp, Homo sapien
tgtgagtcaggcaggagggtataagccaccaaa

SEQ ID NO: 167753 - DNA, 33 bp, Homo sapien
tcctgttttcctcctaacctgttgaacactgct

SEQ ID NO: 167754 - DNA, 33 bp, Homo sapien
tcctgttttcctcctaccctgttgaacactgct

SEQ ID NO: 167755 - DNA, 33 bp, Homo sapien
ggatgtccttaggataaccttcattttatttat

SEQ ID NO: 167756 - DNA, 33 bp, Homo sapien
ggatgtccttaggatagccttcattttatttat

SEQ ID NO: 167757 - DNA, 33 bp, Homo sapien
tcttgctccttcattgcatgtcttgcccactct

SEQ ID NO: 167758 - DNA, 33 bp, Homo sapien
tcttgctccttcattgtatgtcttgcccactct

SEQ ID NO: 167759 - DNA, 33 bp, Homo sapien
tccttctgtctctcaaaatccaacatcctctgg

SEQ ID NO: 167760 - DNA, 33 bp, Homo sapien
tccttctgtctctcaacatccaacatcctctgg

SEQ ID NO: 167761 - DNA, 33 bp, Homo sapien
atcccataacaaaacacatttgctcatctccaa

SEQ ID NO: 167762 - DNA, 33 bp, Homo sapien
atcccataacaaaacatatttgctcatctccaa

SEQ ID NO: 167763 - DNA, 33 bp, Homo sapien
ttgcatctatagagaacctccttcccttcctag

SEQ ID NO: 167764 - DNA, 33 bp, Homo sapien
ttgcatctatagagaatctccttcccttcctag

SEQ ID NO: 167765 - DNA, 33 bp, Homo sapien
caaagaaaagagatgaagttcgcaaggactggc

SEQ ID NO: 167766 - DNA, 33 bp, Homo sapien
caaagaaaagagatgacgttcgcaaggactggc

SEQ ID NO: 167767 - DNA, 33 bp, Homo sapien
ctacagtaatcaaaacaatgtggtactaggata

SEQ ID NO: 167768 - DNA, 33 bp, Homo sapien
ctacagtaatcaaaacgatgtggtactaggata

SEQ ID NO: 167769 - DNA, 33 bp, Homo sapien
gtgccatattgcttccgactatgtcatgtgagt

SEQ ID NO: 167770 - DNA, 33 bp, Homo sapien
gtgccatattgcttcctactatgtcatgtgagt

SEQ ID NO: 167771 - DNA, 33 bp, Homo sapien
ccctcctatgtctttccagcctcgatctatcaa

SEQ ID NO: 167772 - DNA, 33 bp, Homo sapien
ccctcctatgtctttctagcctcgatctatcaa

SEQ ID NO: 167773 - DNA, 33 bp, Homo sapien
gtggtcaggagctaaccgtcagggagcactggt

SEQ ID NO: 167774 - DNA, 33 bp, Homo sapien
gtggtcaggagctaactgtcagggagcactggt

SEQ ID NO: 167775 - DNA, 33 bp, Homo sapien
gaacagactatataaaagtttgaatttcagcat

SEQ ID NO: 167776 - DNA, 33 bp, Homo sapien
gaacagactatataaaggtttgaatttcagcat

SEQ ID NO: 167777 - DNA, 33 bp, Homo sapien
tctcacacaacacgtccccactttacctgcttt

SEQ ID NO: 167778 - DNA, 33 bp, Homo sapien
tctcacacaacacgtctccactttacctgcttt

SEQ ID NO: 167779 - DNA, 33 bp, Homo sapien
tctcctctccctaggccagcaaataacacattc

SEQ ID NO: 167780 - DNA, 33 bp, Homo sapien
tctcctctccctaggcgagcaaataacacattc

SEQ ID NO: 167781 - DNA, 33 bp, Homo sapien
cactgcaaccaggctcagaataaattagcagtg

SEQ ID NO: 167782 - DNA, 33 bp, Homo sapien
cactgcaaccaggctcggaataaattagcagtg

SEQ ID NO: 167783 - DNA, 33 bp, Homo sapien
atgtggtgggaacaataatgtgcgtttggcagg

SEQ ID NO: 167784 - DNA, 33 bp, Homo sapien
atgtggtgggaacaatgatgtgcgtttggcagg

SEQ ID NO: 167785 - DNA, 33 bp, Homo sapien
cattgtctgaaatgcccgaaaggaaaaatcttc

SEQ ID NO: 167786 - DNA, 33 bp, Homo sapien
cattgtctgaaatgcctgaaaggaaaaatcttc

SEQ ID NO: 167787 - DNA, 33 bp, Homo sapien
ctacctcgcgaggaaacggtaagaaggcaccat

SEQ ID NO: 167788 - DNA, 33 bp, Homo sapien
ctacctcgcgaggaaatggtaagaaggcaccat

SEQ ID NO: 167789 - DNA, 33 bp, Homo sapien
cctatactaatgaatacgttccgggacactaga

SEQ ID NO: 167790 - DNA, 33 bp, Homo sapien
cctatactaatgaatatgttccgggacactaga

SEQ ID NO: 167791 - DNA, 33 bp, Homo sapien
agggagcagtgactacacctacttccatggcaa

SEQ ID NO: 167792 - DNA, 33 bp, Homo sapien
agggagcagtgactacgcctacttccatggcaa

SEQ ID NO: 167793 - DNA, 33 bp, Homo sapien
caatccaaaatgcccccactgagttccaaacat

SEQ ID NO: 167794 - DNA, 33 bp, Homo sapien
caatccaaaatgccccgactgagttccaaacat

SEQ ID NO: 167795 - DNA, 33 bp, Homo sapien
atctcaggaaatatagacctcactgatagtgcc

SEQ ID NO: 167796 - DNA, 33 bp, Homo sapien
atctcaggaaatatagtcctcactgatagtgcc

SEQ ID NO: 167797 - DNA, 33 bp, Homo sapien
gacagaatacagcaaagaaggcgtatcacttct

SEQ ID NO: 167798 - DNA, 33 bp, Homo sapien
gacagaatacagcaaataaggcgtatcacttct

SEQ ID NO: 167799 - DNA, 33 bp, Homo sapien
taaggttggcagccacagtctttcaatcccctt

SEQ ID NO: 167800 - DNA, 33 bp, Homo sapien
taaggttggcagccacggtctttcaatcccctt

SEQ ID NO: 167801 - DNA, 33 bp, Homo sapien
ctgactgagcaccaaccatattgcctgtagact

SEQ ID NO: 167802 - DNA, 33 bp, Homo sapien
ctgactgagcaccaactatattgcctgtagact

SEQ ID NO: 167803 - DNA, 33 bp, Homo sapien
accagctgagttcctaagaaaattaggtagaga

SEQ ID NO: 167804 - DNA, 33 bp, Homo sapien
accagctgagttcctatgaaaattaggtagaga

SEQ ID NO: 167805 - DNA, 33 bp, Homo sapien
gcataatttgtacaccaaacccatgactttgtg

SEQ ID NO: 167806 - DNA, 33 bp, Homo sapien
gcataatttgtacacctaacccatgactttgtg

SEQ ID NO: 167807 - DNA, 33 bp, Homo sapien
tcctgagctctttacacacattatctcatggaa

SEQ ID NO: 167808 - DNA, 33 bp, Homo sapien
tcctgagctctttacatacattatctcatggaa

SEQ ID NO: 167809 - DNA, 33 bp, Homo sapien
gggagccggactgacacctgggtcttcaggaac

SEQ ID NO: 167810 - DNA, 33 bp, Homo sapien
gggagccggactgacatctgggtcttcaggaac

SEQ ID NO: 167811 - DNA, 33 bp, Homo sapien
acttactcaggggcaaccttgggaaattccctc

SEQ ID NO: 167812 - DNA, 33 bp, Homo sapien
acttactcaggggcaatcttgggaaattccctc

SEQ ID NO: 167813 - DNA, 33 bp, Homo sapien
gtggctgagcataccgcagatgccaagtagctg

SEQ ID NO: 167814 - DNA, 33 bp, Homo sapien
gtggctgagcataccgtagatgccaagtagctg

SEQ ID NO: 167815 - DNA, 33 bp, Homo sapien
gctgaagtgggttaacccagggcagaaaagaca

SEQ ID NO: 167816 - DNA, 33 bp, Homo sapien
gctgaagtgggttaactcagggcagaaaagaca

SEQ ID NO: 167817 - DNA, 33 bp, Homo sapien
atacttacaaactactaagaactactagagcaa

SEQ ID NO: 167818 - DNA, 33 bp, Homo sapien
atacttacaaactactgagaactactagagcaa

SEQ ID NO: 167819 - DNA, 33 bp, Homo sapien
gagtgctgacagtcaaggatggtttgctcagtc

SEQ ID NO: 167820 - DNA, 33 bp, Homo sapien
gagtgctgacagtcaatgatggtttgctcagtc

SEQ ID NO: 167821 - DNA, 33 bp, Homo sapien
gagctaactccctaagaaagtaactggcccaga

SEQ ID NO: 167822 - DNA, 33 bp, Homo sapien
gagctaactccctaagcaagtaactggcccaga

SEQ ID NO: 167823 - DNA, 33 bp, Homo sapien
tcccaacttctgttcacgatctgtctttcagct

SEQ ID NO: 167824 - DNA, 33 bp, Homo sapien
tcccaacttctgttcatgatctgtctttcagct

SEQ ID NO: 167825 - DNA, 33 bp, Homo sapien
ttagaaaagttgaataacctactagccatgtga

SEQ ID NO: 167826 - DNA, 33 bp, Homo sapien
ttagaaaagttgaatagcctactagccatgtga

SEQ ID NO: 167827 - DNA, 33 bp, Homo sapien
accataatttctagaacgtgcccgagtatttcc

SEQ ID NO: 167828 - DNA, 33 bp, Homo sapien
accataatttctagaatgtgcccgagtatttcc

SEQ ID NO: 167829 - DNA, 33 bp, Homo sapien
ccaatcctttaaagacaccccatcaatttaata

SEQ ID NO: 167830 - DNA, 33 bp, Homo sapien
ccaatcctttaaagacgccccatcaatttaata

SEQ ID NO: 167831 - DNA, 33 bp, Homo sapien
ggccataagcccgagaatacaggctttgataca

SEQ ID NO: 167832 - DNA, 33 bp, Homo sapien
ggccataagcccgagagtacaggctttgataca

SEQ ID NO: 167833 - DNA, 33 bp, Homo sapien
caatatgaacacatcaacttttttcatgattat

SEQ ID NO: 167834 - DNA, 33 bp, Homo sapien
caatatgaacacatcagcttttttcatgattat

SEQ ID NO: 167835 - DNA, 33 bp, Homo sapien
ctggaattcaaagtcaactcttccagaacgact

SEQ ID NO: 167836 - DNA, 33 bp, Homo sapien
ctggaattcaaagtcacctcttccagaacgact

SEQ ID NO: 167837 - DNA, 33 bp, Homo sapien
ctcccccaactaagaaactatgagggctacaga

SEQ ID NO: 167838 - DNA, 33 bp, Homo sapien
ctcccccaactaagaacctatgagggctacaga

SEQ ID NO: 167839 - DNA, 33 bp, Homo sapien
ctgcaaaaagacaaaacgcacaggcctgctcaa

SEQ ID NO: 167840 - DNA, 33 bp, Homo sapien
ctgcaaaaagacaaaatgcacaggcctgctcaa

SEQ ID NO: 167841 - DNA, 33 bp, Homo sapien
tatgtaatattttcaccatatagacatgtagac

SEQ ID NO: 167842 - DNA, 33 bp, Homo sapien
tatgtaatattttcacgatatagacatgtagac

SEQ ID NO: 167843 - DNA, 33 bp, Homo sapien
gtttgggtttgtagagacagcaatccttaaccc

SEQ ID NO: 167844 - DNA, 33 bp, Homo sapien
gtttgggtttgtagaggcagcaatccttaaccc

SEQ ID NO: 167845 - DNA, 33 bp, Homo sapien
ggccaaaaggaagaaaaggaatcagccacttct

SEQ ID NO: 167846 - DNA, 33 bp, Homo sapien
ggccaaaaggaagaaagggaatcagccacttct

SEQ ID NO: 167847 - DNA, 33 bp, Homo sapien
ggcctcaagggctgcaatagtatgctttcgggc

SEQ ID NO: 167848 - DNA, 33 bp, Homo sapien
ggcctcaagggctgcagtagtatgctttcgggc

SEQ ID NO: 167849 - DNA, 33 bp, Homo sapien
gagattcacagactacacacatgatctggtccc

SEQ ID NO: 167850 - DNA, 33 bp, Homo sapien
gagattcacagactacccacatgatctggtccc

SEQ ID NO: 167851 - DNA, 33 bp, Homo sapien
ccatagtcaggatgctaaacagttccaccatcc

SEQ ID NO: 167852 - DNA, 33 bp, Homo sapien
ccatagtcaggatgctgaacagttccaccatcc

SEQ ID NO: 167853 - DNA, 33 bp, Homo sapien
agacggtcccacaatcccagtgtgctgttgagc

SEQ ID NO: 167854 - DNA, 33 bp, Homo sapien
agacggtcccacaatctcagtgtgctgttgagc

SEQ ID NO: 167855 - DNA, 33 bp, Homo sapien
agcatttcactgcggaacctgagcgcgcctgcc

SEQ ID NO: 167856 - DNA, 33 bp, Homo sapien
agcatttcactgcggagcctgagcgcgcctgcc

SEQ ID NO: 167857 - DNA, 33 bp, Homo sapien
atggtaatgataaggagagtggagttgactggc

SEQ ID NO: 167858 - DNA, 33 bp, Homo sapien
atggtaatgataaggatagtggagttgactggc

SEQ ID NO: 167859 - DNA, 33 bp, Homo sapien
atcaggaaaaataagaccgtatgttggtactaa

SEQ ID NO: 167860 - DNA, 33 bp, Homo sapien
atcaggaaaaataagatcgtatgttggtactaa

SEQ ID NO: 167861 - DNA, 33 bp, Homo sapien
tgtggttcaataacccaataggagtgtccagtt

SEQ ID NO: 167862 - DNA, 33 bp, Homo sapien
tgtggttcaataacccgataggagtgtccagtt

SEQ ID NO: 167863 - DNA, 33 bp, Homo sapien
tgtatcttgcttttacccccatattcataaggc

SEQ ID NO: 167864 - DNA, 33 bp, Homo sapien
tgtatcttgcttttacgcccatattcataaggc

SEQ ID NO: 167865 - DNA, 33 bp, Homo sapien
ctgatactggaaattacagtgaaaccttttcca

SEQ ID NO: 167866 - DNA, 33 bp, Homo sapien
ctgatactggaaattagagtgaaaccttttcca

SEQ ID NO: 167867 - DNA, 33 bp, Homo sapien
agatgtgagagggatacgattccctgggggaat

SEQ ID NO: 167868 - DNA, 33 bp, Homo sapien
agatgtgagagggatatgattccctgggggaat

SEQ ID NO: 167869 - DNA, 33 bp, Homo sapien
ttgagaatggagttagaagaaaacaccacagag

SEQ ID NO: 167870 - DNA, 33 bp, Homo sapien
ttgagaatggagttaggagaaaacaccacagag

SEQ ID NO: 167871 - DNA, 33 bp, Homo sapien
tgtcttgaatttcctcaagcttcctcaaaagag

SEQ ID NO: 167872 - DNA, 33 bp, Homo sapien
tgtcttgaatttcctcgagcttcctcaaaagag

SEQ ID NO: 167873 - DNA, 33 bp, Homo sapien
tggcctgctcttgtgaccctgagttagtctctg

SEQ ID NO: 167874 - DNA, 33 bp, Homo sapien
tggcctgctcttgtgatcctgagttagtctctg

SEQ ID NO: 167875 - DNA, 33 bp, Homo sapien
attatttgctcacaaaaaggtacagagtactct

SEQ ID NO: 167876 - DNA, 33 bp, Homo sapien
attatttgctcacaaagaggtacagagtactct

SEQ ID NO: 167877 - DNA, 33 bp, Homo sapien
ttctatatctttcatacgtgtgttggtaaggga

SEQ ID NO: 167878 - DNA, 33 bp, Homo sapien
ttctatatctttcatatgtgtgttggtaaggga

SEQ ID NO: 167879 - DNA, 33 bp, Homo sapien
gggacccatcatcatagcggtgtggcagagtag

SEQ ID NO: 167880 - DNA, 33 bp, Homo sapien
gggacccatcatcatatcggtgtggcagagtag

SEQ ID NO: 167881 - DNA, 33 bp, Homo sapien
aaatgatgattctcttcaaatcctacacaacca

SEQ ID NO: 167882 - DNA, 33 bp, Homo sapien
aaatgatgattctctttaaatcctacacaacca

SEQ ID NO: 167883 - DNA, 33 bp, Homo sapien
gagcagcatagtttagcatctgacccattgtca

SEQ ID NO: 167884 - DNA, 33 bp, Homo sapien
gagcagcatagtttagtatctgacccattgtca

SEQ ID NO: 167885 - DNA, 33 bp, Homo sapien
tcagtgagtaaaaagcaaagaatgaaggggacc

SEQ ID NO: 167886 - DNA, 33 bp, Homo sapien
tcagtgagtaaaaagccaagaatgaaggggacc

SEQ ID NO: 167887 - DNA, 33 bp, Homo sapien
aagggcaagaatggcacgaaggagacaagttag

SEQ ID NO: 167888 - DNA, 33 bp, Homo sapien
aagggcaagaatggcaggaaggagacaagttag

SEQ ID NO: 167889 - DNA, 33 bp, Homo sapien
tgttttggacgtgttaagtttgtttatccaggt

SEQ ID NO: 167890 - DNA, 33 bp, Homo sapien
tgttttggacgtgttaggtttgtttatccaggt

SEQ ID NO: 167891 - DNA, 33 bp, Homo sapien
acaaagctcttatgtaaggacctttccagattt

SEQ ID NO: 167892 - DNA, 33 bp, Homo sapien
acaaagctcttatgtagggacctttccagattt

SEQ ID NO: 167893 - DNA, 33 bp, Homo sapien
attacagaatcagacaccccttctatcctttag

SEQ ID NO: 167894 - DNA, 33 bp, Homo sapien
attacagaatcagacagcccttctatcctttag

SEQ ID NO: 167895 - DNA, 33 bp, Homo sapien
gtgatgattcccagaacagaggaagtacaaaaa

SEQ ID NO: 167896 - DNA, 33 bp, Homo sapien
gtgatgattcccagaagagaggaagtacaaaaa

SEQ ID NO: 167897 - DNA, 33 bp, Homo sapien
agattaaaccaaagtgaatagggaataggaaaa

SEQ ID NO: 167898 - DNA, 33 bp, Homo sapien
agattaaaccaaagtgtatagggaataggaaaa

SEQ ID NO: 167899 - DNA, 33 bp, Homo sapien
aataggtttaggaggaaatgctgattaggggag

SEQ ID NO: 167900 - DNA, 33 bp, Homo sapien
aataggtttaggaggagatgctgattaggggag

SEQ ID NO: 167901 - DNA, 33 bp, Homo sapien
atgttaggtaatgtgcaaatgagtgaatgaatg

SEQ ID NO: 167902 - DNA, 33 bp, Homo sapien
atgttaggtaatgtgcgaatgagtgaatgaatg

SEQ ID NO: 167903 - DNA, 33 bp, Homo sapien
atggcaacttaaaaataaagtcgtgggtagccg

SEQ ID NO: 167904 - DNA, 33 bp, Homo sapien
atggcaacttaaaaatgaagtcgtgggtagccg

SEQ ID NO: 167905 - DNA, 33 bp, Homo sapien
cctagtctcagggcaaatacaggtcagggcagt

SEQ ID NO: 167906 - DNA, 33 bp, Homo sapien
cctagtctcagggcaagtacaggtcagggcagt

SEQ ID NO: 167907 - DNA, 33 bp, Homo sapien
tgacgagatgaacaggaatgtttcacattggca

SEQ ID NO: 167908 - DNA, 33 bp, Homo sapien
tgacgagatgaacagggatgtttcacattggca

SEQ ID NO: 167909 - DNA, 33 bp, Homo sapien
tctccctgaaagcacacggaatccgacctgctg

SEQ ID NO: 167910 - DNA, 33 bp, Homo sapien
tctccctgaaagcacatggaatccgacctgctg

SEQ ID NO: 167911 - DNA, 33 bp, Homo sapien
atggaggccaagtctaaagttgagtctaaaaat

SEQ ID NO: 167912 - DNA, 33 bp, Homo sapien
atggaggccaagtctacagttgagtctaaaaat

SEQ ID NO: 167913 - DNA, 33 bp, Homo sapien
ggctgctctagattctcaagcttagaaaaataa

SEQ ID NO: 167914 - DNA, 33 bp, Homo sapien
ggctgctctagattctgaagcttagaaaaataa

SEQ ID NO: 167915 - DNA, 33 bp, Homo sapien
tattggtccagattcacaatgccttcctccctg

SEQ ID NO: 167916 - DNA, 33 bp, Homo sapien
tattggtccagattcagaatgccttcctccctg

SEQ ID NO: 167917 - DNA, 33 bp, Homo sapien
tagggctcaacccagaagtctgacgcacatgaa

SEQ ID NO: 167918 - DNA, 33 bp, Homo sapien
tagggctcaacccagaggtctgacgcacatgaa

SEQ ID NO: 167919 - DNA, 33 bp, Homo sapien
catgcttcctaacaaacatatgggagtgcccgg

SEQ ID NO: 167920 - DNA, 33 bp, Homo sapien
catgcttcctaacaaatatatgggagtgcccgg

SEQ ID NO: 167921 - DNA, 33 bp, Homo sapien
acccagacgtgtatgcacgggaacagctggcca

SEQ ID NO: 167922 - DNA, 33 bp, Homo sapien
acccagacgtgtatgcgcgggaacagctggcca

SEQ ID NO: 167923 - DNA, 33 bp, Homo sapien
tggagaaggccgactcagagagcaacaagggca

SEQ ID NO: 167924 - DNA, 33 bp, Homo sapien
tggagaaggccgactcggagagcaacaagggca

SEQ ID NO: 167925 - DNA, 33 bp, Homo sapien
ccaatggttgaaccaaacaagagaaggggaatg

SEQ ID NO: 167926 - DNA, 33 bp, Homo sapien
ccaatggttgaaccaagcaagagaaggggaatg

SEQ ID NO: 167927 - DNA, 33 bp, Homo sapien
ggtgaggaggacccagcattgaggcagacagga

SEQ ID NO: 167928 - DNA, 33 bp, Homo sapien
ggtgaggaggacccaggattgaggcagacagga

SEQ ID NO: 167929 - DNA, 33 bp, Homo sapien
gagagcttacctacccactatgtgcctcagttt

SEQ ID NO: 167930 - DNA, 33 bp, Homo sapien
gagagcttacctacccgctatgtgcctcagttt

SEQ ID NO: 167931 - DNA, 33 bp, Homo sapien
ggccagagagagaaggaaacatgccccaattcc

SEQ ID NO: 167932 - DNA, 33 bp, Homo sapien
ggccagagagagaagggaacatgccccaattcc

SEQ ID NO: 167933 - DNA, 33 bp, Homo sapien
atggggtccaagacaacgtagtcccaatctgca

SEQ ID NO: 167934 - DNA, 33 bp, Homo sapien
atggggtccaagacaatgtagtcccaatctgca

SEQ ID NO: 167935 - DNA, 33 bp, Homo sapien
caaaagcagtctatggcaataatgctgacctag

SEQ ID NO: 167936 - DNA, 33 bp, Homo sapien
caaaagcagtctatggtaataatgctgacctag

SEQ ID NO: 167937 - DNA, 33 bp, Homo sapien
ctccttacatccaacacatccttcagcctggca

SEQ ID NO: 167938 - DNA, 33 bp, Homo sapien
ctccttacatccaacagatccttcagcctggca

SEQ ID NO: 167939 - DNA, 33 bp, Homo sapien
ccggggtcggctctagccaaatggttttctccc

SEQ ID NO: 167940 - DNA, 33 bp, Homo sapien
ccggggtcggctctagtcaaatggttttctccc

SEQ ID NO: 167941 - DNA, 33 bp, Homo sapien
tggatgcgactcctgcaataagtccagtaagtt

SEQ ID NO: 167942 - DNA, 33 bp, Homo sapien
tggatgcgactcctgcgataagtccagtaagtt

SEQ ID NO: 167943 - DNA, 33 bp, Homo sapien
cgcttgtactcgggaccgcttggtcaaggctgc

SEQ ID NO: 167944 - DNA, 33 bp, Homo sapien
cgcttgtactcgggacggcttggtcaaggctgc

SEQ ID NO: 167945 - DNA, 33 bp, Homo sapien
tttcaaatagtgatataaaaggattacttcgtg

SEQ ID NO: 167946 - DNA, 33 bp, Homo sapien
tttcaaatagtgatatcaaaggattacttcgtg

SEQ ID NO: 167947 - DNA, 33 bp, Homo sapien
atgcctggcacctaacagttacgtggtaacatc

SEQ ID NO: 167948 - DNA, 33 bp, Homo sapien
atgcctggcacctaacggttacgtggtaacatc

SEQ ID NO: 167949 - DNA, 33 bp, Homo sapien
tgctgtggtagtgacactgataacaaattcgac

SEQ ID NO: 167950 - DNA, 33 bp, Homo sapien
tgctgtggtagtgacattgataacaaattcgac

SEQ ID NO: 167951 - DNA, 33 bp, Homo sapien
ggatgaaagcctaaacacagcaattgattttaa

SEQ ID NO: 167952 - DNA, 33 bp, Homo sapien
ggatgaaagcctaaacgcagcaattgattttaa

SEQ ID NO: 167953 - DNA, 33 bp, Homo sapien
taaacgatattgctgacggcgtagccaaaagct

SEQ ID NO: 167954 - DNA, 33 bp, Homo sapien
taaacgatattgctgatggcgtagccaaaagct

SEQ ID NO: 167955 - DNA, 33 bp, Homo sapien
ctacaagaggtttatacgtcaggaggtccagta

SEQ ID NO: 167956 - DNA, 33 bp, Homo sapien
ctacaagaggtttatatgtcaggaggtccagta

SEQ ID NO: 167957 - DNA, 33 bp, Homo sapien
cttagctcttgcaggtcaccaatttatctgcct

SEQ ID NO: 167958 - DNA, 33 bp, Homo sapien
cttagctcttgcaggttaccaatttatctgcct

SEQ ID NO: 167959 - DNA, 33 bp, Homo sapien
gaagttgagggtgaagaatagcaccagagcagg

SEQ ID NO: 167960 - DNA, 33 bp, Homo sapien
gaagttgagggtgaaggatagcaccagagcagg

SEQ ID NO: 167961 - DNA, 33 bp, Homo sapien
caggtacttgcagctacgaggacagctccagga

SEQ ID NO: 167962 - DNA, 33 bp, Homo sapien
caggtacttgcagctatgaggacagctccagga

SEQ ID NO: 167963 - DNA, 33 bp, Homo sapien
gaggggtcttggggacaccagttgcccttcttt

SEQ ID NO: 167964 - DNA, 33 bp, Homo sapien
gaggggtcttggggacgccagttgcccttcttt

SEQ ID NO: 167965 - DNA, 33 bp, Homo sapien
ggctcctagtcattaaagacctagcatgagtaa

SEQ ID NO: 167966 - DNA, 33 bp, Homo sapien
ggctcctagtcattaacgacctagcatgagtaa

SEQ ID NO: 167967 - DNA, 33 bp, Homo sapien
tggggagtgtggaccactggggagaagacgctg

SEQ ID NO: 167968 - DNA, 33 bp, Homo sapien
tggggagtgtggaccattggggagaagacgctg

SEQ ID NO: 167969 - DNA, 33 bp, Homo sapien
gcagggagacttgtcaaggaagggcatccgagg

SEQ ID NO: 167970 - DNA, 33 bp, Homo sapien
gcagggagacttgtcagggaagggcatccgagg

SEQ ID NO: 167971 - DNA, 33 bp, Homo sapien
gaatttcagataatcaataatttttcggtactg

SEQ ID NO: 167972 - DNA, 33 bp, Homo sapien
gaatttcagataatcagtaatttttcggtactg

SEQ ID NO: 167973 - DNA, 33 bp, Homo sapien
gaacaaaacaatgagaagagttaagatgctcct

SEQ ID NO: 167974 - DNA, 33 bp, Homo sapien
gaacaaaacaatgagaggagttaagatgctcct

SEQ ID NO: 167975 - DNA, 33 bp, Homo sapien
tggcatccgaagaagtcaacatctgagctctca

SEQ ID NO: 167976 - DNA, 33 bp, Homo sapien
tggcatccgaagaagtgaacatctgagctctca

SEQ ID NO: 167977 - DNA, 33 bp, Homo sapien
ctcattcttgagcccacgttctcaactttcaga

SEQ ID NO: 167978 - DNA, 33 bp, Homo sapien
ctcattcttgagcccatgttctcaactttcaga

SEQ ID NO: 167979 - DNA, 33 bp, Homo sapien
agccgtaaggtggctgcagactcttgatttaaa

SEQ ID NO: 167980 - DNA, 33 bp, Homo sapien
agccgtaaggtggctggagactcttgatttaaa

SEQ ID NO: 167981 - DNA, 33 bp, Homo sapien
tgtgttttgcagcaaagaaaaacttttctttta

SEQ ID NO: 167982 - DNA, 33 bp, Homo sapien
tgtgttttgcagcaaataaaaacttttctttta

SEQ ID NO: 167983 - DNA, 33 bp, Homo sapien
cccatatagaagtttacatatcttcctcgtttg

SEQ ID NO: 167984 - DNA, 33 bp, Homo sapien
cccatatagaagtttagatatcttcctcgtttg

SEQ ID NO: 167985 - DNA, 33 bp, Homo sapien
taccagaaagaaagcacaggacagaagtcatgc

SEQ ID NO: 167986 - DNA, 33 bp, Homo sapien
taccagaaagaaagcagaggacagaagtcatgc

SEQ ID NO: 167987 - DNA, 33 bp, Homo sapien
ccttagtcacaacaagcaacctggtgacctgat

SEQ ID NO: 167988 - DNA, 33 bp, Homo sapien
ccttagtcacaacaagtaacctggtgacctgat

SEQ ID NO: 167989 - DNA, 33 bp, Homo sapien
ttttacacatgttagccatagtggagcaaaaaa

SEQ ID NO: 167990 - DNA, 33 bp, Homo sapien
ttttacacatgttagcgatagtggagcaaaaaa

SEQ ID NO: 167991 - DNA, 33 bp, Homo sapien
atagctcatacttaccaagtgctttctctgcac

SEQ ID NO: 167992 - DNA, 33 bp, Homo sapien
atagctcatacttaccgagtgctttctctgcac

SEQ ID NO: 167993 - DNA, 33 bp, Homo sapien
atctagtttttggtgcaaggcacatgagccttg

SEQ ID NO: 167994 - DNA, 33 bp, Homo sapien
atctagtttttggtgcgaggcacatgagccttg

SEQ ID NO: 167995 - DNA, 33 bp, Homo sapien
tgctgccagacaatgacgctaagtccatctacc

SEQ ID NO: 167996 - DNA, 33 bp, Homo sapien
tgctgccagacaatgatgctaagtccatctacc

SEQ ID NO: 167997 - DNA, 33 bp, Homo sapien
ctggttctgaccatcaatgatcttgaaatttta

SEQ ID NO: 167998 - DNA, 33 bp, Homo sapien
ctggttctgaccatcagtgatcttgaaatttta

SEQ ID NO: 167999 - DNA, 33 bp, Homo sapien
gctgtcctttatggaacattgattagtggccag

SEQ ID NO: 168000 - DNA, 33 bp, Homo sapien
gctgtcctttatggaatattgattagtggccag

SEQ ID NO: 168001 - DNA, 33 bp, Homo sapien
agccttcactttatccacactccaaaccccata

SEQ ID NO: 168002 - DNA, 33 bp, Homo sapien
agccttcactttatccgcactccaaaccccata

SEQ ID NO: 168003 - DNA, 33 bp, Homo sapien
ggcatggcacatagtaacctcctatgaatgttg

SEQ ID NO: 168004 - DNA, 33 bp, Homo sapien
ggcatggcacatagtagcctcctatgaatgttg

SEQ ID NO: 168005 - DNA, 33 bp, Homo sapien
agatgtggaatcttccaagagagagctggtaca

SEQ ID NO: 168006 - DNA, 33 bp, Homo sapien
agatgtggaatcttccgagagagagctggtaca

SEQ ID NO: 168007 - DNA, 33 bp, Homo sapien
tgggttgctagaccaccgtgggactgattcaca

SEQ ID NO: 168008 - DNA, 33 bp, Homo sapien
tgggttgctagaccactgtgggactgattcaca

SEQ ID NO: 168009 - DNA, 33 bp, Homo sapien
agggagcattttcttaagagtccccagagctag

SEQ ID NO: 168010 - DNA, 33 bp, Homo sapien
agggagcattttcttacgagtccccagagctag

SEQ ID NO: 168011 - DNA, 33 bp, Homo sapien
gccttcaatgaagaaaagtctgggcatctaccc

SEQ ID NO: 168012 - DNA, 33 bp, Homo sapien
gccttcaatgaagaaatgtctgggcatctaccc

SEQ ID NO: 168013 - DNA, 33 bp, Homo sapien
agaggacatggaagtccctggtacctggggtga

SEQ ID NO: 168014 - DNA, 33 bp, Homo sapien
agaggacatggaagtctctggtacctggggtga

SEQ ID NO: 168015 - DNA, 33 bp, Homo sapien
gtttgagtttgcttgcagactaatccctcactc

SEQ ID NO: 168016 - DNA, 33 bp, Homo sapien
gtttgagtttgcttgcggactaatccctcactc

SEQ ID NO: 168017 - DNA, 33 bp, Homo sapien
gcgatgatctttcccaatagaccagaagttcct

SEQ ID NO: 168018 - DNA, 33 bp, Homo sapien
gcgatgatctttcccactagaccagaagttcct

SEQ ID NO: 168019 - DNA, 33 bp, Homo sapien
gtctacctggaaaagcacctctgttcccagcag

SEQ ID NO: 168020 - DNA, 33 bp, Homo sapien
gtctacctggaaaagcgcctctgttcccagcag

SEQ ID NO: 168021 - DNA, 33 bp, Homo sapien
gaaacagaccaaagcacggatgggacaacacag

SEQ ID NO: 168022 - DNA, 33 bp, Homo sapien
gaaacagaccaaagcatggatgggacaacacag

SEQ ID NO: 168023 - DNA, 33 bp, Homo sapien
aaaataatctgaagaacgagttctatggctttt

SEQ ID NO: 168024 - DNA, 33 bp, Homo sapien
aaaataatctgaagaatgagttctatggctttt

SEQ ID NO: 168025 - DNA, 33 bp, Homo sapien
ccatgcttctctgccaagacgttttcttctaag

SEQ ID NO: 168026 - DNA, 33 bp, Homo sapien
ccatgcttctctgccaggacgttttcttctaag

SEQ ID NO: 168027 - DNA, 33 bp, Homo sapien
agcaaaaggatacagaagggaagagatactgat

SEQ ID NO: 168028 - DNA, 33 bp, Homo sapien
agcaaaaggatacagatgggaagagatactgat

SEQ ID NO: 168029 - DNA, 33 bp, Homo sapien
ctctttctgcactagacggatgatcaggtcagt

SEQ ID NO: 168030 - DNA, 33 bp, Homo sapien
ctctttctgcactagatggatgatcaggtcagt

SEQ ID NO: 168031 - DNA, 33 bp, Homo sapien
ttggcatcaggcaccccggacttgaatctcagc

SEQ ID NO: 168032 - DNA, 33 bp, Homo sapien
ttggcatcaggcaccctggacttgaatctcagc

SEQ ID NO: 168033 - DNA, 33 bp, Homo sapien
aactgtgaacccataaatgtcaaaatctaaaat

SEQ ID NO: 168034 - DNA, 33 bp, Homo sapien
aactgtgaacccataattgtcaaaatctaaaat

SEQ ID NO: 168035 - DNA, 33 bp, Homo sapien
aggaaggacactaaaaagttacataacagatgg

SEQ ID NO: 168036 - DNA, 33 bp, Homo sapien
aggaaggacactaaaacgttacataacagatgg

SEQ ID NO: 168037 - DNA, 33 bp, Homo sapien
ttgcacagcattgctcacagtctgtggttattt

SEQ ID NO: 168038 - DNA, 33 bp, Homo sapien
ttgcacagcattgctcccagtctgtggttattt

SEQ ID NO: 168039 - DNA, 33 bp, Homo sapien
ctcctgtcagaacatagctccctggggtaggga

SEQ ID NO: 168040 - DNA, 33 bp, Homo sapien
ctcctgtcagaacatatctccctggggtaggga

SEQ ID NO: 168041 - DNA, 33 bp, Homo sapien
agcagaacgtgaatggaaactgtacttccaggc

SEQ ID NO: 168042 - DNA, 33 bp, Homo sapien
agcagaacgtgaatgggaactgtacttccaggc

SEQ ID NO: 168043 - DNA, 33 bp, Homo sapien
acgttctgctggtcaaaggagtcacgtggctcc

SEQ ID NO: 168044 - DNA, 33 bp, Homo sapien
acgttctgctggtcaatggagtcacgtggctcc

SEQ ID NO: 168045 - DNA, 33 bp, Homo sapien
tcccctaagtgtccacagatggatggaacagag

SEQ ID NO: 168046 - DNA, 33 bp, Homo sapien
tcccctaagtgtccacggatggatggaacagag

SEQ ID NO: 168047 - DNA, 33 bp, Homo sapien
aggtgtggcctgacaacatcccgatgtcccgtc

SEQ ID NO: 168048 - DNA, 33 bp, Homo sapien
aggtgtggcctgacaatatcccgatgtcccgtc

SEQ ID NO: 168049 - DNA, 33 bp, Homo sapien
ttcttcaagagtcctcagaatagagttagcact

SEQ ID NO: 168050 - DNA, 33 bp, Homo sapien
ttcttcaagagtcctcggaatagagttagcact

SEQ ID NO: 168051 - DNA, 33 bp, Homo sapien
ccagagatgtgcaaaactcttggggccttaacc

SEQ ID NO: 168052 - DNA, 33 bp, Homo sapien
ccagagatgtgcaaaagtcttggggccttaacc

SEQ ID NO: 168053 - DNA, 33 bp, Homo sapien
caggtctatggtgacactgccatttggccttgt

SEQ ID NO: 168054 - DNA, 33 bp, Homo sapien
caggtctatggtgacattgccatttggccttgt

SEQ ID NO: 168055 - DNA, 33 bp, Homo sapien
gtcatgaccattattaaccccatttgcaggttc

SEQ ID NO: 168056 - DNA, 33 bp, Homo sapien
gtcatgaccattattatccccatttgcaggttc

SEQ ID NO: 168057 - DNA, 33 bp, Homo sapien
gacacaaagtcacgcccagctggtaagtagcag

SEQ ID NO: 168058 - DNA, 33 bp, Homo sapien
gacacaaagtcacgcctagctggtaagtagcag

SEQ ID NO: 168059 - DNA, 33 bp, Homo sapien
ctcagatgtcccaaaccgggcagtgacttgccc

SEQ ID NO: 168060 - DNA, 33 bp, Homo sapien
ctcagatgtcccaaactgggcagtgacttgccc

SEQ ID NO: 168061 - DNA, 33 bp, Homo sapien
tctcatgtacttattccccgtccctcaagcctt

SEQ ID NO: 168062 - DNA, 33 bp, Homo sapien
tctcatgtacttattctccgtccctcaagcctt

SEQ ID NO: 168063 - DNA, 33 bp, Homo sapien
gaagcagatgatagtacgggccctgagagagat

SEQ ID NO: 168064 - DNA, 33 bp, Homo sapien
gaagcagatgatagtatgggccctgagagagat

SEQ ID NO: 168065 - DNA, 33 bp, Homo sapien
gtgccacaactggagacagaataatgaagcaga

SEQ ID NO: 168066 - DNA, 33 bp, Homo sapien
gtgccacaactggagatagaataatgaagcaga

SEQ ID NO: 168067 - DNA, 33 bp, Homo sapien
aagcatgaagtggagaacttaagattcccagtc

SEQ ID NO: 168068 - DNA, 33 bp, Homo sapien
aagcatgaagtggagaccttaagattcccagtc

SEQ ID NO: 168069 - DNA, 33 bp, Homo sapien
tttaacactcacctccaaaatcaccacctccag

SEQ ID NO: 168070 - DNA, 33 bp, Homo sapien
tttaacactcacctccgaaatcaccacctccag

SEQ ID NO: 168071 - DNA, 33 bp, Homo sapien
gggattgcccatctcccgctgagtgtggagaat

SEQ ID NO: 168072 - DNA, 33 bp, Homo sapien
gggattgcccatctcctgctgagtgtggagaat

SEQ ID NO: 168073 - DNA, 33 bp, Homo sapien
gttttcacagtctccccgatgacacaagttgtg

SEQ ID NO: 168074 - DNA, 33 bp, Homo sapien
gttttcacagtctccctgatgacacaagttgtg

SEQ ID NO: 168075 - DNA, 33 bp, Homo sapien
taacaaatggttctaaacaaaattgggctcatt

SEQ ID NO: 168076 - DNA, 33 bp, Homo sapien
taacaaatggttctaatcaaaattgggctcatt

SEQ ID NO: 168077 - DNA, 33 bp, Homo sapien
aggtcgtgggagaatccccgtcctgcagatgaa

SEQ ID NO: 168078 - DNA, 33 bp, Homo sapien
aggtcgtgggagaatctccgtcctgcagatgaa

SEQ ID NO: 168079 - DNA, 33 bp, Homo sapien
ggctggggtcgagaaacccaaatctccaaacaa

SEQ ID NO: 168080 - DNA, 33 bp, Homo sapien
ggctggggtcgagaaatccaaatctccaaacaa

SEQ ID NO: 168081 - DNA, 33 bp, Homo sapien
tggggacagcctgcccaagaagggagccaacag

SEQ ID NO: 168082 - DNA, 33 bp, Homo sapien
tggggacagcctgcccgagaagggagccaacag

SEQ ID NO: 168083 - DNA, 33 bp, Homo sapien
tcctcatcctaccacactgatggaaagagggcc

SEQ ID NO: 168084 - DNA, 33 bp, Homo sapien
tcctcatcctaccacattgatggaaagagggcc

SEQ ID NO: 168085 - DNA, 33 bp, Homo sapien
gggtcagttcctggaccgcttccttcctagctc

SEQ ID NO: 168086 - DNA, 33 bp, Homo sapien
gggtcagttcctggactgcttccttcctagctc

SEQ ID NO: 168087 - DNA, 33 bp, Homo sapien
ctggagcatctagccaacaggcatctcctgggc

SEQ ID NO: 168088 - DNA, 33 bp, Homo sapien
ctggagcatctagccaccaggcatctcctgggc

SEQ ID NO: 168089 - DNA, 33 bp, Homo sapien
agtgtagagactcttgcacacaactgatgcacc

SEQ ID NO: 168090 - DNA, 33 bp, Homo sapien
agtgtagagactcttgtacacaactgatgcacc

SEQ ID NO: 168091 - DNA, 33 bp, Homo sapien
gtggggtgttcactccgaattcctcaaggtcca

SEQ ID NO: 168092 - DNA, 33 bp, Homo sapien
gtggggtgttcactcctaattcctcaaggtcca

SEQ ID NO: 168093 - DNA, 33 bp, Homo sapien
acttatatatggttaactgattttgaacaaagg

SEQ ID NO: 168094 - DNA, 33 bp, Homo sapien
acttatatatggttaattgattttgaacaaagg

SEQ ID NO: 168095 - DNA, 33 bp, Homo sapien
aaaacttctgctctccaaaagacattgtttttt

SEQ ID NO: 168096 - DNA, 33 bp, Homo sapien
aaaacttctgctctccgaaagacattgtttttt

SEQ ID NO: 168097 - DNA, 33 bp, Homo sapien
tctgtacctgttgagactatgtagcatctgtcc

SEQ ID NO: 168098 - DNA, 33 bp, Homo sapien
tctgtacctgttgagattatgtagcatctgtcc

SEQ ID NO: 168099 - DNA, 33 bp, Homo sapien
aagaaatgcaccagaaagttggtgttagagtca

SEQ ID NO: 168100 - DNA, 33 bp, Homo sapien
aagaaatgcaccagaaggttggtgttagagtca

SEQ ID NO: 168101 - DNA, 33 bp, Homo sapien
caaggcaggctgcaaacaggcgtgtttctttcc

SEQ ID NO: 168102 - DNA, 33 bp, Homo sapien
caaggcaggctgcaaagaggcgtgtttctttcc

SEQ ID NO: 168103 - DNA, 33 bp, Homo sapien
tctgccaaatggcaataagaatgcctccctagt

SEQ ID NO: 168104 - DNA, 33 bp, Homo sapien
tctgccaaatggcaatgagaatgcctccctagt

SEQ ID NO: 168105 - DNA, 33 bp, Homo sapien
tgcctgggtcatagaacgctcaaagtaacattg

SEQ ID NO: 168106 - DNA, 33 bp, Homo sapien
tgcctgggtcatagaaggctcaaagtaacattg

SEQ ID NO: 168107 - DNA, 33 bp, Homo sapien
ttagtcagggattgagacatatttgctaaataa

SEQ ID NO: 168108 - DNA, 33 bp, Homo sapien
ttagtcagggattgaggcatatttgctaaataa

SEQ ID NO: 168109 - DNA, 33 bp, Homo sapien
catttttgaatggttaaaattgttgtaatacat

SEQ ID NO: 168110 - DNA, 33 bp, Homo sapien
catttttgaatggttagaattgttgtaatacat

SEQ ID NO: 168111 - DNA, 33 bp, Homo sapien
tttggcagcctatgccaatttcagaggatgtat

SEQ ID NO: 168112 - DNA, 33 bp, Homo sapien
tttggcagcctatgcctatttcagaggatgtat

SEQ ID NO: 168113 - DNA, 33 bp, Homo sapien
ataaagacactttgaaattaaaaagacatatgg

SEQ ID NO: 168114 - DNA, 33 bp, Homo sapien
ataaagacactttgaatttaaaaagacatatgg

SEQ ID NO: 168115 - DNA, 33 bp, Homo sapien
ccttaatgagctaaaaaatgtcaaggtttccat

SEQ ID NO: 168116 - DNA, 33 bp, Homo sapien
ccttaatgagctaaaagatgtcaaggtttccat

SEQ ID NO: 168117 - DNA, 33 bp, Homo sapien
gctgctaaatgccacaaatatgaagagggcaca

SEQ ID NO: 168118 - DNA, 33 bp, Homo sapien
gctgctaaatgccacagatatgaagagggcaca

SEQ ID NO: 168119 - DNA, 33 bp, Homo sapien
ccattctaagactatccatccagcctctattaa

SEQ ID NO: 168120 - DNA, 33 bp, Homo sapien
ccattctaagactatctatccagcctctattaa

SEQ ID NO: 168121 - DNA, 33 bp, Homo sapien
tcacctaccactatccaaagggtcccatgtcac

SEQ ID NO: 168122 - DNA, 33 bp, Homo sapien
tcacctaccactatccgaagggtcccatgtcac

SEQ ID NO: 168123 - DNA, 33 bp, Homo sapien
ctcagactccactgaccgacaaggcagacgggg

SEQ ID NO: 168124 - DNA, 33 bp, Homo sapien
ctcagactccactgacggacaaggcagacgggg

SEQ ID NO: 168125 - DNA, 33 bp, Homo sapien
gactgtactctattcaccagggaggaggaggaa

SEQ ID NO: 168126 - DNA, 33 bp, Homo sapien
gactgtactctattcatcagggaggaggaggaa

SEQ ID NO: 168127 - DNA, 33 bp, Homo sapien
agcctaggcagatgaaataataggtgagcattt

SEQ ID NO: 168128 - DNA, 33 bp, Homo sapien
agcctaggcagatgaagtaataggtgagcattt

SEQ ID NO: 168129 - DNA, 33 bp, Homo sapien
ccaacaccttcatggaactactccgctcaaaaa

SEQ ID NO: 168130 - DNA, 33 bp, Homo sapien
ccaacaccttcatggagctactccgctcaaaaa

SEQ ID NO: 168131 - DNA, 33 bp, Homo sapien
tgacttatgttcttagaagaagagactgggaca

SEQ ID NO: 168132 - DNA, 33 bp, Homo sapien
tgacttatgttcttaggagaagagactgggaca

SEQ ID NO: 168133 - DNA, 33 bp, Homo sapien
agttgtaggcacatggacagtactctaaaatat

SEQ ID NO: 168134 - DNA, 33 bp, Homo sapien
agttgtaggcacatgggcagtactctaaaatat

SEQ ID NO: 168135 - DNA, 33 bp, Homo sapien
tctaattcccatccggcccacagagccccagag

SEQ ID NO: 168136 - DNA, 33 bp, Homo sapien
tctaattcccatccggtccacagagccccagag

SEQ ID NO: 168137 - DNA, 33 bp, Homo sapien
gtgtgaaggtgacaaggctcaaaagaaacgacc

SEQ ID NO: 168138 - DNA, 33 bp, Homo sapien
gtgtgaaggtgacaagtctcaaaagaaacgacc

SEQ ID NO: 168139 - DNA, 33 bp, Homo sapien
ctccactgtgtcttcactatgttggcctctgtg

SEQ ID NO: 168140 - DNA, 33 bp, Homo sapien
ctccactgtgtcttcagtatgttggcctctgtg

SEQ ID NO: 168141 - DNA, 33 bp, Homo sapien
gggtaatgctaatgaccacagggtttttggaaa

SEQ ID NO: 168142 - DNA, 33 bp, Homo sapien
gggtaatgctaatgactacagggtttttggaaa

SEQ ID NO: 168143 - DNA, 33 bp, Homo sapien
agggtttttggaaagaacagaagagataacagg

SEQ ID NO: 168144 - DNA, 33 bp, Homo sapien
agggtttttggaaagaccagaagagataacagg

SEQ ID NO: 168145 - DNA, 33 bp, Homo sapien
ggaaacttgtggagaactcactgtaatccaacc

SEQ ID NO: 168146 - DNA, 33 bp, Homo sapien
ggaaacttgtggagaattcactgtaatccaacc

SEQ ID NO: 168147 - DNA, 33 bp, Homo sapien
aagttaggcgcccgaaaaatttagtcctggaca

SEQ ID NO: 168148 - DNA, 33 bp, Homo sapien
aagttaggcgcccgaagaatttagtcctggaca

SEQ ID NO: 168149 - DNA, 33 bp, Homo sapien
tctgttttgagtcccagcttgaagcttccacac

SEQ ID NO: 168150 - DNA, 33 bp, Homo sapien
tctgttttgagtcccatcttgaagcttccacac

SEQ ID NO: 168151 - DNA, 33 bp, Homo sapien
gtaggcggagacaggaggaagtattgtcaagca

SEQ ID NO: 168152 - DNA, 33 bp, Homo sapien
gtaggcggagacaggatgaagtattgtcaagca

SEQ ID NO: 168153 - DNA, 33 bp, Homo sapien
aaagcatgtggcatccaaagttactgcagatgg

SEQ ID NO: 168154 - DNA, 33 bp, Homo sapien
aaagcatgtggcatccgaagttactgcagatgg

SEQ ID NO: 168155 - DNA, 33 bp, Homo sapien
atgagaattcacttgaagaagggcaccaggcca

SEQ ID NO: 168156 - DNA, 33 bp, Homo sapien
atgagaattcacttgaggaagggcaccaggcca

SEQ ID NO: 168157 - DNA, 33 bp, Homo sapien
gccagcatggtgccagcatgtgcttctggagag

SEQ ID NO: 168158 - DNA, 33 bp, Homo sapien
gccagcatggtgccagtatgtgcttctggagag

SEQ ID NO: 168159 - DNA, 33 bp, Homo sapien
cagctcagtacaaaccaggctcagtacaaacag

SEQ ID NO: 168160 - DNA, 33 bp, Homo sapien
cagctcagtacaaaccgggctcagtacaaacag

SEQ ID NO: 168161 - DNA, 33 bp, Homo sapien
gtgcagtttagatgaaaagggaggtccagtgga

SEQ ID NO: 168162 - DNA, 33 bp, Homo sapien
gtgcagtttagatgaagagggaggtccagtgga

SEQ ID NO: 168163 - DNA, 33 bp, Homo sapien
gaagcatgggccttccaatctgagcccattagc

SEQ ID NO: 168164 - DNA, 33 bp, Homo sapien
gaagcatgggccttccgatctgagcccattagc

SEQ ID NO: 168165 - DNA, 33 bp, Homo sapien
gctccagggactgcacagaacacgtattagtgt

SEQ ID NO: 168166 - DNA, 33 bp, Homo sapien
gctccagggactgcacggaacacgtattagtgt

SEQ ID NO: 168167 - DNA, 33 bp, Homo sapien
agatggcactagcaccaggcttgacttcccaca

SEQ ID NO: 168168 - DNA, 33 bp, Homo sapien
agatggcactagcaccgggcttgacttcccaca

SEQ ID NO: 168169 - DNA, 33 bp, Homo sapien
aagtttcaggtctctcaaatgataatgatgatc

SEQ ID NO: 168170 - DNA, 33 bp, Homo sapien
aagtttcaggtctctcgaatgataatgatgatc

SEQ ID NO: 168171 - DNA, 33 bp, Homo sapien
gaagtcgtgggcctcaagcctcggtgtataaga

SEQ ID NO: 168172 - DNA, 33 bp, Homo sapien
gaagtcgtgggcctcacgcctcggtgtataaga

SEQ ID NO: 168173 - DNA, 33 bp, Homo sapien
tatataaacagtcatcgcttagaatccacggag

SEQ ID NO: 168174 - DNA, 33 bp, Homo sapien
tatataaacagtcatctcttagaatccacggag

SEQ ID NO: 168175 - DNA, 33 bp, Homo sapien
ggctcctgacctcaaaacctctctattcaggag

SEQ ID NO: 168176 - DNA, 33 bp, Homo sapien
ggctcctgacctcaaagcctctctattcaggag

SEQ ID NO: 168177 - DNA, 33 bp, Homo sapien
ggactcaggaaaggaactagtaagaccactgta

SEQ ID NO: 168178 - DNA, 33 bp, Homo sapien
ggactcaggaaaggaagtagtaagaccactgta

SEQ ID NO: 168179 - DNA, 33 bp, Homo sapien
ccagatgtgactcgggacaatctttccccaagt

SEQ ID NO: 168180 - DNA, 33 bp, Homo sapien
ccagatgtgactcgggccaatctttccccaagt

SEQ ID NO: 168181 - DNA, 33 bp, Homo sapien
tgagggtagcttaggaacggacctagatgggag

SEQ ID NO: 168182 - DNA, 33 bp, Homo sapien
tgagggtagcttaggagcggacctagatgggag

SEQ ID NO: 168183 - DNA, 33 bp, Homo sapien
caggagagaaggtgccacttaaaggatttttcc

SEQ ID NO: 168184 - DNA, 33 bp, Homo sapien
caggagagaaggtgcctcttaaaggatttttcc

SEQ ID NO: 168185 - DNA, 33 bp, Homo sapien
ctagatagttcagaaacacctggcctttccctg

SEQ ID NO: 168186 - DNA, 33 bp, Homo sapien
ctagatagttcagaaatacctggcctttccctg

SEQ ID NO: 168187 - DNA, 33 bp, Homo sapien
acagtgtttttattggcatctgaaagcatctgg

SEQ ID NO: 168188 - DNA, 33 bp, Homo sapien
acagtgtttttattggtatctgaaagcatctgg

SEQ ID NO: 168189 - DNA, 33 bp, Homo sapien
gtgtaggtatctattcacatgcatattcccagc

SEQ ID NO: 168190 - DNA, 33 bp, Homo sapien
gtgtaggtatctattctcatgcatattcccagc

SEQ ID NO: 168191 - DNA, 33 bp, Homo sapien
atgtcactcactcctacgctgcagagaaaagtg

SEQ ID NO: 168192 - DNA, 33 bp, Homo sapien
atgtcactcactcctatgctgcagagaaaagtg

SEQ ID NO: 168193 - DNA, 33 bp, Homo sapien
attctcacttcccaacaaatctgggtttgtgga

SEQ ID NO: 168194 - DNA, 33 bp, Homo sapien
attctcacttcccaacgaatctgggtttgtgga

SEQ ID NO: 168195 - DNA, 33 bp, Homo sapien
cgtctggctgtcaggacatgggcccgaataacc

SEQ ID NO: 168196 - DNA, 33 bp, Homo sapien
cgtctggctgtcaggatatgggcccgaataacc

SEQ ID NO: 168197 - DNA, 33 bp, Homo sapien
atataagatgcattaaactaacatttactgagt

SEQ ID NO: 168198 - DNA, 33 bp, Homo sapien
atataagatgcattaagctaacatttactgagt

SEQ ID NO: 168199 - DNA, 33 bp, Homo sapien
cagtggatgggcaataggaatgttagccccacc

SEQ ID NO: 168200 - DNA, 33 bp, Homo sapien
cagtggatgggcaatatgaatgttagccccacc

SEQ ID NO: 168201 - DNA, 33 bp, Homo sapien
gccaggccctggtgaggcaactttctggtcagg

SEQ ID NO: 168202 - DNA, 33 bp, Homo sapien
gccaggccctggtgagtcaactttctggtcagg

SEQ ID NO: 168203 - DNA, 33 bp, Homo sapien
ataaccaatataaatcacattttactctgagaa

SEQ ID NO: 168204 - DNA, 33 bp, Homo sapien
ataaccaatataaatcccattttactctgagaa

SEQ ID NO: 168205 - DNA, 33 bp, Homo sapien
aaccttaatatgcactgaactaatcatcccaat

SEQ ID NO: 168206 - DNA, 33 bp, Homo sapien
aaccttaatatgcacttaactaatcatcccaat

SEQ ID NO: 168207 - DNA, 33 bp, Homo sapien
accaatgatagtggaaatgacgcccaagtcact

SEQ ID NO: 168208 - DNA, 33 bp, Homo sapien
accaatgatagtggaagtgacgcccaagtcact

SEQ ID NO: 168209 - DNA, 33 bp, Homo sapien
aaggaaggctttccagcaacaggcaaggctaaa

SEQ ID NO: 168210 - DNA, 33 bp, Homo sapien
aaggaaggctttccaggaacaggcaaggctaaa

SEQ ID NO: 168211 - DNA, 33 bp, Homo sapien
aaaagatatctttccacgtgggaagctcagtgt

SEQ ID NO: 168212 - DNA, 33 bp, Homo sapien
aaaagatatctttccatgtgggaagctcagtgt

SEQ ID NO: 168213 - DNA, 33 bp, Homo sapien
tgcatcattctgatcccgaatccggttcagttc

SEQ ID NO: 168214 - DNA, 33 bp, Homo sapien
tgcatcattctgatcctgaatccggttcagttc

SEQ ID NO: 168215 - DNA, 33 bp, Homo sapien
gtgttatgccaatggaagtaagatccactttct

SEQ ID NO: 168216 - DNA, 33 bp, Homo sapien
gtgttatgccaatggaggtaagatccactttct

SEQ ID NO: 168217 - DNA, 33 bp, Homo sapien
acccccatctgttccaccttttcagaccttttg

SEQ ID NO: 168218 - DNA, 33 bp, Homo sapien
acccccatctgttccagcttttcagaccttttg

SEQ ID NO: 168219 - DNA, 33 bp, Homo sapien
tttcttccattttctcacttctctagggagttg

SEQ ID NO: 168220 - DNA, 33 bp, Homo sapien
tttcttccattttctcgcttctctagggagttg

SEQ ID NO: 168221 - DNA, 33 bp, Homo sapien
ctgctcagctgtaacccggtcatgttgctaaac

SEQ ID NO: 168222 - DNA, 33 bp, Homo sapien
ctgctcagctgtaacctggtcatgttgctaaac

SEQ ID NO: 168223 - DNA, 33 bp, Homo sapien
cggccaagtcctccacagagagaaaactcctga

SEQ ID NO: 168224 - DNA, 33 bp, Homo sapien
cggccaagtcctccacggagagaaaactcctga

SEQ ID NO: 168225 - DNA, 33 bp, Homo sapien
agggaaccttgagcaacgttgtttgagggctca

SEQ ID NO: 168226 - DNA, 33 bp, Homo sapien
agggaaccttgagcaatgttgtttgagggctca

SEQ ID NO: 168227 - DNA, 33 bp, Homo sapien
tgctgcttgatggtgcacaaaacacaccacgtt

SEQ ID NO: 168228 - DNA, 33 bp, Homo sapien
tgctgcttgatggtgcgcaaaacacaccacgtt

SEQ ID NO: 168229 - DNA, 33 bp, Homo sapien
gcatgaagggacctaacagtggccatgaagcaa

SEQ ID NO: 168230 - DNA, 33 bp, Homo sapien
gcatgaagggacctaatagtggccatgaagcaa

SEQ ID NO: 168231 - DNA, 33 bp, Homo sapien
caaaaaaaaaaggaaacgatccaatgtccatcc

SEQ ID NO: 168232 - DNA, 33 bp, Homo sapien
caaaaaaaaaaggaaatgatccaatgtccatcc

SEQ ID NO: 168233 - DNA, 33 bp, Homo sapien
catatcactcgatatgcaggaataacaatagga

SEQ ID NO: 168234 - DNA, 33 bp, Homo sapien
catatcactcgatatgtaggaataacaatagga

SEQ ID NO: 168235 - DNA, 33 bp, Homo sapien
tatgtgaccttagataccttatgtgaacctgaa

SEQ ID NO: 168236 - DNA, 33 bp, Homo sapien
tatgtgaccttagatatcttatgtgaacctgaa

SEQ ID NO: 168237 - DNA, 33 bp, Homo sapien
tcttcctcatctccaaaacccattgcagctaag

SEQ ID NO: 168238 - DNA, 33 bp, Homo sapien
tcttcctcatctccaacacccattgcagctaag

SEQ ID NO: 168239 - DNA, 33 bp, Homo sapien
cctcactgcagagacagtgccagaatttctgtg

SEQ ID NO: 168240 - DNA, 33 bp, Homo sapien
cctcactgcagagacattgccagaatttctgtg

SEQ ID NO: 168241 - DNA, 33 bp, Homo sapien
ctgcagagacattacaatagaaggcagtaagtg

SEQ ID NO: 168242 - DNA, 33 bp, Homo sapien
ctgcagagacattacagtagaaggcagtaagtg

SEQ ID NO: 168243 - DNA, 33 bp, Homo sapien
agacaggactccaacaccagcactctgactcca

SEQ ID NO: 168244 - DNA, 33 bp, Homo sapien
agacaggactccaacatcagcactctgactcca

SEQ ID NO: 168245 - DNA, 33 bp, Homo sapien
ggcatagtaacccccacgtctggctgagcaaag

SEQ ID NO: 168246 - DNA, 33 bp, Homo sapien
ggcatagtaacccccatgtctggctgagcaaag

SEQ ID NO: 168247 - DNA, 33 bp, Homo sapien
tgatcacatgaatggacgttttggtagatatta

SEQ ID NO: 168248 - DNA, 33 bp, Homo sapien
tgatcacatgaatggatgttttggtagatatta

SEQ ID NO: 168249 - DNA, 33 bp, Homo sapien
ggagtcctgggttccaatcccaacaccacacta

SEQ ID NO: 168250 - DNA, 33 bp, Homo sapien
ggagtcctgggttccagtcccaacaccacacta

SEQ ID NO: 168251 - DNA, 33 bp, Homo sapien
ggggagtcttcactctaagaaggaggtgacatc

SEQ ID NO: 168252 - DNA, 33 bp, Homo sapien
ggggagtcttcactctgagaaggaggtgacatc

SEQ ID NO: 168253 - DNA, 33 bp, Homo sapien
gggacaacaccgattccagtaaatccactgtga

SEQ ID NO: 168254 - DNA, 33 bp, Homo sapien
gggacaacaccgattctagtaaatccactgtga

SEQ ID NO: 168255 - DNA, 33 bp, Homo sapien
tggcatggggcccagcacatcatcggtgctaaa

SEQ ID NO: 168256 - DNA, 33 bp, Homo sapien
tggcatggggcccagcgcatcatcggtgctaaa

SEQ ID NO: 168257 - DNA, 33 bp, Homo sapien
ttccaggctgaccaagcaagaaaaggtattgca

SEQ ID NO: 168258 - DNA, 33 bp, Homo sapien
ttccaggctgaccaaggaagaaaaggtattgca

SEQ ID NO: 168259 - DNA, 33 bp, Homo sapien
aatccatcccaaaatacgcagggctgttgctgg

SEQ ID NO: 168260 - DNA, 33 bp, Homo sapien
aatccatcccaaaatatgcagggctgttgctgg

SEQ ID NO: 168261 - DNA, 33 bp, Homo sapien
tcccaggggcttttccaatgctgactggctccc

SEQ ID NO: 168262 - DNA, 33 bp, Homo sapien
tcccaggggcttttccgatgctgactggctccc

SEQ ID NO: 168263 - DNA, 33 bp, Homo sapien
ctgatattaacgcaagacaatgtattatgggcg

SEQ ID NO: 168264 - DNA, 33 bp, Homo sapien
ctgatattaacgcaaggcaatgtattatgggcg

SEQ ID NO: 168265 - DNA, 33 bp, Homo sapien
tgggctggagactttgcagactggggcacggcg

SEQ ID NO: 168266 - DNA, 33 bp, Homo sapien
tgggctggagactttggagactggggcacggcg

SEQ ID NO: 168267 - DNA, 33 bp, Homo sapien
tctccctgtccttccacgtgacgtctgcctcag

SEQ ID NO: 168268 - DNA, 33 bp, Homo sapien
tctccctgtccttccatgtgacgtctgcctcag

SEQ ID NO: 168269 - DNA, 33 bp, Homo sapien
tgcaaagtcatacagacatggtggccagatatt

SEQ ID NO: 168270 - DNA, 33 bp, Homo sapien
tgcaaagtcatacagagatggtggccagatatt

SEQ ID NO: 168271 - DNA, 33 bp, Homo sapien
tttgcaggcatgaaagaaaaggcctggaaaggt

SEQ ID NO: 168272 - DNA, 33 bp, Homo sapien
tttgcaggcatgaaagcaaaggcctggaaaggt

SEQ ID NO: 168273 - DNA, 33 bp, Homo sapien
gcagctcataaacggactacctgtatttattgt

SEQ ID NO: 168274 - DNA, 33 bp, Homo sapien
gcagctcataaacggattacctgtatttattgt

SEQ ID NO: 168275 - DNA, 33 bp, Homo sapien
tgttgagagattaaagccagtcagttctgcgga

SEQ ID NO: 168276 - DNA, 33 bp, Homo sapien
tgttgagagattaaaggcagtcagttctgcgga

SEQ ID NO: 168277 - DNA, 33 bp, Homo sapien
tactcagtccaaaccaagtgcaaccctactgtg

SEQ ID NO: 168278 - DNA, 33 bp, Homo sapien
tactcagtccaaaccatgtgcaaccctactgtg

SEQ ID NO: 168279 - DNA, 33 bp, Homo sapien
gtagaggttgggttccagcaagagagggctgtg

SEQ ID NO: 168280 - DNA, 33 bp, Homo sapien
gtagaggttgggttccggcaagagagggctgtg

SEQ ID NO: 168281 - DNA, 33 bp, Homo sapien
ccaagttacctggtgaagaatgcaagggaaaaa

SEQ ID NO: 168282 - DNA, 33 bp, Homo sapien
ccaagttacctggtgaggaatgcaagggaaaaa

SEQ ID NO: 168283 - DNA, 33 bp, Homo sapien
ccccagggccagtgccaaatccaaagccgatgt

SEQ ID NO: 168284 - DNA, 33 bp, Homo sapien
ccccagggccagtgccgaatccaaagccgatgt

SEQ ID NO: 168285 - DNA, 33 bp, Homo sapien
gaaatgtgtctcaaatcacaagctgctaagatg

SEQ ID NO: 168286 - DNA, 33 bp, Homo sapien
gaaatgtgtctcaaattacaagctgctaagatg

SEQ ID NO: 168287 - DNA, 33 bp, Homo sapien
cagcagttttcctgtcacccagctgtcaaccct

SEQ ID NO: 168288 - DNA, 33 bp, Homo sapien
cagcagttttcctgtcgcccagctgtcaaccct

SEQ ID NO: 168289 - DNA, 33 bp, Homo sapien
gagacataaataagaaatcttttgagctatgga

SEQ ID NO: 168290 - DNA, 33 bp, Homo sapien
gagacataaataagaagtcttttgagctatgga

SEQ ID NO: 168291 - DNA, 33 bp, Homo sapien
gaccttaagtgcaacacgcatcctctaaatcca

SEQ ID NO: 168292 - DNA, 33 bp, Homo sapien
gaccttaagtgcaacatgcatcctctaaatcca

SEQ ID NO: 168293 - DNA, 33 bp, Homo sapien
tttaacactggtaaaccgtcttaagcaggagga

SEQ ID NO: 168294 - DNA, 33 bp, Homo sapien
tttaacactggtaaactgtcttaagcaggagga

SEQ ID NO: 168295 - DNA, 33 bp, Homo sapien
atcttcatggagtttccattgagctgaagcatc

SEQ ID NO: 168296 - DNA, 33 bp, Homo sapien
atcttcatggagtttctattgagctgaagcatc

SEQ ID NO: 168297 - DNA, 33 bp, Homo sapien
catacttccttcccagccatagtgttgcattca

SEQ ID NO: 168298 - DNA, 33 bp, Homo sapien
catacttccttcccagtcatagtgttgcattca

SEQ ID NO: 168299 - DNA, 33 bp, Homo sapien
gcatgtcttcaaaatcagagctcatcagagagg

SEQ ID NO: 168300 - DNA, 33 bp, Homo sapien
gcatgtcttcaaaatcggagctcatcagagagg

SEQ ID NO: 168301 - DNA, 33 bp, Homo sapien
ttcgtcccgttaaaaacctgctgctgtggaact

SEQ ID NO: 168302 - DNA, 33 bp, Homo sapien
ttcgtcccgttaaaaatctgctgctgtggaact

SEQ ID NO: 168303 - DNA, 33 bp, Homo sapien
gggtgtcactgcaatacaatcacacacacacac

SEQ ID NO: 168304 - DNA, 33 bp, Homo sapien
gggtgtcactgcaatataatcacacacacacac

SEQ ID NO: 168305 - DNA, 33 bp, Homo sapien
accctaaaatgcagaactataacagcagaaaaa

SEQ ID NO: 168306 - DNA, 33 bp, Homo sapien
accctaaaatgcagaattataacagcagaaaaa

SEQ ID NO: 168307 - DNA, 33 bp, Homo sapien
ggaggggagagttatgaacatgaaaatgacaga

SEQ ID NO: 168308 - DNA, 33 bp, Homo sapien
ggaggggagagttatggacatgaaaatgacaga

SEQ ID NO: 168309 - DNA, 33 bp, Homo sapien
ccatgtctaatgttgcaactacagtgattggaa

SEQ ID NO: 168310 - DNA, 33 bp, Homo sapien
ccatgtctaatgttgctactacagtgattggaa

SEQ ID NO: 168311 - DNA, 33 bp, Homo sapien
gcaatgctgccaagtcgctgtttctgggtctcc

SEQ ID NO: 168312 - DNA, 33 bp, Homo sapien
gcaatgctgccaagtctctgtttctgggtctcc

SEQ ID NO: 168313 - DNA, 33 bp, Homo sapien
agaggcagagtgcgggaatgtccccgggtcacc

SEQ ID NO: 168314 - DNA, 33 bp, Homo sapien
agaggcagagtgcggggatgtccccgggtcacc

SEQ ID NO: 168315 - DNA, 33 bp, Homo sapien
tgtagatgactgcacaaatagtcaacagcagca

SEQ ID NO: 168316 - DNA, 33 bp, Homo sapien
tgtagatgactgcacagatagtcaacagcagca

SEQ ID NO: 168317 - DNA, 33 bp, Homo sapien
tgttttatatccttacagtaagagaagggcata

SEQ ID NO: 168318 - DNA, 33 bp, Homo sapien
tgttttatatccttacggtaagagaagggcata

SEQ ID NO: 168319 - DNA, 33 bp, Homo sapien
aatggaaggaatattaccagcccaaaggaactg

SEQ ID NO: 168320 - DNA, 33 bp, Homo sapien
aatggaaggaatattatcagcccaaaggaactg

SEQ ID NO: 168321 - DNA, 33 bp, Homo sapien
gaaaactgtggtcatcagaattcccttcagaga

SEQ ID NO: 168322 - DNA, 33 bp, Homo sapien
gaaaactgtggtcatcggaattcccttcagaga

SEQ ID NO: 168323 - DNA, 33 bp, Homo sapien
ccaagtactgtttgaaaggctttacaaatacct

SEQ ID NO: 168324 - DNA, 33 bp, Homo sapien
ccaagtactgtttgaagggctttacaaatacct

SEQ ID NO: 168325 - DNA, 33 bp, Homo sapien
aatgagaatgctaatccacctgtctcagtgaat

SEQ ID NO: 168326 - DNA, 33 bp, Homo sapien
aatgagaatgctaatctacctgtctcagtgaat

SEQ ID NO: 168327 - DNA, 33 bp, Homo sapien
atggagacaggacttccacgctgaccagggcta

SEQ ID NO: 168328 - DNA, 33 bp, Homo sapien
atggagacaggacttcgacgctgaccagggcta

SEQ ID NO: 168329 - DNA, 33 bp, Homo sapien
acacaaattcttcctccgacatagctgagactc

SEQ ID NO: 168330 - DNA, 33 bp, Homo sapien
acacaaattcttcctcggacatagctgagactc

SEQ ID NO: 168331 - DNA, 33 bp, Homo sapien
gttgggactccatcctaaggaaacagggtgtac

SEQ ID NO: 168332 - DNA, 33 bp, Homo sapien
gttgggactccatccttaggaaacagggtgtac

SEQ ID NO: 168333 - DNA, 33 bp, Homo sapien
tgagtatgataaaagacgactttgttctggata

SEQ ID NO: 168334 - DNA, 33 bp, Homo sapien
tgagtatgataaaagaggactttgttctggata

SEQ ID NO: 168335 - DNA, 33 bp, Homo sapien
caacaaacaatggaaaatgtcttcaaagtgctg

SEQ ID NO: 168336 - DNA, 33 bp, Homo sapien
caacaaacaatggaaagtgtcttcaaagtgctg

SEQ ID NO: 168337 - DNA, 33 bp, Homo sapien
atccagcaccggtagaacctgcagtcagctctt

SEQ ID NO: 168338 - DNA, 33 bp, Homo sapien
atccagcaccggtagagcctgcagtcagctctt

SEQ ID NO: 168339 - DNA, 33 bp, Homo sapien
aacaggcctgatggcacgggtgattaaatgaca

SEQ ID NO: 168340 - DNA, 33 bp, Homo sapien
aacaggcctgatggcatgggtgattaaatgaca

SEQ ID NO: 168341 - DNA, 33 bp, Homo sapien
acccctctattcacacacttgccatcataacca

SEQ ID NO: 168342 - DNA, 33 bp, Homo sapien
acccctctattcacacgcttgccatcataacca

SEQ ID NO: 168343 - DNA, 33 bp, Homo sapien
gagagccaggttgtacccgccagctgggcatac

SEQ ID NO: 168344 - DNA, 33 bp, Homo sapien
gagagccaggttgtactcgccagctgggcatac

SEQ ID NO: 168345 - DNA, 33 bp, Homo sapien
gacatcttggtccagacactttttggtcagcaa

SEQ ID NO: 168346 - DNA, 33 bp, Homo sapien
gacatcttggtccagatactttttggtcagcaa

SEQ ID NO: 168347 - DNA, 33 bp, Homo sapien
tggatgctgtaacaaaaagggtcagaaggctgt

SEQ ID NO: 168348 - DNA, 33 bp, Homo sapien
tggatgctgtaacaaagagggtcagaaggctgt

SEQ ID NO: 168349 - DNA, 33 bp, Homo sapien
gctggaggggcacatcggagaagccgttttgta

SEQ ID NO: 168350 - DNA, 33 bp, Homo sapien
gctggaggggcacatctgagaagccgttttgta

SEQ ID NO: 168351 - DNA, 33 bp, Homo sapien
caatgaaacaatctctaactaacaggaaatttg

SEQ ID NO: 168352 - DNA, 33 bp, Homo sapien
caatgaaacaatctctgactaacaggaaatttg

SEQ ID NO: 168353 - DNA, 33 bp, Homo sapien
accacgtggagatagaagggcccagcatcacag

SEQ ID NO: 168354 - DNA, 33 bp, Homo sapien
accacgtggagatagacgggcccagcatcacag

SEQ ID NO: 168355 - DNA, 33 bp, Homo sapien
tccttaaatactctgccctgacacaaccatgcc

SEQ ID NO: 168356 - DNA, 33 bp, Homo sapien
tccttaaatactctgctctgacacaaccatgcc

SEQ ID NO: 168357 - DNA, 33 bp, Homo sapien
aatcaaactccacgaccccacagatcatcttct

SEQ ID NO: 168358 - DNA, 33 bp, Homo sapien
aatcaaactccacgactccacagatcatcttct

SEQ ID NO: 168359 - DNA, 33 bp, Homo sapien
tgtagtgtttggcacaatctccccttttccaga

SEQ ID NO: 168360 - DNA, 33 bp, Homo sapien
tgtagtgtttggcacattctccccttttccaga

SEQ ID NO: 168361 - DNA, 33 bp, Homo sapien
ctgtttgggaaataccacatgccccacactccc

SEQ ID NO: 168362 - DNA, 33 bp, Homo sapien
ctgtttgggaaataccgcatgccccacactccc

SEQ ID NO: 168363 - DNA, 33 bp, Homo sapien
gcagggcacttcatacactggtctattgacatt

SEQ ID NO: 168364 - DNA, 33 bp, Homo sapien
gcagggcacttcatacgctggtctattgacatt

SEQ ID NO: 168365 - DNA, 33 bp, Homo sapien
aatgtagtgcttaccaaaaggggttttcagagg

SEQ ID NO: 168366 - DNA, 33 bp, Homo sapien
aatgtagtgcttaccagaaggggttttcagagg

SEQ ID NO: 168367 - DNA, 33 bp, Homo sapien
gacatgcgtgactgtcaagcaataaccatcact

SEQ ID NO: 168368 - DNA, 33 bp, Homo sapien
gacatgcgtgactgtcgagcaataaccatcact

SEQ ID NO: 168369 - DNA, 33 bp, Homo sapien
gccatagctgttgtaacgttgccatggtgcaac

SEQ ID NO: 168370 - DNA, 33 bp, Homo sapien
gccatagctgttgtaatgttgccatggtgcaac

SEQ ID NO: 168371 - DNA, 33 bp, Homo sapien
gtgctgtgaatgatgagattaactgtattttgg

SEQ ID NO: 168372 - DNA, 33 bp, Homo sapien
gtgctgtgaatgatgatattaactgtattttgg

SEQ ID NO: 168373 - DNA, 33 bp, Homo sapien
ccaccctctccaccacccacagatggttctgcg

SEQ ID NO: 168374 - DNA, 33 bp, Homo sapien
ccaccctctccaccactcacagatggttctgcg

SEQ ID NO: 168375 - DNA, 33 bp, Homo sapien
tatttaaactcaaagtaaatgtctgagtagtct

SEQ ID NO: 168376 - DNA, 33 bp, Homo sapien
tatttaaactcaaagttaatgtctgagtagtct

SEQ ID NO: 168377 - DNA, 33 bp, Homo sapien
ttcccctttgttagaactgtcctcttctctgca

SEQ ID NO: 168378 - DNA, 33 bp, Homo sapien
ttcccctttgttagaattgtcctcttctctgca

SEQ ID NO: 168379 - DNA, 33 bp, Homo sapien
ttctttcgctaaaacccactgcgacttcaacct

SEQ ID NO: 168380 - DNA, 33 bp, Homo sapien
ttctttcgctaaaaccgactgcgacttcaacct

SEQ ID NO: 168381 - DNA, 33 bp, Homo sapien
agtcttcctgcattcacgtttgacaccttgcaa

SEQ ID NO: 168382 - DNA, 33 bp, Homo sapien
agtcttcctgcattcatgtttgacaccttgcaa

SEQ ID NO: 168383 - DNA, 33 bp, Homo sapien
catcttcagataaatcaaggagtaaggagagaa

SEQ ID NO: 168384 - DNA, 33 bp, Homo sapien
catcttcagataaatccaggagtaaggagagaa

SEQ ID NO: 168385 - DNA, 33 bp, Homo sapien
ctcccaggggtgtttgaacgcaaagtgtataaa

SEQ ID NO: 168386 - DNA, 33 bp, Homo sapien
ctcccaggggtgtttgcacgcaaagtgtataaa

SEQ ID NO: 168387 - DNA, 33 bp, Homo sapien
tgggtctgcataaggactagttgttcttggaag

SEQ ID NO: 168388 - DNA, 33 bp, Homo sapien
tgggtctgcataaggattagttgttcttggaag

SEQ ID NO: 168389 - DNA, 33 bp, Homo sapien
cagctaagcttcggagacagaaaaatgagagcc

SEQ ID NO: 168390 - DNA, 33 bp, Homo sapien
cagctaagcttcggagccagaaaaatgagagcc

SEQ ID NO: 168391 - DNA, 33 bp, Homo sapien
gtggtttctgggcaacgcaaagaaaggcgcctc

SEQ ID NO: 168392 - DNA, 33 bp, Homo sapien
gtggtttctgggcaactcaaagaaaggcgcctc

SEQ ID NO: 168393 - DNA, 33 bp, Homo sapien
tgactggatagtgaaccggaactcaatagaaat

SEQ ID NO: 168394 - DNA, 33 bp, Homo sapien
tgactggatagtgaactggaactcaatagaaat

SEQ ID NO: 168395 - DNA, 33 bp, Homo sapien
agcattctaactgttgcaaatagggtcatattg

SEQ ID NO: 168396 - DNA, 33 bp, Homo sapien
agcattctaactgttgtaaatagggtcatattg

SEQ ID NO: 168397 - DNA, 33 bp, Homo sapien
acaaatgattcccccaggactcgaaatgctctg

SEQ ID NO: 168398 - DNA, 33 bp, Homo sapien
acaaatgattcccccatgactcgaaatgctctg

SEQ ID NO: 168399 - DNA, 33 bp, Homo sapien
gacctctaagagcaagaaaaacattccctcaaa

SEQ ID NO: 168400 - DNA, 33 bp, Homo sapien
gacctctaagagcaaggaaaacattccctcaaa

SEQ ID NO: 168401 - DNA, 33 bp, Homo sapien
aaaaggcataaaccaacctctgaacttgctcat

SEQ ID NO: 168402 - DNA, 33 bp, Homo sapien
aaaaggcataaaccaagctctgaacttgctcat

SEQ ID NO: 168403 - DNA, 33 bp, Homo sapien
agggttaaatgcaacacggaggtccagtaagat

SEQ ID NO: 168404 - DNA, 33 bp, Homo sapien
agggttaaatgcaacagggaggtccagtaagat

SEQ ID NO: 168405 - DNA, 33 bp, Homo sapien
gggaaagagagagaaacaatgttgaaggttatt

SEQ ID NO: 168406 - DNA, 33 bp, Homo sapien
gggaaagagagagaaataatgttgaaggttatt

SEQ ID NO: 168407 - DNA, 33 bp, Homo sapien
gcagtttcttgagggcaaaatatagaacccctg

SEQ ID NO: 168408 - DNA, 33 bp, Homo sapien
gcagtttcttgagggccaaatatagaacccctg

SEQ ID NO: 168409 - DNA, 33 bp, Homo sapien
tctaggaaagaggagacgtttcacatttttctc

SEQ ID NO: 168410 - DNA, 33 bp, Homo sapien
tctaggaaagaggagaggtttcacatttttctc

SEQ ID NO: 168411 - DNA, 33 bp, Homo sapien
actgcagcataacttaacctgtgctgaccgatg

SEQ ID NO: 168412 - DNA, 33 bp, Homo sapien
actgcagcataacttagcctgtgctgaccgatg

SEQ ID NO: 168413 - DNA, 33 bp, Homo sapien
tgtgctgttgttttctaaaaagcctgtttccta

SEQ ID NO: 168414 - DNA, 33 bp, Homo sapien
tgtgctgttgttttcttaaaagcctgtttccta

SEQ ID NO: 168415 - DNA, 33 bp, Homo sapien
cactctccaaaggccaacctaaaggcctcctcc

SEQ ID NO: 168416 - DNA, 33 bp, Homo sapien
cactctccaaaggccagcctaaaggcctcctcc

SEQ ID NO: 168417 - DNA, 33 bp, Homo sapien
cagccttatgcccaagccactgctgtttttcgg

SEQ ID NO: 168418 - DNA, 33 bp, Homo sapien
cagccttatgcccaagtcactgctgtttttcgg

SEQ ID NO: 168419 - DNA, 33 bp, Homo sapien
actcagtcctgcaaacacagaggaaaaaatctt

SEQ ID NO: 168420 - DNA, 33 bp, Homo sapien
actcagtcctgcaaacccagaggaaaaaatctt

SEQ ID NO: 168421 - DNA, 33 bp, Homo sapien
aagcattatctgttcactcactcttctgtgttc

SEQ ID NO: 168422 - DNA, 33 bp, Homo sapien
aagcattatctgttcattcactcttctgtgttc

SEQ ID NO: 168423 - DNA, 33 bp, Homo sapien
ccccaggtgttctgcacgctaggactcagcaag

SEQ ID NO: 168424 - DNA, 33 bp, Homo sapien
ccccaggtgttctgcaggctaggactcagcaag

SEQ ID NO: 168425 - DNA, 33 bp, Homo sapien
tggcagggagggtaaccagactccgcgagaccc

SEQ ID NO: 168426 - DNA, 33 bp, Homo sapien
tggcagggagggtaactagactccgcgagaccc

SEQ ID NO: 168427 - DNA, 33 bp, Homo sapien
ttgaaggatggatagacgttcaacagaggaagc

SEQ ID NO: 168428 - DNA, 33 bp, Homo sapien
ttgaaggatggatagatgttcaacagaggaagc

SEQ ID NO: 168429 - DNA, 33 bp, Homo sapien
aaatgaggatgcacagcctaatggaacacaccc

SEQ ID NO: 168430 - DNA, 33 bp, Homo sapien
aaatgaggatgcacagtctaatggaacacaccc

SEQ ID NO: 168431 - DNA, 33 bp, Homo sapien
catccccaagcggtgccatgacagtgcaaagga

SEQ ID NO: 168432 - DNA, 33 bp, Homo sapien
catccccaagcggtgctatgacagtgcaaagga

SEQ ID NO: 168433 - DNA, 33 bp, Homo sapien
ttgttaagaaactaacagagtccattcaatcat

SEQ ID NO: 168434 - DNA, 33 bp, Homo sapien
ttgttaagaaactaactgagtccattcaatcat

SEQ ID NO: 168435 - DNA, 33 bp, Homo sapien
gtagtgacctggtaacacttcaaacctccttgc

SEQ ID NO: 168436 - DNA, 33 bp, Homo sapien
gtagtgacctggtaactcttcaaacctccttgc

SEQ ID NO: 168437 - DNA, 33 bp, Homo sapien
acattttgattaaacacatttgctcggttttgg

SEQ ID NO: 168438 - DNA, 33 bp, Homo sapien
acattttgattaaacatatttgctcggttttgg

SEQ ID NO: 168439 - DNA, 33 bp, Homo sapien
cactctaccaccgtcaaaggcctgttgggtatc

SEQ ID NO: 168440 - DNA, 33 bp, Homo sapien
cactctaccaccgtcagaggcctgttgggtatc

SEQ ID NO: 168441 - DNA, 33 bp, Homo sapien
aagttggtcaggaacacgatatggtgaggcttg

SEQ ID NO: 168442 - DNA, 33 bp, Homo sapien
aagttggtcaggaacatgatatggtgaggcttg

SEQ ID NO: 168443 - DNA, 33 bp, Homo sapien
atcactcttggtcttacatagaaggaggtttct

SEQ ID NO: 168444 - DNA, 33 bp, Homo sapien
atcactcttggtcttatatagaaggaggtttct

SEQ ID NO: 168445 - DNA, 33 bp, Homo sapien
actccatcagggtgccaacctccaattacaaag

SEQ ID NO: 168446 - DNA, 33 bp, Homo sapien
actccatcagggtgcctacctccaattacaaag

SEQ ID NO: 168447 - DNA, 33 bp, Homo sapien
aatcccaagtccttgccatataactttggaatg

SEQ ID NO: 168448 - DNA, 33 bp, Homo sapien
aatcccaagtccttgctatataactttggaatg

SEQ ID NO: 168449 - DNA, 33 bp, Homo sapien
ctatcaactggacagcacaagctaggagagtag

SEQ ID NO: 168450 - DNA, 33 bp, Homo sapien
ctatcaactggacagctcaagctaggagagtag

SEQ ID NO: 168451 - DNA, 33 bp, Homo sapien
ttggcttgggtgtagacggagccaacatcacag

SEQ ID NO: 168452 - DNA, 33 bp, Homo sapien
ttggcttgggtgtagatggagccaacatcacag

SEQ ID NO: 168453 - DNA, 33 bp, Homo sapien
gggaagttatacttcaacccctcaggccacctc

SEQ ID NO: 168454 - DNA, 33 bp, Homo sapien
gggaagttatacttcatcccctcaggccacctc

SEQ ID NO: 168455 - DNA, 33 bp, Homo sapien
gtgagtttctctaagacatatacccaggagtga

SEQ ID NO: 168456 - DNA, 33 bp, Homo sapien
gtgagtttctctaagatatatacccaggagtga

SEQ ID NO: 168457 - DNA, 33 bp, Homo sapien
cattagtcctatcttacacagctggccaaacag

SEQ ID NO: 168458 - DNA, 33 bp, Homo sapien
cattagtcctatcttatacagctggccaaacag

SEQ ID NO: 168459 - DNA, 33 bp, Homo sapien
ctcctgtcaggacaatcacagtacaacacttcg

SEQ ID NO: 168460 - DNA, 33 bp, Homo sapien
ctcctgtcaggacaattacagtacaacacttcg

SEQ ID NO: 168461 - DNA, 33 bp, Homo sapien
ccaggtccagcatctcagagaccaaaacaagct

SEQ ID NO: 168462 - DNA, 33 bp, Homo sapien
ccaggtccagcatctcggagaccaaaacaagct

SEQ ID NO: 168463 - DNA, 33 bp, Homo sapien
tccatttactcttggaccaatcccatccattag

SEQ ID NO: 168464 - DNA, 33 bp, Homo sapien
tccatttactcttggatcaatcccatccattag

SEQ ID NO: 168465 - DNA, 33 bp, Homo sapien
ctcaaaggatcttggcaatgaaatgaatggtag

SEQ ID NO: 168466 - DNA, 33 bp, Homo sapien
ctcaaaggatcttggccatgaaatgaatggtag

SEQ ID NO: 168467 - DNA, 33 bp, Homo sapien
cctcctggctcatcaccgattattagagggcca

SEQ ID NO: 168468 - DNA, 33 bp, Homo sapien
cctcctggctcatcactgattattagagggcca

SEQ ID NO: 168469 - DNA, 33 bp, Homo sapien
cacagacaaatgatgacgatatttgatgtgttc

SEQ ID NO: 168470 - DNA, 33 bp, Homo sapien
cacagacaaatgatgatgatatttgatgtgttc

SEQ ID NO: 168471 - DNA, 33 bp, Homo sapien
aaatggagtccctttcaagtcatatgtgtgcaa

SEQ ID NO: 168472 - DNA, 33 bp, Homo sapien
aaatggagtccctttctagtcatatgtgtgcaa

SEQ ID NO: 168473 - DNA, 33 bp, Homo sapien
tgcccctatggctctcaatgtttgtcctgcctt

SEQ ID NO: 168474 - DNA, 33 bp, Homo sapien
tgcccctatggctctcgatgtttgtcctgcctt

SEQ ID NO: 168475 - DNA, 33 bp, Homo sapien
tccccctctctttcaaggtctcagtcatgccct

SEQ ID NO: 168476 - DNA, 33 bp, Homo sapien
tccccctctctttcaatgtctcagtcatgccct

SEQ ID NO: 168477 - DNA, 33 bp, Homo sapien
agtgggataagaataaacagcaaatgaggatgc

SEQ ID NO: 168478 - DNA, 33 bp, Homo sapien
agtgggataagaataagcagcaaatgaggatgc

SEQ ID NO: 168479 - DNA, 33 bp, Homo sapien
ccaacaaccacaagagcaagcttggaggtagag

SEQ ID NO: 168480 - DNA, 33 bp, Homo sapien
ccaacaaccacaagaggaagcttggaggtagag

SEQ ID NO: 168481 - DNA, 33 bp, Homo sapien
ggtttgactggggcaacctctacctccaagctt

SEQ ID NO: 168482 - DNA, 33 bp, Homo sapien
ggtttgactggggcaagctctacctccaagctt

SEQ ID NO: 168483 - DNA, 33 bp, Homo sapien
tgatgaaaccattaaccaggccaactgctataa

SEQ ID NO: 168484 - DNA, 33 bp, Homo sapien
tgatgaaaccattaactaggccaactgctataa

SEQ ID NO: 168485 - DNA, 33 bp, Homo sapien
agctgcctcaagaaaaatacacttcaactataa

SEQ ID NO: 168486 - DNA, 33 bp, Homo sapien
agctgcctcaagaaaagtacacttcaactataa

SEQ ID NO: 168487 - DNA, 33 bp, Homo sapien
aaagctcagaaaataccgcaaagagatactact

SEQ ID NO: 168488 - DNA, 33 bp, Homo sapien
aaagctcagaaaatactgcaaagagatactact

SEQ ID NO: 168489 - DNA, 33 bp, Homo sapien
agaaaccatcattctcgctttgcctccctggct

SEQ ID NO: 168490 - DNA, 33 bp, Homo sapien
agaaaccatcattctctctttgcctccctggct

SEQ ID NO: 168491 - DNA, 33 bp, Homo sapien
ctggcagcttgagcaaagagaaagagccaggga

SEQ ID NO: 168492 - DNA, 33 bp, Homo sapien
ctggcagcttgagcaaggagaaagagccaggga

SEQ ID NO: 168493 - DNA, 33 bp, Homo sapien
tgttttgtagagacaaagctcaccatgttgcct

SEQ ID NO: 168494 - DNA, 33 bp, Homo sapien
tgttttgtagagacaaggctcaccatgttgcct

SEQ ID NO: 168495 - DNA, 33 bp, Homo sapien
atagatttaggagacaatggctcatagaaatgt

SEQ ID NO: 168496 - DNA, 33 bp, Homo sapien
atagatttaggagacattggctcatagaaatgt

SEQ ID NO: 168497 - DNA, 33 bp, Homo sapien
aggggcacattgggaagtgtgtagagaggagtc

SEQ ID NO: 168498 - DNA, 33 bp, Homo sapien
aggggcacattgggaattgtgtagagaggagtc

SEQ ID NO: 168499 - DNA, 33 bp, Homo sapien
tagttttatgtgggaactcagaataaaagacag

SEQ ID NO: 168500 - DNA, 33 bp, Homo sapien
tagttttatgtgggaattcagaataaaagacag

SEQ ID NO: 168501 - DNA, 33 bp, Homo sapien
gggtgctgtgatggaaagaaggtgggggaaaga

SEQ ID NO: 168502 - DNA, 33 bp, Homo sapien
gggtgctgtgatggaaggaaggtgggggaaaga

SEQ ID NO: 168503 - DNA, 33 bp, Homo sapien
cttgccagaatgagggcccaagaaagagaatga

SEQ ID NO: 168504 - DNA, 33 bp, Homo sapien
cttgccagaatgagggtccaagaaagagaatga

SEQ ID NO: 168505 - DNA, 33 bp, Homo sapien
aactagaagattaccaactgcctggaagttaaa

SEQ ID NO: 168506 - DNA, 33 bp, Homo sapien
aactagaagattaccagctgcctggaagttaaa

SEQ ID NO: 168507 - DNA, 33 bp, Homo sapien
atatgtgaaataaatacaaaatcatgaaggctt

SEQ ID NO: 168508 - DNA, 33 bp, Homo sapien
atatgtgaaataaatagaaaatcatgaaggctt

SEQ ID NO: 168509 - DNA, 33 bp, Homo sapien
atgctactgcacacaacttgatacatttcccag

SEQ ID NO: 168510 - DNA, 33 bp, Homo sapien
atgctactgcacacaatttgatacatttcccag

SEQ ID NO: 168511 - DNA, 33 bp, Homo sapien
ccgttttcgaaaggagacagtccttgacttgag

SEQ ID NO: 168512 - DNA, 33 bp, Homo sapien
ccgttttcgaaaggaggcagtccttgacttgag

SEQ ID NO: 168513 - DNA, 33 bp, Homo sapien
tgactcaactaagtcacgctgctggtccttgtc

SEQ ID NO: 168514 - DNA, 33 bp, Homo sapien
tgactcaactaagtcatgctgctggtccttgtc

SEQ ID NO: 168515 - DNA, 33 bp, Homo sapien
ggacttgctgggtcaaagcattgaaggacacct

SEQ ID NO: 168516 - DNA, 33 bp, Homo sapien
ggacttgctgggtcaacgcattgaaggacacct

SEQ ID NO: 168517 - DNA, 33 bp, Homo sapien
tctacagaagtggcaacacttagacattagccc

SEQ ID NO: 168518 - DNA, 33 bp, Homo sapien
tctacagaagtggcaatacttagacattagccc

SEQ ID NO: 168519 - DNA, 33 bp, Homo sapien
tcgttaacataaaacacggaaccctgggaccag

SEQ ID NO: 168520 - DNA, 33 bp, Homo sapien
tcgttaacataaaacatggaaccctgggaccag

SEQ ID NO: 168521 - DNA, 33 bp, Homo sapien
gccggaaacactgaaaagatgaactgtcaagag

SEQ ID NO: 168522 - DNA, 33 bp, Homo sapien
gccggaaacactgaaaggatgaactgtcaagag

SEQ ID NO: 168523 - DNA, 33 bp, Homo sapien
cactcatttagtacacggagaaaggagagggag

SEQ ID NO: 168524 - DNA, 33 bp, Homo sapien
cactcatttagtacactgagaaaggagagggag

SEQ ID NO: 168525 - DNA, 33 bp, Homo sapien
gtgcagcggttgcgcaaagacaatgatgcttag

SEQ ID NO: 168526 - DNA, 33 bp, Homo sapien
gtgcagcggttgcgcagagacaatgatgcttag

SEQ ID NO: 168527 - DNA, 33 bp, Homo sapien
gaaagctaatccttctaaatttggctgaacaat

SEQ ID NO: 168528 - DNA, 33 bp, Homo sapien
gaaagctaatccttctgaatttggctgaacaat

SEQ ID NO: 168529 - DNA, 33 bp, Homo sapien
tgagtttgaactgccccattggttctgccagcc

SEQ ID NO: 168530 - DNA, 33 bp, Homo sapien
tgagtttgaactgcccgattggttctgccagcc

SEQ ID NO: 168531 - DNA, 33 bp, Homo sapien
ctatcgaggccttcaactgatgagaggaagccc

SEQ ID NO: 168532 - DNA, 33 bp, Homo sapien
ctatcgaggccttcaagtgatgagaggaagccc

SEQ ID NO: 168533 - DNA, 33 bp, Homo sapien
gacaaaggctctgtcccagttcatgttcccgtg

SEQ ID NO: 168534 - DNA, 33 bp, Homo sapien
gacaaaggctctgtcctagttcatgttcccgtg

SEQ ID NO: 168535 - DNA, 33 bp, Homo sapien
agccttgcatactgaacggggctgtcgcttttg

SEQ ID NO: 168536 - DNA, 33 bp, Homo sapien
agccttgcatactgaatggggctgtcgcttttg

SEQ ID NO: 168537 - DNA, 33 bp, Homo sapien
acgatctgacagttccactcccaattattttct

SEQ ID NO: 168538 - DNA, 33 bp, Homo sapien
acgatctgacagttccgctcccaattattttct

SEQ ID NO: 168539 - DNA, 33 bp, Homo sapien
ttttttttctcatgacaggcagtgactaataac

SEQ ID NO: 168540 - DNA, 33 bp, Homo sapien
ttttttttctcatgacgggcagtgactaataac

SEQ ID NO: 168541 - DNA, 33 bp, Homo sapien
ctgatttccataacagaagaggagtttactgca

SEQ ID NO: 168542 - DNA, 33 bp, Homo sapien
ctgatttccataacaggagaggagtttactgca

SEQ ID NO: 168543 - DNA, 33 bp, Homo sapien
acaggacagagcttgagaggtcatcataaggaa

SEQ ID NO: 168544 - DNA, 33 bp, Homo sapien
acaggacagagcttgataggtcatcataaggaa

SEQ ID NO: 168545 - DNA, 33 bp, Homo sapien
gtgggaggtaattgaaagacggggcaggttttc

SEQ ID NO: 168546 - DNA, 33 bp, Homo sapien
gtgggaggtaattgaatgacggggcaggttttc

SEQ ID NO: 168547 - DNA, 33 bp, Homo sapien
cagaaaaagccacataagtatcagcatgaaaag

SEQ ID NO: 168548 - DNA, 33 bp, Homo sapien
cagaaaaagccacataggtatcagcatgaaaag

SEQ ID NO: 168549 - DNA, 33 bp, Homo sapien
gacatacccaagatggaacaaattacaaaagaa

SEQ ID NO: 168550 - DNA, 33 bp, Homo sapien
gacatacccaagatgggacaaattacaaaagaa

SEQ ID NO: 168551 - DNA, 33 bp, Homo sapien
agctggaatggtgccacgattctggacagaaaa

SEQ ID NO: 168552 - DNA, 33 bp, Homo sapien
agctggaatggtgccatgattctggacagaaaa

SEQ ID NO: 168553 - DNA, 33 bp, Homo sapien
catttattaatacgaactgtggtaataacaaaa

SEQ ID NO: 168554 - DNA, 33 bp, Homo sapien
catttattaatacgaagtgtggtaataacaaaa

SEQ ID NO: 168555 - DNA, 33 bp, Homo sapien
tcaccaagtgggttccagaagtaatgaccatag

SEQ ID NO: 168556 - DNA, 33 bp, Homo sapien
tcaccaagtgggttccggaagtaatgaccatag

SEQ ID NO: 168557 - DNA, 33 bp, Homo sapien
agaggcctccaactaccgctccagtggctgaaa

SEQ ID NO: 168558 - DNA, 33 bp, Homo sapien
agaggcctccaactactgctccagtggctgaaa

SEQ ID NO: 168559 - DNA, 33 bp, Homo sapien
atagtgtcttcccttcaaaattgccaaaagcaa

SEQ ID NO: 168560 - DNA, 33 bp, Homo sapien
atagtgtcttcccttccaaattgccaaaagcaa

SEQ ID NO: 168561 - DNA, 33 bp, Homo sapien
atgagcaggacaaccacatagaagtcagcccct

SEQ ID NO: 168562 - DNA, 33 bp, Homo sapien
atgagcaggacaaccatatagaagtcagcccct

SEQ ID NO: 168563 - DNA, 33 bp, Homo sapien
cctggacccactttctcacctgcacacttgctc

SEQ ID NO: 168564 - DNA, 33 bp, Homo sapien
cctggacccactttcttacctgcacacttgctc

SEQ ID NO: 168565 - DNA, 33 bp, Homo sapien
aagattggcatttggaacgtggcaagccttgat

SEQ ID NO: 168566 - DNA, 33 bp, Homo sapien
aagattggcatttggagcgtggcaagccttgat

SEQ ID NO: 168567 - DNA, 33 bp, Homo sapien
cccaccccttcagtcaagttgatctatgactgc

SEQ ID NO: 168568 - DNA, 33 bp, Homo sapien
cccaccccttcagtcatgttgatctatgactgc

SEQ ID NO: 168569 - DNA, 33 bp, Homo sapien
ctctagaatgctcacaaggtccctcccgctaca

SEQ ID NO: 168570 - DNA, 33 bp, Homo sapien
ctctagaatgctcacagggtccctcccgctaca

SEQ ID NO: 168571 - DNA, 33 bp, Homo sapien
atgaataaaaagaaaactatgttgcacagaaag

SEQ ID NO: 168572 - DNA, 33 bp, Homo sapien
atgaataaaaagaaaagtatgttgcacagaaag

SEQ ID NO: 168573 - DNA, 33 bp, Homo sapien
caaagttctgattttcactcttgaggtctattt

SEQ ID NO: 168574 - DNA, 33 bp, Homo sapien
caaagttctgattttcgctcttgaggtctattt

SEQ ID NO: 168575 - DNA, 33 bp, Homo sapien
gaatgagaaaatgataaggcctcaaagcatagc

SEQ ID NO: 168576 - DNA, 33 bp, Homo sapien
gaatgagaaaatgatagggcctcaaagcatagc

SEQ ID NO: 168577 - DNA, 33 bp, Homo sapien
tatcttttcctgtttcaccaactccctcaccgg

SEQ ID NO: 168578 - DNA, 33 bp, Homo sapien
tatcttttcctgtttcgccaactccctcaccgg

SEQ ID NO: 168579 - DNA, 33 bp, Homo sapien
gtttatgcaccgctcaaaagtacctggcaggta

SEQ ID NO: 168580 - DNA, 33 bp, Homo sapien
gtttatgcaccgctcagaagtacctggcaggta

SEQ ID NO: 168581 - DNA, 33 bp, Homo sapien
gtgtatgcaaacaccacgtgaggcaaggttgcc

SEQ ID NO: 168582 - DNA, 33 bp, Homo sapien
gtgtatgcaaacaccatgtgaggcaaggttgcc

SEQ ID NO: 168583 - DNA, 33 bp, Homo sapien
ggaccctggaaatagaagagttttggctataag

SEQ ID NO: 168584 - DNA, 33 bp, Homo sapien
ggaccctggaaatagacgagttttggctataag

SEQ ID NO: 168585 - DNA, 33 bp, Homo sapien
gaagctcttgagtgagacctgcacacagaccag

SEQ ID NO: 168586 - DNA, 33 bp, Homo sapien
gaagctcttgagtgaggcctgcacacagaccag

SEQ ID NO: 168587 - DNA, 33 bp, Homo sapien
cactttgagtcactccactgcttaaaccacttc

SEQ ID NO: 168588 - DNA, 33 bp, Homo sapien
cactttgagtcactccgctgcttaaaccacttc

SEQ ID NO: 168589 - DNA, 33 bp, Homo sapien
accatctttttcatcaacggcagtcatctcctg

SEQ ID NO: 168590 - DNA, 33 bp, Homo sapien
accatctttttcatcagcggcagtcatctcctg

SEQ ID NO: 168591 - DNA, 33 bp, Homo sapien
ggggagctgacttggaaccaggctgtgtgggct

SEQ ID NO: 168592 - DNA, 33 bp, Homo sapien
ggggagctgacttggacccaggctgtgtgggct

SEQ ID NO: 168593 - DNA, 33 bp, Homo sapien
gaatttgctctggtacacttagctaggaagcag

SEQ ID NO: 168594 - DNA, 33 bp, Homo sapien
gaatttgctctggtacgcttagctaggaagcag

SEQ ID NO: 168595 - DNA, 33 bp, Homo sapien
gttttttctagctctcaagttcatggctctcaa

SEQ ID NO: 168596 - DNA, 33 bp, Homo sapien
gttttttctagctctcgagttcatggctctcaa

SEQ ID NO: 168597 - DNA, 33 bp, Homo sapien
cctccctgtgaaaaaaacagttgtctagcactc

SEQ ID NO: 168598 - DNA, 33 bp, Homo sapien
cctccctgtgaaaaaatcagttgtctagcactc

SEQ ID NO: 168599 - DNA, 33 bp, Homo sapien
gtctggactacagagtaacaaggagagagtgca

SEQ ID NO: 168600 - DNA, 33 bp, Homo sapien
gtctggactacagagtgacaaggagagagtgca

SEQ ID NO: 168601 - DNA, 33 bp, Homo sapien
tggggtcacaatgttaaggaaacagagttaggc

SEQ ID NO: 168602 - DNA, 33 bp, Homo sapien
tggggtcacaatgttagggaaacagagttaggc

SEQ ID NO: 168603 - DNA, 33 bp, Homo sapien
attaccaagaccagcagggggtgagaggaaggc

SEQ ID NO: 168604 - DNA, 33 bp, Homo sapien
attaccaagaccagcatggggtgagaggaaggc

SEQ ID NO: 168605 - DNA, 33 bp, Homo sapien
gttatacattgagtaaacctccattttcccctc

SEQ ID NO: 168606 - DNA, 33 bp, Homo sapien
gttatacattgagtaaccctccattttcccctc

SEQ ID NO: 168607 - DNA, 33 bp, Homo sapien
gcactgttaactccagacactagagcacagatc

SEQ ID NO: 168608 - DNA, 33 bp, Homo sapien
gcactgttaactccaggcactagagcacagatc

SEQ ID NO: 168609 - DNA, 33 bp, Homo sapien
gatactcctcaactgacgacagagctgcatccc

SEQ ID NO: 168610 - DNA, 33 bp, Homo sapien
gatactcctcaactgatgacagagctgcatccc

SEQ ID NO: 168611 - DNA, 33 bp, Homo sapien
tgcctacctagtggtcaatgctctttcctggtt

SEQ ID NO: 168612 - DNA, 33 bp, Homo sapien
tgcctacctagtggtcgatgctctttcctggtt

SEQ ID NO: 168613 - DNA, 33 bp, Homo sapien
tcaccctttctccaccaatgcaaatcttaccca

SEQ ID NO: 168614 - DNA, 33 bp, Homo sapien
tcaccctttctccaccgatgcaaatcttaccca

SEQ ID NO: 168615 - DNA, 33 bp, Homo sapien
gatgtgggtcactgggaaatgttcttcaggtgg

SEQ ID NO: 168616 - DNA, 33 bp, Homo sapien
gatgtgggtcactggggaatgttcttcaggtgg

SEQ ID NO: 168617 - DNA, 33 bp, Homo sapien
aattgtatgccctttgcaatatgaattttcagt

SEQ ID NO: 168618 - DNA, 33 bp, Homo sapien
aattgtatgccctttgtaatatgaattttcagt

SEQ ID NO: 168619 - DNA, 33 bp, Homo sapien
tggggaaattctggaaaatcggttttcatggtt

SEQ ID NO: 168620 - DNA, 33 bp, Homo sapien
tggggaaattctggaatatcggttttcatggtt

SEQ ID NO: 168621 - DNA, 33 bp, Homo sapien
ctcccatctcacatacaaggaaactgaagtgtc

SEQ ID NO: 168622 - DNA, 33 bp, Homo sapien
ctcccatctcacatacgaggaaactgaagtgtc

SEQ ID NO: 168623 - DNA, 33 bp, Homo sapien
acattgaggatcttcaaataaagtctgccattt

SEQ ID NO: 168624 - DNA, 33 bp, Homo sapien
acattgaggatcttcagataaagtctgccattt

SEQ ID NO: 168625 - DNA, 33 bp, Homo sapien; identical to SEQ ID NO: 168623

SEQ ID NO: 168626 - DNA, 33 bp, Homo sapien; identical to SEQ ID NO: 168624

SEQ ID NO: 168627 - DNA, 33 bp, Homo sapien
agagcattgaacacacgccagcataggactggc

SEQ ID NO: 168628 - DNA, 33 bp, Homo sapien
agagcattgaacacactccagcataggactggc

SEQ ID NO: 168629 - DNA, 33 bp, Homo sapien
ctgtgcttggccttaactgacaaggggagacca

SEQ ID NO: 168630 - DNA, 33 bp, Homo sapien
ctgtgcttggccttaattgacaaggggagacca

SEQ ID NO: 168631 - DNA, 33 bp, Homo sapien
ctagaagcacagaatgaagaggttgaaccagac

SEQ ID NO: 168632 - DNA, 33 bp, Homo sapien
ctagaagcacagaatggagaggttgaaccagac

SEQ ID NO: 168633 - DNA, 33 bp, Homo sapien
acgatacaatgaagagaaggatgatgatttcct

SEQ ID NO: 168634 - DNA, 33 bp, Homo sapien
acgatacaatgaagaggaggatgatgatttcct

SEQ ID NO: 168635 - DNA, 33 bp, Homo sapien
acgagctttggactctaacggatggtgagggaa

SEQ ID NO: 168636 - DNA, 33 bp, Homo sapien
acgagctttggactctgacggatggtgagggaa

SEQ ID NO: 168637 - DNA, 33 bp, Homo sapien
tgagcctgagagagggacaccaatgggcctatt

SEQ ID NO: 168638 - DNA, 33 bp, Homo sapien
tgagcctgagagaggggcaccaatgggcctatt

SEQ ID NO: 168639 - DNA, 33 bp, Homo sapien
ttcagtgtgccatttaaccgttctgtgcctcag

SEQ ID NO: 168640 - DNA, 33 bp, Homo sapien
ttcagtgtgccatttacccgttctgtgcctcag

SEQ ID NO: 168641 - DNA, 33 bp, Homo sapien
ggaaacaagatttagaagagccacctggagaca

SEQ ID NO: 168642 - DNA, 33 bp, Homo sapien
ggaaacaagatttagacgagccacctggagaca

SEQ ID NO: 168643 - DNA, 33 bp, Homo sapien
aaggaaaccatgtgtacgggtgtatttgtgtgt

SEQ ID NO: 168644 - DNA, 33 bp, Homo sapien
aaggaaaccatgtgtatgggtgtatttgtgtgt

SEQ ID NO: 168645 - DNA, 33 bp, Homo sapien
tgctcatataacatgacgctggtacctgacaca

SEQ ID NO: 168646 - DNA, 33 bp, Homo sapien
tgctcatataacatgatgctggtacctgacaca

SEQ ID NO: 168647 - DNA, 33 bp, Homo sapien
ccctcctgaagatcccactgacgggtctatgga

SEQ ID NO: 168648 - DNA, 33 bp, Homo sapien
ccctcctgaagatcccgctgacgggtctatgga

SEQ ID NO: 168649 - DNA, 33 bp, Homo sapien
atagccaatgactgaccgtagaacagggaaacc

SEQ ID NO: 168650 - DNA, 33 bp, Homo sapien
atagccaatgactgactgtagaacagggaaacc

SEQ ID NO: 168651 - DNA, 33 bp, Homo sapien
taagatagagctagaccaaagcacatgtgctgt

SEQ ID NO: 168652 - DNA, 33 bp, Homo sapien
taagatagagctagacgaaagcacatgtgctgt

SEQ ID NO: 168653 - DNA, 33 bp, Homo sapien
gtacacaacattctgcgagtggtagtgctggga

SEQ ID NO: 168654 - DNA, 33 bp, Homo sapien
gtacacaacattctgctagtggtagtgctggga

SEQ ID NO: 168655 - DNA, 33 bp, Homo sapien
cctgcattagaaaaccagaatcacgttgcccaa

SEQ ID NO: 168656 - DNA, 33 bp, Homo sapien
cctgcattagaaaaccggaatcacgttgcccaa

SEQ ID NO: 168657 - DNA, 33 bp, Homo sapien
ttgataaccaacagtaccctgatgttctcagtt

SEQ ID NO: 168658 - DNA, 33 bp, Homo sapien
ttgataaccaacagtatcctgatgttctcagtt

SEQ ID NO: 168659 - DNA, 33 bp, Homo sapien
tgtcctgatgcaccaacatgatcaggcccttat

SEQ ID NO: 168660 - DNA, 33 bp, Homo sapien
tgtcctgatgcaccaagatgatcaggcccttat

SEQ ID NO: 168661 - DNA, 33 bp, Homo sapien
gtttaatccagatttcaaggggttgccacttgt

SEQ ID NO: 168662 - DNA, 33 bp, Homo sapien
gtttaatccagatttcgaggggttgccacttgt

SEQ ID NO: 168663 - DNA, 33 bp, Homo sapien
tggggcgccctctggacaaaattctgggaagca

SEQ ID NO: 168664 - DNA, 33 bp, Homo sapien
tggggcgccctctggataaaattctgggaagca

SEQ ID NO: 168665 - DNA, 33 bp, Homo sapien
agatgagatgagctaacagttgtaaagccctct

SEQ ID NO: 168666 - DNA, 33 bp, Homo sapien
agatgagatgagctaatagttgtaaagccctct

SEQ ID NO: 168667 - DNA, 33 bp, Homo sapien
gtgtctggacttcctacggccagaagcccacct

SEQ ID NO: 168668 - DNA, 33 bp, Homo sapien
gtgtctggacttcctatggccagaagcccacct

SEQ ID NO: 168669 - DNA, 33 bp, Homo sapien
gacctgttagtgtgaaccctgaccctgccttag

SEQ ID NO: 168670 - DNA, 33 bp, Homo sapien
gacctgttagtgtgaagcctgaccctgccttag

SEQ ID NO: 168671 - DNA, 33 bp, Homo sapien
aaatcataaaaattaaacgaactgtatcaagca

SEQ ID NO: 168672 - DNA, 33 bp, Homo sapien
aaatcataaaaattaagcgaactgtatcaagca

SEQ ID NO: 168673 - DNA, 33 bp, Homo sapien
ctgccagttctgctaaccaaagtgagaacttat

SEQ ID NO: 168674 - DNA, 33 bp, Homo sapien
ctgccagttctgctaatcaaagtgagaacttat

SEQ ID NO: 168675 - DNA, 33 bp, Homo sapien
actttgctgacttcccactaggctgtgagcttt

SEQ ID NO: 168676 - DNA, 33 bp, Homo sapien
actttgctgacttcccgctaggctgtgagcttt

SEQ ID NO: 168677 - DNA, 33 bp, Homo sapien
ggaaaggaaacggcacaagggaattatttggct

SEQ ID NO: 168678 - DNA, 33 bp, Homo sapien
ggaaaggaaacggcacgagggaattatttggct

SEQ ID NO: 168679 - DNA, 33 bp, Homo sapien
gaattatttggcttgaaacagatattttatctt

SEQ ID NO: 168680 - DNA, 33 bp, Homo sapien
gaattatttggcttgatacagatattttatctt

SEQ ID NO: 168681 - DNA, 33 bp, Homo sapien
tatgctttttcatctcacattttcattcagtat

SEQ ID NO: 168682 - DNA, 33 bp, Homo sapien
tatgctttttcatctctcattttcattcagtat

SEQ ID NO: 168683 - DNA, 33 bp, Homo sapien
actttttattacaggaactagcacaaaataggt

SEQ ID NO: 168684 - DNA, 33 bp, Homo sapien
actttttattacaggacctagcacaaaataggt

SEQ ID NO: 168685 - DNA, 33 bp, Homo sapien
gtgacttggtacagaagaaaagctaactgatac

SEQ ID NO: 168686 - DNA, 33 bp, Homo sapien
gtgacttggtacagaataaaagctaactgatac

SEQ ID NO: 168687 - DNA, 33 bp, Homo sapien
tggagaaaataacaccaacctgatagcattgtt

SEQ ID NO: 168688 - DNA, 33 bp, Homo sapien
tggagaaaataacaccgacctgatagcattgtt

SEQ ID NO: 168689 - DNA, 33 bp, Homo sapien
accacagccgctacaccgagtcctctgaacaag

SEQ ID NO: 168690 - DNA, 33 bp, Homo sapien
accacagccgctacactgagtcctctgaacaag

SEQ ID NO: 168691 - DNA, 33 bp, Homo sapien
tttcttagagcaggaacggagaacatgctagag

SEQ ID NO: 168692 - DNA, 33 bp, Homo sapien
tttcttagagcaggaatggagaacatgctagag

SEQ ID NO: 168693 - DNA, 33 bp, Homo sapien
tgacaggagcagttgacgtgacactcaaagtgg

SEQ ID NO: 168694 - DNA, 33 bp, Homo sapien
tgacaggagcagttgatgtgacactcaaagtgg

SEQ ID NO: 168695 - DNA, 33 bp, Homo sapien
ctgcagagcctgagaacaaaatgaggactctgg

SEQ ID NO: 168696 - DNA, 33 bp, Homo sapien
ctgcagagcctgagaagaaaatgaggactctgg

SEQ ID NO: 168697 - DNA, 33 bp, Homo sapien
agataagcaatattaccacaattacagctcatc

SEQ ID NO: 168698 - DNA, 33 bp, Homo sapien
agataagcaatattacgacaattacagctcatc

SEQ ID NO: 168699 - DNA, 33 bp, Homo sapien
tctggttgtatcccccaccttttcaaactttag

SEQ ID NO: 168700 - DNA, 33 bp, Homo sapien
tctggttgtatccccctccttttcaaactttag

SEQ ID NO: 168701 - DNA, 33 bp, Homo sapien
acttgatgtcagttacaagaaaacctgggtctc

SEQ ID NO: 168702 - DNA, 33 bp, Homo sapien
acttgatgtcagttactagaaaacctgggtctc

SEQ ID NO: 168703 - DNA, 33 bp, Homo sapien
gtgggattcggtgatcgagtggggtagacaggg

SEQ ID NO: 168704 - DNA, 33 bp, Homo sapien
gtgggattcggtgatctagtggggtagacaggg

SEQ ID NO: 168705 - DNA, 33 bp, Homo sapien
tcctatagcaacccagactgaaacctggcctct

SEQ ID NO: 168706 - DNA, 33 bp, Homo sapien
tcctatagcaacccaggctgaaacctggcctct

SEQ ID NO: 168707 - DNA, 33 bp, Homo sapien
gctccctcatccatcaaactagactttatgaca

SEQ ID NO: 168708 - DNA, 33 bp, Homo sapien
gctccctcatccatcagactagactttatgaca

SEQ ID NO: 168709 - DNA, 33 bp, Homo sapien
cctgtagcttggaaaccagtccggagctgctgg

SEQ ID NO: 168710 - DNA, 33 bp, Homo sapien
cctgtagcttggaaactagtccggagctgctgg

SEQ ID NO: 168711 - DNA, 33 bp, Homo sapien
ttcagagactgggggacgctccaaacaaaaagg

SEQ ID NO: 168712 - DNA, 33 bp, Homo sapien
ttcagagactgggggatgctccaaacaaaaagg

SEQ ID NO: 168713 - DNA, 33 bp, Homo sapien
ggtcataatgaagggacactttccccaatggac

SEQ ID NO: 168714 - DNA, 33 bp, Homo sapien
ggtcataatgaagggatactttccccaatggac

SEQ ID NO: 168715 - DNA, 33 bp, Homo sapien
aaaggaaaaggtggtcaaagaaggaggtccatt

SEQ ID NO: 168716 - DNA, 33 bp, Homo sapien
aaaggaaaaggtggtcgaagaaggaggtccatt

SEQ ID NO: 168717 - DNA, 33 bp, Homo sapien
tccaggttcttcagggaaatcaacctttgctgt

SEQ ID NO: 168718 - DNA, 33 bp, Homo sapien
tccaggttcttcaggggaatcaacctttgctgt

SEQ ID NO: 168719 - DNA, 33 bp, Homo sapien
aaaagttgaatagtcaaatgaataaggacagct

SEQ ID NO: 168720 - DNA, 33 bp, Homo sapien
aaaagttgaatagtcagatgaataaggacagct

SEQ ID NO: 168721 - DNA, 33 bp, Homo sapien
actggaagagacttcaacagccattgaggtcag

SEQ ID NO: 168722 - DNA, 33 bp, Homo sapien
actggaagagacttcagcagccattgaggtcag

SEQ ID NO: 168723 - DNA, 33 bp, Homo sapien
aatcccagtgcctaaccgggtgccttcagtgtt

SEQ ID NO: 168724 - DNA, 33 bp, Homo sapien
aatcccagtgcctaactgggtgccttcagtgtt

SEQ ID NO: 168725 - DNA, 33 bp, Homo sapien
atatctatctcttgagacagttctgagtcttaa

SEQ ID NO: 168726 - DNA, 33 bp, Homo sapien
atatctatctcttgagtcagttctgagtcttaa

SEQ ID NO: 168727 - DNA, 33 bp, Homo sapien
tgcgctaattcctagacaatgtgagggcactcc

SEQ ID NO: 168728 - DNA, 33 bp, Homo sapien
tgcgctaattcctagataatgtgagggcactcc

SEQ ID NO: 168729 - DNA, 33 bp, Homo sapien
acttgcatttggtgtccctacttgctaaaaaat

SEQ ID NO: 168730 - DNA, 33 bp, Homo sapien
acttgcatttggtgtctctacttgctaaaaaat

SEQ ID NO: 168731 - DNA, 33 bp, Homo sapien
ctgcgtttgccctgacgctgttggttgcccctc

SEQ ID NO: 168732 - DNA, 33 bp, Homo sapien
ctgcgtttgccctgactctgttggttgcccctc

SEQ ID NO: 168733 - DNA, 33 bp, Homo sapien
tgtcttcctggagtctcactcttgagtcctgat

SEQ ID NO: 168734 - DNA, 33 bp, Homo sapien
tgtcttcctggagtcttactcttgagtcctgat

SEQ ID NO: 168735 - DNA, 33 bp, Homo sapien
accgacatttttctcaccctgaacaagactacg

SEQ ID NO: 168736 - DNA, 33 bp, Homo sapien
accgacatttttctcatcctgaacaagactacg

SEQ ID NO: 168737 - DNA, 33 bp, Homo sapien
aatttctctaaacacaacgaggctgagatgacg

SEQ ID NO: 168738 - DNA, 33 bp, Homo sapien
aatttctctaaacacaccgaggctgagatgacg

SEQ ID NO: 168739 - DNA, 33 bp, Homo sapien
acccatgataaacaaacagcaaaattttaagta

SEQ ID NO: 168740 - DNA, 33 bp, Homo sapien
acccatgataaacaaatagcaaaattttaagta

SEQ ID NO: 168741 - DNA, 33 bp, Homo sapien
aagatatgaaccaagaagaaatggagactatgc

SEQ ID NO: 168742 - DNA, 33 bp, Homo sapien
aagatatgaaccaagaggaaatggagactatgc

SEQ ID NO: 168743 - DNA, 33 bp, Homo sapien
tatacacgtatgggaacgctaggtaacaacaca

SEQ ID NO: 168744 - DNA, 33 bp, Homo sapien
tatacacgtatgggaatgctaggtaacaacaca

SEQ ID NO: 168745 - DNA, 33 bp, Homo sapien
tgctggctgggaagacacaggagttccctattg

SEQ ID NO: 168746 - DNA, 33 bp, Homo sapien
tgctggctgggaagacgcaggagttccctattg

SEQ ID NO: 168747 - DNA, 33 bp, Homo sapien
ggcgatcctgcccctcagagaatttatggtcca

SEQ ID NO: 168748 - DNA, 33 bp, Homo sapien
ggcgatcctgcccctcggagaatttatggtcca

SEQ ID NO: 168749 - DNA, 33 bp, Homo sapien
tctggctctttctgaccctgctttagaatgaga

SEQ ID NO: 168750 - DNA, 33 bp, Homo sapien
tctggctctttctgactctgctttagaatgaga

SEQ ID NO: 168751 - DNA, 33 bp, Homo sapien
gtgaggagggtacaaacttacaggacagcatat

SEQ ID NO: 168752 - DNA, 33 bp, Homo sapien
gtgaggagggtacaaagttacaggacagcatat

SEQ ID NO: 168753 - DNA, 33 bp, Homo sapien
tttgatataggagctcactggactaacagtggg

SEQ ID NO: 168754 - DNA, 33 bp, Homo sapien
tttgatataggagctcgctggactaacagtggg

SEQ ID NO: 168755 - DNA, 33 bp, Homo sapien
ctacgtcaaacctgcaaaagaatcacccagtcc

SEQ ID NO: 168756 - DNA, 33 bp, Homo sapien
ctacgtcaaacctgcagaagaatcacccagtcc

SEQ ID NO: 168757 - DNA, 33 bp, Homo sapien
ggatgatccttgaaaacatgggctaaagtgaaa

SEQ ID NO: 168758 - DNA, 33 bp, Homo sapien
ggatgatccttgaaaatatgggctaaagtgaaa

SEQ ID NO: 168759 - DNA, 33 bp, Homo sapien
gaactgttaatcaaaaaacattattcggagagt

SEQ ID NO: 168760 - DNA, 33 bp, Homo sapien
gaactgttaatcaaaatacattattcggagagt

SEQ ID NO: 168761 - DNA, 33 bp, Homo sapien
ggacagcctggacccaaaagaattcactgttat

SEQ ID NO: 168762 - DNA, 33 bp, Homo sapien
ggacagcctggacccagaagaattcactgttat

SEQ ID NO: 168763 - DNA, 33 bp, Homo sapien
agaaagtttagtacaaacaaactagaagcaaag

SEQ ID NO: 168764 - DNA, 33 bp, Homo sapien
agaaagtttagtacaagcaaactagaagcaaag

SEQ ID NO: 168765 - DNA, 33 bp, Homo sapien
tccttttctggaggtgacaatttttcaaaaaca

SEQ ID NO: 168766 - DNA, 33 bp, Homo sapien
tccttttctggaggtgtcaatttttcaaaaaca

SEQ ID NO: 168767 - DNA, 33 bp, Homo sapien
ttctgtttgcagtaacagggccagtccactttt

SEQ ID NO: 168768 - DNA, 33 bp, Homo sapien
ttctgtttgcagtaacggggccagtccactttt

SEQ ID NO: 168769 - DNA, 33 bp, Homo sapien
tcacttattaacttcacaaccaatgactgtttc

SEQ ID NO: 168770 - DNA, 33 bp, Homo sapien
tcacttattaacttcagaaccaatgactgtttc

SEQ ID NO: 168771 - DNA, 33 bp, Homo sapien
gttttgatgacattcacgaggcttccaagatga

SEQ ID NO: 168772 - DNA, 33 bp, Homo sapien
gttttgatgacattcaggaggcttccaagatga

SEQ ID NO: 168773 - DNA, 33 bp, Homo sapien
tgtggtatatcctgcaatcctgaaagttttcta

SEQ ID NO: 168774 - DNA, 33 bp, Homo sapien
tgtggtatatcctgcagtcctgaaagttttcta

SEQ ID NO: 168775 - DNA, 33 bp, Homo sapien
gactccaaacctgtacactttaagagcccactg

SEQ ID NO: 168776 - DNA, 33 bp, Homo sapien
gactccaaacctgtacgctttaagagcccactg

SEQ ID NO: 168777 - DNA, 33 bp, Homo sapien
ggacccaattggaggaatcatacagtcagtcgg

SEQ ID NO: 168778 - DNA, 33 bp, Homo sapien
ggacccaattggaggattcatacagtcagtcgg

SEQ ID NO: 168779 - DNA, 33 bp, Homo sapien
aagttcagggagaagaagaccagcctgcggccc

SEQ ID NO: 168780 - DNA, 33 bp, Homo sapien
aagttcagggagaagacgaccagcctgcggccc

SEQ ID NO: 168781 - DNA, 33 bp, Homo sapien
agtgctggccagtgcccgatgtcctttttctaa

SEQ ID NO: 168782 - DNA, 33 bp, Homo sapien
agtgctggccagtgcctgatgtcctttttctaa

SEQ ID NO: 168783 - DNA, 33 bp, Homo sapien
ctttgtctaggacctaataatagcttaaaaact

SEQ ID NO: 168784 - DNA, 33 bp, Homo sapien
ctttgtctaggacctactaatagcttaaaaact

SEQ ID NO: 168785 - DNA, 33 bp, Homo sapien
gctagaacacaagggcagcagatgagcgagcca

SEQ ID NO: 168786 - DNA, 33 bp, Homo sapien
gctagaacacaagggcggcagatgagcgagcca

SEQ ID NO: 168787 - DNA, 33 bp, Homo sapien
gaatgactctggccatcacaagtactgggttcg

SEQ ID NO: 168788 - DNA, 33 bp, Homo sapien
gaatgactctggccatgacaagtactgggttcg

SEQ ID NO: 168789 - DNA, 33 bp, Homo sapien
cagacatgatcatggactacttgttttttgttg

SEQ ID NO: 168790 - DNA, 33 bp, Homo sapien
cagacatgatcatggagtacttgttttttgttg

SEQ ID NO: 168791 - DNA, 33 bp, Homo sapien
gccagacccaagccaccgacagttttagcatac

SEQ ID NO: 168792 - DNA, 33 bp, Homo sapien
gccagacccaagccactgacagttttagcatac

SEQ ID NO: 168793 - DNA, 33 bp, Homo sapien
aatacaatggttgtaacaaaaacgcacacttaa

SEQ ID NO: 168794 - DNA, 33 bp, Homo sapien
aatacaatggttgtaagaaaaacgcacacttaa

SEQ ID NO: 168795 - DNA, 33 bp, Homo sapien
tgcaatagtagagaaaatagttccaagtgacca

SEQ ID NO: 168796 - DNA, 33 bp, Homo sapien
tgcaatagtagagaaactagttccaagtgacca

SEQ ID NO: 168797 - DNA, 33 bp, Homo sapien
agtagatgaagccagaagacttacgatatagcc

SEQ ID NO: 168798 - DNA, 33 bp, Homo sapien
agtagatgaagccagaggacttacgatatagcc

SEQ ID NO: 168799 - DNA, 33 bp, Homo sapien
aaatgtgatactggaaatgaaatataaatagaa

SEQ ID NO: 168800 - DNA, 33 bp, Homo sapien
aaatgtgatactggaactgaaatataaatagaa

SEQ ID NO: 168801 - DNA, 33 bp, Homo sapien
tttgtcaagaaaagggcacttactgaggcaatt

SEQ ID NO: 168802 - DNA, 33 bp, Homo sapien
tttgtcaagaaaagggtacttactgaggcaatt

SEQ ID NO: 168803 - DNA, 33 bp, Homo sapien
gaaggttgtatttttaaattgcatgttgattca

SEQ ID NO: 168804 - DNA, 33 bp, Homo sapien
gaaggttgtatttttagattgcatgttgattca

SEQ ID NO: 168805 - DNA, 33 bp, Homo sapien
aaatgaaactatcaacgatccttttactaagaa

SEQ ID NO: 168806 - DNA, 33 bp, Homo sapien
aaatgaaactatcaactatccttttactaagaa

SEQ ID NO: 168807 - DNA, 33 bp, Homo sapien
ttggcaatttctaagacactttctcgctctgga

SEQ ID NO: 168808 - DNA, 33 bp, Homo sapien
ttggcaatttctaagatactttctcgctctgga

SEQ ID NO: 168809 - DNA, 33 bp, Homo sapien
atgagtggttagtaaacgtgaaagcctaacaca

SEQ ID NO: 168810 - DNA, 33 bp, Homo sapien
atgagtggttagtaaatgtgaaagcctaacaca

SEQ ID NO: 168811 - DNA, 33 bp, Homo sapien
acaaatttgcgagccacgttaagattttggact

SEQ ID NO: 168812 - DNA, 33 bp, Homo sapien
acaaatttgcgagccatgttaagattttggact

SEQ ID NO: 168813 - DNA, 33 bp, Homo sapien
cctgccgtgagcaaggacactggaatgctgctg

SEQ ID NO: 168814 - DNA, 33 bp, Homo sapien
cctgccgtgagcaaggccactggaatgctgctg

SEQ ID NO: 168815 - DNA, 33 bp, Homo sapien
atggcacagagaactcagagactgctatattta

SEQ ID NO: 168816 - DNA, 33 bp, Homo sapien
atggcacagagaactcggagactgctatattta

SEQ ID NO: 168817 - DNA, 33 bp, Homo sapien
aaaaccagagcatttaccattacctcccacctc

SEQ ID NO: 168818 - DNA, 33 bp, Homo sapien
aaaaccagagcatttagcattacctcccacctc

SEQ ID NO: 168819 - DNA, 33 bp, Homo sapien
tttgtgtttctgaagaccaaagttagagtactc

SEQ ID NO: 168820 - DNA, 33 bp, Homo sapien
tttgtgtttctgaagatcaaagttagagtactc

SEQ ID NO: 168821 - DNA, 33 bp, Homo sapien
tgtaaaacagacatacagtataattcagtatta

SEQ ID NO: 168822 - DNA, 33 bp, Homo sapien
tgtaaaacagacatacggtataattcagtatta

SEQ ID NO: 168823 - DNA, 33 bp, Homo sapien
ccattacttaacaacaatgtgggagaagccaat

SEQ ID NO: 168824 - DNA, 33 bp, Homo sapien
ccattacttaacaacagtgtgggagaagccaat

SEQ ID NO: 168825 - DNA, 33 bp, Homo sapien
gaagcagacaacaatccgatggagaaagtaaaa

SEQ ID NO: 168826 - DNA, 33 bp, Homo sapien
gaagcagacaacaatctgatggagaaagtaaaa

SEQ ID NO: 168827 - DNA, 33 bp, Homo sapien
agagccattaaaaaaacctctcaaagtagatat

SEQ ID NO: 168828 - DNA, 33 bp, Homo sapien
agagccattaaaaaaatctctcaaagtagatat

SEQ ID NO: 168829 - DNA, 33 bp, Homo sapien
cagacatgaagctaaccaatccaatattaattt

SEQ ID NO: 168830 - DNA, 33 bp, Homo sapien
cagacatgaagctaactaatccaatattaattt

SEQ ID NO: 168831 - DNA, 33 bp, Homo sapien
gagttcgcctatagcaacaaaacctttctaaaa

SEQ ID NO: 168832 - DNA, 33 bp, Homo sapien
gagttcgcctatagcagcaaaacctttctaaaa

SEQ ID NO: 168833 - DNA, 33 bp, Homo sapien
atttaaaaagcactagccctctttgaaagactc

SEQ ID NO: 168834 - DNA, 33 bp, Homo sapien
atttaaaaagcactaggcctctttgaaagactc

SEQ ID NO: 168835 - DNA, 33 bp, Homo sapien
gattttttttctgctgcagatccaagtattgtt

SEQ ID NO: 168836 - DNA, 33 bp, Homo sapien
gattttttttctgctgtagatccaagtattgtt

SEQ ID NO: 168837 - DNA, 33 bp, Homo sapien
tgctgttataacccaaaagcatctatacgacaa

SEQ ID NO: 168838 - DNA, 33 bp, Homo sapien
tgctgttataacccaacagcatctatacgacaa

SEQ ID NO: 168839 - DNA, 33 bp, Homo sapien
gtgttagacactcttacattcagctaaaaatat

SEQ ID NO: 168840 - DNA, 33 bp, Homo sapien
gtgttagacactcttatattcagctaaaaatat

SEQ ID NO: 168841 - DNA, 33 bp, Homo sapien
attctctaaccttcgaaaacacctctgtatagg

SEQ ID NO: 168842 - DNA, 33 bp, Homo sapien
attctctaaccttcgagaacacctctgtatagg

SEQ ID NO: 168843 - DNA, 33 bp, Homo sapien
ttagagcacagtgaaaagtagtcattgaaatat

SEQ ID NO: 168844 - DNA, 33 bp, Homo sapien
ttagagcacagtgaaaggtagtcattgaaatat

SEQ ID NO: 168845 - DNA, 33 bp, Homo sapien
gtcaggccacttggccacatcgtcaatggctgg

SEQ ID NO: 168846 - DNA, 33 bp, Homo sapien
gtcaggccacttggccgcatcgtcaatggctgg

SEQ ID NO: 168847 - DNA, 33 bp, Homo sapien
gcctgtaccctgtcacaaaaagaaagaagaaag

SEQ ID NO: 168848 - DNA, 33 bp, Homo sapien
gcctgtaccctgtcacgaaaagaaagaagaaag

SEQ ID NO: 168849 - DNA, 33 bp, Homo sapien
gattgtaccagtaccaacttcttagttttgata

SEQ ID NO: 168850 - DNA, 33 bp, Homo sapien
gattgtaccagtaccagcttcttagttttgata

SEQ ID NO: 168851 - DNA, 33 bp, Homo sapien
tctgtgcctctagactgaacttcacaagtgctt

SEQ ID NO: 168852 - DNA, 33 bp, Homo sapien
tctgtgcctctagacttaacttcacaagtgctt

SEQ ID NO: 168853 - DNA, 33 bp, Homo sapien
tgacagtgtctttcaacgaatagttccatttca

SEQ ID NO: 168854 - DNA, 33 bp, Homo sapien
tgacagtgtctttcaatgaatagttccatttca

SEQ ID NO: 168855 - DNA, 33 bp, Homo sapien
atcctgcagtaaacaaaataatgaagtattgat

SEQ ID NO: 168856 - DNA, 33 bp, Homo sapien
atcctgcagtaaacaagataatgaagtattgat

SEQ ID NO: 168857 - DNA, 33 bp, Homo sapien
aggaaatttgaatttgaacgtactggctggtat

SEQ ID NO: 168858 - DNA, 33 bp, Homo sapien
aggaaatttgaatttggacgtactggctggtat

SEQ ID NO: 168859 - DNA, 33 bp, Homo sapien
ttgcaaaatatgtcaaaaacgatcagttaagac

SEQ ID NO: 168860 - DNA, 33 bp, Homo sapien
ttgcaaaatatgtcaacaacgatcagttaagac

SEQ ID NO: 168861 - DNA, 33 bp, Homo sapien
ttctgctgtaatcacaaatacctaatggaggct

SEQ ID NO: 168862 - DNA, 33 bp, Homo sapien
ttctgctgtaatcacagatacctaatggaggct

SEQ ID NO: 168863 - DNA, 33 bp, Homo sapien
ttatcattcctgcaaaagtcaggccgcaggtga

SEQ ID NO: 168864 - DNA, 33 bp, Homo sapien
ttatcattcctgcaaatgtcaggccgcaggtga

SEQ ID NO: 168865 - DNA, 33 bp, Homo sapien
ctagctggaaaatggaagagacagaaagcgaac

SEQ ID NO: 168866 - DNA, 33 bp, Homo sapien
ctagctggaaaatggacgagacagaaagcgaac

SEQ ID NO: 168867 - DNA, 33 bp, Homo sapien
tcctcatttccatttcaagtcatgtacctcctt

SEQ ID NO: 168868 - DNA, 33 bp, Homo sapien
tcctcatttccatttcgagtcatgtacctcctt

SEQ ID NO: 168869 - DNA, 33 bp, Homo sapien
tatgatgaggcctgaactaaagttaacaatggc

SEQ ID NO: 168870 - DNA, 33 bp, Homo sapien
tatgatgaggcctgaagtaaagttaacaatggc

SEQ ID NO: 168871 - DNA, 33 bp, Homo sapien
gctcccaggcctcctggagaatttgctcctgag

SEQ ID NO: 168872 - DNA, 33 bp, Homo sapien
gctcccaggcctcctgtagaatttgctcctgag

SEQ ID NO: 168873 - DNA, 33 bp, Homo sapien
tcagagagcttatggactcaggcccttttttct

SEQ ID NO: 168874 - DNA, 33 bp, Homo sapien
tcagagagcttatggagtcaggcccttttttct

SEQ ID NO: 168875 - DNA, 33 bp, Homo sapien
cagggctggtgcaagcccatgctcagctgaact

SEQ ID NO: 168876 - DNA, 33 bp, Homo sapien
cagggctggtgcaagctcatgctcagctgaact

SEQ ID NO: 168877 - DNA, 33 bp, Homo sapien
tggcagatgggagttcgaatccttttatttttg

SEQ ID NO: 168878 - DNA, 33 bp, Homo sapien
tggcagatgggagttctaatccttttatttttg

SEQ ID NO: 168879 - DNA, 33 bp, Homo sapien
ctcttcctcctgaatccctgtcatggtcaacag

SEQ ID NO: 168880 - DNA, 33 bp, Homo sapien
ctcttcctcctgaatctctgtcatggtcaacag

SEQ ID NO: 168881 - DNA, 33 bp, Homo sapien
acccaacacttgataccctgtgggcagcaacag

SEQ ID NO: 168882 - DNA, 33 bp, Homo sapien
acccaacacttgatactctgtgggcagcaacag

SEQ ID NO: 168883 - DNA, 33 bp, Homo sapien
cctggacgccctacaacgtcatggtcctggtga

SEQ ID NO: 168884 - DNA, 33 bp, Homo sapien
cctggacgccctacaatgtcatggtcctggtga

SEQ ID NO: 168885 - DNA, 33 bp, Homo sapien
cagtgcacagagttctgagaaagcattggggct

SEQ ID NO: 168886 - DNA, 33 bp, Homo sapien
cagtgcacagagttcttagaaagcattggggct

SEQ ID NO: 168887 - DNA, 33 bp, Homo sapien
ggcatattgctagcgcactagagggagaagggg

SEQ ID NO: 168888 - DNA, 33 bp, Homo sapien
ggcatattgctagcgctctagagggagaagggg

SEQ ID NO: 168889 - DNA, 33 bp, Homo sapien
gggtataaagggatagaccactactgaccagca

SEQ ID NO: 168890 - DNA, 33 bp, Homo sapien
gggtataaagggatagtccactactgaccagca

SEQ ID NO: 168891 - DNA, 33 bp, Homo sapien
atacacaaggaatgtcaccattggccttagaaa

SEQ ID NO: 168892 - DNA, 33 bp, Homo sapien
atacacaaggaatgtcgccattggccttagaaa

SEQ ID NO: 168893 - DNA, 33 bp, Homo sapien
attcagttccttacttcaaggcaggaaatggca

SEQ ID NO: 168894 - DNA, 33 bp, Homo sapien
attcagttccttacttgaaggcaggaaatggca

SEQ ID NO: 168895 - DNA, 33 bp, Homo sapien
aacatcagaggtcaccagagctcaagttttgga

SEQ ID NO: 168896 - DNA, 33 bp, Homo sapien
aacatcagaggtcaccggagctcaagttttgga

SEQ ID NO: 168897 - DNA, 33 bp, Homo sapien
catacagtacttcagaaagactttagggactga

SEQ ID NO: 168898 - DNA, 33 bp, Homo sapien
catacagtacttcagagagactttagggactga

SEQ ID NO: 168899 - DNA, 33 bp, Homo sapien
aatacagagcaaattacgtttagaaatattaag

SEQ ID NO: 168900 - DNA, 33 bp, Homo sapien
aatacagagcaaattaggtttagaaatattaag

SEQ ID NO: 168901 - DNA, 33 bp, Homo sapien
gaaaccagaagactacagagaagacggcaaaaa

SEQ ID NO: 168902 - DNA, 33 bp, Homo sapien
gaaaccagaagactacggagaagacggcaaaaa

SEQ ID NO: 168903 - DNA, 33 bp, Homo sapien
tagggatgtagcagtaactgtgttcacattagc

SEQ ID NO: 168904 - DNA, 33 bp, Homo sapien
tagggatgtagcagtatctgtgttcacattagc

SEQ ID NO: 168905 - DNA, 33 bp, Homo sapien
gtccttgaaggataggaaagtgttcagtagatg

SEQ ID NO: 168906 - DNA, 33 bp, Homo sapien
gtccttgaaggatagggaagtgttcagtagatg

SEQ ID NO: 168907 - DNA, 33 bp, Homo sapien
gaaggcacctttagcacgacaaaaatggaactc

SEQ ID NO: 168908 - DNA, 33 bp, Homo sapien
gaaggcacctttagcatgacaaaaatggaactc

SEQ ID NO: 168909 - DNA, 33 bp, Homo sapien
ggagttgattctggaacaggaaattgcccaaca

SEQ ID NO: 168910 - DNA, 33 bp, Homo sapien
ggagttgattctggaagaggaaattgcccaaca

SEQ ID NO: 168911 - DNA, 33 bp, Homo sapien
cagaacagggtgtgtgaactgaaatggctaggg

SEQ ID NO: 168912 - DNA, 33 bp, Homo sapien
cagaacagggtgtgtggactgaaatggctaggg

SEQ ID NO: 168913 - DNA, 33 bp, Homo sapien
agaaaaatgaagcacaaggagagagaacggctg

SEQ ID NO: 168914 - DNA, 33 bp, Homo sapien
agaaaaatgaagcacagggagagagaacggctg

SEQ ID NO: 168915 - DNA, 33 bp, Homo sapien
acgttctagatttctacggatagagtatgctta

SEQ ID NO: 168916 - DNA, 33 bp, Homo sapien
acgttctagatttctatggatagagtatgctta

SEQ ID NO: 168917 - DNA, 33 bp, Homo sapien
aaatattgagtgaggacggtgcttttttagtta

SEQ ID NO: 168918 - DNA, 33 bp, Homo sapien
aaatattgagtgaggatggtgcttttttagtta

SEQ ID NO: 168919 - DNA, 33 bp, Homo sapien
tagtactgaatacacaccctaaaatacacaata

SEQ ID NO: 168920 - DNA, 33 bp, Homo sapien
tagtactgaatacacatcctaaaatacacaata

SEQ ID NO: 168921 - DNA, 33 bp, Homo sapien
ttgagaggttttcataacaatggataatgtcca

SEQ ID NO: 168922 - DNA, 33 bp, Homo sapien
ttgagaggttttcataccaatggataatgtcca

SEQ ID NO: 168923 - DNA, 33 bp, Homo sapien
tccaggctcgacaacaatatgagacactgtctc

SEQ ID NO: 168924 - DNA, 33 bp, Homo sapien
tccaggctcgacaacagtatgagacactgtctc

SEQ ID NO: 168925 - DNA, 33 bp, Homo sapien
aaagaaaataaagccaagtcagtaacatgcttg

SEQ ID NO: 168926 - DNA, 33 bp, Homo sapien
aaagaaaataaagccacgtcagtaacatgcttg

SEQ ID NO: 168927 - DNA, 33 bp, Homo sapien
aaattgtagtagaaacagcattaatatttcaag

SEQ ID NO: 168928 - DNA, 33 bp, Homo sapien
aaattgtagtagaaacggcattaatatttcaag

SEQ ID NO: 168929 - DNA, 33 bp, Homo sapien
aatttcaaataaattaagtaggtactccaccct

SEQ ID NO: 168930 - DNA, 33 bp, Homo sapien
aatttcaaataaattaggtaggtactccaccct

SEQ ID NO: 168931 - DNA, 33 bp, Homo sapien
gagccaagaactttcacgtatcttgctcttcct

SEQ ID NO: 168932 - DNA, 33 bp, Homo sapien
gagccaagaactttcatgtatcttgctcttcct

SEQ ID NO: 168933 - DNA, 33 bp, Homo sapien
aaatggtcagaaagaacgatcaggttggagact

SEQ ID NO: 168934 - DNA, 33 bp, Homo sapien
aaatggtcagaaagaatgatcaggttggagact

SEQ ID NO: 168935 - DNA, 33 bp, Homo sapien
caggacaggcacatacaaagtccgaggctctgg

SEQ ID NO: 168936 - DNA, 33 bp, Homo sapien
caggacaggcacatacgaagtccgaggctctgg

SEQ ID NO: 168937 - DNA, 33 bp, Homo sapien
gggaggaggagagatacaaccgcgagggagtaa

SEQ ID NO: 168938 - DNA, 33 bp, Homo sapien
gggaggaggagagatagaaccgcgagggagtaa

SEQ ID NO: 168939 - DNA, 33 bp, Homo sapien
atacagacagagttgacaatatttggcaaaaaa

SEQ ID NO: 168940 - DNA, 33 bp, Homo sapien
atacagacagagttgataatatttggcaaaaaa

SEQ ID NO: 168941 - DNA, 33 bp, Homo sapien
cccctggcaaccgccactatgtccagttagcag

SEQ ID NO: 168942 - DNA, 33 bp, Homo sapien
cccctggcaaccgccattatgtccagttagcag

SEQ ID NO: 168943 - DNA, 33 bp, Homo sapien
cagagctcctttacagccagaaagacggtgacc

SEQ ID NO: 168944 - DNA, 33 bp, Homo sapien
cagagctcctttacaggcagaaagacggtgacc

SEQ ID NO: 168945 - DNA, 33 bp, Homo sapien
ccacctccatgtgtacagcagaacagttccgct

SEQ ID NO: 168946 - DNA, 33 bp, Homo sapien
ccacctccatgtgtacggcagaacagttccgct

SEQ ID NO: 168947 - DNA, 33 bp, Homo sapien
acagagaagggtatccagagagacacctgatta

SEQ ID NO: 168948 - DNA, 33 bp, Homo sapien
acagagaagggtatccggagagacacctgatta

SEQ ID NO: 168949 - DNA, 33 bp, Homo sapien
ttcttactccactaccagcatatcaataatacc

SEQ ID NO: 168950 - DNA, 33 bp, Homo sapien
ttcttactccactaccggcatatcaataatacc

SEQ ID NO: 168951 - DNA, 33 bp, Homo sapien
gtcagattgcccttaacaggtgttgtaccattt

SEQ ID NO: 168952 - DNA, 33 bp, Homo sapien
gtcagattgcccttaataggtgttgtaccattt

SEQ ID NO: 168953 - DNA, 33 bp, Homo sapien
taataagtaaagagtaggtgacctatatggttc

SEQ ID NO: 168954 - DNA, 33 bp, Homo sapien
taataagtaaagagtatgtgacctatatggttc

SEQ ID NO: 168955 - DNA, 33 bp, Homo sapien
attgttcaagggtcaaccgtatttcactttgaa

SEQ ID NO: 168956 - DNA, 33 bp, Homo sapien
attgttcaagggtcaatcgtatttcactttgaa

SEQ ID NO: 168957 - DNA, 33 bp, Homo sapien
ctttttgaataggacacaaagcacaccaaaaaa

SEQ ID NO: 168958 - DNA, 33 bp, Homo sapien
ctttttgaataggacagaaagcacaccaaaaaa

SEQ ID NO: 168959 - DNA, 33 bp, Homo sapien
ggtccatttgggtccacgtgaatttatgtgtgt

SEQ ID NO: 168960 - DNA, 33 bp, Homo sapien
ggtccatttgggtccatgtgaatttatgtgtgt

SEQ ID NO: 168961 - DNA, 33 bp, Homo sapien
tcaataaatgtcgttaggttctgactcctccac

SEQ ID NO: 168962 - DNA, 33 bp, Homo sapien
tcaataaatgtcgttatgttctgactcctccac

SEQ ID NO: 168963 - DNA, 33 bp, Homo sapien
tcttaaagccatacaccatccatatcctctgga

SEQ ID NO: 168964 - DNA, 33 bp, Homo sapien
tcttaaagccatacactatccatatcctctgga

SEQ ID NO: 168965 - DNA, 33 bp, Homo sapien
agtatttttttcaaccaaattcatatcatcttg

SEQ ID NO: 168966 - DNA, 33 bp, Homo sapien
agtatttttttcaaccgaattcatatcatcttg

SEQ ID NO: 168967 - DNA, 33 bp, Homo sapien
aagccatccaatacaaaacctggttctggacta

SEQ ID NO: 168968 - DNA, 33 bp, Homo sapien
aagccatccaatacaagacctggttctggacta

SEQ ID NO: 168969 - DNA, 33 bp, Homo sapien
tcacagtttcagcacaaaaagattcattttatt

SEQ ID NO: 168970 - DNA, 33 bp, Homo sapien
tcacagtttcagcacagaaagattcattttatt

SEQ ID NO: 168971 - DNA, 33 bp, Homo sapien
catttgcttctataccagatcatataagtaaaa

SEQ ID NO: 168972 - DNA, 33 bp, Homo sapien
catttgcttctataccggatcatataagtaaaa

SEQ ID NO: 168973 - DNA, 33 bp, Homo sapien
cacggactccactaagcccatttgcagttttgc

SEQ ID NO: 168974 - DNA, 33 bp, Homo sapien
cacggactccactaagtccatttgcagttttgc

SEQ ID NO: 168975 - DNA, 33 bp, Homo sapien
ctttagaagttcttaactgctacattcttagct

SEQ ID NO: 168976 - DNA, 33 bp, Homo sapien
ctttagaagttcttaattgctacattcttagct

SEQ ID NO: 168977 - DNA, 33 bp, Homo sapien
gaccaagtactacaaaattcctggccaaactgg

SEQ ID NO: 168978 - DNA, 33 bp, Homo sapien
gaccaagtactacaaacttcctggccaaactgg

SEQ ID NO: 168979 - DNA, 33 bp, Homo sapien
agatgagtgccatgtaactgctggactaaagat

SEQ ID NO: 168980 - DNA, 33 bp, Homo sapien
agatgagtgccatgtatctgctggactaaagat

SEQ ID NO: 168981 - DNA, 33 bp, Homo sapien
caagagtccttcacccaaacgagaattattagc

SEQ ID NO: 168982 - DNA, 33 bp, Homo sapien
caagagtccttcaccccaacgagaattattagc

SEQ ID NO: 168983 - DNA, 33 bp, Homo sapien
gtaatgagctggcaaaaggtagtgttcataatg

SEQ ID NO: 168984 - DNA, 33 bp, Homo sapien
gtaatgagctggcaaagggtagtgttcataatg

SEQ ID NO: 168985 - DNA, 33 bp, Homo sapien
tgcttttctaggctaaactttggtggatatatc

SEQ ID NO: 168986 - DNA, 33 bp, Homo sapien
tgcttttctaggctaatctttggtggatatatc

SEQ ID NO: 168987 - DNA, 33 bp, Homo sapien
gtttttccagctcacacctgctgccccagggcc

SEQ ID NO: 168988 - DNA, 33 bp, Homo sapien
gtttttccagctcacatctgctgccccagggcc

SEQ ID NO: 168989 - DNA, 33 bp, Homo sapien
cgcagcctcgcggaagccttaatgctgagtgcc

SEQ ID NO: 168990 - DNA, 33 bp, Homo sapien
cgcagcctcgcggaagtcttaatgctgagtgcc

SEQ ID NO: 168991 - DNA, 33 bp, Homo sapien
caatgtaaataaatagcaagtggaagttgctgc

SEQ ID NO: 168992 - DNA, 33 bp, Homo sapien
caatgtaaataaatagtaagtggaagttgctgc

SEQ ID NO: 168993 - DNA, 33 bp, Homo sapien
ccctttatgagtcagacggttttcttcctgtga

SEQ ID NO: 168994 - DNA, 33 bp, Homo sapien
ccctttatgagtcagatggttttcttcctgtga

SEQ ID NO: 168995 - DNA, 33 bp, Homo sapien
ttaagggggagaacccaaatagccacgcagggc

SEQ ID NO: 168996 - DNA, 33 bp, Homo sapien
ttaagggggagaacccgaatagccacgcagggc

SEQ ID NO: 168997 - DNA, 33 bp, Homo sapien
tagttaagtgagaaaacaagcgatgtccacctg

SEQ ID NO: 168998 - DNA, 33 bp, Homo sapien
tagttaagtgagaaaagaagcgatgtccacctg

SEQ ID NO: 168999 - DNA, 33 bp, Homo sapien
gtgctgaaataatatacgtgaaatgtgtaaact

SEQ ID NO: 169000 - DNA, 33 bp, Homo sapien
gtgctgaaataatatatgtgaaatgtgtaaact

SEQ ID NO: 169001 - DNA, 33 bp, Homo sapien
actcatctatctatcactctccaaatattcaac

SEQ ID NO: 169002 - DNA, 33 bp, Homo sapien
actcatctatctatcagtctccaaatattcaac

SEQ ID NO: 169003 - DNA, 33 bp, Homo sapien
accacttagctatcacaacatactaactggcac

SEQ ID NO: 169004 - DNA, 33 bp, Homo sapien
accacttagctatcactacatactaactggcac

SEQ ID NO: 169005 - DNA, 33 bp, Homo sapien
agttcttctatgcaacaaccacttagctatcac

SEQ ID NO: 169006 - DNA, 33 bp, Homo sapien
agttcttctatgcaacgaccacttagctatcac

SEQ ID NO: 169007 - DNA, 33 bp, Homo sapien
gcagtgagttgcgatcaaatcactgcactctag

SEQ ID NO: 169008 - DNA, 33 bp, Homo sapien
gcagtgagttgcgatcgaatcactgcactctag

SEQ ID NO: 169009 - DNA, 33 bp, Homo sapien
ggcttgttactggcaaatactactttttttttt

SEQ ID NO: 169010 - DNA, 33 bp, Homo sapien
ggcttgttactggcaactactactttttttttt

SEQ ID NO: 169011 - DNA, 33 bp, Homo sapien
agagacaagagtgtcaacatgaggagagggtga

SEQ ID NO: 169012 - DNA, 33 bp, Homo sapien
agagacaagagtgtcagcatgaggagagggtga

SEQ ID NO: 169013 - DNA, 33 bp, Homo sapien
tggcccgcaaacctacaatttggtaaagaaata

SEQ ID NO: 169014 - DNA, 33 bp, Homo sapien
tggcccgcaaacctacgatttggtaaagaaata

SEQ ID NO: 169015 - DNA, 33 bp, Homo sapien
gagattggtaacagaaagtgtaagtcagactgg

SEQ ID NO: 169016 - DNA, 33 bp, Homo sapien
gagattggtaacagaaggtgtaagtcagactgg

SEQ ID NO: 169017 - DNA, 33 bp, Homo sapien
tcaactggagcaggacagaaggttgtctgtact

SEQ ID NO: 169018 - DNA, 33 bp, Homo sapien
tcaactggagcaggacggaaggttgtctgtact

SEQ ID NO: 169019 - DNA, 33 bp, Homo sapien
agagaagtgaaagcaacgtatgtggtggggaca

SEQ ID NO: 169020 - DNA, 33 bp, Homo sapien
agagaagtgaaagcaatgtatgtggtggggaca

SEQ ID NO: 169021 - DNA, 33 bp, Homo sapien
atcatcttgcagaccactgcgtatctactcaag

SEQ ID NO: 169022 - DNA, 33 bp, Homo sapien
atcatcttgcagaccattgcgtatctactcaag

SEQ ID NO: 169023 - DNA, 33 bp, Homo sapien
acattcagcttgatgtaaaactaccacatagac

SEQ ID NO: 169024 - DNA, 33 bp, Homo sapien
acattcagcttgatgtgaaactaccacatagac

SEQ ID NO: 169025 - DNA, 33 bp, Homo sapien
acctgcaccagagaaacgataaaagacgtgacc

SEQ ID NO: 169026 - DNA, 33 bp, Homo sapien
acctgcaccagagaaatgataaaagacgtgacc

SEQ ID NO: 169027 - DNA, 33 bp, Homo sapien
gcctgacgtctgtccacgttcgatttgccaatg

SEQ ID NO: 169028 - DNA, 33 bp, Homo sapien
gcctgacgtctgtccatgttcgatttgccaatg

SEQ ID NO: 169029 - DNA, 33 bp, Homo sapien
gagcaacatgagggacaacaaccaggtcaaagg

SEQ ID NO: 169030 - DNA, 33 bp, Homo sapien
gagcaacatgagggacgacaaccaggtcaaagg

SEQ ID NO: 169031 - DNA, 33 bp, Homo sapien
aagaagttcaaggaaacatgagctgatgtctta

SEQ ID NO: 169032 - DNA, 33 bp, Homo sapien
aagaagttcaaggaaagatgagctgatgtctta

SEQ ID NO: 169033 - DNA, 33 bp, Homo sapien
ccactggaaaaagaggaccccagatgccttaag

SEQ ID NO: 169034 - DNA, 33 bp, Homo sapien
ccactggaaaaagaggtccccagatgccttaag

SEQ ID NO: 169035 - DNA, 33 bp, Homo sapien
cgctgcaagaaaaagaatctcagtcaagaatac

SEQ ID NO: 169036 - DNA, 33 bp, Homo sapien
cgctgcaagaaaaagattctcagtcaagaatac

SEQ ID NO: 169037 - DNA, 33 bp, Homo sapien
atgtcggcaacacggaactctgggggtacacag

SEQ ID NO: 169038 - DNA, 33 bp, Homo sapien
atgtcggcaacacggagctctgggggtacacag

SEQ ID NO: 169039 - DNA, 33 bp, Homo sapien
attcattctccacaccaaaaaggccctttccct

SEQ ID NO: 169040 - DNA, 33 bp, Homo sapien
attcattctccacacccaaaaggccctttccct

SEQ ID NO: 169041 - DNA, 33 bp, Homo sapien
cttctctgtctctgacaaactctcctatgtgtg

SEQ ID NO: 169042 - DNA, 33 bp, Homo sapien
cttctctgtctctgacgaactctcctatgtgtg

SEQ ID NO: 169043 - DNA, 33 bp, Homo sapien
gtgtggagagggttaaccgggcttcatttcttt

SEQ ID NO: 169044 - DNA, 33 bp, Homo sapien
gtgtggagagggttaatcgggcttcatttcttt

SEQ ID NO: 169045 - DNA, 33 bp, Homo sapien
tgtacacatgtctgcccgcatctctctttctct

SEQ ID NO: 169046 - DNA, 33 bp, Homo sapien
tgtacacatgtctgcctgcatctctctttctct

SEQ ID NO: 169047 - DNA, 33 bp, Homo sapien
gttctgagcagggaaaagacatgaccatgatct

SEQ ID NO: 169048 - DNA, 33 bp, Homo sapien
gttctgagcagggaaatgacatgaccatgatct

SEQ ID NO: 169049 - DNA, 33 bp, Homo sapien
ttacatctgcagaaaacggtctctttgtctgat

SEQ ID NO: 169050 - DNA, 33 bp, Homo sapien
ttacatctgcagaaaatggtctctttgtctgat

SEQ ID NO: 169051 - DNA, 33 bp, Homo sapien
ggcagggtttcctaaccgtggcactgctgacat

SEQ ID NO: 169052 - DNA, 33 bp, Homo sapien
ggcagggtttcctaactgtggcactgctgacat

SEQ ID NO: 169053 - DNA, 33 bp, Homo sapien
tctagaatctccagacactttgtagctgcctga

SEQ ID NO: 169054 - DNA, 33 bp, Homo sapien
tctagaatctccagacgctttgtagctgcctga

SEQ ID NO: 169055 - DNA, 33 bp, Homo sapien
gctggaattttttcaaatctgatatcctccagc

SEQ ID NO: 169056 - DNA, 33 bp, Homo sapien
gctggaattttttcaactctgatatcctccagc

SEQ ID NO: 169057 - DNA, 33 bp, Homo sapien
gcagtcaggtatttgcagactgcagcctcagcc

SEQ ID NO: 169058 - DNA, 33 bp, Homo sapien
gcagtcaggtatttgcggactgcagcctcagcc

SEQ ID NO: 169059 - DNA, 33 bp, Homo sapien
ataaccccagggcccactgataagagaatggat

SEQ ID NO: 169060 - DNA, 33 bp, Homo sapien
ataaccccagggcccagtgataagagaatggat

SEQ ID NO: 169061 - DNA, 33 bp, Homo sapien
agctcccttccctgataacattttcagtcaagg

SEQ ID NO: 169062 - DNA, 33 bp, Homo sapien
agctcccttccctgattacattttcagtcaagg

SEQ ID NO: 169063 - DNA, 33 bp, Homo sapien
tgagaatggtaattcaatctgtccacaaggcag

SEQ ID NO: 169064 - DNA, 33 bp, Homo sapien
tgagaatggtaattcagtctgtccacaaggcag

SEQ ID NO: 169065 - DNA, 33 bp, Homo sapien
ggcaacacagcaagacgccgtcataaaaaaaaa

SEQ ID NO: 169066 - DNA, 33 bp, Homo sapien
ggcaacacagcaagactccgtcataaaaaaaaa

SEQ ID NO: 169067 - DNA, 33 bp, Homo sapien
tctttattccagaacaatctctcaatcattttg

SEQ ID NO: 169068 - DNA, 33 bp, Homo sapien
tctttattccagaacagtctctcaatcattttg

SEQ ID NO: 169069 - DNA, 33 bp, Homo sapien
ggagaaagtggagaacagaacaatagttttccg

SEQ ID NO: 169070 - DNA, 33 bp, Homo sapien
ggagaaagtggagaaccgaacaatagttttccg

SEQ ID NO: 169071 - DNA, 33 bp, Homo sapien
tcaggtaaagatcgcaatgaattccggaaaact

SEQ ID NO: 169072 - DNA, 33 bp, Homo sapien
tcaggtaaagatcgcagtgaattccggaaaact

SEQ ID NO: 169073 - DNA, 33 bp, Homo sapien
cctcctataccagaacagaaaggcagagcaaag

SEQ ID NO: 169074 - DNA, 33 bp, Homo sapien
cctcctataccagaacggaaaggcagagcaaag

SEQ ID NO: 169075 - DNA, 33 bp, Homo sapien
cttcttttcagatggaagaatttgaccctttcg

SEQ ID NO: 169076 - DNA, 33 bp, Homo sapien
cttcttttcagatggaggaatttgaccctttcg

SEQ ID NO: 169077 - DNA, 33 bp, Homo sapien
ctaagagctgtttgagaatgggaactgaacttt

SEQ ID NO: 169078 - DNA, 33 bp, Homo sapien
ctaagagctgtttgaggatgggaactgaacttt

SEQ ID NO: 169079 - DNA, 33 bp, Homo sapien
cagtccagatctaaagcagtacatttgacacag

SEQ ID NO: 169080 - DNA, 33 bp, Homo sapien
cagtccagatctaaagtagtacatttgacacag

SEQ ID NO: 169081 - DNA, 33 bp, Homo sapien
agaggtaacacctaaaagaagcagtgaaggctg

SEQ ID NO: 169082 - DNA, 33 bp, Homo sapien
agaggtaacacctaaacgaagcagtgaaggctg

SEQ ID NO: 169083 - DNA, 33 bp, Homo sapien
ttttatcattttcgccgcatcttgttctttgtg

SEQ ID NO: 169084 - DNA, 33 bp, Homo sapien
ttttatcattttcgcctcatcttgttctttgtg

SEQ ID NO: 169085 - DNA, 33 bp, Homo sapien
ccaaagaggacagggaaattataggcctttgca

SEQ ID NO: 169086 - DNA, 33 bp, Homo sapien
ccaaagaggacagggagattataggcctttgca

SEQ ID NO: 169087 - DNA, 33 bp, Homo sapien
gagacaaaggaagagaaatcaaagacattttaa

SEQ ID NO: 169088 - DNA, 33 bp, Homo sapien
gagacaaaggaagagacatcaaagacattttaa

SEQ ID NO: 169089 - DNA, 33 bp, Homo sapien
gggcgtgcctttcctccgaaataatattgttca

SEQ ID NO: 169090 - DNA, 33 bp, Homo sapien
gggcgtgcctttcctctgaaataatattgttca

SEQ ID NO: 169091 - DNA, 33 bp, Homo sapien
ttggcagagcaaaagacgagaaaaattacaaag

SEQ ID NO: 169092 - DNA, 33 bp, Homo sapien
ttggcagagcaaaagatgagaaaaattacaaag

SEQ ID NO: 169093 - DNA, 33 bp, Homo sapien
agttgttgggaatccaaattatttcttgctgag

SEQ ID NO: 169094 - DNA, 33 bp, Homo sapien
agttgttgggaatccagattatttcttgctgag

SEQ ID NO: 169095 - DNA, 33 bp, Homo sapien
ctcctctggaaactgcagaaggaatagcgcctt

SEQ ID NO: 169096 - DNA, 33 bp, Homo sapien
ctcctctggaaactgcggaaggaatagcgcctt

SEQ ID NO: 169097 - DNA, 33 bp, Homo sapien
ataatatctacatcctaaagttgtgtgaattag

SEQ ID NO: 169098 - DNA, 33 bp, Homo sapien
ataatatctacatcctgaagttgtgtgaattag

SEQ ID NO: 169099 - DNA, 33 bp, Homo sapien
tctgcataccgagttaacctttgtgtcttgagt

SEQ ID NO: 169100 - DNA, 33 bp, Homo sapien
tctgcataccgagttagcctttgtgtcttgagt

SEQ ID NO: 169101 - DNA, 33 bp, Homo sapien
ctgcattccatgcgaactattctatcgtgggga

SEQ ID NO: 169102 - DNA, 33 bp, Homo sapien
ctgcattccatgcgaattattctatcgtgggga

SEQ ID NO: 169103 - DNA, 33 bp, Homo sapien
agaagctacaaagccacaagaggacaagtgaaa

SEQ ID NO: 169104 - DNA, 33 bp, Homo sapien
agaagctacaaagccagaagaggacaagtgaaa

SEQ ID NO: 169105 - DNA, 33 bp, Homo sapien
ctgatttccaaccataataactcatgcattcct

SEQ ID NO: 169106 - DNA, 33 bp, Homo sapien
ctgatttccaaccatagtaactcatgcattcct

SEQ ID NO: 169107 - DNA, 33 bp, Homo sapien
aaattagtaaatagaaaaaagcagtttgctggt

SEQ ID NO: 169108 - DNA, 33 bp, Homo sapien
aaattagtaaatagaagaaagcagtttgctggt

SEQ ID NO: 169109 - DNA, 33 bp, Homo sapien
aatataactactgtctaaattgcatgtatagtt

SEQ ID NO: 169110 - DNA, 33 bp, Homo sapien
aatataactactgtctcaattgcatgtatagtt

SEQ ID NO: 169111 - DNA, 33 bp, Homo sapien
tatctaacattaggtacaatcaacattaaattg

SEQ ID NO: 169112 - DNA, 33 bp, Homo sapien
tatctaacattaggtataatcaacattaaattg

SEQ ID NO: 169113 - DNA, 33 bp, Homo sapien
ttgacttggttctacacaaaaagctcccttgtc

SEQ ID NO: 169114 - DNA, 33 bp, Homo sapien
ttgacttggttctacataaaaagctcccttgtc

SEQ ID NO: 169115 - DNA, 33 bp, Homo sapien
gttcctgagcaatccaatctaaaaacctagagc

SEQ ID NO: 169116 - DNA, 33 bp, Homo sapien
gttcctgagcaatccagtctaaaaacctagagc

SEQ ID NO: 169117 - DNA, 33 bp, Homo sapien
ccacatcagtacacacagaataacttggtatgt

SEQ ID NO: 169118 - DNA, 33 bp, Homo sapien
ccacatcagtacacacggaataacttggtatgt

SEQ ID NO: 169119 - DNA, 33 bp, Homo sapien
gtctgacctctagatacgaaagtggaaataatc

SEQ ID NO: 169120 - DNA, 33 bp, Homo sapien
gtctgacctctagatatgaaagtggaaataatc

SEQ ID NO: 169121 - DNA, 33 bp, Homo sapien
gctgatgactataaaaacttcataaattgcctt

SEQ ID NO: 169122 - DNA, 33 bp, Homo sapien
gctgatgactataaaagcttcataaattgcctt

SEQ ID NO: 169123 - DNA, 33 bp, Homo sapien
gggtgttgtcctcaaaattctgcagtttctagg

SEQ ID NO: 169124 - DNA, 33 bp, Homo sapien
gggtgttgtcctcaaagttctgcagtttctagg

SEQ ID NO: 169125 - DNA, 33 bp, Homo sapien
ctaaggttagacttgaccctttagtatgtgttg

SEQ ID NO: 169126 - DNA, 33 bp, Homo sapien
ctaaggttagacttgatcctttagtatgtgttg

SEQ ID NO: 169127 - DNA, 33 bp, Homo sapien
agatccctgttagcgaagatattctgtgcagat

SEQ ID NO: 169128 - DNA, 33 bp, Homo sapien
agatccctgttagcgatgatattctgtgcagat

SEQ ID NO: 169129 - DNA, 33 bp, Homo sapien
taaagtcagtatggggccaaagaacctacagaa

SEQ ID NO: 169130 - DNA, 33 bp, Homo sapien
taaagtcagtatggggtcaaagaacctacagaa

SEQ ID NO: 169131 - DNA, 33 bp, Homo sapien
ggtttaagattttgaaatatgttggaacatcta

SEQ ID NO: 169132 - DNA, 33 bp, Homo sapien
ggtttaagattttgaattatgttggaacatcta

SEQ ID NO: 169133 - DNA, 33 bp, Homo sapien
gctacatgctcaagaacgaatttagcatctacc

SEQ ID NO: 169134 - DNA, 33 bp, Homo sapien
gctacatgctcaagaatgaatttagcatctacc

SEQ ID NO: 169135 - DNA, 33 bp, Homo sapien
tgtaacatggtttcaaaagattcgcaaacctct

SEQ ID NO: 169136 - DNA, 33 bp, Homo sapien
tgtaacatggtttcaagagattcgcaaacctct

SEQ ID NO: 169137 - DNA, 33 bp, Homo sapien
tttgtggtctgacttacattggagttggtctct

SEQ ID NO: 169138 - DNA, 33 bp, Homo sapien
tttgtggtctgacttatattggagttggtctct

SEQ ID NO: 169139 - DNA, 33 bp, Homo sapien
ttttgaaaggggtggcacaaaacatatgtatca

SEQ ID NO: 169140 - DNA, 33 bp, Homo sapien
ttttgaaaggggtggcgcaaaacatatgtatca

SEQ ID NO: 169141 - DNA, 33 bp, Homo sapien
tctgtcccaaaaaaaacgaaaatgtgaatcgag

SEQ ID NO: 169142 - DNA, 33 bp, Homo sapien
tctgtcccaaaaaaaaggaaaatgtgaatcgag

SEQ ID NO: 169143 - DNA, 33 bp, Homo sapien
acagttgcttcaggtcaccccctgatgtggcac

SEQ ID NO: 169144 - DNA, 33 bp, Homo sapien
acagttgcttcaggtcgccccctgatgtggcac

SEQ ID NO: 169145 - DNA, 33 bp, Homo sapien
gattataggcatgagacgctgcatggtcataac

SEQ ID NO: 169146 - DNA, 33 bp, Homo sapien
gattataggcatgagatgctgcatggtcataac

SEQ ID NO: 169147 - DNA, 33 bp, Homo sapien
agtgcctacgaatgcacgtcttgttctcagcac

SEQ ID NO: 169148 - DNA, 33 bp, Homo sapien
agtgcctacgaatgcaggtcttgttctcagcac

SEQ ID NO: 169149 - DNA, 33 bp, Homo sapien
tgaaggagttggactacacaatttctaaattgc

SEQ ID NO: 169150 - DNA, 33 bp, Homo sapien
tgaaggagttggactatacaatttctaaattgc

SEQ ID NO: 169151 - DNA, 33 bp, Homo sapien
ctgactcttggtttgaagtattaaccaacttgg

SEQ ID NO: 169152 - DNA, 33 bp, Homo sapien
ctgactcttggtttgaggtattaaccaacttgg

SEQ ID NO: 169153 - DNA, 33 bp, Homo sapien
tatgatgaataaataaaaagatgtgagtaaagc

SEQ ID NO: 169154 - DNA, 33 bp, Homo sapien
tatgatgaataaataataagatgtgagtaaagc

SEQ ID NO: 169155 - DNA, 33 bp, Homo sapien
catcagtaagggtgtacgttacaattgatggtg

SEQ ID NO: 169156 - DNA, 33 bp, Homo sapien
catcagtaagggtgtaggttacaattgatggtg

SEQ ID NO: 169157 - DNA, 33 bp, Homo sapien
ggtcatatggtgtaaaaatggctatcacctggt

SEQ ID NO: 169158 - DNA, 33 bp, Homo sapien
ggtcatatggtgtaaagatggctatcacctggt

SEQ ID NO: 169159 - DNA, 33 bp, Homo sapien
gcacagtaagagattaacagcattaactaataa

SEQ ID NO: 169160 - DNA, 33 bp, Homo sapien
gcacagtaagagattatcagcattaactaataa

SEQ ID NO: 169161 - DNA, 33 bp, Homo sapien
gggttagattggcgtaccagtcagaatgggcta

SEQ ID NO: 169162 - DNA, 33 bp, Homo sapien
gggttagattggcgtatcagtcagaatgggcta

SEQ ID NO: 169163 - DNA, 33 bp, Homo sapien
tacgaagttcttggcacattttccaggagaccc

SEQ ID NO: 169164 - DNA, 33 bp, Homo sapien
tacgaagttcttggcagattttccaggagaccc

SEQ ID NO: 169165 - DNA, 33 bp, Homo sapien
tgaaatggccaaatgaaataatgcattaaaacc

SEQ ID NO: 169166 - DNA, 33 bp, Homo sapien
tgaaatggccaaatgagataatgcattaaaacc

SEQ ID NO: 169167 - DNA, 33 bp, Homo sapien
accctgaggcctctaaacactctaaaagctgaa

SEQ ID NO: 169168 - DNA, 33 bp, Homo sapien
accctgaggcctctaaccactctaaaagctgaa

SEQ ID NO: 169169 - DNA, 33 bp, Homo sapien
taactaccaagttgcacggcaatgagctcagct

SEQ ID NO: 169170 - DNA, 33 bp, Homo sapien
taactaccaagttgcatggcaatgagctcagct

SEQ ID NO: 169171 - DNA, 33 bp, Homo sapien
tggtgttatgaaatacagaaatttttggcgttg

SEQ ID NO: 169172 - DNA, 33 bp, Homo sapien
tggtgttatgaaatacggaaatttttggcgttg

SEQ ID NO: 169173 - DNA, 33 bp, Homo sapien
ttgacactttataacacgaagccatttgtacct

SEQ ID NO: 169174 - DNA, 33 bp, Homo sapien
ttgacactttataacatgaagccatttgtacct

SEQ ID NO: 169175 - DNA, 33 bp, Homo sapien
gcatctttctggaataacaaggatcagcttggt

SEQ ID NO: 169176 - DNA, 33 bp, Homo sapien
gcatctttctggaatagcaaggatcagcttggt

SEQ ID NO: 169177 - DNA, 33 bp, Homo sapien
gtgtcttcctagttcccgccttggatcacaggt

SEQ ID NO: 169178 - DNA, 33 bp, Homo sapien
gtgtcttcctagttcctgccttggatcacaggt

SEQ ID NO: 169179 - DNA, 33 bp, Homo sapien
agaactcacatcagtagaaagagcgctggattt

SEQ ID NO: 169180 - DNA, 33 bp, Homo sapien
agaactcacatcagtataaagagcgctggattt

SEQ ID NO: 169181 - DNA, 33 bp, Homo sapien
tgtgatgaagtttgtaataacgctatgtgtctg

SEQ ID NO: 169182 - DNA, 33 bp, Homo sapien
tgtgatgaagtttgtagtaacgctatgtgtctg

SEQ ID NO: 169183 - DNA, 33 bp, Homo sapien
aataaataaataaataaatttgcagctcgggct

SEQ ID NO: 169184 - DNA, 33 bp, Homo sapien
aataaataaataaatacatttgcagctcgggct

SEQ ID NO: 169185 - DNA, 33 bp, Homo sapien
gcttatctagataggaaactagaagaactgcac

SEQ ID NO: 169186 - DNA, 33 bp, Homo sapien
gcttatctagataggagactagaagaactgcac

SEQ ID NO: 169187 - DNA, 33 bp, Homo sapien
taaatccaagttccagcaccaaccggctttgat

SEQ ID NO: 169188 - DNA, 33 bp, Homo sapien
taaatccaagttccagtaccaaccggctttgat

SEQ ID NO: 169189 - DNA, 33 bp, Homo sapien
agctcccagagtacctcagctctgtctttagca

SEQ ID NO: 169190 - DNA, 33 bp, Homo sapien
agctcccagagtaccttagctctgtctttagca

SEQ ID NO: 169191 - DNA, 33 bp, Homo sapien
atccggacctgtcgccagcaggagggggcactt

SEQ ID NO: 169192 - DNA, 33 bp, Homo sapien
atccggacctgtcgccggcaggagggggcactt

SEQ ID NO: 169193 - DNA, 33 bp, Homo sapien
ctagatgagaagaaaacgttgtaaaggaatgtt

SEQ ID NO: 169194 - DNA, 33 bp, Homo sapien
ctagatgagaagaaaatgttgtaaaggaatgtt

SEQ ID NO: 169195 - DNA, 33 bp, Homo sapien
ctccattcccacaagacaatttatggcagttat

SEQ ID NO: 169196 - DNA, 33 bp, Homo sapien
ctccattcccacaagataatttatggcagttat

SEQ ID NO: 169197 - DNA, 33 bp, Homo sapien
gtttgcagaagaaggaagcgtggtaacttggca

SEQ ID NO: 169198 - DNA, 33 bp, Homo sapien
gtttgcagaagaaggaggcgtggtaacttggca

SEQ ID NO: 169199 - DNA, 33 bp, Homo sapien
cttatgttctgcaggacggatgaactaggtacc

SEQ ID NO: 169200 - DNA, 33 bp, Homo sapien
cttatgttctgcaggatggatgaactaggtacc

SEQ ID NO: 169201 - DNA, 33 bp, Homo sapien
acaaagcctcagtagaaaaaccaaggaggggga

SEQ ID NO: 169202 - DNA, 33 bp, Homo sapien
acaaagcctcagtagagaaaccaaggaggggga

SEQ ID NO: 169203 - DNA, 33 bp, Homo sapien
tgattgaaaaaattcgaaaagtcacctgtttcc

SEQ ID NO: 169204 - DNA, 33 bp, Homo sapien
tgattgaaaaaattcggaaagtcacctgtttcc

SEQ ID NO: 169205 - DNA, 33 bp, Homo sapien
ttaccatttgcaactacacgtctctatgagtca

SEQ ID NO: 169206 - DNA, 33 bp, Homo sapien
ttaccatttgcaactatacgtctctatgagtca

SEQ ID NO: 169207 - DNA, 33 bp, Homo sapien
ccatcgcagtaaacacagcagaaaagcccacca

SEQ ID NO: 169208 - DNA, 33 bp, Homo sapien
ccatcgcagtaaacacggcagaaaagcccacca

SEQ ID NO: 169209 - DNA, 33 bp, Homo sapien
acttttcaacatacacactatcttaaaaaacaa

SEQ ID NO: 169210 - DNA, 33 bp, Homo sapien
acttttcaacatacaccctatcttaaaaaacaa

SEQ ID NO: 169211 - DNA, 33 bp, Homo sapien
ccctttgagctctctaaggacggagtgaaagcc

SEQ ID NO: 169212 - DNA, 33 bp, Homo sapien
ccctttgagctctctagggacggagtgaaagcc

SEQ ID NO: 169213 - DNA, 33 bp, Homo sapien
catttaacgcttgtaaataaagttctgttggaa

SEQ ID NO: 169214 - DNA, 33 bp, Homo sapien
catttaacgcttgtaagtaaagttctgttggaa

SEQ ID NO: 169215 - DNA, 33 bp, Homo sapien
gtctctgccttttggacgggagataggccaccc

SEQ ID NO: 169216 - DNA, 33 bp, Homo sapien
gtctctgccttttggatgggagataggccaccc

SEQ ID NO: 169217 - DNA, 33 bp, Homo sapien
tctgttttgatgtgtaagtacatgtaggatttt

SEQ ID NO: 169218 - DNA, 33 bp, Homo sapien
tctgttttgatgtgtatgtacatgtaggatttt

SEQ ID NO: 169219 - DNA, 33 bp, Homo sapien
gttctgctgggtatagcaatcttggttggcagg

SEQ ID NO: 169220 - DNA, 33 bp, Homo sapien
gttctgctgggtatagtaatcttggttggcagg

SEQ ID NO: 169221 - DNA, 33 bp, Homo sapien
ttcttaaatctgttaacacttgttttgtggtct

SEQ ID NO: 169222 - DNA, 33 bp, Homo sapien
ttcttaaatctgttaagacttgttttgtggtct

SEQ ID NO: 169223 - DNA, 33 bp, Homo sapien
caacaggcaacttgaacggacaaggccctagaa

SEQ ID NO: 169224 - DNA, 33 bp, Homo sapien
caacaggcaacttgaatggacaaggccctagaa

SEQ ID NO: 169225 - DNA, 33 bp, Homo sapien
gtaactctgagacaccagaagaaacttaacttc

SEQ ID NO: 169226 - DNA, 33 bp, Homo sapien
gtaactctgagacaccggaagaaacttaacttc

SEQ ID NO: 169227 - DNA, 33 bp, Homo sapien
aacccgtatcttctacaatcaaataagacaaag

SEQ ID NO: 169228 - DNA, 33 bp, Homo sapien
aacccgtatcttctaccatcaaataagacaaag

SEQ ID NO: 169229 - DNA, 33 bp, Homo sapien
atgttcacagcggtgacgtcaaaaacctgaata

SEQ ID NO: 169230 - DNA, 33 bp, Homo sapien
atgttcacagcggtgatgtcaaaaacctgaata

SEQ ID NO: 169231 - DNA, 33 bp, Homo sapien
tcaattcccaggataaatcccttttggttaaaa

SEQ ID NO: 169232 - DNA, 33 bp, Homo sapien
tcaattcccaggataagtcccttttggttaaaa

SEQ ID NO: 169233 - DNA, 33 bp, Homo sapien
ggcttgaacagaaatagactttctcatagttct

SEQ ID NO: 169234 - DNA, 33 bp, Homo sapien
ggcttgaacagaaatatactttctcatagttct

SEQ ID NO: 169235 - DNA, 33 bp, Homo sapien
cacagctcagaacatacacccctggatcccgca

SEQ ID NO: 169236 - DNA, 33 bp, Homo sapien
cacagctcagaacatagacccctggatcccgca

SEQ ID NO: 169237 - DNA, 33 bp, Homo sapien
agatgttgcaatgtgaataagttttgctcaacg

SEQ ID NO: 169238 - DNA, 33 bp, Homo sapien
agatgttgcaatgtgactaagttttgctcaacg

SEQ ID NO: 169239 - DNA, 33 bp, Homo sapien
agtgaaaaggaatagccgaaattggtattaata

SEQ ID NO: 169240 - DNA, 33 bp, Homo sapien
agtgaaaaggaatagctgaaattggtattaata

SEQ ID NO: 169241 - DNA, 33 bp, Homo sapien
tgggggcgcagaggaaataggactggccaaatg

SEQ ID NO: 169242 - DNA, 33 bp, Homo sapien
tgggggcgcagaggaactaggactggccaaatg

SEQ ID NO: 169243 - DNA, 33 bp, Homo sapien
ggcctgggccgcatgaagacccctaaggcagga

SEQ ID NO: 169244 - DNA, 33 bp, Homo sapien
ggcctgggccgcatgaggacccctaaggcagga

SEQ ID NO: 169245 - DNA, 33 bp, Homo sapien
tggacagggcagcacaagaggacgagtgtgcat

SEQ ID NO: 169246 - DNA, 33 bp, Homo sapien
tggacagggcagcacaggaggacgagtgtgcat

SEQ ID NO: 169247 - DNA, 33 bp, Homo sapien
ccatgaattgatgtgaagagaactgaaaaacac

SEQ ID NO: 169248 - DNA, 33 bp, Homo sapien
ccatgaattgatgtgaggagaactgaaaaacac

SEQ ID NO: 169249 - DNA, 33 bp, Homo sapien
ggtgccacagcagtagaatcacccagaaactgg

SEQ ID NO: 169250 - DNA, 33 bp, Homo sapien
ggtgccacagcagtaggatcacccagaaactgg

SEQ ID NO: 169251 - DNA, 33 bp, Homo sapien
atactggtcctgatagaaaaacgaaagagagag

SEQ ID NO: 169252 - DNA, 33 bp, Homo sapien
atactggtcctgataggaaaacgaaagagagag

SEQ ID NO: 169253 - DNA, 33 bp, Homo sapien
tgagtggctgccaaccacatgaaactggggtat

SEQ ID NO: 169254 - DNA, 33 bp, Homo sapien
tgagtggctgccaaccgcatgaaactggggtat

SEQ ID NO: 169255 - DNA, 33 bp, Homo sapien
cagcctttggcaactaactacaccctaaggagt

SEQ ID NO: 169256 - DNA, 33 bp, Homo sapien
cagcctttggcaactagctacaccctaaggagt

SEQ ID NO: 169257 - DNA, 33 bp, Homo sapien
ttcctttggatatgtaactggtaatggaattgc

SEQ ID NO: 169258 - DNA, 33 bp, Homo sapien
ttcctttggatatgtacctggtaatggaattgc

SEQ ID NO: 169259 - DNA, 33 bp, Homo sapien
agctcccacttgtaaacgagaatctgcagtatt

SEQ ID NO: 169260 - DNA, 33 bp, Homo sapien
agctcccacttgtaaatgagaatctgcagtatt

SEQ ID NO: 169261 - DNA, 33 bp, Homo sapien
gggccagagaatttaactgacctttcaaagtta

SEQ ID NO: 169262 - DNA, 33 bp, Homo sapien
gggccagagaatttaattgacctttcaaagtta

SEQ ID NO: 169263 - DNA, 33 bp, Homo sapien
gactctttctcaccaaatatataaaattatgaa

SEQ ID NO: 169264 - DNA, 33 bp, Homo sapien
gactctttctcaccaagtatataaaattatgaa

SEQ ID NO: 169265 - DNA, 33 bp, Homo sapien
aaactagattctttaaagctatctctctacatt

SEQ ID NO: 169266 - DNA, 33 bp, Homo sapien
aaactagattctttaatgctatctctctacatt

SEQ ID NO: 169267 - DNA, 33 bp, Homo sapien
tcaactctttttctaacgacaaacagatgactg

SEQ ID NO: 169268 - DNA, 33 bp, Homo sapien
tcaactctttttctaatgacaaacagatgactg

SEQ ID NO: 169269 - DNA, 33 bp, Homo sapien
gaactcctaggcttaacggatccttctgccttg

SEQ ID NO: 169270 - DNA, 33 bp, Homo sapien
gaactcctaggcttaagggatccttctgccttg

SEQ ID NO: 169271 - DNA, 33 bp, Homo sapien
agcacacagtagacccagaatacacagcagcag

SEQ ID NO: 169272 - DNA, 33 bp, Homo sapien
agcacacagtagacccggaatacacagcagcag

SEQ ID NO: 169273 - DNA, 33 bp, Homo sapien
agtaaaaaaaattaccactttcagcatgaaaac

SEQ ID NO: 169274 - DNA, 33 bp, Homo sapien
agtaaaaaaaattaccgctttcagcatgaaaac

SEQ ID NO: 169275 - DNA, 33 bp, Homo sapien
catttggtgctcaataacctaccctatgcaaga

SEQ ID NO: 169276 - DNA, 33 bp, Homo sapien
catttggtgctcaatagcctaccctatgcaaga

SEQ ID NO: 169277 - DNA, 33 bp, Homo sapien
acaaagcacatgcaataataacgctaatccttc

SEQ ID NO: 169278 - DNA, 33 bp, Homo sapien
acaaagcacatgcaatcataacgctaatccttc

SEQ ID NO: 169279 - DNA, 33 bp, Homo sapien
cagaacatggtcatcaataaatattagccatca

SEQ ID NO: 169280 - DNA, 33 bp, Homo sapien
cagaacatggtcatcagtaaatattagccatca

SEQ ID NO: 169281 - DNA, 33 bp, Homo sapien
agcatttgacacagctaactagtctctcctgga

SEQ ID NO: 169282 - DNA, 33 bp, Homo sapien
agcatttgacacagctgactagtctctcctgga

SEQ ID NO: 169283 - DNA, 33 bp, Homo sapien
ctgtgctctttcaacactaggctgtcttctaat

SEQ ID NO: 169284 - DNA, 33 bp, Homo sapien
ctgtgctctttcaacattaggctgtcttctaat

SEQ ID NO: 169285 - DNA, 33 bp, Homo sapien
tattcattaattaccacaaaactgaaattgaga

SEQ ID NO: 169286 - DNA, 33 bp, Homo sapien
tattcattaattaccagaaaactgaaattgaga

SEQ ID NO: 169287 - DNA, 33 bp, Homo sapien
gattggaagtagaagcacatctttcgtgaattg

SEQ ID NO: 169288 - DNA, 33 bp, Homo sapien
gattggaagtagaagcccatctttcgtgaattg

SEQ ID NO: 169289 - DNA, 33 bp, Homo sapien
acactcattgtggaataacaaaatctagccaat

SEQ ID NO: 169290 - DNA, 33 bp, Homo sapien
acactcattgtggaatcacaaaatctagccaat

SEQ ID NO: 169291 - DNA, 33 bp, Homo sapien
gggaattgcttattgaaatatctagagatggag

SEQ ID NO: 169292 - DNA, 33 bp, Homo sapien
gggaattgcttattgagatatctagagatggag

SEQ ID NO: 169293 - DNA, 33 bp, Homo sapien
tatttaaaagcagaaaactactataactggaac

SEQ ID NO: 169294 - DNA, 33 bp, Homo sapien
tatttaaaagcagaaagctactataactggaac

SEQ ID NO: 169295 - DNA, 33 bp, Homo sapien
attgtccagtcgggtcaaatgacaaggtgttcc

SEQ ID NO: 169296 - DNA, 33 bp, Homo sapien
attgtccagtcgggtcgaatgacaaggtgttcc

SEQ ID NO: 169297 - DNA, 33 bp, Homo sapien
ttagaactttaagaacaagcagttggacggctc

SEQ ID NO: 169298 - DNA, 33 bp, Homo sapien
ttagaactttaagaactagcagttggacggctc

SEQ ID NO: 169299 - DNA, 33 bp, Homo sapien
agaaaaaaaagtattaacctatctgagcctgaa

SEQ ID NO: 169300 - DNA, 33 bp, Homo sapien
agaaaaaaaagtattagcctatctgagcctgaa

SEQ ID NO: 169301 - DNA, 33 bp, Homo sapien
aaacttatgtcttcaccgagagacctgacagat

SEQ ID NO: 169302 - DNA, 33 bp, Homo sapien
aaacttatgtcttcactgagagacctgacagat

SEQ ID NO: 169303 - DNA, 33 bp, Homo sapien
tatctttggagagaagaatgttcgaaaagacca

SEQ ID NO: 169304 - DNA, 33 bp, Homo sapien
tatctttggagagaagtatgttcgaaaagacca

SEQ ID NO: 169305 - DNA, 33 bp, Homo sapien
aaaatatggttgctacaaacaatgtgactgaaa

SEQ ID NO: 169306 - DNA, 33 bp, Homo sapien
aaaatatggttgctacgaacaatgtgactgaaa

SEQ ID NO: 169307 - DNA, 33 bp, Homo sapien
cacacctctcttaaaccctgtgatttactcctt

SEQ ID NO: 169308 - DNA, 33 bp, Homo sapien
cacacctctcttaaactctgtgatttactcctt

SEQ ID NO: 169309 - DNA, 33 bp, Homo sapien
ggagggcttctttatcaccacccattttgttaa

SEQ ID NO: 169310 - DNA, 33 bp, Homo sapien
ggagggcttctttatcgccacccattttgttaa

SEQ ID NO: 169311 - DNA, 33 bp, Homo sapien
gtcatcctgtgccttacagtgcctaacctcctg

SEQ ID NO: 169312 - DNA, 33 bp, Homo sapien
gtcatcctgtgccttagagtgcctaacctcctg

SEQ ID NO: 169313 - DNA, 33 bp, Homo sapien
gatatataacctgcaacagtgacttaacttccc

SEQ ID NO: 169314 - DNA, 33 bp, Homo sapien
gatatataacctgcaagagtgacttaacttccc

SEQ ID NO: 169315 - DNA, 33 bp, Homo sapien
gtcatttgaatccttacgtccctcatctgaaaa

SEQ ID NO: 169316 - DNA, 33 bp, Homo sapien
gtcatttgaatccttatgtccctcatctgaaaa

SEQ ID NO: 169317 - DNA, 33 bp, Homo sapien
ctgctggcataaaaacaaatgcacagaccagtg

SEQ ID NO: 169318 - DNA, 33 bp, Homo sapien
ctgctggcataaaaaccaatgcacagaccagtg

SEQ ID NO: 169319 - DNA, 33 bp, Homo sapien
gcatgatgctattcacagtatgcagatgcagca

SEQ ID NO: 169320 - DNA, 33 bp, Homo sapien
gcatgatgctattcacggtatgcagatgcagca

SEQ ID NO: 169321 - DNA, 33 bp, Homo sapien
atcacacttgagaaaaacatgtagagttaagac

SEQ ID NO: 169322 - DNA, 33 bp, Homo sapien
atcacacttgagaaaaccatgtagagttaagac

SEQ ID NO: 169323 - DNA, 33 bp, Homo sapien
aaaagactggccttgaataggaggataagtcag

SEQ ID NO: 169324 - DNA, 33 bp, Homo sapien
aaaagactggccttgagtaggaggataagtcag

SEQ ID NO: 169325 - DNA, 33 bp, Homo sapien
tcagcctctgggatacccaggtgagagtctctg

SEQ ID NO: 169326 - DNA, 33 bp, Homo sapien
tcagcctctgggatactcaggtgagagtctctg

SEQ ID NO: 169327 - DNA, 33 bp, Homo sapien
taccaagaatgtaatgaaatgttaaaagattca

SEQ ID NO: 169328 - DNA, 33 bp, Homo sapien
taccaagaatgtaatggaatgttaaaagattca

SEQ ID NO: 169329 - DNA, 33 bp, Homo sapien
cattcaccaccactgaataacacaactatcata

SEQ ID NO: 169330 - DNA, 33 bp, Homo sapien
cattcaccaccactgagtaacacaactatcata

SEQ ID NO: 169331 - DNA, 33 bp, Homo sapien; identical to SEQ ID NO: 169329

SEQ ID NO: 169332 - DNA, 33 bp, Homo sapien; identical to SEQ ID NO: 169330

SEQ ID NO: 169333 - DNA, 33 bp, Homo sapien
aattcaaaactctatcaaaaaaacttaacaaag

SEQ ID NO: 169334 - DNA, 33 bp, Homo sapien
aattcaaaactctatcgaaaaaacttaacaaag

SEQ ID NO: 169335 - DNA, 33 bp, Homo sapien
actctgcagtctgaagaataggatgctgtttaa

SEQ ID NO: 169336 - DNA, 33 bp, Homo sapien
actctgcagtctgaaggataggatgctgtttaa

SEQ ID NO: 169337 - DNA, 33 bp, Homo sapien
caaatttcttcaaatgcattcagcagggatttt

SEQ ID NO: 169338 - DNA, 33 bp, Homo sapien
caaatttcttcaaatgtattcagcagggatttt

SEQ ID NO: 169339 - DNA, 33 bp, Homo sapien
tggccatgatcattaactcactcattcactcag

SEQ ID NO: 169340 - DNA, 33 bp, Homo sapien
tggccatgatcattaattcactcattcactcag

SEQ ID NO: 169341 - DNA, 33 bp, Homo sapien; identical to SEQ ID NO: 169339

SEQ ID NO: 169342 - DNA, 33 bp, Homo sapien; identical to SEQ ID NO: 169340

SEQ ID NO: 169343 - DNA, 33 bp, Homo sapien
attcctagcaatagtgcatattacctgttgttt

SEQ ID NO: 169344 - DNA, 33 bp, Homo sapien
attcctagcaatagtgtatattacctgttgttt

SEQ ID NO: 169345 - DNA, 33 bp, Homo sapien
ttgtttatgctgttaactattttgctgtgcaga

SEQ ID NO: 169346 - DNA, 33 bp, Homo sapien
ttgtttatgctgttaattattttgctgtgcaga

SEQ ID NO: 169347 - DNA, 33 bp, Homo sapien; identical to SEQ ID NO: 169345

SEQ ID NO: 169348 - DNA, 33 bp, Homo sapien; identical to SEQ ID NO: 169346

SEQ ID NO: 169349 - DNA, 33 bp, Homo sapien
ccacatagctataaccaactgatttccaacaaa

SEQ ID NO: 169350 - DNA, 33 bp, Homo sapien
ccacatagctataaccgactgatttccaacaaa

SEQ ID NO: 169351 - DNA, 33 bp, Homo sapien
attatttattgaacccccactgtgcactggtgt

SEQ ID NO: 169352 - DNA, 33 bp, Homo sapien
attatttattgaacccgcactgtgcactggtgt

SEQ ID NO: 169353 - DNA, 33 bp, Homo sapien
ctcttctggatatacaaccataggaaatgaaag

SEQ ID NO: 169354 - DNA, 33 bp, Homo sapien
ctcttctggatatacacccataggaaatgaaag

SEQ ID NO: 169355 - DNA, 33 bp, Homo sapien
ctggtggtggaaatgtaaattggaacagccatt

SEQ ID NO: 169356 - DNA, 33 bp, Homo sapien
ctggtggtggaaatgtgaattggaacagccatt

SEQ ID NO: 169357 - DNA, 33 bp, Homo sapien
aactgggtaatgggcacatacctccagagtttg

SEQ ID NO: 169358 - DNA, 33 bp, Homo sapien
aactgggtaatgggcagatacctccagagtttg

SEQ ID NO: 169359 - DNA, 33 bp, Homo sapien
cctgaggaaaatttcacggcaattaaataatca

SEQ ID NO: 169360 - DNA, 33 bp, Homo sapien
cctgaggaaaatttcatggcaattaaataatca

SEQ ID NO: 169361 - DNA, 33 bp, Homo sapien
aatccagactacagagaagaagcaggaacaatg

SEQ ID NO: 169362 - DNA, 33 bp, Homo sapien
aatccagactacagaggagaagcaggaacaatg

SEQ ID NO: 169363 - DNA, 33 bp, Homo sapien
ttcctactttggtatcacaagagtttttctata

SEQ ID NO: 169364 - DNA, 33 bp, Homo sapien
ttcctactttggtatcgcaagagtttttctata

SEQ ID NO: 169365 - DNA, 33 bp, Homo sapien
cagttctggatatagacgttgagatcttgaact

SEQ ID NO: 169366 - DNA, 33 bp, Homo sapien
cagttctggatatagaggttgagatcttgaact

SEQ ID NO: 169367 - DNA, 33 bp, Homo sapien
tgtagggaaagaacaaccttccaaacatgacac

SEQ ID NO: 169368 - DNA, 33 bp, Homo sapien
tgtagggaaagaacaatcttccaaacatgacac

SEQ ID NO: 169369 - DNA, 33 bp, Homo sapien
gtaaggccctacttaccgggagcatttttagca

SEQ ID NO: 169370 - DNA, 33 bp, Homo sapien
gtaaggccctacttactgggagcatttttagca

SEQ ID NO: 169371 - DNA, 33 bp, Homo sapien
tactaatagatacgtacggtcaggaaggtacct

SEQ ID NO: 169372 - DNA, 33 bp, Homo sapien
tactaatagatacgtatggtcaggaaggtacct

SEQ ID NO: 169373 - DNA, 33 bp, Homo sapien
ttctgcaacttctacagatattgaaagggctaa

SEQ ID NO: 169374 - DNA, 33 bp, Homo sapien
ttctgcaacttctacatatattgaaagggctaa

SEQ ID NO: 169375 - DNA, 33 bp, Homo sapien
tgacagatgaacgaataaagacaatgtgatatc

SEQ ID NO: 169376 - DNA, 33 bp, Homo sapien
tgacagatgaacgaatgaagacaatgtgatatc

SEQ ID NO: 169377 - DNA, 33 bp, Homo sapien
ttaattcagtccaagacgatttatgtatccagc

SEQ ID NO: 169378 - DNA, 33 bp, Homo sapien
ttaattcagtccaagatgatttatgtatccagc

SEQ ID NO: 169379 - DNA, 33 bp, Homo sapien
agtcatttgagccttagaaatgtgctaaatttg

SEQ ID NO: 169380 - DNA, 33 bp, Homo sapien
agtcatttgagccttataaatgtgctaaatttg

SEQ ID NO: 169381 - DNA, 33 bp, Homo sapien
tgagagatatttttcacgacaaggcctgcctta

SEQ ID NO: 169382 - DNA, 33 bp, Homo sapien
tgagagatatttttcatgacaaggcctgcctta

SEQ ID NO: 169383 - DNA, 33 bp, Homo sapien
ttggaaaacgctctgcaagatatcatccaggag

SEQ ID NO: 169384 - DNA, 33 bp, Homo sapien
ttggaaaacgctctgccagatatcatccaggag

SEQ ID NO: 169385 - DNA, 33 bp, Homo sapien
taaaacaaatcactcaccaccataagctttttt

SEQ ID NO: 169386 - DNA, 33 bp, Homo sapien
taaaacaaatcactcatcaccataagctttttt

SEQ ID NO: 169387 - DNA, 33 bp, Homo sapien
gtgaacaataaataggacaagtgctaggacaaa

SEQ ID NO: 169388 - DNA, 33 bp, Homo sapien
gtgaacaataaatagggcaagtgctaggacaaa

SEQ ID NO: 169389 - DNA, 33 bp, Homo sapien
actctctcaaaatgaacatcaaatactacaatg

SEQ ID NO: 169390 - DNA, 33 bp, Homo sapien
actctctcaaaatgaagatcaaatactacaatg

SEQ ID NO: 169391 - DNA, 33 bp, Homo sapien; identical to SEQ ID NO: 169389

SEQ ID NO: 169392 - DNA, 33 bp, Homo sapien; identical to SEQ ID NO: 169390

SEQ ID NO: 169393 - DNA, 33 bp, Homo sapien
taagctaatgaggaaactggaaattttaaaatt

SEQ ID NO: 169394 - DNA, 33 bp, Homo sapien
taagctaatgaggaaagtggaaattttaaaatt

SEQ ID NO: 169395 - DNA, 33 bp, Homo sapien
ccattctactttctgaccttatgagtttgactt

SEQ ID NO: 169396 - DNA, 33 bp, Homo sapien
ccattctactttctgatcttatgagtttgactt

SEQ ID NO: 169397 - DNA, 33 bp, Homo sapien
agagttgcctaaaacaggatattttctaaagat

SEQ ID NO: 169398 - DNA, 33 bp, Homo sapien
agagttgcctaaaacatgatattttctaaagat

SEQ ID NO: 169399 - DNA, 33 bp, Homo sapien
acatagcgatcatagaccatccccaccagtagg

SEQ ID NO: 169400 - DNA, 33 bp, Homo sapien
acatagcgatcatagatcatccccaccagtagg

SEQ ID NO: 169401 - DNA, 33 bp, Homo sapien
gcacccataatcttccgaggtacacaaaccaat

SEQ ID NO: 169402 - DNA, 33 bp, Homo sapien
gcacccataatcttcctaggtacacaaaccaat

SEQ ID NO: 169403 - DNA, 33 bp, Homo sapien
taagtggtaaaagatgcacaaacatttaattct

SEQ ID NO: 169404 - DNA, 33 bp, Homo sapien
taagtggtaaaagatggacaaacatttaattct

SEQ ID NO: 169405 - DNA, 33 bp, Homo sapien
tttatgagactctgtacctaacactcttatgac

SEQ ID NO: 169406 - DNA, 33 bp, Homo sapien
tttatgagactctgtatctaacactcttatgac

SEQ ID NO: 169407 - DNA, 33 bp, Homo sapien
ccttaaccgtcagtaccagagagttaagagtaa

SEQ ID NO: 169408 - DNA, 33 bp, Homo sapien
ccttaaccgtcagtactagagagttaagagtaa

SEQ ID NO: 169409 - DNA, 33 bp, Homo sapien
taaatggcccaaactcacataaaaaacggcgaa

SEQ ID NO: 169410 - DNA, 33 bp, Homo sapien
taaatggcccaaactctcataaaaaacggcgaa

SEQ ID NO: 169411 - DNA, 33 bp, Homo sapien
cagatatgatcaaagacactgtggtttaaatta

SEQ ID NO: 169412 - DNA, 33 bp, Homo sapien
cagatatgatcaaagatactgtggtttaaatta

SEQ ID NO: 169413 - DNA, 33 bp, Homo sapien
tgaagtctagttttgaagatagaagagggaaaa

SEQ ID NO: 169414 - DNA, 33 bp, Homo sapien
tgaagtctagttttgaggatagaagagggaaaa

SEQ ID NO: 169415 - DNA, 33 bp, Homo sapien
ctcccttcctggcaataagttttaagggtgttt

SEQ ID NO: 169416 - DNA, 33 bp, Homo sapien
ctcccttcctggcaatgagttttaagggtgttt

SEQ ID NO: 169417 - DNA, 33 bp, Homo sapien
cctgcaggtgcacaaactgcaagagatgaggct

SEQ ID NO: 169418 - DNA, 33 bp, Homo sapien
cctgcaggtgcacaaattgcaagagatgaggct

SEQ ID NO: 169419 - DNA, 33 bp, Homo sapien
tgccataattctctaacgaccgagataatgaaa

SEQ ID NO: 169420 - DNA, 33 bp, Homo sapien
tgccataattctctaatgaccgagataatgaaa

SEQ ID NO: 169421 - DNA, 33 bp, Homo sapien; identical to SEQ ID NO: 169419

SEQ ID NO: 169422 - DNA, 33 bp, Homo sapien; identical to SEQ ID NO: 169420

SEQ ID NO: 169423 - DNA, 33 bp, Homo sapien
gataaaaacttgaatgaagcattctgagaaact

SEQ ID NO: 169424 - DNA, 33 bp, Homo sapien
gataaaaacttgaatggagcattctgagaaact

SEQ ID NO: 169425 - DNA, 33 bp, Homo sapien
tcatagaatctgtgaaagtatatataggagggc

SEQ ID NO: 169426 - DNA, 33 bp, Homo sapien
tcatagaatctgtgaaggtatatataggagggc

SEQ ID NO: 169427 - DNA, 33 bp, Homo sapien
ttgtgagtgatttgaggcctattgtggaaaagg

SEQ ID NO: 169428 - DNA, 33 bp, Homo sapien
ttgtgagtgatttgagtcctattgtggaaaagg

SEQ ID NO: 169429 - DNA, 33 bp, Homo sapien
cagattcgagaggaaccgagtttccaaactgct

SEQ ID NO: 169430 - DNA, 33 bp, Homo sapien
cagattcgagaggaactgagtttccaaactgct

SEQ ID NO: 169431 - DNA, 33 bp, Homo sapien
ctagaaaagctcacaaggaataaaccagaagag

SEQ ID NO: 169432 - DNA, 33 bp, Homo sapien
ctagaaaagctcacaatgaataaaccagaagag

SEQ ID NO: 169433 - DNA, 33 bp, Homo sapien
caaaaaaaataactggacattgtgacccacaac

SEQ ID NO: 169434 - DNA, 33 bp, Homo sapien
caaaaaaaataactgggcattgtgacccacaac

SEQ ID NO: 169435 - DNA, 33 bp, Homo sapien
tatcttcatataaaaaatagagagcagcattgc

SEQ ID NO: 169436 - DNA, 33 bp, Homo sapien
tatcttcatataaaaagtagagagcagcattgc

SEQ ID NO: 169437 - DNA, 33 bp, Homo sapien
accacctttttgaatgcatgaaacttataaaaa

SEQ ID NO: 169438 - DNA, 33 bp, Homo sapien
accacctttttgaatgtatgaaacttataaaaa

SEQ ID NO: 169439 - DNA, 33 bp, Homo sapien
agaaacatttgtattggatctgaccgtcaaaat

SEQ ID NO: 169440 - DNA, 33 bp, Homo sapien
agaaacatttgtattgtatctgaccgtcaaaat

SEQ ID NO: 169441 - DNA, 33 bp, Homo sapien
aaccaccagaacaagaagctggaaggttagtac

SEQ ID NO: 169442 - DNA, 33 bp, Homo sapien
aaccaccagaacaagatgctggaaggttagtac

SEQ ID NO: 169443 - DNA, 33 bp, Homo sapien
caccctttgatatcagacaacctacatgagagt

SEQ ID NO: 169444 - DNA, 33 bp, Homo sapien
caccctttgatatcaggcaacctacatgagagt

SEQ ID NO: 169445 - DNA, 33 bp, Homo sapien
ttctctctctgtttcaccaacgctggagggcaa

SEQ ID NO: 169446 - DNA, 33 bp, Homo sapien
ttctctctctgtttcatcaacgctggagggcaa

SEQ ID NO: 169447 - DNA, 33 bp, Homo sapien
aaagcatttctcatctaacactgcccagggccc

SEQ ID NO: 169448 - DNA, 33 bp, Homo sapien
aaagcatttctcatctgacactgcccagggccc

SEQ ID NO: 169449 - DNA, 33 bp, Homo sapien; identical to SEQ ID NO: 169447

SEQ ID NO: 169450 - DNA, 33 bp, Homo sapien; identical to SEQ ID NO: 169448

SEQ ID NO: 169451 - DNA, 33 bp, Homo sapien
atatttctatttgacgaagggattgactcattc

SEQ ID NO: 169452 - DNA, 33 bp, Homo sapien
atatttctatttgacggagggattgactcattc

SEQ ID NO: 169453 - DNA, 33 bp, Homo sapien
tccaaaaacacgattcgataactaatgctactt

SEQ ID NO: 169454 - DNA, 33 bp, Homo sapien
tccaaaaacacgattctataactaatgctactt

SEQ ID NO: 169455 - DNA, 33 bp, Homo sapien
caacacctataattaactgtaataccacagtaa

SEQ ID NO: 169456 - DNA, 33 bp, Homo sapien
caacacctataattaattgtaataccacagtaa

SEQ ID NO: 169457 - DNA, 33 bp, Homo sapien
catgtctctctgcaaacaccttcacagactcac

SEQ ID NO: 169458 - DNA, 33 bp, Homo sapien
catgtctctctgcaaataccttcacagactcac

SEQ ID NO: 169459 - DNA, 33 bp, Homo sapien
gatcttgataacaacacagtatttagggcatat

SEQ ID NO: 169460 - DNA, 33 bp, Homo sapien
gatcttgataacaacatagtatttagggcatat

SEQ ID NO: 169461 - DNA, 33 bp, Homo sapien; identical to SEQ ID NO: 169459

SEQ ID NO: 169462 - DNA, 33 bp, Homo sapien; identical to SEQ ID NO: 169460

SEQ ID NO: 169463 - DNA, 33 bp, Homo sapien
tataagaaatgaggtcactttttctcaatgttt

SEQ ID NO: 169464 - DNA, 33 bp, Homo sapien
tataagaaatgaggtcgctttttctcaatgttt

SEQ ID NO: 169465 - DNA, 33 bp, Homo sapien
caacaggtcattcttcaaagttacacttttcag

SEQ ID NO: 169466 - DNA, 33 bp, Homo sapien
caacaggtcattcttcgaagttacacttttcag

SEQ ID NO: 169467 - DNA, 33 bp, Homo sapien; identical to SEQ ID NO: 169465

SEQ ID NO: 169468 - DNA, 33 bp, Homo sapien; identical to SEQ ID NO: 169466

SEQ ID NO: 169469 - DNA, 33 bp, Homo sapien
ctggagtgttagataaactcaacaaattcagag

SEQ ID NO: 169470 - DNA, 33 bp, Homo sapien
ctggagtgttagataagctcaacaaattcagag

SEQ ID NO: 169471 - DNA, 33 bp, Homo sapien
tctgagttatcacaaaagagtctcctattctgg

SEQ ID NO: 169472 - DNA, 33 bp, Homo sapien
tctgagttatcacaaaggagtctcctattctgg

SEQ ID NO: 169473 - DNA, 33 bp, Homo sapien
agcaaatcttcaagaaacttttcaagtatgaga

SEQ ID NO: 169474 - DNA, 33 bp, Homo sapien
agcaaatcttcaagaaccttttcaagtatgaga

SEQ ID NO: 169475 - DNA, 33 bp, Homo sapien
cctcacgtctcatccaatgccaaaatcaactca

SEQ ID NO: 169476 - DNA, 33 bp, Homo sapien
cctcacgtctcatccagtgccaaaatcaactca

SEQ ID NO: 169477 - DNA, 33 bp, Homo sapien
gtccacaaaagcaaaaatcaacagctggaatta

SEQ ID NO: 169478 - DNA, 33 bp, Homo sapien
gtccacaaaagcaaaattcaacagctggaatta

SEQ ID NO: 169479 - DNA, 33 bp, Homo sapien
gtcctaaagctctataggtgattgcactacagc

SEQ ID NO: 169480 - DNA, 33 bp, Homo sapien
gtcctaaagctctatatgtgattgcactacagc

SEQ ID NO: 169481 - DNA, 33 bp, Homo sapien
gcaccttcctgctacacgtacctaattcacagc

SEQ ID NO: 169482 - DNA, 33 bp, Homo sapien
gcaccttcctgctacatgtacctaattcacagc

SEQ ID NO: 169483 - DNA, 33 bp, Homo sapien
tccaggcatccttaaaatgtaataaaggatgca

SEQ ID NO: 169484 - DNA, 33 bp, Homo sapien
tccaggcatccttaaagtgtaataaaggatgca

SEQ ID NO: 169485 - DNA, 33 bp, Homo sapien
gagttatgagaatttcaagagtgaatccagaaa

SEQ ID NO: 169486 - DNA, 33 bp, Homo sapien
gagttatgagaatttcgagagtgaatccagaaa

SEQ ID NO: 169487 - DNA, 33 bp, Homo sapien
cactgcacgtataagccgacatccatgctgttc

SEQ ID NO: 169488 - DNA, 33 bp, Homo sapien
cactgcacgtataagctgacatccatgctgttc

SEQ ID NO: 169489 - DNA, 33 bp, Homo sapien
tgctgatctgtaggagacaccaggaaatcaaga

SEQ ID NO: 169490 - DNA, 33 bp, Homo sapien
tgctgatctgtaggaggcaccaggaaatcaaga

SEQ ID NO: 169491 - DNA, 33 bp, Homo sapien
cacagataaagccaatgaggatctttaaattaa

SEQ ID NO: 169492 - DNA, 33 bp, Homo sapien
cacagataaagccaattaggatctttaaattaa

SEQ ID NO: 169493 - DNA, 33 bp, Homo sapien
cagcatctttttcttacggcaagcctcttgatt

SEQ ID NO: 169494 - DNA, 33 bp, Homo sapien
cagcatctttttcttatggcaagcctcttgatt

SEQ ID NO: 169495 - DNA, 33 bp, Homo sapien
ataaaagggagtgaacaaagcctccaataaata

SEQ ID NO: 169496 - DNA, 33 bp, Homo sapien
ataaaagggagtgaacgaagcctccaataaata

SEQ ID NO: 169497 - DNA, 33 bp, Homo sapien
actgatagagattgaactgaaaataaaaaaaca

SEQ ID NO: 169498 - DNA, 33 bp, Homo sapien
actgatagagattgaagtgaaaataaaaaaaca

SEQ ID NO: 169499 - DNA, 33 bp, Homo sapien
ggcccagatctatttacgaagacaatcaagtgg

SEQ ID NO: 169500 - DNA, 33 bp, Homo sapien
ggcccagatctatttatgaagacaatcaagtgg

SEQ ID NO: 169501 - DNA, 33 bp, Homo sapien
gcatttgcttgtcttgaaagaatcttatttctc

SEQ ID NO: 169502 - DNA, 33 bp, Homo sapien
gcatttgcttgtcttggaagaatcttatttctc

SEQ ID NO: 169503 - DNA, 33 bp, Homo sapien
gtttcttacaagcagccagtgatttattttaga

SEQ ID NO: 169504 - DNA, 33 bp, Homo sapien
gtttcttacaagcagcgagtgatttattttaga

SEQ ID NO: 169505 - DNA, 33 bp, Homo sapien
attagccacaaaaaaaacttgaagtaacgcatt

SEQ ID NO: 169506 - DNA, 33 bp, Homo sapien
attagccacaaaaaaaccttgaagtaacgcatt

SEQ ID NO: 169507 - DNA, 33 bp, Homo sapien
aaagttatgttattaacggtgattgtatttgta

SEQ ID NO: 169508 - DNA, 33 bp, Homo sapien
aaagttatgttattaatggtgattgtatttgta

SEQ ID NO: 169509 - DNA, 33 bp, Homo sapien; identical to SEQ ID NO: 169507

SEQ ID NO: 169510 - DNA, 33 bp, Homo sapien; identical to SEQ ID NO: 169508

SEQ ID NO: 169511 - DNA, 33 bp, Homo sapien
gccagtaagaggaatacatgagtaagagattta

SEQ ID NO: 169512 - DNA, 33 bp, Homo sapien
gccagtaagaggaatatatgagtaagagattta

SEQ ID NO: 169513 - DNA, 33 bp, Homo sapien
atgtggctgttatgaacaattttgtacacgtct

SEQ ID NO: 169514 - DNA, 33 bp, Homo sapien
atgtggctgttatgaataattttgtacacgtct

SEQ ID NO: 169515 - DNA, 33 bp, Homo sapien
atcctcagaggtagcacgaaatttggctttgcc

SEQ ID NO: 169516 - DNA, 33 bp, Homo sapien
atcctcagaggtagcatgaaatttggctttgcc

SEQ ID NO: 169517 - DNA, 33 bp, Homo sapien; identical to SEQ ID NO: 169515

SEQ ID NO: 169518 - DNA, 33 bp, Homo sapien; identical to SEQ ID NO: 169516

SEQ ID NO: 169519 - DNA, 33 bp, Homo sapien
tcagagtctcacatttaaaacggcccttccaaa

SEQ ID NO: 169520 - DNA, 33 bp, Homo sapien
tcagagtctcacatttgaaacggcccttccaaa

SEQ ID NO: 169521 - DNA, 33 bp, Homo sapien
aaagtctggcagaggaaaagtacgcagtggcta

SEQ ID NO: 169522 - DNA, 33 bp, Homo sapien
aaagtctggcagaggagaagtacgcagtggcta

SEQ ID NO: 169523 - DNA, 33 bp, Homo sapien
caccaataattacctaccattttcagctaattg

SEQ ID NO: 169524 - DNA, 33 bp, Homo sapien
caccaataattacctatcattttcagctaattg

SEQ ID NO: 169525 - DNA, 33 bp, Homo sapien
ctacatcagctgcataagttcaggcacagaata

SEQ ID NO: 169526 - DNA, 33 bp, Homo sapien
ctacatcagctgcataggttcaggcacagaata

SEQ ID NO: 169527 - DNA, 33 bp, Homo sapien
gactgaggttacatagaaaataaatgacagagc

SEQ ID NO: 169528 - DNA, 33 bp, Homo sapien
gactgaggttacatagcaaataaatgacagagc

SEQ ID NO: 169529 - DNA, 33 bp, Homo sapien
ccttccccttccttcaacagatgtggactccat

SEQ ID NO: 169530 - DNA, 33 bp, Homo sapien
ccttccccttccttcagcagatgtggactccat

SEQ ID NO: 169531 - DNA, 33 bp, Homo sapien
gctgcttcagtggccaaggaagaatgaacataa

SEQ ID NO: 169532 - DNA, 33 bp, Homo sapien
gctgcttcagtggccagggaagaatgaacataa

SEQ ID NO: 169533 - DNA, 33 bp, Homo sapien
ctttttaatcaacatccaagtaagctgcttgtg

SEQ ID NO: 169534 - DNA, 33 bp, Homo sapien
ctttttaatcaacatctaagtaagctgcttgtg

SEQ ID NO: 169535 - DNA, 33 bp, Homo sapien
gattcaaataaagttacgttcatagcaaagaac

SEQ ID NO: 169536 - DNA, 33 bp, Homo sapien
gattcaaataaagttatgttcatagcaaagaac

SEQ ID NO: 169537 - DNA, 33 bp, Homo sapien
agagcctaatatatgacaagcacttaaaaaata

SEQ ID NO: 169538 - DNA, 33 bp, Homo sapien
agagcctaatatatgataagcacttaaaaaata

SEQ ID NO: 169539 - DNA, 33 bp, Homo sapien
tacatcaatagtgctacctcaaacatccataca

SEQ ID NO: 169540 - DNA, 33 bp, Homo sapien
tacatcaatagtgctatctcaaacatccataca

SEQ ID NO: 169541 - DNA, 33 bp, Homo sapien
gtcatggggattcctacggttaatattctagag

SEQ ID NO: 169542 - DNA, 33 bp, Homo sapien
gtcatggggattcctatggttaatattctagag

SEQ ID NO: 169543 - DNA, 33 bp, Homo sapien
tgagaatggactaatacagttcaggatttgcaa

SEQ ID NO: 169544 - DNA, 33 bp, Homo sapien
tgagaatggactaatagagttcaggatttgcaa

SEQ ID NO: 169545 - DNA, 33 bp, Homo sapien
agttcacatgagacacagaaattaaaaatgaga

SEQ ID NO: 169546 - DNA, 33 bp, Homo sapien
agttcacatgagacaccgaaattaaaaatgaga

SEQ ID NO: 169547 - DNA, 33 bp, Homo sapien
ttcaacaactggctgaatataacttaacattag

SEQ ID NO: 169548 - DNA, 33 bp, Homo sapien
ttcaacaactggctgagtataacttaacattag

SEQ ID NO: 169549 - DNA, 33 bp, Homo sapien
gatggctccagtacaacaccagaacttgagcaa

SEQ ID NO: 169550 - DNA, 33 bp, Homo sapien
gatggctccagtacaataccagaacttgagcaa

SEQ ID NO: 169551 - DNA, 33 bp, Homo sapien
aagaaaccaactgcagacagattaagtacatta

SEQ ID NO: 169552 - DNA, 33 bp, Homo sapien
aagaaaccaactgcagtcagattaagtacatta

SEQ ID NO: 169553 - DNA, 33 bp, Homo sapien
cagccctaaaccaaagaaaacataatggaggtt

SEQ ID NO: 169554 - DNA, 33 bp, Homo sapien
cagccctaaaccaaaggaaacataatggaggtt

SEQ ID NO: 169555 - DNA, 33 bp, Homo sapien
ctgatgtttagaaagactaagtagcttgttgaa

SEQ ID NO: 169556 - DNA, 33 bp, Homo sapien
ctgatgtttagaaagattaagtagcttgttgaa

SEQ ID NO: 169557 - DNA, 33 bp, Homo sapien
actaaatgttcttggaatatgtgatctgatttt

SEQ ID NO: 169558 - DNA, 33 bp, Homo sapien
actaaatgttcttggagtatgtgatctgatttt

SEQ ID NO: 169559 - DNA, 33 bp, Homo sapien
atctgccaagctcatacgggtattaagtgatgt

SEQ ID NO: 169560 - DNA, 33 bp, Homo sapien
atctgccaagctcatatgggtattaagtgatgt

SEQ ID NO: 169561 - DNA, 33 bp, Homo sapien
ggtttaaagtaatgcaacaaagtaggcagaata

SEQ ID NO: 169562 - DNA, 33 bp, Homo sapien
ggtttaaagtaatgcagcaaagtaggcagaata

SEQ ID NO: 169563 - DNA, 33 bp, Homo sapien; identical to SEQ ID NO: 169561

SEQ ID NO: 169564 - DNA, 33 bp, Homo sapien; identical to SEQ ID NO: 169562

SEQ ID NO: 169565 - DNA, 33 bp, Homo sapien
aagtggttaacatctacctcgtagggataatgc

SEQ ID NO: 169566 - DNA, 33 bp, Homo sapien
aagtggttaacatctatctcgtagggataatgc

SEQ ID NO: 169567 - DNA, 33 bp, Homo sapien
caagaaacattctgtacgtctaataagtgttct

SEQ ID NO: 169568 - DNA, 33 bp, Homo sapien
caagaaacattctgtatgtctaataagtgttct

SEQ ID NO: 169569 - DNA, 33 bp, Homo sapien
ataataataaacacatcactaatacactattcc

SEQ ID NO: 169570 - DNA, 33 bp, Homo sapien
ataataataaacacatgactaatacactattcc

SEQ ID NO: 169571 - DNA, 33 bp, Homo sapien
aaagcctgctgtgagacgggatattggtgttga

SEQ ID NO: 169572 - DNA, 33 bp, Homo sapien
aaagcctgctgtgagatgggatattggtgttga

SEQ ID NO: 169573 - DNA, 33 bp, Homo sapien
gctcactggtcaaaccaaatgaagagtgagaag

SEQ ID NO: 169574 - DNA, 33 bp, Homo sapien
gctcactggtcaaacccaatgaagagtgagaag

SEQ ID NO: 169575 - DNA, 33 bp, Homo sapien
tccccacaagctctaaatattacaacataccag

SEQ ID NO: 169576 - DNA, 33 bp, Homo sapien
tccccacaagctctaagtattacaacataccag

SEQ ID NO: 169577 - DNA, 33 bp, Homo sapien
gaaaaaataggaggatgaacctgagaatgaata

SEQ ID NO: 169578 - DNA, 33 bp, Homo sapien
gaaaaaataggaggattaacctgagaatgaata

SEQ ID NO: 169579 - DNA, 33 bp, Homo sapien
tctttagttcttgtacactgcaaatgcaattcc

SEQ ID NO: 169580 - DNA, 33 bp, Homo sapien
tctttagttcttgtacgctgcaaatgcaattcc

SEQ ID NO: 169581 - DNA, 33 bp, Homo sapien
aagtttaagagataataagagtaagagagtatt

SEQ ID NO: 169582 - DNA, 33 bp, Homo sapien
aagtttaagagataatgagagtaagagagtatt

SEQ ID NO: 169583 - DNA, 33 bp, Homo sapien
agtagaaccacttgccactgatgaggacacaga

SEQ ID NO: 169584 - DNA, 33 bp, Homo sapien
agtagaaccacttgccgctgatgaggacacaga

SEQ ID NO: 169585 - DNA, 33 bp, Homo sapien
tctctttttgtgttcaaattacttcttgtaagt

SEQ ID NO: 169586 - DNA, 33 bp, Homo sapien
tctctttttgtgttcacattacttcttgtaagt

SEQ ID NO: 169587 - DNA, 33 bp, Homo sapien
ttaccaaaaggcgttaacagaagattatctttt

SEQ ID NO: 169588 - DNA, 33 bp, Homo sapien
ttaccaaaaggcgttagcagaagattatctttt

SEQ ID NO: 169589 - DNA, 33 bp, Homo sapien
agctcacattggtgcaagcaggattttaactcc

SEQ ID NO: 169590 - DNA, 33 bp, Homo sapien
agctcacattggtgcaggcaggattttaactcc

SEQ ID NO: 169591 - DNA, 33 bp, Homo sapien
tattgttagattgatcacttgtgctgttttagt

SEQ ID NO: 169592 - DNA, 33 bp, Homo sapien
tattgttagattgatcgcttgtgctgttttagt

SEQ ID NO: 169593 - DNA, 33 bp, Homo sapien
acattgccttagataccatggatacaatggtaa

SEQ ID NO: 169594 - DNA, 33 bp, Homo sapien
acattgccttagatactatggatacaatggtaa

SEQ ID NO: 169595 - DNA, 33 bp, Homo sapien
aatgacacttcatgataaatatcacttgcactc

SEQ ID NO: 169596 - DNA, 33 bp, Homo sapien
aatgacacttcatgatgaatatcacttgcactc

SEQ ID NO: 169597 - DNA, 33 bp, Homo sapien
ccttgttcacagattgaaagacttaactatcat

SEQ ID NO: 169598 - DNA, 33 bp, Homo sapien
ccttgttcacagattggaagacttaactatcat

SEQ ID NO: 169599 - DNA, 33 bp, Homo sapien
attctctaatacataaactctctcttaaaaaga

SEQ ID NO: 169600 - DNA, 33 bp, Homo sapien
attctctaatacataacctctctcttaaaaaga

SEQ ID NO: 169601 - DNA, 33 bp, Homo sapien
aatctggtgtattagtcaaggttcgtcagagag

SEQ ID NO: 169602 - DNA, 33 bp, Homo sapien
aatctggtgtattagttaaggttcgtcagagag

SEQ ID NO: 169603 - DNA, 33 bp, Homo sapien
atctactctccgttaccatgagtttgacttctt

SEQ ID NO: 169604 - DNA, 33 bp, Homo sapien
atctactctccgttactatgagtttgacttctt

SEQ ID NO: 169605 - DNA, 33 bp, Homo sapien
gtggtccctactctcaaaaattttacagtctag

SEQ ID NO: 169606 - DNA, 33 bp, Homo sapien
gtggtccctactctcataaattttacagtctag

SEQ ID NO: 169607 - DNA, 33 bp, Homo sapien
cacccatctgaaccaaagagatgtactcccaac

SEQ ID NO: 169608 - DNA, 33 bp, Homo sapien
cacccatctgaaccaaggagatgtactcccaac

SEQ ID NO: 169609 - DNA, 33 bp, Homo sapien
atatatagttactcaaaactttgggggcaactt

SEQ ID NO: 169610 - DNA, 33 bp, Homo sapien
atatatagttactcaatactttgggggcaactt

SEQ ID NO: 169611 - DNA, 33 bp, Homo sapien
cttttataatgaaaaactgggaggaagcagaaa

SEQ ID NO: 169612 - DNA, 33 bp, Homo sapien
cttttataatgaaaaagtgggaggaagcagaaa

SEQ ID NO: 169613 - DNA, 33 bp, Homo sapien
atactgtgtgcacattcaacatcaataaacttg

SEQ ID NO: 169614 - DNA, 33 bp, Homo sapien
atactgtgtgcacattgaacatcaataaacttg

SEQ ID NO: 169615 - DNA, 33 bp, Homo sapien
ggatatgcctttcgccaggagtactcaatgaac

SEQ ID NO: 169616 - DNA, 33 bp, Homo sapien
ggatatgcctttcgcccggagtactcaatgaac

SEQ ID NO: 169617 - DNA, 33 bp, Homo sapien
tatttctatgaacatacggccaattttatcttt

SEQ ID NO: 169618 - DNA, 33 bp, Homo sapien
tatttctatgaacatatggccaattttatcttt

SEQ ID NO: 169619 - DNA, 33 bp, Homo sapien
ctctgcccagattacactgcatttatgttttac

SEQ ID NO: 169620 - DNA, 33 bp, Homo sapien
ctctgcccagattacattgcatttatgttttac

SEQ ID NO: 169621 - DNA, 33 bp, Homo sapien
tctcaggaggaatatccatgatcttcttcttcc

SEQ ID NO: 169622 - DNA, 33 bp, Homo sapien
tctcaggaggaatatcgatgatcttcttcttcc

SEQ ID NO: 169623 - DNA, 33 bp, Homo sapien
ggagaggataacaagcccttgtgcttatttaga

SEQ ID NO: 169624 - DNA, 33 bp, Homo sapien
ggagaggataacaagcgcttgtgcttatttaga

SEQ ID NO: 169625 - DNA, 33 bp, Homo sapien
attagggaaagtcaaggattgaaatcctaaccc

SEQ ID NO: 169626 - DNA, 33 bp, Homo sapien
attagggaaagtcaagtattgaaatcctaaccc

SEQ ID NO: 169627 - DNA, 33 bp, Homo sapien
gtgaaaaaaccgcatgacatagacaagaaaaaa

SEQ ID NO: 169628 - DNA, 33 bp, Homo sapien
gtgaaaaaaccgcatggcatagacaagaaaaaa

SEQ ID NO: 169629 - DNA, 33 bp, Homo sapien
gaatgagaggattctacgacgtaacagaaagct

SEQ ID NO: 169630 - DNA, 33 bp, Homo sapien
gaatgagaggattctatgacgtaacagaaagct

SEQ ID NO: 169631 - DNA, 33 bp, Homo sapien
tagtttaagtcctaaacgtctgattctcaaata

SEQ ID NO: 169632 - DNA, 33 bp, Homo sapien
tagtttaagtcctaaatgtctgattctcaaata

SEQ ID NO: 169633 - DNA, 33 bp, Homo sapien
ggtgaagatcaaaaaactgttagcttctatgct

SEQ ID NO: 169634 - DNA, 33 bp, Homo sapien
ggtgaagatcaaaaaagtgttagcttctatgct

SEQ ID NO: 169635 - DNA, 33 bp, Homo sapien
cagcttctatggaagacgcaccaaagacagacc

SEQ ID NO: 169636 - DNA, 33 bp, Homo sapien
cagcttctatggaagatgcaccaaagacagacc

SEQ ID NO: 169637 - DNA, 33 bp, Homo sapien
tctgttttgtgttggacgataagagctgatgtg

SEQ ID NO: 169638 - DNA, 33 bp, Homo sapien
tctgttttgtgttggatgataagagctgatgtg

SEQ ID NO: 169639 - DNA, 33 bp, Homo sapien
aatacaagggtgcccacattaatcgtattttca

SEQ ID NO: 169640 - DNA, 33 bp, Homo sapien
aatacaagggtgcccatattaatcgtattttca

SEQ ID NO: 169641 - DNA, 33 bp, Homo sapien
agatcatgcttctcaacatttatgaactcctag

SEQ ID NO: 169642 - DNA, 33 bp, Homo sapien
agatcatgcttctcaatatttatgaactcctag

SEQ ID NO: 169643 - DNA, 33 bp, Homo sapien
accaaaagttgagttgacaaatagacaaagtag

SEQ ID NO: 169644 - DNA, 33 bp, Homo sapien
accaaaagttgagttgccaaatagacaaagtag

SEQ ID NO: 169645 - DNA, 33 bp, Homo sapien
taaagcacaaagctaactcataaagaccccaat

SEQ ID NO: 169646 - DNA, 33 bp, Homo sapien
taaagcacaaagctaattcataaagaccccaat

SEQ ID NO: 169647 - DNA, 33 bp, Homo sapien
gatcattggtattatacaggtttgtttgtcaat

SEQ ID NO: 169648 - DNA, 33 bp, Homo sapien
gatcattggtattatataggtttgtttgtcaat

SEQ ID NO: 169649 - DNA, 33 bp, Homo sapien
tagcatggatgttggaaaaaatgactattatgg

SEQ ID NO: 169650 - DNA, 33 bp, Homo sapien
tagcatggatgttggacaaaatgactattatgg

SEQ ID NO: 169651 - DNA, 33 bp, Homo sapien
ccatattttagcattcaatacaaacatcatgtt

SEQ ID NO: 169652 - DNA, 33 bp, Homo sapien
ccatattttagcattccatacaaacatcatgtt

SEQ ID NO: 169653 - DNA, 33 bp, Homo sapien
attaattgcaataaggaagtacaggttgatgga

SEQ ID NO: 169654 - DNA, 33 bp, Homo sapien
attaattgcaataaggcagtacaggttgatgga

SEQ ID NO: 169655 - DNA, 33 bp, Homo sapien
cttccaatgggcaacaacaaaccaatgtcatcc

SEQ ID NO: 169656 - DNA, 33 bp, Homo sapien
cttccaatgggcaacagcaaaccaatgtcatcc

SEQ ID NO: 169657 - DNA, 33 bp, Homo sapien
gaggagcacagattatcagcaattacttaatag

SEQ ID NO: 169658 - DNA, 33 bp, Homo sapien
gaggagcacagattatgagcaattacttaatag

SEQ ID NO: 169659 - DNA, 33 bp, Homo sapien
ttgatattcataaacaagtcagttcttcatgag

SEQ ID NO: 169660 - DNA, 33 bp, Homo sapien
ttgatattcataaacacgtcagttcttcatgag

SEQ ID NO: 169661 - DNA, 33 bp, Homo sapien
gcctggtacataactaaaattgcttactaacca

SEQ ID NO: 169662 - DNA, 33 bp, Homo sapien
gcctggtacataactagaattgcttactaacca

SEQ ID NO: 169663 - DNA, 33 bp, Homo sapien
cttgggaggggtaagaagtagaatgacacagtt

SEQ ID NO: 169664 - DNA, 33 bp, Homo sapien
cttgggaggggtaagaggtagaatgacacagtt

SEQ ID NO: 169665 - DNA, 33 bp, Homo sapien
taagatttcccgatagaataacaaattattgaa

SEQ ID NO: 169666 - DNA, 33 bp, Homo sapien
taagatttcccgataggataacaaattattgaa

SEQ ID NO: 169667 - DNA, 33 bp, Homo sapien
tcctattcacaaaaaagctgactaatacatatt

SEQ ID NO: 169668 - DNA, 33 bp, Homo sapien
tcctattcacaaaaaatctgactaatacatatt

SEQ ID NO: 169669 - DNA, 33 bp, Homo sapien
ccttctgaagctttctcaccattctcagccttg

SEQ ID NO: 169670 - DNA, 33 bp, Homo sapien
ccttctgaagctttcttaccattctcagccttg

SEQ ID NO: 169671 - DNA, 33 bp, Homo sapien
gtagccatctctataaactaaaagtgcaaggta

SEQ ID NO: 169672 - DNA, 33 bp, Homo sapien
gtagccatctctataacctaaaagtgcaaggta

SEQ ID NO: 169673 - DNA, 33 bp, Homo sapien
agaggaaagtcaccaaagctctaatgcctgaac

SEQ ID NO: 169674 - DNA, 33 bp, Homo sapien
agaggaaagtcaccaaggctctaatgcctgaac

SEQ ID NO: 169675 - DNA, 33 bp, Homo sapien
aggatttctgccccaaatagagagccaagtcac

SEQ ID NO: 169676 - DNA, 33 bp, Homo sapien
aggatttctgccccaagtagagagccaagtcac

SEQ ID NO: 169677 - DNA, 33 bp, Homo sapien
gcttgcaaatggagcacataggaatcatggaat

SEQ ID NO: 169678 - DNA, 33 bp, Homo sapien
gcttgcaaatggagcagataggaatcatggaat

SEQ ID NO: 169679 - DNA, 33 bp, Homo sapien
gatgcaacaagagtaaagagcccagaatgatgc

SEQ ID NO: 169680 - DNA, 33 bp, Homo sapien
gatgcaacaagagtaaggagcccagaatgatgc

SEQ ID NO: 169681 - DNA, 33 bp, Homo sapien
cttttctgggaacttacagcgaacaaatgggtg

SEQ ID NO: 169682 - DNA, 33 bp, Homo sapien
cttttctgggaacttatagcgaacaaatgggtg

SEQ ID NO: 169683 - DNA, 33 bp, Homo sapien
gctgctgaggaataccaggtaagcgatgcctct

SEQ ID NO: 169684 - DNA, 33 bp, Homo sapien
gctgctgaggaataccgggtaagcgatgcctct

SEQ ID NO: 169685 - DNA, 33 bp, Homo sapien
agttgaggtacaaacaagaccggcaaaagctgt

SEQ ID NO: 169686 - DNA, 33 bp, Homo sapien
agttgaggtacaaacaggaccggcaaaagctgt

SEQ ID NO: 169687 - DNA, 33 bp, Homo sapien
gtccctctctctaaaaatatgtcacagcgccct

SEQ ID NO: 169688 - DNA, 33 bp, Homo sapien
gtccctctctctaaaactatgtcacagcgccct

SEQ ID NO: 169689 - DNA, 33 bp, Homo sapien; identical to SEQ ID NO: 169687

SEQ ID NO: 169690 - DNA, 33 bp, Homo sapien; identical to SEQ ID NO: 169688

SEQ ID NO: 169691 - DNA, 33 bp, Homo sapien
tatttagactaaaatcaaatactgcggatacca

SEQ ID NO: 169692 - DNA, 33 bp, Homo sapien
tatttagactaaaatcgaatactgcggatacca

SEQ ID NO: 169693 - DNA, 33 bp, Homo sapien; identical to SEQ ID NO: 169691

SEQ ID NO: 169694 - DNA, 33 bp, Homo sapien; identical to SEQ ID NO: 169692

SEQ ID NO: 169695 - DNA, 33 bp, Homo sapien
gaggaagatattcacccgaacatatacaaaata

SEQ ID NO: 169696 - DNA, 33 bp, Homo sapien
gaggaagatattcacctgaacatatacaaaata

SEQ ID NO: 169697 - DNA, 33 bp, Homo sapien
caggcctgtttctggaaggcactggactcctct

SEQ ID NO: 169698 - DNA, 33 bp, Homo sapien
caggcctgtttctggacggcactggactcctct

SEQ ID NO: 169699 - DNA, 33 bp, Homo sapien
cctatttaaaactcagacactaatctccagttt

SEQ ID NO: 169700 - DNA, 33 bp, Homo sapien
cctatttaaaactcaggcactaatctccagttt

SEQ ID NO: 169701 - DNA, 33 bp, Homo sapien
ctgaaccagtccagtccgaaacacaaagtaatg

SEQ ID NO: 169702 - DNA, 33 bp, Homo sapien
ctgaaccagtccagtctgaaacacaaagtaatg

SEQ ID NO: 169703 - DNA, 33 bp, Homo sapien
atgctgcaaatttatccacttaccacttgagcg

SEQ ID NO: 169704 - DNA, 33 bp, Homo sapien
atgctgcaaatttatctacttaccacttgagcg

SEQ ID NO: 169705 - DNA, 33 bp, Homo sapien; identical to SEQ ID NO: 169703

SEQ ID NO: 169706 - DNA, 33 bp, Homo sapien; identical to SEQ ID NO: 169704

SEQ ID NO: 169707 - DNA, 33 bp, Homo sapien
ggattggaagccatgacaaaaaatcttcctcaa

SEQ ID NO: 169708 - DNA, 33 bp, Homo sapien
ggattggaagccatgagaaaaaatcttcctcaa

SEQ ID NO: 169709 - DNA, 33 bp, Homo sapien; identical to SEQ ID NO: 169707

SEQ ID NO: 169710 - DNA, 33 bp, Homo sapien; identical to SEQ ID NO: 169708

SEQ ID NO: 169711 - DNA, 33 bp, Homo sapien
cgggggcacagaaacaagcagttgatttaagtc

SEQ ID NO: 169712 - DNA, 33 bp, Homo sapien
cgggggcacagaaacaggcagttgatttaagtc

SEQ ID NO: 169713 - DNA, 33 bp, Homo sapien
acttaaaggcgactgaagcctctcaaaatcctt

SEQ ID NO: 169714 - DNA, 33 bp, Homo sapien
acttaaaggcgactgaggcctctcaaaatcctt

SEQ ID NO: 169715 - DNA, 33 bp, Homo sapien
tggagttttaggacagacccagggctcagctcc

SEQ ID NO: 169716 - DNA, 33 bp, Homo sapien
tggagttttaggacaggcccagggctcagctcc

SEQ ID NO: 169717 - DNA, 33 bp, Homo sapien
cacatgaggttgaattaaacaccaagtgcagtc

SEQ ID NO: 169718 - DNA, 33 bp, Homo sapien
cacatgaggttgaattgaacaccaagtgcagtc

SEQ ID NO: 169719 - DNA, 33 bp, Homo sapien
tagaccttcatctccaaaatatctcatcctggt

SEQ ID NO: 169720 - DNA, 33 bp, Homo sapien
tagaccttcatctccagaatatctcatcctggt

SEQ ID NO: 169721 - DNA, 33 bp, Homo sapien
tattatcacaattagaaagggcatggcaagatg

SEQ ID NO: 169722 - DNA, 33 bp, Homo sapien
tattatcacaattagacagggcatggcaagatg

SEQ ID NO: 169723 - DNA, 33 bp, Homo sapien
taacacagtggtggtaagcaatgatatttttgt

SEQ ID NO: 169724 - DNA, 33 bp, Homo sapien
taacacagtggtggtaggcaatgatatttttgt

SEQ ID NO: 169725 - DNA, 33 bp, Homo sapien
cccaaggaagggctggcaataatagtcaccaca

SEQ ID NO: 169726 - DNA, 33 bp, Homo sapien
cccaaggaagggctggtaataatagtcaccaca

SEQ ID NO: 169727 - DNA, 33 bp, Homo sapien
gtgccccaagattgaaacttctaaatgtgaaga

SEQ ID NO: 169728 - DNA, 33 bp, Homo sapien
gtgccccaagattgaaccttctaaatgtgaaga

SEQ ID NO: 169729 - DNA, 33 bp, Homo sapien
tcactgggcacagataaacaagtatacagaaca

SEQ ID NO: 169730 - DNA, 33 bp, Homo sapien
tcactgggcacagatacacaagtatacagaaca

SEQ ID NO: 169731 - DNA, 33 bp, Homo sapien; identical to SEQ ID NO: 169729

SEQ ID NO: 169732 - DNA, 33 bp, Homo sapien; identical to SEQ ID NO: 169730

SEQ ID NO: 169733 - DNA, 33 bp, Homo sapien
agagaatcacaccttccctgagcagaaacccac

SEQ ID NO: 169734 - DNA, 33 bp, Homo sapien
agagaatcacaccttctctgagcagaaacccac

SEQ ID NO: 169735 - DNA, 33 bp, Homo sapien
atataggtaggaaaaacctgaacttaattgatg

SEQ ID NO: 169736 - DNA, 33 bp, Homo sapien
atataggtaggaaaaatctgaacttaattgatg

SEQ ID NO: 169737 - DNA, 33 bp, Homo sapien
gaaaatacaagacatgaagctgtaaagtaggat

SEQ ID NO: 169738 - DNA, 33 bp, Homo sapien
gaaaatacaagacatggagctgtaaagtaggat

SEQ ID NO: 169739 - DNA, 33 bp, Homo sapien; identical to SEQ ID NO: 169737

SEQ ID NO: 169740 - DNA, 33 bp, Homo sapien; identical to SEQ ID NO: 169738

SEQ ID NO: 169741 - DNA, 33 bp, Homo sapien
aaatctgcctgcctagacattcctatggagaga

SEQ ID NO: 169742 - DNA, 33 bp, Homo sapien
aaatctgcctgcctagccattcctatggagaga

SEQ ID NO: 169743 - DNA, 33 bp, Homo sapien
tccctggccactagaaaaacactcatgtagggc

SEQ ID NO: 169744 - DNA, 33 bp, Homo sapien
tccctggccactagaagaacactcatgtagggc

SEQ ID NO: 169745 - DNA, 33 bp, Homo sapien
tgggtactttcagggaaccaaatctatgaattt

SEQ ID NO: 169746 - DNA, 33 bp, Homo sapien
tgggtactttcagggagccaaatctatgaattt

SEQ ID NO: 169747 - DNA, 33 bp, Homo sapien; identical to SEQ ID NO: 169745

SEQ ID NO: 169748 - DNA, 33 bp, Homo sapien; identical to SEQ ID NO: 169746

SEQ ID NO: 169749 - DNA, 33 bp, Homo sapien
cagcattcagcattctcaacaacacaggttcag

SEQ ID NO: 169750 - DNA, 33 bp, Homo sapien
cagcattcagcattcttaacaacacaggttcag

SEQ ID NO: 169751 - DNA, 33 bp, Homo sapien
gtccttgcagggagtagggcacaagacaatcag

SEQ ID NO: 169752 - DNA, 33 bp, Homo sapien
gtccttgcagggagtatggcacaagacaatcag

SEQ ID NO: 169753 - DNA, 33 bp, Homo sapien
agcaggcaacatggcaacaaccaagtagagaac

SEQ ID NO: 169754 - DNA, 33 bp, Homo sapien
agcaggcaacatggcaccaaccaagtagagaac

SEQ ID NO: 169755 - DNA, 33 bp, Homo sapien
actatcactctgctaaatgtggaatctcatcta

SEQ ID NO: 169756 - DNA, 33 bp, Homo sapien
actatcactctgctaagtgtggaatctcatcta

SEQ ID NO: 169757 - DNA, 33 bp, Homo sapien
tctaaagtatggactactacagccctggcagtc

SEQ ID NO: 169758 - DNA, 33 bp, Homo sapien
tctaaagtatggactattacagccctggcagtc

SEQ ID NO: 169759 - DNA, 33 bp, Homo sapien
aggaatccaaatccagcataatccagtcattcc

SEQ ID NO: 169760 - DNA, 33 bp, Homo sapien
aggaatccaaatccagtataatccagtcattcc

SEQ ID NO: 169761 - DNA, 33 bp, Homo sapien
cttccaggtccatataccttgctgcaaatgaca

SEQ ID NO: 169762 - DNA, 33 bp, Homo sapien
cttccaggtccatatatcttgctgcaaatgaca

SEQ ID NO: 169763 - DNA, 33 bp, Homo sapien
tagacctaatagtccaatagatagttttggggt

SEQ ID NO: 169764 - DNA, 33 bp, Homo sapien
tagacctaatagtccagtagatagttttggggt

SEQ ID NO: 169765 - DNA, 33 bp, Homo sapien
ctgtgaaaagcagacactagtttggaaatacta

SEQ ID NO: 169766 - DNA, 33 bp, Homo sapien
ctgtgaaaagcagacattagtttggaaatacta

SEQ ID NO: 169767 - DNA, 33 bp, Homo sapien
tctaagtcctataaaagtatacagcatgctggg

SEQ ID NO: 169768 - DNA, 33 bp, Homo sapien
tctaagtcctataaaattatacagcatgctggg

SEQ ID NO: 169769 - DNA, 33 bp, Homo sapien
atattttgcatagagcagatcacctagcccaca

SEQ ID NO: 169770 - DNA, 33 bp, Homo sapien
atattttgcatagagcggatcacctagcccaca

SEQ ID NO: 169771 - DNA, 33 bp, Homo sapien
ctctgtaggtgattcaagtttgcatttatcttt

SEQ ID NO: 169772 - DNA, 33 bp, Homo sapien
ctctgtaggtgattcacgtttgcatttatcttt

SEQ ID NO: 169773 - DNA, 33 bp, Homo sapien
aaacaaacaataaagcacagaattcaattatgt

SEQ ID NO: 169774 - DNA, 33 bp, Homo sapien
aaacaaacaataaagcgcagaattcaattatgt

SEQ ID NO: 169775 - DNA, 33 bp, Homo sapien
gtgcagaagtatccgaaaaagataaagaaccat

SEQ ID NO: 169776 - DNA, 33 bp, Homo sapien
gtgcagaagtatccgagaaagataaagaaccat

SEQ ID NO: 169777 - DNA, 33 bp, Homo sapien
taatatcttctatttcacttatgcttgtctggg

SEQ ID NO: 169778 - DNA, 33 bp, Homo sapien
taatatcttctatttcgcttatgcttgtctggg

SEQ ID NO: 169779 - DNA, 33 bp, Homo sapien
catcaggagctagccaaaccagatgaggaagaa

SEQ ID NO: 169780 - DNA, 33 bp, Homo sapien
catcaggagctagccagaccagatgaggaagaa

SEQ ID NO: 169781 - DNA, 33 bp, Homo sapien
ttattatttattttacagatgaggtttcactac

SEQ ID NO: 169782 - DNA, 33 bp, Homo sapien
ttattatttattttactgatgaggtttcactac

SEQ ID NO: 169783 - DNA, 33 bp, Homo sapien
ttccaatttcagaccagctctttgtgaacacat

SEQ ID NO: 169784 - DNA, 33 bp, Homo sapien
ttccaatttcagaccatctctttgtgaacacat

SEQ ID NO: 169785 - DNA, 33 bp, Homo sapien
acacgtttgctacaaaatcaagtttaagatatt

SEQ ID NO: 169786 - DNA, 33 bp, Homo sapien
acacgtttgctacaaagtcaagtttaagatatt

SEQ ID NO: 169787 - DNA, 33 bp, Homo sapien; identical to SEQ ID NO: 169785

SEQ ID NO: 169788 - DNA, 33 bp, Homo sapien; identical to SEQ ID NO: 169786

SEQ ID NO: 169789 - DNA, 33 bp, Homo sapien
ttattgaagtgtcagacgatattttcaataaaa

SEQ ID NO: 169790 - DNA, 33 bp, Homo sapien
ttattgaagtgtcagatgatattttcaataaaa

SEQ ID NO: 169791 - DNA, 33 bp, Homo sapien; identical to SEQ ID NO: 169789

SEQ ID NO: 169792 - DNA, 33 bp, Homo sapien; identical to SEQ ID NO: 169790

SEQ ID NO: 169793 - DNA, 33 bp, Homo sapien
cagtgagaactgaactaagcatcagccttcatc

SEQ ID NO: 169794 - DNA, 33 bp, Homo sapien
cagtgagaactgaactgagcatcagccttcatc

SEQ ID NO: 169795 - DNA, 33 bp, Homo sapien
agtacagaactggtagcatcttgtgtaatgtga

SEQ ID NO: 169796 - DNA, 33 bp, Homo sapien
agtacagaactggtaggatcttgtgtaatgtga

SEQ ID NO: 169797 - DNA, 33 bp, Homo sapien; identical to SEQ ID NO: 169795

SEQ ID NO: 169798 - DNA, 33 bp, Homo sapien; identical to SEQ ID NO: 169796

SEQ ID NO: 169799 - DNA, 33 bp, Homo sapien
tttttttttttgagtcaattcagagtgatccaa

SEQ ID NO: 169800 - DNA, 33 bp, Homo sapien
tttttttttttgagtcgattcagagtgatccaa

SEQ ID NO: 169801 - DNA, 33 bp, Homo sapien
ctcttagatgaagtaacctttgtcttagtttaa

SEQ ID NO: 169802 - DNA, 33 bp, Homo sapien
ctcttagatgaagtaatctttgtcttagtttaa

SEQ ID NO: 169803 - DNA, 33 bp, Homo sapien
catggacagagagacgaattctattgcttgaca

SEQ ID NO: 169804 - DNA, 33 bp, Homo sapien
catggacagagagacggattctattgcttgaca

SEQ ID NO: 169805 - DNA, 33 bp, Homo sapien
tagtctttgatgtagacaatgaaagatggaaaa

SEQ ID NO: 169806 - DNA, 33 bp, Homo sapien
tagtctttgatgtagataatgaaagatggaaaa

SEQ ID NO: 169807 - DNA, 33 bp, Homo sapien; identical to SEQ ID NO: 169805

SEQ ID NO: 169808 - DNA, 33 bp, Homo sapien; identical to SEQ ID NO: 169806

SEQ ID NO: 169809 - DNA, 33 bp, Homo sapien
ctggaagaaataatcccgaatgtgaaccacagg

SEQ ID NO: 169810 - DNA, 33 bp, Homo sapien
ctggaagaaataatcctgaatgtgaaccacagg

SEQ ID NO: 169811 - DNA, 33 bp, Homo sapien
attgtactctagttgacaaagttctatagcaca

SEQ ID NO: 169812 - DNA, 33 bp, Homo sapien
attgtactctagttgataaagttctatagcaca

SEQ ID NO: 169813 - DNA, 33 bp, Homo sapien
ttagtttgcaagtttacctagtcaaactgaaat

SEQ ID NO: 169814 - DNA, 33 bp, Homo sapien
ttagtttgcaagtttatctagtcaaactgaaat

SEQ ID NO: 169815 - DNA, 33 bp, Homo sapien; identical to SEQ ID NO: 169813

SEQ ID NO: 169816 - DNA, 33 bp, Homo sapien; identical to SEQ ID NO: 169814

SEQ ID NO: 169817 - DNA, 33 bp, Homo sapien
ataatactgctcttcaccggaatcatttaacct

SEQ ID NO: 169818 - DNA, 33 bp, Homo sapien
ataatactgctcttcatcggaatcatttaacct

SEQ ID NO: 169819 - DNA, 33 bp, Homo sapien
tactatccagtccatcaaagtcctaataatctt

SEQ ID NO: 169820 - DNA, 33 bp, Homo sapien
tactatccagtccatcgaagtcctaataatctt

SEQ ID NO: 169821 - DNA, 33 bp, Homo sapien
cgcacatgaagcaataataactgaaatcataaa

SEQ ID NO: 169822 - DNA, 33 bp, Homo sapien
cgcacatgaagcaatagtaactgaaatcataaa

SEQ ID NO: 169823 - DNA, 33 bp, Homo sapien
tcataagagatggttaccaaaagcacttgcatg

SEQ ID NO: 169824 - DNA, 33 bp, Homo sapien
tcataagagatggttatcaaaagcacttgcatg

SEQ ID NO: 169825 - DNA, 33 bp, Homo sapien
ctctgacaatgcacaacggcaaacaaaaagatg

SEQ ID NO: 169826 - DNA, 33 bp, Homo sapien
ctctgacaatgcacaatggcaaacaaaaagatg

SEQ ID NO: 169827 - DNA, 33 bp, Homo sapien
catccatgagaaaagtaaaccaaatagtctccc

SEQ ID NO: 169828 - DNA, 33 bp, Homo sapien
catccatgagaaaagtgaaccaaatagtctccc

SEQ ID NO: 169829 - DNA, 33 bp, Homo sapien; identical to SEQ ID NO: 169827

SEQ ID NO: 169830 - DNA, 33 bp, Homo sapien; identical to SEQ ID NO: 169828

SEQ ID NO: 169831 - DNA, 33 bp, Homo sapien
tgctccaataaaatgacagtaatgttggttagc

SEQ ID NO: 169832 - DNA, 33 bp, Homo sapien
tgctccaataaaatgatagtaatgttggttagc

SEQ ID NO: 169833 - DNA, 33 bp, Homo sapien; identical to SEQ ID NO: 169831

SEQ ID NO: 169834 - DNA, 33 bp, Homo sapien; identical to SEQ ID NO: 169832

SEQ ID NO: 169835 - DNA, 33 bp, Homo sapien
gataattacattaaacaaattcagagagtaggt

SEQ ID NO: 169836 - DNA, 33 bp, Homo sapien
gataattacattaaaccaattcagagagtaggt

SEQ ID NO: 169837 - DNA, 33 bp, Homo sapien
aagccagaggaatataaccaacatatctactca

SEQ ID NO: 169838 - DNA, 33 bp, Homo sapien
aagccagaggaatatatccaacatatctactca

SEQ ID NO: 169839 - DNA, 33 bp, Homo sapien
acccaaagttggaacgccagaagtcatgggtta

SEQ ID NO: 169840 - DNA, 33 bp, Homo sapien
acccaaagttggaacgtcagaagtcatgggtta

SEQ ID NO: 169841 - DNA, 33 bp, Homo sapien
tcaatgagttgccaaacgtcctttcacctattg

SEQ ID NO: 169842 - DNA, 33 bp, Homo sapien
tcaatgagttgccaaatgtcctttcacctattg

SEQ ID NO: 169843 - DNA, 33 bp, Homo sapien
attcatttaactgagtaacacctatgttttgat

SEQ ID NO: 169844 - DNA, 33 bp, Homo sapien
attcatttaactgagttacacctatgttttgat

SEQ ID NO: 169845 - DNA, 33 bp, Homo sapien
cctacgatatcatctcacagagttacaccactc

SEQ ID NO: 169846 - DNA, 33 bp, Homo sapien
cctacgatatcatctcgcagagttacaccactc

SEQ ID NO: 169847 - DNA, 33 bp, Homo sapien
tcagcctctagtttcccagtcatgtcctaacct

SEQ ID NO: 169848 - DNA, 33 bp, Homo sapien
tcagcctctagtttcctagtcatgtcctaacct

SEQ ID NO: 169849 - DNA, 33 bp, Homo sapien
ttcctcttctataaaacgcctgtatttttgctc

SEQ ID NO: 169850 - DNA, 33 bp, Homo sapien
ttcctcttctataaaatgcctgtatttttgctc

SEQ ID NO: 169851 - DNA, 33 bp, Homo sapien
tggcttagcatgctggcatagccataacgtcat

SEQ ID NO: 169852 - DNA, 33 bp, Homo sapien
tggcttagcatgctggtatagccataacgtcat

SEQ ID NO: 169853 - DNA, 33 bp, Homo sapien
ttcattcactatacacactgtggacaaaattta

SEQ ID NO: 169854 - DNA, 33 bp, Homo sapien
ttcattcactatacacgctgtggacaaaattta

SEQ ID NO: 169855 - DNA, 33 bp, Homo sapien
ctttttcaccattggccaaatgctctcccaaat

SEQ ID NO: 169856 - DNA, 33 bp, Homo sapien
ctttttcaccattggctaaatgctctcccaaat

SEQ ID NO: 169857 - DNA, 33 bp, Homo sapien
gtccttgggagagtaacgcctttatcctcccat

SEQ ID NO: 169858 - DNA, 33 bp, Homo sapien
gtccttgggagagtaatgcctttatcctcccat

SEQ ID NO: 169859 - DNA, 33 bp, Homo sapien
cagctgccgttaaatacggtaacctaatctctc

SEQ ID NO: 169860 - DNA, 33 bp, Homo sapien
cagctgccgttaaatatggtaacctaatctctc

SEQ ID NO: 169861 - DNA, 33 bp, Homo sapien
ggagaaccagtcacaaagtataatttaatggta

SEQ ID NO: 169862 - DNA, 33 bp, Homo sapien
ggagaaccagtcacaacgtataatttaatggta

SEQ ID NO: 169863 - DNA, 33 bp, Homo sapien
atcttaagacaaaaaccggaaagaagctttctg

SEQ ID NO: 169864 - DNA, 33 bp, Homo sapien
atcttaagacaaaaactggaaagaagctttctg

SEQ ID NO: 169865 - DNA, 33 bp, Homo sapien
aatgaaaagagaggttgaaatctgagaaatgac

SEQ ID NO: 169866 - DNA, 33 bp, Homo sapien
aatgaaaagagaggtttaaatctgagaaatgac

SEQ ID NO: 169867 - DNA, 33 bp, Homo sapien
tgtgcattcatttagcagagttaagcctttctt

SEQ ID NO: 169868 - DNA, 33 bp, Homo sapien
tgtgcattcatttagcggagttaagcctttctt

SEQ ID NO: 169869 - DNA, 33 bp, Homo sapien
gtgaacccccattcacaatcacctcaaagagaa

SEQ ID NO: 169870 - DNA, 33 bp, Homo sapien
gtgaacccccattcaccatcacctcaaagagaa

SEQ ID NO: 169871 - DNA, 33 bp, Homo sapien
cgaaggtatattgggaactcattgaggccaaca

SEQ ID NO: 169872 - DNA, 33 bp, Homo sapien
cgaaggtatattgggagctcattgaggccaaca

SEQ ID NO: 169873 - DNA, 33 bp, Homo sapien
aagctttctaagaaccggctttgagaagtgtac

SEQ ID NO: 169874 - DNA, 33 bp, Homo sapien
aagctttctaagaacctgctttgagaagtgtac

SEQ ID NO: 169875 - DNA, 33 bp, Homo sapien
ccatgaaatcttcaaaatccacgttcttctgcc

SEQ ID NO: 169876 - DNA, 33 bp, Homo sapien
ccatgaaatcttcaaagtccacgttcttctgcc

SEQ ID NO: 169877 - DNA, 33 bp, Homo sapien
ctttctggattttatcggaagagatttccattt

SEQ ID NO: 169878 - DNA, 33 bp, Homo sapien
ctttctggattttatctgaagagatttccattt

SEQ ID NO: 169879 - DNA, 33 bp, Homo sapien
aggccaatggcaaaaaagcaaatatcgcaggat

SEQ ID NO: 169880 - DNA, 33 bp, Homo sapien
aggccaatggcaaaaaggcaaatatcgcaggat

SEQ ID NO: 169881 - DNA, 33 bp, Homo sapien
aatcatactgctataaagttacatgcacactaa

SEQ ID NO: 169882 - DNA, 33 bp, Homo sapien
aatcatactgctataatgttacatgcacactaa

SEQ ID NO: 169883 - DNA, 33 bp, Homo sapien
aagaaactttctgagaagctgctttgtgatgtg

SEQ ID NO: 169884 - DNA, 33 bp, Homo sapien
aagaaactttctgagacgctgctttgtgatgtg

SEQ ID NO: 169885 - DNA, 33 bp, Homo sapien
agtagctttctgataacccattttgtgatctgt

SEQ ID NO: 169886 - DNA, 33 bp, Homo sapien
agtagctttctgataatccattttgtgatctgt

SEQ ID NO: 169887 - DNA, 33 bp, Homo sapien
tatgaagagaaaggtaaagtttgcagatgagtg

SEQ ID NO: 169888 - DNA, 33 bp, Homo sapien
tatgaagagaaaggtagagtttgcagatgagtg

SEQ ID NO: 169889 - DNA, 33 bp, Homo sapien
gcaaagggatatctcaaagcgcatagtggccta

SEQ ID NO: 169890 - DNA, 33 bp, Homo sapien
gcaaagggatatctcagagcgcatagtggccta

SEQ ID NO: 169891 - DNA, 33 bp, Homo sapien
atgaacacatctctaactaggttctcagacagc

SEQ ID NO: 169892 - DNA, 33 bp, Homo sapien
atgaacacatctctaagtaggttctcagacagc

SEQ ID NO: 169893 - DNA, 33 bp, Homo sapien
cccagatataactacacagattctacgaaaaca

SEQ ID NO: 169894 - DNA, 33 bp, Homo sapien
cccagatataactacagagattctacgaaaaca

SEQ ID NO: 169895 - DNA, 33 bp, Homo sapien
ggcacccatacacttccaaatgtctcttcacag

SEQ ID NO: 169896 - DNA, 33 bp, Homo sapien
ggcacccatacacttctaaatgtctcttcacag

SEQ ID NO: 169897 - DNA, 33 bp, Homo sapien
tatttccttactataagcctcaatgtgctctca

SEQ ID NO: 169898 - DNA, 33 bp, Homo sapien
tatttccttactataatcctcaatgtgctctca

SEQ ID NO: 169899 - DNA, 33 bp, Homo sapien
ataaaagaggattcaaacaaatggagaacattc

SEQ ID NO: 169900 - DNA, 33 bp, Homo sapien
ataaaagaggattcaatcaaatggagaacattc

SEQ ID NO: 169901 - DNA, 33 bp, Homo sapien
aacaccgtgtttgtagaagcatagaaggggtat

SEQ ID NO: 169902 - DNA, 33 bp, Homo sapien
aacaccgtgtttgtaggagcatagaaggggtat

SEQ ID NO: 169903 - DNA, 33 bp, Homo sapien
gctgaatgaaaagagacgtttaactctgtgaga

SEQ ID NO: 169904 - DNA, 33 bp, Homo sapien
gctgaatgaaaagagatgtttaactctgtgaga

SEQ ID NO: 169905 - DNA, 33 bp, Homo sapien
tctgcctttcagggaccattagtattttcacta

SEQ ID NO: 169906 - DNA, 33 bp, Homo sapien
tctgcctttcagggactattagtattttcacta

SEQ ID NO: 169907 - DNA, 33 bp, Homo sapien
ggcctcaaagcactacaaaatatctcttcaaag

SEQ ID NO: 169908 - DNA, 33 bp, Homo sapien
ggcctcaaagcactaccaaatatctcttcaaag

SEQ ID NO: 169909 - DNA, 33 bp, Homo sapien
tgaaaaagataatgtcacaggataaaaactaga

SEQ ID NO: 169910 - DNA, 33 bp, Homo sapien
tgaaaaagataatgtcccaggataaaaactaga

SEQ ID NO: 169911 - DNA, 33 bp, Homo sapien
aaatggctgtactgccaaaagtagtttatagat

SEQ ID NO: 169912 - DNA, 33 bp, Homo sapien
aaatggctgtactgccgaaagtagtttatagat

SEQ ID NO: 169913 - DNA, 33 bp, Homo sapien
aaaaagaggcagaaaaaccactaatgaatggat

SEQ ID NO: 169914 - DNA, 33 bp, Homo sapien
aaaaagaggcagaaaagccactaatgaatggat

SEQ ID NO: 169915 - DNA, 33 bp, Homo sapien
atcctagtggtttcaactagacttatccttaaa

SEQ ID NO: 169916 - DNA, 33 bp, Homo sapien
atcctagtggtttcaattagacttatccttaaa

SEQ ID NO: 169917 - DNA, 33 bp, Homo sapien
tcaggtccagctgtgactaaaaagggccaaagt

SEQ ID NO: 169918 - DNA, 33 bp, Homo sapien
tcaggtccagctgtgattaaaaagggccaaagt

SEQ ID NO: 169919 - DNA, 33 bp, Homo sapien
accaggattcagaggaggtatcaaaaagtctgg

SEQ ID NO: 169920 - DNA, 33 bp, Homo sapien
accaggattcagaggatgtatcaaaaagtctgg

SEQ ID NO: 169921 - DNA, 33 bp, Homo sapien
cctatggagtcatcctaaacaactttaaaactt

SEQ ID NO: 169922 - DNA, 33 bp, Homo sapien
cctatggagtcatcctcaacaactttaaaactt

SEQ ID NO: 169923 - DNA, 33 bp, Homo sapien
agtaggtatcagtgcaaaccagttccaataatg

SEQ ID NO: 169924 - DNA, 33 bp, Homo sapien
agtaggtatcagtgcacaccagttccaataatg

SEQ ID NO: 169925 - DNA, 33 bp, Homo sapien
gtgtgaggtttgatcaaaacagtacttaaagaa

SEQ ID NO: 169926 - DNA, 33 bp, Homo sapien
gtgtgaggtttgatcacaacagtacttaaagaa

SEQ ID NO: 169927 - DNA, 33 bp, Homo sapien
gatggaccagtttcaaagatatttttgagtatg

SEQ ID NO: 169928 - DNA, 33 bp, Homo sapien
gatggaccagtttcaacgatatttttgagtatg

SEQ ID NO: 169929 - DNA, 33 bp, Homo sapien
aagcccttctttttggaaatgtgcttagggtaa

SEQ ID NO: 169930 - DNA, 33 bp, Homo sapien
aagcccttctttttgggaatgtgcttagggtaa

SEQ ID NO: 169931 - DNA, 33 bp, Homo sapien; identical to SEQ ID NO: 169929

SEQ ID NO: 169932 - DNA, 33 bp, Homo sapien; identical to SEQ ID NO: 169930

SEQ ID NO: 169933 - DNA, 33 bp, Homo sapien
atctaaaactgcagaactatgattacctgcttt

SEQ ID NO: 169934 - DNA, 33 bp, Homo sapien
atctaaaactgcagaattatgattacctgcttt

SEQ ID NO: 169935 - DNA, 33 bp, Homo sapien
tgagaatcgtttccagccaaccacctacaaaac

SEQ ID NO: 169936 - DNA, 33 bp, Homo sapien
tgagaatcgtttccagtcaaccacctacaaaac

SEQ ID NO: 169937 - DNA, 33 bp, Homo sapien; identical to SEQ ID NO: 169935

SEQ ID NO: 169938 - DNA, 33 bp, Homo sapien; identical to SEQ ID NO: 169936

SEQ ID NO: 169939 - DNA, 33 bp, Homo sapien
ctcattttcatttgaaacatctagagttctttt

SEQ ID NO: 169940 - DNA, 33 bp, Homo sapien
ctcattttcatttgaatcatctagagttctttt

SEQ ID NO: 169941 - DNA, 33 bp, Homo sapien
tgaagatttttagaagaacactagactcagtta

SEQ ID NO: 169942 - DNA, 33 bp, Homo sapien
tgaagatttttagaaggacactagactcagtta

SEQ ID NO: 169943 - DNA, 33 bp, Homo sapien
cttttctggaccaagacgtgagtatttgaaacc

SEQ ID NO: 169944 - DNA, 33 bp, Homo sapien
cttttctggaccaagatgtgagtatttgaaacc

SEQ ID NO: 169945 - DNA, 33 bp, Homo sapien
actgtgaaaaagccaacgacaaagctttcttat

SEQ ID NO: 169946 - DNA, 33 bp, Homo sapien
actgtgaaaaagccaatgacaaagctttcttat

SEQ ID NO: 169947 - DNA, 33 bp, Homo sapien
atccaattgttactgaggatgcggaataactgg

SEQ ID NO: 169948 - DNA, 33 bp, Homo sapien
atccaattgttactgatgatgcggaataactgg

SEQ ID NO: 169949 - DNA, 33 bp, Homo sapien
cactttttgtttgtagaatggctctcgagatga

SEQ ID NO: 169950 - DNA, 33 bp, Homo sapien
cactttttgtttgtaggatggctctcgagatga

SEQ ID NO: 169951 - DNA, 33 bp, Homo sapien
cgggtgagcaatccaaatacctggttttaactt

SEQ ID NO: 169952 - DNA, 33 bp, Homo sapien
cgggtgagcaatccaagtacctggttttaactt

SEQ ID NO: 169953 - DNA, 33 bp, Homo sapien
ttttaacttcacatcactgaatgaaacatactt

SEQ ID NO: 169954 - DNA, 33 bp, Homo sapien
ttttaacttcacatcattgaatgaaacatactt

SEQ ID NO: 169955 - DNA, 33 bp, Homo sapien
gtaggaaagacagtctcaaatcaccaataacac

SEQ ID NO: 169956 - DNA, 33 bp, Homo sapien
gtaggaaagacagtcttaaatcaccaataacac

SEQ ID NO: 169957 - DNA, 33 bp, Homo sapien
tccaaacagaattatacctcctgaggtgaaaag

SEQ ID NO: 169958 - DNA, 33 bp, Homo sapien
tccaaacagaattatagctcctgaggtgaaaag

SEQ ID NO: 169959 - DNA, 33 bp, Homo sapien; identical to SEQ ID NO: 169957

SEQ ID NO: 169960 - DNA, 33 bp, Homo sapien; identical to SEQ ID NO: 169958

SEQ ID NO: 169961 - DNA, 33 bp, Homo sapien
ttatttctaatcaacaaccttattttagatgct

SEQ ID NO: 169962 - DNA, 33 bp, Homo sapien
ttatttctaatcaacagccttattttagatgct

SEQ ID NO: 169963 - DNA, 33 bp, Homo sapien; identical to SEQ ID NO: 169961

SEQ ID NO: 169964 - DNA, 33 bp, Homo sapien; identical to SEQ ID NO: 169962

SEQ ID NO: 169965 - DNA, 33 bp, Homo sapien
gcagcaacaaagaaaccaattgtattagtagta

SEQ ID NO: 169966 - DNA, 33 bp, Homo sapien
gcagcaacaaagaaacgaattgtattagtagta

SEQ ID NO: 169967 - DNA, 33 bp, Homo sapien
tgggctacttcagaaacacagattgtcaaatgc

SEQ ID NO: 169968 - DNA, 33 bp, Homo sapien
tgggctacttcagaaatacagattgtcaaatgc

SEQ ID NO: 169969 - DNA, 33 bp, Homo sapien
gcaggtagtacaaagaaatcctatataacctct

SEQ ID NO: 169970 - DNA, 33 bp, Homo sapien
gcaggtagtacaaagagatcctatataacctct

SEQ ID NO: 169971 - DNA, 33 bp, Homo sapien
tcatctcacatggttacctttttgcatatatat

SEQ ID NO: 169972 - DNA, 33 bp, Homo sapien
tcatctcacatggttatctttttgcatatatat

SEQ ID NO: 169973 - DNA, 33 bp, Homo sapien
ttcttttcaggtaatgcaattagccaccatttg

SEQ ID NO: 169974 - DNA, 33 bp, Homo sapien
ttcttttcaggtaatgtaattagccaccatttg

SEQ ID NO: 169975 - DNA, 33 bp, Homo sapien
gcacaattcaagcatgccatccaggagcatgga

SEQ ID NO: 169976 - DNA, 33 bp, Homo sapien
gcacaattcaagcatgtcatccaggagcatgga

SEQ ID NO: 169977 - DNA, 33 bp, Homo sapien
gctgttgaaacaatgacaccatccataacctat

SEQ ID NO: 169978 - DNA, 33 bp, Homo sapien
gctgttgaaacaatgataccatccataacctat

SEQ ID NO: 169979 - DNA, 33 bp, Homo sapien
aactacacagacaaacagaaaaagactcagttg

SEQ ID NO: 169980 - DNA, 33 bp, Homo sapien
aactacacagacaaaccgaaaaagactcagttg

SEQ ID NO: 169981 - DNA, 33 bp, Homo sapien
ttttataatctttccaatacttgcttaaacctt

SEQ ID NO: 169982 - DNA, 33 bp, Homo sapien
ttttataatctttccagtacttgcttaaacctt

SEQ ID NO: 169983 - DNA, 33 bp, Homo sapien
aaacatcttcagataaaaacgggaaagaagctt

SEQ ID NO: 169984 - DNA, 33 bp, Homo sapien
aaacatcttcagataagaacgggaaagaagctt

SEQ ID NO: 169985 - DNA, 33 bp, Homo sapien
tttctcaccatatgccgctatgcgatcccacaa

SEQ ID NO: 169986 - DNA, 33 bp, Homo sapien
tttctcaccatatgcctctatgcgatcccacaa

SEQ ID NO: 169987 - DNA, 33 bp, Homo sapien
caggataaaaaatttgaaggaattgatctcagg

SEQ ID NO: 169988 - DNA, 33 bp, Homo sapien
caggataaaaaatttggaggaattgatctcagg

SEQ ID NO: 169989 - DNA, 33 bp, Homo sapien
ccaagccaatggaaaacaaaaaatggcagggtt

SEQ ID NO: 169990 - DNA, 33 bp, Homo sapien
ccaagccaatggaaaagaaaaaatggcagggtt

SEQ ID NO: 169991 - DNA, 33 bp, Homo sapien
agcatatgtggttcacaaagacctgctgttcca

SEQ ID NO: 169992 - DNA, 33 bp, Homo sapien
agcatatgtggttcacgaagacctgctgttcca

SEQ ID NO: 169993 - DNA, 33 bp, Homo sapien
catcacaaggaagttacggagaatgcttctttc

SEQ ID NO: 169994 - DNA, 33 bp, Homo sapien
catcacaaggaagttatggagaatgcttctttc

SEQ ID NO: 169995 - DNA, 33 bp, Homo sapien
atttttttcagtttcactatttttcatctctca

SEQ ID NO: 169996 - DNA, 33 bp, Homo sapien
atttttttcagtttcattatttttcatctctca

SEQ ID NO: 169997 - DNA, 33 bp, Homo sapien
ttgatctttatgcagaaagaaaggaaaggaaaa

SEQ ID NO: 169998 - DNA, 33 bp, Homo sapien
ttgatctttatgcagacagaaaggaaaggaaaa

SEQ ID NO: 169999 - DNA, 33 bp, Homo sapien
aagttggcactggtaacggtatggagcccccac

SEQ ID NO: 170000 - DNA, 33 bp, Homo sapien
aagttggcactggtaatggtatggagcccccac

SEQ ID NO: 170001 - DNA, 33 bp, Homo sapien
cctgccattgctgttcaacacatccctggagac

SEQ ID NO: 170002 - DNA, 33 bp, Homo sapien
cctgccattgctgttctacacatccctggagac

SEQ ID NO: 170003 - DNA, 33 bp, Homo sapien
atttaagtcattctaacgcataagcaagttcca

SEQ ID NO: 170004 - DNA, 33 bp, Homo sapien
atttaagtcattctaatgcataagcaagttcca

SEQ ID NO: 170005 - DNA, 33 bp, Homo sapien
aatgacttaaatcaaccgctcgtttcagtgccc

SEQ ID NO: 170006 - DNA, 33 bp, Homo sapien
aatgacttaaatcaactgctcgtttcagtgccc

SEQ ID NO: 170007 - DNA, 33 bp, Homo sapien
ataagtttcctgctcacctagcattactttgtg

SEQ ID NO: 170008 - DNA, 33 bp, Homo sapien
ataagtttcctgctcatctagcattactttgtg

SEQ ID NO: 170009 - DNA, 33 bp, Homo sapien
gatcactatttagcaactctactgttgatgaat

SEQ ID NO: 170010 - DNA, 33 bp, Homo sapien
gatcactatttagcaattctactgttgatgaat

SEQ ID NO: 170011 - DNA, 33 bp, Homo sapien
atgagattccgtctcagatttaaacagttatta

SEQ ID NO: 170012 - DNA, 33 bp, Homo sapien
atgagattccgtctcatatttaaacagttatta

SEQ ID NO: 170013 - DNA, 33 bp, Homo sapien
ttgttaatttaaagtgacaccagtttgcttaca

SEQ ID NO: 170014 - DNA, 33 bp, Homo sapien
ttgttaatttaaagtgtcaccagtttgcttaca

SEQ ID NO: 170015 - DNA, 33 bp, Homo sapien
ctgtagtcagaatgaacaagtctttgaaccaac

SEQ ID NO: 170016 - DNA, 33 bp, Homo sapien
ctgtagtcagaatgaataagtctttgaaccaac

SEQ ID NO: 170017 - DNA, 33 bp, Homo sapien
gaaaatgtgagagaaaggtgagaagagcatgag

SEQ ID NO: 170018 - DNA, 33 bp, Homo sapien
gaaaatgtgagagaaatgtgagaagagcatgag

SEQ ID NO: 170019 - DNA, 33 bp, Homo sapien
agtctgcaatctaacaaggcagtcattaaatct

SEQ ID NO: 170020 - DNA, 33 bp, Homo sapien
agtctgcaatctaacagggcagtcattaaatct

SEQ ID NO: 170021 - DNA, 33 bp, Homo sapien
tttaaaggaccattagacatagatcctagtggt

SEQ ID NO: 170022 - DNA, 33 bp, Homo sapien
tttaaaggaccattaggcatagatcctagtggt

SEQ ID NO: 170023 - DNA, 33 bp, Homo sapien
gtcatccatgcatatacccaagtggctaccacc

SEQ ID NO: 170024 - DNA, 33 bp, Homo sapien
gtcatccatgcatatatccaagtggctaccacc

SEQ ID NO: 170025 - DNA, 33 bp, Homo sapien
tttattgattggctggaataatcgcacttttca

SEQ ID NO: 170026 - DNA, 33 bp, Homo sapien
tttattgattggctggcataatcgcacttttca

SEQ ID NO: 170027 - DNA, 33 bp, Homo sapien
gttattagaaatacaaagtaagcttccctggac

SEQ ID NO: 170028 - DNA, 33 bp, Homo sapien
gttattagaaatacaatgtaagcttccctggac

SEQ ID NO: 170029 - DNA, 33 bp, Homo sapien
gataatgcctagaatgaacatgactattctttc

SEQ ID NO: 170030 - DNA, 33 bp, Homo sapien
gataatgcctagaatggacatgactattctttc

SEQ ID NO: 170031 - DNA, 33 bp, Homo sapien
ggtcctttgtaataacactacaagttcagttgt

SEQ ID NO: 170032 - DNA, 33 bp, Homo sapien
ggtcctttgtaataaccctacaagttcagttgt

SEQ ID NO: 170033 - DNA, 33 bp, Homo sapien
tgttatcatgtgtataccaagaaatggattcaa

SEQ ID NO: 170034 - DNA, 33 bp, Homo sapien
tgttatcatgtgtatatcaagaaatggattcaa

SEQ ID NO: 170035 - DNA, 33 bp, Homo sapien
gatgaatgaataaaggcaaagtgacatctatca

SEQ ID NO: 170036 - DNA, 33 bp, Homo sapien
gatgaatgaataaaggtaaagtgacatctatca

SEQ ID NO: 170037 - DNA, 33 bp, Homo sapien
ttggctatagactacagtattttcttgtgttct

SEQ ID NO: 170038 - DNA, 33 bp, Homo sapien
ttggctatagactacattattttcttgtgttct

SEQ ID NO: 170039 - DNA, 33 bp, Homo sapien
agagatgagagctcagaagaacagaacctgtaa

SEQ ID NO: 170040 - DNA, 33 bp, Homo sapien
agagatgagagctcaggagaacagaacctgtaa

SEQ ID NO: 170041 - DNA, 33 bp, Homo sapien; identical to SEQ ID NO: 170039

SEQ ID NO: 170042 - DNA, 33 bp, Homo sapien; identical to SEQ ID NO: 170040

SEQ ID NO: 170043 - DNA, 33 bp, Homo sapien
atcagtttgggagaaacggtagtggaatatgca

SEQ ID NO: 170044 - DNA, 33 bp, Homo sapien
atcagtttgggagaaatggtagtggaatatgca

SEQ ID NO: 170045 - DNA, 33 bp, Homo sapien
gctttgtacctaacaaagacaatgctgagattt

SEQ ID NO: 170046 - DNA, 33 bp, Homo sapien
gctttgtacctaacaaggacaatgctgagattt

SEQ ID NO: 170047 - DNA, 33 bp, Homo sapien
tgagtgtttgaaaccactgacaagagatatgca

SEQ ID NO: 170048 - DNA, 33 bp, Homo sapien
tgagtgtttgaaaccattgacaagagatatgca

SEQ ID NO: 170049 - DNA, 33 bp, Homo sapien
aagcagtcaggaataccagtaatagataccatt

SEQ ID NO: 170050 - DNA, 33 bp, Homo sapien
aagcagtcaggaatacgagtaatagataccatt

SEQ ID NO: 170051 - DNA, 33 bp, Homo sapien
caaaagaaagacctcaataccaccaaatgggta

SEQ ID NO: 170052 - DNA, 33 bp, Homo sapien
caaaagaaagacctcattaccaccaaatgggta

SEQ ID NO: 170053 - DNA, 33 bp, Homo sapien
tacttctctaaagacaaagataatgagaagcct

SEQ ID NO: 170054 - DNA, 33 bp, Homo sapien
tacttctctaaagacagagataatgagaagcct

SEQ ID NO: 170055 - DNA, 33 bp, Homo sapien
taaagtaggtgtcagcacatgccagttccagta

SEQ ID NO: 170056 - DNA, 33 bp, Homo sapien
taaagtaggtgtcagcgcatgccagttccagta

SEQ ID NO: 170057 - DNA, 33 bp, Homo sapien
gtttcaccttccgctaacatctctgcagatctc

SEQ ID NO: 170058 - DNA, 33 bp, Homo sapien
gtttcaccttccgctagcatctctgcagatctc

SEQ ID NO: 170059 - DNA, 33 bp, Homo sapien
aaaaattgataagaaagaagttggtaaatagca

SEQ ID NO: 170060 - DNA, 33 bp, Homo sapien
aaaaattgataagaaataagttggtaaatagca

SEQ ID NO: 170061 - DNA, 33 bp, Homo sapien
gaagtaaggctctgtagagatagaggaagagtt

SEQ ID NO: 170062 - DNA, 33 bp, Homo sapien
gaagtaaggctctgtatagatagaggaagagtt

SEQ ID NO: 170063 - DNA, 33 bp, Homo sapien
catgtgtcaatgataaaaatccagaaactcatt

SEQ ID NO: 170064 - DNA, 33 bp, Homo sapien
catgtgtcaatgataagaatccagaaactcatt

SEQ ID NO: 170065 - DNA, 33 bp, Homo sapien
aaattatcttgatataaaactcagggcaagaga

SEQ ID NO: 170066 - DNA, 33 bp, Homo sapien
aaattatcttgatatagaactcagggcaagaga

SEQ ID NO: 170067 - DNA, 33 bp, Homo sapien
attattttcatgataagaaagtgaagtgcattt

SEQ ID NO: 170068 - DNA, 33 bp, Homo sapien
attattttcatgataataaagtgaagtgcattt

SEQ ID NO: 170069 - DNA, 33 bp, Homo sapien
tgaaagtcacgtagaaagattctgccatattcc

SEQ ID NO: 170070 - DNA, 33 bp, Homo sapien
tgaaagtcacgtagaatgattctgccatattcc

SEQ ID NO: 170071 - DNA, 33 bp, Homo sapien
actggctggtcactccgctctggcaggagcagg

SEQ ID NO: 170072 - DNA, 33 bp, Homo sapien
actggctggtcactcctctctggcaggagcagg

SEQ ID NO: 170073 - DNA, 33 bp, Homo sapien
ctagcacccaccataacaaatatgctattcatg

SEQ ID NO: 170074 - DNA, 33 bp, Homo sapien
ctagcacccaccataataaatatgctattcatg

SEQ ID NO: 170075 - DNA, 33 bp, Homo sapien
tacacaaccattatgcaacaagggatctgccac

SEQ ID NO: 170076 - DNA, 33 bp, Homo sapien
tacacaaccattatgcgacaagggatctgccac

SEQ ID NO: 170077 - DNA, 33 bp, Homo sapien
ctgcaggcaagtttcaacaatgggaagagatca

SEQ ID NO: 170078 - DNA, 33 bp, Homo sapien
ctgcaggcaagtttcagcaatgggaagagatca

SEQ ID NO: 170079 - DNA, 33 bp, Homo sapien
atggtaaagcaaaaaacaggctagaaatcccta

SEQ ID NO: 170080 - DNA, 33 bp, Homo sapien
atggtaaagcaaaaaagaggctagaaatcccta

SEQ ID NO: 170081 - DNA, 33 bp, Homo sapien
ctaaataatttcttcactaaaatcttgaatggt

SEQ ID NO: 170082 - DNA, 33 bp, Homo sapien
ctaaataatttcttcagtaaaatcttgaatggt

SEQ ID NO: 170083 - DNA, 33 bp, Homo sapien
tctgactatgacgtgacacattttatggcttca

SEQ ID NO: 170084 - DNA, 33 bp, Homo sapien
tctgactatgacgtgatacattttatggcttca

SEQ ID NO: 170085 - DNA, 33 bp, Homo sapien
catgctggtaaacggcaaacactctacagtgta

SEQ ID NO: 170086 - DNA, 33 bp, Homo sapien
catgctggtaaacggcgaacactctacagtgta

SEQ ID NO: 170087 - DNA, 33 bp, Homo sapien
gctgagagctggttaaaagtcttgtaggctctt

SEQ ID NO: 170088 - DNA, 33 bp, Homo sapien
gctgagagctggttaagagtcttgtaggctctt

SEQ ID NO: 170089 - DNA, 33 bp, Homo sapien
atgatgaggcagtgtcgcctatgtgtcacagca

SEQ ID NO: 170090 - DNA, 33 bp, Homo sapien
atgatgaggcagtgtctcctatgtgtcacagca

SEQ ID NO: 170091 - DNA, 33 bp, Homo sapien
ttgaattagtaatcaccaggtatgttgggtatt

SEQ ID NO: 170092 - DNA, 33 bp, Homo sapien
ttgaattagtaatcactaggtatgttgggtatt

SEQ ID NO: 170093 - DNA, 33 bp, Homo sapien
agtctgagatcacctaggtacttttcccttact

SEQ ID NO: 170094 - DNA, 33 bp, Homo sapien
agtctgagatcacctatgtacttttcccttact

SEQ ID NO: 170095 - DNA, 33 bp, Homo sapien
gaaagtgtgttgcgtcaacctaccgagctgcaa

SEQ ID NO: 170096 - DNA, 33 bp, Homo sapien
gaaagtgtgttgcgtcgacctaccgagctgcaa

SEQ ID NO: 170097 - DNA, 33 bp, Homo sapien
ttagaaaataactgaaaggaatgaccaaagaac

SEQ ID NO: 170098 - DNA, 33 bp, Homo sapien
ttagaaaataactgaagggaatgaccaaagaac

SEQ ID NO: 170099 - DNA, 33 bp, Homo sapien
gctggcacacaaaaagaccatctcgtctcttcc

SEQ ID NO: 170100 - DNA, 33 bp, Homo sapien
gctggcacacaaaaaggccatctcgtctcttcc

SEQ ID NO: 170101 - DNA, 33 bp, Homo sapien
ccatctcgtctcttccacaggctctatgctatg

SEQ ID NO: 170102 - DNA, 33 bp, Homo sapien
ccatctcgtctcttccgcaggctctatgctatg

SEQ ID NO: 170103 - DNA, 33 bp, Homo sapien
agtctaatgtgctcaagagaagtcatggttgga

SEQ ID NO: 170104 - DNA, 33 bp, Homo sapien
agtctaatgtgctcaatagaagtcatggttgga

SEQ ID NO: 170105 - DNA, 33 bp, Homo sapien
atgaagtcaaaagttgaagagtaattatctaga

SEQ ID NO: 170106 - DNA, 33 bp, Homo sapien
atgaagtcaaaagttggagagtaattatctaga

SEQ ID NO: 170107 - DNA, 33 bp, Homo sapien
caagttggtacatccaagtgcaaaattattgag

SEQ ID NO: 170108 - DNA, 33 bp, Homo sapien
caagttggtacatccatgtgcaaaattattgag

SEQ ID NO: 170109 - DNA, 33 bp, Homo sapien
ccctctatgtgacaaaaaccatctcttttgaag

SEQ ID NO: 170110 - DNA, 33 bp, Homo sapien
ccctctatgtgacaaagaccatctcttttgaag

SEQ ID NO: 170111 - DNA, 33 bp, Homo sapien
cctcctcaataaaggacctccttaaggctgctc

SEQ ID NO: 170112 - DNA, 33 bp, Homo sapien
cctcctcaataaaggatctccttaaggctgctc

SEQ ID NO: 170113 - DNA, 33 bp, Homo sapien
tcttaaccctggattccactcccttctgtcctc

SEQ ID NO: 170114 - DNA, 33 bp, Homo sapien
tcttaaccctggattctactcccttctgtcctc

SEQ ID NO: 170115 - DNA, 33 bp, Homo sapien
agagctaacataaaagcaaccaggaaatggtgg

SEQ ID NO: 170116 - DNA, 33 bp, Homo sapien
agagctaacataaaagtaaccaggaaatggtgg

SEQ ID NO: 170117 - DNA, 33 bp, Homo sapien
ccaacagtgttcccaaatagagacgcaaaaaaa

SEQ ID NO: 170118 - DNA, 33 bp, Homo sapien
ccaacagtgttcccaagtagagacgcaaaaaaa

SEQ ID NO: 170119 - DNA, 33 bp, Homo sapien
cctctctacttccataacccctagaatgattgt

SEQ ID NO: 170120 - DNA, 33 bp, Homo sapien
cctctctacttccatagcccctagaatgattgt

SEQ ID NO: 170121 - DNA, 33 bp, Homo sapien
gcactgaaggcaatgaactttacatactagttt

SEQ ID NO: 170122 - DNA, 33 bp, Homo sapien
gcactgaaggcaatgagctttacatactagttt

SEQ ID NO: 170123 - DNA, 33 bp, Homo sapien
caacataaaggaaccacgaagaaagaaagatgt

SEQ ID NO: 170124 - DNA, 33 bp, Homo sapien
caacataaaggaaccatgaagaaagaaagatgt

SEQ ID NO: 170125 - DNA, 33 bp, Homo sapien
taagacaaaagtttggccacacatgatttcaaa

SEQ ID NO: 170126 - DNA, 33 bp, Homo sapien
taagacaaaagtttggtcacacatgatttcaaa

SEQ ID NO: 170127 - DNA, 33 bp, Homo sapien
ttgaatagaatgaaagacacatttgccacgagc

SEQ ID NO: 170128 - DNA, 33 bp, Homo sapien
ttgaatagaatgaaaggcacatttgccacgagc

SEQ ID NO: 170129 - DNA, 33 bp, Homo sapien
ataataatgctacatcaaaaataatgttttaaa

SEQ ID NO: 170130 - DNA, 33 bp, Homo sapien
ataataatgctacatcgaaaataatgttttaaa

SEQ ID NO: 170131 - DNA, 33 bp, Homo sapien
ctaatatgtgaaccagaaatcctactgctgggc

SEQ ID NO: 170132 - DNA, 33 bp, Homo sapien
ctaatatgtgaaccagcaatcctactgctgggc

SEQ ID NO: 170133 - DNA, 33 bp, Homo sapien
ctcacctactgtttgcaaagtactgtctttagg

SEQ ID NO: 170134 - DNA, 33 bp, Homo sapien
ctcacctactgtttgctaagtactgtctttagg

SEQ ID NO: 170135 - DNA, 33 bp, Homo sapien
accttatattcttggcacatatgtttcctttct

SEQ ID NO: 170136 - DNA, 33 bp, Homo sapien
accttatattcttggcgcatatgtttcctttct

SEQ ID NO: 170137 - DNA, 33 bp, Homo sapien
ctttaagaatgctacgacaagtgaaagaagcaa

SEQ ID NO: 170138 - DNA, 33 bp, Homo sapien
ctttaagaatgctacggcaagtgaaagaagcaa

SEQ ID NO: 170139 - DNA, 33 bp, Homo sapien
ctccactttatacatacggtgagtttctgcttt

SEQ ID NO: 170140 - DNA, 33 bp, Homo sapien
ctccactttatacatatggtgagtttctgcttt

SEQ ID NO: 170141 - DNA, 33 bp, Homo sapien
ttgacaattttttggactatctgttgtctactt

SEQ ID NO: 170142 - DNA, 33 bp, Homo sapien
ttgacaattttttggattatctgttgtctactt

SEQ ID NO: 170143 - DNA, 33 bp, Homo sapien
agttaccaatgcaaggaccccaaatcagagctt

SEQ ID NO: 170144 - DNA, 33 bp, Homo sapien
agttaccaatgcaagggccccaaatcagagctt

SEQ ID NO: 170145 - DNA, 33 bp, Homo sapien
tcacatgaatcaagaaacagactactctcatga

SEQ ID NO: 170146 - DNA, 33 bp, Homo sapien
tcacatgaatcaagaagcagactactctcatga

SEQ ID NO: 170147 - DNA, 33 bp, Homo sapien
agcattgtttcattaaatgtcatcttgttataa

SEQ ID NO: 170148 - DNA, 33 bp, Homo sapien
agcattgtttcattaactgtcatcttgttataa

SEQ ID NO: 170149 - DNA, 33 bp, Homo sapien
agatggacttgagcagaactaaatctacgaaaa

SEQ ID NO: 170150 - DNA, 33 bp, Homo sapien
agatggacttgagcagcactaaatctacgaaaa

SEQ ID NO: 170151 - DNA, 33 bp, Homo sapien
accctatgaagtgaaaattgactataggtagag

SEQ ID NO: 170152 - DNA, 33 bp, Homo sapien
accctatgaagtgaaagttgactataggtagag

SEQ ID NO: 170153 - DNA, 33 bp, Homo sapien
atcacacatttgtgcaccactttaagacagatg

SEQ ID NO: 170154 - DNA, 33 bp, Homo sapien
atcacacatttgtgcatcactttaagacagatg

SEQ ID NO: 170155 - DNA, 33 bp, Homo sapien
tgtaccaatgttcttcacagtattattcacagt

SEQ ID NO: 170156 - DNA, 33 bp, Homo sapien
tgtaccaatgttcttcccagtattattcacagt

SEQ ID NO: 170157 - DNA, 33 bp, Homo sapien
atataaatacctgttcaacttttctttaagtaa

SEQ ID NO: 170158 - DNA, 33 bp, Homo sapien
atataaatacctgttcgacttttctttaagtaa

SEQ ID NO: 170159 - DNA, 33 bp, Homo sapien
tatataagttgaataaacatttgctacctaaaa

SEQ ID NO: 170160 - DNA, 33 bp, Homo sapien
tatataagttgaataaccatttgctacctaaaa

SEQ ID NO: 170161 - DNA, 33 bp, Homo sapien
catgcaaccaggatatcacatggggcattgttt

SEQ ID NO: 170162 - DNA, 33 bp, Homo sapien
catgcaaccaggatattacatggggcattgttt

SEQ ID NO: 170163 - DNA, 33 bp, Homo sapien
attcagtcttttggtaacatttttctctctgtt

SEQ ID NO: 170164 - DNA, 33 bp, Homo sapien
attcagtcttttggtatcatttttctctctgtt

SEQ ID NO: 170165 - DNA, 33 bp, Homo sapien
aatgcacaatcggataaccatgctgggtgtcac

SEQ ID NO: 170166 - DNA, 33 bp, Homo sapien
aatgcacaatcggatagccatgctgggtgtcac

SEQ ID NO: 170167 - DNA, 33 bp, Homo sapien
agatttgttctgaaaaattatagcttaccatga

SEQ ID NO: 170168 - DNA, 33 bp, Homo sapien
agatttgttctgaaaatttatagcttaccatga

SEQ ID NO: 170169 - DNA, 33 bp, Homo sapien
actggattttcccaaactgcttagatctagata

SEQ ID NO: 170170 - DNA, 33 bp, Homo sapien
actggattttcccaaattgcttagatctagata

SEQ ID NO: 170171 - DNA, 33 bp, Homo sapien
atcagtttcctgaaccaacaaaatggaagtact

SEQ ID NO: 170172 - DNA, 33 bp, Homo sapien
atcagtttcctgaacccacaaaatggaagtact

SEQ ID NO: 170173 - DNA, 33 bp, Homo sapien
gtcatcttctttggaccctttggctgatagtct

SEQ ID NO: 170174 - DNA, 33 bp, Homo sapien
gtcatcttctttggactctttggctgatagtct

SEQ ID NO: 170175 - DNA, 33 bp, Homo sapien
aatttgattgccttaaacaaatggctggttgag

SEQ ID NO: 170176 - DNA, 33 bp, Homo sapien
aatttgattgccttaaccaaatggctggttgag

SEQ ID NO: 170177 - DNA, 33 bp, Homo sapien
ggcaggacatttgctaccatatgcacaatacta

SEQ ID NO: 170178 - DNA, 33 bp, Homo sapien
ggcaggacatttgctatcatatgcacaatacta

SEQ ID NO: 170179 - DNA, 33 bp, Homo sapien
attatgttgactaaacaaagacggcatcaaaga

SEQ ID NO: 170180 - DNA, 33 bp, Homo sapien
attatgttgactaaacgaagacggcatcaaaga

SEQ ID NO: 170181 - DNA, 33 bp, Homo sapien
tagtgttggacaaatagatcattacgtgattat

SEQ ID NO: 170182 - DNA, 33 bp, Homo sapien
tagtgttggacaaatatatcattacgtgattat

SEQ ID NO: 170183 - DNA, 33 bp, Homo sapien
ctcctctttctagggaactgtaagtataataaa

SEQ ID NO: 170184 - DNA, 33 bp, Homo sapien
ctcctctttctagggatctgtaagtataataaa

SEQ ID NO: 170185 - DNA, 33 bp, Homo sapien
cagtatcctaaaagaccctgatagaaaataaag

SEQ ID NO: 170186 - DNA, 33 bp, Homo sapien
cagtatcctaaaagactctgatagaaaataaag

SEQ ID NO: 170187 - DNA, 33 bp, Homo sapien
ataacaaattatatcactaaatctattctctca

SEQ ID NO: 170188 - DNA, 33 bp, Homo sapien
ataacaaattatatcagtaaatctattctctca

SEQ ID NO: 170189 - DNA, 33 bp, Homo sapien
ggagagtggtgtataaacaggtgttgattaatg

SEQ ID NO: 170190 - DNA, 33 bp, Homo sapien
ggagagtggtgtataagcaggtgttgattaatg

SEQ ID NO: 170191 - DNA, 33 bp, Homo sapien
actttaaaatattatcactcagaaacagaagtt

SEQ ID NO: 170192 - DNA, 33 bp, Homo sapien
actttaaaatattatcgctcagaaacagaagtt

SEQ ID NO: 170193 - DNA, 33 bp, Homo sapien
ttgcactgtatatccacctatagttttcagcat

SEQ ID NO: 170194 - DNA, 33 bp, Homo sapien
ttgcactgtatatccagctatagttttcagcat

SEQ ID NO: 170195 - DNA, 33 bp, Homo sapien
caacttcctgacggtcccttttacatctttgtt

SEQ ID NO: 170196 - DNA, 33 bp, Homo sapien
caacttcctgacggtctcttttacatctttgtt

SEQ ID NO: 170197 - DNA, 33 bp, Homo sapien
agagataatggtaaggcatcttgaacatcgaaa

SEQ ID NO: 170198 - DNA, 33 bp, Homo sapien
agagataatggtaaggtatcttgaacatcgaaa

SEQ ID NO: 170199 - DNA, 33 bp, Homo sapien
aaatagttggttatgacgcctttaatattgatc

SEQ ID NO: 170200 - DNA, 33 bp, Homo sapien
aaatagttggttatgaggcctttaatattgatc

SEQ ID NO: 170201 - DNA, 33 bp, Homo sapien
attatcttagacttctcaaagttttcattatgc

SEQ ID NO: 170202 - DNA, 33 bp, Homo sapien
attatcttagacttctgaaagttttcattatgc

SEQ ID NO: 170203 - DNA, 33 bp, Homo sapien
cttaattcaattcccacagtgtaaaaaatcaag

SEQ ID NO: 170204 - DNA, 33 bp, Homo sapien
cttaattcaattcccagagtgtaaaaaatcaag

SEQ ID NO: 170205 - DNA, 33 bp, Homo sapien
ctatgtggaataaccaggactcaaataatatcc

SEQ ID NO: 170206 - DNA, 33 bp, Homo sapien
ctatgtggaataaccatgactcaaataatatcc

SEQ ID NO: 170207 - DNA, 33 bp, Homo sapien
cccaatatttgagcccccatattataaaacatg

SEQ ID NO: 170208 - DNA, 33 bp, Homo sapien
cccaatatttgagccctcatattataaaacatg

SEQ ID NO: 170209 - DNA, 33 bp, Homo sapien
gttgttgcattctcaccgagttattatttcctt

SEQ ID NO: 170210 - DNA, 33 bp, Homo sapien
gttgttgcattctcactgagttattatttcctt

SEQ ID NO: 170211 - DNA, 33 bp, Homo sapien
ttgaataggaaactccgcattagtctaagtgcc

SEQ ID NO: 170212 - DNA, 33 bp, Homo sapien
ttgaataggaaactcctcattagtctaagtgcc

SEQ ID NO: 170213 - DNA, 33 bp, Homo sapien
agagttatgaatgaataaggacgaagagggaga

SEQ ID NO: 170214 - DNA, 33 bp, Homo sapien
agagttatgaatgaattaggacgaagagggaga

SEQ ID NO: 170215 - DNA, 33 bp, Homo sapien
tggaagatggtgatagaagtcaggtgggaggcc

SEQ ID NO: 170216 - DNA, 33 bp, Homo sapien
tggaagatggtgatagcagtcaggtgggaggcc

SEQ ID NO: 170217 - DNA, 33 bp, Homo sapien
ccttaggctgtagatcagagggttcagcatggg

SEQ ID NO: 170218 - DNA, 33 bp, Homo sapien
ccttaggctgtagatcggagggttcagcatggg

SEQ ID NO: 170219 - DNA, 33 bp, Homo sapien
cctggggatcttcacacgtcagtgatgtctgaa

SEQ ID NO: 170220 - DNA, 33 bp, Homo sapien
cctggggatcttcacatgtcagtgatgtctgaa

SEQ ID NO: 170221 - DNA, 33 bp, Homo sapien
tatgtcatagtgattcacctagaaaacttcact

SEQ ID NO: 170222 - DNA, 33 bp, Homo sapien
tatgtcatagtgattcccctagaaaacttcact

SEQ ID NO: 170223 - DNA, 33 bp, Homo sapien
tgcaggagtgcttgaccggtgcttctacaatga

SEQ ID NO: 170224 - DNA, 33 bp, Homo sapien
tgcaggagtgcttgactggtgcttctacaatga

SEQ ID NO: 170225 - DNA, 33 bp, Homo sapien
actcatgtaagtattacggctagttgtaagatt

SEQ ID NO: 170226 - DNA, 33 bp, Homo sapien
actcatgtaagtattatggctagttgtaagatt

SEQ ID NO: 170227 - DNA, 33 bp, Homo sapien
gaagatcagataaaatgaagaactcatgtaagt

SEQ ID NO: 170228 - DNA, 33 bp, Homo sapien
gaagatcagataaaattaagaactcatgtaagt

SEQ ID NO: 170229 - DNA, 33 bp, Homo sapien
cggtcataggccatcacagctaataaaaaggat

SEQ ID NO: 170230 - DNA, 33 bp, Homo sapien
cggtcataggccatcatagctaataaaaaggat

SEQ ID NO: 170231 - DNA, 33 bp, Homo sapien
tatgaatagtgaccatgaaattaattacaactg

SEQ ID NO: 170232 - DNA, 33 bp, Homo sapien
tatgaatagtgaccattaaattaattacaactg

SEQ ID NO: 170233 - DNA, 33 bp, Homo sapien
tggccatctgtaaccccctgctgtacatggtga

SEQ ID NO: 170234 - DNA, 33 bp, Homo sapien
tggccatctgtaaccctctgctgtacatggtga

SEQ ID NO: 170235 - DNA, 33 bp, Homo sapien
actaatgttttctaggccatgatgccactggga

SEQ ID NO: 170236 - DNA, 33 bp, Homo sapien
actaatgttttctaggtcatgatgccactggga

SEQ ID NO: 170237 - DNA, 33 bp, Homo sapien
aaatgtacatttcttcacgtacctaacaatata

SEQ ID NO: 170238 - DNA, 33 bp, Homo sapien
aaatgtacatttcttcgcgtacctaacaatata

SEQ ID NO: 170239 - DNA, 33 bp, Homo sapien
aaagtgaatcaatagaacttggttgtgttttag

SEQ ID NO: 170240 - DNA, 33 bp, Homo sapien
aaagtgaatcaatagaccttggttgtgttttag

SEQ ID NO: 170241 - DNA, 33 bp, Homo sapien
gtacctattttgtagccaactttgagatggaca

SEQ ID NO: 170242 - DNA, 33 bp, Homo sapien
gtacctattttgtagctaactttgagatggaca

SEQ ID NO: 170243 - DNA, 33 bp, Homo sapien
tacactggtttacacactctcacttcagcctac

SEQ ID NO: 170244 - DNA, 33 bp, Homo sapien
tacactggtttacacattctcacttcagcctac

SEQ ID NO: 170245 - DNA, 33 bp, Homo sapien
ataaagaaaacagaaaagtcaaaatcaataaaa

SEQ ID NO: 170246 - DNA, 33 bp, Homo sapien
ataaagaaaacagaaaggtcaaaatcaataaaa

SEQ ID NO: 170247 - DNA, 33 bp, Homo sapien
ccagtttaattggaaaatcataagcagggctaa

SEQ ID NO: 170248 - DNA, 33 bp, Homo sapien
ccagtttaattggaaagtcataagcagggctaa

SEQ ID NO: 170249 - DNA, 33 bp, Homo sapien; identical to SEQ ID NO: 170247

SEQ ID NO: 170250 - DNA, 33 bp, Homo sapien; identical to SEQ ID NO: 170248

SEQ ID NO: 170251 - DNA, 33 bp, Homo sapien
gacctggggaaattgccagttttttgctgtcct

SEQ ID NO: 170252 - DNA, 33 bp, Homo sapien
gacctggggaaattgctagttttttgctgtcct

SEQ ID NO: 170253 - DNA, 33 bp, Homo sapien
catccctggagactatgagcatcggttacagtg

SEQ ID NO: 170254 - DNA, 33 bp, Homo sapien
catccctggagactattagcatcggttacagtg

SEQ ID NO: 170255 - DNA, 33 bp, Homo sapien
aaatacttcatggtcccactcatatttgaaatc

SEQ ID NO: 170256 - DNA, 33 bp, Homo sapien
aaatacttcatggtccgactcatatttgaaatc

SEQ ID NO: 170257 - DNA, 33 bp, Homo sapien
aatagtgaagaccgaaatagcatcctgaaatta

SEQ ID NO: 170258 - DNA, 33 bp, Homo sapien
aatagtgaagaccgaattagcatcctgaaatta

SEQ ID NO: 170259 - DNA, 33 bp, Homo sapien
aaatgttttacgtgcaagggttcatcacaatga

SEQ ID NO: 170260 - DNA, 33 bp, Homo sapien
aaatgttttacgtgcatgggttcatcacaatga

SEQ ID NO: 170261 - DNA, 33 bp, Homo sapien
ttgattcctttgtatgaacacatggcatgtcag

SEQ ID NO: 170262 - DNA, 33 bp, Homo sapien
ttgattcctttgtatgtacacatggcatgtcag

SEQ ID NO: 170263 - DNA, 33 bp, Homo sapien
cttcatagtctcagcaacaggctctggacttcc

SEQ ID NO: 170264 - DNA, 33 bp, Homo sapien
cttcatagtctcagcaccaggctctggacttcc

SEQ ID NO: 170265 - DNA, 33 bp, Homo sapien
agttattcaataaacaaatcaatgttcctcaca

SEQ ID NO: 170266 - DNA, 33 bp, Homo sapien
agttattcaataaacacatcaatgttcctcaca

SEQ ID NO: 170267 - DNA, 33 bp, Homo sapien
tggaatttcatgtctaaggcaagagatttctta

SEQ ID NO: 170268 - DNA, 33 bp, Homo sapien
tggaatttcatgtctagggcaagagatttctta

SEQ ID NO: 170269 - DNA, 33 bp, Homo sapien
catttacactagagcacgaatatcaacatattg

SEQ ID NO: 170270 - DNA, 33 bp, Homo sapien
catttacactagagcatgaatatcaacatattg

SEQ ID NO: 170271 - DNA, 33 bp, Homo sapien
cactgaccttatttgaaaatggcccatgattca

SEQ ID NO: 170272 - DNA, 33 bp, Homo sapien
cactgaccttatttgataatggcccatgattca

SEQ ID NO: 170273 - DNA, 33 bp, Homo sapien
gtgtagtgggttaacaaggtaggaacatttcta

SEQ ID NO: 170274 - DNA, 33 bp, Homo sapien
gtgtagtgggttaacatggtaggaacatttcta

SEQ ID NO: 170275 - DNA, 33 bp, Homo sapien
taacaataagaaatgaaaactcctgaaatggta

SEQ ID NO: 170276 - DNA, 33 bp, Homo sapien
taacaataagaaatgagaactcctgaaatggta

SEQ ID NO: 170277 - DNA, 33 bp, Homo sapien
tatctggttctaaaaaacaaaagccaaatgtaa

SEQ ID NO: 170278 - DNA, 33 bp, Homo sapien
tatctggttctaaaaatcaaaagccaaatgtaa

SEQ ID NO: 170279 - DNA, 33 bp, Homo sapien
tttttcattaaaatcaaaatgtgaagaacaata

SEQ ID NO: 170280 - DNA, 33 bp, Homo sapien
tttttcattaaaatcagaatgtgaagaacaata

SEQ ID NO: 170281 - DNA, 33 bp, Homo sapien
tgctgctttttttcatcaatcattgtctgagta

SEQ ID NO: 170282 - DNA, 33 bp, Homo sapien
tgctgctttttttcattaatcattgtctgagta

SEQ ID NO: 170283 - DNA, 33 bp, Homo sapien
aatgtatgtttttaaacgtgattgtgtgatgtt

SEQ ID NO: 170284 - DNA, 33 bp, Homo sapien
aatgtatgtttttaaatgtgattgtgtgatgtt

SEQ ID NO: 170285 - DNA, 33 bp, Homo sapien
aaattatggaagaaaacaacctagttggaattc

SEQ ID NO: 170286 - DNA, 33 bp, Homo sapien
aaattatggaagaaaataacctagttggaattc

SEQ ID NO: 170287 - DNA, 33 bp, Homo sapien
atatccaataccatacaagtacctctgtgttct

SEQ ID NO: 170288 - DNA, 33 bp, Homo sapien
atatccaataccatactagtacctctgtgttct

SEQ ID NO: 170289 - DNA, 33 bp, Homo sapien
ctatttttcttacataaccacagaacacagagg

SEQ ID NO: 170290 - DNA, 33 bp, Homo sapien
ctatttttcttacatacccacagaacacagagg

SEQ ID NO: 170291 - DNA, 33 bp, Homo sapien
actaatgggtgttttaactttatagaaagcaag

SEQ ID NO: 170292 - DNA, 33 bp, Homo sapien
actaatgggtgttttagctttatagaaagcaag

SEQ ID NO: 170293 - DNA, 33 bp, Homo sapien
aattaacctgcgagaacttagcattcctgaaga

SEQ ID NO: 170294 - DNA, 33 bp, Homo sapien
aattaacctgcgagaatttagcattcctgaaga

SEQ ID NO: 170295 - DNA, 33 bp, Homo sapien
aagggtttgcaggccacaagttgcatggtaatt

SEQ ID NO: 170296 - DNA, 33 bp, Homo sapien
aagggtttgcaggccataagttgcatggtaatt

SEQ ID NO: 170297 - DNA, 33 bp, Homo sapien
acacttaggatatacacgaaactgctagattaa

SEQ ID NO: 170298 - DNA, 33 bp, Homo sapien
acacttaggatatacatgaaactgctagattaa

SEQ ID NO: 170299 - DNA, 33 bp, Homo sapien
gggaacaatgtctgagaaatagcaaaggtctac

SEQ ID NO: 170300 - DNA, 33 bp, Homo sapien
gggaacaatgtctgaggaatagcaaaggtctac

SEQ ID NO: 170301 - DNA, 33 bp, Homo sapien
atcaccctttctgatacagcttccacagggtct

SEQ ID NO: 170302 - DNA, 33 bp, Homo sapien
atcaccctttctgatatagcttccacagggtct

SEQ ID NO: 170303 - DNA, 33 bp, Homo sapien
ctgatataagctaatcacatagtcaactgatcg

SEQ ID NO: 170304 - DNA, 33 bp, Homo sapien
ctgatataagctaatcgcatagtcaactgatcg

SEQ ID NO: 170305 - DNA, 33 bp, Homo sapien
ttgccttctatttccactaacttggactgccat

SEQ ID NO: 170306 - DNA, 33 bp, Homo sapien
ttgccttctatttccattaacttggactgccat

SEQ ID NO: 170307 - DNA, 33 bp, Homo sapien
tagcatcgactgtccaaagaaatcacttcttag

SEQ ID NO: 170308 - DNA, 33 bp, Homo sapien
tagcatcgactgtccagagaaatcacttcttag

SEQ ID NO: 170309 - DNA, 33 bp, Homo sapien
ttgaaaatacttaccactctagatacagataag

SEQ ID NO: 170310 - DNA, 33 bp, Homo sapien
ttgaaaatacttaccattctagatacagataag

SEQ ID NO: 170311 - DNA, 33 bp, Homo sapien
tggagtcacaatagtaagaaaaagagaaagcat

SEQ ID NO: 170312 - DNA, 33 bp, Homo sapien
tggagtcacaatagtacgaaaaagagaaagcat

SEQ ID NO: 170313 - DNA, 33 bp, Homo sapien
tgtttatacttgaaaaagagcaaaccaactaag

SEQ ID NO: 170314 - DNA, 33 bp, Homo sapien
tgtttatacttgaaaacgagcaaaccaactaag

SEQ ID NO: 170315 - DNA, 33 bp, Homo sapien
tgttaaatgttggaaactatatatggcttggtt

SEQ ID NO: 170316 - DNA, 33 bp, Homo sapien
tgttaaatgttggaaattatatatggcttggtt

SEQ ID NO: 170317 - DNA, 33 bp, Homo sapien
ttataatggagagaaaaatccaatactctttaa

SEQ ID NO: 170318 - DNA, 33 bp, Homo sapien
ttataatggagagaaacatccaatactctttaa

SEQ ID NO: 170319 - DNA, 33 bp, Homo sapien
tttttgattggtagcacgttaagtatggtggat

SEQ ID NO: 170320 - DNA, 33 bp, Homo sapien
tttttgattggtagcatgttaagtatggtggat

SEQ ID NO: 170321 - DNA, 33 bp, Homo sapien
gtacttagaatgttcacaaagctttggattcag

SEQ ID NO: 170322 - DNA, 33 bp, Homo sapien
gtacttagaatgttcataaagctttggattcag

SEQ ID NO: 170323 - DNA, 33 bp, Homo sapien
atattttgttcatatacctctctttgaaactat

SEQ ID NO: 170324 - DNA, 33 bp, Homo sapien
atattttgttcatatatctctctttgaaactat

SEQ ID NO: 170325 - DNA, 33 bp, Homo sapien
tgatttcaagaaattcacctcatttatctaacc

SEQ ID NO: 170326 - DNA, 33 bp, Homo sapien
tgatttcaagaaattcgcctcatttatctaacc

SEQ ID NO: 170327 - DNA, 33 bp, Homo sapien
caaatggtcatagaacaccaaacaagaagaaac

SEQ ID NO: 170328 - DNA, 33 bp, Homo sapien
caaatggtcatagaacgccaaacaagaagaaac

SEQ ID NO: 170329 - DNA, 33 bp, Homo sapien
gattctacccagagaaatagtgacagctgtctc

SEQ ID NO: 170330 - DNA, 33 bp, Homo sapien
gattctacccagagaactagtgacagctgtctc

SEQ ID NO: 170331 - DNA, 33 bp, Homo sapien
tatctaaatataaagaccagtggaatgaaaata

SEQ ID NO: 170332 - DNA, 33 bp, Homo sapien
tatctaaatataaagatcagtggaatgaaaata

SEQ ID NO: 170333 - DNA, 33 bp, Homo sapien
tcttagaatggggaagacaactgtatagtaaca

SEQ ID NO: 170334 - DNA, 33 bp, Homo sapien
tcttagaatggggaaggcaactgtatagtaaca

SEQ ID NO: 170335 - DNA, 33 bp, Homo sapien
ggttgagacgttgaaacgggtcacagaaaaaat

SEQ ID NO: 170336 - DNA, 33 bp, Homo sapien
ggttgagacgttgaaatgggtcacagaaaaaat

SEQ ID NO: 170337 - DNA, 33 bp, Homo sapien
acacccactgtgataagaggaggaatacctccc

SEQ ID NO: 170338 - DNA, 33 bp, Homo sapien
acacccactgtgataataggaggaatacctccc

SEQ ID NO: 170339 - DNA, 33 bp, Homo sapien
ttcagagagactctcaagggcctgaatactggg

SEQ ID NO: 170340 - DNA, 33 bp, Homo sapien
ttcagagagactctcatgggcctgaatactggg

SEQ ID NO: 170341 - DNA, 33 bp, Homo sapien
aaaccttctattctagccctcaccaagtctgtg

SEQ ID NO: 170342 - DNA, 33 bp, Homo sapien
aaaccttctattctagtcctcaccaagtctgtg

SEQ ID NO: 170343 - DNA, 33 bp, Homo sapien
gttttcagttctgtgacattttgattttgtaaa

SEQ ID NO: 170344 - DNA, 33 bp, Homo sapien
gttttcagttctgtgatattttgattttgtaaa

SEQ ID NO: 170345 - DNA, 33 bp, Homo sapien
tgagttggcctaaaacagaccatttgaatccta

SEQ ID NO: 170346 - DNA, 33 bp, Homo sapien
tgagttggcctaaaacggaccatttgaatccta

SEQ ID NO: 170347 - DNA, 33 bp, Homo sapien
agcgggcgacatatggccacataccggtcatag

SEQ ID NO: 170348 - DNA, 33 bp, Homo sapien
agcgggcgacatatggtcacataccggtcatag

SEQ ID NO: 170349 - DNA, 33 bp, Homo sapien
gtattgtgcagtaaagcataaactcaactatct

SEQ ID NO: 170350 - DNA, 33 bp, Homo sapien
gtattgtgcagtaaaggataaactcaactatct

SEQ ID NO: 170351 - DNA, 33 bp, Homo sapien
ttctaatttcttgagaaccagtgaaaccaccat

SEQ ID NO: 170352 - DNA, 33 bp, Homo sapien
ttctaatttcttgagagccagtgaaaccaccat

SEQ ID NO: 170353 - DNA, 33 bp, Homo sapien
acaataaagcaactgacgcagtaaagtgtcaca

SEQ ID NO: 170354 - DNA, 33 bp, Homo sapien
acaataaagcaactgatgcagtaaagtgtcaca

SEQ ID NO: 170355 - DNA, 33 bp, Homo sapien
ggcatagacatatttcacagctggcagaacccc

SEQ ID NO: 170356 - DNA, 33 bp, Homo sapien
ggcatagacatatttcgcagctggcagaacccc

SEQ ID NO: 170357 - DNA, 33 bp, Homo sapien
tcttcacattccctccactgatgcaatattgtt

SEQ ID NO: 170358 - DNA, 33 bp, Homo sapien
tcttcacattccctccgctgatgcaatattgtt

SEQ ID NO: 170359 - DNA, 33 bp, Homo sapien
tgggatccaataacaaccctggccaaactctgg

SEQ ID NO: 170360 - DNA, 33 bp, Homo sapien
tgggatccaataacaagcctggccaaactctgg

SEQ ID NO: 170361 - DNA, 33 bp, Homo sapien
catgtctcacagtttgaacagctgtaactgcaa

SEQ ID NO: 170362 - DNA, 33 bp, Homo sapien
catgtctcacagtttgtacagctgtaactgcaa

SEQ ID NO: 170363 - DNA, 33 bp, Homo sapien
gcaatatgttgtgcccaagtgagtcaaaacata

SEQ ID NO: 170364 - DNA, 33 bp, Homo sapien
gcaatatgttgtgccccagtgagtcaaaacata

SEQ ID NO: 170365 - DNA, 33 bp, Homo sapien
cacatggctaggtaggaattccaaatggtcttg

SEQ ID NO: 170366 - DNA, 33 bp, Homo sapien
cacatggctaggtagggattccaaatggtcttg

SEQ ID NO: 170367 - DNA, 33 bp, Homo sapien
ctgtgcagcaatacaccgtggcacatgtttacc

SEQ ID NO: 170368 - DNA, 33 bp, Homo sapien
ctgtgcagcaatacacggtggcacatgtttacc

SEQ ID NO: 170369 - DNA, 33 bp, Homo sapien
aatatagatgccattgccaaattaatataaaaa

SEQ ID NO: 170370 - DNA, 33 bp, Homo sapien
aatatagatgccattgtcaaattaatataaaaa

SEQ ID NO: 170371 - DNA, 33 bp, Homo sapien
atactactgtggttgacagttttcaaaaagaaa

SEQ ID NO: 170372 - DNA, 33 bp, Homo sapien
atactactgtggttgatagttttcaaaaagaaa

SEQ ID NO: 170373 - DNA, 33 bp, Homo sapien
gtaacaatatattccaaactccataatacaagg

SEQ ID NO: 170374 - DNA, 33 bp, Homo sapien
gtaacaatatattccagactccataatacaagg

SEQ ID NO: 170375 - DNA, 33 bp, Homo sapien
aaatgttggtgaattacatagcaggacagaaag

SEQ ID NO: 170376 - DNA, 33 bp, Homo sapien
aaatgttggtgaattatatagcaggacagaaag

SEQ ID NO: 170377 - DNA, 33 bp, Homo sapien
tgttctgtagaagagagtcactaccattaggtg

SEQ ID NO: 170378 - DNA, 33 bp, Homo sapien
tgttctgtagaagagattcactaccattaggtg

SEQ ID NO: 170379 - DNA, 33 bp, Homo sapien
aaatgttgttcaattagcatctttgatctcttg

SEQ ID NO: 170380 - DNA, 33 bp, Homo sapien
aaatgttgttcaattatcatctttgatctcttg

SEQ ID NO: 170381 - DNA, 33 bp, Homo sapien
ttcctgtataatggaccctaaatgttatgatgt

SEQ ID NO: 170382 - DNA, 33 bp, Homo sapien
ttcctgtataatggactctaaatgttatgatgt

SEQ ID NO: 170383 - DNA, 33 bp, Homo sapien
gtaggaaactgaatggaaccagcaatttaaggg

SEQ ID NO: 170384 - DNA, 33 bp, Homo sapien
gtaggaaactgaatggcaccagcaatttaaggg

SEQ ID NO: 170385 - DNA, 33 bp, Homo sapien
catttagtttgtgttacgctttttgaggttact

SEQ ID NO: 170386 - DNA, 33 bp, Homo sapien
catttagtttgtgttatgctttttgaggttact

SEQ ID NO: 170387 - DNA, 33 bp, Homo sapien; identical to SEQ ID NO: 170385

SEQ ID NO: 170388 - DNA, 33 bp, Homo sapien; identical to SEQ ID NO: 170386

SEQ ID NO: 170389 - DNA, 33 bp, Homo sapien
agatgaggaagcaaagcaagaatctgaaacaat

SEQ ID NO: 170390 - DNA, 33 bp, Homo sapien
agatgaggaagcaaaggaagaatctgaaacaat

SEQ ID NO: 170391 - DNA, 33 bp, Homo sapien
tgacctgattatatacagaggaagttttgggct

SEQ ID NO: 170392 - DNA, 33 bp, Homo sapien
tgacctgattatatacggaggaagttttgggct

SEQ ID NO: 170393 - DNA, 33 bp, Homo sapien
ttgagtcatagcttaaggtaggagccagagtta

SEQ ID NO: 170394 - DNA, 33 bp, Homo sapien
ttgagtcatagcttaatgtaggagccagagtta

SEQ ID NO: 170395 - DNA, 33 bp, Homo sapien
tattatcttggatttcaaactcacacttatgaa

SEQ ID NO: 170396 - DNA, 33 bp, Homo sapien
tattatcttggatttcgaactcacacttatgaa

SEQ ID NO: 170397 - DNA, 33 bp, Homo sapien
tgaattcactctaaaacggaccattgctttgat

SEQ ID NO: 170398 - DNA, 33 bp, Homo sapien
tgaattcactctaaaatggaccattgctttgat

SEQ ID NO: 170399 - DNA, 33 bp, Homo sapien
ttatcagctcgtaaacacatagttaacttagta

SEQ ID NO: 170400 - DNA, 33 bp, Homo sapien
ttatcagctcgtaaacgcatagttaacttagta

SEQ ID NO: 170401 - DNA, 33 bp, Homo sapien
ctttgcacaaagcctaacatggctacatttagt

SEQ ID NO: 170402 - DNA, 33 bp, Homo sapien
ctttgcacaaagcctagcatggctacatttagt

SEQ ID NO: 170403 - DNA, 33 bp, Homo sapien
aaggtaagaggataccaggaagaggatcccagg

SEQ ID NO: 170404 - DNA, 33 bp, Homo sapien
aaggtaagaggataccgggaagaggatcccagg

SEQ ID NO: 170405 - DNA, 33 bp, Homo sapien
acacttcctgtagtcactatctgatgaaatttc

SEQ ID NO: 170406 - DNA, 33 bp, Homo sapien
acacttcctgtagtcattatctgatgaaatttc

SEQ ID NO: 170407 - DNA, 33 bp, Homo sapien
ctgatgaggttatgaacaaaagggaatacttat

SEQ ID NO: 170408 - DNA, 33 bp, Homo sapien
ctgatgaggttatgaagaaaagggaatacttat

SEQ ID NO: 170409 - DNA, 33 bp, Homo sapien
tattaaaacactgagcacttaatgataaagtca

SEQ ID NO: 170410 - DNA, 33 bp, Homo sapien
tattaaaacactgagcgcttaatgataaagtca

SEQ ID NO: 170411 - DNA, 33 bp, Homo sapien
attaccaagatcaacaaaagccaaatgtctgat

SEQ ID NO: 170412 - DNA, 33 bp, Homo sapien
attaccaagatcaacagaagccaaatgtctgat

SEQ ID NO: 170413 - DNA, 33 bp, Homo sapien
acaaatcaacagtgctaaaattacaaaatgttg

SEQ ID NO: 170414 - DNA, 33 bp, Homo sapien
acaaatcaacagtgctgaaattacaaaatgttg

SEQ ID NO: 170415 - DNA, 33 bp, Homo sapien
tttctcaagatatctcaatgggaatggtattct

SEQ ID NO: 170416 - DNA, 33 bp, Homo sapien
tttctcaagatatctcgatgggaatggtattct

SEQ ID NO: 170417 - DNA, 33 bp, Homo sapien
tgatccctgcttcctaaacccatagtgtcaatg

SEQ ID NO: 170418 - DNA, 33 bp, Homo sapien
tgatccctgcttcctagacccatagtgtcaatg

SEQ ID NO: 170419 - DNA, 33 bp, Homo sapien
tgatacccacaccatacagaatggctaagtctc

SEQ ID NO: 170420 - DNA, 33 bp, Homo sapien
tgatacccacaccatagagaatggctaagtctc

SEQ ID NO: 170421 - DNA, 33 bp, Homo sapien
tttctccacttttacactgattttcatatcaat

SEQ ID NO: 170422 - DNA, 33 bp, Homo sapien
tttctccacttttacattgattttcatatcaat

SEQ ID NO: 170423 - DNA, 33 bp, Homo sapien
ataaaatgttctctccaattataaggattgccc

SEQ ID NO: 170424 - DNA, 33 bp, Homo sapien
ataaaatgttctctcctattataaggattgccc

SEQ ID NO: 170425 - DNA, 33 bp, Homo sapien
ttttattaaaagcaaaccaacatttcaataaaa

SEQ ID NO: 170426 - DNA, 33 bp, Homo sapien
ttttattaaaagcaaatcaacatttcaataaaa

SEQ ID NO: 170427 - DNA, 33 bp, Homo sapien
ttctaaactgcaaacactatctatttctgccaa

SEQ ID NO: 170428 - DNA, 33 bp, Homo sapien
ttctaaactgcaaacagtatctatttctgccaa

SEQ ID NO: 170429 - DNA, 33 bp, Homo sapien
gacacttggatatctgacaccttaccaaaggct

SEQ ID NO: 170430 - DNA, 33 bp, Homo sapien
gacacttggatatctggcaccttaccaaaggct

SEQ ID NO: 170431 - DNA, 33 bp, Homo sapien
atgcctgatagcaaaaatatcacaaatgacggc

SEQ ID NO: 170432 - DNA, 33 bp, Homo sapien
atgcctgatagcaaaagtatcacaaatgacggc

SEQ ID NO: 170433 - DNA, 33 bp, Homo sapien
cacactatatgagggacatttctggtctcaagg

SEQ ID NO: 170434 - DNA, 33 bp, Homo sapien
cacactatatgagggatatttctggtctcaagg

SEQ ID NO: 170435 - DNA, 33 bp, Homo sapien
agcagaatcactgaagacaggaaaaatcacact

SEQ ID NO: 170436 - DNA, 33 bp, Homo sapien
agcagaatcactgaaggcaggaaaaatcacact

SEQ ID NO: 170437 - DNA, 33 bp, Homo sapien
tttatcaatttctaccacataatgttgcttcag

SEQ ID NO: 170438 - DNA, 33 bp, Homo sapien
tttatcaatttctaccgcataatgttgcttcag

SEQ ID NO: 170439 - DNA, 33 bp, Homo sapien
tcacaatattcacattaaaattgaccattggag

SEQ ID NO: 170440 - DNA, 33 bp, Homo sapien
tcacaatattcacattgaaattgaccattggag

SEQ ID NO: 170441 - DNA, 33 bp, Homo sapien
ctcaaagcatatagaaacatcttaagtaaatac

SEQ ID NO: 170442 - DNA, 33 bp, Homo sapien
ctcaaagcatatagaagcatcttaagtaaatac

SEQ ID NO: 170443 - DNA, 33 bp, Homo sapien
aagaatacacaatgggaaattaaattggaccct

SEQ ID NO: 170444 - DNA, 33 bp, Homo sapien
aagaatacacaatggggaattaaattggaccct

SEQ ID NO: 170445 - DNA, 33 bp, Homo sapien
tttagccagaagccaaagttctttcaggtaatc

SEQ ID NO: 170446 - DNA, 33 bp, Homo sapien
tttagccagaagccaaggttctttcaggtaatc

SEQ ID NO: 170447 - DNA, 33 bp, Homo sapien
aaataagctgctcgctaaattagatacatgata

SEQ ID NO: 170448 - DNA, 33 bp, Homo sapien
aaataagctgctcgctcaattagatacatgata

SEQ ID NO: 170449 - DNA, 33 bp, Homo sapien
tgtttatgcagttgaacgaggtatatgtgaaag

SEQ ID NO: 170450 - DNA, 33 bp, Homo sapien
tgtttatgcagttgaatgaggtatatgtgaaag

SEQ ID NO: 170451 - DNA, 33 bp, Homo sapien
attggagccaaatagaagaatttcactgtataa

SEQ ID NO: 170452 - DNA, 33 bp, Homo sapien
attggagccaaatagatgaatttcactgtataa

SEQ ID NO: 170453 - DNA, 33 bp, Homo sapien
aaaagatcatacacagaaaactacattttaaga

SEQ ID NO: 170454 - DNA, 33 bp, Homo sapien
aaaagatcatacacaggaaactacattttaaga

SEQ ID NO: 170455 - DNA, 33 bp, Homo sapien
ccttgactcactaggacgacttgcctatggaaa

SEQ ID NO: 170456 - DNA, 33 bp, Homo sapien
ccttgactcactaggatgacttgcctatggaaa

SEQ ID NO: 170457 - DNA, 33 bp, Homo sapien
atgtatccacttggacacaattttatcaccacc

SEQ ID NO: 170458 - DNA, 33 bp, Homo sapien
atgtatccacttggacccaattttatcaccacc

SEQ ID NO: 170459 - DNA, 33 bp, Homo sapien
agttggagtagcaacaaaagttaaggagaaaag

SEQ ID NO: 170460 - DNA, 33 bp, Homo sapien
agttggagtagcaacagaagttaaggagaaaag

SEQ ID NO: 170461 - DNA, 33 bp, Homo sapien
gcagggaggactagcccgaaatttaaagttcct

SEQ ID NO: 170462 - DNA, 33 bp, Homo sapien
gcagggaggactagcctgaaatttaaagttcct

SEQ ID NO: 170463 - DNA, 33 bp, Homo sapien
atacagcagtcacttgaatacctattttttgct

SEQ ID NO: 170464 - DNA, 33 bp, Homo sapien
atacagcagtcacttggatacctattttttgct

SEQ ID NO: 170465 - DNA, 33 bp, Homo sapien
catagactggatctaggagcctaggaatgaaga

SEQ ID NO: 170466 - DNA, 33 bp, Homo sapien
catagactggatctagtagcctaggaatgaaga

SEQ ID NO: 170467 - DNA, 33 bp, Homo sapien
gaatgaagagatggaactatgagtgacaccact

SEQ ID NO: 170468 - DNA, 33 bp, Homo sapien
gaatgaagagatggaagtatgagtgacaccact

SEQ ID NO: 170469 - DNA, 33 bp, Homo sapien
ttctgaactggccacacgattatagctggtatt

SEQ ID NO: 170470 - DNA, 33 bp, Homo sapien
ttctgaactggccacatgattatagctggtatt

SEQ ID NO: 170471 - DNA, 33 bp, Homo sapien
ggtaataaaaaatggaataaagcatcttaataa

SEQ ID NO: 170472 - DNA, 33 bp, Homo sapien
ggtaataaaaaatggagtaaagcatcttaataa

SEQ ID NO: 170473 - DNA, 33 bp, Homo sapien
ctaatcctttattccaatcaggacatatattct

SEQ ID NO: 170474 - DNA, 33 bp, Homo sapien
ctaatcctttattccagtcaggacatatattct

SEQ ID NO: 170475 - DNA, 33 bp, Homo sapien
gttcactccctgcttaagctaggacatccttcg

SEQ ID NO: 170476 - DNA, 33 bp, Homo sapien
gttcactccctgcttaggctaggacatccttcg

SEQ ID NO: 170477 - DNA, 33 bp, Homo sapien
gagttgacagatattaagcatatgagtaagagc

SEQ ID NO: 170478 - DNA, 33 bp, Homo sapien
gagttgacagatattaggcatatgagtaagagc

SEQ ID NO: 170479 - DNA, 33 bp, Homo sapien
ctgttgattattctccaaatgttccattaagaa

SEQ ID NO: 170480 - DNA, 33 bp, Homo sapien
ctgttgattattctccgaatgttccattaagaa

SEQ ID NO: 170481 - DNA, 33 bp, Homo sapien
taaaatatttcattaccaaggagtgagtgtcaa

SEQ ID NO: 170482 - DNA, 33 bp, Homo sapien
taaaatatttcattactaaggagtgagtgtcaa

SEQ ID NO: 170483 - DNA, 33 bp, Homo sapien
agcgtagaaagatagacgagcttttgtttgttt

SEQ ID NO: 170484 - DNA, 33 bp, Homo sapien
agcgtagaaagatagatgagcttttgtttgttt

SEQ ID NO: 170485 - DNA, 33 bp, Homo sapien
aatctgtaagcatttacattggctgatagttgg

SEQ ID NO: 170486 - DNA, 33 bp, Homo sapien
aatctgtaagcatttatattggctgatagttgg

SEQ ID NO: 170487 - DNA, 33 bp, Homo sapien
gattcaggaacaaaaaatcaactaaggctatga

SEQ ID NO: 170488 - DNA, 33 bp, Homo sapien
gattcaggaacaaaaagtcaactaaggctatga

SEQ ID NO: 170489 - DNA, 33 bp, Homo sapien
ttctctaattattgtacggcactctttaatttt

SEQ ID NO: 170490 - DNA, 33 bp, Homo sapien
ttctctaattattgtatggcactctttaatttt

SEQ ID NO: 170491 - DNA, 33 bp, Homo sapien
ttagtagactagcactaaagtctgcaggttcat

SEQ ID NO: 170492 - DNA, 33 bp, Homo sapien
ttagtagactagcactcaagtctgcaggttcat

SEQ ID NO: 170493 - DNA, 33 bp, Homo sapien
ctacattaaggcaaaacactcgatatttctact

SEQ ID NO: 170494 - DNA, 33 bp, Homo sapien
ctacattaaggcaaaatactcgatatttctact

SEQ ID NO: 170495 - DNA, 33 bp, Homo sapien
gagagagttatctttccagtatgatcaccatca

SEQ ID NO: 170496 - DNA, 33 bp, Homo sapien
gagagagttatctttctagtatgatcaccatca

SEQ ID NO: 170497 - DNA, 33 bp, Homo sapien
atgaaatacttctacacatatttcatggccaaa

SEQ ID NO: 170498 - DNA, 33 bp, Homo sapien
atgaaatacttctacatatatttcatggccaaa

SEQ ID NO: 170499 - DNA, 33 bp, Homo sapien
gtatcatcatgaacagaagggtctgtattcaaa

SEQ ID NO: 170500 - DNA, 33 bp, Homo sapien
gtatcatcatgaacagcagggtctgtattcaaa

SEQ ID NO: 170501 - DNA, 33 bp, Homo sapien
tacagaaatagagaaagggcttgttataagaat

SEQ ID NO: 170502 - DNA, 33 bp, Homo sapien
tacagaaatagagaaatggcttgttataagaat

SEQ ID NO: 170503 - DNA, 33 bp, Homo sapien
aggtggggacatcttagaccagcttgtttccag

SEQ ID NO: 170504 - DNA, 33 bp, Homo sapien
aggtggggacatcttataccagcttgtttccag

SEQ ID NO: 170505 - DNA, 33 bp, Homo sapien
aggaagaaaattgaggaatgtaggagtatgatg

SEQ ID NO: 170506 - DNA, 33 bp, Homo sapien
aggaagaaaattgaggtatgtaggagtatgatg

SEQ ID NO: 170507 - DNA, 33 bp, Homo sapien
acagagtccagtgctaataccctgccaaagaaa

SEQ ID NO: 170508 - DNA, 33 bp, Homo sapien
acagagtccagtgctactaccctgccaaagaaa

SEQ ID NO: 170509 - DNA, 33 bp, Homo sapien
gtgatagcagaggtaccgtaaaaatccacaaaa

SEQ ID NO: 170510 - DNA, 33 bp, Homo sapien
gtgatagcagaggtactgtaaaaatccacaaaa

SEQ ID NO: 170511 - DNA, 33 bp, Homo sapien
aattcccagactgaaaatgtaatgaagcagcac

SEQ ID NO: 170512 - DNA, 33 bp, Homo sapien
aattcccagactgaaagtgtaatgaagcagcac

SEQ ID NO: 170513 - DNA, 33 bp, Homo sapien
acataggagatgagaaaaatgataagagaacaa

SEQ ID NO: 170514 - DNA, 33 bp, Homo sapien
acataggagatgagaacaatgataagagaacaa

SEQ ID NO: 170515 - DNA, 33 bp, Homo sapien
gaggcaacatatgcaccactaaagtttctcgcc

SEQ ID NO: 170516 - DNA, 33 bp, Homo sapien
gaggcaacatatgcacgactaaagtttctcgcc

SEQ ID NO: 170517 - DNA, 33 bp, Homo sapien
aagtcattatagtaagcctgtgtggtgggaatt

SEQ ID NO: 170518 - DNA, 33 bp, Homo sapien
aagtcattatagtaagtctgtgtggtgggaatt

SEQ ID NO: 170519 - DNA, 33 bp, Homo sapien
ggtccacaatgaacacaatgaatccctttgtcc

SEQ ID NO: 170520 - DNA, 33 bp, Homo sapien
ggtccacaatgaacacgatgaatccctttgtcc

SEQ ID NO: 170521 - DNA, 33 bp, Homo sapien
atagaaagcgcaaaagaatattgtgcaacttct

SEQ ID NO: 170522 - DNA, 33 bp, Homo sapien
atagaaagcgcaaaagtatattgtgcaacttct

SEQ ID NO: 170523 - DNA, 33 bp, Homo sapien
actttagtgacctagaccaatgatttgttatgt

SEQ ID NO: 170524 - DNA, 33 bp, Homo sapien
actttagtgacctagagcaatgatttgttatgt

SEQ ID NO: 170525 - DNA, 33 bp, Homo sapien
tttccaagccatcagaatctcttggttttccca

SEQ ID NO: 170526 - DNA, 33 bp, Homo sapien
tttccaagccatcagagtctcttggttttccca

SEQ ID NO: 170527 - DNA, 33 bp, Homo sapien
cctttcatcatgaaaaacattattttgttgctt

SEQ ID NO: 170528 - DNA, 33 bp, Homo sapien
cctttcatcatgaaaaccattattttgttgctt

SEQ ID NO: 170529 - DNA, 33 bp, Homo sapien
gtattgcttcaactacccttcccaacaaccaac

SEQ ID NO: 170530 - DNA, 33 bp, Homo sapien
gtattgcttcaactacgcttcccaacaaccaac

SEQ ID NO: 170531 - DNA, 33 bp, Homo sapien
tatgttaaatgtgtcaagttcatgggaactaat

SEQ ID NO: 170532 - DNA, 33 bp, Homo sapien
tatgttaaatgtgtcatgttcatgggaactaat

SEQ ID NO: 170533 - DNA, 33 bp, Homo sapien
aactgcgtgtatctgcacaagaataaacattta

SEQ ID NO: 170534 - DNA, 33 bp, Homo sapien
aactgcgtgtatctgcgcaagaataaacattta

SEQ ID NO: 170535 - DNA, 33 bp, Homo sapien
agaaaatgtcaaggtccattaaagtaacagcta

SEQ ID NO: 170536 - DNA, 33 bp, Homo sapien
agaaaatgtcaaggtctattaaagtaacagcta

SEQ ID NO: 170537 - DNA, 33 bp, Homo sapien
ctcttccacaccgttaccactttccgtctgact

SEQ ID NO: 170538 - DNA, 33 bp, Homo sapien
ctcttccacaccgttatcactttccgtctgact

SEQ ID NO: 170539 - DNA, 33 bp, Homo sapien
agaactgtctaaaggacatctattcgtatttaa

SEQ ID NO: 170540 - DNA, 33 bp, Homo sapien
agaactgtctaaaggatatctattcgtatttaa

SEQ ID NO: 170541 - DNA, 33 bp, Homo sapien
cattaaagcttaccgaagagagaggcttctaat

SEQ ID NO: 170542 - DNA, 33 bp, Homo sapien
cattaaagcttaccgaggagagaggcttctaat

SEQ ID NO: 170543 - DNA, 33 bp, Homo sapien
gtgtgcttggctaatacattgaaactgttctaa

SEQ ID NO: 170544 - DNA, 33 bp, Homo sapien
gtgtgcttggctaatatattgaaactgttctaa

SEQ ID NO: 170545 - DNA, 33 bp, Homo sapien
ttgttaactgaagaaaattgttaaagtgatcaa

SEQ ID NO: 170546 - DNA, 33 bp, Homo sapien
ttgttaactgaagaaatttgttaaagtgatcaa

SEQ ID NO: 170547 - DNA, 33 bp, Homo sapien
gatctgtctgacttcactaatgacttctacttt

SEQ ID NO: 170548 - DNA, 33 bp, Homo sapien
gatctgtctgacttcagtaatgacttctacttt

SEQ ID NO: 170549 - DNA, 33 bp, Homo sapien
tatatgatgcaaaccaatattttgccaaaatgc

SEQ ID NO: 170550 - DNA, 33 bp, Homo sapien
tatatgatgcaaaccagtattttgccaaaatgc

SEQ ID NO: 170551 - DNA, 33 bp, Homo sapien
aaaacgcagggctactcaagcaacaacttcttt

SEQ ID NO: 170552 - DNA, 33 bp, Homo sapien
aaaacgcagggctacttaagcaacaacttcttt

SEQ ID NO: 170553 - DNA, 33 bp, Homo sapien
cttttacaaaggtcccagcacaggccattttga

SEQ ID NO: 170554 - DNA, 33 bp, Homo sapien
cttttacaaaggtcccggcacaggccattttga

SEQ ID NO: 170555 - DNA, 33 bp, Homo sapien
tctcattttgtagtgacgggtgattcagcacaa

SEQ ID NO: 170556 - DNA, 33 bp, Homo sapien
tctcattttgtagtgatgggtgattcagcacaa

SEQ ID NO: 170557 - DNA, 33 bp, Homo sapien
tggcataagagaataactgtgctatctattgcc

SEQ ID NO: 170558 - DNA, 33 bp, Homo sapien
tggcataagagaataattgtgctatctattgcc

SEQ ID NO: 170559 - DNA, 33 bp, Homo sapien
catcataaaacccagaaaaaccacatgaggcta

SEQ ID NO: 170560 - DNA, 33 bp, Homo sapien
catcataaaacccagagaaaccacatgaggcta

SEQ ID NO: 170561 - DNA, 33 bp, Homo sapien
ctccaacttaattgcacactgtgattacaaatt

SEQ ID NO: 170562 - DNA, 33 bp, Homo sapien
ctccaacttaattgcatactgtgattacaaatt

SEQ ID NO: 170563 - DNA, 33 bp, Homo sapien
aagtataaaataaccggaagactcaatatctct

SEQ ID NO: 170564 - DNA, 33 bp, Homo sapien
aagtataaaataaccgtaagactcaatatctct

SEQ ID NO: 170565 - DNA, 33 bp, Homo sapien
tctgagcctggttactcacctaactaaatttat

SEQ ID NO: 170566 - DNA, 33 bp, Homo sapien
tctgagcctggttacttacctaactaaatttat

SEQ ID NO: 170567 - DNA, 33 bp, Homo sapien
gacaggagtttatatacggcttgtaatattatt

SEQ ID NO: 170568 - DNA, 33 bp, Homo sapien
gacaggagtttatatatggcttgtaatattatt

SEQ ID NO: 170569 - DNA, 33 bp, Homo sapien
tagcaaatacaaaagcactctttttcggatttc

SEQ ID NO: 170570 - DNA, 33 bp, Homo sapien
tagcaaatacaaaagcgctctttttcggatttc

SEQ ID NO: 170571 - DNA, 33 bp, Homo sapien
ttggctttatcgctgggatgcaaggctaactta

SEQ ID NO: 170572 - DNA, 33 bp, Homo sapien
ttggctttatcgctggtatgcaaggctaactta

SEQ ID NO: 170573 - DNA, 33 bp, Homo sapien
tcaatgaagtatagtgacaaaagtataatagta

SEQ ID NO: 170574 - DNA, 33 bp, Homo sapien
tcaatgaagtatagtggcaaaagtataatagta

SEQ ID NO: 170575 - DNA, 33 bp, Homo sapien
cataggtagattagaaggggagctcaaatatgc

SEQ ID NO: 170576 - DNA, 33 bp, Homo sapien
cataggtagattagaatgggagctcaaatatgc

SEQ ID NO: 170577 - DNA, 33 bp, Homo sapien
tattattttctcctcacctatccaaaagatcat

SEQ ID NO: 170578 - DNA, 33 bp, Homo sapien
tattattttctcctcatctatccaaaagatcat

SEQ ID NO: 170579 - DNA, 33 bp, Homo sapien
atagtttttcattgggaatctaaaattgacttt

SEQ ID NO: 170580 - DNA, 33 bp, Homo sapien
atagtttttcattggggatctaaaattgacttt

SEQ ID NO: 170581 - DNA, 33 bp, Homo sapien
tctgctgaaagtaggcacaaagcgttctccacc

SEQ ID NO: 170582 - DNA, 33 bp, Homo sapien
tctgctgaaagtaggcgcaaagcgttctccacc

SEQ ID NO: 170583 - DNA, 33 bp, Homo sapien
attttcttaggtaccaacatttttcacttaaat

SEQ ID NO: 170584 - DNA, 33 bp, Homo sapien
attttcttaggtaccagcatttttcacttaaat

SEQ ID NO: 170585 - DNA, 33 bp, Homo sapien
tgtatgttacactgagaccctctagaagtgaaa

SEQ ID NO: 170586 - DNA, 33 bp, Homo sapien
tgtatgttacactgaggccctctagaagtgaaa

SEQ ID NO: 170587 - DNA, 33 bp, Homo sapien
tagaaaacagaggtaaagattactgaagcttat

SEQ ID NO: 170588 - DNA, 33 bp, Homo sapien
tagaaaacagaggtaaggattactgaagcttat

SEQ ID NO: 170589 - DNA, 33 bp, Homo sapien
tgtctacacagtcacaatggacttcagcaccat

SEQ ID NO: 170590 - DNA, 33 bp, Homo sapien
tgtctacacagtcacagtggacttcagcaccat

SEQ ID NO: 170591 - DNA, 33 bp, Homo sapien
gggaaatgaaagaaccaagtaaacaataggtca

SEQ ID NO: 170592 - DNA, 33 bp, Homo sapien
gggaaatgaaagaaccgagtaaacaataggtca

SEQ ID NO: 170593 - DNA, 33 bp, Homo sapien
actgctgtgggtgaaacgtggcatgccctggaa

SEQ ID NO: 170594 - DNA, 33 bp, Homo sapien
actgctgtgggtgaaatgtggcatgccctggaa

SEQ ID NO: 170595 - DNA, 33 bp, Homo sapien
cttggaggttgttacacgtacagaatcaaagtc

SEQ ID NO: 170596 - DNA, 33 bp, Homo sapien
cttggaggttgttacatgtacagaatcaaagtc

SEQ ID NO: 170597 - DNA, 33 bp, Homo sapien
ttaagtaccggactcacaaaggtgtaaaagaca

SEQ ID NO: 170598 - DNA, 33 bp, Homo sapien
ttaagtaccggactcagaaaggtgtaaaagaca

SEQ ID NO: 170599 - DNA, 33 bp, Homo sapien
agtatcaatggccttcaccagagtacagtttca

SEQ ID NO: 170600 - DNA, 33 bp, Homo sapien
agtatcaatggccttctccagagtacagtttca

SEQ ID NO: 170601 - DNA, 33 bp, Homo sapien
gtgggaatttcagattgaaaaagacacagtagg

SEQ ID NO: 170602 - DNA, 33 bp, Homo sapien
gtgggaatttcagatttaaaaagacacagtagg

SEQ ID NO: 170603 - DNA, 33 bp, Homo sapien
ctggatcccataaaagccaatgagcctctcagt

SEQ ID NO: 170604 - DNA, 33 bp, Homo sapien
ctggatcccataaaagtcaatgagcctctcagt

SEQ ID NO: 170605 - DNA, 33 bp, Homo sapien
tctcaaagaataaccaccatttgtgatctaaga

SEQ ID NO: 170606 - DNA, 33 bp, Homo sapien
tctcaaagaataaccatcatttgtgatctaaga

SEQ ID NO: 170607 - DNA, 33 bp, Homo sapien
aaacaaagccagctaccagttaaagtagtaagg

SEQ ID NO: 170608 - DNA, 33 bp, Homo sapien
aaacaaagccagctacgagttaaagtagtaagg

SEQ ID NO: 170609 - DNA, 33 bp, Homo sapien
ggatataaagaaaacaatagtgtatcaaagggc

SEQ ID NO: 170610 - DNA, 33 bp, Homo sapien
ggatataaagaaaacagtagtgtatcaaagggc

SEQ ID NO: 170611 - DNA, 33 bp, Homo sapien
ccttcctgcttcattacaagtgtgctaaattgg

SEQ ID NO: 170612 - DNA, 33 bp, Homo sapien
ccttcctgcttcattataagtgtgctaaattgg

SEQ ID NO: 170613 - DNA, 33 bp, Homo sapien
ctcactgcaagacttacggaataactactatat

SEQ ID NO: 170614 - DNA, 33 bp, Homo sapien
ctcactgcaagacttatggaataactactatat

SEQ ID NO: 170615 - DNA, 33 bp, Homo sapien
atgctagtaattttcagatctgactcccatgtg

SEQ ID NO: 170616 - DNA, 33 bp, Homo sapien
atgctagtaattttcatatctgactcccatgtg

SEQ ID NO: 170617 - DNA, 33 bp, Homo sapien
accacattctcaaatccaaattcaccagcaata

SEQ ID NO: 170618 - DNA, 33 bp, Homo sapien
accacattctcaaatctaaattcaccagcaata

SEQ ID NO: 170619 - DNA, 33 bp, Homo sapien
gaaaacgctgaagctcagaagaatgaaataatg

SEQ ID NO: 170620 - DNA, 33 bp, Homo sapien
gaaaacgctgaagctcggaagaatgaaataatg

SEQ ID NO: 170621 - DNA, 33 bp, Homo sapien
tatttcatctatagcaataatctcatcaattca

SEQ ID NO: 170622 - DNA, 33 bp, Homo sapien
tatttcatctatagcagtaatctcatcaattca

SEQ ID NO: 170623 - DNA, 33 bp, Homo sapien
cataaatgacaaacctaaatgcattttaatttc

SEQ ID NO: 170624 - DNA, 33 bp, Homo sapien
cataaatgacaaacctgaatgcattttaatttc

SEQ ID NO: 170625 - DNA, 33 bp, Homo sapien
taccaatagaggcctcacaagttacagaacgga

SEQ ID NO: 170626 - DNA, 33 bp, Homo sapien
taccaatagaggcctcgcaagttacagaacgga

SEQ ID NO: 170627 - DNA, 33 bp, Homo sapien
aacacggctaacgagtaactccctgtagactgg

SEQ ID NO: 170628 - DNA, 33 bp, Homo sapien
aacacggctaacgagtcactccctgtagactgg

SEQ ID NO: 170629 - DNA, 33 bp, Homo sapien
tgacacaaatgcttgacctgggaacacggctaa

SEQ ID NO: 170630 - DNA, 33 bp, Homo sapien
tgacacaaatgcttgatctgggaacacggctaa

SEQ ID NO: 170631 - DNA, 33 bp, Homo sapien
cacactaattcacccacggtaagcaggaggtat

SEQ ID NO: 170632 - DNA, 33 bp, Homo sapien
cacactaattcacccagggtaagcaggaggtat

SEQ ID NO: 170633 - DNA, 33 bp, Homo sapien
tatagaagatggggccacaggtagatctagtct

SEQ ID NO: 170634 - DNA, 33 bp, Homo sapien
tatagaagatggggccgcaggtagatctagtct

SEQ ID NO: 170635 - DNA, 33 bp, Homo sapien
cactaagctgtgtaaccctagaaatgggaagta

SEQ ID NO: 170636 - DNA, 33 bp, Homo sapien
cactaagctgtgtaactctagaaatgggaagta

SEQ ID NO: 170637 - DNA, 33 bp, Homo sapien
tttcttgccactatagcctagaatcacttctaa

SEQ ID NO: 170638 - DNA, 33 bp, Homo sapien
tttcttgccactatagtctagaatcacttctaa

SEQ ID NO: 170639 - DNA, 33 bp, Homo sapien
aatttattcacctctacgcaacatcagaatttg

SEQ ID NO: 170640 - DNA, 33 bp, Homo sapien
aatttattcacctctatgcaacatcagaatttg

SEQ ID NO: 170641 - DNA, 33 bp, Homo sapien
aagaaattagccatacgacattcttccatttgc

SEQ ID NO: 170642 - DNA, 33 bp, Homo sapien
aagaaattagccatactacattcttccatttgc

SEQ ID NO: 170643 - DNA, 33 bp, Homo sapien; identical to SEQ ID NO: 170641

SEQ ID NO: 170644 - DNA, 33 bp, Homo sapien; identical to SEQ ID NO: 170642

SEQ ID NO: 170645 - DNA, 33 bp, Homo sapien
gtctcaaactacttgacggcttctattctaata

SEQ ID NO: 170646 - DNA, 33 bp, Homo sapien
gtctcaaactacttgatggcttctattctaata

SEQ ID NO: 170647 - DNA, 33 bp, Homo sapien
tagtagtttttcaagacggtagactgaaggttt

SEQ ID NO: 170648 - DNA, 33 bp, Homo sapien
tagtagtttttcaagatggtagactgaaggttt

SEQ ID NO: 170649 - DNA, 33 bp, Homo sapien
ttgtgcccatacatggacaaccagagtgcagac

SEQ ID NO: 170650 - DNA, 33 bp, Homo sapien
ttgtgcccatacatgggcaaccagagtgcagac

SEQ ID NO: 170651 - DNA, 33 bp, Homo sapien
ctttgtgtttgccttacgttacccagagaaggt

SEQ ID NO: 170652 - DNA, 33 bp, Homo sapien
ctttgtgtttgccttatgttacccagagaaggt

SEQ ID NO: 170653 - DNA, 33 bp, Homo sapien
tctcatttcaagtgtcaaagaaagtaaactaaa

SEQ ID NO: 170654 - DNA, 33 bp, Homo sapien
tctcatttcaagtgtcgaagaaagtaaactaaa

SEQ ID NO: 170655 - DNA, 33 bp, Homo sapien
ttgtaacattatagtgaaatgctttactcacat

SEQ ID NO: 170656 - DNA, 33 bp, Homo sapien
ttgtaacattatagtgcaatgctttactcacat

SEQ ID NO: 170657 - DNA, 33 bp, Homo sapien
cctgtccctgggaaccaaatgtctcggtataaa

SEQ ID NO: 170658 - DNA, 33 bp, Homo sapien
cctgtccctgggaaccgaatgtctcggtataaa

SEQ ID NO: 170659 - DNA, 33 bp, Homo sapien
ggaatggattaaatgaagaagatctgcaattaa

SEQ ID NO: 170660 - DNA, 33 bp, Homo sapien
ggaatggattaaatgaggaagatctgcaattaa

SEQ ID NO: 170661 - DNA, 33 bp, Homo sapien
tgaacaaaggtggaagcatttgatttttctccg

SEQ ID NO: 170662 - DNA, 33 bp, Homo sapien
tgaacaaaggtggaagtatttgatttttctccg

SEQ ID NO: 170663 - DNA, 33 bp, Homo sapien
tttaccatgtagaaacaacgtgccacataatac

SEQ ID NO: 170664 - DNA, 33 bp, Homo sapien
tttaccatgtagaaaccacgtgccacataatac

SEQ ID NO: 170665 - DNA, 33 bp, Homo sapien
atgtgataactttcctcaatatgtaatctaatg

SEQ ID NO: 170666 - DNA, 33 bp, Homo sapien
atgtgataactttcctgaatatgtaatctaatg

SEQ ID NO: 170667 - DNA, 33 bp, Homo sapien
cacagtaaaccgtatgcatattcggggaggtaa

SEQ ID NO: 170668 - DNA, 33 bp, Homo sapien
cacagtaaaccgtatgtatattcggggaggtaa

SEQ ID NO: 170669 - DNA, 33 bp, Homo sapien
aatgactaattgacaagctaaggtaccaaaagt

SEQ ID NO: 170670 - DNA, 33 bp, Homo sapien
aatgactaattgacaatctaaggtaccaaaagt

SEQ ID NO: 170671 - DNA, 33 bp, Homo sapien
gcaccaatgtgaagcaaatgaggatcctacatg

SEQ ID NO: 170672 - DNA, 33 bp, Homo sapien
gcaccaatgtgaagcagatgaggatcctacatg

SEQ ID NO: 170673 - DNA, 33 bp, Homo sapien
gccatcattgttggtaaactaacacaggaagag

SEQ ID NO: 170674 - DNA, 33 bp, Homo sapien
gccatcattgttggtagactaacacaggaagag

SEQ ID NO: 170675 - DNA, 33 bp, Homo sapien
gggaacagcatagtataaaaggtagaaaccatt

SEQ ID NO: 170676 - DNA, 33 bp, Homo sapien
gggaacagcatagtatgaaaggtagaaaccatt

SEQ ID NO: 170677 - DNA, 33 bp, Homo sapien
ccataatgttctcaaaccaatgctaagtgatga

SEQ ID NO: 170678 - DNA, 33 bp, Homo sapien
ccataatgttctcaaatcaatgctaagtgatga

SEQ ID NO: 170679 - DNA, 33 bp, Homo sapien
gacttattgaacttaactgaactacagaaatgc

SEQ ID NO: 170680 - DNA, 33 bp, Homo sapien
gacttattgaacttaattgaactacagaaatgc

SEQ ID NO: 170681 - DNA, 33 bp, Homo sapien
acagaaatgcaaatgaacacatttataagccaa

SEQ ID NO: 170682 - DNA, 33 bp, Homo sapien
acagaaatgcaaatgagcacatttataagccaa

SEQ ID NO: 170683 - DNA, 33 bp, Homo sapien
aggacatttttaccaacggtggtgcatcacaga

SEQ ID NO: 170684 - DNA, 33 bp, Homo sapien
aggacatttttaccaatggtggtgcatcacaga

SEQ ID NO: 170685 - DNA, 33 bp, Homo sapien
catcagaaacactccaaatagaatcggctgcca

SEQ ID NO: 170686 - DNA, 33 bp, Homo sapien
catcagaaacactccagatagaatcggctgcca

SEQ ID NO: 170687 - DNA, 33 bp, Homo sapien
gagagatttcagaaaactttatatccgagggaa

SEQ ID NO: 170688 - DNA, 33 bp, Homo sapien
gagagatttcagaaaattttatatccgagggaa

SEQ ID NO: 170689 - DNA, 33 bp, Homo sapien
gacatagaaacagatcaagaagtaggaccagag

SEQ ID NO: 170690 - DNA, 33 bp, Homo sapien
gacatagaaacagatcgagaagtaggaccagag

SEQ ID NO: 170691 - DNA, 33 bp, Homo sapien
catattctctaagaaaatgacttgccctgctaa

SEQ ID NO: 170692 - DNA, 33 bp, Homo sapien
catattctctaagaaattgacttgccctgctaa

SEQ ID NO: 170693 - DNA, 33 bp, Homo sapien
ttctgactaaaatgtcaagagaaaatgcttaaa

SEQ ID NO: 170694 - DNA, 33 bp, Homo sapien
ttctgactaaaatgtccagagaaaatgcttaaa

SEQ ID NO: 170695 - DNA, 33 bp, Homo sapien
taaatgaggtggtcacgctttacttaactgtta

SEQ ID NO: 170696 - DNA, 33 bp, Homo sapien
taaatgaggtggtcactctttacttaactgtta

SEQ ID NO: 170697 - DNA, 33 bp, Homo sapien
catttataaaaatccaaaatgtggcttgccata

SEQ ID NO: 170698 - DNA, 33 bp, Homo sapien
catttataaaaatccagaatgtggcttgccata

SEQ ID NO: 170699 - DNA, 33 bp, Homo sapien
gacattatcatacacaagaccaaaccacaagct

SEQ ID NO: 170700 - DNA, 33 bp, Homo sapien
gacattatcatacacacgaccaaaccacaagct

SEQ ID NO: 170701 - DNA, 33 bp, Homo sapien
gagggacaagttatctcagaaccactaaaagag

SEQ ID NO: 170702 - DNA, 33 bp, Homo sapien
gagggacaagttatcttagaaccactaaaagag

SEQ ID NO: 170703 - DNA, 33 bp, Homo sapien
atcttgggatgatgaccaggaagtctaactatg

SEQ ID NO: 170704 - DNA, 33 bp, Homo sapien
atcttgggatgatgacgaggaagtctaactatg

SEQ ID NO: 170705 - DNA, 33 bp, Homo sapien
agatactcaatgactacgaagaacccaaagaac

SEQ ID NO: 170706 - DNA, 33 bp, Homo sapien
agatactcaatgactatgaagaacccaaagaac

SEQ ID NO: 170707 - DNA, 33 bp, Homo sapien
tgtgaaagcaggaatcaagccagatgcgaacca

SEQ ID NO: 170708 - DNA, 33 bp, Homo sapien
tgtgaaagcaggaatcgagccagatgcgaacca

SEQ ID NO: 170709 - DNA, 33 bp, Homo sapien
ttttacctcattactacgacagaaaacttgggc

SEQ ID NO: 170710 - DNA, 33 bp, Homo sapien
ttttacctcattactatgacagaaaacttgggc

SEQ ID NO: 170711 - DNA, 33 bp, Homo sapien
aacctctggattatacagcattgttttttacat

SEQ ID NO: 170712 - DNA, 33 bp, Homo sapien
aacctctggattatacggcattgttttttacat

SEQ ID NO: 170713 - DNA, 33 bp, Homo sapien
attacttttttctccacgaagatatcagtcaac

SEQ ID NO: 170714 - DNA, 33 bp, Homo sapien
attacttttttctccatgaagatatcagtcaac

SEQ ID NO: 170715 - DNA, 33 bp, Homo sapien
aggagcagacatccacaaaggacaagtggcaga

SEQ ID NO: 170716 - DNA, 33 bp, Homo sapien
aggagcagacatccacgaaggacaagtggcaga

SEQ ID NO: 170717 - DNA, 33 bp, Homo sapien
cttggggtagttggtgacaatttactgaaaaac

SEQ ID NO: 170718 - DNA, 33 bp, Homo sapien
cttggggtagttggtgccaatttactgaaaaac

SEQ ID NO: 170719 - DNA, 33 bp, Homo sapien
tagcagaaactcggataaaatgaaacaaattgt

SEQ ID NO: 170720 - DNA, 33 bp, Homo sapien
tagcagaaactcggatgaaatgaaacaaattgt

SEQ ID NO: 170721 - DNA, 33 bp, Homo sapien
gaaagcaaaaagtggcacaatgtgtacagtaaa

SEQ ID NO: 170722 - DNA, 33 bp, Homo sapien
gaaagcaaaaagtggcgcaatgtgtacagtaaa

SEQ ID NO: 170723 - DNA, 33 bp, Homo sapien
tgagattttccagtacccttgaaaccttgaacc

SEQ ID NO: 170724 - DNA, 33 bp, Homo sapien
tgagattttccagtacgcttgaaaccttgaacc

SEQ ID NO: 170725 - DNA, 33 bp, Homo sapien
gtcactggagatgatacgattccagaacacttg

SEQ ID NO: 170726 - DNA, 33 bp, Homo sapien
gtcactggagatgataggattccagaacacttg

SEQ ID NO: 170727 - DNA, 33 bp, Homo sapien
ttccagaacacttgaactggaaattaatgccac

SEQ ID NO: 170728 - DNA, 33 bp, Homo sapien
ttccagaacacttgaattggaaattaatgccac

SEQ ID NO: 170729 - DNA, 33 bp, Homo sapien
tggactaaaactataagcagtctgtacacctct

SEQ ID NO: 170730 - DNA, 33 bp, Homo sapien
tggactaaaactataatcagtctgtacacctct

SEQ ID NO: 170731 - DNA, 33 bp, Homo sapien
tttatttgtctgaccacgttagtttgaacgaat

SEQ ID NO: 170732 - DNA, 33 bp, Homo sapien
tttatttgtctgaccatgttagtttgaacgaat

SEQ ID NO: 170733 - DNA, 33 bp, Homo sapien
tctcataagaagaaaaacatgcagccaacatac

SEQ ID NO: 170734 - DNA, 33 bp, Homo sapien
tctcataagaagaaaaccatgcagccaacatac

SEQ ID NO: 170735 - DNA, 33 bp, Homo sapien
ttataaaatgttcaaggctgggaatgtgtcttg

SEQ ID NO: 170736 - DNA, 33 bp, Homo sapien
ttataaaatgttcaagtctgggaatgtgtcttg

SEQ ID NO: 170737 - DNA, 33 bp, Homo sapien
gtgaagtaggtagtgaagctatattccttacac

SEQ ID NO: 170738 - DNA, 33 bp, Homo sapien
gtgaagtaggtagtgacgctatattccttacac

SEQ ID NO: 170739 - DNA, 33 bp, Homo sapien
ccatgaaacattgtaaaaaattattggttgatc

SEQ ID NO: 170740 - DNA, 33 bp, Homo sapien
ccatgaaacattgtaagaaattattggttgatc

SEQ ID NO: 170741 - DNA, 33 bp, Homo sapien
atctcagctcacatccaacaaatcaggtagtaa

SEQ ID NO: 170742 - DNA, 33 bp, Homo sapien
atctcagctcacatccgacaaatcaggtagtaa

SEQ ID NO: 170743 - DNA, 33 bp, Homo sapien
gttccaccattaaaataactgtgtgatattggg

SEQ ID NO: 170744 - DNA, 33 bp, Homo sapien
gttccaccattaaaatgactgtgtgatattggg

SEQ ID NO: 170745 - DNA, 33 bp, Homo sapien
attaagactacaagaaatccctgaatacacaga

SEQ ID NO: 170746 - DNA, 33 bp, Homo sapien
attaagactacaagaagtccctgaatacacaga

SEQ ID NO: 170747 - DNA, 33 bp, Homo sapien
aagtgaggctaaactgaatattactgagcagga

SEQ ID NO: 170748 - DNA, 33 bp, Homo sapien
aagtgaggctaaactggatattactgagcagga

SEQ ID NO: 170749 - DNA, 33 bp, Homo sapien
gagaccacagaagtaaatgattgctttgagttt

SEQ ID NO: 170750 - DNA, 33 bp, Homo sapien
gagaccacagaagtaagtgattgctttgagttt

SEQ ID NO: 170751 - DNA, 33 bp, Homo sapien
acatgaacagtttttacgctaacactggcactt

SEQ ID NO: 170752 - DNA, 33 bp, Homo sapien
acatgaacagtttttatgctaacactggcactt

SEQ ID NO: 170753 - DNA, 33 bp, Homo sapien
atgtgagccttcaaccaccttaaaaataactga

SEQ ID NO: 170754 - DNA, 33 bp, Homo sapien
atgtgagccttcaaccgccttaaaaataactga

SEQ ID NO: 170755 - DNA, 33 bp, Homo sapien
agctcagcacacaagaacctttctctccctctg

SEQ ID NO: 170756 - DNA, 33 bp, Homo sapien
agctcagcacacaagatcctttctctccctctg

SEQ ID NO: 170757 - DNA, 33 bp, Homo sapien
atataattcagagctcactccacgttaggcatt

SEQ ID NO: 170758 - DNA, 33 bp, Homo sapien
atataattcagagctcgctccacgttaggcatt

SEQ ID NO: 170759 - DNA, 33 bp, Homo sapien
acctagagaagcagtaaacgtagtaggtgggtc

SEQ ID NO: 170760 - DNA, 33 bp, Homo sapien
acctagagaagcagtacacgtagtaggtgggtc

SEQ ID NO: 170761 - DNA, 33 bp, Homo sapien
atcctgacatctcactcacatttttgtgtcttt

SEQ ID NO: 170762 - DNA, 33 bp, Homo sapien
atcctgacatctcacttacatttttgtgtcttt

SEQ ID NO: 170763 - DNA, 33 bp, Homo sapien
taattaaaagcagtcaatgaaaaggaaattata

SEQ ID NO: 170764 - DNA, 33 bp, Homo sapien
taattaaaagcagtcagtgaaaaggaaattata

SEQ ID NO: 170765 - DNA, 33 bp, Homo sapien
aactatattgttctacaatctccatcttccatg

SEQ ID NO: 170766 - DNA, 33 bp, Homo sapien
aactatattgttctacgatctccatcttccatg

SEQ ID NO: 170767 - DNA, 33 bp, Homo sapien
agtgtctggcctatggcaaatgtttaattagtg

SEQ ID NO: 170768 - DNA, 33 bp, Homo sapien
agtgtctggcctatggtaaatgtttaattagtg

SEQ ID NO: 170769 - DNA, 33 bp, Homo sapien
aatgggagcagtagacaactgaacaaggacaat

SEQ ID NO: 170770 - DNA, 33 bp, Homo sapien
aatgggagcagtagaccactgaacaaggacaat

SEQ ID NO: 170771 - DNA, 33 bp, Homo sapien
aagcataggagatataaggataaccaaagaaaa

SEQ ID NO: 170772 - DNA, 33 bp, Homo sapien
aagcataggagatatacggataaccaaagaaaa

SEQ ID NO: 170773 - DNA, 33 bp, Homo sapien
atacatcaactatgaaaagcagcacctgtactt

SEQ ID NO: 170774 - DNA, 33 bp, Homo sapien
atacatcaactatgaagagcagcacctgtactt

SEQ ID NO: 170775 - DNA, 33 bp, Homo sapien
gcaacagaatgagggaagattacattggaaaac

SEQ ID NO: 170776 - DNA, 33 bp, Homo sapien
gcaacagaatgagggaggattacattggaaaac

SEQ ID NO: 170777 - DNA, 33 bp, Homo sapien
cagtgcttgctactgaaacaccccaaacagtca

SEQ ID NO: 170778 - DNA, 33 bp, Homo sapien
cagtgcttgctactgacacaccccaaacagtca

SEQ ID NO: 170779 - DNA, 33 bp, Homo sapien
gaaaaagtggcaaaagaataagacaactaggga

SEQ ID NO: 170780 - DNA, 33 bp, Homo sapien
gaaaaagtggcaaaaggataagacaactaggga

SEQ ID NO: 170781 - DNA, 33 bp, Homo sapien
ctttttcttctgcctgaaatgttcctccaaacc

SEQ ID NO: 170782 - DNA, 33 bp, Homo sapien
ctttttcttctgcctggaatgttcctccaaacc

SEQ ID NO: 170783 - DNA, 33 bp, Homo sapien
tgaatacaattgtgataaacttcacaaatgaag

SEQ ID NO: 170784 - DNA, 33 bp, Homo sapien
tgaatacaattgtgatgaacttcacaaatgaag

SEQ ID NO: 170785 - DNA, 33 bp, Homo sapien
ttgctaatgtttgaaaacttctcatcattttaa

SEQ ID NO: 170786 - DNA, 33 bp, Homo sapien
ttgctaatgtttgaaagcttctcatcattttaa

SEQ ID NO: 170787 - DNA, 33 bp, Homo sapien
tcctgctaatcctacaagcacaagataatattc

SEQ ID NO: 170788 - DNA, 33 bp, Homo sapien
tcctgctaatcctacaggcacaagataatattc

SEQ ID NO: 170789 - DNA, 33 bp, Homo sapien
caactgacacccagataaggatataattcattc

SEQ ID NO: 170790 - DNA, 33 bp, Homo sapien
caactgacacccagatcaggatataattcattc

SEQ ID NO: 170791 - DNA, 33 bp, Homo sapien
ccaactcttcctttcaatcctaatccaaattta

SEQ ID NO: 170792 - DNA, 33 bp, Homo sapien
ccaactcttcctttcagtcctaatccaaattta

SEQ ID NO: 170793 - DNA, 33 bp, Homo sapien
tattgggttctatgctcactacttgagtgcaat

SEQ ID NO: 170794 - DNA, 33 bp, Homo sapien
tattgggttctatgcttactacttgagtgcaat

SEQ ID NO: 170795 - DNA, 33 bp, Homo sapien
gtctgtatctaaactgcagtcgtagctacacaa

SEQ ID NO: 170796 - DNA, 33 bp, Homo sapien
gtctgtatctaaactgtagtcgtagctacacaa

SEQ ID NO: 170797 - DNA, 33 bp, Homo sapien
cttactcatcaagaccaattccagacttcaaac

SEQ ID NO: 170798 - DNA, 33 bp, Homo sapien
cttactcatcaagaccgattccagacttcaaac

SEQ ID NO: 170799 - DNA, 33 bp, Homo sapien
catctagctgtatccaagtagctacaaaagact

SEQ ID NO: 170800 - DNA, 33 bp, Homo sapien
catctagctgtatccatgtagctacaaaagact

SEQ ID NO: 170801 - DNA, 33 bp, Homo sapien
agggttagaaacactaactgttgggtactattg

SEQ ID NO: 170802 - DNA, 33 bp, Homo sapien
agggttagaaacactagctgttgggtactattg

SEQ ID NO: 170803 - DNA, 33 bp, Homo sapien
acttgcttcctgataaatgtggaaaagaacaca

SEQ ID NO: 170804 - DNA, 33 bp, Homo sapien
acttgcttcctgataagtgtggaaaagaacaca

SEQ ID NO: 170805 - DNA, 33 bp, Homo sapien
ggaaactactacaacacccattggcagaatctg

SEQ ID NO: 170806 - DNA, 33 bp, Homo sapien
ggaaactactacaacatccattggcagaatctg

SEQ ID NO: 170807 - DNA, 33 bp, Homo sapien
ttcaagagcaagaaaagccagcatccatatttt

SEQ ID NO: 170808 - DNA, 33 bp, Homo sapien
ttcaagagcaagaaaatccagcatccatatttt

SEQ ID NO: 170809 - DNA, 33 bp, Homo sapien
gaaatgtctatgccaccattgcactttggaagc

SEQ ID NO: 170810 - DNA, 33 bp, Homo sapien
gaaatgtctatgccacgattgcactttggaagc

SEQ ID NO: 170811 - DNA, 33 bp, Homo sapien
aaaccaggcttattgccgattgtggtgacaggg

SEQ ID NO: 170812 - DNA, 33 bp, Homo sapien
aaaccaggcttattgctgattgtggtgacaggg

SEQ ID NO: 170813 - DNA, 33 bp, Homo sapien
caatcagtttgtaccccgggaatatagcaactg

SEQ ID NO: 170814 - DNA, 33 bp, Homo sapien
caatcagtttgtaccctgggaatatagcaactg

SEQ ID NO: 170815 - DNA, 33 bp, Homo sapien
agtgttagcaaaagaactggtgattagctatgt

SEQ ID NO: 170816 - DNA, 33 bp, Homo sapien
agtgttagcaaaagaattggtgattagctatgt

SEQ ID NO: 170817 - DNA, 33 bp, Homo sapien
atgttagctaataataacccgattatttctcca

SEQ ID NO: 170818 - DNA, 33 bp, Homo sapien
atgttagctaataataccccgattatttctcca

SEQ ID NO: 170819 - DNA, 33 bp, Homo sapien
tgtcttcgaaagtctgcatcctgttagcagctg

SEQ ID NO: 170820 - DNA, 33 bp, Homo sapien
tgtcttcgaaagtctgtatcctgttagcagctg

SEQ ID NO: 170821 - DNA, 33 bp, Homo sapien
atgttttcattgttcccatagtaaccaggaaag

SEQ ID NO: 170822 - DNA, 33 bp, Homo sapien
atgttttcattgttcctatagtaaccaggaaag

SEQ ID NO: 170823 - DNA, 33 bp, Homo sapien
tagtaggtactcaatcaagagctaacatttatc

SEQ ID NO: 170824 - DNA, 33 bp, Homo sapien
tagtaggtactcaatcgagagctaacatttatc

SEQ ID NO: 170825 - DNA, 33 bp, Homo sapien
ggaactatctggggagaaggaatcctggaaaaa

SEQ ID NO: 170826 - DNA, 33 bp, Homo sapien
ggaactatctggggaggaggaatcctggaaaaa

SEQ ID NO: 170827 - DNA, 33 bp, Homo sapien
tctttggtgcagaaatcaaggaaataaaatagt

SEQ ID NO: 170828 - DNA, 33 bp, Homo sapien
tctttggtgcagaaatgaaggaaataaaatagt

SEQ ID NO: 170829 - DNA, 33 bp, Homo sapien
atgtacaggatatatcaacatttactactcatc

SEQ ID NO: 170830 - DNA, 33 bp, Homo sapien
atgtacaggatatatctacatttactactcatc

SEQ ID NO: 170831 - DNA, 33 bp, Homo sapien
gacacagtctaggagacggacaatgagtgtggc

SEQ ID NO: 170832 - DNA, 33 bp, Homo sapien
gacacagtctaggagatggacaatgagtgtggc

SEQ ID NO: 170833 - DNA, 33 bp, Homo sapien
aggaatgagcaatgctaacgctaacactggcca

SEQ ID NO: 170834 - DNA, 33 bp, Homo sapien
aggaatgagcaatgcttacgctaacactggcca

SEQ ID NO: 170835 - DNA, 33 bp, Homo sapien
actgaacaattgtgcaaacaagaggagtgagcc

SEQ ID NO: 170836 - DNA, 33 bp, Homo sapien
actgaacaattgtgcagacaagaggagtgagcc

SEQ ID NO: 170837 - DNA, 33 bp, Homo sapien
cactcacaccttactaactcatttcaatcctct

SEQ ID NO: 170838 - DNA, 33 bp, Homo sapien
cactcacaccttactacctcatttcaatcctct

SEQ ID NO: 170839 - DNA, 33 bp, Homo sapien
cggaattaagctaagacattatgcaacttgccc

SEQ ID NO: 170840 - DNA, 33 bp, Homo sapien
cggaattaagctaagagattatgcaacttgccc

SEQ ID NO: 170841 - DNA, 33 bp, Homo sapien
aagttacccaggtaaaagagaccaagacaggat

SEQ ID NO: 170842 - DNA, 33 bp, Homo sapien
aagttacccaggtaaaggagaccaagacaggat

SEQ ID NO: 170843 - DNA, 33 bp, Homo sapien
aacagtggtcgattaactcagatggaatacttc

SEQ ID NO: 170844 - DNA, 33 bp, Homo sapien
aacagtggtcgattaattcagatggaatacttc

SEQ ID NO: 170845 - DNA, 33 bp, Homo sapien
gaatttagtaaaccccaactgaggacaaattat

SEQ ID NO: 170846 - DNA, 33 bp, Homo sapien
gaatttagtaaaccccgactgaggacaaattat

SEQ ID NO: 170847 - DNA, 33 bp, Homo sapien
cctggtatgtttaaacaataactcaggacttga

SEQ ID NO: 170848 - DNA, 33 bp, Homo sapien
cctggtatgtttaaaccataactcaggacttga

SEQ ID NO: 170849 - DNA, 33 bp, Homo sapien
gctaagtgctaacacactattgggagatagaag

SEQ ID NO: 170850 - DNA, 33 bp, Homo sapien
gctaagtgctaacacagtattgggagatagaag

SEQ ID NO: 170851 - DNA, 33 bp, Homo sapien
ggagaaatcacataaccaaaagcaacactctca

SEQ ID NO: 170852 - DNA, 33 bp, Homo sapien
ggagaaatcacataactaaaagcaacactctca

SEQ ID NO: 170853 - DNA, 33 bp, Homo sapien
aaacaaactgaatgacaatgtaatgaaagagag

SEQ ID NO: 170854 - DNA, 33 bp, Homo sapien
aaacaaactgaatgactatgtaatgaaagagag

SEQ ID NO: 170855 - DNA, 33 bp, Homo sapien
aaagccctaaagatcaagtgcagcagacagcct

SEQ ID NO: 170856 - DNA, 33 bp, Homo sapien
aaagccctaaagatcacgtgcagcagacagcct

SEQ ID NO: 170857 - DNA, 33 bp, Homo sapien
aatgaatctggaagggccacttggtctataagc

SEQ ID NO: 170858 - DNA, 33 bp, Homo sapien
aatgaatctggaagggtcacttggtctataagc

SEQ ID NO: 170859 - DNA, 33 bp, Homo sapien
agtggatattaagcaccagtccaaggaaatgat

SEQ ID NO: 170860 - DNA, 33 bp, Homo sapien
agtggatattaagcactagtccaaggaaatgat

SEQ ID NO: 170861 - DNA, 33 bp, Homo sapien
ccagtttactggtcaccaagattgctagcatta

SEQ ID NO: 170862 - DNA, 33 bp, Homo sapien
ccagtttactggtcacgaagattgctagcatta

SEQ ID NO: 170863 - DNA, 33 bp, Homo sapien
ctgggcccactcagagaccattcctattgacta

SEQ ID NO: 170864 - DNA, 33 bp, Homo sapien
ctgggcccactcagaggccattcctattgacta

SEQ ID NO: 170865 - DNA, 33 bp, Homo sapien
taaaaagacaataagcccaaatggattcagaca

SEQ ID NO: 170866 - DNA, 33 bp, Homo sapien
taaaaagacaataagctcaaatggattcagaca

SEQ ID NO: 170867 - DNA, 33 bp, Homo sapien
ggtgattagaaacggacgtatgcaaggctctgc

SEQ ID NO: 170868 - DNA, 33 bp, Homo sapien
ggtgattagaaacggaggtatgcaaggctctgc

SEQ ID NO: 170869 - DNA, 33 bp, Homo sapien
cttttaaaatgtacatcacattgtatcactaac

SEQ ID NO: 170870 - DNA, 33 bp, Homo sapien
cttttaaaatgtacatgacattgtatcactaac

SEQ ID NO: 170871 - DNA, 33 bp, Homo sapien
agaaagctgaagttcaagaaagttaagcccctt

SEQ ID NO: 170872 - DNA, 33 bp, Homo sapien
agaaagctgaagttcacgaaagttaagcccctt

SEQ ID NO: 170873 - DNA, 33 bp, Homo sapien
ttcccccctagttttaccatgtagagcagcacc

SEQ ID NO: 170874 - DNA, 33 bp, Homo sapien
ttcccccctagttttatcatgtagagcagcacc

SEQ ID NO: 170875 - DNA, 33 bp, Homo sapien
tggtataaattctgcaatccaagttctgcatgc

SEQ ID NO: 170876 - DNA, 33 bp, Homo sapien
tggtataaattctgcagtccaagttctgcatgc

SEQ ID NO: 170877 - DNA, 33 bp, Homo sapien
actgccatgaagaacacagaatcatgtacaagg

SEQ ID NO: 170878 - DNA, 33 bp, Homo sapien
actgccatgaagaacatagaatcatgtacaagg

SEQ ID NO: 170879 - DNA, 33 bp, Homo sapien
cagaaggcaataaaaacaacggtgcgtgtgggc

SEQ ID NO: 170880 - DNA, 33 bp, Homo sapien
cagaaggcaataaaaataacggtgcgtgtgggc

SEQ ID NO: 170881 - DNA, 33 bp, Homo sapien
atacttttttgatgtgaaatcgagtaggaaagc

SEQ ID NO: 170882 - DNA, 33 bp, Homo sapien
atacttttttgatgtgcaatcgagtaggaaagc

SEQ ID NO: 170883 - DNA, 33 bp, Homo sapien
tgcagagggattgcacacttggttgtggagtca

SEQ ID NO: 170884 - DNA, 33 bp, Homo sapien
tgcagagggattgcacgcttggttgtggagtca

SEQ ID NO: 170885 - DNA, 33 bp, Homo sapien
ctatacttcctctttcacagtacttatcagact

SEQ ID NO: 170886 - DNA, 33 bp, Homo sapien
ctatacttcctctttcgcagtacttatcagact

SEQ ID NO: 170887 - DNA, 33 bp, Homo sapien
aaaggtgggctgcaaagtggtggtccagcagat

SEQ ID NO: 170888 - DNA, 33 bp, Homo sapien
aaaggtgggctgcaaattggtggtccagcagat

SEQ ID NO: 170889 - DNA, 33 bp, Homo sapien
ctgacctctgaattggacattgaagacacaggg

SEQ ID NO: 170890 - DNA, 33 bp, Homo sapien
ctgacctctgaattgggcattgaagacacaggg

SEQ ID NO: 170891 - DNA, 33 bp, Homo sapien
tacagaaaggcactgaatatacaaagatgaatc

SEQ ID NO: 170892 - DNA, 33 bp, Homo sapien
tacagaaaggcactgagtatacaaagatgaatc

SEQ ID NO: 170893 - DNA, 33 bp, Homo sapien
gagtatctgatatctgccaaggtatacagaaag

SEQ ID NO: 170894 - DNA, 33 bp, Homo sapien
gagtatctgatatctgtcaaggtatacagaaag

SEQ ID NO: 170895 - DNA, 33 bp, Homo sapien
cttggccagtgcccaaactatacgggttgttta

SEQ ID NO: 170896 - DNA, 33 bp, Homo sapien
cttggccagtgcccaatctatacgggttgttta

SEQ ID NO: 170897 - DNA, 33 bp, Homo sapien
ctgtccacacccatcaaggaagtgaagtgaggc

SEQ ID NO: 170898 - DNA, 33 bp, Homo sapien
ctgtccacacccatcagggaagtgaagtgaggc

SEQ ID NO: 170899 - DNA, 33 bp, Homo sapien
accacaaagctgtacactgaaggcatgacagac

SEQ ID NO: 170900 - DNA, 33 bp, Homo sapien
accacaaagctgtacattgaaggcatgacagac

SEQ ID NO: 170901 - DNA, 33 bp, Homo sapien
atggggctctcttcaccgtagaagggaaggctg

SEQ ID NO: 170902 - DNA, 33 bp, Homo sapien
atggggctctcttcactgtagaagggaaggctg

SEQ ID NO: 170903 - DNA, 33 bp, Homo sapien
tacttgtgaccagttcgcatgtcctttctgctt

SEQ ID NO: 170904 - DNA, 33 bp, Homo sapien
tacttgtgaccagttctcatgtcctttctgctt

SEQ ID NO: 170905 - DNA, 33 bp, Homo sapien
agcccacattagaaaacgcagtaggtgctttct

SEQ ID NO: 170906 - DNA, 33 bp, Homo sapien
agcccacattagaaaatgcagtaggtgctttct

SEQ ID NO: 170907 - DNA, 33 bp, Homo sapien
gtccctgggtgtaatggaagcttagtgctttgg

SEQ ID NO: 170908 - DNA, 33 bp, Homo sapien
gtccctgggtgtaatgtaagcttagtgctttgg

SEQ ID NO: 170909 - DNA, 33 bp, Homo sapien
agaccacgaagcccacaaacgcaatgaataggt

SEQ ID NO: 170910 - DNA, 33 bp, Homo sapien
agaccacgaagcccacgaacgcaatgaataggt

SEQ ID NO: 170911 - DNA, 33 bp, Homo sapien
gcagatgctcatacaaaatgagtgtccccacct

SEQ ID NO: 170912 - DNA, 33 bp, Homo sapien
gcagatgctcatacaagatgagtgtccccacct

SEQ ID NO: 170913 - DNA, 33 bp, Homo sapien
ctgatgaagaagaccacgatgatgataattgtg

SEQ ID NO: 170914 - DNA, 33 bp, Homo sapien
ctgatgaagaagaccatgatgatgataattgtg

SEQ ID NO: 170915 - DNA, 33 bp, Homo sapien
ctgaatctttcttacaacatctgggacaaatcc

SEQ ID NO: 170916 - DNA, 33 bp, Homo sapien
ctgaatctttcttacagcatctgggacaaatcc

SEQ ID NO: 170917 - DNA, 33 bp, Homo sapien
acatggcttttaaaggacagatgtttctcctgc

SEQ ID NO: 170918 - DNA, 33 bp, Homo sapien
acatggcttttaaagggcagatgtttctcctgc

SEQ ID NO: 170919 - DNA, 33 bp, Homo sapien
atatcaaccattttcagagctttggcttattta

SEQ ID NO: 170920 - DNA, 33 bp, Homo sapien
atatcaaccattttcatagctttggcttattta

SEQ ID NO: 170921 - DNA, 33 bp, Homo sapien
accaaattaataatgacactagttagcaaatca

SEQ ID NO: 170922 - DNA, 33 bp, Homo sapien
accaaattaataatgatactagttagcaaatca

SEQ ID NO: 170923 - DNA, 33 bp, Homo sapien
gtacaatatgaatttacagaagtgagagaccaa

SEQ ID NO: 170924 - DNA, 33 bp, Homo sapien
gtacaatatgaatttagagaagtgagagaccaa

SEQ ID NO: 170925 - DNA, 33 bp, Homo sapien
tcctatgttctttctaccgtctcactttactga

SEQ ID NO: 170926 - DNA, 33 bp, Homo sapien
tcctatgttctttctatcgtctcactttactga

SEQ ID NO: 170927 - DNA, 33 bp, Homo sapien
aggattcaccaggttccagcttctctgtttaca

SEQ ID NO: 170928 - DNA, 33 bp, Homo sapien
aggattcaccaggttctagcttctctgtttaca

SEQ ID NO: 170929 - DNA, 33 bp, Homo sapien
ttggaggtaagcccagccagacatcaggacttt

SEQ ID NO: 170930 - DNA, 33 bp, Homo sapien
ttggaggtaagcccaggcagacatcaggacttt

SEQ ID NO: 170931 - DNA, 33 bp, Homo sapien
gcaggaaggaatcatccgagaattatctgtctc

SEQ ID NO: 170932 - DNA, 33 bp, Homo sapien
gcaggaaggaatcatctgagaattatctgtctc

SEQ ID NO: 170933 - DNA, 33 bp, Homo sapien
gagttcctttatcaaactcattttctgcataaa

SEQ ID NO: 170934 - DNA, 33 bp, Homo sapien
gagttcctttatcaaattcattttctgcataaa

SEQ ID NO: 170935 - DNA, 33 bp, Homo sapien
ggcaatagctagagaaaggctttaaaaaattaa

SEQ ID NO: 170936 - DNA, 33 bp, Homo sapien
ggcaatagctagagaagggctttaaaaaattaa

SEQ ID NO: 170937 - DNA, 33 bp, Homo sapien
atcatgttgtttgggacggagatgcctgcctct

SEQ ID NO: 170938 - DNA, 33 bp, Homo sapien
atcatgttgtttgggatggagatgcctgcctct

SEQ ID NO: 170939 - DNA, 33 bp, Homo sapien
ccaaacacgaacataacacagtacctggcatgt

SEQ ID NO: 170940 - DNA, 33 bp, Homo sapien
ccaaacacgaacataatacagtacctggcatgt

SEQ ID NO: 170941 - DNA, 33 bp, Homo sapien
ccatagatggaagaacaagtgtaagaattacta

SEQ ID NO: 170942 - DNA, 33 bp, Homo sapien
ccatagatggaagaacgagtgtaagaattacta

SEQ ID NO: 170943 - DNA, 33 bp, Homo sapien
atgtggacagaaagacacaggctaaggtgcaaa

SEQ ID NO: 170944 - DNA, 33 bp, Homo sapien
atgtggacagaaagacgcaggctaaggtgcaaa

SEQ ID NO: 170945 - DNA, 33 bp, Homo sapien
tctttcgatacactcactaattttagcatggga

SEQ ID NO: 170946 - DNA, 33 bp, Homo sapien
tctttcgatacactcattaattttagcatggga

SEQ ID NO: 170947 - DNA, 33 bp, Homo sapien
aggcttcctggagtcaagtaaaatctattgttg

SEQ ID NO: 170948 - DNA, 33 bp, Homo sapien
aggcttcctggagtcaggtaaaatctattgttg

SEQ ID NO: 170949 - DNA, 33 bp, Homo sapien
ttaggtgaaagcaaaaagagataatgatagcta

SEQ ID NO: 170950 - DNA, 33 bp, Homo sapien
ttaggtgaaagcaaaacgagataatgatagcta

SEQ ID NO: 170951 - DNA, 33 bp, Homo sapien
aaaaagatagaaaagagtccttccctctccagg

SEQ ID NO: 170952 - DNA, 33 bp, Homo sapien
aaaaagatagaaaagattccttccctctccagg

SEQ ID NO: 170953 - DNA, 33 bp, Homo sapien
tggtccctgattcctaaatgtggctcagctcat

SEQ ID NO: 170954 - DNA, 33 bp, Homo sapien
tggtccctgattcctacatgtggctcagctcat

SEQ ID NO: 170955 - DNA, 33 bp, Homo sapien
acttctatatttgagaacttgtgagcaaactgt

SEQ ID NO: 170956 - DNA, 33 bp, Homo sapien
acttctatatttgagaccttgtgagcaaactgt

SEQ ID NO: 170957 - DNA, 33 bp, Homo sapien
tggtcagcagtatataaaaatggtgccatagat

SEQ ID NO: 170958 - DNA, 33 bp, Homo sapien
tggtcagcagtatatacaaatggtgccatagat

SEQ ID NO: 170959 - DNA, 33 bp, Homo sapien
gagccttagctgggcaaacaaggtattctacag

SEQ ID NO: 170960 - DNA, 33 bp, Homo sapien
gagccttagctgggcagacaaggtattctacag

SEQ ID NO: 170961 - DNA, 33 bp, Homo sapien
agggagctttcaatgacggcagaaggcaaaggg

SEQ ID NO: 170962 - DNA, 33 bp, Homo sapien
agggagctttcaatgatggcagaaggcaaaggg

SEQ ID NO: 170963 - DNA, 33 bp, Homo sapien
ctcacatgaactaaccaagagagaattcactca

SEQ ID NO: 170964 - DNA, 33 bp, Homo sapien
ctcacatgaactaaccgagagagaattcactca

SEQ ID NO: 170965 - DNA, 33 bp, Homo sapien
attaatcaactcctacacttaaaagtcatgcac

SEQ ID NO: 170966 - DNA, 33 bp, Homo sapien
attaatcaactcctacccttaaaagtcatgcac

SEQ ID NO: 170967 - DNA, 33 bp, Homo sapien
tgagctgcagctcccaatgagccacactatcac

SEQ ID NO: 170968 - DNA, 33 bp, Homo sapien
tgagctgcagctcccactgagccacactatcac

SEQ ID NO: 170969 - DNA, 33 bp, Homo sapien
aaaggcagctgtttcccgaaaacaaagggctgg

SEQ ID NO: 170970 - DNA, 33 bp, Homo sapien
aaaggcagctgtttcctgaaaacaaagggctgg

SEQ ID NO: 170971 - DNA, 33 bp, Homo sapien
tctcaaagaggttagggacttggtgcttcttgc

SEQ ID NO: 170972 - DNA, 33 bp, Homo sapien
tctcaaagaggttaggtacttggtgcttcttgc

SEQ ID NO: 170973 - DNA, 33 bp, Homo sapien
cccatctgaactacaaagagtagaaaagatgat

SEQ ID NO: 170974 - DNA, 33 bp, Homo sapien
cccatctgaactacaaggagtagaaaagatgat

SEQ ID NO: 170975 - DNA, 33 bp, Homo sapien
aaagcacatattggtaaccaagcagcaggccct

SEQ ID NO: 170976 - DNA, 33 bp, Homo sapien
aaagcacatattggtagccaagcagcaggccct

SEQ ID NO: 170977 - DNA, 33 bp, Homo sapien
gactgaggttgagccgccagggcatcatcttca

SEQ ID NO: 170978 - DNA, 33 bp, Homo sapien
gactgaggttgagccgtcagggcatcatcttca

SEQ ID NO: 170979 - DNA, 33 bp, Homo sapien
ctcacatacgctctcacccccgcccctggcctc

SEQ ID NO: 170980 - DNA, 33 bp, Homo sapien
ctcacatacgctctcatccccgcccctggcctc

SEQ ID NO: 170981 - DNA, 33 bp, Homo sapien
tgtctgattacgtgacaccacctcaggtatggt

SEQ ID NO: 170982 - DNA, 33 bp, Homo sapien
tgtctgattacgtgacgccacctcaggtatggt

SEQ ID NO: 170983 - DNA, 33 bp, Homo sapien
ataactcatttggcagaaaagcttatgaagaat

SEQ ID NO: 170984 - DNA, 33 bp, Homo sapien
ataactcatttggcaggaaagcttatgaagaat

SEQ ID NO: 170985 - DNA, 33 bp, Homo sapien
cctttctctcttattcaagcattcagaaagaca

SEQ ID NO: 170986 - DNA, 33 bp, Homo sapien
cctttctctcttattcgagcattcagaaagaca

SEQ ID NO: 170987 - DNA, 33 bp, Homo sapien
atgtgatggcgcaaggcatgctggaagcaatgg

SEQ ID NO: 170988 - DNA, 33 bp, Homo sapien
atgtgatggcgcaaggtatgctggaagcaatgg

SEQ ID NO: 170989 - DNA, 33 bp, Homo sapien
aggtgaatgagactacactgaaaatcgcggctt

SEQ ID NO: 170990 - DNA, 33 bp, Homo sapien
aggtgaatgagactacgctgaaaatcgcggctt

SEQ ID NO: 170991 - DNA, 33 bp, Homo sapien
aataattataaccaccacttattgagagtttat

SEQ ID NO: 170992 - DNA, 33 bp, Homo sapien
aataattataaccaccgcttattgagagtttat

SEQ ID NO: 170993 - DNA, 33 bp, Homo sapien
tgaagctatgccttgaagttgggcaaggtggca

SEQ ID NO: 170994 - DNA, 33 bp, Homo sapien
tgaagctatgccttgaggttgggcaaggtggca

SEQ ID NO: 170995 - DNA, 33 bp, Homo sapien
gggacactaagaaattcactattcaagataaat

SEQ ID NO: 170996 - DNA, 33 bp, Homo sapien
gggacactaagaaatttactattcaagataaat

SEQ ID NO: 170997 - DNA, 33 bp, Homo sapien
ggagaggaaaattcacacacaaacccatatttt

SEQ ID NO: 170998 - DNA, 33 bp, Homo sapien
ggagaggaaaattcacgcacaaacccatatttt

SEQ ID NO: 170999 - DNA, 33 bp, Homo sapien
taagttgagaaagagacagaaatcaaactcagg

SEQ ID NO: 171000 - DNA, 33 bp, Homo sapien
taagttgagaaagagagagaaatcaaactcagg

SEQ ID NO: 171001 - DNA, 33 bp, Homo sapien
cagttgactttaaggaaaaggaactgccctcta

SEQ ID NO: 171002 - DNA, 33 bp, Homo sapien
cagttgactttaaggacaaggaactgccctcta

SEQ ID NO: 171003 - DNA, 33 bp, Homo sapien
acaagaaaccagtaagaaagcaagattatatca

SEQ ID NO: 171004 - DNA, 33 bp, Homo sapien
acaagaaaccagtaaggaagcaagattatatca

SEQ ID NO: 171005 - DNA, 33 bp, Homo sapien
agcctcttctgcataaatgctcattaccgtgtg

SEQ ID NO: 171006 - DNA, 33 bp, Homo sapien
agcctcttctgcataagtgctcattaccgtgtg

SEQ ID NO: 171007 - DNA, 33 bp, Homo sapien
tttagcttgtctccaccgaacaaaacaacacaa

SEQ ID NO: 171008 - DNA, 33 bp, Homo sapien
tttagcttgtctccactgaacaaaacaacacaa

SEQ ID NO: 171009 - DNA, 33 bp, Homo sapien
ttatttttaaagcagcaaatcttagaataggag

SEQ ID NO: 171010 - DNA, 33 bp, Homo sapien
ttatttttaaagcagcgaatcttagaataggag

SEQ ID NO: 171011 - DNA, 33 bp, Homo sapien
caaggttaaccaatgacatggttcctcctaaca

SEQ ID NO: 171012 - DNA, 33 bp, Homo sapien
caaggttaaccaatgagatggttcctcctaaca

SEQ ID NO: 171013 - DNA, 33 bp, Homo sapien
gtatctcttcgccgtcccccatccttgctgaga

SEQ ID NO: 171014 - DNA, 33 bp, Homo sapien
gtatctcttcgccgtctcccatccttgctgaga

SEQ ID NO: 171015 - DNA, 33 bp, Homo sapien
cgatggaatgcataaaagatggggctgtgatag

SEQ ID NO: 171016 - DNA, 33 bp, Homo sapien
cgatggaatgcataaaggatggggctgtgatag

SEQ ID NO: 171017 - DNA, 33 bp, Homo sapien
gccatgccctgaagtacggtaggagttggttag

SEQ ID NO: 171018 - DNA, 33 bp, Homo sapien
gccatgccctgaagtatggtaggagttggttag

SEQ ID NO: 171019 - DNA, 33 bp, Homo sapien
cacatttctctgagtgcattcctgttgttaagc

SEQ ID NO: 171020 - DNA, 33 bp, Homo sapien
cacatttctctgagtgtattcctgttgttaagc

SEQ ID NO: 171021 - DNA, 33 bp, Homo sapien
acatcaggaccactacaccatagacaataggaa

SEQ ID NO: 171022 - DNA, 33 bp, Homo sapien
acatcaggaccactacgccatagacaataggaa

SEQ ID NO: 171023 - DNA, 33 bp, Homo sapien
ctttactcttctgccaactgcatgacctttgga

SEQ ID NO: 171024 - DNA, 33 bp, Homo sapien
ctttactcttctgccacctgcatgacctttgga

SEQ ID NO: 171025 - DNA, 33 bp, Homo sapien
agactgcctcccagaaagtaataggtgagtgag

SEQ ID NO: 171026 - DNA, 33 bp, Homo sapien
agactgcctcccagaaggtaataggtgagtgag

SEQ ID NO: 171027 - DNA, 33 bp, Homo sapien
taccagcagagggagactaatgagtgtttaaga

SEQ ID NO: 171028 - DNA, 33 bp, Homo sapien
taccagcagagggagattaatgagtgtttaaga

SEQ ID NO: 171029 - DNA, 33 bp, Homo sapien
taccctatttacaactaagtcagccaagccact

SEQ ID NO: 171030 - DNA, 33 bp, Homo sapien
taccctatttacaactgagtcagccaagccact

SEQ ID NO: 171031 - DNA, 33 bp, Homo sapien
tgtcaggacattgggaacgggcagccatgactc

SEQ ID NO: 171032 - DNA, 33 bp, Homo sapien
tgtcaggacattgggagcgggcagccatgactc

SEQ ID NO: 171033 - DNA, 33 bp, Homo sapien
tggctgttgcaactgaagaactcaattcttttt

SEQ ID NO: 171034 - DNA, 33 bp, Homo sapien
tggctgttgcaactgaggaactcaattcttttt

SEQ ID NO: 171035 - DNA, 33 bp, Homo sapien
atacctgtcacttgaccgagcactttcggcact

SEQ ID NO: 171036 - DNA, 33 bp, Homo sapien
atacctgtcacttgactgagcactttcggcact

SEQ ID NO: 171037 - DNA, 33 bp, Homo sapien
gaagggaaatgactcccgaagaccatagcagag

SEQ ID NO: 171038 - DNA, 33 bp, Homo sapien
gaagggaaatgactccggaagaccatagcagag

SEQ ID NO: 171039 - DNA, 33 bp, Homo sapien
aatgaattggtacaaaacagtggttctcaacca

SEQ ID NO: 171040 - DNA, 33 bp, Homo sapien
aatgaattggtacaaaccagtggttctcaacca

SEQ ID NO: 171041 - DNA, 33 bp, Homo sapien
agttcaacactggtaaactgtgtatggtgactg

SEQ ID NO: 171042 - DNA, 33 bp, Homo sapien
agttcaacactggtaacctgtgtatggtgactg

SEQ ID NO: 171043 - DNA, 33 bp, Homo sapien
tctttgtggacaccaaaggaatccctcatctgg

SEQ ID NO: 171044 - DNA, 33 bp, Homo sapien
tctttgtggacaccaagggaatccctcatctgg

SEQ ID NO: 171045 - DNA, 33 bp, Homo sapien
aatgtaaatgtgtacaatccctatgatgagtaa

SEQ ID NO: 171046 - DNA, 33 bp, Homo sapien
aatgtaaatgtgtacagtccctatgatgagtaa

SEQ ID NO: 171047 - DNA, 33 bp, Homo sapien
acactcacatcaaaccgggaccacaatcatata

SEQ ID NO: 171048 - DNA, 33 bp, Homo sapien
acactcacatcaaacctggaccacaatcatata

SEQ ID NO: 171049 - DNA, 33 bp, Homo sapien
tagcaatgcataaataataaggcctggtgtggt

SEQ ID NO: 171050 - DNA, 33 bp, Homo sapien
tagcaatgcataaatagtaaggcctggtgtggt

SEQ ID NO: 171051 - DNA, 33 bp, Homo sapien
ccagagaaacagctgcgccaggagaatattaac

SEQ ID NO: 171052 - DNA, 33 bp, Homo sapien
ccagagaaacagctgctccaggagaatattaac

SEQ ID NO: 171053 - DNA, 33 bp, Homo sapien
tagtttgctctgaagacgtattccacctatttc

SEQ ID NO: 171054 - DNA, 33 bp, Homo sapien
tagtttgctctgaagatgtattccacctatttc

SEQ ID NO: 171055 - DNA, 33 bp, Homo sapien
caactcatcagaagaccctggtggcttagcaag

SEQ ID NO: 171056 - DNA, 33 bp, Homo sapien
caactcatcagaagactctggtggcttagcaag

SEQ ID NO: 171057 - DNA, 33 bp, Homo sapien
gcccagaagaagtagacagtaagccaatttcga

SEQ ID NO: 171058 - DNA, 33 bp, Homo sapien
gcccagaagaagtagatagtaagccaatttcga

SEQ ID NO: 171059 - DNA, 33 bp, Homo sapien
caatcaattgtcggaaactgaatagcccagaag

SEQ ID NO: 171060 - DNA, 33 bp, Homo sapien
caatcaattgtcggaacctgaatagcccagaag

SEQ ID NO: 171061 - DNA, 33 bp, Homo sapien
gctccaggaagtcaggccacagctgccttatct

SEQ ID NO: 171062 - DNA, 33 bp, Homo sapien
gctccaggaagtcaggtcacagctgccttatct

SEQ ID NO: 171063 - DNA, 33 bp, Homo sapien
tagggatttcataccactgccaataaaatgtcc

SEQ ID NO: 171064 - DNA, 33 bp, Homo sapien
tagggatttcataccagtgccaataaaatgtcc

SEQ ID NO: 171065 - DNA, 33 bp, Homo sapien
agaatgggcggccacacgtgagggctttggtac

SEQ ID NO: 171066 - DNA, 33 bp, Homo sapien
agaatgggcggccacatgtgagggctttggtac

SEQ ID NO: 171067 - DNA, 33 bp, Homo sapien
tgaaaccccgtctgtacaaaaaatgcaaatatt

SEQ ID NO: 171068 - DNA, 33 bp, Homo sapien
tgaaaccccgtctgtagaaaaaatgcaaatatt

SEQ ID NO: 171069 - DNA, 33 bp, Homo sapien
ctataacccactctccacaaagcagtgatcttt

SEQ ID NO: 171070 - DNA, 33 bp, Homo sapien
ctataacccactctccgcaaagcagtgatcttt

SEQ ID NO: 171071 - DNA, 33 bp, Homo sapien
tttgatccaggacagaagtatactgagatagaa

SEQ ID NO: 171072 - DNA, 33 bp, Homo sapien
tttgatccaggacagaggtatactgagatagaa

SEQ ID NO: 171073 - DNA, 33 bp, Homo sapien
gcttcacctggccaaacgacatcaaaggactag

SEQ ID NO: 171074 - DNA, 33 bp, Homo sapien
gcttcacctggccaaaggacatcaaaggactag

SEQ ID NO: 171075 - DNA, 33 bp, Homo sapien
gccagtttcatttttaagcaaagcaactcagtt

SEQ ID NO: 171076 - DNA, 33 bp, Homo sapien
gccagtttcatttttaggcaaagcaactcagtt

SEQ ID NO: 171077 - DNA, 33 bp, Homo sapien
gtgggtaaatgcaccaaaaaggttctgtgatgt

SEQ ID NO: 171078 - DNA, 33 bp, Homo sapien
gtgggtaaatgcaccagaaaggttctgtgatgt

SEQ ID NO: 171079 - DNA, 33 bp, Homo sapien
cgctcattatgtaaagactcctgaggagccagt

SEQ ID NO: 171080 - DNA, 33 bp, Homo sapien
cgctcattatgtaaagcctcctgaggagccagt

SEQ ID NO: 171081 - DNA, 33 bp, Homo sapien
atgacatgagacctaaacaatacctttgcattt

SEQ ID NO: 171082 - DNA, 33 bp, Homo sapien
atgacatgagacctaatcaatacctttgcattt

SEQ ID NO: 171083 - DNA, 33 bp, Homo sapien
tccaaaacccattgccactttctcatattccca

SEQ ID NO: 171084 - DNA, 33 bp, Homo sapien
tccaaaacccattgccgctttctcatattccca

SEQ ID NO: 171085 - DNA, 33 bp, Homo sapien
tttttacaggaactacaatagaaagttagggat

SEQ ID NO: 171086 - DNA, 33 bp, Homo sapien
tttttacaggaactaccatagaaagttagggat

SEQ ID NO: 171087 - DNA, 33 bp, Homo sapien
aataagaccctaagcacagaatgtcaaggccct

SEQ ID NO: 171088 - DNA, 33 bp, Homo sapien
aataagaccctaagcatagaatgtcaaggccct

SEQ ID NO: 171089 - DNA, 33 bp, Homo sapien
actccactggcagtaacactagcatggtgaatg

SEQ ID NO: 171090 - DNA, 33 bp, Homo sapien
actccactggcagtaatactagcatggtgaatg

SEQ ID NO: 171091 - DNA, 33 bp, Homo sapien
tacttagaaagtttcacacagcgctaaatatta

SEQ ID NO: 171092 - DNA, 33 bp, Homo sapien
tacttagaaagtttcatacagcgctaaatatta

SEQ ID NO: 171093 - DNA, 33 bp, Homo sapien
cattttagacctggtagcttcctgcttctgggc

SEQ ID NO: 171094 - DNA, 33 bp, Homo sapien
cattttagacctggtatcttcctgcttctgggc

SEQ ID NO: 171095 - DNA, 33 bp, Homo sapien
ggggcacagagcagtaagaagcatatttccaaa

SEQ ID NO: 171096 - DNA, 33 bp, Homo sapien
ggggcacagagcagtaggaagcatatttccaaa

SEQ ID NO: 171097 - DNA, 33 bp, Homo sapien
agatagactatgaagacaagctgagtctttagg

SEQ ID NO: 171098 - DNA, 33 bp, Homo sapien
agatagactatgaagataagctgagtctttagg

SEQ ID NO: 171099 - DNA, 33 bp, Homo sapien
attaagttactcaatacgaccttctctgctctg

SEQ ID NO: 171100 - DNA, 33 bp, Homo sapien
attaagttactcaatatgaccttctctgctctg

SEQ ID NO: 171101 - DNA, 33 bp, Homo sapien
atgtttataattgttacgtcttcctgatagatt

SEQ ID NO: 171102 - DNA, 33 bp, Homo sapien
atgtttataattgttatgtcttcctgatagatt

SEQ ID NO: 171103 - DNA, 33 bp, Homo sapien
ctatccagtggcccaaattgctagagcttctgc

SEQ ID NO: 171104 - DNA, 33 bp, Homo sapien
ctatccagtggcccaacttgctagagcttctgc

SEQ ID NO: 171105 - DNA, 33 bp, Homo sapien
cataggtgaaaaccacagtgccatagaaaatgg

SEQ ID NO: 171106 - DNA, 33 bp, Homo sapien
cataggtgaaaaccacggtgccatagaaaatgg

SEQ ID NO: 171107 - DNA, 33 bp, Homo sapien
tttctgtgggcccaaccagctaacacactacta

SEQ ID NO: 171108 - DNA, 33 bp, Homo sapien
tttctgtgggcccaactagctaacacactacta

SEQ ID NO: 171109 - DNA, 33 bp, Homo sapien
cggaagtttatgacgcaaaaagggacttagctc

SEQ ID NO: 171110 - DNA, 33 bp, Homo sapien
cggaagtttatgacgcgaaaagggacttagctc

SEQ ID NO: 171111 - DNA, 33 bp, Homo sapien
agaggtggagaggaaaagtggtcaccgcgagat

SEQ ID NO: 171112 - DNA, 33 bp, Homo sapien
agaggtggagaggaaaggtggtcaccgcgagat

SEQ ID NO: 171113 - DNA, 33 bp, Homo sapien
gagttagcttaaacaacagaagagtttatcata

SEQ ID NO: 171114 - DNA, 33 bp, Homo sapien
gagttagcttaaacaagagaagagtttatcata

SEQ ID NO: 171115 - DNA, 33 bp, Homo sapien
atcctgctaacaggcaagtgaacgagctacatt

SEQ ID NO: 171116 - DNA, 33 bp, Homo sapien
atcctgctaacaggcatgtgaacgagctacatt

SEQ ID NO: 171117 - DNA, 33 bp, Homo sapien
agcaaaacctaaacacacgaagtcattcaggat

SEQ ID NO: 171118 - DNA, 33 bp, Homo sapien
agcaaaacctaaacacgcgaagtcattcaggat

SEQ ID NO: 171119 - DNA, 33 bp, Homo sapien
ttgctggaaagatgcgaccctggcacactttgt

SEQ ID NO: 171120 - DNA, 33 bp, Homo sapien
ttgctggaaagatgcggccctggcacactttgt

SEQ ID NO: 171121 - DNA, 33 bp, Homo sapien
aataagatcacaatgacgattaaatttcaacat

SEQ ID NO: 171122 - DNA, 33 bp, Homo sapien
aataagatcacaatgatgattaaatttcaacat

SEQ ID NO: 171123 - DNA, 33 bp, Homo sapien
aacatgattgatgtcactataagaaaagaaatc

SEQ ID NO: 171124 - DNA, 33 bp, Homo sapien
aacatgattgatgtcattataagaaaagaaatc

SEQ ID NO: 171125 - DNA, 33 bp, Homo sapien
gcaggtaatattttgccccctatctgccttgct

SEQ ID NO: 171126 - DNA, 33 bp, Homo sapien
gcaggtaatattttgctccctatctgccttgct

SEQ ID NO: 171127 - DNA, 33 bp, Homo sapien
aattgggtacaatgtacgtcattcaggtgatgg

SEQ ID NO: 171128 - DNA, 33 bp, Homo sapien
aattgggtacaatgtatgtcattcaggtgatgg

SEQ ID NO: 171129 - DNA, 33 bp, Homo sapien
aactgatatcgaatgaacatcagctgtgaacca

SEQ ID NO: 171130 - DNA, 33 bp, Homo sapien
aactgatatcgaatgagcatcagctgtgaacca

SEQ ID NO: 171131 - DNA, 33 bp, Homo sapien
tgcgagtgtttagtaacgtgtgaattagattta

SEQ ID NO: 171132 - DNA, 33 bp, Homo sapien
tgcgagtgtttagtaatgtgtgaattagattta

SEQ ID NO: 171133 - DNA, 33 bp, Homo sapien
ctacaacagaccacaaggctgacaaacagtcag

SEQ ID NO: 171134 - DNA, 33 bp, Homo sapien
ctacaacagaccacaatgctgacaaacagtcag

SEQ ID NO: 171135 - DNA, 33 bp, Homo sapien
agggccatctggattacaccacctgcaaaggag

SEQ ID NO: 171136 - DNA, 33 bp, Homo sapien
agggccatctggattataccacctgcaaaggag

SEQ ID NO: 171137 - DNA, 33 bp, Homo sapien
cccaactgttctaggccattttgatgttattca

SEQ ID NO: 171138 - DNA, 33 bp, Homo sapien
cccaactgttctaggctattttgatgttattca

SEQ ID NO: 171139 - DNA, 33 bp, Homo sapien
agcaatcctaagagtaaagactattattcccac

SEQ ID NO: 171140 - DNA, 33 bp, Homo sapien
agcaatcctaagagtagagactattattcccac

SEQ ID NO: 171141 - DNA, 33 bp, Homo sapien
ggaatatactacaattaaaccattctgttgtag

SEQ ID NO: 171142 - DNA, 33 bp, Homo sapien
ggaatatactacaatttaaccattctgttgtag

SEQ ID NO: 171143 - DNA, 33 bp, Homo sapien
gagatcataaaaatagaaatctctgaattggat

SEQ ID NO: 171144 - DNA, 33 bp, Homo sapien
gagatcataaaaataggaatctctgaattggat

SEQ ID NO: 171145 - DNA, 33 bp, Homo sapien
tgggattatgtctgtacagtgatcagcagatag

SEQ ID NO: 171146 - DNA, 33 bp, Homo sapien
tgggattatgtctgtatagtgatcagcagatag

SEQ ID NO: 171147 - DNA, 33 bp, Homo sapien
acctgtctgcagaagacgtgctggcagtatttg

SEQ ID NO: 171148 - DNA, 33 bp, Homo sapien
acctgtctgcagaagatgtgctggcagtatttg

SEQ ID NO: 171149 - DNA, 33 bp, Homo sapien
acacaaatgtaaccacagatcaagaagatataa

SEQ ID NO: 171150 - DNA, 33 bp, Homo sapien
acacaaatgtaaccacggatcaagaagatataa

SEQ ID NO: 171151 - DNA, 33 bp, Homo sapien
gatgcgcacaataagacgagtcatgagaatgtt

SEQ ID NO: 171152 - DNA, 33 bp, Homo sapien
gatgcgcacaataagatgagtcatgagaatgtt

SEQ ID NO: 171153 - DNA, 33 bp, Homo sapien
ctctcattaataggcactgaagatgtgtctaat

SEQ ID NO: 171154 - DNA, 33 bp, Homo sapien
ctctcattaataggcattgaagatgtgtctaat

SEQ ID NO: 171155 - DNA, 33 bp, Homo sapien
agttctttgatcttgcccaagtttacttactgt

SEQ ID NO: 171156 - DNA, 33 bp, Homo sapien
agttctttgatcttgcgcaagtttacttactgt

SEQ ID NO: 171157 - DNA, 33 bp, Homo sapien
aacacctctatatcaacaatagttcataggatc

SEQ ID NO: 171158 - DNA, 33 bp, Homo sapien
aacacctctatatcaagaatagttcataggatc

SEQ ID NO: 171159 - DNA, 33 bp, Homo sapien
gtgttagacagtttcacagtcaaattctctgaa

SEQ ID NO: 171160 - DNA, 33 bp, Homo sapien
gtgttagacagtttcatagtcaaattctctgaa

SEQ ID NO: 171161 - DNA, 33 bp, Homo sapien
aaatctgaaaactttgaacttgtttatttctga

SEQ ID NO: 171162 - DNA, 33 bp, Homo sapien
aaatctgaaaactttggacttgtttatttctga

SEQ ID NO: 171163 - DNA, 33 bp, Homo sapien
aatgacatttgggccacaaaatgttagctgaga

SEQ ID NO: 171164 - DNA, 33 bp, Homo sapien
aatgacatttgggccataaaatgttagctgaga

SEQ ID NO: 171165 - DNA, 33 bp, Homo sapien
atatggttgtttacaacttggatatcttctttt

SEQ ID NO: 171166 - DNA, 33 bp, Homo sapien
atatggttgtttacaatttggatatcttctttt

SEQ ID NO: 171167 - DNA, 33 bp, Homo sapien
tttgaggtccccagtaactcttattcccatctt

SEQ ID NO: 171168 - DNA, 33 bp, Homo sapien
tttgaggtccccagtatctcttattcccatctt

SEQ ID NO: 171169 - DNA, 33 bp, Homo sapien
ggggcaatggctgaaaaactgcctgttgggtac

SEQ ID NO: 171170 - DNA, 33 bp, Homo sapien
ggggcaatggctgaaacactgcctgttgggtac

SEQ ID NO: 171171 - DNA, 33 bp, Homo sapien
tgacagaatgaatagaatccaaaccttaccatc

SEQ ID NO: 171172 - DNA, 33 bp, Homo sapien
tgacagaatgaatagagtccaaaccttaccatc

SEQ ID NO: 171173 - DNA, 33 bp, Homo sapien
gattggtaaatgaatgaatcaacttatgcaaaa

SEQ ID NO: 171174 - DNA, 33 bp, Homo sapien
gattggtaaatgaatgcatcaacttatgcaaaa

SEQ ID NO: 171175 - DNA, 33 bp, Homo sapien
tccctgagaaagccacactccctatggttcact

SEQ ID NO: 171176 - DNA, 33 bp, Homo sapien
tccctgagaaagccacgctccctatggttcact

SEQ ID NO: 171177 - DNA, 33 bp, Homo sapien
tttacagatttattcaggcatcagccaatttag

SEQ ID NO: 171178 - DNA, 33 bp, Homo sapien
tttacagatttattcatgcatcagccaatttag

SEQ ID NO: 171179 - DNA, 33 bp, Homo sapien
accaccaggtgctgaaaagaggatgacacaaat

SEQ ID NO: 171180 - DNA, 33 bp, Homo sapien
accaccaggtgctgaagagaggatgacacaaat

SEQ ID NO: 171181 - DNA, 33 bp, Homo sapien
ttgtctattcatttccccaagacacacactgaa

SEQ ID NO: 171182 - DNA, 33 bp, Homo sapien
ttgtctattcatttccgcaagacacacactgaa

SEQ ID NO: 171183 - DNA, 33 bp, Homo sapien
aaatgcctaccatatgacaaatgttaaactaag

SEQ ID NO: 171184 - DNA, 33 bp, Homo sapien
aaatgcctaccatatggcaaatgttaaactaag

SEQ ID NO: 171185 - DNA, 33 bp, Homo sapien
tcttctttttggtctccacttccctggactttt

SEQ ID NO: 171186 - DNA, 33 bp, Homo sapien
tcttctttttggtctcgacttccctggactttt

SEQ ID NO: 171187 - DNA, 33 bp, Homo sapien
gccagagtagacttcacatgaaagctgtgtcca

SEQ ID NO: 171188 - DNA, 33 bp, Homo sapien
gccagagtagacttcagatgaaagctgtgtcca

SEQ ID NO: 171189 - DNA, 33 bp, Homo sapien
tgtctgcaacgaaaaacgtcctgtggaaaccag

SEQ ID NO: 171190 - DNA, 33 bp, Homo sapien
tgtctgcaacgaaaaatgtcctgtggaaaccag

SEQ ID NO: 171191 - DNA, 33 bp, Homo sapien
acaagtttgaaatcacagagaaaagagatagaa

SEQ ID NO: 171192 - DNA, 33 bp, Homo sapien
acaagtttgaaatcacggagaaaagagatagaa

SEQ ID NO: 171193 - DNA, 33 bp, Homo sapien
attcctcactctatctcaatcagtgatgtgact

SEQ ID NO: 171194 - DNA, 33 bp, Homo sapien
attcctcactctatctgaatcagtgatgtgact

SEQ ID NO: 171195 - DNA, 33 bp, Homo sapien
tgaacaagtgacaaacaattccactggatttct

SEQ ID NO: 171196 - DNA, 33 bp, Homo sapien
tgaacaagtgacaaaccattccactggatttct

SEQ ID NO: 171197 - DNA, 33 bp, Homo sapien
gcagaaggggctgcccaacatcactgtgggact

SEQ ID NO: 171198 - DNA, 33 bp, Homo sapien
gcagaaggggctgcccgacatcactgtgggact

SEQ ID NO: 171199 - DNA, 33 bp, Homo sapien
gtcctgggctttattgaagctcatggcaggttg

SEQ ID NO: 171200 - DNA, 33 bp, Homo sapien
gtcctgggctttattggagctcatggcaggttg

SEQ ID NO: 171201 - DNA, 33 bp, Homo sapien
tgtgcatgagcattggcacctcaaggtaggatg

SEQ ID NO: 171202 - DNA, 33 bp, Homo sapien
tgtgcatgagcattgggacctcaaggtaggatg

SEQ ID NO: 171203 - DNA, 33 bp, Homo sapien
gattgtcttggctctacgggatattttttgctt

SEQ ID NO: 171204 - DNA, 33 bp, Homo sapien
gattgtcttggctctatgggatattttttgctt

SEQ ID NO: 171205 - DNA, 33 bp, Homo sapien
gtgtaggcattcaccacgttcaccatcaaaacc

SEQ ID NO: 171206 - DNA, 33 bp, Homo sapien
gtgtaggcattcaccatgttcaccatcaaaacc

SEQ ID NO: 171207 - DNA, 33 bp, Homo sapien
gttcctggttaaaatccacctgttggctcataa

SEQ ID NO: 171208 - DNA, 33 bp, Homo sapien
gttcctggttaaaatctacctgttggctcataa

SEQ ID NO: 171209 - DNA, 33 bp, Homo sapien
atctaaatcaagactcaatacatcatcaatctc

SEQ ID NO: 171210 - DNA, 33 bp, Homo sapien
atctaaatcaagactcgatacatcatcaatctc

SEQ ID NO: 171211 - DNA, 33 bp, Homo sapien
ctccagcttctaccacactgagacctagtatgg

SEQ ID NO: 171212 - DNA, 33 bp, Homo sapien
ctccagcttctaccacgctgagacctagtatgg

SEQ ID NO: 171213 - DNA, 33 bp, Homo sapien
cccaaatgtgtatggaaagaataatggataaac

SEQ ID NO: 171214 - DNA, 33 bp, Homo sapien
cccaaatgtgtatggacagaataatggataaac

SEQ ID NO: 171215 - DNA, 33 bp, Homo sapien
cagggcttatgggacaacgctaagtgaacaaat

SEQ ID NO: 171216 - DNA, 33 bp, Homo sapien
cagggcttatgggacaccgctaagtgaacaaat

SEQ ID NO: 171217 - DNA, 33 bp, Homo sapien
tttaggggtagggaataaagacttctgttctgg

SEQ ID NO: 171218 - DNA, 33 bp, Homo sapien
tttaggggtagggaatgaagacttctgttctgg

SEQ ID NO: 171219 - DNA, 33 bp, Homo sapien
tgtgactagttttaacaaatgcactgaagcagt

SEQ ID NO: 171220 - DNA, 33 bp, Homo sapien
tgtgactagttttaaccaatgcactgaagcagt

SEQ ID NO: 171221 - DNA, 33 bp, Homo sapien
caacaagtgttgagagaagcatagtgagccacc

SEQ ID NO: 171222 - DNA, 33 bp, Homo sapien
caacaagtgttgagaggagcatagtgagccacc

SEQ ID NO: 171223 - DNA, 33 bp, Homo sapien
cattttgcaaaagagaacaatgaagtccagaga

SEQ ID NO: 171224 - DNA, 33 bp, Homo sapien
cattttgcaaaagagagcaatgaagtccagaga

SEQ ID NO: 171225 - DNA, 33 bp, Homo sapien
cttacaaatatcaccagtggggacaacctactc

SEQ ID NO: 171226 - DNA, 33 bp, Homo sapien
cttacaaatatcaccattggggacaacctactc

SEQ ID NO: 171227 - DNA, 33 bp, Homo sapien
atgccctaaaaagagaacatgataagatggaaa

SEQ ID NO: 171228 - DNA, 33 bp, Homo sapien
atgccctaaaaagagagcatgataagatggaaa

SEQ ID NO: 171229 - DNA, 33 bp, Homo sapien
agattgctcaaatagacgtatgtagctgactga

SEQ ID NO: 171230 - DNA, 33 bp, Homo sapien
agattgctcaaatagatgtatgtagctgactga

SEQ ID NO: 171231 - DNA, 33 bp, Homo sapien
tctttgccactggctcaccattcccaaagttac

SEQ ID NO: 171232 - DNA, 33 bp, Homo sapien
tctttgccactggctccccattcccaaagttac

SEQ ID NO: 171233 - DNA, 33 bp, Homo sapien
agttactcagtggtaacatcaggactggaactc

SEQ ID NO: 171234 - DNA, 33 bp, Homo sapien
agttactcagtggtaatatcaggactggaactc

SEQ ID NO: 171235 - DNA, 33 bp, Homo sapien
aagttctctttacaacacactcatccttagtcc

SEQ ID NO: 171236 - DNA, 33 bp, Homo sapien
aagttctctttacaacgcactcatccttagtcc

SEQ ID NO: 171237 - DNA, 33 bp, Homo sapien
actttgggtgcactgcacaacctttatgactcc

SEQ ID NO: 171238 - DNA, 33 bp, Homo sapien
actttgggtgcactgcccaacctttatgactcc

SEQ ID NO: 171239 - DNA, 33 bp, Homo sapien
gccctctctgcattagaccaataacagtgccgc

SEQ ID NO: 171240 - DNA, 33 bp, Homo sapien
gccctctctgcattagcccaataacagtgccgc

SEQ ID NO: 171241 - DNA, 33 bp, Homo sapien
tcagaataatcggaataatcagccctctctgca

SEQ ID NO: 171242 - DNA, 33 bp, Homo sapien
tcagaataatcggaatcatcagccctctctgca

SEQ ID NO: 171243 - DNA, 33 bp, Homo sapien
agcaaggtttgtttcacgtgacttttatcctgc

SEQ ID NO: 171244 - DNA, 33 bp, Homo sapien
agcaaggtttgtttcatgtgacttttatcctgc

SEQ ID NO: 171245 - DNA, 33 bp, Homo sapien
catataaaaagacagcactaacagacctcaaat

SEQ ID NO: 171246 - DNA, 33 bp, Homo sapien
catataaaaagacagcgctaacagacctcaaat

SEQ ID NO: 171247 - DNA, 33 bp, Homo sapien
aattttgccactttgccaagaatcagtcctaaa

SEQ ID NO: 171248 - DNA, 33 bp, Homo sapien
aattttgccactttgctaagaatcagtcctaaa

SEQ ID NO: 171249 - DNA, 33 bp, Homo sapien
aacaaacgatgctaggaaaactggataacccac

SEQ ID NO: 171250 - DNA, 33 bp, Homo sapien
aacaaacgatgctagggaaactggataacccac

SEQ ID NO: 171251 - DNA, 33 bp, Homo sapien
cctgagactttttatacgacatctcctctcatt

SEQ ID NO: 171252 - DNA, 33 bp, Homo sapien
cctgagactttttatatgacatctcctctcatt

SEQ ID NO: 171253 - DNA, 33 bp, Homo sapien
tattagctcattacaactatgtgtacacaacca

SEQ ID NO: 171254 - DNA, 33 bp, Homo sapien
tattagctcattacaagtatgtgtacacaacca

SEQ ID NO: 171255 - DNA, 33 bp, Homo sapien
tgctcaattgtagatacatggtttcttggggac

SEQ ID NO: 171256 - DNA, 33 bp, Homo sapien
tgctcaattgtagatatatggtttcttggggac

SEQ ID NO: 171257 - DNA, 33 bp, Homo sapien
aagagaaaggtctcacaaaaaataatgaattct

SEQ ID NO: 171258 - DNA, 33 bp, Homo sapien
aagagaaaggtctcacgaaaaataatgaattct

SEQ ID NO: 171259 - DNA, 33 bp, Homo sapien
caattaacaagttacaatgacatccgtaattgt

SEQ ID NO: 171260 - DNA, 33 bp, Homo sapien
caattaacaagttacagtgacatccgtaattgt

SEQ ID NO: 171261 - DNA, 33 bp, Homo sapien
ctctaaccatttatcagcaggaggctgagcatg

SEQ ID NO: 171262 - DNA, 33 bp, Homo sapien
ctctaaccatttatcatcaggaggctgagcatg

SEQ ID NO: 171263 - DNA, 33 bp, Homo sapien
aaattcaatgactcaacaaaatgcctatgaatt

SEQ ID NO: 171264 - DNA, 33 bp, Homo sapien
aaattcaatgactcaataaaatgcctatgaatt

SEQ ID NO: 171265 - DNA, 33 bp, Homo sapien
ttccaacagcctctacacagaaggtgtccatca

SEQ ID NO: 171266 - DNA, 33 bp, Homo sapien
ttccaacagcctctactcagaaggtgtccatca

SEQ ID NO: 171267 - DNA, 33 bp, Homo sapien
tagggtaagagttggcaaggacttggaggatgc

SEQ ID NO: 171268 - DNA, 33 bp, Homo sapien
tagggtaagagttggctaggacttggaggatgc

SEQ ID NO: 171269 - DNA, 33 bp, Homo sapien
gcaggtggagactcagcagctcttaggtatttt

SEQ ID NO: 171270 - DNA, 33 bp, Homo sapien
gcaggtggagactcagtagctcttaggtatttt

SEQ ID NO: 171271 - DNA, 33 bp, Homo sapien; identical to SEQ ID NO: 171269

SEQ ID NO: 171272 - DNA, 33 bp, Homo sapien; identical to SEQ ID NO: 171270

SEQ ID NO: 171273 - DNA, 33 bp, Homo sapien
tgacatttgtaactaggcatggcactgtaaaag

SEQ ID NO: 171274 - DNA, 33 bp, Homo sapien
tgacatttgtaactagtcatggcactgtaaaag

SEQ ID NO: 171275 - DNA, 33 bp, Homo sapien
gtagaatgcacagaagcacttatcaaaatgtat

SEQ ID NO: 171276 - DNA, 33 bp, Homo sapien
gtagaatgcacagaaggacttatcaaaatgtat

SEQ ID NO: 171277 - DNA, 33 bp, Homo sapien
ttatatgccaaataaacctacatgaacctcaga

SEQ ID NO: 171278 - DNA, 33 bp, Homo sapien
ttatatgccaaataaatctacatgaacctcaga

SEQ ID NO: 171279 - DNA, 33 bp, Homo sapien
acattagggaaccaagactcatcaagtaatgtg

SEQ ID NO: 171280 - DNA, 33 bp, Homo sapien
acattagggaaccaaggctcatcaagtaatgtg

SEQ ID NO: 171281 - DNA, 33 bp, Homo sapien
attttctactgaaatcgcacttccattttgttc

SEQ ID NO: 171282 - DNA, 33 bp, Homo sapien
attttctactgaaatctcacttccattttgttc

SEQ ID NO: 171283 - DNA, 33 bp, Homo sapien
gaatccatcccacctaggttcttctttgttgca

SEQ ID NO: 171284 - DNA, 33 bp, Homo sapien
gaatccatcccacctatgttcttctttgttgca

SEQ ID NO: 171285 - DNA, 33 bp, Homo sapien
atctttaatacaaggaacaatagctctgggctg

SEQ ID NO: 171286 - DNA, 33 bp, Homo sapien
atctttaatacaaggatcaatagctctgggctg

SEQ ID NO: 171287 - DNA, 33 bp, Homo sapien
aatagcaaacgctctgaaaaagaaatcaagaaa

SEQ ID NO: 171288 - DNA, 33 bp, Homo sapien
aatagcaaacgctctggaaaagaaatcaagaaa

SEQ ID NO: 171289 - DNA, 33 bp, Homo sapien
tgtatacaccgttaatcaaagtgtaaattagtt

SEQ ID NO: 171290 - DNA, 33 bp, Homo sapien
tgtatacaccgttaatgaaagtgtaaattagtt

SEQ ID NO: 171291 - DNA, 33 bp, Homo sapien
gtctccaatagacccacgtgtgtttttcttctg

SEQ ID NO: 171292 - DNA, 33 bp, Homo sapien
gtctccaatagacccatgtgtgtttttcttctg

SEQ ID NO: 171293 - DNA, 33 bp, Homo sapien
aattaacagagcctcaataagacttttagcaga

SEQ ID NO: 171294 - DNA, 33 bp, Homo sapien
aattaacagagcctcagtaagacttttagcaga

SEQ ID NO: 171295 - DNA, 33 bp, Homo sapien
tttgggtgtcagaacaataatgagagtctagcc

SEQ ID NO: 171296 - DNA, 33 bp, Homo sapien
tttgggtgtcagaacagtaatgagagtctagcc

SEQ ID NO: 171297 - DNA, 33 bp, Homo sapien
actagatatggggcataagtaaaacagaagagt

SEQ ID NO: 171298 - DNA, 33 bp, Homo sapien
actagatatggggcatgagtaaaacagaagagt

SEQ ID NO: 171299 - DNA, 33 bp, Homo sapien
agttccattaaacaccaaaggtatcgacatctg

SEQ ID NO: 171300 - DNA, 33 bp, Homo sapien
agttccattaaacaccgaaggtatcgacatctg

SEQ ID NO: 171301 - DNA, 33 bp, Homo sapien
acagagtctacaacaacgcttttcttaagaggt

SEQ ID NO: 171302 - DNA, 33 bp, Homo sapien
acagagtctacaacaatgcttttcttaagaggt

SEQ ID NO: 171303 - DNA, 33 bp, Homo sapien
gtagaattgtggttatgagagcctggtaagggt

SEQ ID NO: 171304 - DNA, 33 bp, Homo sapien
gtagaattgtggttattagagcctggtaagggt

SEQ ID NO: 171305 - DNA, 33 bp, Homo sapien
gaaccagggtcaaacaaagaacaatcagaacaa

SEQ ID NO: 171306 - DNA, 33 bp, Homo sapien
gaaccagggtcaaacagagaacaatcagaacaa

SEQ ID NO: 171307 - DNA, 33 bp, Homo sapien
ttgcctgatcctaaggcatattcttccctctac

SEQ ID NO: 171308 - DNA, 33 bp, Homo sapien
ttgcctgatcctaaggtatattcttccctctac

SEQ ID NO: 171309 - DNA, 33 bp, Homo sapien
tggttgattggatacccgagtttccttcatcta

SEQ ID NO: 171310 - DNA, 33 bp, Homo sapien
tggttgattggatacctgagtttccttcatcta

SEQ ID NO: 171311 - DNA, 33 bp, Homo sapien
ttaatcatcagtcaacagtgaaccaaactctaa

SEQ ID NO: 171312 - DNA, 33 bp, Homo sapien
ttaatcatcagtcaacggtgaaccaaactctaa

SEQ ID NO: 171313 - DNA, 33 bp, Homo sapien
tgacatttgtgatgaaatctgtaaattaagaaa

SEQ ID NO: 171314 - DNA, 33 bp, Homo sapien
tgacatttgtgatgaactctgtaaattaagaaa

SEQ ID NO: 171315 - DNA, 33 bp, Homo sapien
tatccatcatctcaccaacttatttttttttgt

SEQ ID NO: 171316 - DNA, 33 bp, Homo sapien
tatccatcatctcaccgacttatttttttttgt

SEQ ID NO: 171317 - DNA, 33 bp, Homo sapien
gaaccacattcccaaaccattgtctacaatttg

SEQ ID NO: 171318 - DNA, 33 bp, Homo sapien
gaaccacattcccaaatcattgtctacaatttg

SEQ ID NO: 171319 - DNA, 33 bp, Homo sapien
ctccatttactttccaatgaggatctcaactaa

SEQ ID NO: 171320 - DNA, 33 bp, Homo sapien
ctccatttactttccagtgaggatctcaactaa

SEQ ID NO: 171321 - DNA, 33 bp, Homo sapien
ttcaattctatgatccagaaatttgactcctaa

SEQ ID NO: 171322 - DNA, 33 bp, Homo sapien
ttcaattctatgatccggaaatttgactcctaa

SEQ ID NO: 171323 - DNA, 33 bp, Homo sapien
ggcacaggtggaaaagaccttcttttgtccctc

SEQ ID NO: 171324 - DNA, 33 bp, Homo sapien
ggcacaggtggaaaaggccttcttttgtccctc

SEQ ID NO: 171325 - DNA, 33 bp, Homo sapien
gagggcttcaaagatacggcaagtagtgaaaaa

SEQ ID NO: 171326 - DNA, 33 bp, Homo sapien
gagggcttcaaagatatggcaagtagtgaaaaa

SEQ ID NO: 171327 - DNA, 33 bp, Homo sapien
catcttgaagtctgccaatccatgaatataaca

SEQ ID NO: 171328 - DNA, 33 bp, Homo sapien
catcttgaagtctgccgatccatgaatataaca

SEQ ID NO: 171329 - DNA, 33 bp, Homo sapien
ctaatgtcattatcaccggaatgggttcattat

SEQ ID NO: 171330 - DNA, 33 bp, Homo sapien
ctaatgtcattatcactggaatgggttcattat

SEQ ID NO: 171331 - DNA, 33 bp, Homo sapien
aagtaggatatcaagacaactagaagggcaaag

SEQ ID NO: 171332 - DNA, 33 bp, Homo sapien
aagtaggatatcaagataactagaagggcaaag

SEQ ID NO: 171333 - DNA, 33 bp, Homo sapien
cattcaggaaaccaccaacgtatcaacctatgg

SEQ ID NO: 171334 - DNA, 33 bp, Homo sapien
cattcaggaaaccaccgacgtatcaacctatgg

SEQ ID NO: 171335 - DNA, 33 bp, Homo sapien
ttcaattataaggatgacagtaatgagaaaaag

SEQ ID NO: 171336 - DNA, 33 bp, Homo sapien
ttcaattataaggatgccagtaatgagaaaaag

SEQ ID NO: 171337 - DNA, 33 bp, Homo sapien
cagttgtgttttggtgcaaagtttatgtttaaa

SEQ ID NO: 171338 - DNA, 33 bp, Homo sapien
cagttgtgttttggtggaaagtttatgtttaaa

SEQ ID NO: 171339 - DNA, 33 bp, Homo sapien
ttcatacactaggacacattcaaataaaaacat

SEQ ID NO: 171340 - DNA, 33 bp, Homo sapien
ttcatacactaggacagattcaaataaaaacat

SEQ ID NO: 171341 - DNA, 33 bp, Homo sapien
taggataagagctttacacatagccgtgtgtgt

SEQ ID NO: 171342 - DNA, 33 bp, Homo sapien
taggataagagctttatacatagccgtgtgtgt

SEQ ID NO: 171343 - DNA, 33 bp, Homo sapien
aactactatctttatgcacttacagcctagctc

SEQ ID NO: 171344 - DNA, 33 bp, Homo sapien
aactactatctttatgtacttacagcctagctc

SEQ ID NO: 171345 - DNA, 33 bp, Homo sapien
tttatctaaggaatgcaagtagaaagagtagaa

SEQ ID NO: 171346 - DNA, 33 bp, Homo sapien
tttatctaaggaatgcgagtagaaagagtagaa

SEQ ID NO: 171347 - DNA, 33 bp, Homo sapien
gactgaatctagagaacattttgccttctcaac

SEQ ID NO: 171348 - DNA, 33 bp, Homo sapien
gactgaatctagagaatattttgccttctcaac

SEQ ID NO: 171349 - DNA, 33 bp, Homo sapien
ataagcaacccagttaaaacctttggagtgaca

SEQ ID NO: 171350 - DNA, 33 bp, Homo sapien
ataagcaacccagttataacctttggagtgaca

SEQ ID NO: 171351 - DNA, 33 bp, Homo sapien
catgttttagaaaaaacgttcaaacaagtagat

SEQ ID NO: 171352 - DNA, 33 bp, Homo sapien
catgttttagaaaaaatgttcaaacaagtagat

SEQ ID NO: 171353 - DNA, 33 bp, Homo sapien
ccagtctcaaacggtcacaaaaaatccaaggca

SEQ ID NO: 171354 - DNA, 33 bp, Homo sapien
ccagtctcaaacggtcgcaaaaaatccaaggca

SEQ ID NO: 171355 - DNA, 33 bp, Homo sapien
atattagtaatctaccaaacatttgatatgtgc

SEQ ID NO: 171356 - DNA, 33 bp, Homo sapien
atattagtaatctaccgaacatttgatatgtgc

SEQ ID NO: 171357 - DNA, 33 bp, Homo sapien
ttataaatattgatacagcatggatcacaaaaa

SEQ ID NO: 171358 - DNA, 33 bp, Homo sapien
ttataaatattgataccgcatggatcacaaaaa

SEQ ID NO: 171359 - DNA, 33 bp, Homo sapien
tctgatctctcccttcacagtcaggttcttttc

SEQ ID NO: 171360 - DNA, 33 bp, Homo sapien
tctgatctctcccttcgcagtcaggttcttttc

SEQ ID NO: 171361 - DNA, 33 bp, Homo sapien
taaatggtcttctccacataatcaggatgtggc

SEQ ID NO: 171362 - DNA, 33 bp, Homo sapien
taaatggtcttctccatataatcaggatgtggc

SEQ ID NO: 171363 - DNA, 33 bp, Homo sapien
tgaaccaaaaagaaaacttagctccttctacat

SEQ ID NO: 171364 - DNA, 33 bp, Homo sapien
tgaaccaaaaagaaaatttagctccttctacat

SEQ ID NO: 171365 - DNA, 33 bp, Homo sapien
tttatgtattggatgtaaatgtagaaggagcta

SEQ ID NO: 171366 - DNA, 33 bp, Homo sapien
tttatgtattggatgtgaatgtagaaggagcta

SEQ ID NO: 171367 - DNA, 33 bp, Homo sapien
attcaagtcgaagatacgataaacaggtgaaca

SEQ ID NO: 171368 - DNA, 33 bp, Homo sapien
attcaagtcgaagatatgataaacaggtgaaca

SEQ ID NO: 171369 - DNA, 33 bp, Homo sapien
ctgtttcctctgctcacaaaatttccatactca

SEQ ID NO: 171370 - DNA, 33 bp, Homo sapien
ctgtttcctctgctcagaaaatttccatactca

SEQ ID NO: 171371 - DNA, 33 bp, Homo sapien
atagcctgagaaacaacgaggtcaagagtgcat

SEQ ID NO: 171372 - DNA, 33 bp, Homo sapien
atagcctgagaaacaatgaggtcaagagtgcat

SEQ ID NO: 171373 - DNA, 33 bp, Homo sapien
cccagagtggtttccaacccaaacgctgttaat

SEQ ID NO: 171374 - DNA, 33 bp, Homo sapien
cccagagtggtttccatcccaaacgctgttaat

SEQ ID NO: 171375 - DNA, 33 bp, Homo sapien
gtatccatctcccaaaacagatcaaccaagatt

SEQ ID NO: 171376 - DNA, 33 bp, Homo sapien
gtatccatctcccaaagcagatcaaccaagatt

SEQ ID NO: 171377 - DNA, 33 bp, Homo sapien
atgcagcgattaaagaaacagtcagtggaatca

SEQ ID NO: 171378 - DNA, 33 bp, Homo sapien
atgcagcgattaaagacacagtcagtggaatca

SEQ ID NO: 171379 - DNA, 33 bp, Homo sapien
cccagtaaaataatgcaaaaacctcagaaaaac

SEQ ID NO: 171380 - DNA, 33 bp, Homo sapien
cccagtaaaataatgcgaaaacctcagaaaaac

SEQ ID NO: 171381 - DNA, 33 bp, Homo sapien
aactagaagagattaaagaaacctgacaactaa

SEQ ID NO: 171382 - DNA, 33 bp, Homo sapien
aactagaagagattaaggaaacctgacaactaa

SEQ ID NO: 171383 - DNA, 33 bp, Homo sapien
accttattccgatctcactcatttatccactat

SEQ ID NO: 171384 - DNA, 33 bp, Homo sapien
accttattccgatctcgctcatttatccactat

SEQ ID NO: 171385 - DNA, 33 bp, Homo sapien
aaaacacaggtgaagcggcaaaaggtggtgtat

SEQ ID NO: 171386 - DNA, 33 bp, Homo sapien
aaaacacaggtgaagctgcaaaaggtggtgtat

SEQ ID NO: 171387 - DNA, 33 bp, Homo sapien
gtggtgtatgtcaactaaaataagaatgaagga

SEQ ID NO: 171388 - DNA, 33 bp, Homo sapien
gtggtgtatgtcaacttaaataagaatgaagga

SEQ ID NO: 171389 - DNA, 33 bp, Homo sapien
acataaaattaaccatcagaacttgccacatta

SEQ ID NO: 171390 - DNA, 33 bp, Homo sapien
acataaaattaaccatgagaacttgccacatta

SEQ ID NO: 171391 - DNA, 33 bp, Homo sapien
tttctgtgatattccaacagtcatggttctctc

SEQ ID NO: 171392 - DNA, 33 bp, Homo sapien
tttctgtgatattccagcagtcatggttctctc

SEQ ID NO: 171393 - DNA, 33 bp, Homo sapien
tggagacaggaatcccagaatatcaatacaata

SEQ ID NO: 171394 - DNA, 33 bp, Homo sapien
tggagacaggaatcccggaatatcaatacaata

SEQ ID NO: 171395 - DNA, 33 bp, Homo sapien
tgtagcaatacaaaaaagaacagtgtgataaat

SEQ ID NO: 171396 - DNA, 33 bp, Homo sapien
tgtagcaatacaaaaaggaacagtgtgataaat

SEQ ID NO: 171397 - DNA, 33 bp, Homo sapien
ggaaaagtaaattgacagatagatgcatctaga

SEQ ID NO: 171398 - DNA, 33 bp, Homo sapien
ggaaaagtaaattgaccgatagatgcatctaga

SEQ ID NO: 171399 - DNA, 33 bp, Homo sapien
agcaacaaccttggtgcacagaacaaatgttta

SEQ ID NO: 171400 - DNA, 33 bp, Homo sapien
agcaacaaccttggtgtacagaacaaatgttta

SEQ ID NO: 171401 - DNA, 33 bp, Homo sapien
ttagttttgccagatgcagaattctcagttgac

SEQ ID NO: 171402 - DNA, 33 bp, Homo sapien
ttagttttgccagatgtagaattctcagttgac

SEQ ID NO: 171403 - DNA, 33 bp, Homo sapien
tttgttctttctcctacctaattactcttgcta

SEQ ID NO: 171404 - DNA, 33 bp, Homo sapien
tttgttctttctcctatctaattactcttgcta

SEQ ID NO: 171405 - DNA, 33 bp, Homo sapien
aaagataactagaagaacaaaaaagatattaaa

SEQ ID NO: 171406 - DNA, 33 bp, Homo sapien
aaagataactagaagagcaaaaaagatattaaa

SEQ ID NO: 171407 - DNA, 33 bp, Homo sapien
gtgattctggtttttacgtcaagctttaatatc

SEQ ID NO: 171408 - DNA, 33 bp, Homo sapien
gtgattctggtttttatgtcaagctttaatatc

SEQ ID NO: 171409 - DNA, 33 bp, Homo sapien
tcatttagatacattcgctcattgcctcaacaa

SEQ ID NO: 171410 - DNA, 33 bp, Homo sapien
tcatttagatacattctctcattgcctcaacaa

SEQ ID NO: 171411 - DNA, 33 bp, Homo sapien
agtggtcaacttgctgaaagaattgttttaacc

SEQ ID NO: 171412 - DNA, 33 bp, Homo sapien
agtggtcaacttgctggaagaattgttttaacc

SEQ ID NO: 171413 - DNA, 33 bp, Homo sapien
tccatatctataaaacagaactcatactagtat

SEQ ID NO: 171414 - DNA, 33 bp, Homo sapien
tccatatctataaaacggaactcatactagtat

SEQ ID NO: 171415 - DNA, 33 bp, Homo sapien
gactgggacaaggttcaacatccaatatatgtt

SEQ ID NO: 171416 - DNA, 33 bp, Homo sapien
gactgggacaaggttctacatccaatatatgtt

SEQ ID NO: 171417 - DNA, 33 bp, Homo sapien
aagatatcatttcagaactactagaatggctaa

SEQ ID NO: 171418 - DNA, 33 bp, Homo sapien
aagatatcatttcagatctactagaatggctaa

SEQ ID NO: 171419 - DNA, 33 bp, Homo sapien
aagacagacaaaagcaagggttggtaatgattt

SEQ ID NO: 171420 - DNA, 33 bp, Homo sapien
aagacagacaaaagcaggggttggtaatgattt

SEQ ID NO: 171421 - DNA, 33 bp, Homo sapien
gctttagccaggctcaaacattattcagataaa

SEQ ID NO: 171422 - DNA, 33 bp, Homo sapien
gctttagccaggctcatacattattcagataaa

SEQ ID NO: 171423 - DNA, 33 bp, Homo sapien
aggtgacataactaaaacagattctaaaggata

SEQ ID NO: 171424 - DNA, 33 bp, Homo sapien
aggtgacataactaaaccagattctaaaggata

SEQ ID NO: 171425 - DNA, 33 bp, Homo sapien
gcacctcacaaatcaacgaatagccgcaaaata

SEQ ID NO: 171426 - DNA, 33 bp, Homo sapien
gcacctcacaaatcaatgaatagccgcaaaata

SEQ ID NO: 171427 - DNA, 33 bp, Homo sapien
accactaactgcatctcactaatgccaaggcac

SEQ ID NO: 171428 - DNA, 33 bp, Homo sapien
accactaactgcatcttactaatgccaaggcac

SEQ ID NO: 171429 - DNA, 33 bp, Homo sapien
tcaaagctttttatcacagcttcggtgaaggac

SEQ ID NO: 171430 - DNA, 33 bp, Homo sapien
tcaaagctttttatcatagcttcggtgaaggac

SEQ ID NO: 171431 - DNA, 33 bp, Homo sapien
tagtagcaaaattgctcaatcaagtggtatatg

SEQ ID NO: 171432 - DNA, 33 bp, Homo sapien
tagtagcaaaattgctgaatcaagtggtatatg

SEQ ID NO: 171433 - DNA, 33 bp, Homo sapien
aaagccaaattctaaacagagtagttggcatgt

SEQ ID NO: 171434 - DNA, 33 bp, Homo sapien
aaagccaaattctaaatagagtagttggcatgt

SEQ ID NO: 171435 - DNA, 33 bp, Homo sapien
ttgcctaaaaaccacccaaatagagaagttgat

SEQ ID NO: 171436 - DNA, 33 bp, Homo sapien
ttgcctaaaaaccaccgaaatagagaagttgat

SEQ ID NO: 171437 - DNA, 33 bp, Homo sapien
acatacacaattttaacgatacgaatttatctc

SEQ ID NO: 171438 - DNA, 33 bp, Homo sapien
acatacacaattttaaggatacgaatttatctc

SEQ ID NO: 171439 - DNA, 33 bp, Homo sapien
gtgtttcgtgtttttaaatgtaggaacttcatc

SEQ ID NO: 171440 - DNA, 33 bp, Homo sapien
gtgtttcgtgtttttagatgtaggaacttcatc

SEQ ID NO: 171441 - DNA, 33 bp, Homo sapien
agttgaccaaaaaataataaacaacagagaagg

SEQ ID NO: 171442 - DNA, 33 bp, Homo sapien
agttgaccaaaaaatagtaaacaacagagaagg

SEQ ID NO: 171443 - DNA, 33 bp, Homo sapien
ttagttttcactgcctcaaaatattctaggcaa

SEQ ID NO: 171444 - DNA, 33 bp, Homo sapien
ttagttttcactgccttaaaatattctaggcaa

SEQ ID NO: 171445 - DNA, 33 bp, Homo sapien
agcacatacctctaaaatttacagcacctatct

SEQ ID NO: 171446 - DNA, 33 bp, Homo sapien
agcacatacctctaaactttacagcacctatct

SEQ ID NO: 171447 - DNA, 33 bp, Homo sapien
tttcaaagaaatgaaccgaggccatcataatgg

SEQ ID NO: 171448 - DNA, 33 bp, Homo sapien
tttcaaagaaatgaactgaggccatcataatgg

SEQ ID NO: 171449 - DNA, 33 bp, Homo sapien
gctggacagcggctagaaaaacctaagtaatgc

SEQ ID NO: 171450 - DNA, 33 bp, Homo sapien
gctggacagcggctaggaaaacctaagtaatgc

SEQ ID NO: 171451 - DNA, 33 bp, Homo sapien
gccaaagcacaatttcaattcactgatctatgt

SEQ ID NO: 171452 - DNA, 33 bp, Homo sapien
gccaaagcacaatttccattcactgatctatgt

SEQ ID NO: 171453 - DNA, 33 bp, Homo sapien
ccattcagccaaagcacgattattttcacttgt

SEQ ID NO: 171454 - DNA, 33 bp, Homo sapien
ccattcagccaaagcatgattattttcacttgt

SEQ ID NO: 171455 - DNA, 33 bp, Homo sapien
cagccccagccaatcagaactaacattggctgc

SEQ ID NO: 171456 - DNA, 33 bp, Homo sapien
cagccccagccaatcataactaacattggctgc

SEQ ID NO: 171457 - DNA, 33 bp, Homo sapien
tctatgcagatttggaaacaggactttatttct

SEQ ID NO: 171458 - DNA, 33 bp, Homo sapien
tctatgcagatttggacacaggactttatttct

SEQ ID NO: 171459 - DNA, 33 bp, Homo sapien
acaccatgagacagctaaaaaattgtgaatgcc

SEQ ID NO: 171460 - DNA, 33 bp, Homo sapien
acaccatgagacagctgaaaaattgtgaatgcc

SEQ ID NO: 171461 - DNA, 33 bp, Homo sapien
gaccctttgaaagaagaagcttgctgctgcaaa

SEQ ID NO: 171462 - DNA, 33 bp, Homo sapien
gaccctttgaaagaagtagcttgctgctgcaaa

SEQ ID NO: 171463 - DNA, 33 bp, Homo sapien
tggggtgttaaactccactactattattgtatt

SEQ ID NO: 171464 - DNA, 33 bp, Homo sapien
tggggtgttaaactcctctactattattgtatt

SEQ ID NO: 171465 - DNA, 33 bp, Homo sapien
caataactctgcccaacgcttttcccctgggta

SEQ ID NO: 171466 - DNA, 33 bp, Homo sapien
caataactctgcccaatgcttttcccctgggta

SEQ ID NO: 171467 - DNA, 33 bp, Homo sapien
ttagagaggtattgagactaatatcacagtggg

SEQ ID NO: 171468 - DNA, 33 bp, Homo sapien
ttagagaggtattgagtctaatatcacagtggg

SEQ ID NO: 171469 - DNA, 33 bp, Homo sapien
ttgctgactgattgaacgtgcggtgtggaggcc

SEQ ID NO: 171470 - DNA, 33 bp, Homo sapien
ttgctgactgattgaatgtgcggtgtggaggcc

SEQ ID NO: 171471 - DNA, 33 bp, Homo sapien
ttcaagcttcaggtgcaagtggacaggtgccta

SEQ ID NO: 171472 - DNA, 33 bp, Homo sapien
ttcaagcttcaggtgcgagtggacaggtgccta

SEQ ID NO: 171473 - DNA, 33 bp, Homo sapien
catccaggagatgacaaatgaccttgatcacta

SEQ ID NO: 171474 - DNA, 33 bp, Homo sapien
catccaggagatgacagatgaccttgatcacta

SEQ ID NO: 171475 - DNA, 33 bp, Homo sapien
aatagatagtgcaacaaatgggtatctcttacc

SEQ ID NO: 171476 - DNA, 33 bp, Homo sapien
aatagatagtgcaacagatgggtatctcttacc

SEQ ID NO: 171477 - DNA, 33 bp, Homo sapien
ttactgaaagaggccacgatcataaaagacatg

SEQ ID NO: 171478 - DNA, 33 bp, Homo sapien
ttactgaaagaggccatgatcataaaagacatg

SEQ ID NO: 171479 - DNA, 33 bp, Homo sapien
tattccaagaccagcaaatgttaagggaatttg

SEQ ID NO: 171480 - DNA, 33 bp, Homo sapien
tattccaagaccagcacatgttaagggaatttg

SEQ ID NO: 171481 - DNA, 33 bp, Homo sapien
tgagcatttctttgtaagtccagtctgatagtg

SEQ ID NO: 171482 - DNA, 33 bp, Homo sapien
tgagcatttctttgtatgtccagtctgatagtg

SEQ ID NO: 171483 - DNA, 33 bp, Homo sapien
ttgcatttcttgattgcatagttgctttattga

SEQ ID NO: 171484 - DNA, 33 bp, Homo sapien
ttgcatttcttgattgtatagttgctttattga

SEQ ID NO: 171485 - DNA, 33 bp, Homo sapien
acagatacctaataacaacacggcaagaaaaaa

SEQ ID NO: 171486 - DNA, 33 bp, Homo sapien
acagatacctaataaccacacggcaagaaaaaa

SEQ ID NO: 171487 - DNA, 33 bp, Homo sapien
aaatttaatgcaaggacaggcttaaaagtgcct

SEQ ID NO: 171488 - DNA, 33 bp, Homo sapien
aaatttaatgcaaggagaggcttaaaagtgcct

SEQ ID NO: 171489 - DNA, 33 bp, Homo sapien
ctaagtattatgctaaacacttcctagtcactt

SEQ ID NO: 171490 - DNA, 33 bp, Homo sapien
ctaagtattatgctaagcacttcctagtcactt

SEQ ID NO: 171491 - DNA, 33 bp, Homo sapien
cacatggaaataataaatattctggatgatgaa

SEQ ID NO: 171492 - DNA, 33 bp, Homo sapien
cacatggaaataataattattctggatgatgaa

SEQ ID NO: 171493 - DNA, 33 bp, Homo sapien
tgataacagctgcctcactatgttctgttcact

SEQ ID NO: 171494 - DNA, 33 bp, Homo sapien
tgataacagctgcctcgctatgttctgttcact

SEQ ID NO: 171495 - DNA, 33 bp, Homo sapien
gttgtatgcatgctaacttaaggcattctccct

SEQ ID NO: 171496 - DNA, 33 bp, Homo sapien
gttgtatgcatgctaatttaaggcattctccct

SEQ ID NO: 171497 - DNA, 33 bp, Homo sapien
ttgctctctcaaatccaagcattgctgtttttg

SEQ ID NO: 171498 - DNA, 33 bp, Homo sapien
ttgctctctcaaatcctagcattgctgtttttg

SEQ ID NO: 171499 - DNA, 33 bp, Homo sapien
ctaggttggtgcaaaaacaatcatggtccccac

SEQ ID NO: 171500 - DNA, 33 bp, Homo sapien
ctaggttggtgcaaaagcaatcatggtccccac

SEQ ID NO: 171501 - DNA, 33 bp, Homo sapien
tgaaaggggtgcagacagaagataaatggctac

SEQ ID NO: 171502 - DNA, 33 bp, Homo sapien
tgaaaggggtgcagaccgaagataaatggctac

SEQ ID NO: 171503 - DNA, 33 bp, Homo sapien
aatgaaattgtttgcacataattgtaaatactc

SEQ ID NO: 171504 - DNA, 33 bp, Homo sapien
aatgaaattgtttgcatataattgtaaatactc

SEQ ID NO: 171505 - DNA, 33 bp, Homo sapien
gaacaaaatatagatcacttgcagggcttacat

SEQ ID NO: 171506 - DNA, 33 bp, Homo sapien
gaacaaaatatagatcgcttgcagggcttacat

SEQ ID NO: 171507 - DNA, 33 bp, Homo sapien
aaatctcagagttcgcaactaaaaaactcattc

SEQ ID NO: 171508 - DNA, 33 bp, Homo sapien
aaatctcagagttcgctactaaaaaactcattc

SEQ ID NO: 171509 - DNA, 33 bp, Homo sapien
catttgttgaacatcacatttgtgttttcagtc

SEQ ID NO: 171510 - DNA, 33 bp, Homo sapien
catttgttgaacatcatatttgtgttttcagtc

SEQ ID NO: 171511 - DNA, 33 bp, Homo sapien
ggtagccacttcaataagctgagtagcactcac

SEQ ID NO: 171512 - DNA, 33 bp, Homo sapien
ggtagccacttcaataggctgagtagcactcac

SEQ ID NO: 171513 - DNA, 33 bp, Homo sapien
attatgctagctctgcacttgtcatactttgcc

SEQ ID NO: 171514 - DNA, 33 bp, Homo sapien
attatgctagctctgcgcttgtcatactttgcc

SEQ ID NO: 171515 - DNA, 33 bp, Homo sapien
ggcacgaaataatagcactctccttcaacttat

SEQ ID NO: 171516 - DNA, 33 bp, Homo sapien
ggcacgaaataatagcgctctccttcaacttat

SEQ ID NO: 171517 - DNA, 33 bp, Homo sapien
atgtctccctagaatgcataaaccaaattgttc

SEQ ID NO: 171518 - DNA, 33 bp, Homo sapien
atgtctccctagaatgtataaaccaaattgttc

SEQ ID NO: 171519 - DNA, 33 bp, Homo sapien
tttattttcctttcaccagaatttgttctcagg

SEQ ID NO: 171520 - DNA, 33 bp, Homo sapien
tttattttcctttcactagaatttgttctcagg

SEQ ID NO: 171521 - DNA, 33 bp, Homo sapien
gctgaaaaagacaagaacagacttggatgtata

SEQ ID NO: 171522 - DNA, 33 bp, Homo sapien
gctgaaaaagacaagagcagacttggatgtata

SEQ ID NO: 171523 - DNA, 33 bp, Homo sapien
ggcaaaatagaatcaacatcttcatcttcaaaa

SEQ ID NO: 171524 - DNA, 33 bp, Homo sapien
ggcaaaatagaatcaatatcttcatcttcaaaa

SEQ ID NO: 171525 - DNA, 33 bp, Homo sapien
caaattcaaaaggatacgcactggctttttctg

SEQ ID NO: 171526 - DNA, 33 bp, Homo sapien
caaattcaaaaggatatgcactggctttttctg

SEQ ID NO: 171527 - DNA, 33 bp, Homo sapien
tggaagaaggccaactcaattgtctatcttttt

SEQ ID NO: 171528 - DNA, 33 bp, Homo sapien
tggaagaaggccaactgaattgtctatcttttt

SEQ ID NO: 171529 - DNA, 33 bp, Homo sapien
atctcttctcgtctcaataggctatcatgctag

SEQ ID NO: 171530 - DNA, 33 bp, Homo sapien
atctcttctcgtctcagtaggctatcatgctag

SEQ ID NO: 171531 - DNA, 33 bp, Homo sapien
tttggtcattgattgaaaaagagtgagaaggct

SEQ ID NO: 171532 - DNA, 33 bp, Homo sapien
tttggtcattgattgagaaagagtgagaaggct

SEQ ID NO: 171533 - DNA, 33 bp, Homo sapien
tcatgactgtgaaaccaaatgactatatttatg

SEQ ID NO: 171534 - DNA, 33 bp, Homo sapien
tcatgactgtgaaaccgaatgactatatttatg

SEQ ID NO: 171535 - DNA, 33 bp, Homo sapien
aaacaatatactaagaagtttgaatgtacctgg

SEQ ID NO: 171536 - DNA, 33 bp, Homo sapien
aaacaatatactaagaggtttgaatgtacctgg

SEQ ID NO: 171537 - DNA, 33 bp, Homo sapien
tcagatttagagagcaccactgtctccccttat

SEQ ID NO: 171538 - DNA, 33 bp, Homo sapien
tcagatttagagagcatcactgtctccccttat

SEQ ID NO: 171539 - DNA, 33 bp, Homo sapien
tgagtaaattcctagacgcataaaacccaccaa

SEQ ID NO: 171540 - DNA, 33 bp, Homo sapien
tgagtaaattcctagatgcataaaacccaccaa

SEQ ID NO: 171541 - DNA, 33 bp, Homo sapien
tatatcagacacatgcgaacagtcactagaaca

SEQ ID NO: 171542 - DNA, 33 bp, Homo sapien
tatatcagacacatgctaacagtcactagaaca

SEQ ID NO: 171543 - DNA, 33 bp, Homo sapien
tgctgtcttggaaaccaagtgaagaaagtccat

SEQ ID NO: 171544 - DNA, 33 bp, Homo sapien
tgctgtcttggaaacccagtgaagaaagtccat

SEQ ID NO: 171545 - DNA, 33 bp, Homo sapien
gaatgtttgaatactcaaggaaattttagtaaa

SEQ ID NO: 171546 - DNA, 33 bp, Homo sapien
gaatgtttgaatactcgaggaaattttagtaaa

SEQ ID NO: 171547 - DNA, 33 bp, Homo sapien
tatttgaaacaatcatcagcaaattagttaata

SEQ ID NO: 171548 - DNA, 33 bp, Homo sapien
tatttgaaacaatcattagcaaattagttaata

SEQ ID NO: 171549 - DNA, 33 bp, Homo sapien
actcatgcaaggtgccaagtactgaaggagtgt

SEQ ID NO: 171550 - DNA, 33 bp, Homo sapien
actcatgcaaggtgcccagtactgaaggagtgt

SEQ ID NO: 171551 - DNA, 33 bp, Homo sapien
ttggacaatgccttaacatctggtatccagcag

SEQ ID NO: 171552 - DNA, 33 bp, Homo sapien
ttggacaatgccttaatatctggtatccagcag

SEQ ID NO: 171553 - DNA, 33 bp, Homo sapien
gtatactatggaatcacactagatgaatgtatt

SEQ ID NO: 171554 - DNA, 33 bp, Homo sapien
gtatactatggaatcagactagatgaatgtatt

SEQ ID NO: 171555 - DNA, 33 bp, Homo sapien
aacacttatgcatattcaaagactatatcccct

SEQ ID NO: 171556 - DNA, 33 bp, Homo sapien
aacacttatgcatatttaaagactatatcccct

SEQ ID NO: 171557 - DNA, 33 bp, Homo sapien; identical to SEQ ID NO: 171555

SEQ ID NO: 171558 - DNA, 33 bp, Homo sapien; identical to SEQ ID NO: 171556

SEQ ID NO: 171559 - DNA, 33 bp, Homo sapien
tacagagaggggtgaaatctatccttgcctttc

SEQ ID NO: 171560 - DNA, 33 bp, Homo sapien
tacagagaggggtgaattctatccttgcctttc

SEQ ID NO: 171561 - DNA, 33 bp, Homo sapien
atgtaaacctctacacacagctcagtgaatatt

SEQ ID NO: 171562 - DNA, 33 bp, Homo sapien
atgtaaacctctacacgcagctcagtgaatatt

SEQ ID NO: 171563 - DNA, 33 bp, Homo sapien
tctctcatccatcaagcccaaatataaatctca

SEQ ID NO: 171564 - DNA, 33 bp, Homo sapien
tctctcatccatcaagtccaaatataaatctca

SEQ ID NO: 171565 - DNA, 33 bp, Homo sapien
ttggtactaaaaatgacgtcaggttacttattc

SEQ ID NO: 171566 - DNA, 33 bp, Homo sapien
ttggtactaaaaatgatgtcaggttacttattc

SEQ ID NO: 171567 - DNA, 33 bp, Homo sapien
agtatctccaagtcaacatatcaaaagtagaat

SEQ ID NO: 171568 - DNA, 33 bp, Homo sapien
agtatctccaagtcaatatatcaaaagtagaat

SEQ ID NO: 171569 - DNA, 33 bp, Homo sapien
aaactattatggtgtaactttcctccaaccctc

SEQ ID NO: 171570 - DNA, 33 bp, Homo sapien
aaactattatggtgtagctttcctccaaccctc

SEQ ID NO: 171571 - DNA, 33 bp, Homo sapien
agtaagggtgataaaactgctttgcttcttgaa

SEQ ID NO: 171572 - DNA, 33 bp, Homo sapien
agtaagggtgataaaattgctttgcttcttgaa

SEQ ID NO: 171573 - DNA, 33 bp, Homo sapien
tcatgagatgcctgagcaggcaggcctggactg

SEQ ID NO: 171574 - DNA, 33 bp, Homo sapien
tcatgagatgcctgagtaggcaggcctggactg

SEQ ID NO: 171575 - DNA, 33 bp, Homo sapien
tagaagtcctagtagacaaaacaaccaccactc

SEQ ID NO: 171576 - DNA, 33 bp, Homo sapien
tagaagtcctagtagagaaaacaaccaccactc

SEQ ID NO: 171577 - DNA, 33 bp, Homo sapien
gggggttggccaaagcaacagaataatggaagt

SEQ ID NO: 171578 - DNA, 33 bp, Homo sapien
gggggttggccaaagcgacagaataatggaagt

SEQ ID NO: 171579 - DNA, 33 bp, Homo sapien
gtagtggatccaagcacggttcctgtaacttga

SEQ ID NO: 171580 - DNA, 33 bp, Homo sapien
gtagtggatccaagcatggttcctgtaacttga

SEQ ID NO: 171581 - DNA, 33 bp, Homo sapien
tcaccaggtttgaaacagtatacagtgtctgtc

SEQ ID NO: 171582 - DNA, 33 bp, Homo sapien
tcaccaggtttgaaacggtatacagtgtctgtc

SEQ ID NO: 171583 - DNA, 33 bp, Homo sapien
gagctcaagaaaagtgaagcacatgaactggac

SEQ ID NO: 171584 - DNA, 33 bp, Homo sapien
gagctcaagaaaagtggagcacatgaactggac

SEQ ID NO: 171585 - DNA, 33 bp, Homo sapien
gggcaccaaaaatcaggaacactagaagctaaa

SEQ ID NO: 171586 - DNA, 33 bp, Homo sapien
gggcaccaaaaatcagtaacactagaagctaaa

SEQ ID NO: 171587 - DNA, 33 bp, Homo sapien
ttcttttcactcatggacatacaaaaagaaagg

SEQ ID NO: 171588 - DNA, 33 bp, Homo sapien
ttcttttcactcatgggcatacaaaaagaaagg

SEQ ID NO: 171589 - DNA, 33 bp, Homo sapien
gatttcagattgcagaaatgtacagccatagga

SEQ ID NO: 171590 - DNA, 33 bp, Homo sapien
gatttcagattgcagatatgtacagccatagga

SEQ ID NO: 171591 - DNA, 33 bp, Homo sapien
ccttacacttccttcaaagcttgccttacaagg

SEQ ID NO: 171592 - DNA, 33 bp, Homo sapien
ccttacacttccttcatagcttgccttacaagg

SEQ ID NO: 171593 - DNA, 33 bp, Homo sapien
aattagctctataatacacgggtgaaacattac

SEQ ID NO: 171594 - DNA, 33 bp, Homo sapien
aattagctctataatatacgggtgaaacattac

SEQ ID NO: 171595 - DNA, 33 bp, Homo sapien
aatggggaacaggagacgaaagaatcagaaaga

SEQ ID NO: 171596 - DNA, 33 bp, Homo sapien
aatggggaacaggagatgaaagaatcagaaaga

SEQ ID NO: 171597 - DNA, 33 bp, Homo sapien
cctagaacattttaaaactctctgatgtcttct

SEQ ID NO: 171598 - DNA, 33 bp, Homo sapien
cctagaacattttaaagctctctgatgtcttct

SEQ ID NO: 171599 - DNA, 33 bp, Homo sapien
gaactaagctaggcccagagagccctgaggttg

SEQ ID NO: 171600 - DNA, 33 bp, Homo sapien
gaactaagctaggcccggagagccctgaggttg

SEQ ID NO: 171601 - DNA, 33 bp, Homo sapien
aacgttagcacctaccgcttaaagttgctatgg

SEQ ID NO: 171602 - DNA, 33 bp, Homo sapien
aacgttagcacctacctcttaaagttgctatgg

SEQ ID NO: 171603 - DNA, 33 bp, Homo sapien
gtgtaaagcataggacccttctgggaaaggggg

SEQ ID NO: 171604 - DNA, 33 bp, Homo sapien
gtgtaaagcataggactcttctgggaaaggggg

SEQ ID NO: 171605 - DNA, 33 bp, Homo sapien; identical to SEQ ID NO: 171603

SEQ ID NO: 171606 - DNA, 33 bp, Homo sapien; identical to SEQ ID NO: 171604

SEQ ID NO: 171607 - DNA, 33 bp, Homo sapien
tgggtgtctgagatatcagaacagtggcttaga

SEQ ID NO: 171608 - DNA, 33 bp, Homo sapien
tgggtgtctgagatattagaacagtggcttaga

SEQ ID NO: 171609 - DNA, 33 bp, Homo sapien
gattggtattggaggaccatttttcgacaattt

SEQ ID NO: 171610 - DNA, 33 bp, Homo sapien
gattggtattggaggagcatttttcgacaattt

SEQ ID NO: 171611 - DNA, 33 bp, Homo sapien
ggaatcagttcagtgaatagaaaggtatccaag

SEQ ID NO: 171612 - DNA, 33 bp, Homo sapien
ggaatcagttcagtgagtagaaaggtatccaag

SEQ ID NO: 171613 - DNA, 33 bp, Homo sapien
aaaacacagggtatggacaattttagttgacag

SEQ ID NO: 171614 - DNA, 33 bp, Homo sapien
aaaacacagggtatgggcaattttagttgacag

SEQ ID NO: 171615 - DNA, 33 bp, Homo sapien
gataacaagggaagggacaatgttaagggacca

SEQ ID NO: 171616 - DNA, 33 bp, Homo sapien
gataacaagggaaggggcaatgttaagggacca

SEQ ID NO: 171617 - DNA, 33 bp, Homo sapien
tcagaggattacaagacgtttaaatgagatatt

SEQ ID NO: 171618 - DNA, 33 bp, Homo sapien
tcagaggattacaagaggtttaaatgagatatt

SEQ ID NO: 171619 - DNA, 33 bp, Homo sapien
agatgattcttatgtccatgatgtattagtttt

SEQ ID NO: 171620 - DNA, 33 bp, Homo sapien
agatgattcttatgtctatgatgtattagtttt

SEQ ID NO: 171621 - DNA, 33 bp, Homo sapien
gaaaaccaaattttcactcctagccacaaaatt

SEQ ID NO: 171622 - DNA, 33 bp, Homo sapien
gaaaaccaaattttcattcctagccacaaaatt

SEQ ID NO: 171623 - DNA, 33 bp, Homo sapien
ccataaaaacagccaaaaaatattgtacaacac

SEQ ID NO: 171624 - DNA, 33 bp, Homo sapien
ccataaaaacagccaagaaatattgtacaacac

SEQ ID NO: 171625 - DNA, 33 bp, Homo sapien
cttcttctgcacagacccttcacgtatgtcggg

SEQ ID NO: 171626 - DNA, 33 bp, Homo sapien
cttcttctgcacagactcttcacgtatgtcggg

SEQ ID NO: 171627 - DNA, 33 bp, Homo sapien
aagcattctaaaaaccacatttctaaccttcac

SEQ ID NO: 171628 - DNA, 33 bp, Homo sapien
aagcattctaaaaaccccatttctaaccttcac

SEQ ID NO: 171629 - DNA, 33 bp, Homo sapien
atgttaatgggagaaacagtggactagaattag

SEQ ID NO: 171630 - DNA, 33 bp, Homo sapien
atgttaatgggagaaagagtggactagaattag

SEQ ID NO: 171631 - DNA, 33 bp, Homo sapien; identical to SEQ ID NO: 171629

SEQ ID NO: 171632 - DNA, 33 bp, Homo sapien; identical to SEQ ID NO: 171630

SEQ ID NO: 171633 - DNA, 33 bp, Homo sapien
ggtgctgagcttaataaactgttgagtaacact

SEQ ID NO: 171634 - DNA, 33 bp, Homo sapien
ggtgctgagcttaatatactgttgagtaacact

SEQ ID NO: 171635 - DNA, 33 bp, Homo sapien
atctcaacctctaataccctaatatctgactcc

SEQ ID NO: 171636 - DNA, 33 bp, Homo sapien
atctcaacctctaatagcctaatatctgactcc

SEQ ID NO: 171637 - DNA, 33 bp, Homo sapien
tgcagatagtagaaaaacctaattgataatttt

SEQ ID NO: 171638 - DNA, 33 bp, Homo sapien
tgcagatagtagaaaatcctaattgataatttt

SEQ ID NO: 171639 - DNA, 33 bp, Homo sapien
tattactaatttaaccaccttactcattattgg

SEQ ID NO: 171640 - DNA, 33 bp, Homo sapien
tattactaatttaacctccttactcattattgg

SEQ ID NO: 171641 - DNA, 33 bp, Homo sapien
tgaatgccacatgttaacactcttcccgtaagc

SEQ ID NO: 171642 - DNA, 33 bp, Homo sapien
tgaatgccacatgttaccactcttcccgtaagc

SEQ ID NO: 171643 - DNA, 33 bp, Homo sapien
atcagaactctttatgaaacttgattgatagaa

SEQ ID NO: 171644 - DNA, 33 bp, Homo sapien
atcagaactctttatgcaacttgattgatagaa

SEQ ID NO: 171645 - DNA, 33 bp, Homo sapien
gatgtccaatgattgaaagttgttatttcacag

SEQ ID NO: 171646 - DNA, 33 bp, Homo sapien
gatgtccaatgattgagagttgttatttcacag

SEQ ID NO: 171647 - DNA, 33 bp, Homo sapien
aaaattaatactgtcaaaatgacaacaatgccc

SEQ ID NO: 171648 - DNA, 33 bp, Homo sapien
aaaattaatactgtcagaatgacaacaatgccc

SEQ ID NO: 171649 - DNA, 33 bp, Homo sapien
tttcatcttctgttccccatttttctacaccaa

SEQ ID NO: 171650 - DNA, 33 bp, Homo sapien
tttcatcttctgttccgcatttttctacaccaa

SEQ ID NO: 171651 - DNA, 33 bp, Homo sapien
agacctaaagatcaaagaatcactctatcccaa

SEQ ID NO: 171652 - DNA, 33 bp, Homo sapien
agacctaaagatcaaataatcactctatcccaa

SEQ ID NO: 171653 - DNA, 33 bp, Homo sapien
gcagactcctttgcataagcctttcagaccagc

SEQ ID NO: 171654 - DNA, 33 bp, Homo sapien
gcagactcctttgcatcagcctttcagaccagc

SEQ ID NO: 171655 - DNA, 33 bp, Homo sapien
aaagctaaaggcacagacacaatgatatctgac

SEQ ID NO: 171656 - DNA, 33 bp, Homo sapien
aaagctaaaggcacaggcacaatgatatctgac

SEQ ID NO: 171657 - DNA, 33 bp, Homo sapien
catttcaagttaggtaaaaggtaggagtccaac

SEQ ID NO: 171658 - DNA, 33 bp, Homo sapien
catttcaagttaggtataaggtaggagtccaac

SEQ ID NO: 171659 - DNA, 33 bp, Homo sapien
tgacttgaacaatccacatgtaaaacaaaaatg

SEQ ID NO: 171660 - DNA, 33 bp, Homo sapien
tgacttgaacaatccatatgtaaaacaaaaatg

SEQ ID NO: 171661 - DNA, 33 bp, Homo sapien
agtattctatccaatactaaaatgggagttaca

SEQ ID NO: 171662 - DNA, 33 bp, Homo sapien
agtattctatccaatagtaaaatgggagttaca

SEQ ID NO: 171663 - DNA, 33 bp, Homo sapien
ttaaggttatacctcacctttggttgtacagtt

SEQ ID NO: 171664 - DNA, 33 bp, Homo sapien
ttaaggttatacctcatctttggttgtacagtt

SEQ ID NO: 171665 - DNA, 33 bp, Homo sapien
atgaaaaagcattatactaggaagaagtaagcc

SEQ ID NO: 171666 - DNA, 33 bp, Homo sapien
atgaaaaagcattatagtaggaagaagtaagcc

SEQ ID NO: 171667 - DNA, 33 bp, Homo sapien
tctagctgcaaattcccgcggatgctatgcaaa

SEQ ID NO: 171668 - DNA, 33 bp, Homo sapien
tctagctgcaaattcctgcggatgctatgcaaa

SEQ ID NO: 171669 - DNA, 33 bp, Homo sapien
tgagatttgttccaggacctctcttggatacca

SEQ ID NO: 171670 - DNA, 33 bp, Homo sapien
tgagatttgttccagggcctctcttggatacca

SEQ ID NO: 171671 - DNA, 33 bp, Homo sapien
acaaataatccagagacgatttaaagtatacag

SEQ ID NO: 171672 - DNA, 33 bp, Homo sapien
acaaataatccagagatgatttaaagtatacag

SEQ ID NO: 171673 - DNA, 33 bp, Homo sapien
cccaaggagctccatccataacgttactttagc

SEQ ID NO: 171674 - DNA, 33 bp, Homo sapien
cccaaggagctccatctataacgttactttagc

SEQ ID NO: 171675 - DNA, 33 bp, Homo sapien
acatttgctggtagcccgcttatctagtttaga

SEQ ID NO: 171676 - DNA, 33 bp, Homo sapien
acatttgctggtagcctgcttatctagtttaga

SEQ ID NO: 171677 - DNA, 33 bp, Homo sapien
ggcattttcttttgagacagcccaactaaattt

SEQ ID NO: 171678 - DNA, 33 bp, Homo sapien
ggcattttcttttgagtcagcccaactaaattt

SEQ ID NO: 171679 - DNA, 33 bp, Homo sapien
caatctggccaaccaggaaataatccaatcccc

SEQ ID NO: 171680 - DNA, 33 bp, Homo sapien
caatctggccaaccagtaaataatccaatcccc

SEQ ID NO: 171681 - DNA, 33 bp, Homo sapien
gtcctgagaataatgacgaccaaaaatgtctcc

SEQ ID NO: 171682 - DNA, 33 bp, Homo sapien
gtcctgagaataatgatgaccaaaaatgtctcc

SEQ ID NO: 171683 - DNA, 33 bp, Homo sapien
aggcagtctgattttcacattcacagcctgaaa

SEQ ID NO: 171684 - DNA, 33 bp, Homo sapien
aggcagtctgattttcgcattcacagcctgaaa

SEQ ID NO: 171685 - DNA, 33 bp, Homo sapien
tcccaccttcccacacactgtgatacttcaaac

SEQ ID NO: 171686 - DNA, 33 bp, Homo sapien
tcccaccttcccacacgctgtgatacttcaaac

SEQ ID NO: 171687 - DNA, 33 bp, Homo sapien
aatgttaaggatgcaactgggagcttcactaag

SEQ ID NO: 171688 - DNA, 33 bp, Homo sapien
aatgttaaggatgcaattgggagcttcactaag

SEQ ID NO: 171689 - DNA, 33 bp, Homo sapien
aaatacagagtaataacgcaaggggtgctattg

SEQ ID NO: 171690 - DNA, 33 bp, Homo sapien
aaatacagagtaataatgcaaggggtgctattg

SEQ ID NO: 171691 - DNA, 33 bp, Homo sapien
aatcccatttcgaaggaagatttggaaaagaca

SEQ ID NO: 171692 - DNA, 33 bp, Homo sapien
aatcccatttcgaagggagatttggaaaagaca

SEQ ID NO: 171693 - DNA, 33 bp, Homo sapien
atgttttccctccagaggcaatggcctactatg

SEQ ID NO: 171694 - DNA, 33 bp, Homo sapien
atgttttccctccagatgcaatggcctactatg

SEQ ID NO: 171695 - DNA, 33 bp, Homo sapien
gctacctgtgctcaggaataaagaaaatgccag

SEQ ID NO: 171696 - DNA, 33 bp, Homo sapien
gctacctgtgctcagggataaagaaaatgccag

SEQ ID NO: 171697 - DNA, 33 bp, Homo sapien
ggtgtggttccaataagatatccctggagtcaa

SEQ ID NO: 171698 - DNA, 33 bp, Homo sapien
ggtgtggttccaataatatatccctggagtcaa

SEQ ID NO: 171699 - DNA, 33 bp, Homo sapien
atttctcatcactggacgtgtgtaagcagaaga

SEQ ID NO: 171700 - DNA, 33 bp, Homo sapien
atttctcatcactggatgtgtgtaagcagaaga

SEQ ID NO: 171701 - DNA, 33 bp, Homo sapien
catacatacatacataaatacattgtcttcttc

SEQ ID NO: 171702 - DNA, 33 bp, Homo sapien
catacatacatacatacatacattgtcttcttc

SEQ ID NO: 171703 - DNA, 33 bp, Homo sapien
tttaagaatttggagagaatttgcatttgcttt

SEQ ID NO: 171704 - DNA, 33 bp, Homo sapien
tttaagaatttggagataatttgcatttgcttt

SEQ ID NO: 171705 - DNA, 33 bp, Homo sapien
aggtctccgcttaaaaacaggcaaagtttagga

SEQ ID NO: 171706 - DNA, 33 bp, Homo sapien
aggtctccgcttaaaatcaggcaaagtttagga

SEQ ID NO: 171707 - DNA, 33 bp, Homo sapien
aataatcccagcccaaacaaagtaccgctacct

SEQ ID NO: 171708 - DNA, 33 bp, Homo sapien
aataatcccagcccaatcaaagtaccgctacct

SEQ ID NO: 171709 - DNA, 33 bp, Homo sapien
tgaggtcatctatgtgcatggaccggcccctag

SEQ ID NO: 171710 - DNA, 33 bp, Homo sapien
tgaggtcatctatgtgtatggaccggcccctag

SEQ ID NO: 171711 - DNA, 33 bp, Homo sapien
cagaaagactctaaccccatctaagcccactca

SEQ ID NO: 171712 - DNA, 33 bp, Homo sapien
cagaaagactctaacctcatctaagcccactca

SEQ ID NO: 171713 - DNA, 33 bp, Homo sapien
aggttaccagttagggacccaggacttggaagg

SEQ ID NO: 171714 - DNA, 33 bp, Homo sapien
aggttaccagttaggggcccaggacttggaagg

SEQ ID NO: 171715 - DNA, 33 bp, Homo sapien
tttcaggagagtgaagactcaacaggatctact

SEQ ID NO: 171716 - DNA, 33 bp, Homo sapien
tttcaggagagtgaaggctcaacaggatctact

SEQ ID NO: 171717 - DNA, 33 bp, Homo sapien
ctctgtttaagccagcaaagcaaactggtcagt

SEQ ID NO: 171718 - DNA, 33 bp, Homo sapien
ctctgtttaagccagccaagcaaactggtcagt

SEQ ID NO: 171719 - DNA, 33 bp, Homo sapien
agactctaactcctctaaagctggcctctaacc

SEQ ID NO: 171720 - DNA, 33 bp, Homo sapien
agactctaactcctctgaagctggcctctaacc

SEQ ID NO: 171721 - DNA, 33 bp, Homo sapien
ggagaggggatccaagcaaagcgccaggcttgt

SEQ ID NO: 171722 - DNA, 33 bp, Homo sapien
ggagaggggatccaaggaaagcgccaggcttgt

SEQ ID NO: 171723 - DNA, 33 bp, Homo sapien
ccctttgtacaattcacacccatttacagcttc

SEQ ID NO: 171724 - DNA, 33 bp, Homo sapien
ccctttgtacaattcagacccatttacagcttc

SEQ ID NO: 171725 - DNA, 33 bp, Homo sapien
gctttctttccccacagatttagattccattaa

SEQ ID NO: 171726 - DNA, 33 bp, Homo sapien
gctttctttccccacatatttagattccattaa

SEQ ID NO: 171727 - DNA, 33 bp, Homo sapien
tggctattgatttatgcagttgacttgaataag

SEQ ID NO: 171728 - DNA, 33 bp, Homo sapien
tggctattgatttatgtagttgacttgaataag

SEQ ID NO: 171729 - DNA, 33 bp, Homo sapien
ttttacaggtgaaaaaaaagaagatagcagtgt

SEQ ID NO: 171730 - DNA, 33 bp, Homo sapien
ttttacaggtgaaaaagaagaagatagcagtgt

SEQ ID NO: 171731 - DNA, 33 bp, Homo sapien
ccagaaacgttgctcaataaagaacaatatatg

SEQ ID NO: 171732 - DNA, 33 bp, Homo sapien
ccagaaacgttgctcagtaaagaacaatatatg

SEQ ID NO: 171733 - DNA, 33 bp, Homo sapien
ctccagaaaagtagaactaccttgtgcactcat

SEQ ID NO: 171734 - DNA, 33 bp, Homo sapien
ctccagaaaagtagaattaccttgtgcactcat

SEQ ID NO: 171735 - DNA, 33 bp, Homo sapien
taaacttaggccagagaaattcagaaacacagc

SEQ ID NO: 171736 - DNA, 33 bp, Homo sapien
taaacttaggccagaggaattcagaaacacagc

SEQ ID NO: 171737 - DNA, 33 bp, Homo sapien
acttgagggttgcaaagacctaatgctcacccc

SEQ ID NO: 171738 - DNA, 33 bp, Homo sapien
acttgagggttgcaaatacctaatgctcacccc

SEQ ID NO: 171739 - DNA, 33 bp, Homo sapien
aaatgcacacatatcaatattaaccttgaatgt

SEQ ID NO: 171740 - DNA, 33 bp, Homo sapien
aaatgcacacatatcagtattaaccttgaatgt

SEQ ID NO: 171741 - DNA, 33 bp, Homo sapien
gaagtcataaaggaaagaatttgagcaacatat

SEQ ID NO: 171742 - DNA, 33 bp, Homo sapien
gaagtcataaaggaaataatttgagcaacatat

SEQ ID NO: 171743 - DNA, 33 bp, Homo sapien
ttcactcacagcaaaaacgatgaccacaacttc

SEQ ID NO: 171744 - DNA, 33 bp, Homo sapien
ttcactcacagcaaaagcgatgaccacaacttc

SEQ ID NO: 171745 - DNA, 33 bp, Homo sapien
acccgggttctcatcaaggaaactgacttttta

SEQ ID NO: 171746 - DNA, 33 bp, Homo sapien
acccgggttctcatcatggaaactgacttttta

SEQ ID NO: 171747 - DNA, 33 bp, Homo sapien
acatgaaatgtggagaaggaagactagattggt

SEQ ID NO: 171748 - DNA, 33 bp, Homo sapien
acatgaaatgtggagagggaagactagattggt

SEQ ID NO: 171749 - DNA, 33 bp, Homo sapien
catgatttctgtgggccctatatgatcaaccac

SEQ ID NO: 171750 - DNA, 33 bp, Homo sapien
catgatttctgtgggctctatatgatcaaccac

SEQ ID NO: 171751 - DNA, 33 bp, Homo sapien
atcccacagaagacaaagtactgagtggcacag

SEQ ID NO: 171752 - DNA, 33 bp, Homo sapien
atcccacagaagacaaggtactgagtggcacag

SEQ ID NO: 171753 - DNA, 33 bp, Homo sapien
tgcttgttgaccaaaaaagaatccatctaataa

SEQ ID NO: 171754 - DNA, 33 bp, Homo sapien
tgcttgttgaccaaaagagaatccatctaataa

SEQ ID NO: 171755 - DNA, 33 bp, Homo sapien
aatcagatgagtttgaagtgtccctttggattt

SEQ ID NO: 171756 - DNA, 33 bp, Homo sapien
aatcagatgagtttgaggtgtccctttggattt

SEQ ID NO: 171757 - DNA, 33 bp, Homo sapien
tatataatgctcttaagaaaagtcattgcacaa

SEQ ID NO: 171758 - DNA, 33 bp, Homo sapien
tatataatgctcttaataaaagtcattgcacaa

SEQ ID NO: 171759 - DNA, 33 bp, Homo sapien
attctcctaatagactcaagaagtggcagcgtt

SEQ ID NO: 171760 - DNA, 33 bp, Homo sapien
attctcctaatagacttaagaagtggcagcgtt

SEQ ID NO: 171761 - DNA, 33 bp, Homo sapien
atttgtaaaatggggcaagaaacgctgccactt

SEQ ID NO: 171762 - DNA, 33 bp, Homo sapien
atttgtaaaatggggcgagaaacgctgccactt

SEQ ID NO: 171763 - DNA, 33 bp, Homo sapien
gcacagcagtttgggactcaggacttaagatag

SEQ ID NO: 171764 - DNA, 33 bp, Homo sapien
gcacagcagtttgggattcaggacttaagatag

SEQ ID NO: 171765 - DNA, 33 bp, Homo sapien
aatgtgatgggaaatacattggttactaaggta

SEQ ID NO: 171766 - DNA, 33 bp, Homo sapien
aatgtgatgggaaatatattggttactaaggta

SEQ ID NO: 171767 - DNA, 33 bp, Homo sapien
aaacaatagaatgtaaataaggaactgttaaga

SEQ ID NO: 171768 - DNA, 33 bp, Homo sapien
aaacaatagaatgtaagtaaggaactgttaaga

SEQ ID NO: 171769 - DNA, 33 bp, Homo sapien
tgatcattagagcgtcacaggacttcagagata

SEQ ID NO: 171770 - DNA, 33 bp, Homo sapien
tgatcattagagcgtcccaggacttcagagata

SEQ ID NO: 171771 - DNA, 33 bp, Homo sapien
cttactttggcttaccagaattctagtgtgtat

SEQ ID NO: 171772 - DNA, 33 bp, Homo sapien
cttactttggcttaccggaattctagtgtgtat

SEQ ID NO: 171773 - DNA, 33 bp, Homo sapien
ccacactaatgtgaagcagtttttcttcctgga

SEQ ID NO: 171774 - DNA, 33 bp, Homo sapien
ccacactaatgtgaaggagtttttcttcctgga

SEQ ID NO: 171775 - DNA, 33 bp, Homo sapien
gatctgtgccatgcagccattgtaggagatggt

SEQ ID NO: 171776 - DNA, 33 bp, Homo sapien
gatctgtgccatgcagtcattgtaggagatggt

SEQ ID NO: 171777 - DNA, 33 bp, Homo sapien
agcaaagtggaagaaaaagatctgtgccatgca

SEQ ID NO: 171778 - DNA, 33 bp, Homo sapien
agcaaagtggaagaaagagatctgtgccatgca

SEQ ID NO: 171779 - DNA, 33 bp, Homo sapien
tgaatgcaaaccaccactcacccaagaagccac

SEQ ID NO: 171780 - DNA, 33 bp, Homo sapien
tgaatgcaaaccaccagtcacccaagaagccac

SEQ ID NO: 171781 - DNA, 33 bp, Homo sapien
acctaacaaagtgttacgcttcccagtttccag

SEQ ID NO: 171782 - DNA, 33 bp, Homo sapien
acctaacaaagtgttatgcttcccagtttccag

SEQ ID NO: 171783 - DNA, 33 bp, Homo sapien
tcttagcctgtgttcgccaagatccttctcagt

SEQ ID NO: 171784 - DNA, 33 bp, Homo sapien
tcttagcctgtgttcgtcaagatccttctcagt

SEQ ID NO: 171785 - DNA, 33 bp, Homo sapien
cacatcatgacttatacgtattggcctttgagt

SEQ ID NO: 171786 - DNA, 33 bp, Homo sapien
cacatcatgacttatatgtattggcctttgagt

SEQ ID NO: 171787 - DNA, 33 bp, Homo sapien
tgaggctttaacaacactaggatgaataaaaca

SEQ ID NO: 171788 - DNA, 33 bp, Homo sapien
tgaggctttaacaacattaggatgaataaaaca

SEQ ID NO: 171789 - DNA, 33 bp, Homo sapien
ctgttccactggtctacgtgcttatttttatac

SEQ ID NO: 171790 - DNA, 33 bp, Homo sapien
ctgttccactggtctatgtgcttatttttatac

SEQ ID NO: 171791 - DNA, 33 bp, Homo sapien
ttcattacgctgattgaaagtttctatggacat

SEQ ID NO: 171792 - DNA, 33 bp, Homo sapien
ttcattacgctgattgtaagtttctatggacat

SEQ ID NO: 171793 - DNA, 33 bp, Homo sapien
tggatccagacaaatcggaatctgttttggaat

SEQ ID NO: 171794 - DNA, 33 bp, Homo sapien
tggatccagacaaatctgaatctgttttggaat

SEQ ID NO: 171795 - DNA, 33 bp, Homo sapien
agactcctgattcagacgtattaaataggcaat

SEQ ID NO: 171796 - DNA, 33 bp, Homo sapien
agactcctgattcagatgtattaaataggcaat

SEQ ID NO: 171797 - DNA, 33 bp, Homo sapien
agtgaatatagccccacgatgcatttttttgtt

SEQ ID NO: 171798 - DNA, 33 bp, Homo sapien
agtgaatatagccccatgatgcatttttttgtt

SEQ ID NO: 171799 - DNA, 33 bp, Homo sapien
atgatgttcatgaccaaggacgtttcaagtaat

SEQ ID NO: 171800 - DNA, 33 bp, Homo sapien
atgatgttcatgaccacggacgtttcaagtaat

SEQ ID NO: 171801 - DNA, 33 bp, Homo sapien
cttgtcactactttacactaatcagattttttg

SEQ ID NO: 171802 - DNA, 33 bp, Homo sapien
cttgtcactactttacgctaatcagattttttg

SEQ ID NO: 171803 - DNA, 33 bp, Homo sapien
atcaggttatgttgcacgtttagacacggtcat

SEQ ID NO: 171804 - DNA, 33 bp, Homo sapien
atcaggttatgttgcatgtttagacacggtcat

SEQ ID NO: 171805 - DNA, 33 bp, Homo sapien
ggggaccacagaagtacatttaacaagctttag

SEQ ID NO: 171806 - DNA, 33 bp, Homo sapien
ggggaccacagaagtatatttaacaagctttag

SEQ ID NO: 171807 - DNA, 33 bp, Homo sapien
gtttgttataacaggacctaaccattatttatc

SEQ ID NO: 171808 - DNA, 33 bp, Homo sapien
gtttgttataacaggatctaaccattatttatc

SEQ ID NO: 171809 - DNA, 33 bp, Homo sapien
ataccttagctaggacactgtgttctataatac

SEQ ID NO: 171810 - DNA, 33 bp, Homo sapien
ataccttagctaggacgctgtgttctataatac

SEQ ID NO: 171811 - DNA, 33 bp, Homo sapien
taaacaaagaaaactaagcatagataggttggg

SEQ ID NO: 171812 - DNA, 33 bp, Homo sapien
taaacaaagaaaactaggcatagataggttggg

SEQ ID NO: 171813 - DNA, 33 bp, Homo sapien
ataagcataggaatgcaaatactatcaaattgt

SEQ ID NO: 171814 - DNA, 33 bp, Homo sapien
ataagcataggaatgcgaatactatcaaattgt

SEQ ID NO: 171815 - DNA, 33 bp, Homo sapien
atcacctagaatcagacgtatatgctcagtagc

SEQ ID NO: 171816 - DNA, 33 bp, Homo sapien
atcacctagaatcagatgtatatgctcagtagc

SEQ ID NO: 171817 - DNA, 33 bp, Homo sapien
ctgagaacagagaatccacactgaggtagacca

SEQ ID NO: 171818 - DNA, 33 bp, Homo sapien
ctgagaacagagaatctacactgaggtagacca

SEQ ID NO: 171819 - DNA, 33 bp, Homo sapien
aatataccaaacagccaccaaaacaaagaatta

SEQ ID NO: 171820 - DNA, 33 bp, Homo sapien
aatataccaaacagccgccaaaacaaagaatta

SEQ ID NO: 171821 - DNA, 33 bp, Homo sapien
acagcataatgatgacaaacaaaatctgtgcat

SEQ ID NO: 171822 - DNA, 33 bp, Homo sapien
acagcataatgatgaccaacaaaatctgtgcat

SEQ ID NO: 171823 - DNA, 33 bp, Homo sapien
caaggacgggtacatcaagagctacgaataacc

SEQ ID NO: 171824 - DNA, 33 bp, Homo sapien
caaggacgggtacatccagagctacgaataacc

SEQ ID NO: 171825 - DNA, 33 bp, Homo sapien
tcagcaacatgctttacagtatgcaatatataa

SEQ ID NO: 171826 - DNA, 33 bp, Homo sapien
tcagcaacatgctttagagtatgcaatatataa

SEQ ID NO: 171827 - DNA, 33 bp, Homo sapien
gtttaggactactagcgaaagacaaactcatta

SEQ ID NO: 171828 - DNA, 33 bp, Homo sapien
gtttaggactactagctaaagacaaactcatta

SEQ ID NO: 171829 - DNA, 33 bp, Homo sapien
acttaaaatctaagagaaagttgtatgctaatg

SEQ ID NO: 171830 - DNA, 33 bp, Homo sapien
acttaaaatctaagaggaagttgtatgctaatg

SEQ ID NO: 171831 - DNA, 33 bp, Homo sapien
aactaatacataaatcaaccaaactaggcagtg

SEQ ID NO: 171832 - DNA, 33 bp, Homo sapien
aactaatacataaatcgaccaaactaggcagtg

SEQ ID NO: 171833 - DNA, 33 bp, Homo sapien
caccaaccaactataccatatctggcaaacatg

SEQ ID NO: 171834 - DNA, 33 bp, Homo sapien
caccaaccaactatactatatctggcaaacatg

SEQ ID NO: 171835 - DNA, 33 bp, Homo sapien
acttacttttggttaccatcatcgtggaatatc

SEQ ID NO: 171836 - DNA, 33 bp, Homo sapien
acttacttttggttactatcatcgtggaatatc

SEQ ID NO: 171837 - DNA, 33 bp, Homo sapien
ttaagtgtcttgtagacgatatatagttggatc

SEQ ID NO: 171838 - DNA, 33 bp, Homo sapien
ttaagtgtcttgtagatgatatatagttggatc

SEQ ID NO: 171839 - DNA, 33 bp, Homo sapien
gattgtgtcctgctggcagtcatggcttatgac

SEQ ID NO: 171840 - DNA, 33 bp, Homo sapien
gattgtgtcctgctggtagtcatggcttatgac

SEQ ID NO: 171841 - DNA, 33 bp, Homo sapien
cgggatgtggcacccaaatgtttttctttgtct

SEQ ID NO: 171842 - DNA, 33 bp, Homo sapien
cgggatgtggcacccagatgtttttctttgtct

SEQ ID NO: 171843 - DNA, 33 bp, Homo sapien
atctttagaagccacaaatacctatgttccgag

SEQ ID NO: 171844 - DNA, 33 bp, Homo sapien
atctttagaagccacagatacctatgttccgag

SEQ ID NO: 171845 - DNA, 33 bp, Homo sapien
tatttgaataggtaccaatatatcttccctgac

SEQ ID NO: 171846 - DNA, 33 bp, Homo sapien
tatttgaataggtaccgatatatcttccctgac

SEQ ID NO: 171847 - DNA, 33 bp, Homo sapien
ttaattgctttgccaacttctatttccctaact

SEQ ID NO: 171848 - DNA, 33 bp, Homo sapien
ttaattgctttgccaagttctatttccctaact

SEQ ID NO: 171849 - DNA, 33 bp, Homo sapien
cgcaaaagaagatgtacgatcagccaaaaaaca

SEQ ID NO: 171850 - DNA, 33 bp, Homo sapien
cgcaaaagaagatgtatgatcagccaaaaaaca

SEQ ID NO: 171851 - DNA, 33 bp, Homo sapien
atgcattcagctaagaaaaagcactaggccttc

SEQ ID NO: 171852 - DNA, 33 bp, Homo sapien
atgcattcagctaagagaaagcactaggccttc

SEQ ID NO: 171853 - DNA, 33 bp, Homo sapien
cagtttggtccgggaacagtaggagtgtcctct

SEQ ID NO: 171854 - DNA, 33 bp, Homo sapien
cagtttggtccgggaagagtaggagtgtcctct

SEQ ID NO: 171855 - DNA, 33 bp, Homo sapien
ggattgctggatgaaacagtagttctacttcta

SEQ ID NO: 171856 - DNA, 33 bp, Homo sapien
ggattgctggatgaaagagtagttctacttcta

SEQ ID NO: 171857 - DNA, 33 bp, Homo sapien
ttgtttcactctaggacgccccagatgaagtgc

SEQ ID NO: 171858 - DNA, 33 bp, Homo sapien
ttgtttcactctaggatgccccagatgaagtgc

SEQ ID NO: 171859 - DNA, 33 bp, Homo sapien
aatcattaatactatgaagtgagcttgctggga

SEQ ID NO: 171860 - DNA, 33 bp, Homo sapien
aatcattaatactatgtagtgagcttgctggga

SEQ ID NO: 171861 - DNA, 33 bp, Homo sapien
tgattgaccaagagtacgacctcggataacctg

SEQ ID NO: 171862 - DNA, 33 bp, Homo sapien
tgattgaccaagagtatgacctcggataacctg

SEQ ID NO: 171863 - DNA, 33 bp, Homo sapien
ctcttggtcaatcagcccaggaattagaaccta

SEQ ID NO: 171864 - DNA, 33 bp, Homo sapien
ctcttggtcaatcagctcaggaattagaaccta

SEQ ID NO: 171865 - DNA, 33 bp, Homo sapien
agactgttaaggtttacgtggattttggtgtca

SEQ ID NO: 171866 - DNA, 33 bp, Homo sapien
agactgttaaggtttatgtggattttggtgtca

SEQ ID NO: 171867 - DNA, 33 bp, Homo sapien
ttcctacaacattcaaaatcccaacaagcttct

SEQ ID NO: 171868 - DNA, 33 bp, Homo sapien
ttcctacaacattcaacatcccaacaagcttct

SEQ ID NO: 171869 - DNA, 33 bp, Homo sapien
tcaattcactcacttgcagaatgagaataatag

SEQ ID NO: 171870 - DNA, 33 bp, Homo sapien
tcaattcactcacttgtagaatgagaataatag

SEQ ID NO: 171871 - DNA, 33 bp, Homo sapien
tgtcttaatcactctcccattggtgtataaacc

SEQ ID NO: 171872 - DNA, 33 bp, Homo sapien
tgtcttaatcactctcgcattggtgtataaacc

SEQ ID NO: 171873 - DNA, 33 bp, Homo sapien
tgttccactaatgtccgctttctgttctaggat

SEQ ID NO: 171874 - DNA, 33 bp, Homo sapien
tgttccactaatgtcctctttctgttctaggat

SEQ ID NO: 171875 - DNA, 33 bp, Homo sapien
ggccttgtttttgctaagagtttctggcaaaga

SEQ ID NO: 171876 - DNA, 33 bp, Homo sapien
ggccttgtttttgctaggagtttctggcaaaga

SEQ ID NO: 171877 - DNA, 33 bp, Homo sapien
ttttctgctttagataacatgatcttgggcatt

SEQ ID NO: 171878 - DNA, 33 bp, Homo sapien
ttttctgctttagatagcatgatcttgggcatt

SEQ ID NO: 171879 - DNA, 33 bp, Homo sapien
acaccatgtcaacgaaccccatctgcagtatgt

SEQ ID NO: 171880 - DNA, 33 bp, Homo sapien
acaccatgtcaacgaatcccatctgcagtatgt

SEQ ID NO: 171881 - DNA, 33 bp, Homo sapien
agttttgtgggagaaacgggccctgtgtttgaa

SEQ ID NO: 171882 - DNA, 33 bp, Homo sapien
agttttgtgggagaaatgggccctgtgtttgaa

SEQ ID NO: 171883 - DNA, 33 bp, Homo sapien
caacttgatctcctcaggtcttctgcacacatc

SEQ ID NO: 171884 - DNA, 33 bp, Homo sapien
caacttgatctcctcatgtcttctgcacacatc

SEQ ID NO: 171885 - DNA, 33 bp, Homo sapien
aggctgaggacttttacacagtaagtaataggg

SEQ ID NO: 171886 - DNA, 33 bp, Homo sapien
aggctgaggacttttatacagtaagtaataggg

SEQ ID NO: 171887 - DNA, 33 bp, Homo sapien
ttgttaaatcttcaacagcctcttcagaagtag

SEQ ID NO: 171888 - DNA, 33 bp, Homo sapien
ttgttaaatcttcaacggcctcttcagaagtag

SEQ ID NO: 171889 - DNA, 33 bp, Homo sapien
cttcttgatcgttggaaaaaaagattggccctt

SEQ ID NO: 171890 - DNA, 33 bp, Homo sapien
cttcttgatcgttggagaaaaagattggccctt

SEQ ID NO: 171891 - DNA, 33 bp, Homo sapien
taaatcaccatgtaaaatttacagctaatatat

SEQ ID NO: 171892 - DNA, 33 bp, Homo sapien
taaatcaccatgtaaagtttacagctaatatat

SEQ ID NO: 171893 - DNA, 33 bp, Homo sapien
ttcatgcatattcagcccacatcaggttaatgt

SEQ ID NO: 171894 - DNA, 33 bp, Homo sapien
ttcatgcatattcagctcacatcaggttaatgt

SEQ ID NO: 171895 - DNA, 33 bp, Homo sapien
cttgactgtggccaggaagtaggagctcaggta

SEQ ID NO: 171896 - DNA, 33 bp, Homo sapien
cttgactgtggccaggcagtaggagctcaggta

SEQ ID NO: 171897 - DNA, 33 bp, Homo sapien
catttgcttcaggcggaagtatattaggaggat

SEQ ID NO: 171898 - DNA, 33 bp, Homo sapien
catttgcttcaggcggcagtatattaggaggat

SEQ ID NO: 171899 - DNA, 33 bp, Homo sapien
acaccatctgataaggaccctgaaaattaggaa

SEQ ID NO: 171900 - DNA, 33 bp, Homo sapien
acaccatctgataaggtccctgaaaattaggaa

SEQ ID NO: 171901 - DNA, 33 bp, Homo sapien
gtggttgggtcttaaaggatgatagttaacaca

SEQ ID NO: 171902 - DNA, 33 bp, Homo sapien
gtggttgggtcttaaatgatgatagttaacaca

SEQ ID NO: 171903 - DNA, 33 bp, Homo sapien
ataaacacactgtctaccctcctgttcagagac

SEQ ID NO: 171904 - DNA, 33 bp, Homo sapien
ataaacacactgtctatcctcctgttcagagac

SEQ ID NO: 171905 - DNA, 33 bp, Homo sapien
aaaagttcaggggtcacattatggctgctccac

SEQ ID NO: 171906 - DNA, 33 bp, Homo sapien
aaaagttcaggggtcatattatggctgctccac

SEQ ID NO: 171907 - DNA, 33 bp, Homo sapien
gggatatttaactccaagttctgtcctgggttt

SEQ ID NO: 171908 - DNA, 33 bp, Homo sapien
gggatatttaactccaggttctgtcctgggttt

SEQ ID NO: 171909 - DNA, 33 bp, Homo sapien
tagaatgcagttcacacctttttaagccatgtg

SEQ ID NO: 171910 - DNA, 33 bp, Homo sapien
tagaatgcagttcacatctttttaagccatgtg

SEQ ID NO: 171911 - DNA, 33 bp, Homo sapien
gataccaaggctcaaactgtttagcaggaatca

SEQ ID NO: 171912 - DNA, 33 bp, Homo sapien
gataccaaggctcaaattgtttagcaggaatca

SEQ ID NO: 171913 - DNA, 33 bp, Homo sapien
tcaagaggaaagagaacgtaacaaccagaaccc

SEQ ID NO: 171914 - DNA, 33 bp, Homo sapien
tcaagaggaaagagaatgtaacaaccagaaccc

SEQ ID NO: 171915 - DNA, 33 bp, Homo sapien
caattattatgtgttgaatggctaaaacttaga

SEQ ID NO: 171916 - DNA, 33 bp, Homo sapien
caattattatgtgttgtatggctaaaacttaga

SEQ ID NO: 171917 - DNA, 33 bp, Homo sapien
atctagatgtccaacaatacgacaatggacaaa

SEQ ID NO: 171918 - DNA, 33 bp, Homo sapien
atctagatgtccaacagtacgacaatggacaaa

SEQ ID NO: 171919 - DNA, 33 bp, Homo sapien
ggaatccataccaaacactagtaatctctggag

SEQ ID NO: 171920 - DNA, 33 bp, Homo sapien
ggaatccataccaaacgctagtaatctctggag

SEQ ID NO: 171921 - DNA, 33 bp, Homo sapien
tataatgatatgttaacgatctaaaagtaacta

SEQ ID NO: 171922 - DNA, 33 bp, Homo sapien
tataatgatatgttaatgatctaaaagtaacta

SEQ ID NO: 171923 - DNA, 33 bp, Homo sapien
taagaaacctaattggccacacttgccttacaa

SEQ ID NO: 171924 - DNA, 33 bp, Homo sapien
taagaaacctaattggtcacacttgccttacaa

SEQ ID NO: 171925 - DNA, 33 bp, Homo sapien
aagtccacctaaggaaaaactgaagtgaaaaga

SEQ ID NO: 171926 - DNA, 33 bp, Homo sapien
aagtccacctaaggaagaactgaagtgaaaaga

SEQ ID NO: 171927 - DNA, 33 bp, Homo sapien
ccatagaatcagaaaacctgagaaatgtgaggg

SEQ ID NO: 171928 - DNA, 33 bp, Homo sapien
ccatagaatcagaaaatctgagaaatgtgaggg

SEQ ID NO: 171929 - DNA, 33 bp, Homo sapien
tgcattgaatttcaggaaaaaaagattgcatat

SEQ ID NO: 171930 - DNA, 33 bp, Homo sapien
tgcattgaatttcagggaaaaaagattgcatat

SEQ ID NO: 171931 - DNA, 33 bp, Homo sapien
acacataggcttgctgcaccaacagcgctactg

SEQ ID NO: 171932 - DNA, 33 bp, Homo sapien
acacataggcttgctggaccaacagcgctactg

SEQ ID NO: 171933 - DNA, 33 bp, Homo sapien
ctcaactttaattacccgatgtccttgccattc

SEQ ID NO: 171934 - DNA, 33 bp, Homo sapien
ctcaactttaattacctgatgtccttgccattc

SEQ ID NO: 171935 - DNA, 33 bp, Homo sapien
cacctaagttccagccaaggttacattgtcaga

SEQ ID NO: 171936 - DNA, 33 bp, Homo sapien
cacctaagttccagccgaggttacattgtcaga

SEQ ID NO: 171937 - DNA, 33 bp, Homo sapien
cctgattttgccagtcactgtaagtatttcaca

SEQ ID NO: 171938 - DNA, 33 bp, Homo sapien
cctgattttgccagtcgctgtaagtatttcaca

SEQ ID NO: 171939 - DNA, 33 bp, Homo sapien
agaaaagttcatgagaaaatttttgtccagtaa

SEQ ID NO: 171940 - DNA, 33 bp, Homo sapien
agaaaagttcatgagataatttttgtccagtaa

SEQ ID NO: 171941 - DNA, 33 bp, Homo sapien
tacaatggcctctaaacgttcacaggaaaggaa

SEQ ID NO: 171942 - DNA, 33 bp, Homo sapien
tacaatggcctctaaatgttcacaggaaaggaa

SEQ ID NO: 171943 - DNA, 33 bp, Homo sapien
gcccaagagattcaaaatgattttttcttccaa

SEQ ID NO: 171944 - DNA, 33 bp, Homo sapien
gcccaagagattcaaagtgattttttcttccaa

SEQ ID NO: 171945 - DNA, 33 bp, Homo sapien
aagtaacatctgggtgaagccagtaaagcctta

SEQ ID NO: 171946 - DNA, 33 bp, Homo sapien
aagtaacatctgggtggagccagtaaagcctta

SEQ ID NO: 171947 - DNA, 33 bp, Homo sapien
ctccctagttgagccacagtgaaatatctaagg

SEQ ID NO: 171948 - DNA, 33 bp, Homo sapien
ctccctagttgagccatagtgaaatatctaagg

SEQ ID NO: 171949 - DNA, 33 bp, Homo sapien
agttaccgagtctcccaacccagattgttggtt

SEQ ID NO: 171950 - DNA, 33 bp, Homo sapien
agttaccgagtctccccacccagattgttggtt

SEQ ID NO: 171951 - DNA, 33 bp, Homo sapien
tccctgacttattcaaggaagcattaatctagg

SEQ ID NO: 171952 - DNA, 33 bp, Homo sapien
tccctgacttattcaatgaagcattaatctagg

SEQ ID NO: 171953 - DNA, 33 bp, Homo sapien
ttgtgcagagtgtagaaatgtacctaaaagtgt

SEQ ID NO: 171954 - DNA, 33 bp, Homo sapien
ttgtgcagagtgtagagatgtacctaaaagtgt

SEQ ID NO: 171955 - DNA, 33 bp, Homo sapien
ctcaaggctctagaacaagtaatgctatttgac

SEQ ID NO: 171956 - DNA, 33 bp, Homo sapien
ctcaaggctctagaaccagtaatgctatttgac

SEQ ID NO: 171957 - DNA, 33 bp, Homo sapien; identical to SEQ ID NO: 171955

SEQ ID NO: 171958 - DNA, 33 bp, Homo sapien; identical to SEQ ID NO: 171956

SEQ ID NO: 171959 - DNA, 33 bp, Homo sapien
atgagactgatgagctaacaaaagtaggcttca

SEQ ID NO: 171960 - DNA, 33 bp, Homo sapien
atgagactgatgagctgacaaaagtaggcttca

SEQ ID NO: 171961 - DNA, 33 bp, Homo sapien; identical to SEQ ID NO: 171959

SEQ ID NO: 171962 - DNA, 33 bp, Homo sapien; identical to SEQ ID NO: 171960

SEQ ID NO: 171963 - DNA, 33 bp, Homo sapien
atagatgaccatatccggagtgtagaatatata

SEQ ID NO: 171964 - DNA, 33 bp, Homo sapien
atagatgaccatatcctgagtgtagaatatata

SEQ ID NO: 171965 - DNA, 33 bp, Homo sapien
tagacttacagtatcaatcacaaactgcatttc

SEQ ID NO: 171966 - DNA, 33 bp, Homo sapien
tagacttacagtatcagtcacaaactgcatttc

SEQ ID NO: 171967 - DNA, 33 bp, Homo sapien
aggccagatttctttcacatagccattcattca

SEQ ID NO: 171968 - DNA, 33 bp, Homo sapien
aggccagatttctttcccatagccattcattca

SEQ ID NO: 171969 - DNA, 33 bp, Homo sapien
ttctagaagaaaataacacttggcaatagcaag

SEQ ID NO: 171970 - DNA, 33 bp, Homo sapien
ttctagaagaaaataagacttggcaatagcaag

SEQ ID NO: 171971 - DNA, 33 bp, Homo sapien
gatttaacagtgggaacgaacactacagctcct

SEQ ID NO: 171972 - DNA, 33 bp, Homo sapien
gatttaacagtgggaatgaacactacagctcct

SEQ ID NO: 171973 - DNA, 33 bp, Homo sapien
agagtttgtaacagaaccttgaataggatggta

SEQ ID NO: 171974 - DNA, 33 bp, Homo sapien
agagtttgtaacagaatcttgaataggatggta

SEQ ID NO: 171975 - DNA, 33 bp, Homo sapien
gcatcacagaggggaacttaagcctaaatgcag

SEQ ID NO: 171976 - DNA, 33 bp, Homo sapien
gcatcacagaggggaatttaagcctaaatgcag

SEQ ID NO: 171977 - DNA, 33 bp, Homo sapien
tataacttcaaggaagacaatgatgtaaattcc

SEQ ID NO: 171978 - DNA, 33 bp, Homo sapien
tataacttcaaggaaggcaatgatgtaaattcc

SEQ ID NO: 171979 - DNA, 33 bp, Homo sapien
aggatatattttgcggaatattaaaacatacaa

SEQ ID NO: 171980 - DNA, 33 bp, Homo sapien
aggatatattttgcgggatattaaaacatacaa

SEQ ID NO: 171981 - DNA, 33 bp, Homo sapien
aggctgctgttcatacactgtaaaaaggagata

SEQ ID NO: 171982 - DNA, 33 bp, Homo sapien
aggctgctgttcatacgctgtaaaaaggagata

SEQ ID NO: 171983 - DNA, 33 bp, Homo sapien
cgatcattatgattaactccttcgaggaagcat

SEQ ID NO: 171984 - DNA, 33 bp, Homo sapien
cgatcattatgattaagtccttcgaggaagcat

SEQ ID NO: 171985 - DNA, 33 bp, Homo sapien
ccacttactcttataaaatgaaattgagcaata

SEQ ID NO: 171986 - DNA, 33 bp, Homo sapien
ccacttactcttataagatgaaattgagcaata

SEQ ID NO: 171987 - DNA, 33 bp, Homo sapien
cttcctaagggtcagaatatggtacaagtacat

SEQ ID NO: 171988 - DNA, 33 bp, Homo sapien
cttcctaagggtcagagtatggtacaagtacat

SEQ ID NO: 171989 - DNA, 33 bp, Homo sapien
gtggtatgagaaggaaagttgaggaaattttga

SEQ ID NO: 171990 - DNA, 33 bp, Homo sapien
gtggtatgagaaggaaggttgaggaaattttga

SEQ ID NO: 171991 - DNA, 33 bp, Homo sapien
ccttcagaagttctaaaccctcaaatgtcttca

SEQ ID NO: 171992 - DNA, 33 bp, Homo sapien
ccttcagaagttctaagccctcaaatgtcttca

SEQ ID NO: 171993 - DNA, 33 bp, Homo sapien
ttactaagcattgactaaaagtgagagtcaagc

SEQ ID NO: 171994 - DNA, 33 bp, Homo sapien
ttactaagcattgacttaaagtgagagtcaagc

SEQ ID NO: 171995 - DNA, 33 bp, Homo sapien
tcagaaagtggcaggacagtaaaacagacatga

SEQ ID NO: 171996 - DNA, 33 bp, Homo sapien
tcagaaagtggcaggagagtaaaacagacatga

SEQ ID NO: 171997 - DNA, 33 bp, Homo sapien
ggggagaggtgaagacaaaatgctgccactgga

SEQ ID NO: 171998 - DNA, 33 bp, Homo sapien
ggggagaggtgaagacgaaatgctgccactgga

SEQ ID NO: 171999 - DNA, 33 bp, Homo sapien
cctaaattaacagaacaagagcttatctgaaag

SEQ ID NO: 172000 - DNA, 33 bp, Homo sapien
cctaaattaacagaacgagagcttatctgaaag

SEQ ID NO: 172001 - DNA, 33 bp, Homo sapien
gtttgaaaataggaaggaaaacagataaaggaa

SEQ ID NO: 172002 - DNA, 33 bp, Homo sapien
gtttgaaaataggaagtaaaacagataaaggaa

SEQ ID NO: 172003 - DNA, 33 bp, Homo sapien
tgacctaccatctgaacacgttaagaaaactaa

SEQ ID NO: 172004 - DNA, 33 bp, Homo sapien
tgacctaccatctgaatacgttaagaaaactaa

SEQ ID NO: 172005 - DNA, 33 bp, Homo sapien
ttaagttagatgaggaacaagagttgaccgttg

SEQ ID NO: 172006 - DNA, 33 bp, Homo sapien
ttaagttagatgaggatcaagagttgaccgttg

SEQ ID NO: 172007 - DNA, 33 bp, Homo sapien
tggaattatgcgtaaccatctctaccatagcca

SEQ ID NO: 172008 - DNA, 33 bp, Homo sapien
tggaattatgcgtaactatctctaccatagcca

SEQ ID NO: 172009 - DNA, 33 bp, Homo sapien
agtaaacatcaatgaaaggattttattgttgat

SEQ ID NO: 172010 - DNA, 33 bp, Homo sapien
agtaaacatcaatgaatggattttattgttgat

SEQ ID NO: 172011 - DNA, 33 bp, Homo sapien
agttactgagagacaaattgacactgtggacat

SEQ ID NO: 172012 - DNA, 33 bp, Homo sapien
agttactgagagacaacttgacactgtggacat

SEQ ID NO: 172013 - DNA, 33 bp, Homo sapien
atatcacatatctttggatccttgcggtcagtt

SEQ ID NO: 172014 - DNA, 33 bp, Homo sapien
atatcacatatctttgtatccttgcggtcagtt

SEQ ID NO: 172015 - DNA, 33 bp, Homo sapien
aaaatatgctccaaaaaatagaataagtttcca

SEQ ID NO: 172016 - DNA, 33 bp, Homo sapien
aaaatatgctccaaaacatagaataagtttcca

SEQ ID NO: 172017 - DNA, 33 bp, Homo sapien
gacctggcataccctaaacacaggggcatcatt

SEQ ID NO: 172018 - DNA, 33 bp, Homo sapien
gacctggcataccctagacacaggggcatcatt

SEQ ID NO: 172019 - DNA, 33 bp, Homo sapien
atgatcaccattctaactggcgcaagatggtat

SEQ ID NO: 172020 - DNA, 33 bp, Homo sapien
atgatcaccattctaattggcgcaagatggtat

SEQ ID NO: 172021 - DNA, 33 bp, Homo sapien
tgcttagatctttacaatggcaagaatgggata

SEQ ID NO: 172022 - DNA, 33 bp, Homo sapien
tgcttagatctttacagtggcaagaatgggata

SEQ ID NO: 172023 - DNA, 33 bp, Homo sapien
caaatagacgattgcaatagaatgagagtggtg

SEQ ID NO: 172024 - DNA, 33 bp, Homo sapien
caaatagacgattgcagtagaatgagagtggtg

SEQ ID NO: 172025 - DNA, 33 bp, Homo sapien
agggagagaggagagaaagatccacttaggcaa

SEQ ID NO: 172026 - DNA, 33 bp, Homo sapien
agggagagaggagagagagatccacttaggcaa

SEQ ID NO: 172027 - DNA, 33 bp, Homo sapien
caggccatgcttctacgcaaatggagtgggcaa

SEQ ID NO: 172028 - DNA, 33 bp, Homo sapien
caggccatgcttctactcaaatggagtgggcaa

SEQ ID NO: 172029 - DNA, 33 bp, Homo sapien
gtctcctcaaagcaaaatgcagcaatttctcaa

SEQ ID NO: 172030 - DNA, 33 bp, Homo sapien
gtctcctcaaagcaaactgcagcaatttctcaa

SEQ ID NO: 172031 - DNA, 33 bp, Homo sapien
agataagccatgctccaaccctgtcccatacat

SEQ ID NO: 172032 - DNA, 33 bp, Homo sapien
agataagccatgctccgaccctgtcccatacat

SEQ ID NO: 172033 - DNA, 33 bp, Homo sapien
aagttagcctaaaacacaaattcaggccatgat

SEQ ID NO: 172034 - DNA, 33 bp, Homo sapien
aagttagcctaaaacagaaattcaggccatgat

SEQ ID NO: 172035 - DNA, 33 bp, Homo sapien
gtctttgataaaacccggaaacttgctgttctt

SEQ ID NO: 172036 - DNA, 33 bp, Homo sapien
gtctttgataaaaccctgaaacttgctgttctt

SEQ ID NO: 172037 - DNA, 33 bp, Homo sapien
aagacgatcacaaaccaaacaatgggtaactgc

SEQ ID NO: 172038 - DNA, 33 bp, Homo sapien
aagacgatcacaaaccgaacaatgggtaactgc

SEQ ID NO: 172039 - DNA, 33 bp, Homo sapien
acaattcagccacttacatagcatgatcaacca

SEQ ID NO: 172040 - DNA, 33 bp, Homo sapien
acaattcagccacttatatagcatgatcaacca

SEQ ID NO: 172041 - DNA, 33 bp, Homo sapien
cacacatcctgctgtaccttgtgtcttttttcc

SEQ ID NO: 172042 - DNA, 33 bp, Homo sapien
cacacatcctgctgtagcttgtgtcttttttcc

SEQ ID NO: 172043 - DNA, 33 bp, Homo sapien
agagaagctaagcttgaaaactcagtcatgcaa

SEQ ID NO: 172044 - DNA, 33 bp, Homo sapien
agagaagctaagcttggaaactcagtcatgcaa

SEQ ID NO: 172045 - DNA, 33 bp, Homo sapien
gggcctggagtttggaggttcttcatggataag

SEQ ID NO: 172046 - DNA, 33 bp, Homo sapien
gggcctggagtttggatgttcttcatggataag

SEQ ID NO: 172047 - DNA, 33 bp, Homo sapien
cttttgcaatacaaacaaagaaccaggtgaaga

SEQ ID NO: 172048 - DNA, 33 bp, Homo sapien
cttttgcaatacaaacgaagaaccaggtgaaga

SEQ ID NO: 172049 - DNA, 33 bp, Homo sapien
ctgactctcactgtaaagactgtattggagaaa

SEQ ID NO: 172050 - DNA, 33 bp, Homo sapien
ctgactctcactgtaaggactgtattggagaaa

SEQ ID NO: 172051 - DNA, 33 bp, Homo sapien
aataagcaaaaggatcacaatccagtttttaaa

SEQ ID NO: 172052 - DNA, 33 bp, Homo sapien
aataagcaaaaggatcgcaatccagtttttaaa

SEQ ID NO: 172053 - DNA, 33 bp, Homo sapien
cagtaaatgcaaatgacataaacaactcagttt

SEQ ID NO: 172054 - DNA, 33 bp, Homo sapien
cagtaaatgcaaatgatataaacaactcagttt

SEQ ID NO: 172055 - DNA, 33 bp, Homo sapien
ttgtagttggtaaatgaaaaaaaatgcactcca

SEQ ID NO: 172056 - DNA, 33 bp, Homo sapien
ttgtagttggtaaatgcaaaaaaatgcactcca

SEQ ID NO: 172057 - DNA, 33 bp, Homo sapien
acaatgtgctcttacactgatactgtgttagca

SEQ ID NO: 172058 - DNA, 33 bp, Homo sapien
acaatgtgctcttacattgatactgtgttagca

SEQ ID NO: 172059 - DNA, 33 bp, Homo sapien
aacatccggtatggtacgacacagcgggtttgg

SEQ ID NO: 172060 - DNA, 33 bp, Homo sapien
aacatccggtatggtatgacacagcgggtttgg

SEQ ID NO: 172061 - DNA, 33 bp, Homo sapien
atgagcctcatagaaacccatgtgattgtacat

SEQ ID NO: 172062 - DNA, 33 bp, Homo sapien
atgagcctcatagaaagccatgtgattgtacat

SEQ ID NO: 172063 - DNA, 33 bp, Homo sapien
acttttctcatctcaccattcccttgccgtgac

SEQ ID NO: 172064 - DNA, 33 bp, Homo sapien
acttttctcatctcactattcccttgccgtgac

SEQ ID NO: 172065 - DNA, 33 bp, Homo sapien
gaagggatgtagtgaacttaagaattttcaaga

SEQ ID NO: 172066 - DNA, 33 bp, Homo sapien
gaagggatgtagtgaatttaagaattttcaaga

SEQ ID NO: 172067 - DNA, 33 bp, Homo sapien; identical to SEQ ID NO: 172065

SEQ ID NO: 172068 - DNA, 33 bp, Homo sapien; identical to SEQ ID NO: 172066

SEQ ID NO: 172069 - DNA, 33 bp, Homo sapien
agtggaagacctttaccggttagcatagctaga

SEQ ID NO: 172070 - DNA, 33 bp, Homo sapien
agtggaagacctttacgggttagcatagctaga

SEQ ID NO: 172071 - DNA, 33 bp, Homo sapien
aataattcctccccaaactctctgtctctctga

SEQ ID NO: 172072 - DNA, 33 bp, Homo sapien
aataattcctccccaacctctctgtctctctga

SEQ ID NO: 172073 - DNA, 33 bp, Homo sapien
atcccaaattactatacatggcaagaaacagaa

SEQ ID NO: 172074 - DNA, 33 bp, Homo sapien
atcccaaattactatatatggcaagaaacagaa

SEQ ID NO: 172075 - DNA, 33 bp, Homo sapien
tgagtaagaaagagaacgttttaacagcagagg

SEQ ID NO: 172076 - DNA, 33 bp, Homo sapien
tgagtaagaaagagaatgttttaacagcagagg

SEQ ID NO: 172077 - DNA, 33 bp, Homo sapien
atgttttctcaatagacagcagtttttgcagca

SEQ ID NO: 172078 - DNA, 33 bp, Homo sapien
atgttttctcaatagatagcagtttttgcagca

SEQ ID NO: 172079 - DNA, 33 bp, Homo sapien
gagatgtaaggacttccaggatttagtatgagt

SEQ ID NO: 172080 - DNA, 33 bp, Homo sapien
gagatgtaaggacttctaggatttagtatgagt

SEQ ID NO: 172081 - DNA, 33 bp, Homo sapien
gattggcccaacttgaggtaaactttgacttgg

SEQ ID NO: 172082 - DNA, 33 bp, Homo sapien
gattggcccaacttgatgtaaactttgacttgg

SEQ ID NO: 172083 - DNA, 33 bp, Homo sapien
ttttcttttcaagatcacattgaaaaccagctt

SEQ ID NO: 172084 - DNA, 33 bp, Homo sapien
ttttcttttcaagatctcattgaaaaccagctt

SEQ ID NO: 172085 - DNA, 33 bp, Homo sapien
aactacctaggtttccactttcatgtccatttt

SEQ ID NO: 172086 - DNA, 33 bp, Homo sapien
aactacctaggtttccgctttcatgtccatttt

SEQ ID NO: 172087 - DNA, 33 bp, Homo sapien
catcaaggacttaaaagatgcaagggtgatgat

SEQ ID NO: 172088 - DNA, 33 bp, Homo sapien
catcaaggacttaaaatatgcaagggtgatgat

SEQ ID NO: 172089 - DNA, 33 bp, Homo sapien
ggcccattaatcaagagacctgaaaggcttcca

SEQ ID NO: 172090 - DNA, 33 bp, Homo sapien
ggcccattaatcaagatacctgaaaggcttcca

SEQ ID NO: 172091 - DNA, 33 bp, Homo sapien
aattccaaccctggggaatggagtgccacatag

SEQ ID NO: 172092 - DNA, 33 bp, Homo sapien
aattccaaccctgggggatggagtgccacatag

SEQ ID NO: 172093 - DNA, 33 bp, Homo sapien
gtttctgtaactctaccctgtgaataatacagc

SEQ ID NO: 172094 - DNA, 33 bp, Homo sapien
gtttctgtaactctactctgtgaataatacagc

SEQ ID NO: 172095 - DNA, 33 bp, Homo sapien
aatatacatagcaaaaattgacaacccacagaa

SEQ ID NO: 172096 - DNA, 33 bp, Homo sapien
aatatacatagcaaaagttgacaacccacagaa

SEQ ID NO: 172097 - DNA, 33 bp, Homo sapien
gttcttgtcccacgtcccagaagaatgaggtta

SEQ ID NO: 172098 - DNA, 33 bp, Homo sapien
gttcttgtcccacgtctcagaagaatgaggtta

SEQ ID NO: 172099 - DNA, 33 bp, Homo sapien
ccacaaaacccaaacaccagtctaatcatgaga

SEQ ID NO: 172100 - DNA, 33 bp, Homo sapien
ccacaaaacccaaacatcagtctaatcatgaga

SEQ ID NO: 172101 - DNA, 33 bp, Homo sapien
agtacattatttatcaaatagagaaagtcaaaa

SEQ ID NO: 172102 - DNA, 33 bp, Homo sapien
agtacattatttatcatatagagaaagtcaaaa

SEQ ID NO: 172103 - DNA, 33 bp, Homo sapien
aatgtcacaaagaccactatttctccaattcag

SEQ ID NO: 172104 - DNA, 33 bp, Homo sapien
aatgtcacaaagaccattatttctccaattcag

SEQ ID NO: 172105 - DNA, 33 bp, Homo sapien
tacagcttagaaaaaccgtttgtctgagtaccc

SEQ ID NO: 172106 - DNA, 33 bp, Homo sapien
tacagcttagaaaaactgtttgtctgagtaccc

SEQ ID NO: 172107 - DNA, 33 bp, Homo sapien
ctaagctgtaggaaaccgatactaaattgacaa

SEQ ID NO: 172108 - DNA, 33 bp, Homo sapien
ctaagctgtaggaaactgatactaaattgacaa

SEQ ID NO: 172109 - DNA, 33 bp, Homo sapien
aattcacaggacttcaaatgcttactggagaca

SEQ ID NO: 172110 - DNA, 33 bp, Homo sapien
aattcacaggacttcagatgcttactggagaca

SEQ ID NO: 172111 - DNA, 33 bp, Homo sapien
ctaaggaaaattctcaagtatgacaaaggaggg

SEQ ID NO: 172112 - DNA, 33 bp, Homo sapien
ctaaggaaaattctcaggtatgacaaaggaggg

SEQ ID NO: 172113 - DNA, 33 bp, Homo sapien
ctggctagccatctacagaagattgaagctgga

SEQ ID NO: 172114 - DNA, 33 bp, Homo sapien
ctggctagccatctacggaagattgaagctgga

SEQ ID NO: 172115 - DNA, 33 bp, Homo sapien
aagctggttttgaataactactggcattttttt

SEQ ID NO: 172116 - DNA, 33 bp, Homo sapien
aagctggttttgaatagctactggcattttttt

SEQ ID NO: 172117 - DNA, 33 bp, Homo sapien
ctgttccatgcaaagactagcctaaagagaata

SEQ ID NO: 172118 - DNA, 33 bp, Homo sapien
ctgttccatgcaaagagtagcctaaagagaata

SEQ ID NO: 172119 - DNA, 33 bp, Homo sapien
cagaaacataagataaccaaactgtgttgtctt

SEQ ID NO: 172120 - DNA, 33 bp, Homo sapien
cagaaacataagataatcaaactgtgttgtctt

SEQ ID NO: 172121 - DNA, 33 bp, Homo sapien
ataagtagtaaacaacaaagatgggatagcaag

SEQ ID NO: 172122 - DNA, 33 bp, Homo sapien
ataagtagtaaacaacgaagatgggatagcaag

SEQ ID NO: 172123 - DNA, 33 bp, Homo sapien
tatatattaattaaaactttcgtggctccatat

SEQ ID NO: 172124 - DNA, 33 bp, Homo sapien
tatatattaattaaaagtttcgtggctccatat

SEQ ID NO: 172125 - DNA, 33 bp, Homo sapien
gttttagttggaagagcacataaaggacataaa

SEQ ID NO: 172126 - DNA, 33 bp, Homo sapien
gttttagttggaagagtacataaaggacataaa

SEQ ID NO: 172127 - DNA, 33 bp, Homo sapien
aagagagaaacttccaatgcagagctttacatg

SEQ ID NO: 172128 - DNA, 33 bp, Homo sapien
aagagagaaacttccattgcagagctttacatg

SEQ ID NO: 172129 - DNA, 33 bp, Homo sapien
ttcttttggttgattaaatgcctcttggttctc

SEQ ID NO: 172130 - DNA, 33 bp, Homo sapien
ttcttttggttgattagatgcctcttggttctc

SEQ ID NO: 172131 - DNA, 33 bp, Homo sapien
tatgaaaacaagtcaagaaatctattgtgttcg

SEQ ID NO: 172132 - DNA, 33 bp, Homo sapien
tatgaaaacaagtcaataaatctattgtgttcg

SEQ ID NO: 172133 - DNA, 33 bp, Homo sapien
cttgacctagccaaacagtcatgcctcctgaca

SEQ ID NO: 172134 - DNA, 33 bp, Homo sapien
cttgacctagccaaacggtcatgcctcctgaca

SEQ ID NO: 172135 - DNA, 33 bp, Homo sapien
ggagggcgttgcattaactcaggtgtcaggagg

SEQ ID NO: 172136 - DNA, 33 bp, Homo sapien
ggagggcgttgcattagctcaggtgtcaggagg

SEQ ID NO: 172137 - DNA, 33 bp, Homo sapien
atgtcctcctgattaactgaactcttcatcact

SEQ ID NO: 172138 - DNA, 33 bp, Homo sapien
atgtcctcctgattaattgaactcttcatcact

SEQ ID NO: 172139 - DNA, 33 bp, Homo sapien
agatttatcaatttccactaggttatctcatta

SEQ ID NO: 172140 - DNA, 33 bp, Homo sapien
agatttatcaatttccgctaggttatctcatta

SEQ ID NO: 172141 - DNA, 33 bp, Homo sapien
atcaatattcttcagaaatactggtctcaactt

SEQ ID NO: 172142 - DNA, 33 bp, Homo sapien
atcaatattcttcagatatactggtctcaactt

SEQ ID NO: 172143 - DNA, 33 bp, Homo sapien
gggaaacttcagcatacacattttaacaatatt

SEQ ID NO: 172144 - DNA, 33 bp, Homo sapien
gggaaacttcagcatagacattttaacaatatt

SEQ ID NO: 172145 - DNA, 33 bp, Homo sapien
atttcctgggaacacacaattgtagtaaactct

SEQ ID NO: 172146 - DNA, 33 bp, Homo sapien
atttcctgggaacacataattgtagtaaactct

SEQ ID NO: 172147 - DNA, 33 bp, Homo sapien
gggtccaaagagttaaagccttcttattctcta

SEQ ID NO: 172148 - DNA, 33 bp, Homo sapien
gggtccaaagagttaaggccttcttattctcta

SEQ ID NO: 172149 - DNA, 33 bp, Homo sapien
cacaaagagcccacacacttcattttgcttaat

SEQ ID NO: 172150 - DNA, 33 bp, Homo sapien
cacaaagagcccacacgcttcattttgcttaat

SEQ ID NO: 172151 - DNA, 33 bp, Homo sapien
ctaatgttcagcataaactatttcacaaaagtg

SEQ ID NO: 172152 - DNA, 33 bp, Homo sapien
ctaatgttcagcataagctatttcacaaaagtg

SEQ ID NO: 172153 - DNA, 33 bp, Homo sapien
ttatgctgaacattagcccttccttctctggat

SEQ ID NO: 172154 - DNA, 33 bp, Homo sapien
ttatgctgaacattagtccttccttctctggat

SEQ ID NO: 172155 - DNA, 33 bp, Homo sapien
actggtttctgtcttacatgactcagagtgcag

SEQ ID NO: 172156 - DNA, 33 bp, Homo sapien
actggtttctgtcttatatgactcagagtgcag

SEQ ID NO: 172157 - DNA, 33 bp, Homo sapien
gggagaaagaggttacaggctccagacaagaaa

SEQ ID NO: 172158 - DNA, 33 bp, Homo sapien
gggagaaagaggttacgggctccagacaagaaa

SEQ ID NO: 172159 - DNA, 33 bp, Homo sapien
gaaacaagtgtatgaaatggattagttgattta

SEQ ID NO: 172160 - DNA, 33 bp, Homo sapien
gaaacaagtgtatgaagtggattagttgattta

SEQ ID NO: 172161 - DNA, 33 bp, Homo sapien
ccaacactcttcatgccgatcatgtaaaaactg

SEQ ID NO: 172162 - DNA, 33 bp, Homo sapien
ccaacactcttcatgctgatcatgtaaaaactg

SEQ ID NO: 172163 - DNA, 33 bp, Homo sapien
gctctgtctaaacaggaaactctgtctcaatag

SEQ ID NO: 172164 - DNA, 33 bp, Homo sapien
gctctgtctaaacagggaactctgtctcaatag

SEQ ID NO: 172165 - DNA, 33 bp, Homo sapien
tggttcattgattacactatattctgttggttt

SEQ ID NO: 172166 - DNA, 33 bp, Homo sapien
tggttcattgattacagtatattctgttggttt

SEQ ID NO: 172167 - DNA, 33 bp, Homo sapien
gacaggaaatctagacggcacttcaaacagata

SEQ ID NO: 172168 - DNA, 33 bp, Homo sapien
gacaggaaatctagactgcacttcaaacagata

SEQ ID NO: 172169 - DNA, 33 bp, Homo sapien
cttctctcttgtagacagtccagatcctgtgtt

SEQ ID NO: 172170 - DNA, 33 bp, Homo sapien
cttctctcttgtagactgtccagatcctgtgtt

SEQ ID NO: 172171 - DNA, 33 bp, Homo sapien
agatcctgtgttgcctattgatttcaagtctgg

SEQ ID NO: 172172 - DNA, 33 bp, Homo sapien
agatcctgtgttgcctgttgatttcaagtctgg

SEQ ID NO: 172173 - DNA, 33 bp, Homo sapien
agtacatatctagtaggagtcccagtgagagat

SEQ ID NO: 172174 - DNA, 33 bp, Homo sapien
agtacatatctagtagtagtcccagtgagagat

SEQ ID NO: 172175 - DNA, 33 bp, Homo sapien
tgttcctcagtttcagcattgtagaactgttaa

SEQ ID NO: 172176 - DNA, 33 bp, Homo sapien
tgttcctcagtttcagtattgtagaactgttaa

SEQ ID NO: 172177 - DNA, 33 bp, Homo sapien
gggtaagtcctctccaatcaataggtcttccag

SEQ ID NO: 172178 - DNA, 33 bp, Homo sapien
gggtaagtcctctccagtcaataggtcttccag

SEQ ID NO: 172179 - DNA, 33 bp, Homo sapien
aagcagcatgccagaacctcattttaattcaca

SEQ ID NO: 172180 - DNA, 33 bp, Homo sapien
aagcagcatgccagaatctcattttaattcaca

SEQ ID NO: 172181 - DNA, 33 bp, Homo sapien
agagtaatagtattcacaggaggcatccattac

SEQ ID NO: 172182 - DNA, 33 bp, Homo sapien
agagtaatagtattcataggaggcatccattac

SEQ ID NO: 172183 - DNA, 33 bp, Homo sapien
caacactccaggagaaatgaaaatatgtccaca

SEQ ID NO: 172184 - DNA, 33 bp, Homo sapien
caacactccaggagaagtgaaaatatgtccaca

SEQ ID NO: 172185 - DNA, 33 bp, Homo sapien
caatcttcttgacaaccctgtgctgagtactac

SEQ ID NO: 172186 - DNA, 33 bp, Homo sapien
caatcttcttgacaactctgtgctgagtactac

SEQ ID NO: 172187 - DNA, 33 bp, Homo sapien
gtgtgatatctggagacgggcttttgaagctgt

SEQ ID NO: 172188 - DNA, 33 bp, Homo sapien
gtgtgatatctggagatgggcttttgaagctgt

SEQ ID NO: 172189 - DNA, 33 bp, Homo sapien
ttagagtgtttatgtcagaagatacagtaggaa

SEQ ID NO: 172190 - DNA, 33 bp, Homo sapien
ttagagtgtttatgtcggaagatacagtaggaa

SEQ ID NO: 172191 - DNA, 33 bp, Homo sapien
tattcattaatgttctcaaattcagccttaatt

SEQ ID NO: 172192 - DNA, 33 bp, Homo sapien
tattcattaatgttctgaaattcagccttaatt

SEQ ID NO: 172193 - DNA, 33 bp, Homo sapien
aggagcatcataaaggaacttctattattcttc

SEQ ID NO: 172194 - DNA, 33 bp, Homo sapien
aggagcatcataaagggacttctattattcttc

SEQ ID NO: 172195 - DNA, 33 bp, Homo sapien
gatatggttttaacaaagtgaaaaggaagataa

SEQ ID NO: 172196 - DNA, 33 bp, Homo sapien
gatatggttttaacaaggtgaaaaggaagataa

SEQ ID NO: 172197 - DNA, 33 bp, Homo sapien
acagggtgtgatgaggaagaataaacacagggg

SEQ ID NO: 172198 - DNA, 33 bp, Homo sapien
acagggtgtgatgagggagaataaacacagggg

SEQ ID NO: 172199 - DNA, 33 bp, Homo sapien
tgatggaaatgggaaacggaaaatggttcaacc

SEQ ID NO: 172200 - DNA, 33 bp, Homo sapien
tgatggaaatgggaaatggaaaatggttcaacc

SEQ ID NO: 172201 - DNA, 33 bp, Homo sapien
ttataatcaggaaaacagttactgtgccaacat

SEQ ID NO: 172202 - DNA, 33 bp, Homo sapien
ttataatcaggaaaaccgttactgtgccaacat

SEQ ID NO: 172203 - DNA, 33 bp, Homo sapien
agtgtgagccaatgagaacaatatttggggacc

SEQ ID NO: 172204 - DNA, 33 bp, Homo sapien
agtgtgagccaatgaggacaatatttggggacc

SEQ ID NO: 172205 - DNA, 33 bp, Homo sapien
aaaagtcagtgctaacagcccatctttgaccaa

SEQ ID NO: 172206 - DNA, 33 bp, Homo sapien
aaaagtcagtgctaacggcccatctttgaccaa

SEQ ID NO: 172207 - DNA, 33 bp, Homo sapien
acatacttcagatagacctcgcttctaagtttt

SEQ ID NO: 172208 - DNA, 33 bp, Homo sapien
acatacttcagatagatctcgcttctaagtttt

SEQ ID NO: 172209 - DNA, 33 bp, Homo sapien
gcttcacaggctataaagtactacactgtggtc

SEQ ID NO: 172210 - DNA, 33 bp, Homo sapien
gcttcacaggctataaggtactacactgtggtc

SEQ ID NO: 172211 - DNA, 33 bp, Homo sapien
gtcattttctccatcaacaaccagggagactgc

SEQ ID NO: 172212 - DNA, 33 bp, Homo sapien
gtcattttctccatcagcaaccagggagactgc

SEQ ID NO: 172213 - DNA, 33 bp, Homo sapien
ctattactatgaagtaagataatcaactatcct

SEQ ID NO: 172214 - DNA, 33 bp, Homo sapien
ctattactatgaagtaggataatcaactatcct

SEQ ID NO: 172215 - DNA, 33 bp, Homo sapien
atatgaatggagtaacacacatatatggccttt

SEQ ID NO: 172216 - DNA, 33 bp, Homo sapien
atatgaatggagtaacgcacatatatggccttt

SEQ ID NO: 172217 - DNA, 33 bp, Homo sapien
ccatggaggttaagaacatgataggatctaata

SEQ ID NO: 172218 - DNA, 33 bp, Homo sapien
ccatggaggttaagaatatgataggatctaata

SEQ ID NO: 172219 - DNA, 33 bp, Homo sapien
aagatataagaatctaacaatgtctgtaggctt

SEQ ID NO: 172220 - DNA, 33 bp, Homo sapien
aagatataagaatctaccaatgtctgtaggctt

SEQ ID NO: 172221 - DNA, 33 bp, Homo sapien
ccaaggtgtatgggtcacctctagaagctggat

SEQ ID NO: 172222 - DNA, 33 bp, Homo sapien
ccaaggtgtatgggtcgcctctagaagctggat

SEQ ID NO: 172223 - DNA, 33 bp, Homo sapien
atgaatccaaaatcaaataataaggtgtgtttt

SEQ ID NO: 172224 - DNA, 33 bp, Homo sapien
atgaatccaaaatcaagtaataaggtgtgtttt

SEQ ID NO: 172225 - DNA, 33 bp, Homo sapien
catttatcatttatcaactatgaaccagtgcat

SEQ ID NO: 172226 - DNA, 33 bp, Homo sapien
catttatcatttatcacctatgaaccagtgcat

SEQ ID NO: 172227 - DNA, 33 bp, Homo sapien
atttctgccaacaaaagtaaatcaaaattattt

SEQ ID NO: 172228 - DNA, 33 bp, Homo sapien
atttctgccaacaaaattaaatcaaaattattt

SEQ ID NO: 172229 - DNA, 33 bp, Homo sapien
gagagttaccatgtccgcaatcagccattctgg

SEQ ID NO: 172230 - DNA, 33 bp, Homo sapien
gagagttaccatgtcctcaatcagccattctgg

SEQ ID NO: 172231 - DNA, 33 bp, Homo sapien
acttgatcaaattggcgaggtaattctcgtgcc

SEQ ID NO: 172232 - DNA, 33 bp, Homo sapien
acttgatcaaattggctaggtaattctcgtgcc

SEQ ID NO: 172233 - DNA, 33 bp, Homo sapien
cgtcatttatattagggatttctgctaatgcta

SEQ ID NO: 172234 - DNA, 33 bp, Homo sapien
cgtcatttatattaggtatttctgctaatgcta

SEQ ID NO: 172235 - DNA, 33 bp, Homo sapien
actccttgggaaaaacagcgaaggcaccactca

SEQ ID NO: 172236 - DNA, 33 bp, Homo sapien
actccttgggaaaaacggcgaaggcaccactca

SEQ ID NO: 172237 - DNA, 33 bp, Homo sapien
ttctaggcccacgcttcaaaaggacacagcttc

SEQ ID NO: 172238 - DNA, 33 bp, Homo sapien
ttctaggcccacgctttaaaaggacacagcttc

SEQ ID NO: 172239 - DNA, 33 bp, Homo sapien
ctcttgcattactaacagcatacccattttggt

SEQ ID NO: 172240 - DNA, 33 bp, Homo sapien
ctcttgcattactaacggcatacccattttggt

SEQ ID NO: 172241 - DNA, 33 bp, Homo sapien
aacataaaacatgcgaagaaactgaaacatatt

SEQ ID NO: 172242 - DNA, 33 bp, Homo sapien
aacataaaacatgcgaggaaactgaaacatatt

SEQ ID NO: 172243 - DNA, 33 bp, Homo sapien
atcttaggggctgttacaagtgtccttgagaaa

SEQ ID NO: 172244 - DNA, 33 bp, Homo sapien
atcttaggggctgttataagtgtccttgagaaa

SEQ ID NO: 172245 - DNA, 33 bp, Homo sapien
ttcatgattcctgtaacgcaggtgtagtgatga

SEQ ID NO: 172246 - DNA, 33 bp, Homo sapien
ttcatgattcctgtaatgcaggtgtagtgatga

SEQ ID NO: 172247 - DNA, 33 bp, Homo sapien
tcatcaaatcacaaaaatcagtaagagaggagg

SEQ ID NO: 172248 - DNA, 33 bp, Homo sapien
tcatcaaatcacaaaagtcagtaagagaggagg

SEQ ID NO: 172249 - DNA, 33 bp, Homo sapien
atgagagccagatgcaataaaaaagtgtgaggc

SEQ ID NO: 172250 - DNA, 33 bp, Homo sapien
atgagagccagatgcagtaaaaaagtgtgaggc

SEQ ID NO: 172251 - DNA, 33 bp, Homo sapien
tgtcttattgtattaacggcttaccaaattgtg

SEQ ID NO: 172252 - DNA, 33 bp, Homo sapien
tgtcttattgtattaatggcttaccaaattgtg

SEQ ID NO: 172253 - DNA, 33 bp, Homo sapien
cagtgcatatgttacccccaacagttttctctg

SEQ ID NO: 172254 - DNA, 33 bp, Homo sapien
cagtgcatatgttacctccaacagttttctctg

SEQ ID NO: 172255 - DNA, 33 bp, Homo sapien
taagaagagagtgaaaatatggaggaactggaa

SEQ ID NO: 172256 - DNA, 33 bp, Homo sapien
taagaagagagtgaaagtatggaggaactggaa

SEQ ID NO: 172257 - DNA, 33 bp, Homo sapien
atacaacagcaacttcaataaacacatccttta

SEQ ID NO: 172258 - DNA, 33 bp, Homo sapien
atacaacagcaacttcgataaacacatccttta

SEQ ID NO: 172259 - DNA, 33 bp, Homo sapien
tagtaaaagcagaccaatcactgaaatacaggc

SEQ ID NO: 172260 - DNA, 33 bp, Homo sapien
tagtaaaagcagaccagtcactgaaatacaggc

SEQ ID NO: 172261 - DNA, 33 bp, Homo sapien
gagccttaattaataccctgtggcacttttcac

SEQ ID NO: 172262 - DNA, 33 bp, Homo sapien
gagccttaattaatactctgtggcacttttcac

SEQ ID NO: 172263 - DNA, 33 bp, Homo sapien
gcttacctatgttttacgaaaggaaatacaagt

SEQ ID NO: 172264 - DNA, 33 bp, Homo sapien
gcttacctatgttttatgaaaggaaatacaagt

SEQ ID NO: 172265 - DNA, 33 bp, Homo sapien
tgaagtcatcacactacataatcttgaaatata

SEQ ID NO: 172266 - DNA, 33 bp, Homo sapien
tgaagtcatcacactatataatcttgaaatata

SEQ ID NO: 172267 - DNA, 33 bp, Homo sapien
agcaaaatatacaaccacgtgtactgcttgaag

SEQ ID NO: 172268 - DNA, 33 bp, Homo sapien
agcaaaatatacaacctcgtgtactgcttgaag

SEQ ID NO: 172269 - DNA, 33 bp, Homo sapien
tccaaatgttcaagacaaaactatggcagccct

SEQ ID NO: 172270 - DNA, 33 bp, Homo sapien
tccaaatgttcaagacgaaactatggcagccct

SEQ ID NO: 172271 - DNA, 33 bp, Homo sapien
tcactgatatgtgcaactattaacacagtccat

SEQ ID NO: 172272 - DNA, 33 bp, Homo sapien
tcactgatatgtgcaattattaacacagtccat

SEQ ID NO: 172273 - DNA, 33 bp, Homo sapien
tccagcaacagattccaacaaaatgaatccctt

SEQ ID NO: 172274 - DNA, 33 bp, Homo sapien
tccagcaacagattcccacaaaatgaatccctt

SEQ ID NO: 172275 - DNA, 33 bp, Homo sapien
acattgaagtacactggaaagcctctataatta

SEQ ID NO: 172276 - DNA, 33 bp, Homo sapien
acattgaagtacactgtaaagcctctataatta

SEQ ID NO: 172277 - DNA, 33 bp, Homo sapien
ggctcacagtgaaggacattgaatgtaaaaaag

SEQ ID NO: 172278 - DNA, 33 bp, Homo sapien
ggctcacagtgaaggatattgaatgtaaaaaag

SEQ ID NO: 172279 - DNA, 33 bp, Homo sapien
accttgttttttttcccgagagaatgaatgtac

SEQ ID NO: 172280 - DNA, 33 bp, Homo sapien
accttgttttttttcctgagagaatgaatgtac

SEQ ID NO: 172281 - DNA, 33 bp, Homo sapien
aatgagaacctagaaccgagagtcaaaaggaca

SEQ ID NO: 172282 - DNA, 33 bp, Homo sapien
aatgagaacctagaactgagagtcaaaaggaca

SEQ ID NO: 172283 - DNA, 33 bp, Homo sapien
tgtttagaaatcactcaaaaaaccgtttttatc

SEQ ID NO: 172284 - DNA, 33 bp, Homo sapien
tgtttagaaatcactcgaaaaaccgtttttatc

SEQ ID NO: 172285 - DNA, 33 bp, Homo sapien
ggttggtctccagggaccttcatgaaatagctc

SEQ ID NO: 172286 - DNA, 33 bp, Homo sapien
ggttggtctccagggatcttcatgaaatagctc

SEQ ID NO: 172287 - DNA, 33 bp, Homo sapien
ttgaaatgtctcccagaagtcaccttaaagcca

SEQ ID NO: 172288 - DNA, 33 bp, Homo sapien
ttgaaatgtctcccaggagtcaccttaaagcca

SEQ ID NO: 172289 - DNA, 33 bp, Homo sapien
gggctcagaaacaacaatagatacaaatttaac

SEQ ID NO: 172290 - DNA, 33 bp, Homo sapien
gggctcagaaacaacactagatacaaatttaac

SEQ ID NO: 172291 - DNA, 33 bp, Homo sapien
cccaagactgggattccctgtaactcaaccagt

SEQ ID NO: 172292 - DNA, 33 bp, Homo sapien
cccaagactgggattctctgtaactcaaccagt

SEQ ID NO: 172293 - DNA, 33 bp, Homo sapien
cctcccgcttgttggccactgggaaagaaactc

SEQ ID NO: 172294 - DNA, 33 bp, Homo sapien
cctcccgcttgttggcgactgggaaagaaactc

SEQ ID NO: 172295 - DNA, 33 bp, Homo sapien
ggagaccttagttgaaaattcccagaattccag

SEQ ID NO: 172296 - DNA, 33 bp, Homo sapien
ggagaccttagttgaacattcccagaattccag

SEQ ID NO: 172297 - DNA, 33 bp, Homo sapien
tcaggctcagagaacaaggcaatgaagatcatg

SEQ ID NO: 172298 - DNA, 33 bp, Homo sapien
tcaggctcagagaacacggcaatgaagatcatg

SEQ ID NO: 172299 - DNA, 33 bp, Homo sapien
gcaggggagaggccgacggtgccccctacttcc

SEQ ID NO: 172300 - DNA, 33 bp, Homo sapien
gcaggggagaggccgatggtgccccctacttcc

SEQ ID NO: 172301 - DNA, 33 bp, Homo sapien
cctgaaggaatgtagagcttctgggaaatggtg

SEQ ID NO: 172302 - DNA, 33 bp, Homo sapien
cctgaaggaatgtagatcttctgggaaatggtg

SEQ ID NO: 172303 - DNA, 33 bp, Homo sapien
ggcataactttgttaaaggcatctgtctgtagg

SEQ ID NO: 172304 - DNA, 33 bp, Homo sapien
ggcataactttgttaagggcatctgtctgtagg

SEQ ID NO: 172305 - DNA, 33 bp, Homo sapien
gccaccaaatttgtgacaatttactacaacatc

SEQ ID NO: 172306 - DNA, 33 bp, Homo sapien
gccaccaaatttgtgataatttactacaacatc

SEQ ID NO: 172307 - DNA, 33 bp, Homo sapien
ccgtgagattcaaggacatcttagctagtgcag

SEQ ID NO: 172308 - DNA, 33 bp, Homo sapien
ccgtgagattcaaggagatcttagctagtgcag

SEQ ID NO: 172309 - DNA, 33 bp, Homo sapien
ccctgtgcatccaccactgatcagagaaggcag

SEQ ID NO: 172310 - DNA, 33 bp, Homo sapien
ccctgtgcatccaccattgatcagagaaggcag

SEQ ID NO: 172311 - DNA, 33 bp, Homo sapien
cacaggctccctcagaaatgtcttagtaggttg

SEQ ID NO: 172312 - DNA, 33 bp, Homo sapien
cacaggctccctcagagatgtcttagtaggttg

SEQ ID NO: 172313 - DNA, 33 bp, Homo sapien
aggtacattgtgttccagatttgactattggaa

SEQ ID NO: 172314 - DNA, 33 bp, Homo sapien
aggtacattgtgttccggatttgactattggaa

SEQ ID NO: 172315 - DNA, 33 bp, Homo sapien
attttattgatttgagactactcatgttttcaa

SEQ ID NO: 172316 - DNA, 33 bp, Homo sapien
attttattgatttgagtctactcatgttttcaa

SEQ ID NO: 172317 - DNA, 33 bp, Homo sapien
ggatcagaaagtcgaacggcttgtcataaggaa

SEQ ID NO: 172318 - DNA, 33 bp, Homo sapien
ggatcagaaagtcgaatggcttgtcataaggaa

SEQ ID NO: 172319 - DNA, 33 bp, Homo sapien
gacccggctgcttctactaacggtactgtgtga

SEQ ID NO: 172320 - DNA, 33 bp, Homo sapien
gacccggctgcttctattaacggtactgtgtga

SEQ ID NO: 172321 - DNA, 33 bp, Homo sapien
gtaagtgggtatctgccaatcctgacatctgtc

SEQ ID NO: 172322 - DNA, 33 bp, Homo sapien
gtaagtgggtatctgctaatcctgacatctgtc

SEQ ID NO: 172323 - DNA, 33 bp, Homo sapien
ggcccgactatttacaatctgtctgacctgagc

SEQ ID NO: 172324 - DNA, 33 bp, Homo sapien
ggcccgactatttacagtctgtctgacctgagc

SEQ ID NO: 172325 - DNA, 33 bp, Homo sapien
cctggcctccagccctcaaaattagcagcaaag

SEQ ID NO: 172326 - DNA, 33 bp, Homo sapien
cctggcctccagccctgaaaattagcagcaaag

SEQ ID NO: 172327 - DNA, 33 bp, Homo sapien
gcttgaatccaggatacgagagcaaacctatgt

SEQ ID NO: 172328 - DNA, 33 bp, Homo sapien
gcttgaatccaggatatgagagcaaacctatgt

SEQ ID NO: 172329 - DNA, 33 bp, Homo sapien
accattcagactgacacccatcagcaaaaaagt

SEQ ID NO: 172330 - DNA, 33 bp, Homo sapien
accattcagactgacatccatcagcaaaaaagt

SEQ ID NO: 172331 - DNA, 33 bp, Homo sapien
ctaatcagagtagctacctaataaggcaactaa

SEQ ID NO: 172332 - DNA, 33 bp, Homo sapien
ctaatcagagtagctatctaataaggcaactaa

SEQ ID NO: 172333 - DNA, 33 bp, Homo sapien
tagtgagcacctgttacgtgcttattttaatct

SEQ ID NO: 172334 - DNA, 33 bp, Homo sapien
tagtgagcacctgttatgtgcttattttaatct

SEQ ID NO: 172335 - DNA, 33 bp, Homo sapien
agcgcatgtaaggctacagttgtcagccaggat

SEQ ID NO: 172336 - DNA, 33 bp, Homo sapien
agcgcatgtaaggctatagttgtcagccaggat

SEQ ID NO: 172337 - DNA, 33 bp, Homo sapien
ttagtgactaaagttgcatatcttgtccgtgtg

SEQ ID NO: 172338 - DNA, 33 bp, Homo sapien
ttagtgactaaagttgtatatcttgtccgtgtg

SEQ ID NO: 172339 - DNA, 33 bp, Homo sapien
gagattttccctatcacgtggtcaacaggaagc

SEQ ID NO: 172340 - DNA, 33 bp, Homo sapien
gagattttccctatcatgtggtcaacaggaagc

SEQ ID NO: 172341 - DNA, 33 bp, Homo sapien
tcattcatttgtacaccaagtcttttttgaatg

SEQ ID NO: 172342 - DNA, 33 bp, Homo sapien
tcattcatttgtacactaagtcttttttgaatg

SEQ ID NO: 172343 - DNA, 33 bp, Homo sapien
gctgttagaagcacgcagcatagatgagcctct

SEQ ID NO: 172344 - DNA, 33 bp, Homo sapien
gctgttagaagcacgcggcatagatgagcctct

SEQ ID NO: 172345 - DNA, 33 bp, Homo sapien
ggacagctgcatggccagagaggagcagtgagg

SEQ ID NO: 172346 - DNA, 33 bp, Homo sapien
ggacagctgcatggccggagaggagcagtgagg

SEQ ID NO: 172347 - DNA, 33 bp, Homo sapien
gacttctggacctcccaaggcctagagaagact

SEQ ID NO: 172348 - DNA, 33 bp, Homo sapien
gacttctggacctcccgaggcctagagaagact

SEQ ID NO: 172349 - DNA, 33 bp, Homo sapien
tgagtttcctcaatacccaggtagaaccaatgg

SEQ ID NO: 172350 - DNA, 33 bp, Homo sapien
tgagtttcctcaatactcaggtagaaccaatgg

SEQ ID NO: 172351 - DNA, 33 bp, Homo sapien
atcaaagatgaagctacactagtaaaatgctga

SEQ ID NO: 172352 - DNA, 33 bp, Homo sapien
atcaaagatgaagctagactagtaaaatgctga

SEQ ID NO: 172353 - DNA, 33 bp, Homo sapien
ggcttgcagatttgaaatccatgtccccggtat

SEQ ID NO: 172354 - DNA, 33 bp, Homo sapien
ggcttgcagatttgaactccatgtccccggtat

SEQ ID NO: 172355 - DNA, 33 bp, Homo sapien
aaagggcatacactgccgagggagtcacctgcc

SEQ ID NO: 172356 - DNA, 33 bp, Homo sapien
aaagggcatacactgctgagggagtcacctgcc

SEQ ID NO: 172357 - DNA, 33 bp, Homo sapien
agtgggaagtctattacgagtttcactttgtgt

SEQ ID NO: 172358 - DNA, 33 bp, Homo sapien
agtgggaagtctattatgagtttcactttgtgt

SEQ ID NO: 172359 - DNA, 33 bp, Homo sapien
aggagttagggaacaacgaaatgcaaacttctc

SEQ ID NO: 172360 - DNA, 33 bp, Homo sapien
aggagttagggaacaatgaaatgcaaacttctc

SEQ ID NO: 172361 - DNA, 33 bp, Homo sapien
cttggtcagcaaatgacagtaaggagttaggga

SEQ ID NO: 172362 - DNA, 33 bp, Homo sapien
cttggtcagcaaatgagagtaaggagttaggga

SEQ ID NO: 172363 - DNA, 33 bp, Homo sapien
tgttctgacagcccgaagaaacaaatacaccac

SEQ ID NO: 172364 - DNA, 33 bp, Homo sapien
tgttctgacagcccgaggaaacaaatacaccac

SEQ ID NO: 172365 - DNA, 33 bp, Homo sapien
gccagctgtgtgtgtacgtatggaccgtgctca

SEQ ID NO: 172366 - DNA, 33 bp, Homo sapien
gccagctgtgtgtgtatgtatggaccgtgctca

SEQ ID NO: 172367 - DNA, 33 bp, Homo sapien
ctgagaagatagtacaaacagttcccatacacc

SEQ ID NO: 172368 - DNA, 33 bp, Homo sapien
ctgagaagatagtacagacagttcccatacacc

SEQ ID NO: 172369 - DNA, 33 bp, Homo sapien
gagcacggaagatgcacggtagtcaacatttac

SEQ ID NO: 172370 - DNA, 33 bp, Homo sapien
gagcacggaagatgcatggtagtcaacatttac

SEQ ID NO: 172371 - DNA, 33 bp, Homo sapien
gcaacttacagcagccagaggtctcatctgtca

SEQ ID NO: 172372 - DNA, 33 bp, Homo sapien
gcaacttacagcagccggaggtctcatctgtca

SEQ ID NO: 172373 - DNA, 33 bp, Homo sapien
gttggtttagtgcttcccagtcaagatttccct

SEQ ID NO: 172374 - DNA, 33 bp, Homo sapien
gttggtttagtgcttcgcagtcaagatttccct

SEQ ID NO: 172375 - DNA, 33 bp, Homo sapien
gaagggcaatctccacaactccaaagtgagccc

SEQ ID NO: 172376 - DNA, 33 bp, Homo sapien
gaagggcaatctccacgactccaaagtgagccc

SEQ ID NO: 172377 - DNA, 33 bp, Homo sapien
ttcctcaaacatacccacgctggctggtttcag

SEQ ID NO: 172378 - DNA, 33 bp, Homo sapien
ttcctcaaacatacccgcgctggctggtttcag

SEQ ID NO: 172379 - DNA, 33 bp, Homo sapien
ggagtcctaatagagaaaggaggaaaaccttgt

SEQ ID NO: 172380 - DNA, 33 bp, Homo sapien
ggagtcctaatagagagaggaggaaaaccttgt

SEQ ID NO: 172381 - DNA, 33 bp, Homo sapien
gaaaatgaggccgagaagttaaggtatttgcct

SEQ ID NO: 172382 - DNA, 33 bp, Homo sapien
gaaaatgaggccgagaggttaaggtatttgcct

SEQ ID NO: 172383 - DNA, 33 bp, Homo sapien
gctcactttgtaatgagatctttcctgaggatc

SEQ ID NO: 172384 - DNA, 33 bp, Homo sapien
gctcactttgtaatgatatctttcctgaggatc

SEQ ID NO: 172385 - DNA, 33 bp, Homo sapien
gtgagtcttattctaagagatgccaaccaatcc

SEQ ID NO: 172386 - DNA, 33 bp, Homo sapien
gtgagtcttattctaatagatgccaaccaatcc

SEQ ID NO: 172387 - DNA, 33 bp, Homo sapien
tttgggggaatgtgaacggcccagagaaaggat

SEQ ID NO: 172388 - DNA, 33 bp, Homo sapien
tttgggggaatgtgaatggcccagagaaaggat

SEQ ID NO: 172389 - DNA, 33 bp, Homo sapien
aattcttacaacaacccgaagatatgttctcat

SEQ ID NO: 172390 - DNA, 33 bp, Homo sapien
aattcttacaacaacctgaagatatgttctcat

SEQ ID NO: 172391 - DNA, 33 bp, Homo sapien
tgcagctggaggtgatcaagcagtggctggagt

SEQ ID NO: 172392 - DNA, 33 bp, Homo sapien
tgcagctggaggtgattaagcagtggctggagt

SEQ ID NO: 172393 - DNA, 33 bp, Homo sapien
gctgagctctacgaccaccgtgacctgggactg

SEQ ID NO: 172394 - DNA, 33 bp, Homo sapien
gctgagctctacgaccgccgtgacctgggactg

SEQ ID NO: 172395 - DNA, 33 bp, Homo sapien
gccgtctcagcaatccaactccctcggtggtac

SEQ ID NO: 172396 - DNA, 33 bp, Homo sapien
gccgtctcagcaatccgactccctcggtggtac

SEQ ID NO: 172397 - DNA, 33 bp, Homo sapien
tggcaaattgatgctacgagccaaaaaatccct

SEQ ID NO: 172398 - DNA, 33 bp, Homo sapien
tggcaaattgatgctatgagccaaaaaatccct

SEQ ID NO: 172399 - DNA, 33 bp, Homo sapien
ttagatcctattgacaagagctgtaactggctg

SEQ ID NO: 172400 - DNA, 33 bp, Homo sapien
ttagatcctattgacaggagctgtaactggctg

SEQ ID NO: 172401 - DNA, 33 bp, Homo sapien
tgagtgtgagaagcacaggggctgcgtcatcag

SEQ ID NO: 172402 - DNA, 33 bp, Homo sapien
tgagtgtgagaagcacgggggctgcgtcatcag

SEQ ID NO: 172403 - DNA, 33 bp, Homo sapien
tgatggtgaaaccacccgcactgatgatgcatc

SEQ ID NO: 172404 - DNA, 33 bp, Homo sapien
tgatggtgaaaccaccggcactgatgatgcatc

SEQ ID NO: 172405 - DNA, 33 bp, Homo sapien
agtcttacaacctacacagagtcaaacaaagcc

SEQ ID NO: 172406 - DNA, 33 bp, Homo sapien
agtcttacaacctacatagagtcaaacaaagcc

SEQ ID NO: 172407 - DNA, 33 bp, Homo sapien
tggtttcctctctttcacttccacagagtcctg

SEQ ID NO: 172408 - DNA, 33 bp, Homo sapien
tggtttcctctctttcgcttccacagagtcctg

SEQ ID NO: 172409 - DNA, 33 bp, Homo sapien
gagagccaaattacacagaccgggacaggcaat

SEQ ID NO: 172410 - DNA, 33 bp, Homo sapien
gagagccaaattacacggaccgggacaggcaat

SEQ ID NO: 172411 - DNA, 33 bp, Homo sapien
gaaaaaaagtgcctaacacatactagtagctca

SEQ ID NO: 172412 - DNA, 33 bp, Homo sapien
gaaaaaaagtgcctaatacatactagtagctca

SEQ ID NO: 172413 - DNA, 33 bp, Homo sapien
gcgctggctcatacaaataatataattcaattg

SEQ ID NO: 172414 - DNA, 33 bp, Homo sapien
gcgctggctcatacaagtaatataattcaattg

SEQ ID NO: 172415 - DNA, 33 bp, Homo sapien
ggagaatcacatatctaacttactctggccatt

SEQ ID NO: 172416 - DNA, 33 bp, Homo sapien
ggagaatcacatatctcacttactctggccatt

SEQ ID NO: 172417 - DNA, 33 bp, Homo sapien
cagcatactgttttcaatatgctgtcaatatag

SEQ ID NO: 172418 - DNA, 33 bp, Homo sapien
cagcatactgttttcagtatgctgtcaatatag

SEQ ID NO: 172419 - DNA, 33 bp, Homo sapien
gggggtgataagcatacagtactttctcctagc

SEQ ID NO: 172420 - DNA, 33 bp, Homo sapien
gggggtgataagcatatagtactttctcctagc

SEQ ID NO: 172421 - DNA, 33 bp, Homo sapien
atggtagagtatgaacagcagaggtgagaggca

SEQ ID NO: 172422 - DNA, 33 bp, Homo sapien
atggtagagtatgaacggcagaggtgagaggca

SEQ ID NO: 172423 - DNA, 33 bp, Homo sapien
tgcagtaatcctcccccgaagaggtgctcgact

SEQ ID NO: 172424 - DNA, 33 bp, Homo sapien
tgcagtaatcctcccctgaagaggtgctcgact

SEQ ID NO: 172425 - DNA, 33 bp, Homo sapien
catcttatgactgaggaaacaggctcaagaatg

SEQ ID NO: 172426 - DNA, 33 bp, Homo sapien
catcttatgactgagggaacaggctcaagaatg

SEQ ID NO: 172427 - DNA, 33 bp, Homo sapien
cagcactgctcgttaacagccccaaactggaaa

SEQ ID NO: 172428 - DNA, 33 bp, Homo sapien
cagcactgctcgttaatagccccaaactggaaa

SEQ ID NO: 172429 - DNA, 33 bp, Homo sapien
catataggtatgtgtacgtatagaggtggttat

SEQ ID NO: 172430 - DNA, 33 bp, Homo sapien
catataggtatgtgtatgtatagaggtggttat

SEQ ID NO: 172431 - DNA, 33 bp, Homo sapien
tagcagcttgtaatgacgggaaacgctattgat

SEQ ID NO: 172432 - DNA, 33 bp, Homo sapien
tagcagcttgtaatgatgggaaacgctattgat

SEQ ID NO: 172433 - DNA, 33 bp, Homo sapien
ttaaccgattccaagcactcaacagcactaaga

SEQ ID NO: 172434 - DNA, 33 bp, Homo sapien
ttaaccgattccaagctctcaacagcactaaga

SEQ ID NO: 172435 - DNA, 33 bp, Homo sapien
tcagacggacaccgcaatccacgctccttttta

SEQ ID NO: 172436 - DNA, 33 bp, Homo sapien
tcagacggacaccgcagtccacgctccttttta

SEQ ID NO: 172437 - DNA, 33 bp, Homo sapien
tccacgctcctttttacagccacactgctccac

SEQ ID NO: 172438 - DNA, 33 bp, Homo sapien
tccacgctcctttttatagccacactgctccac

SEQ ID NO: 172439 - DNA, 33 bp, Homo sapien
aaacgcttcagtccaagttctgtagctctgtgc

SEQ ID NO: 172440 - DNA, 33 bp, Homo sapien
aaacgcttcagtccaatttctgtagctctgtgc

SEQ ID NO: 172441 - DNA, 33 bp, Homo sapien
ccctgctgcagtcttacgctccatgcagtccct

SEQ ID NO: 172442 - DNA, 33 bp, Homo sapien
ccctgctgcagtcttatgctccatgcagtccct

SEQ ID NO: 172443 - DNA, 33 bp, Homo sapien
atatggaagactaagactcgcagagaccctgcc

SEQ ID NO: 172444 - DNA, 33 bp, Homo sapien
atatggaagactaagattcgcagagaccctgcc

SEQ ID NO: 172445 - DNA, 33 bp, Homo sapien
cgatacaacttcactcaagagctcgccgcttcc

SEQ ID NO: 172446 - DNA, 33 bp, Homo sapien
cgatacaacttcactcgagagctcgccgcttcc

SEQ ID NO: 172447 - DNA, 33 bp, Homo sapien
attgatgacttcaggtcacacgatacaggaatg

SEQ ID NO: 172448 - DNA, 33 bp, Homo sapien
attgatgacttcaggttacacgatacaggaatg

SEQ ID NO: 172449 - DNA, 33 bp, Homo sapien
tgggttctgccttcgaaatgtagtcagactctg

SEQ ID NO: 172450 - DNA, 33 bp, Homo sapien
tgggttctgccttcgagatgtagtcagactctg

SEQ ID NO: 172451 - DNA, 33 bp, Homo sapien
agagggaaagactgagccgggaatgcctgaggc

SEQ ID NO: 172452 - DNA, 33 bp, Homo sapien
agagggaaagactgagtcgggaatgcctgaggc

SEQ ID NO: 172453 - DNA, 33 bp, Homo sapien
gatgggcctctcggtgaatcaagatggcttcac

SEQ ID NO: 172454 - DNA, 33 bp, Homo sapien
gatgggcctctcggtgcatcaagatggcttcac

SEQ ID NO: 172455 - DNA, 33 bp, Homo sapien
cttcctaccagggttcccgcccactggagccag

SEQ ID NO: 172456 - DNA, 33 bp, Homo sapien
cttcctaccagggttctcgcccactggagccag

SEQ ID NO: 172457 - DNA, 33 bp, Homo sapien
attttcatggggtccaaattctttctcttcagg

SEQ ID NO: 172458 - DNA, 33 bp, Homo sapien
attttcatggggtccagattctttctcttcagg

SEQ ID NO: 172459 - DNA, 33 bp, Homo sapien
tccacctcgagggacaagtttgatataagaata

SEQ ID NO: 172460 - DNA, 33 bp, Homo sapien
tccacctcgagggacaggtttgatataagaata

SEQ ID NO: 172461 - DNA, 33 bp, Homo sapien
cctatgccttatggtccaacaagtctaatctta

SEQ ID NO: 172462 - DNA, 33 bp, Homo sapien
cctatgccttatggtcgaacaagtctaatctta

SEQ ID NO: 172463 - DNA, 33 bp, Homo sapien
tgacctggaagcgctcatgcagccagaccctga

SEQ ID NO: 172464 - DNA, 33 bp, Homo sapien
tgacctggaagcgctcgtgcagccagaccctga

SEQ ID NO: 172465 - DNA, 33 bp, Homo sapien
gagcatctctatttcccgagtcatcatactcaa

SEQ ID NO: 172466 - DNA, 33 bp, Homo sapien
gagcatctctatttcctgagtcatcatactcaa

SEQ ID NO: 172467 - DNA, 33 bp, Homo sapien
atccaagagtaaacccaagtcggacagatggaa

SEQ ID NO: 172468 - DNA, 33 bp, Homo sapien
atccaagagtaaaccctagtcggacagatggaa

SEQ ID NO: 172469 - DNA, 33 bp, Homo sapien
tgccaaagcttggagcgaggatgtcagtgcagg

SEQ ID NO: 172470 - DNA, 33 bp, Homo sapien
tgccaaagcttggagctaggatgtcagtgcagg

SEQ ID NO: 172471 - DNA, 33 bp, Homo sapien
ggctcaacagaggcacacatttatttctgcctg

SEQ ID NO: 172472 - DNA, 33 bp, Homo sapien
ggctcaacagaggcacgcatttatttctgcctg

SEQ ID NO: 172473 - DNA, 33 bp, Homo sapien
ccaggttagaattagacggctcacagacaggcc

SEQ ID NO: 172474 - DNA, 33 bp, Homo sapien
ccaggttagaattagatggctcacagacaggcc

SEQ ID NO: 172475 - DNA, 33 bp, Homo sapien
gtcctgcactctggggcaggcccattgcctctt

SEQ ID NO: 172476 - DNA, 33 bp, Homo sapien
gtcctgcactctggggtaggcccattgcctctt

SEQ ID NO: 172477 - DNA, 33 bp, Homo sapien
tcttgacctcctggccacaaatgagccttctac

SEQ ID NO: 172478 - DNA, 33 bp, Homo sapien
tcttgacctcctggccgcaaatgagccttctac

SEQ ID NO: 172479 - DNA, 33 bp, Homo sapien
gtaacacagcctccaaaaacacatcgcaaactt

SEQ ID NO: 172480 - DNA, 33 bp, Homo sapien
gtaacacagcctccaacaacacatcgcaaactt

SEQ ID NO: 172481 - DNA, 33 bp, Homo sapien
agcggcgtgcggaacacagtaagtaccactaag

SEQ ID NO: 172482 - DNA, 33 bp, Homo sapien
agcggcgtgcggaacatagtaagtaccactaag

SEQ ID NO: 172483 - DNA, 33 bp, Homo sapien
tactttatatcttgacaaaatcgatcccacagg

SEQ ID NO: 172484 - DNA, 33 bp, Homo sapien
tactttatatcttgactaaatcgatcccacagg

SEQ ID NO: 172485 - DNA, 33 bp, Homo sapien
ggctggcatgccacacactcatctcagtgccct

SEQ ID NO: 172486 - DNA, 33 bp, Homo sapien
ggctggcatgccacactctcatctcagtgccct

SEQ ID NO: 172487 - DNA, 33 bp, Homo sapien
gaaaagaaaaccagatcaggcctgcaaatattt

SEQ ID NO: 172488 - DNA, 33 bp, Homo sapien
gaaaagaaaaccagattaggcctgcaaatattt

SEQ ID NO: 172489 - DNA, 33 bp, Homo sapien
cagctggaatcattccaggaaaagaaaaccaga

SEQ ID NO: 172490 - DNA, 33 bp, Homo sapien
cagctggaatcattccgggaaaagaaaaccaga

SEQ ID NO: 172491 - DNA, 33 bp, Homo sapien
gagtctggtacttggacgcacagctggaatcat

SEQ ID NO: 172492 - DNA, 33 bp, Homo sapien
gagtctggtacttggatgcacagctggaatcat

SEQ ID NO: 172493 - DNA, 33 bp, Homo sapien
ccagcctttggagttacgttcctctgttgactg

SEQ ID NO: 172494 - DNA, 33 bp, Homo sapien
ccagcctttggagttatgttcctctgttgactg

SEQ ID NO: 172495 - DNA, 33 bp, Homo sapien
caaaccttgttccaataaggcaaatgtcaatct

SEQ ID NO: 172496 - DNA, 33 bp, Homo sapien
caaaccttgttccaatgaggcaaatgtcaatct

SEQ ID NO: 172497 - DNA, 33 bp, Homo sapien
gtcttccgtccacacccgaacacaccatcgtca

SEQ ID NO: 172498 - DNA, 33 bp, Homo sapien
gtcttccgtccacacctgaacacaccatcgtca

SEQ ID NO: 172499 - DNA, 33 bp, Homo sapien
aggtctggcaacagaactggagccggacttaag

SEQ ID NO: 172500 - DNA, 33 bp, Homo sapien
aggtctggcaacagaagtggagccggacttaag

SEQ ID NO: 172501 - DNA, 33 bp, Homo sapien
gccccagaatcccgagaaacatacaatcccttc

SEQ ID NO: 172502 - DNA, 33 bp, Homo sapien
gccccagaatcccgagcaacatacaatcccttc

SEQ ID NO: 172503 - DNA, 33 bp, Homo sapien
gcagaccctctgttcacgcccctgggcttctct

SEQ ID NO: 172504 - DNA, 33 bp, Homo sapien
gcagaccctctgttcatgcccctgggcttctct

SEQ ID NO: 172505 - DNA, 33 bp, Homo sapien
ccaaagagattcataaactttgttgagagagaa

SEQ ID NO: 172506 - DNA, 33 bp, Homo sapien
ccaaagagattcataacctttgttgagagagaa

SEQ ID NO: 172507 - DNA, 33 bp, Homo sapien
aagtgagaagaaattacagcgagtgactataac

SEQ ID NO: 172508 - DNA, 33 bp, Homo sapien
aagtgagaagaaattagagcgagtgactataac

SEQ ID NO: 172509 - DNA, 33 bp, Homo sapien
agaagcaagctgggcccatcaaaacaggttggt

SEQ ID NO: 172510 - DNA, 33 bp, Homo sapien
agaagcaagctgggcctatcaaaacaggttggt

SEQ ID NO: 172511 - DNA, 33 bp, Homo sapien; identical to SEQ ID NO: 172509

SEQ ID NO: 172512 - DNA, 33 bp, Homo sapien; identical to SEQ ID NO: 172510

SEQ ID NO: 172513 - DNA, 33 bp, Homo sapien
tgaccacaaatgcgccaaaggcacggcctagtc

SEQ ID NO: 172514 - DNA, 33 bp, Homo sapien
tgaccacaaatgcgccgaaggcacggcctagtc

SEQ ID NO: 172515 - DNA, 33 bp, Homo sapien
gggtgtgaagatgcaccagtagttgtccctcaa

SEQ ID NO: 172516 - DNA, 33 bp, Homo sapien
gggtgtgaagatgcacgagtagttgtccctcaa

SEQ ID NO: 172517 - DNA, 33 bp, Homo sapien
gccaagcgtgatggtacgtgccgatagtcccag

SEQ ID NO: 172518 - DNA, 33 bp, Homo sapien
gccaagcgtgatggtatgtgccgatagtcccag

SEQ ID NO: 172519 - DNA, 33 bp, Homo sapien
ggcactgatgcctaagaataacctgtatcaaca

SEQ ID NO: 172520 - DNA, 33 bp, Homo sapien
ggcactgatgcctaaggataacctgtatcaaca

SEQ ID NO: 172521 - DNA, 33 bp, Homo sapien
gcagctgacagacacaagagtgagcccagatga

SEQ ID NO: 172522 - DNA, 33 bp, Homo sapien
gcagctgacagacacatgagtgagcccagatga

SEQ ID NO: 172523 - DNA, 33 bp, Homo sapien
gccagcgaaagatgccactcagtattagcgtgg

SEQ ID NO: 172524 - DNA, 33 bp, Homo sapien
gccagcgaaagatgccgctcagtattagcgtgg

SEQ ID NO: 172525 - DNA, 33 bp, Homo sapien
tgccatcgtatggacacgatttgaagtacagaa

SEQ ID NO: 172526 - DNA, 33 bp, Homo sapien
tgccatcgtatggacaggatttgaagtacagaa

SEQ ID NO: 172527 - DNA, 33 bp, Homo sapien
cattagaggtctcttaagaggctttccacagtc

SEQ ID NO: 172528 - DNA, 33 bp, Homo sapien
cattagaggtctcttaggaggctttccacagtc

SEQ ID NO: 172529 - DNA, 33 bp, Homo sapien
cactgttaaacatacacacttgtgaacagaagt

SEQ ID NO: 172530 - DNA, 33 bp, Homo sapien
cactgttaaacatacatacttgtgaacagaagt

SEQ ID NO: 172531 - DNA, 33 bp, Homo sapien
tcataacacctgctcccgcatttaattaagcac

SEQ ID NO: 172532 - DNA, 33 bp, Homo sapien
tcataacacctgctcctgcatttaattaagcac

SEQ ID NO: 172533 - DNA, 33 bp, Homo sapien
ttactaatgggatataactgccaagcagactaa

SEQ ID NO: 172534 - DNA, 33 bp, Homo sapien
ttactaatgggatatacctgccaagcagactaa

SEQ ID NO: 172535 - DNA, 33 bp, Homo sapien
cattacaaattttagacacatatacctgaatta

SEQ ID NO: 172536 - DNA, 33 bp, Homo sapien
cattacaaattttagagacatatacctgaatta

SEQ ID NO: 172537 - DNA, 33 bp, Homo sapien
agccatatttcagcccagaaaaagtgtgtggaa

SEQ ID NO: 172538 - DNA, 33 bp, Homo sapien
agccatatttcagcccggaaaaagtgtgtggaa

SEQ ID NO: 172539 - DNA, 33 bp, Homo sapien
tccctcagctggtcaaaagatgaacagaccatg

SEQ ID NO: 172540 - DNA, 33 bp, Homo sapien
tccctcagctggtcaacagatgaacagaccatg

SEQ ID NO: 172541 - DNA, 33 bp, Homo sapien
tcacaagaatctgatccatactaagcagctgcc

SEQ ID NO: 172542 - DNA, 33 bp, Homo sapien
tcacaagaatctgatctatactaagcagctgcc

SEQ ID NO: 172543 - DNA, 33 bp, Homo sapien
aagatgaggtctgatacactgagatgtgccagc

SEQ ID NO: 172544 - DNA, 33 bp, Homo sapien
aagatgaggtctgatatactgagatgtgccagc

SEQ ID NO: 172545 - DNA, 33 bp, Homo sapien
aaaaattggtatataaatggacgcatgcagttc

SEQ ID NO: 172546 - DNA, 33 bp, Homo sapien
aaaaattggtatataagtggacgcatgcagttc

SEQ ID NO: 172547 - DNA, 33 bp, Homo sapien
aatatgcagaggtaacactttgttgcagtgacg

SEQ ID NO: 172548 - DNA, 33 bp, Homo sapien
aatatgcagaggtaacgctttgttgcagtgacg

SEQ ID NO: 172549 - DNA, 33 bp, Homo sapien
tgaccgtgggggcgcacgttgggtccagggcgt

SEQ ID NO: 172550 - DNA, 33 bp, Homo sapien
tgaccgtgggggcgcaggttgggtccagggcgt

SEQ ID NO: 172551 - DNA, 33 bp, Homo sapien
gcccccacggtcattacgtcacccatcactcct

SEQ ID NO: 172552 - DNA, 33 bp, Homo sapien
gcccccacggtcattatgtcacccatcactcct

SEQ ID NO: 172553 - DNA, 33 bp, Homo sapien
ccaggccagagtgtcaacaagtcagacttcctc

SEQ ID NO: 172554 - DNA, 33 bp, Homo sapien
ccaggccagagtgtcaccaagtcagacttcctc

SEQ ID NO: 172555 - DNA, 33 bp, Homo sapien
cggaaacacaaacaaacgggcacaagcaccaga

SEQ ID NO: 172556 - DNA, 33 bp, Homo sapien
cggaaacacaaacaaatgggcacaagcaccaga

SEQ ID NO: 172557 - DNA, 33 bp, Homo sapien
aggaaacatgagctgtaaaaggacactcggagg

SEQ ID NO: 172558 - DNA, 33 bp, Homo sapien
aggaaacatgagctgtgaaaggacactcggagg

SEQ ID NO: 172559 - DNA, 33 bp, Homo sapien
acccctgggaattgcgcacatcattgggtgagt

SEQ ID NO: 172560 - DNA, 33 bp, Homo sapien
acccctgggaattgcgtacatcattgggtgagt

SEQ ID NO: 172561 - DNA, 33 bp, Homo sapien
agctacaaagacagcactataatcccacatgaa

SEQ ID NO: 172562 - DNA, 33 bp, Homo sapien
agctacaaagacagcattataatcccacatgaa

SEQ ID NO: 172563 - DNA, 33 bp, Homo sapien
gctggaggtggagtgaaccttgtttccatctat

SEQ ID NO: 172564 - DNA, 33 bp, Homo sapien
gctggaggtggagtgatccttgtttccatctat

SEQ ID NO: 172565 - DNA, 33 bp, Homo sapien
gtggtagcaggcgaagaaagaagagtcatggaa

SEQ ID NO: 172566 - DNA, 33 bp, Homo sapien
gtggtagcaggcgaaggaagaagagtcatggaa

SEQ ID NO: 172567 - DNA, 33 bp, Homo sapien
ttggcatttctttctccccttgttgttcaggaa

SEQ ID NO: 172568 - DNA, 33 bp, Homo sapien
ttggcatttctttctctccttgttgttcaggaa

SEQ ID NO: 172569 - DNA, 33 bp, Homo sapien
ggggaaactaaggtacaaagagttaagagactt

SEQ ID NO: 172570 - DNA, 33 bp, Homo sapien
ggggaaactaaggtacgaagagttaagagactt

SEQ ID NO: 172571 - DNA, 33 bp, Homo sapien
ctccagctctgtaacacatggtggaacttcttt

SEQ ID NO: 172572 - DNA, 33 bp, Homo sapien
ctccagctctgtaacatatggtggaacttcttt

SEQ ID NO: 172573 - DNA, 33 bp, Homo sapien
tcagcatcatcctggactatgttcttccaagaa

SEQ ID NO: 172574 - DNA, 33 bp, Homo sapien
tcagcatcatcctggattatgttcttccaagaa

SEQ ID NO: 172575 - DNA, 33 bp, Homo sapien
gcccattgtaggagacaggagggagaggtctga

SEQ ID NO: 172576 - DNA, 33 bp, Homo sapien
gcccattgtaggagacgggagggagaggtctga

SEQ ID NO: 172577 - DNA, 33 bp, Homo sapien
taaaaatgctgaggaaactgtttgtgcagctca

SEQ ID NO: 172578 - DNA, 33 bp, Homo sapien
taaaaatgctgaggaagctgtttgtgcagctca

SEQ ID NO: 172579 - DNA, 33 bp, Homo sapien
gtgagcaagtgcgctccgagccattcggctgta

SEQ ID NO: 172580 - DNA, 33 bp, Homo sapien
gtgagcaagtgcgctctgagccattcggctgta

SEQ ID NO: 172581 - DNA, 33 bp, Homo sapien
gcaaacagaagactcaaagacagaacagcagag

SEQ ID NO: 172582 - DNA, 33 bp, Homo sapien
gcaaacagaagactcagagacagaacagcagag

SEQ ID NO: 172583 - DNA, 33 bp, Homo sapien
cctggcatgggaatcacgttctcataggatgtt

SEQ ID NO: 172584 - DNA, 33 bp, Homo sapien
cctggcatgggaatcatgttctcataggatgtt

SEQ ID NO: 172585 - DNA, 33 bp, Homo sapien
tggctacctctgtctacggggaaatggagcccc

SEQ ID NO: 172586 - DNA, 33 bp, Homo sapien
tggctacctctgtctatggggaaatggagcccc

SEQ ID NO: 172587 - DNA, 33 bp, Homo sapien
agaaataaccaaaacaatagccaaccagcagcc

SEQ ID NO: 172588 - DNA, 33 bp, Homo sapien
agaaataaccaaaacactagccaaccagcagcc

SEQ ID NO: 172589 - DNA, 33 bp, Homo sapien
tagaaaaataacagaacaaaagggctgccggtt

SEQ ID NO: 172590 - DNA, 33 bp, Homo sapien
tagaaaaataacagaataaaagggctgccggtt

SEQ ID NO: 172591 - DNA, 33 bp, Homo sapien
atatcctttgaactgaaaactgaagggcaggaa

SEQ ID NO: 172592 - DNA, 33 bp, Homo sapien
atatcctttgaactgataactgaagggcaggaa

SEQ ID NO: 172593 - DNA, 33 bp, Homo sapien
ggaactccctcaggacaaagtgataccattatt

SEQ ID NO: 172594 - DNA, 33 bp, Homo sapien
ggaactccctcaggacgaagtgataccattatt

SEQ ID NO: 172595 - DNA, 33 bp, Homo sapien
gcggcagcagcagccgaactgtcagtaaggagc

SEQ ID NO: 172596 - DNA, 33 bp, Homo sapien
gcggcagcagcagccggactgtcagtaaggagc

SEQ ID NO: 172597 - DNA, 33 bp, Homo sapien
gatgcccacccccagaccagataagctccagtg

SEQ ID NO: 172598 - DNA, 33 bp, Homo sapien
gatgcccacccccagatcagataagctccagtg

SEQ ID NO: 172599 - DNA, 33 bp, Homo sapien
atgacctcgtcctaccagccatcttcctctttc

SEQ ID NO: 172600 - DNA, 33 bp, Homo sapien
atgacctcgtcctaccggccatcttcctctttc

SEQ ID NO: 172601 - DNA, 33 bp, Homo sapien
gggcgttagggacaaaatacgagtcttcccttc

SEQ ID NO: 172602 - DNA, 33 bp, Homo sapien
gggcgttagggacaaagtacgagtcttcccttc

SEQ ID NO: 172603 - DNA, 33 bp, Homo sapien
agagaaactgaggcaccggaagacctgcttctc

SEQ ID NO: 172604 - DNA, 33 bp, Homo sapien
agagaaactgaggcactggaagacctgcttctc

SEQ ID NO: 172605 - DNA, 33 bp, Homo sapien
cctgtcccgtgcctgcactggctctggagtcca

SEQ ID NO: 172606 - DNA, 33 bp, Homo sapien
cctgtcccgtgcctgccctggctctggagtcca

SEQ ID NO: 172607 - DNA, 33 bp, Homo sapien
agttagccagagtggacacctagcccccagctc

SEQ ID NO: 172608 - DNA, 33 bp, Homo sapien
agttagccagagtggatacctagcccccagctc

SEQ ID NO: 172609 - DNA, 33 bp, Homo sapien
gcagccacaaagcttccaagcatgggagtgatg

SEQ ID NO: 172610 - DNA, 33 bp, Homo sapien
gcagccacaaagcttctaagcatgggagtgatg

SEQ ID NO: 172611 - DNA, 33 bp, Homo sapien
caggtgttcccatgaaagtaaacagtcacagcc

SEQ ID NO: 172612 - DNA, 33 bp, Homo sapien
caggtgttcccatgaaggtaaacagtcacagcc

SEQ ID NO: 172613 - DNA, 33 bp, Homo sapien
taaatgggatgatctacgtaaggctgcaggcct

SEQ ID NO: 172614 - DNA, 33 bp, Homo sapien
taaatgggatgatctatgtaaggctgcaggcct

SEQ ID NO: 172615 - DNA, 33 bp, Homo sapien
tagaagcaatctacctcaatcagaaaatagagc

SEQ ID NO: 172616 - DNA, 33 bp, Homo sapien
tagaagcaatctacctgaatcagaaaatagagc

SEQ ID NO: 172617 - DNA, 33 bp, Homo sapien
tgttttcacctacgcacccttttcaatagttgt

SEQ ID NO: 172618 - DNA, 33 bp, Homo sapien
tgttttcacctacgcatccttttcaatagttgt

SEQ ID NO: 172619 - DNA, 33 bp, Homo sapien
tggttatccagactcactcatcttcagcttctc

SEQ ID NO: 172620 - DNA, 33 bp, Homo sapien
tggttatccagactcagtcatcttcagcttctc

SEQ ID NO: 172621 - DNA, 33 bp, Homo sapien
ggggtccaatcctgcaatatctagtgccactgc

SEQ ID NO: 172622 - DNA, 33 bp, Homo sapien
ggggtccaatcctgcagtatctagtgccactgc

SEQ ID NO: 172623 - DNA, 33 bp, Homo sapien
ggagggatgaacttgacgtagatcattccacct

SEQ ID NO: 172624 - DNA, 33 bp, Homo sapien
ggagggatgaacttgatgtagatcattccacct

SEQ ID NO: 172625 - DNA, 33 bp, Homo sapien
ccaggagtgttgctcacgttactcccttaggcc

SEQ ID NO: 172626 - DNA, 33 bp, Homo sapien
ccaggagtgttgctcatgttactcccttaggcc

SEQ ID NO: 172627 - DNA, 33 bp, Homo sapien
tgtccttttcattgacaaccctggacatgtagg

SEQ ID NO: 172628 - DNA, 33 bp, Homo sapien
tgtccttttcattgaccaccctggacatgtagg

SEQ ID NO: 172629 - DNA, 33 bp, Homo sapien
actcctgcacttctaacgacttttgtcctttgg

SEQ ID NO: 172630 - DNA, 33 bp, Homo sapien
actcctgcacttctaatgacttttgtcctttgg

SEQ ID NO: 172631 - DNA, 33 bp, Homo sapien
cctcacctgtaaatacagacacagctcctcatt

SEQ ID NO: 172632 - DNA, 33 bp, Homo sapien
cctcacctgtaaatacggacacagctcctcatt

SEQ ID NO: 172633 - DNA, 33 bp, Homo sapien
caaattttatctccaagtcttggacccatatat

SEQ ID NO: 172634 - DNA, 33 bp, Homo sapien
caaattttatctccaattcttggacccatatat

SEQ ID NO: 172635 - DNA, 33 bp, Homo sapien
cgagggcaggacctcacgttccaataaggtggc

SEQ ID NO: 172636 - DNA, 33 bp, Homo sapien
cgagggcaggacctcatgttccaataaggtggc

SEQ ID NO: 172637 - DNA, 33 bp, Homo sapien
aaccagaacccacggcactgacaaggaggtgac

SEQ ID NO: 172638 - DNA, 33 bp, Homo sapien
aaccagaacccacggcgctgacaaggaggtgac

SEQ ID NO: 172639 - DNA, 33 bp, Homo sapien
gcccactgccagacaaagagcctaagacctgac

SEQ ID NO: 172640 - DNA, 33 bp, Homo sapien
gcccactgccagacaaggagcctaagacctgac

SEQ ID NO: 172641 - DNA, 33 bp, Homo sapien
ggctgtcccaccatacactgcagtttgcagggc

SEQ ID NO: 172642 - DNA, 33 bp, Homo sapien
ggctgtcccaccatacgctgcagtttgcagggc

SEQ ID NO: 172643 - DNA, 33 bp, Homo sapien
tggcccagggctgccaggtagtagtttgtattc

SEQ ID NO: 172644 - DNA, 33 bp, Homo sapien
tggcccagggctgccatgtagtagtttgtattc

SEQ ID NO: 172645 - DNA, 33 bp, Homo sapien
cggggactccaaaagccattactacatctcgcc

SEQ ID NO: 172646 - DNA, 33 bp, Homo sapien
cggggactccaaaagctattactacatctcgcc

SEQ ID NO: 172647 - DNA, 33 bp, Homo sapien
tcattcattctactcactcatacattcagccac

SEQ ID NO: 172648 - DNA, 33 bp, Homo sapien
tcattcattctactcattcatacattcagccac

SEQ ID NO: 172649 - DNA, 33 bp, Homo sapien
gagccagaaaaggcccaattgtctcttcttgca

SEQ ID NO: 172650 - DNA, 33 bp, Homo sapien
gagccagaaaaggcccgattgtctcttcttgca

SEQ ID NO: 172651 - DNA, 33 bp, Homo sapien
attcctagagatgaaacctgttcacccgctctc

SEQ ID NO: 172652 - DNA, 33 bp, Homo sapien
attcctagagatgaaatctgttcacccgctctc

SEQ ID NO: 172653 - DNA, 33 bp, Homo sapien
atgtagccgtagttcacagacatttgttgacat

SEQ ID NO: 172654 - DNA, 33 bp, Homo sapien
atgtagccgtagttcagagacatttgttgacat

SEQ ID NO: 172655 - DNA, 33 bp, Homo sapien
tcttgctttaggcccactaatactgattttgga

SEQ ID NO: 172656 - DNA, 33 bp, Homo sapien
tcttgctttaggcccagtaatactgattttgga

SEQ ID NO: 172657 - DNA, 33 bp, Homo sapien
tttttttgttcctcaactccttcattattgcct

SEQ ID NO: 172658 - DNA, 33 bp, Homo sapien
tttttttgttcctcaattccttcattattgcct

SEQ ID NO: 172659 - DNA, 33 bp, Homo sapien
aactcaaaataggtcaaattcctaaatgtaaga

SEQ ID NO: 172660 - DNA, 33 bp, Homo sapien
aactcaaaataggtcagattcctaaatgtaaga

SEQ ID NO: 172661 - DNA, 33 bp, Homo sapien
cagagcaggaagattaagaactcgccatatagc

SEQ ID NO: 172662 - DNA, 33 bp, Homo sapien
cagagcaggaagattaggaactcgccatatagc

SEQ ID NO: 172663 - DNA, 33 bp, Homo sapien
ctgacttgcacacttacgtgacttaggggctct

SEQ ID NO: 172664 - DNA, 33 bp, Homo sapien
ctgacttgcacacttatgtgacttaggggctct

SEQ ID NO: 172665 - DNA, 33 bp, Homo sapien
tggctcttgtcatccacaactatgttttctttt

SEQ ID NO: 172666 - DNA, 33 bp, Homo sapien
tggctcttgtcatccagaactatgttttctttt

SEQ ID NO: 172667 - DNA, 33 bp, Homo sapien
tttatctattaagctaaccatttgattcaggct

SEQ ID NO: 172668 - DNA, 33 bp, Homo sapien
tttatctattaagctagccatttgattcaggct

SEQ ID NO: 172669 - DNA, 33 bp, Homo sapien
aacaacggcacttaagaaatctggaagatagcc

SEQ ID NO: 172670 - DNA, 33 bp, Homo sapien
aacaacggcacttaaggaatctggaagatagcc

SEQ ID NO: 172671 - DNA, 33 bp, Homo sapien
ctgtttccagctgcacagatgatatgctaaccc

SEQ ID NO: 172672 - DNA, 33 bp, Homo sapien
ctgtttccagctgcacggatgatatgctaaccc

SEQ ID NO: 172673 - DNA, 33 bp, Homo sapien
aatggcaactgattcccgcatgggtctcagaat

SEQ ID NO: 172674 - DNA, 33 bp, Homo sapien
aatggcaactgattcctgcatgggtctcagaat

SEQ ID NO: 172675 - DNA, 33 bp, Homo sapien
tacacctggctaattaaagcaatttttgatggg

SEQ ID NO: 172676 - DNA, 33 bp, Homo sapien
tacacctggctaattagagcaatttttgatggg

SEQ ID NO: 172677 - DNA, 33 bp, Homo sapien
ctctgcttcctgagatgaaattcttctggcagt

SEQ ID NO: 172678 - DNA, 33 bp, Homo sapien
ctctgcttcctgagattaaattcttctggcagt

SEQ ID NO: 172679 - DNA, 33 bp, Homo sapien
cttctggcagtgctcaagtacggttatgtgatt

SEQ ID NO: 172680 - DNA, 33 bp, Homo sapien
cttctggcagtgctcacgtacggttatgtgatt

SEQ ID NO: 172681 - DNA, 33 bp, Homo sapien
ctctctgccgttcccaaggaaggaggatatttc

SEQ ID NO: 172682 - DNA, 33 bp, Homo sapien
ctctctgccgttcccagggaaggaggatatttc

SEQ ID NO: 172683 - DNA, 33 bp, Homo sapien
aaagcaaaatcatcccaactgatgtgagacctc

SEQ ID NO: 172684 - DNA, 33 bp, Homo sapien
aaagcaaaatcatcccgactgatgtgagacctc

SEQ ID NO: 172685 - DNA, 33 bp, Homo sapien
cacatacagctctgaactctgaatggtgcaggc

SEQ ID NO: 172686 - DNA, 33 bp, Homo sapien
cacatacagctctgaagtctgaatggtgcaggc

SEQ ID NO: 172687 - DNA, 33 bp, Homo sapien
agccccaggaagtgacaaaatcaggaacaccct

SEQ ID NO: 172688 - DNA, 33 bp, Homo sapien
agccccaggaagtgacgaaatcaggaacaccct

SEQ ID NO: 172689 - DNA, 33 bp, Homo sapien
tctgtacagcgagtgacgggaatgtctgactcc

SEQ ID NO: 172690 - DNA, 33 bp, Homo sapien
tctgtacagcgagtgatgggaatgtctgactcc

SEQ ID NO: 172691 - DNA, 33 bp, Homo sapien
cccagatgccagtgccaaagcctctgcagaagc

SEQ ID NO: 172692 - DNA, 33 bp, Homo sapien
cccagatgccagtgccgaagcctctgcagaagc

SEQ ID NO: 172693 - DNA, 33 bp, Homo sapien
tggatgctctcaataaaaataacaaggcccagt

SEQ ID NO: 172694 - DNA, 33 bp, Homo sapien
tggatgctctcaataacaataacaaggcccagt

SEQ ID NO: 172695 - DNA, 33 bp, Homo sapien
ctgtggttaccaagaaagtagccaatgtcaggg

SEQ ID NO: 172696 - DNA, 33 bp, Homo sapien
ctgtggttaccaagaaggtagccaatgtcaggg

SEQ ID NO: 172697 - DNA, 33 bp, Homo sapien
ttccttagactctgggaataggtttgcaaaggc

SEQ ID NO: 172698 - DNA, 33 bp, Homo sapien
ttccttagactctggggataggtttgcaaaggc

SEQ ID NO: 172699 - DNA, 33 bp, Homo sapien
gtgtagaagagttggacgaggtgaacattccgc

SEQ ID NO: 172700 - DNA, 33 bp, Homo sapien
gtgtagaagagttggatgaggtgaacattccgc

SEQ ID NO: 172701 - DNA, 33 bp, Homo sapien
tctttgtcatacggaacagtcagccttgatggt

SEQ ID NO: 172702 - DNA, 33 bp, Homo sapien
tctttgtcatacggaatagtcagccttgatggt

SEQ ID NO: 172703 - DNA, 33 bp, Homo sapien
ttttcacattgctaccaaatatatcctaaaatg

SEQ ID NO: 172704 - DNA, 33 bp, Homo sapien
ttttcacattgctaccgaatatatcctaaaatg

SEQ ID NO: 172705 - DNA, 33 bp, Homo sapien
agggatcatggctgtcgacaagtggcaccccaa

SEQ ID NO: 172706 - DNA, 33 bp, Homo sapien
agggatcatggctgtctacaagtggcaccccaa

SEQ ID NO: 172707 - DNA, 33 bp, Homo sapien
gggggagtggttgtccaccggcagtttgattca

SEQ ID NO: 172708 - DNA, 33 bp, Homo sapien
gggggagtggttgtccgccggcagtttgattca

SEQ ID NO: 172709 - DNA, 33 bp, Homo sapien
ctacagttacgcaccaccatgtccagctaattt

SEQ ID NO: 172710 - DNA, 33 bp, Homo sapien
ctacagttacgcaccatcatgtccagctaattt

SEQ ID NO: 172711 - DNA, 33 bp, Homo sapien
gttctagtcccagcaacgcctccaacagggtgt

SEQ ID NO: 172712 - DNA, 33 bp, Homo sapien
gttctagtcccagcaatgcctccaacagggtgt

SEQ ID NO: 172713 - DNA, 33 bp, Homo sapien
aaagtccatttgctagacattaacaccagagga

SEQ ID NO: 172714 - DNA, 33 bp, Homo sapien
aaagtccatttgctaggcattaacaccagagga

SEQ ID NO: 172715 - DNA, 33 bp, Homo sapien
ggtgacaaatcaaagcacatttcccggtcaggc

SEQ ID NO: 172716 - DNA, 33 bp, Homo sapien
ggtgacaaatcaaagcgcatttcccggtcaggc

SEQ ID NO: 172717 - DNA, 33 bp, Homo sapien
ctgaggcagaagcaaaaggaaaataaaatagga

SEQ ID NO: 172718 - DNA, 33 bp, Homo sapien
ctgaggcagaagcaaagggaaaataaaatagga

SEQ ID NO: 172719 - DNA, 33 bp, Homo sapien
aaagctttttgagtaccaatgtgaccctcaaag

SEQ ID NO: 172720 - DNA, 33 bp, Homo sapien
aaagctttttgagtactaatgtgaccctcaaag

SEQ ID NO: 172721 - DNA, 33 bp, Homo sapien
atccgcaggccttgaaataccatgacaccttta

SEQ ID NO: 172722 - DNA, 33 bp, Homo sapien
atccgcaggccttgaactaccatgacaccttta

SEQ ID NO: 172723 - DNA, 33 bp, Homo sapien
aaaactgttttctgcaagtaatttgattaaatt

SEQ ID NO: 172724 - DNA, 33 bp, Homo sapien
aaaactgttttctgcaggtaatttgattaaatt

SEQ ID NO: 172725 - DNA, 33 bp, Homo sapien
taggcaatgatagtaagctgtgctaaaggaata

SEQ ID NO: 172726 - DNA, 33 bp, Homo sapien
taggcaatgatagtaatctgtgctaaaggaata

SEQ ID NO: 172727 - DNA, 33 bp, Homo sapien
aaatcatttacgtataagaattcatgccatttt

SEQ ID NO: 172728 - DNA, 33 bp, Homo sapien
aaatcatttacgtataggaattcatgccatttt

SEQ ID NO: 172729 - DNA, 33 bp, Homo sapien; identical to SEQ ID NO: 172727

SEQ ID NO: 172730 - DNA, 33 bp, Homo sapien; identical to SEQ ID NO: 172728

SEQ ID NO: 172731 - DNA, 33 bp, Homo sapien
tgctctgggcattcaacgatgagcaagacagac

SEQ ID NO: 172732 - DNA, 33 bp, Homo sapien
tgctctgggcattcaatgatgagcaagacagac

SEQ ID NO: 172733 - DNA, 33 bp, Homo sapien
ataagccataacaacaaactgcatgcctcaagt

SEQ ID NO: 172734 - DNA, 33 bp, Homo sapien
ataagccataacaacagactgcatgcctcaagt

SEQ ID NO: 172735 - DNA, 33 bp, Homo sapien
tggtgtggcttgaggaaatccaagaggaggccg

SEQ ID NO: 172736 - DNA, 33 bp, Homo sapien
tggtgtggcttgaggagatccaagaggaggccg

SEQ ID NO: 172737 - DNA, 33 bp, Homo sapien
ccataattccctcctccagatcaaacacagtgt

SEQ ID NO: 172738 - DNA, 33 bp, Homo sapien
ccataattccctcctctagatcaaacacagtgt

SEQ ID NO: 172739 - DNA, 33 bp, Homo sapien
aggaaggactcggtaacgttagctgctctctca

SEQ ID NO: 172740 - DNA, 33 bp, Homo sapien
aggaaggactcggtaatgttagctgctctctca

SEQ ID NO: 172741 - DNA, 33 bp, Homo sapien
aggtccctgagaacaacggaaataactcgtggc

SEQ ID NO: 172742 - DNA, 33 bp, Homo sapien
aggtccctgagaacaatggaaataactcgtggc

SEQ ID NO: 172743 - DNA, 33 bp, Homo sapien
tctacaggctgcttgacctctctgcttccatgt

SEQ ID NO: 172744 - DNA, 33 bp, Homo sapien
tctacaggctgcttgatctctctgcttccatgt

SEQ ID NO: 172745 - DNA, 33 bp, Homo sapien
ggtggaccataacagcaattgtatagaactctt

SEQ ID NO: 172746 - DNA, 33 bp, Homo sapien
ggtggaccataacagccattgtatagaactctt

SEQ ID NO: 172747 - DNA, 33 bp, Homo sapien
ggttgctgggttgatacgcacaacacacagcag

SEQ ID NO: 172748 - DNA, 33 bp, Homo sapien
ggttgctgggttgatatgcacaacacacagcag

SEQ ID NO: 172749 - DNA, 33 bp, Homo sapien
agactgcagttattcccacacttcatggggttg

SEQ ID NO: 172750 - DNA, 33 bp, Homo sapien
agactgcagttattcctacacttcatggggttg

SEQ ID NO: 172751 - DNA, 33 bp, Homo sapien
gaactcttgtctattgaacagagaccactgcat

SEQ ID NO: 172752 - DNA, 33 bp, Homo sapien
gaactcttgtctattgtacagagaccactgcat

SEQ ID NO: 172753 - DNA, 33 bp, Homo sapien
atgaggctcagagacccaagttacaaggaaaag

SEQ ID NO: 172754 - DNA, 33 bp, Homo sapien
atgaggctcagagacctaagttacaaggaaaag

SEQ ID NO: 172755 - DNA, 33 bp, Homo sapien
cacctgagggtgcagggaacacaagctggagcc

SEQ ID NO: 172756 - DNA, 33 bp, Homo sapien
cacctgagggtgcaggtaacacaagctggagcc

SEQ ID NO: 172757 - DNA, 33 bp, Homo sapien
aagtgggattgctgaacgggcaaccagcttaga

SEQ ID NO: 172758 - DNA, 33 bp, Homo sapien
aagtgggattgctgaatgggcaaccagcttaga

SEQ ID NO: 172759 - DNA, 33 bp, Homo sapien
gcagcccctgctgcagaagtccagacccgccca

SEQ ID NO: 172760 - DNA, 33 bp, Homo sapien
gcagcccctgctgcaggagtccagacccgccca

SEQ ID NO: 172761 - DNA, 33 bp, Homo sapien
gagggaactgacggccacgtttgtttttgcagt

SEQ ID NO: 172762 - DNA, 33 bp, Homo sapien
gagggaactgacggccgcgtttgtttttgcagt

SEQ ID NO: 172763 - DNA, 33 bp, Homo sapien
ctcatgtcactctcaacagaactcctcagctgg

SEQ ID NO: 172764 - DNA, 33 bp, Homo sapien
ctcatgtcactctcaatagaactcctcagctgg

SEQ ID NO: 172765 - DNA, 33 bp, Homo sapien
tttgaagtgagccttgcaggtagtgtgacctct

SEQ ID NO: 172766 - DNA, 33 bp, Homo sapien
tttgaagtgagccttgtaggtagtgtgacctct

SEQ ID NO: 172767 - DNA, 33 bp, Homo sapien
attctcaggaatagaacggggcttgatcctcac

SEQ ID NO: 172768 - DNA, 33 bp, Homo sapien
attctcaggaatagaatggggcttgatcctcac

SEQ ID NO: 172769 - DNA, 33 bp, Homo sapien
acctaaaacatagctgaatacaccccacctttg

SEQ ID NO: 172770 - DNA, 33 bp, Homo sapien
acctaaaacatagctgcatacaccccacctttg

SEQ ID NO: 172771 - DNA, 33 bp, Homo sapien
gccacttggatgttaaactgttgtctccaggag

SEQ ID NO: 172772 - DNA, 33 bp, Homo sapien
gccacttggatgttaacctgttgtctccaggag

SEQ ID NO: 172773 - DNA, 33 bp, Homo sapien
atatgtacacttagaaatagaacctaatgtgtg

SEQ ID NO: 172774 - DNA, 33 bp, Homo sapien
atatgtacacttagaagtagaacctaatgtgtg

SEQ ID NO: 172775 - DNA, 33 bp, Homo sapien
atcctctaaagagaccacaagcatcagaaacgc

SEQ ID NO: 172776 - DNA, 33 bp, Homo sapien
atcctctaaagagaccgcaagcatcagaaacgc

SEQ ID NO: 172777 - DNA, 33 bp, Homo sapien
cctctcagtcagtggacagaaaaccgtaaaagg

SEQ ID NO: 172778 - DNA, 33 bp, Homo sapien
cctctcagtcagtggatagaaaaccgtaaaagg

SEQ ID NO: 172779 - DNA, 33 bp, Homo sapien
tcaaatatttgggctacgtgcaatacctgcatc

SEQ ID NO: 172780 - DNA, 33 bp, Homo sapien
tcaaatatttgggctatgtgcaatacctgcatc

SEQ ID NO: 172781 - DNA, 33 bp, Homo sapien
gtaccttgaagaataacgagaagaggaggagac

SEQ ID NO: 172782 - DNA, 33 bp, Homo sapien
gtaccttgaagaataaggagaagaggaggagac

SEQ ID NO: 172783 - DNA, 33 bp, Homo sapien
ttcctatttcgttccacattcaaggagacccat

SEQ ID NO: 172784 - DNA, 33 bp, Homo sapien
ttcctatttcgttccatattcaaggagacccat

SEQ ID NO: 172785 - DNA, 33 bp, Homo sapien
gatctatttaatttgaagtggtttggtttatgg

SEQ ID NO: 172786 - DNA, 33 bp, Homo sapien
gatctatttaatttgaggtggtttggtttatgg

SEQ ID NO: 172787 - DNA, 33 bp, Homo sapien
catttgcattgagctacactctcttacaagggc

SEQ ID NO: 172788 - DNA, 33 bp, Homo sapien
catttgcattgagctatactctcttacaagggc

SEQ ID NO: 172789 - DNA, 33 bp, Homo sapien
agaaaatacaaagtaaccagctaacaacttcat

SEQ ID NO: 172790 - DNA, 33 bp, Homo sapien
agaaaatacaaagtaagcagctaacaacttcat

SEQ ID NO: 172791 - DNA, 33 bp, Homo sapien
gaaaggactccatagtcaataaatagtgctggg

SEQ ID NO: 172792 - DNA, 33 bp, Homo sapien
gaaaggactccatagttaataaatagtgctggg

SEQ ID NO: 172793 - DNA, 33 bp, Homo sapien
tagaagaaaacctaagacacaccattctggaca

SEQ ID NO: 172794 - DNA, 33 bp, Homo sapien
tagaagaaaacctaagtcacaccattctggaca

SEQ ID NO: 172795 - DNA, 33 bp, Homo sapien
gaaaatatcataggatcaaggaatttctccttt

SEQ ID NO: 172796 - DNA, 33 bp, Homo sapien
gaaaatatcataggatgaaggaatttctccttt

SEQ ID NO: 172797 - DNA, 33 bp, Homo sapien
gtccctcctccttaccgagttcatgcaatattt

SEQ ID NO: 172798 - DNA, 33 bp, Homo sapien
gtccctcctccttacctagttcatgcaatattt

SEQ ID NO: 172799 - DNA, 33 bp, Homo sapien
taaaaaaccctgtgcaagtgttaagggcaatag

SEQ ID NO: 172800 - DNA, 33 bp, Homo sapien
taaaaaaccctgtgcaggtgttaagggcaatag

SEQ ID NO: 172801 - DNA, 33 bp, Homo sapien
tcgattgcgcagctgcaaatggaaagctcgggc

SEQ ID NO: 172802 - DNA, 33 bp, Homo sapien
tcgattgcgcagctgcgaatggaaagctcgggc

SEQ ID NO: 172803 - DNA, 33 bp, Homo sapien
gacctcgtgcttggaaaagggtgcttcccaggg

SEQ ID NO: 172804 - DNA, 33 bp, Homo sapien
gacctcgtgcttggaagagggtgcttcccaggg

SEQ ID NO: 172805 - DNA, 33 bp, Homo sapien
ggctgcaacagcttccagaggggcatcaaattt

SEQ ID NO: 172806 - DNA, 33 bp, Homo sapien
ggctgcaacagcttccggaggggcatcaaattt

SEQ ID NO: 172807 - DNA, 33 bp, Homo sapien
ttccatctattctctcccaatgaactaaccatg

SEQ ID NO: 172808 - DNA, 33 bp, Homo sapien
ttccatctattctctctcaatgaactaaccatg

SEQ ID NO: 172809 - DNA, 33 bp, Homo sapien
ctgtccaggacacaaaacatctgacagacccag

SEQ ID NO: 172810 - DNA, 33 bp, Homo sapien
ctgtccaggacacaaagcatctgacagacccag

SEQ ID NO: 172811 - DNA, 33 bp, Homo sapien
ttcattaattctttcaacaaaatatactatctt

SEQ ID NO: 172812 - DNA, 33 bp, Homo sapien
ttcattaattctttcagcaaaatatactatctt

SEQ ID NO: 172813 - DNA, 33 bp, Homo sapien
gaatgggaagacaggacgtagaactaaagaaag

SEQ ID NO: 172814 - DNA, 33 bp, Homo sapien
gaatgggaagacaggatgtagaactaaagaaag

SEQ ID NO: 172815 - DNA, 33 bp, Homo sapien
tagtatgtggttaaaaattaatcctgtacatgt

SEQ ID NO: 172816 - DNA, 33 bp, Homo sapien
tagtatgtggttaaaagttaatcctgtacatgt

SEQ ID NO: 172817 - DNA, 33 bp, Homo sapien
gagcacctatttctaaatacaccttataacata

SEQ ID NO: 172818 - DNA, 33 bp, Homo sapien
gagcacctatttctaagtacaccttataacata

SEQ ID NO: 172819 - DNA, 33 bp, Homo sapien
tgtgtcctgtctcctgaagctgaggttgaatga

SEQ ID NO: 172820 - DNA, 33 bp, Homo sapien
tgtgtcctgtctcctgcagctgaggttgaatga

SEQ ID NO: 172821 - DNA, 33 bp, Homo sapien
agaatatgtccaatgaagattaaaatacagacc

SEQ ID NO: 172822 - DNA, 33 bp, Homo sapien
agaatatgtccaatgaggattaaaatacagacc

SEQ ID NO: 172823 - DNA, 33 bp, Homo sapien
atgatataggtgcttcaagtaaaaaatataatt

SEQ ID NO: 172824 - DNA, 33 bp, Homo sapien
atgatataggtgcttcgagtaaaaaatataatt

SEQ ID NO: 172825 - DNA, 33 bp, Homo sapien
acactctttgtgtaaaatatcaaaatctgctct

SEQ ID NO: 172826 - DNA, 33 bp, Homo sapien
acactctttgtgtaaagtatcaaaatctgctct

SEQ ID NO: 172827 - DNA, 33 bp, Homo sapien
ttggtttttgtttgagacaattcttcctccatg

SEQ ID NO: 172828 - DNA, 33 bp, Homo sapien
ttggtttttgtttgaggcaattcttcctccatg

SEQ ID NO: 172829 - DNA, 33 bp, Homo sapien
gtatggtgagaaaccaactacggattgctgcaa

SEQ ID NO: 172830 - DNA, 33 bp, Homo sapien
gtatggtgagaaaccagctacggattgctgcaa

SEQ ID NO: 172831 - DNA, 33 bp, Homo sapien
ttacagggatgtagtaccctgaatttaaaaaat

SEQ ID NO: 172832 - DNA, 33 bp, Homo sapien
ttacagggatgtagtatcctgaatttaaaaaat

SEQ ID NO: 172833 - DNA, 33 bp, Homo sapien
tccctgggacatcccacagtgaccgtgtccact

SEQ ID NO: 172834 - DNA, 33 bp, Homo sapien
tccctgggacatcccatagtgaccgtgtccact

SEQ ID NO: 172835 - DNA, 33 bp, Homo sapien; identical to SEQ ID NO: 172833

SEQ ID NO: 172836 - DNA, 33 bp, Homo sapien; identical to SEQ ID NO: 172834

SEQ ID NO: 172837 - DNA, 33 bp, Homo sapien
gactaataaaagtatacgcaaacaatcctctgt

SEQ ID NO: 172838 - DNA, 33 bp, Homo sapien
gactaataaaagtatatgcaaacaatcctctgt

SEQ ID NO: 172839 - DNA, 33 bp, Homo sapien
tgaaggggagtattgaacaagtcatcggggtca

SEQ ID NO: 172840 - DNA, 33 bp, Homo sapien
tgaaggggagtattgaccaagtcatcggggtca

SEQ ID NO: 172841 - DNA, 33 bp, Homo sapien
cccttgcagtgaaatacgtgatagaaccactac

SEQ ID NO: 172842 - DNA, 33 bp, Homo sapien
cccttgcagtgaaatatgtgatagaaccactac

SEQ ID NO: 172843 - DNA, 33 bp, Homo sapien
ctgtctttgtagaacacgcaggttagcccacca

SEQ ID NO: 172844 - DNA, 33 bp, Homo sapien
ctgtctttgtagaacatgcaggttagcccacca

SEQ ID NO: 172845 - DNA, 33 bp, Homo sapien
tgtgggcaggaggtagaaagcacaagggataga

SEQ ID NO: 172846 - DNA, 33 bp, Homo sapien
tgtgggcaggaggtaggaagcacaagggataga

SEQ ID NO: 172847 - DNA, 33 bp, Homo sapien
ctagagcttttcttgccgaggaaaagaatcatc

SEQ ID NO: 172848 - DNA, 33 bp, Homo sapien
ctagagcttttcttgctgaggaaaagaatcatc

SEQ ID NO: 172849 - DNA, 33 bp, Homo sapien
cagcttgtaactgccacgatgtcaaagccatgg

SEQ ID NO: 172850 - DNA, 33 bp, Homo sapien
cagcttgtaactgccatgatgtcaaagccatgg

SEQ ID NO: 172851 - DNA, 33 bp, Homo sapien
ggccagattctatactaaactctgaggctataa

SEQ ID NO: 172852 - DNA, 33 bp, Homo sapien
ggccagattctatactgaactctgaggctataa

SEQ ID NO: 172853 - DNA, 33 bp, Homo sapien
catagactccagctacacagttactaatttcag

SEQ ID NO: 172854 - DNA, 33 bp, Homo sapien
catagactccagctactcagttactaatttcag

SEQ ID NO: 172855 - DNA, 33 bp, Homo sapien
ggaaagctctttctgacgagaggacgtttaggt

SEQ ID NO: 172856 - DNA, 33 bp, Homo sapien
ggaaagctctttctgatgagaggacgtttaggt

SEQ ID NO: 172857 - DNA, 33 bp, Homo sapien
cagtgggagctataaacgtcagtgttgccttag

SEQ ID NO: 172858 - DNA, 33 bp, Homo sapien
cagtgggagctataaaggtcagtgttgccttag

SEQ ID NO: 172859 - DNA, 33 bp, Homo sapien
ttgacaaaaggagtgacgggcagaattgcctgg

SEQ ID NO: 172860 - DNA, 33 bp, Homo sapien
ttgacaaaaggagtgatgggcagaattgcctgg

SEQ ID NO: 172861 - DNA, 33 bp, Homo sapien
tcatagctcctttagcacttttttcagtacttc

SEQ ID NO: 172862 - DNA, 33 bp, Homo sapien
tcatagctcctttagcgcttttttcagtacttc

SEQ ID NO: 172863 - DNA, 33 bp, Homo sapien
cttaggtgggagagaaggtggatggagataaac

SEQ ID NO: 172864 - DNA, 33 bp, Homo sapien
cttaggtgggagagaatgtggatggagataaac

SEQ ID NO: 172865 - DNA, 33 bp, Homo sapien
agttgctaggcagtaaaaacgtagtaaaggcag

SEQ ID NO: 172866 - DNA, 33 bp, Homo sapien
agttgctaggcagtaagaacgtagtaaaggcag

SEQ ID NO: 172867 - DNA, 33 bp, Homo sapien
cataagatgtcaatcaatacatacaagacatac

SEQ ID NO: 172868 - DNA, 33 bp, Homo sapien
cataagatgtcaatcagtacatacaagacatac

SEQ ID NO: 172869 - DNA, 33 bp, Homo sapien
gggttgatgttcttacccattttacacatgaag

SEQ ID NO: 172870 - DNA, 33 bp, Homo sapien
gggttgatgttcttactcattttacacatgaag

SEQ ID NO: 172871 - DNA, 33 bp, Homo sapien
gccacgtctcgcataaacatatttggtacaggc

SEQ ID NO: 172872 - DNA, 33 bp, Homo sapien
gccacgtctcgcataaccatatttggtacaggc

SEQ ID NO: 172873 - DNA, 33 bp, Homo sapien; identical to SEQ ID NO: 172871

SEQ ID NO: 172874 - DNA, 33 bp, Homo sapien; identical to SEQ ID NO: 172872

SEQ ID NO: 172875 - DNA, 33 bp, Homo sapien
tctgtcctgcagagacactctgtgtaaaacagc

SEQ ID NO: 172876 - DNA, 33 bp, Homo sapien
tctgtcctgcagagactctctgtgtaaaacagc

SEQ ID NO: 172877 - DNA, 33 bp, Homo sapien
aaagactagagcaacacattaaaaagggaaggt

SEQ ID NO: 172878 - DNA, 33 bp, Homo sapien
aaagactagagcaacatattaaaaagggaaggt

SEQ ID NO: 172879 - DNA, 33 bp, Homo sapien
aagggtgctcaagtacagacaaaggtcaggtta

SEQ ID NO: 172880 - DNA, 33 bp, Homo sapien
aagggtgctcaagtaccgacaaaggtcaggtta

SEQ ID NO: 172881 - DNA, 33 bp, Homo sapien
atattagaagtcggacactacatgaaagttaaa

SEQ ID NO: 172882 - DNA, 33 bp, Homo sapien
atattagaagtcggacgctacatgaaagttaaa

SEQ ID NO: 172883 - DNA, 33 bp, Homo sapien
gagaggcctcgggagaaaccaacgtggccgaca

SEQ ID NO: 172884 - DNA, 33 bp, Homo sapien
gagaggcctcgggagacaccaacgtggccgaca

SEQ ID NO: 172885 - DNA, 33 bp, Homo sapien
acaacaaagatggcccagaagattgtgaggcct

SEQ ID NO: 172886 - DNA, 33 bp, Homo sapien
acaacaaagatggcccggaagattgtgaggcct

SEQ ID NO: 172887 - DNA, 33 bp, Homo sapien
gtcgatgggacactacaaaaggcatgaaagcgg

SEQ ID NO: 172888 - DNA, 33 bp, Homo sapien
gtcgatgggacactacgaaaggcatgaaagcgg

SEQ ID NO: 172889 - DNA, 33 bp, Homo sapien
ccaagtgaaacctcaacgcctctttggcactca

SEQ ID NO: 172890 - DNA, 33 bp, Homo sapien
ccaagtgaaacctcaatgcctctttggcactca

SEQ ID NO: 172891 - DNA, 33 bp, Homo sapien
tggttttgtgtaagagccaggcttccagaaccc

SEQ ID NO: 172892 - DNA, 33 bp, Homo sapien
tggttttgtgtaagagtcaggcttccagaaccc

SEQ ID NO: 172893 - DNA, 33 bp, Homo sapien
cccttttgcagaggacagaaatgtttagaaaac

SEQ ID NO: 172894 - DNA, 33 bp, Homo sapien
cccttttgcagaggacggaaatgtttagaaaac

SEQ ID NO: 172895 - DNA, 33 bp, Homo sapien
gagatgacgagccacacaaacttcaacattaac

SEQ ID NO: 172896 - DNA, 33 bp, Homo sapien
gagatgacgagccacagaaacttcaacattaac

SEQ ID NO: 172897 - DNA, 33 bp, Homo sapien
ctgagtaaggcttgtccattcatgtcgaggcac

SEQ ID NO: 172898 - DNA, 33 bp, Homo sapien
ctgagtaaggcttgtcgattcatgtcgaggcac

SEQ ID NO: 172899 - DNA, 33 bp, Homo sapien
agcagggaacaacggaatacgatgaacttcaaa

SEQ ID NO: 172900 - DNA, 33 bp, Homo sapien
agcagggaacaacggagtacgatgaacttcaaa

SEQ ID NO: 172901 - DNA, 33 bp, Homo sapien
ctgtccccttgcaagtaaagaaatgcaccaagc

SEQ ID NO: 172902 - DNA, 33 bp, Homo sapien
ctgtccccttgcaagtgaagaaatgcaccaagc

SEQ ID NO: 172903 - DNA, 33 bp, Homo sapien
tcatgatttgactcatcatagatcagctttgcc

SEQ ID NO: 172904 - DNA, 33 bp, Homo sapien
tcatgatttgactcattatagatcagctttgcc

SEQ ID NO: 172905 - DNA, 33 bp, Homo sapien
tgcaaatgcgctgggaaattagctgagcctggt

SEQ ID NO: 172906 - DNA, 33 bp, Homo sapien
tgcaaatgcgctgggagattagctgagcctggt

SEQ ID NO: 172907 - DNA, 33 bp, Homo sapien
ggcttttctgagaagactctggtgccttttgag

SEQ ID NO: 172908 - DNA, 33 bp, Homo sapien
ggcttttctgagaagattctggtgccttttgag

SEQ ID NO: 172909 - DNA, 33 bp, Homo sapien
ttgcaaaatttgctgaaacaccttttttgttga

SEQ ID NO: 172910 - DNA, 33 bp, Homo sapien
ttgcaaaatttgctgacacaccttttttgttga

SEQ ID NO: 172911 - DNA, 33 bp, Homo sapien
gaacatttgaggaagcaaaagaaggccagggtg

SEQ ID NO: 172912 - DNA, 33 bp, Homo sapien
gaacatttgaggaagcgaaagaaggccagggtg

SEQ ID NO: 172913 - DNA, 33 bp, Homo sapien
caaagctcttagaaaagttgtcctactatctta

SEQ ID NO: 172914 - DNA, 33 bp, Homo sapien
caaagctcttagaaaatttgtcctactatctta

SEQ ID NO: 172915 - DNA, 33 bp, Homo sapien
acccccttgagaagtcaacttagagaaagctgg

SEQ ID NO: 172916 - DNA, 33 bp, Homo sapien
acccccttgagaagtcgacttagagaaagctgg

SEQ ID NO: 172917 - DNA, 33 bp, Homo sapien
caaacacatgaaaagaataacccgttgaaaaca

SEQ ID NO: 172918 - DNA, 33 bp, Homo sapien
caaacacatgaaaagagtaacccgttgaaaaca

SEQ ID NO: 172919 - DNA, 33 bp, Homo sapien
agtagagtgagtggggaacacgccctgactccc

SEQ ID NO: 172920 - DNA, 33 bp, Homo sapien
agtagagtgagtgggggacacgccctgactccc

SEQ ID NO: 172921 - DNA, 33 bp, Homo sapien
gttatgtaatcgtggacaacctttgattgggct

SEQ ID NO: 172922 - DNA, 33 bp, Homo sapien
gttatgtaatcgtggagaacctttgattgggct

SEQ ID NO: 172923 - DNA, 33 bp, Homo sapien
taaaaaggccactctgaatgttctgcaaacact

SEQ ID NO: 172924 - DNA, 33 bp, Homo sapien
taaaaaggccactctgcatgttctgcaaacact

SEQ ID NO: 172925 - DNA, 33 bp, Homo sapien
cagaaaggtgaggctcagaaaagcgaagcgatt

SEQ ID NO: 172926 - DNA, 33 bp, Homo sapien
cagaaaggtgaggctcggaaaagcgaagcgatt

SEQ ID NO: 172927 - DNA, 33 bp, Homo sapien
cattaacatcgaaggcccagagggtaaattcaa

SEQ ID NO: 172928 - DNA, 33 bp, Homo sapien
cattaacatcgaaggctcagagggtaaattcaa

SEQ ID NO: 172929 - DNA, 33 bp, Homo sapien
aaggaccagagggaaaattgaaagggcctaagt

SEQ ID NO: 172930 - DNA, 33 bp, Homo sapien
aaggaccagagggaaagttgaaagggcctaagt

SEQ ID NO: 172931 - DNA, 33 bp, Homo sapien
atacacatctgccagcacaatgaccatttcctt

SEQ ID NO: 172932 - DNA, 33 bp, Homo sapien
atacacatctgccagcgcaatgaccatttcctt

SEQ ID NO: 172933 - DNA, 33 bp, Homo sapien
tctactaagtggtagaatagaatttgaacccaa

SEQ ID NO: 172934 - DNA, 33 bp, Homo sapien
tctactaagtggtagagtagaatttgaacccaa

SEQ ID NO: 172935 - DNA, 33 bp, Homo sapien
agcctcatagcagggaaaatgtcatcaacttca

SEQ ID NO: 172936 - DNA, 33 bp, Homo sapien
agcctcatagcagggagaatgtcatcaacttca

SEQ ID NO: 172937 - DNA, 33 bp, Homo sapien
gtgtcgttgggtgagaatccagaaacctgaaga

SEQ ID NO: 172938 - DNA, 33 bp, Homo sapien
gtgtcgttgggtgagagtccagaaacctgaaga

SEQ ID NO: 172939 - DNA, 33 bp, Homo sapien
tcttagactatcccagacaacactgatctaatt

SEQ ID NO: 172940 - DNA, 33 bp, Homo sapien
tcttagactatcccaggcaacactgatctaatt

SEQ ID NO: 172941 - DNA, 33 bp, Homo sapien
gtgtaacggcttgctagaagtagatgtggtcgc

SEQ ID NO: 172942 - DNA, 33 bp, Homo sapien
gtgtaacggcttgctataagtagatgtggtcgc

SEQ ID NO: 172943 - DNA, 33 bp, Homo sapien
tctctattgtgtagccaactttcagggactgag

SEQ ID NO: 172944 - DNA, 33 bp, Homo sapien
tctctattgtgtagccgactttcagggactgag

SEQ ID NO: 172945 - DNA, 33 bp, Homo sapien
ttagttacctacaaccagacttcccatagagta

SEQ ID NO: 172946 - DNA, 33 bp, Homo sapien
ttagttacctacaaccggacttcccatagagta

SEQ ID NO: 172947 - DNA, 33 bp, Homo sapien
taattacagtcaagcactagataaaaattggac

SEQ ID NO: 172948 - DNA, 33 bp, Homo sapien
taattacagtcaagcagtagataaaaattggac

SEQ ID NO: 172949 - DNA, 33 bp, Homo sapien
tcatcttccaagatgccaacgtccggcggtacc

SEQ ID NO: 172950 - DNA, 33 bp, Homo sapien
tcatcttccaagatgctaacgtccggcggtacc

SEQ ID NO: 172951 - DNA, 33 bp, Homo sapien
tttcatcagcaagcaacttcagcagactaaata

SEQ ID NO: 172952 - DNA, 33 bp, Homo sapien
tttcatcagcaagcaatttcagcagactaaata

SEQ ID NO: 172953 - DNA, 33 bp, Homo sapien
ccacagacccagcaaacagatagtcaagtcaga

SEQ ID NO: 172954 - DNA, 33 bp, Homo sapien
ccacagacccagcaaatagatagtcaagtcaga

SEQ ID NO: 172955 - DNA, 33 bp, Homo sapien
cacactaatctccctgaacggtgggtattctgg

SEQ ID NO: 172956 - DNA, 33 bp, Homo sapien
cacactaatctccctggacggtgggtattctgg

SEQ ID NO: 172957 - DNA, 33 bp, Homo sapien
tcaagtgatcttctccactgagcctcctaaata

SEQ ID NO: 172958 - DNA, 33 bp, Homo sapien
tcaagtgatcttctccgctgagcctcctaaata

SEQ ID NO: 172959 - DNA, 33 bp, Homo sapien
caactcaagattcagacagaccagtacagccag

SEQ ID NO: 172960 - DNA, 33 bp, Homo sapien
caactcaagattcagatagaccagtacagccag

SEQ ID NO: 172961 - DNA, 33 bp, Homo sapien
ctggacagacatgaagcaacaggatctaaaggt

SEQ ID NO: 172962 - DNA, 33 bp, Homo sapien
ctggacagacatgaaggaacaggatctaaaggt

SEQ ID NO: 172963 - DNA, 33 bp, Homo sapien
cctaaaggctcatgacaggaacagaaggtggct

SEQ ID NO: 172964 - DNA, 33 bp, Homo sapien
cctaaaggctcatgacgggaacagaaggtggct

SEQ ID NO: 172965 - DNA, 33 bp, Homo sapien
ttaaagtgttagcagacacagattaagacactg

SEQ ID NO: 172966 - DNA, 33 bp, Homo sapien
ttaaagtgttagcagatacagattaagacactg

SEQ ID NO: 172967 - DNA, 33 bp, Homo sapien
aaatactgtgtgactaaggattttgtatgctcc

SEQ ID NO: 172968 - DNA, 33 bp, Homo sapien
aaatactgtgtgactagggattttgtatgctcc

SEQ ID NO: 172969 - DNA, 33 bp, Homo sapien
gaccagacttggaaaacggacaggaagcaagcg

SEQ ID NO: 172970 - DNA, 33 bp, Homo sapien
gaccagacttggaaaatggacaggaagcaagcg

SEQ ID NO: 172971 - DNA, 33 bp, Homo sapien
agcactgtgttcaacactgggaagggaacagga

SEQ ID NO: 172972 - DNA, 33 bp, Homo sapien
agcactgtgttcaacattgggaagggaacagga

SEQ ID NO: 172973 - DNA, 33 bp, Homo sapien
agcaggggaggaagccactccttatgtgctaat

SEQ ID NO: 172974 - DNA, 33 bp, Homo sapien
agcaggggaggaagccgctccttatgtgctaat

SEQ ID NO: 172975 - DNA, 33 bp, Homo sapien
gactgatgcataaaaaatacttagcaagaatct

SEQ ID NO: 172976 - DNA, 33 bp, Homo sapien
gactgatgcataaaaattacttagcaagaatct

SEQ ID NO: 172977 - DNA, 33 bp, Homo sapien
gcaaaccagaggttgacagattcttgctaagta

SEQ ID NO: 172978 - DNA, 33 bp, Homo sapien
gcaaaccagaggttgagagattcttgctaagta

SEQ ID NO: 172979 - DNA, 33 bp, Homo sapien
tgttggttagagttccagcatgaatgcccagat

SEQ ID NO: 172980 - DNA, 33 bp, Homo sapien
tgttggttagagttccggcatgaatgcccagat

SEQ ID NO: 172981 - DNA, 33 bp, Homo sapien
cagcatcctgtcttaaccctctttccagatgtg

SEQ ID NO: 172982 - DNA, 33 bp, Homo sapien
cagcatcctgtcttaatcctctttccagatgtg

SEQ ID NO: 172983 - DNA, 33 bp, Homo sapien
ctcaacttactcgatgcattttccactgagcct

SEQ ID NO: 172984 - DNA, 33 bp, Homo sapien
ctcaacttactcgatgtattttccactgagcct

SEQ ID NO: 172985 - DNA, 33 bp, Homo sapien
aatgatggaaccctaaccatccgtcgtgtttag

SEQ ID NO: 172986 - DNA, 33 bp, Homo sapien
aatgatggaaccctaatcatccgtcgtgtttag

SEQ ID NO: 172987 - DNA, 33 bp, Homo sapien
tggaactgttacatgaaaaagagaaacacttca

SEQ ID NO: 172988 - DNA, 33 bp, Homo sapien
tggaactgttacatgagaaagagaaacacttca

SEQ ID NO: 172989 - DNA, 33 bp, Homo sapien
tgggcagctctgaaggcacggtcgggagagtcg

SEQ ID NO: 172990 - DNA, 33 bp, Homo sapien
tgggcagctctgaaggtacggtcgggagagtcg

SEQ ID NO: 172991 - DNA, 33 bp, Homo sapien
aaatcactatggttaacaacttagtaccccctg

SEQ ID NO: 172992 - DNA, 33 bp, Homo sapien
aaatcactatggttaagaacttagtaccccctg

SEQ ID NO: 172993 - DNA, 33 bp, Homo sapien
agtagagctcccagcaagcattgcccatctgga

SEQ ID NO: 172994 - DNA, 33 bp, Homo sapien
agtagagctcccagcaggcattgcccatctgga

SEQ ID NO: 172995 - DNA, 33 bp, Homo sapien
gcacaatttcaaccaccgacttatcaatgcagc

SEQ ID NO: 172996 - DNA, 33 bp, Homo sapien
gcacaatttcaaccactgacttatcaatgcagc

SEQ ID NO: 172997 - DNA, 33 bp, Homo sapien
gtacaacagagttactaaacacatgggctttga

SEQ ID NO: 172998 - DNA, 33 bp, Homo sapien
gtacaacagagttactgaacacatgggctttga

SEQ ID NO: 172999 - DNA, 33 bp, Homo sapien
atgatttaataacccactgcttgtagctcttag

SEQ ID NO: 173000 - DNA, 33 bp, Homo sapien
atgatttaataacccattgcttgtagctcttag

SEQ ID NO: 173001 - DNA, 33 bp, Homo sapien
gataaaacttgcagataaaatttgaggaaaaaa

SEQ ID NO: 173002 - DNA, 33 bp, Homo sapien
gataaaacttgcagatgaaatttgaggaaaaaa

SEQ ID NO: 173003 - DNA, 33 bp, Homo sapien
ataagtaatatatcaaatggcagggctgaaatt

SEQ ID NO: 173004 - DNA, 33 bp, Homo sapien
ataagtaatatatcaagtggcagggctgaaatt

SEQ ID NO: 173005 - DNA, 33 bp, Homo sapien
aatccctatgaaagaaacgctaaattcattttc

SEQ ID NO: 173006 - DNA, 33 bp, Homo sapien
aatccctatgaaagaagcgctaaattcattttc

SEQ ID NO: 173007 - DNA, 33 bp, Homo sapien
gttaacatgcatcagcaaaatcatcagttcctg

SEQ ID NO: 173008 - DNA, 33 bp, Homo sapien
gttaacatgcatcagcgaaatcatcagttcctg

SEQ ID NO: 173009 - DNA, 33 bp, Homo sapien
tgactcggctattgaaacttgtacatgggtcat

SEQ ID NO: 173010 - DNA, 33 bp, Homo sapien
tgactcggctattgaagcttgtacatgggtcat

SEQ ID NO: 173011 - DNA, 33 bp, Homo sapien
tgcttcttggcaaagcacatattcttcaggaac

SEQ ID NO: 173012 - DNA, 33 bp, Homo sapien
tgcttcttggcaaagcgcatattcttcaggaac

SEQ ID NO: 173013 - DNA, 33 bp, Homo sapien; identical to SEQ ID NO: 173011

SEQ ID NO: 173014 - DNA, 33 bp, Homo sapien; identical to SEQ ID NO: 173012

SEQ ID NO: 173015 - DNA, 33 bp, Homo sapien
gcacccatctttcagacagtagctcggagaacc

SEQ ID NO: 173016 - DNA, 33 bp, Homo sapien
gcacccatctttcagagagtagctcggagaacc

SEQ ID NO: 173017 - DNA, 33 bp, Homo sapien
gtcaaacactagcagacggttctttttaaagaa

SEQ ID NO: 173018 - DNA, 33 bp, Homo sapien
gtcaaacactagcagatggttctttttaaagaa

SEQ ID NO: 173019 - DNA, 33 bp, Homo sapien
cagcatagctaagggcaaggctcttcatgtgtc

SEQ ID NO: 173020 - DNA, 33 bp, Homo sapien
cagcatagctaagggcgaggctcttcatgtgtc

SEQ ID NO: 173021 - DNA, 33 bp, Homo sapien
aaataagaacttcttggaggcagaataaattct

SEQ ID NO: 173022 - DNA, 33 bp, Homo sapien
aaataagaacttcttgtaggcagaataaattct

SEQ ID NO: 173023 - DNA, 33 bp, Homo sapien
ctgtgaattcactgagcattcgctataagtcga

SEQ ID NO: 173024 - DNA, 33 bp, Homo sapien
ctgtgaattcactgagtattcgctataagtcga

SEQ ID NO: 173025 - DNA, 33 bp, Homo sapien
ccatggtagtctaaagaaaaatctcttactcac

SEQ ID NO: 173026 - DNA, 33 bp, Homo sapien
ccatggtagtctaaaggaaaatctcttactcac

SEQ ID NO: 173027 - DNA, 33 bp, Homo sapien
ggcttttggtgttggaaggagagttacaccatt

SEQ ID NO: 173028 - DNA, 33 bp, Homo sapien
ggcttttggtgttggatggagagttacaccatt

SEQ ID NO: 173029 - DNA, 33 bp, Homo sapien
taccagcaaatctacactagtctatataaattt

SEQ ID NO: 173030 - DNA, 33 bp, Homo sapien
taccagcaaatctacattagtctatataaattt

SEQ ID NO: 173031 - DNA, 33 bp, Homo sapien
attataatctgtggaacctaaatcctacaaatg

SEQ ID NO: 173032 - DNA, 33 bp, Homo sapien
attataatctgtggaagctaaatcctacaaatg

SEQ ID NO: 173033 - DNA, 33 bp, Homo sapien
tttgggcataggagatcaatgttacgtactgaa

SEQ ID NO: 173034 - DNA, 33 bp, Homo sapien
tttgggcataggagatgaatgttacgtactgaa

SEQ ID NO: 173035 - DNA, 33 bp, Homo sapien
ttgaaacaggaataagaccacacacatatggat

SEQ ID NO: 173036 - DNA, 33 bp, Homo sapien
ttgaaacaggaataagtccacacacatatggat

SEQ ID NO: 173037 - DNA, 33 bp, Homo sapien
ggcttaaaggaacttacaaaagctgcacacagg

SEQ ID NO: 173038 - DNA, 33 bp, Homo sapien
ggcttaaaggaacttagaaaagctgcacacagg

SEQ ID NO: 173039 - DNA, 33 bp, Homo sapien; identical to SEQ ID NO: 173037

SEQ ID NO: 173040 - DNA, 33 bp, Homo sapien; identical to SEQ ID NO: 173038

SEQ ID NO: 173041 - DNA, 33 bp, Homo sapien
ttgatttttctacatcccttaactttgagcctg

SEQ ID NO: 173042 - DNA, 33 bp, Homo sapien
ttgatttttctacatctcttaactttgagcctg

SEQ ID NO: 173043 - DNA, 33 bp, Homo sapien
ttcaatttcctctctaagtagtgggtattgacg

SEQ ID NO: 173044 - DNA, 33 bp, Homo sapien
ttcaatttcctctctaggtagtgggtattgacg

SEQ ID NO: 173045 - DNA, 33 bp, Homo sapien
tgtactcaaggctagacagaggatcaaatggaa

SEQ ID NO: 173046 - DNA, 33 bp, Homo sapien
tgtactcaaggctagatagaggatcaaatggaa

SEQ ID NO: 173047 - DNA, 33 bp, Homo sapien
gcaggccataggtaaacggatgtgaaaggaaca

SEQ ID NO: 173048 - DNA, 33 bp, Homo sapien
gcaggccataggtaaatggatgtgaaaggaaca

SEQ ID NO: 173049 - DNA, 33 bp, Homo sapien
cacaatgaatatctaacgtttaaatgcccaggc

SEQ ID NO: 173050 - DNA, 33 bp, Homo sapien
cacaatgaatatctaatgtttaaatgcccaggc

SEQ ID NO: 173051 - DNA, 33 bp, Homo sapien
gcataccagatcccaccggaagaaaaggaaacc

SEQ ID NO: 173052 - DNA, 33 bp, Homo sapien
gcataccagatcccactggaagaaaaggaaacc

SEQ ID NO: 173053 - DNA, 33 bp, Homo sapien
ccttttctgcattacccgatattcactgttcag

SEQ ID NO: 173054 - DNA, 33 bp, Homo sapien
ccttttctgcattacctgatattcactgttcag

SEQ ID NO: 173055 - DNA, 33 bp, Homo sapien
acactcagtgctgacaagatagccctcaccaca

SEQ ID NO: 173056 - DNA, 33 bp, Homo sapien
acactcagtgctgacaggatagccctcaccaca

SEQ ID NO: 173057 - DNA, 33 bp, Homo sapien
tcagagaagtatgggaagatagttgaagggaga

SEQ ID NO: 173058 - DNA, 33 bp, Homo sapien
tcagagaagtatgggatgatagttgaagggaga

SEQ ID NO: 173059 - DNA, 33 bp, Homo sapien
cacagaaaatccaaagaagaggaaattagtaag

SEQ ID NO: 173060 - DNA, 33 bp, Homo sapien
cacagaaaatccaaaggagaggaaattagtaag

SEQ ID NO: 173061 - DNA, 33 bp, Homo sapien
gagaaattttggtagggcaatactgctgtaaaa

SEQ ID NO: 173062 - DNA, 33 bp, Homo sapien
gagaaattttggtaggtcaatactgctgtaaaa

SEQ ID NO: 173063 - DNA, 33 bp, Homo sapien
ataccctgacacatggaatcaattcccttttac

SEQ ID NO: 173064 - DNA, 33 bp, Homo sapien
ataccctgacacatgggatcaattcccttttac

SEQ ID NO: 173065 - DNA, 33 bp, Homo sapien
aagaccctaaagctgcaaccaaaaggctattag

SEQ ID NO: 173066 - DNA, 33 bp, Homo sapien
aagaccctaaagctgccaccaaaaggctattag

SEQ ID NO: 173067 - DNA, 33 bp, Homo sapien
tcaccactcctattcaacgtagtacgcaagtcc

SEQ ID NO: 173068 - DNA, 33 bp, Homo sapien
tcaccactcctattcagcgtagtacgcaagtcc

SEQ ID NO: 173069 - DNA, 33 bp, Homo sapien
ctagagaccattgctgcagagctagagcaatat

SEQ ID NO: 173070 - DNA, 33 bp, Homo sapien
ctagagaccattgctgtagagctagagcaatat

SEQ ID NO: 173071 - DNA, 33 bp, Homo sapien
ttcgtattggtctttgaagtttgacccacaggc

SEQ ID NO: 173072 - DNA, 33 bp, Homo sapien
ttcgtattggtctttgcagtttgacccacaggc

SEQ ID NO: 173073 - DNA, 33 bp, Homo sapien
gccacaactgtgacctcagcactggcccaactg

SEQ ID NO: 173074 - DNA, 33 bp, Homo sapien
gccacaactgtgacctgagcactggcccaactg

SEQ ID NO: 173075 - DNA, 33 bp, Homo sapien
gtttcccaaatggtgccataggctgggctcccc

SEQ ID NO: 173076 - DNA, 33 bp, Homo sapien
gtttcccaaatggtgctataggctgggctcccc

SEQ ID NO: 173077 - DNA, 33 bp, Homo sapien
atcagaggttcctaccaaggatcttcaatatac

SEQ ID NO: 173078 - DNA, 33 bp, Homo sapien
atcagaggttcctaccgaggatcttcaatatac

SEQ ID NO: 173079 - DNA, 33 bp, Homo sapien
cttaacactgaccaataactgcctgggccaata

SEQ ID NO: 173080 - DNA, 33 bp, Homo sapien
cttaacactgaccaatgactgcctgggccaata

SEQ ID NO: 173081 - DNA, 33 bp, Homo sapien
atttctgctagagtcaccgtttctcctccctct

SEQ ID NO: 173082 - DNA, 33 bp, Homo sapien
atttctgctagagtcatcgtttctcctccctct

SEQ ID NO: 173083 - DNA, 33 bp, Homo sapien
ttgacataataagccactggaaaacggaaagat

SEQ ID NO: 173084 - DNA, 33 bp, Homo sapien
ttgacataataagccattggaaaacggaaagat

SEQ ID NO: 173085 - DNA, 33 bp, Homo sapien
gggtaaaggatataaacggatgcttcaaaaaag

SEQ ID NO: 173086 - DNA, 33 bp, Homo sapien
gggtaaaggatataaatggatgcttcaaaaaag

SEQ ID NO: 173087 - DNA, 33 bp, Homo sapien
aagcctcagtagccgactcaatcaactggaaga

SEQ ID NO: 173088 - DNA, 33 bp, Homo sapien
aagcctcagtagccgattcaatcaactggaaga

SEQ ID NO: 173089 - DNA, 33 bp, Homo sapien
aggacagggagtggaaggtgtagtatgataagg

SEQ ID NO: 173090 - DNA, 33 bp, Homo sapien
aggacagggagtggaatgtgtagtatgataagg

SEQ ID NO: 173091 - DNA, 33 bp, Homo sapien; identical to SEQ ID NO: 173089

SEQ ID NO: 173092 - DNA, 33 bp, Homo sapien; identical to SEQ ID NO: 173090

SEQ ID NO: 173093 - DNA, 33 bp, Homo sapien
atgaaatccattagcaacttgatatattcttct

SEQ ID NO: 173094 - DNA, 33 bp, Homo sapien
atgaaatccattagcagcttgatatattcttct

SEQ ID NO: 173095 - DNA, 33 bp, Homo sapien
gatatattcttctatggattgtcctttcaaatc

SEQ ID NO: 173096 - DNA, 33 bp, Homo sapien
gatatattcttctatgtattgtcctttcaaatc

SEQ ID NO: 173097 - DNA, 33 bp, Homo sapien
agagactcagttttacgcatcataaatgtccct

SEQ ID NO: 173098 - DNA, 33 bp, Homo sapien
agagactcagttttactcatcataaatgtccct

SEQ ID NO: 173099 - DNA, 33 bp, Homo sapien
gattatgtaaagacaacgaatctacaactcatt

SEQ ID NO: 173100 - DNA, 33 bp, Homo sapien
gattatgtaaagacaatgaatctacaactcatt

SEQ ID NO: 173101 - DNA, 33 bp, Homo sapien
agagaggaaaggcatcacagtataaaggttatg

SEQ ID NO: 173102 - DNA, 33 bp, Homo sapien
agagaggaaaggcatcgcagtataaaggttatg

SEQ ID NO: 173103 - DNA, 33 bp, Homo sapien
ggtcaggtaatgctgaaaaaggaagccacagag

SEQ ID NO: 173104 - DNA, 33 bp, Homo sapien
ggtcaggtaatgctgagaaaggaagccacagag

SEQ ID NO: 173105 - DNA, 33 bp, Homo sapien
tggctagtgggtgaaactgactctatgcaggtt

SEQ ID NO: 173106 - DNA, 33 bp, Homo sapien
tggctagtgggtgaaattgactctatgcaggtt

SEQ ID NO: 173107 - DNA, 33 bp, Homo sapien; identical to SEQ ID NO: 173105

SEQ ID NO: 173108 - DNA, 33 bp, Homo sapien; identical to SEQ ID NO: 173106

SEQ ID NO: 173109 - DNA, 33 bp, Homo sapien
tgtggagagaaaccagcagtgaatggggcccta

SEQ ID NO: 173110 - DNA, 33 bp, Homo sapien
tgtggagagaaaccagtagtgaatggggcccta

SEQ ID NO: 173111 - DNA, 33 bp, Homo sapien; identical to SEQ ID NO: 173109

SEQ ID NO: 173112 - DNA, 33 bp, Homo sapien; identical to SEQ ID NO: 173110

SEQ ID NO: 173113 - DNA, 33 bp, Homo sapien; identical to SEQ ID NO: 173109

SEQ ID NO: 173114 - DNA, 33 bp, Homo sapien; identical to SEQ ID NO: 173110

SEQ ID NO: 173115 - DNA, 33 bp, Homo sapien
cttgagaaaagaagagccaagattaaaggaggc

SEQ ID NO: 173116 - DNA, 33 bp, Homo sapien
cttgagaaaagaagaggcaagattaaaggaggc

SEQ ID NO: 173117 - DNA, 33 bp, Homo sapien
tgaggagaggagagggaagaatgaagaggactt

SEQ ID NO: 173118 - DNA, 33 bp, Homo sapien
tgaggagaggagagggtagaatgaagaggactt

SEQ ID NO: 173119 - DNA, 33 bp, Homo sapien
tacccctgcatctgcagactcttccacaaattc

SEQ ID NO: 173120 - DNA, 33 bp, Homo sapien
tacccctgcatctgcatactcttccacaaattc

SEQ ID NO: 173121 - DNA, 33 bp, Homo sapien
atagaatagcataaaaggtccagaaataaatcc

SEQ ID NO: 173122 - DNA, 33 bp, Homo sapien
atagaatagcataaaatgtccagaaataaatcc

SEQ ID NO: 173123 - DNA, 33 bp, Homo sapien
aaggtcacgctacaaaagcaaatataaatagat

SEQ ID NO: 173124 - DNA, 33 bp, Homo sapien
aaggtcacgctacaaaggcaaatataaatagat

SEQ ID NO: 173125 - DNA, 33 bp, Homo sapien
aaacattttggcttaaagtagtcctatctattt

SEQ ID NO: 173126 - DNA, 33 bp, Homo sapien
aaacattttggcttaatgtagtcctatctattt

SEQ ID NO: 173127 - DNA, 33 bp, Homo sapien
taaaggtaccatgtaacaaaacttcacaagtat

SEQ ID NO: 173128 - DNA, 33 bp, Homo sapien
taaaggtaccatgtaagaaaacttcacaagtat

SEQ ID NO: 173129 - DNA, 33 bp, Homo sapien
ttccctgcataggtgggatagttttctggctat

SEQ ID NO: 173130 - DNA, 33 bp, Homo sapien
ttccctgcataggtggtatagttttctggctat

SEQ ID NO: 173131 - DNA, 33 bp, Homo sapien
tgaagaatgcctctaccgcccacaagcaactga

SEQ ID NO: 173132 - DNA, 33 bp, Homo sapien
tgaagaatgcctctactgcccacaagcaactga

SEQ ID NO: 173133 - DNA, 33 bp, Homo sapien
gtaaatcacctgatgacacatgaataatctgtc

SEQ ID NO: 173134 - DNA, 33 bp, Homo sapien
gtaaatcacctgatgatacatgaataatctgtc

SEQ ID NO: 173135 - DNA, 33 bp, Homo sapien
tgaatgacataatttaggttggtgactagtttc

SEQ ID NO: 173136 - DNA, 33 bp, Homo sapien
tgaatgacataatttatgttggtgactagtttc

SEQ ID NO: 173137 - DNA, 33 bp, Homo sapien
ttgctataatagaatacgtgaggctaagtaatt

SEQ ID NO: 173138 - DNA, 33 bp, Homo sapien
ttgctataatagaatatgtgaggctaagtaatt

SEQ ID NO: 173139 - DNA, 33 bp, Homo sapien
agaatatgctctaatgaacaacagctggtcctt

SEQ ID NO: 173140 - DNA, 33 bp, Homo sapien
agaatatgctctaatgcacaacagctggtcctt

SEQ ID NO: 173141 - DNA, 33 bp, Homo sapien
tagtaacttctgcacaaaggactcatccatctc

SEQ ID NO: 173142 - DNA, 33 bp, Homo sapien
tagtaacttctgcacagaggactcatccatctc

SEQ ID NO: 173143 - DNA, 33 bp, Homo sapien
cattgagagaaggcaacggaaggaagcatgttc

SEQ ID NO: 173144 - DNA, 33 bp, Homo sapien
cattgagagaaggcaagggaaggaagcatgttc

SEQ ID NO: 173145 - DNA, 33 bp, Homo sapien
aggccctcattctacaaacaggggatccaagag

SEQ ID NO: 173146 - DNA, 33 bp, Homo sapien
aggccctcattctacagacaggggatccaagag

SEQ ID NO: 173147 - DNA, 33 bp, Homo sapien
tgagctggggctccaaccgctggtcttactatt

SEQ ID NO: 173148 - DNA, 33 bp, Homo sapien
tgagctggggctccaatcgctggtcttactatt

SEQ ID NO: 173149 - DNA, 33 bp, Homo sapien
ttggaatcaaagaaccacagagaatcaactttc

SEQ ID NO: 173150 - DNA, 33 bp, Homo sapien
ttggaatcaaagaaccgcagagaatcaactttc

SEQ ID NO: 173151 - DNA, 33 bp, Homo sapien
tttctgagtcactccaaagggaaagccacttga

SEQ ID NO: 173152 - DNA, 33 bp, Homo sapien
tttctgagtcactccagagggaaagccacttga

SEQ ID NO: 173153 - DNA, 33 bp, Homo sapien
caagaaagacttcatgaaaagatagggagctga

SEQ ID NO: 173154 - DNA, 33 bp, Homo sapien
caagaaagacttcatggaaagatagggagctga

SEQ ID NO: 173155 - DNA, 33 bp, Homo sapien
ctgcttctgggtccacaactgcttggcggggtt

SEQ ID NO: 173156 - DNA, 33 bp, Homo sapien
ctgcttctgggtccacgactgcttggcggggtt

SEQ ID NO: 173157 - DNA, 33 bp, Homo sapien
atggacccctggagagacacttaacaatggcct

SEQ ID NO: 173158 - DNA, 33 bp, Homo sapien
atggacccctggagaggcacttaacaatggcct

SEQ ID NO: 173159 - DNA, 33 bp, Homo sapien
gtactgcccaaggccacacagggagtggatgac

SEQ ID NO: 173160 - DNA, 33 bp, Homo sapien
gtactgcccaaggccatacagggagtggatgac

SEQ ID NO: 173161 - DNA, 33 bp, Homo sapien
caagtaatgatgttcacaataagtggagaaaag

SEQ ID NO: 173162 - DNA, 33 bp, Homo sapien
caagtaatgatgttcagaataagtggagaaaag

SEQ ID NO: 173163 - DNA, 33 bp, Homo sapien
agtgactaagtggacactaccaaacttctccta

SEQ ID NO: 173164 - DNA, 33 bp, Homo sapien
agtgactaagtggacattaccaaacttctccta

SEQ ID NO: 173165 - DNA, 33 bp, Homo sapien
ggtaataagacagagaacacctggcccataaaa

SEQ ID NO: 173166 - DNA, 33 bp, Homo sapien
ggtaataagacagagaccacctggcccataaaa

SEQ ID NO: 173167 - DNA, 33 bp, Homo sapien
tggcaatgggaatgatcatcatgtctgtgactc

SEQ ID NO: 173168 - DNA, 33 bp, Homo sapien
tggcaatgggaatgattatcatgtctgtgactc

SEQ ID NO: 173169 - DNA, 33 bp, Homo sapien
agggaattttacagataaatcatgttcttttgt

SEQ ID NO: 173170 - DNA, 33 bp, Homo sapien
agggaattttacagatgaatcatgttcttttgt

SEQ ID NO: 173171 - DNA, 33 bp, Homo sapien
ctaggcttaacaatgaatcatccaataataggg

SEQ ID NO: 173172 - DNA, 33 bp, Homo sapien
ctaggcttaacaatgagtcatccaataataggg

SEQ ID NO: 173173 - DNA, 33 bp, Homo sapien
aagtttcacccgaaaacggcacctttcatgagg

SEQ ID NO: 173174 - DNA, 33 bp, Homo sapien
aagtttcacccgaaaatggcacctttcatgagg

SEQ ID NO: 173175 - DNA, 33 bp, Homo sapien
ccctacgtcattggcaatctagaggttagcctg

SEQ ID NO: 173176 - DNA, 33 bp, Homo sapien
ccctacgtcattggcagtctagaggttagcctg

SEQ ID NO: 173177 - DNA, 33 bp, Homo sapien
cattttaatttctgcacatcatgtgaagttaga

SEQ ID NO: 173178 - DNA, 33 bp, Homo sapien
cattttaatttctgcatatcatgtgaagttaga

SEQ ID NO: 173179 - DNA, 33 bp, Homo sapien
tggcttcattttaaaccattggcaactgcctca

SEQ ID NO: 173180 - DNA, 33 bp, Homo sapien
tggcttcattttaaactattggcaactgcctca

SEQ ID NO: 173181 - DNA, 33 bp, Homo sapien
cgtgcccagcctgtaacgaagaacatttaaaag

SEQ ID NO: 173182 - DNA, 33 bp, Homo sapien
cgtgcccagcctgtaatgaagaacatttaaaag

SEQ ID NO: 173183 - DNA, 33 bp, Homo sapien
aaaacatgggcaagaccgatactgcctgtgact

SEQ ID NO: 173184 - DNA, 33 bp, Homo sapien
aaaacatgggcaagactgatactgcctgtgact

SEQ ID NO: 173185 - DNA, 33 bp, Homo sapien
ttttccttgcagtaccaacgaacaagtattctg

SEQ ID NO: 173186 - DNA, 33 bp, Homo sapien
ttttccttgcagtaccgacgaacaagtattctg

SEQ ID NO: 173187 - DNA, 33 bp, Homo sapien
cttttgtttataaggacagctaagttttccatc

SEQ ID NO: 173188 - DNA, 33 bp, Homo sapien
cttttgtttataaggatagctaagttttccatc

SEQ ID NO: 173189 - DNA, 33 bp, Homo sapien
tatatggattgcagtcaattttttaattttttt

SEQ ID NO: 173190 - DNA, 33 bp, Homo sapien
tatatggattgcagtccattttttaattttttt

SEQ ID NO: 173191 - DNA, 33 bp, Homo sapien
aaggcagacaatgatacgacgtgttccaactct

SEQ ID NO: 173192 - DNA, 33 bp, Homo sapien
aaggcagacaatgatatgacgtgttccaactct

SEQ ID NO: 173193 - DNA, 33 bp, Homo sapien
tgttacataggatataaacaaacaggtgatgag

SEQ ID NO: 173194 - DNA, 33 bp, Homo sapien
tgttacataggatatagacaaacaggtgatgag

SEQ ID NO: 173195 - DNA, 33 bp, Homo sapien
ccacgttctatggtaaacactgacatggatttt

SEQ ID NO: 173196 - DNA, 33 bp, Homo sapien
ccacgttctatggtaatcactgacatggatttt

SEQ ID NO: 173197 - DNA, 33 bp, Homo sapien
tcatggaattagagtgaatgagttgttctccgg

SEQ ID NO: 173198 - DNA, 33 bp, Homo sapien
tcatggaattagagtggatgagttgttctccgg

SEQ ID NO: 173199 - DNA, 33 bp, Homo sapien
gaagcctcgctcccagcagtaaatgcagaatcc

SEQ ID NO: 173200 - DNA, 33 bp, Homo sapien
gaagcctcgctcccaggagtaaatgcagaatcc

SEQ ID NO: 173201 - DNA, 33 bp, Homo sapien
ccacactggccactgaaggtagcaagctgggag

SEQ ID NO: 173202 - DNA, 33 bp, Homo sapien
ccacactggccactgagggtagcaagctgggag

SEQ ID NO: 173203 - DNA, 33 bp, Homo sapien
gggaagtaactagttcgaaggggtattgacgct

SEQ ID NO: 173204 - DNA, 33 bp, Homo sapien
gggaagtaactagttctaaggggtattgacgct

SEQ ID NO: 173205 - DNA, 33 bp, Homo sapien
gcctcctggttgcaataaaatggttcttacgac

SEQ ID NO: 173206 - DNA, 33 bp, Homo sapien
gcctcctggttgcaatgaaatggttcttacgac

SEQ ID NO: 173207 - DNA, 33 bp, Homo sapien
tttgattcaaaatcccacactctctttttttgt

SEQ ID NO: 173208 - DNA, 33 bp, Homo sapien
tttgattcaaaatcccgcactctctttttttgt

SEQ ID NO: 173209 - DNA, 33 bp, Homo sapien
cttatcctcctgacaactccatgagaaaggtac

SEQ ID NO: 173210 - DNA, 33 bp, Homo sapien
cttatcctcctgacaagtccatgagaaaggtac

SEQ ID NO: 173211 - DNA, 33 bp, Homo sapien
cagcaattccaactgcacaagcgtgagtctctc

SEQ ID NO: 173212 - DNA, 33 bp, Homo sapien
cagcaattccaactgcgcaagcgtgagtctctc

SEQ ID NO: 173213 - DNA, 33 bp, Homo sapien
accagttggtgccacgcatccagtgactggaaa

SEQ ID NO: 173214 - DNA, 33 bp, Homo sapien
accagttggtgccacgtatccagtgactggaaa

SEQ ID NO: 173215 - DNA, 33 bp, Homo sapien
ggggatggccattccaagaagtttctgcctggg

SEQ ID NO: 173216 - DNA, 33 bp, Homo sapien
ggggatggccattccaggaagtttctgcctggg

SEQ ID NO: 173217 - DNA, 33 bp, Homo sapien
tcttgatcaagtcaccggactcttcaggcctat

SEQ ID NO: 173218 - DNA, 33 bp, Homo sapien
tcttgatcaagtcacctgactcttcaggcctat

SEQ ID NO: 173219 - DNA, 33 bp, Homo sapien
ggccagggagctgccaaccaggccaggagatgg

SEQ ID NO: 173220 - DNA, 33 bp, Homo sapien
ggccagggagctgccagccaggccaggagatgg

SEQ ID NO: 173221 - DNA, 33 bp, Homo sapien
agaagaggcggctctaacagaaaaagtcgcagg

SEQ ID NO: 173222 - DNA, 33 bp, Homo sapien
agaagaggcggctctaccagaaaaagtcgcagg

SEQ ID NO: 173223 - DNA, 33 bp, Homo sapien
ggcacagagagtgtgcccacaatggccatggtg

SEQ ID NO: 173224 - DNA, 33 bp, Homo sapien
ggcacagagagtgtgctcacaatggccatggtg

SEQ ID NO: 173225 - DNA, 33 bp, Homo sapien
aggaacgagagcccacaaaggagacgggaagtc

SEQ ID NO: 173226 - DNA, 33 bp, Homo sapien
aggaacgagagcccacgaaggagacgggaagtc

SEQ ID NO: 173227 - DNA, 33 bp, Homo sapien
tttcaccggaaaatgccagactttcatttctac

SEQ ID NO: 173228 - DNA, 33 bp, Homo sapien
tttcaccggaaaatgcgagactttcatttctac

SEQ ID NO: 173229 - DNA, 33 bp, Homo sapien
ctggcaggacattaaaaggcaccgagatagaag

SEQ ID NO: 173230 - DNA, 33 bp, Homo sapien
ctggcaggacattaaacggcaccgagatagaag

SEQ ID NO: 173231 - DNA, 33 bp, Homo sapien
ggaatgtcgttccttccccatctttgcagacgc

SEQ ID NO: 173232 - DNA, 33 bp, Homo sapien
ggaatgtcgttccttctccatctttgcagacgc

SEQ ID NO: 173233 - DNA, 33 bp, Homo sapien
tatttgtaacggcctccgacaacaagcatttct

SEQ ID NO: 173234 - DNA, 33 bp, Homo sapien
tatttgtaacggcctctgacaacaagcatttct

SEQ ID NO: 173235 - DNA, 33 bp, Homo sapien
gaagttcaggacatcccgccgcctggcaccagc

SEQ ID NO: 173236 - DNA, 33 bp, Homo sapien
gaagttcaggacatcctgccgcctggcaccagc

SEQ ID NO: 173237 - DNA, 33 bp, Homo sapien
tctgctaaacattgaaagtaaccttattttatc

SEQ ID NO: 173238 - DNA, 33 bp, Homo sapien
tctgctaaacattgaaggtaaccttattttatc

SEQ ID NO: 173239 - DNA, 33 bp, Homo sapien
cgtaccgcgccaaagaagagtacgtggtccaca

SEQ ID NO: 173240 - DNA, 33 bp, Homo sapien
cgtaccgcgccaaagaggagtacgtggtccaca

SEQ ID NO: 173241 - DNA, 33 bp, Homo sapien
ccagcactgatgagtacgttttgtggcatttaa

SEQ ID NO: 173242 - DNA, 33 bp, Homo sapien
ccagcactgatgagtatgttttgtggcatttaa

SEQ ID NO: 173243 - DNA, 33 bp, Homo sapien
cagaatgctttacgacaccacataagatacaaa

SEQ ID NO: 173244 - DNA, 33 bp, Homo sapien
cagaatgctttacgacgccacataagatacaaa

SEQ ID NO: 173245 - DNA, 33 bp, Homo sapien
ggatgggaggtttgccaagctccagagccccca

SEQ ID NO: 173246 - DNA, 33 bp, Homo sapien
ggatgggaggtttgccgagctccagagccccca

SEQ ID NO: 173247 - DNA, 33 bp, Homo sapien
accccacagcttttcaagatggaggagggtggg

SEQ ID NO: 173248 - DNA, 33 bp, Homo sapien
accccacagcttttcaggatggaggagggtggg

SEQ ID NO: 173249 - DNA, 33 bp, Homo sapien
tgggaagacgcatagagcaaggttgcttcagga

SEQ ID NO: 173250 - DNA, 33 bp, Homo sapien
tgggaagacgcatagatcaaggttgcttcagga

SEQ ID NO: 173251 - DNA, 33 bp, Homo sapien
tccctccctgaacaaaaagagcaggacaagata

SEQ ID NO: 173252 - DNA, 33 bp, Homo sapien
tccctccctgaacaaagagagcaggacaagata

SEQ ID NO: 173253 - DNA, 33 bp, Homo sapien
ctctgggaagtggagcaatcctgtgggctttgc

SEQ ID NO: 173254 - DNA, 33 bp, Homo sapien
ctctgggaagtggagccatcctgtgggctttgc

SEQ ID NO: 173255 - DNA, 33 bp, Homo sapien
tccacatctcacccccaaaagcgtccctctaac

SEQ ID NO: 173256 - DNA, 33 bp, Homo sapien
tccacatctcacccccgaaagcgtccctctaac

SEQ ID NO: 173257 - DNA, 33 bp, Homo sapien
aaacacctcaaattccaagcagaagagacttac

SEQ ID NO: 173258 - DNA, 33 bp, Homo sapien
aaacacctcaaattcccagcagaagagacttac

SEQ ID NO: 173259 - DNA, 33 bp, Homo sapien
ggagggaccacgtgagaatgcaggaagaaggca

SEQ ID NO: 173260 - DNA, 33 bp, Homo sapien
ggagggaccacgtgaggatgcaggaagaaggca

SEQ ID NO: 173261 - DNA, 33 bp, Homo sapien
gaaggcctcttcatcaatcagctatagacaata

SEQ ID NO: 173262 - DNA, 33 bp, Homo sapien
gaaggcctcttcatcagtcagctatagacaata

SEQ ID NO: 173263 - DNA, 33 bp, Homo sapien
ctattcatgttagttgcatttcagaacttgtga

SEQ ID NO: 173264 - DNA, 33 bp, Homo sapien
ctattcatgttagttgtatttcagaacttgtga

SEQ ID NO: 173265 - DNA, 33 bp, Homo sapien
gttcactggaaaggccactgtcctgcgcagagc

SEQ ID NO: 173266 - DNA, 33 bp, Homo sapien
gttcactggaaaggccgctgtcctgcgcagagc

SEQ ID NO: 173267 - DNA, 33 bp, Homo sapien
caccttgcagcctggcacagtgcagatctgcac

SEQ ID NO: 173268 - DNA, 33 bp, Homo sapien
caccttgcagcctggcgcagtgcagatctgcac

SEQ ID NO: 173269 - DNA, 33 bp, Homo sapien
cacagctatttcacaacgggaccgcatgcctgc

SEQ ID NO: 173270 - DNA, 33 bp, Homo sapien
cacagctatttcacaatgggaccgcatgcctgc

SEQ ID NO: 173271 - DNA, 33 bp, Homo sapien
ggtgtcctggcaaaggaaacatgagacaaagcc

SEQ ID NO: 173272 - DNA, 33 bp, Homo sapien
ggtgtcctggcaaagggaacatgagacaaagcc

SEQ ID NO: 173273 - DNA, 33 bp, Homo sapien
cagcacccagagagcaagtacaaaggccacact

SEQ ID NO: 173274 - DNA, 33 bp, Homo sapien
cagcacccagagagcaggtacaaaggccacact

SEQ ID NO: 173275 - DNA, 33 bp, Homo sapien
atttgtatgatgagagaataaagaggtggtatc

SEQ ID NO: 173276 - DNA, 33 bp, Homo sapien
atttgtatgatgagaggataaagaggtggtatc

SEQ ID NO: 173277 - DNA, 33 bp, Homo sapien
ttcatagcacctagtacggctacaacagtctcg

SEQ ID NO: 173278 - DNA, 33 bp, Homo sapien
ttcatagcacctagtatggctacaacagtctcg

SEQ ID NO: 173279 - DNA, 33 bp, Homo sapien
ccaaacacccttcctcacgccttttcacacgca

SEQ ID NO: 173280 - DNA, 33 bp, Homo sapien
ccaaacacccttcctcgcgccttttcacacgca

SEQ ID NO: 173281 - DNA, 33 bp, Homo sapien
ggaaagtaggcaggtcacccggctagacagcat

SEQ ID NO: 173282 - DNA, 33 bp, Homo sapien
ggaaagtaggcaggtcgcccggctagacagcat

SEQ ID NO: 173283 - DNA, 33 bp, Homo sapien
aaaacaaaaaaccaaagagtcttagaggagtag

SEQ ID NO: 173284 - DNA, 33 bp, Homo sapien
aaaacaaaaaaccaaatagtcttagaggagtag

SEQ ID NO: 173285 - DNA, 33 bp, Homo sapien
accaaagaagctgtccaagaaaaagcagaagga

SEQ ID NO: 173286 - DNA, 33 bp, Homo sapien
accaaagaagctgtccgagaaaaagcagaagga

SEQ ID NO: 173287 - DNA, 33 bp, Homo sapien
cgtgaactcaggccacactttcaatatattcat

SEQ ID NO: 173288 - DNA, 33 bp, Homo sapien
cgtgaactcaggccaccctttcaatatattcat

SEQ ID NO: 173289 - DNA, 33 bp, Homo sapien
acactcaagggtaggcaacagaataaaacactg

SEQ ID NO: 173290 - DNA, 33 bp, Homo sapien
acactcaagggtaggcgacagaataaaacactg

SEQ ID NO: 173291 - DNA, 33 bp, Homo sapien
gcaaaggatgagcacaatgcatttgaggacctg

SEQ ID NO: 173292 - DNA, 33 bp, Homo sapien
gcaaaggatgagcacagtgcatttgaggacctg

SEQ ID NO: 173293 - DNA, 33 bp, Homo sapien
agcatccagagaaacacgggatgtgcagggcag

SEQ ID NO: 173294 - DNA, 33 bp, Homo sapien
agcatccagagaaacaggggatgtgcagggcag

SEQ ID NO: 173295 - DNA, 33 bp, Homo sapien
tgagcatctatcataaacttccaacctccttga

SEQ ID NO: 173296 - DNA, 33 bp, Homo sapien
tgagcatctatcataaccttccaacctccttga

SEQ ID NO: 173297 - DNA, 33 bp, Homo sapien
tgcatttttggacttcaatcatgggggctcctg

SEQ ID NO: 173298 - DNA, 33 bp, Homo sapien
tgcatttttggacttcgatcatgggggctcctg

SEQ ID NO: 173299 - DNA, 33 bp, Homo sapien
agcaaagatgcaggcacaacgcaccggcgacaa

SEQ ID NO: 173300 - DNA, 33 bp, Homo sapien
agcaaagatgcaggcagaacgcaccggcgacaa

SEQ ID NO: 173301 - DNA, 33 bp, Homo sapien
agtgcaacatcattccccttgtcgccggtgcgt

SEQ ID NO: 173302 - DNA, 33 bp, Homo sapien
agtgcaacatcattcctcttgtcgccggtgcgt

SEQ ID NO: 173303 - DNA, 33 bp, Homo sapien
gcaggggttcagcggccaatgtgtacttctcgg

SEQ ID NO: 173304 - DNA, 33 bp, Homo sapien
gcaggggttcagcggcgaatgtgtacttctcgg

SEQ ID NO: 173305 - DNA, 33 bp, Homo sapien
caaaatgagaagatgcaaagtcccagcagtcac

SEQ ID NO: 173306 - DNA, 33 bp, Homo sapien
caaaatgagaagatgcgaagtcccagcagtcac

SEQ ID NO: 173307 - DNA, 33 bp, Homo sapien
tcaggacaggagatccaacaaagagctgggggt

SEQ ID NO: 173308 - DNA, 33 bp, Homo sapien
tcaggacaggagatccgacaaagagctgggggt

SEQ ID NO: 173309 - DNA, 33 bp, Homo sapien
ctgtaagaacaacaatcatagcttttgtgttta

SEQ ID NO: 173310 - DNA, 33 bp, Homo sapien
ctgtaagaacaacaattatagcttttgtgttta

SEQ ID NO: 173311 - DNA, 33 bp, Homo sapien
ctctctctccctctcccgctggtgtgtgtttca

SEQ ID NO: 173312 - DNA, 33 bp, Homo sapien
ctctctctccctctcctgctggtgtgtgtttca

SEQ ID NO: 173313 - DNA, 33 bp, Homo sapien
gatccaagaagggtcacatcaccactttcaaag

SEQ ID NO: 173314 - DNA, 33 bp, Homo sapien
gatccaagaagggtcagatcaccactttcaaag

SEQ ID NO: 173315 - DNA, 33 bp, Homo sapien
ttctcactagttggcaaattggttctctccctt

SEQ ID NO: 173316 - DNA, 33 bp, Homo sapien
ttctcactagttggcagattggttctctccctt

SEQ ID NO: 173317 - DNA, 33 bp, Homo sapien
accccattgttcccaactgcattttaactgaaa

SEQ ID NO: 173318 - DNA, 33 bp, Homo sapien
accccattgttcccaattgcattttaactgaaa

SEQ ID NO: 173319 - DNA, 33 bp, Homo sapien
ggggaacacaaatcacaggtaacaggtgctgtt

SEQ ID NO: 173320 - DNA, 33 bp, Homo sapien
ggggaacacaaatcaccggtaacaggtgctgtt

SEQ ID NO: 173321 - DNA, 33 bp, Homo sapien
atcttcaattgactaccgcaaagaccctaaccc

SEQ ID NO: 173322 - DNA, 33 bp, Homo sapien
atcttcaattgactactgcaaagaccctaaccc

SEQ ID NO: 173323 - DNA, 33 bp, Homo sapien
ctacatgaatttgtgacctagaggaatttttaa

SEQ ID NO: 173324 - DNA, 33 bp, Homo sapien
ctacatgaatttgtgatctagaggaatttttaa

SEQ ID NO: 173325 - DNA, 33 bp, Homo sapien
gagaggtgggagtagacgtgttgcttcccgcca

SEQ ID NO: 173326 - DNA, 33 bp, Homo sapien
gagaggtgggagtagaggtgttgcttcccgcca

SEQ ID NO: 173327 - DNA, 33 bp, Homo sapien
tcagtctccttcaatccaacagtttctctgtct

SEQ ID NO: 173328 - DNA, 33 bp, Homo sapien
tcagtctccttcaatctaacagtttctctgtct

SEQ ID NO: 173329 - DNA, 33 bp, Homo sapien
tgtgctcaaaaatcgaaggagatgaattaaaag

SEQ ID NO: 173330 - DNA, 33 bp, Homo sapien
tgtgctcaaaaatcgatggagatgaattaaaag

SEQ ID NO: 173331 - DNA, 33 bp, Homo sapien
ggcaattaggagcaaagggtttttgtggaattg

SEQ ID NO: 173332 - DNA, 33 bp, Homo sapien
ggcaattaggagcaaatggtttttgtggaattg

SEQ ID NO: 173333 - DNA, 33 bp, Homo sapien
ttaacttacaaaaaagacagtgaggacaaagga

SEQ ID NO: 173334 - DNA, 33 bp, Homo sapien
ttaacttacaaaaaaggcagtgaggacaaagga

SEQ ID NO: 173335 - DNA, 33 bp, Homo sapien
ctctgctccaaacctcacctatgttatctccag

SEQ ID NO: 173336 - DNA, 33 bp, Homo sapien
ctctgctccaaacctcgcctatgttatctccag

SEQ ID NO: 173337 - DNA, 33 bp, Homo sapien
tccgccaataatccagaagcccactctagctaa

SEQ ID NO: 173338 - DNA, 33 bp, Homo sapien
tccgccaataatccaggagcccactctagctaa

SEQ ID NO: 173339 - DNA, 33 bp, Homo sapien
cgtttgtaaggactcaatacatgtttgttgaat

SEQ ID NO: 173340 - DNA, 33 bp, Homo sapien
cgtttgtaaggactcattacatgtttgttgaat

SEQ ID NO: 173341 - DNA, 33 bp, Homo sapien
cttttcttccttttcaactctttgtgcttttgc

SEQ ID NO: 173342 - DNA, 33 bp, Homo sapien
cttttcttccttttcatctctttgtgcttttgc

SEQ ID NO: 173343 - DNA, 33 bp, Homo sapien
aatacagtgacctggaagttcatgacaaaggag

SEQ ID NO: 173344 - DNA, 33 bp, Homo sapien
aatacagtgacctggacgttcatgacaaaggag

SEQ ID NO: 173345 - DNA, 33 bp, Homo sapien
aagaatccaatgcaccaaaagagagacaccaaa

SEQ ID NO: 173346 - DNA, 33 bp, Homo sapien
aagaatccaatgcaccgaaagagagacaccaaa

SEQ ID NO: 173347 - DNA, 33 bp, Homo sapien
tgattttctgagtaaaaggttctgcttccccat

SEQ ID NO: 173348 - DNA, 33 bp, Homo sapien
tgattttctgagtaaagggttctgcttccccat

SEQ ID NO: 173349 - DNA, 33 bp, Homo sapien
gcctgatgatgcagagaataggaatggacttgg

SEQ ID NO: 173350 - DNA, 33 bp, Homo sapien
gcctgatgatgcagaggataggaatggacttgg

SEQ ID NO: 173351 - DNA, 33 bp, Homo sapien
taaggaacaagcccaaaataatagagcctgcat

SEQ ID NO: 173352 - DNA, 33 bp, Homo sapien
taaggaacaagcccaagataatagagcctgcat

SEQ ID NO: 173353 - DNA, 33 bp, Homo sapien
tcggctttcaaccaaacggcacccttttgctgt

SEQ ID NO: 173354 - DNA, 33 bp, Homo sapien
tcggctttcaaccaaatggcacccttttgctgt

SEQ ID NO: 173355 - DNA, 33 bp, Homo sapien
gtccctgatgtctacactgcactctgcacaaca

SEQ ID NO: 173356 - DNA, 33 bp, Homo sapien
gtccctgatgtctacattgcactctgcacaaca

SEQ ID NO: 173357 - DNA, 33 bp, Homo sapien
tcgtatccttgaaacacgaatggcagtccccag

SEQ ID NO: 173358 - DNA, 33 bp, Homo sapien
tcgtatccttgaaacatgaatggcagtccccag

SEQ ID NO: 173359 - DNA, 33 bp, Homo sapien
cttattcctgcctacaactagggctcagagttg

SEQ ID NO: 173360 - DNA, 33 bp, Homo sapien
cttattcctgcctacacctagggctcagagttg

SEQ ID NO: 173361 - DNA, 33 bp, Homo sapien
accctccggagcacaaagagagtcccgaggcca

SEQ ID NO: 173362 - DNA, 33 bp, Homo sapien
accctccggagcacaaggagagtcccgaggcca

SEQ ID NO: 173363 - DNA, 33 bp, Homo sapien
tcagatgtccagcctaagaggaaaagaaccaag

SEQ ID NO: 173364 - DNA, 33 bp, Homo sapien
tcagatgtccagcctaggaggaaaagaaccaag

SEQ ID NO: 173365 - DNA, 33 bp, Homo sapien
atctgagcctcaaaaccaccacagacgtaggca

SEQ ID NO: 173366 - DNA, 33 bp, Homo sapien
atctgagcctcaaaactaccacagacgtaggca

SEQ ID NO: 173367 - DNA, 33 bp, Homo sapien
aatgacttacccaacagtaaaagataccaaagt

SEQ ID NO: 173368 - DNA, 33 bp, Homo sapien
aatgacttacccaacattaaaagataccaaagt

SEQ ID NO: 173369 - DNA, 33 bp, Homo sapien
ggggaggcaacacttcaaggatggaagctaaag

SEQ ID NO: 173370 - DNA, 33 bp, Homo sapien
ggggaggcaacacttcgaggatggaagctaaag

SEQ ID NO: 173371 - DNA, 33 bp, Homo sapien
tctctagactgttcccaaaagagaaatggggtg

SEQ ID NO: 173372 - DNA, 33 bp, Homo sapien
tctctagactgttcccgaaagagaaatggggtg

SEQ ID NO: 173373 - DNA, 33 bp, Homo sapien
cttccgatgatggggggaaagagagaggagtga

SEQ ID NO: 173374 - DNA, 33 bp, Homo sapien
cttccgatgatgggggtaaagagagaggagtga

SEQ ID NO: 173375 - DNA, 33 bp, Homo sapien
tatcaccagaaagaaaagagggcaactaagtgg

SEQ ID NO: 173376 - DNA, 33 bp, Homo sapien
tatcaccagaaagaaaggagggcaactaagtgg

SEQ ID NO: 173377 - DNA, 33 bp, Homo sapien
gcactctatcctgtaaagctgaagacagatgtc

SEQ ID NO: 173378 - DNA, 33 bp, Homo sapien
gcactctatcctgtaaggctgaagacagatgtc

SEQ ID NO: 173379 - DNA, 33 bp, Homo sapien
tgtcacccagacactacagaaacttgattgagg

SEQ ID NO: 173380 - DNA, 33 bp, Homo sapien
tgtcacccagacactatagaaacttgattgagg

SEQ ID NO: 173381 - DNA, 33 bp, Homo sapien
agtttccatcagttaccagcttggactctcgac

SEQ ID NO: 173382 - DNA, 33 bp, Homo sapien
agtttccatcagttacgagcttggactctcgac

SEQ ID NO: 173383 - DNA, 33 bp, Homo sapien
ccagggaaaagagacaaccaagagagacaagtc

SEQ ID NO: 173384 - DNA, 33 bp, Homo sapien
ccagggaaaagagacatccaagagagacaagtc

SEQ ID NO: 173385 - DNA, 33 bp, Homo sapien
gacatgagtcacccaacgtggaaggcccaaatc

SEQ ID NO: 173386 - DNA, 33 bp, Homo sapien
gacatgagtcacccaatgtggaaggcccaaatc

SEQ ID NO: 173387 - DNA, 33 bp, Homo sapien
ccacattgttcttcaacgtcctactctgtaaga

SEQ ID NO: 173388 - DNA, 33 bp, Homo sapien
ccacattgttcttcaatgtcctactctgtaaga

SEQ ID NO: 173389 - DNA, 33 bp, Homo sapien
ccccggcctccgacgaataacttgggtgtggag

SEQ ID NO: 173390 - DNA, 33 bp, Homo sapien
ccccggcctccgacgactaacttgggtgtggag

SEQ ID NO: 173391 - DNA, 33 bp, Homo sapien
tgtttatcatctctggaaaggtccgaaacagcc

SEQ ID NO: 173392 - DNA, 33 bp, Homo sapien
tgtttatcatctctggcaaggtccgaaacagcc

SEQ ID NO: 173393 - DNA, 33 bp, Homo sapien
agcctggttcggagaaagccaagctgtttctga

SEQ ID NO: 173394 - DNA, 33 bp, Homo sapien
agcctggttcggagaaggccaagctgtttctga

SEQ ID NO: 173395 - DNA, 33 bp, Homo sapien
ggcagcctgctttggccacacacaccttctttg

SEQ ID NO: 173396 - DNA, 33 bp, Homo sapien
ggcagcctgctttggctacacacaccttctttg

SEQ ID NO: 173397 - DNA, 33 bp, Homo sapien
agtaacagagccctgaagctgacctttccccac

SEQ ID NO: 173398 - DNA, 33 bp, Homo sapien
agtaacagagccctgaggctgacctttccccac

SEQ ID NO: 173399 - DNA, 33 bp, Homo sapien
tgtgagaaaaactctacgccctgggcttttggc

SEQ ID NO: 173400 - DNA, 33 bp, Homo sapien
tgtgagaaaaactctatgccctgggcttttggc

SEQ ID NO: 173401 - DNA, 33 bp, Homo sapien
tgtggctgggctcctgcataggacagtgcggct

SEQ ID NO: 173402 - DNA, 33 bp, Homo sapien
tgtggctgggctcctgtataggacagtgcggct

SEQ ID NO: 173403 - DNA, 33 bp, Homo sapien
gccactcactcccacaatcatcctggagagccg

SEQ ID NO: 173404 - DNA, 33 bp, Homo sapien
gccactcactcccacagtcatcctggagagccg

SEQ ID NO: 173405 - DNA, 33 bp, Homo sapien
tgcaggtgtgtgtcaccattccaggctaatttt

SEQ ID NO: 173406 - DNA, 33 bp, Homo sapien
tgcaggtgtgtgtcactattccaggctaatttt

SEQ ID NO: 173407 - DNA, 33 bp, Homo sapien
tctggtagatctctcccaggttgttcaccagct

SEQ ID NO: 173408 - DNA, 33 bp, Homo sapien
tctggtagatctctccgaggttgttcaccagct

SEQ ID NO: 173409 - DNA, 33 bp, Homo sapien
agctgtatcagcatcaacagggtagtgtttcta

SEQ ID NO: 173410 - DNA, 33 bp, Homo sapien
agctgtatcagcatcagcagggtagtgtttcta

SEQ ID NO: 173411 - DNA, 33 bp, Homo sapien
agaaaacaaacagggacagtggatgacgaggtg

SEQ ID NO: 173412 - DNA, 33 bp, Homo sapien
agaaaacaaacagggatagtggatgacgaggtg

SEQ ID NO: 173413 - DNA, 33 bp, Homo sapien
gttcagacattcccaccggcccttgcagccaca

SEQ ID NO: 173414 - DNA, 33 bp, Homo sapien
gttcagacattcccactggcccttgcagccaca

SEQ ID NO: 173415 - DNA, 33 bp, Homo sapien
ggcattgtttttgtacagcctttgagctaagta

SEQ ID NO: 173416 - DNA, 33 bp, Homo sapien
ggcattgtttttgtacggcctttgagctaagta

SEQ ID NO: 173417 - DNA, 33 bp, Homo sapien
gcttgtggaaggaatcgagagctctgccttctt

SEQ ID NO: 173418 - DNA, 33 bp, Homo sapien
gcttgtggaaggaatctagagctctgccttctt

SEQ ID NO: 173419 - DNA, 33 bp, Homo sapien
ggagttggttttctacagagcttgtctggggaa

SEQ ID NO: 173420 - DNA, 33 bp, Homo sapien
ggagttggttttctacggagcttgtctggggaa

SEQ ID NO: 173421 - DNA, 33 bp, Homo sapien
gtgttatatgcaacgaaagatgtatgttcaaaa

SEQ ID NO: 173422 - DNA, 33 bp, Homo sapien
gtgttatatgcaacgacagatgtatgttcaaaa

SEQ ID NO: 173423 - DNA, 33 bp, Homo sapien
gactggccctttaaaccggagaccatgatgtca

SEQ ID NO: 173424 - DNA, 33 bp, Homo sapien
gactggccctttaaactggagaccatgatgtca

SEQ ID NO: 173425 - DNA, 33 bp, Homo sapien
ctgtgactccataaaaaccctctactgagggaa

SEQ ID NO: 173426 - DNA, 33 bp, Homo sapien
ctgtgactccataaaagccctctactgagggaa

SEQ ID NO: 173427 - DNA, 33 bp, Homo sapien
aataagatgagaaaagaacatggaggctgcagc

SEQ ID NO: 173428 - DNA, 33 bp, Homo sapien
aataagatgagaaaagcacatggaggctgcagc

SEQ ID NO: 173429 - DNA, 33 bp, Homo sapien
cacctgcgtaacaggcacaggtgccctcacaag

SEQ ID NO: 173430 - DNA, 33 bp, Homo sapien
cacctgcgtaacaggcgcaggtgccctcacaag

SEQ ID NO: 173431 - DNA, 33 bp, Homo sapien
aaccaggcctggggagaagccacaaacctgaat

SEQ ID NO: 173432 - DNA, 33 bp, Homo sapien
aaccaggcctggggaggagccacaaacctgaat

SEQ ID NO: 173433 - DNA, 33 bp, Homo sapien
ctcagtgtgaagaaggaccatgtctgtggttac

SEQ ID NO: 173434 - DNA, 33 bp, Homo sapien
ctcagtgtgaagaagggccatgtctgtggttac

SEQ ID NO: 173435 - DNA, 33 bp, Homo sapien
agggccctggaagtgaagaagagaggcaagcca

SEQ ID NO: 173436 - DNA, 33 bp, Homo sapien
agggccctggaagtgaggaagagaggcaagcca

SEQ ID NO: 173437 - DNA, 33 bp, Homo sapien
cagccacctgcttggggatcagtccacccacat

SEQ ID NO: 173438 - DNA, 33 bp, Homo sapien
cagccacctgcttgggtatcagtccacccacat

SEQ ID NO: 173439 - DNA, 33 bp, Homo sapien
ggtcactgctgactaccacttcctcattctcta

SEQ ID NO: 173440 - DNA, 33 bp, Homo sapien
ggtcactgctgactacgacttcctcattctcta

SEQ ID NO: 173441 - DNA, 33 bp, Homo sapien
gacaggcggttgaagaacatggctccgttgagc

SEQ ID NO: 173442 - DNA, 33 bp, Homo sapien
gacaggcggttgaagagcatggctccgttgagc

SEQ ID NO: 173443 - DNA, 33 bp, Homo sapien
agaacatcttgggagacaatggaaaagccaggt

SEQ ID NO: 173444 - DNA, 33 bp, Homo sapien
agaacatcttgggagagaatggaaaagccaggt

SEQ ID NO: 173445 - DNA, 33 bp, Homo sapien
cctgtccagttcctcacgtgcattaccacctta

SEQ ID NO: 173446 - DNA, 33 bp, Homo sapien
cctgtccagttcctcatgtgcattaccacctta

SEQ ID NO: 173447 - DNA, 33 bp, Homo sapien
ctgactgttcactgaccgcctcaattcaattcc

SEQ ID NO: 173448 - DNA, 33 bp, Homo sapien
ctgactgttcactgacggcctcaattcaattcc

SEQ ID NO: 173449 - DNA, 33 bp, Homo sapien
gtgagtgagagaggaacgttctttgaagtaccg

SEQ ID NO: 173450 - DNA, 33 bp, Homo sapien
gtgagtgagagaggaatgttctttgaagtaccg

SEQ ID NO: 173451 - DNA, 33 bp, Homo sapien
caacagtaaataaagccaaattcaaacccagaa

SEQ ID NO: 173452 - DNA, 33 bp, Homo sapien
caacagtaaataaagctaaattcaaacccagaa

SEQ ID NO: 173453 - DNA, 33 bp, Homo sapien
cagtacacatcacttacgaatatgaattaagac

SEQ ID NO: 173454 - DNA, 33 bp, Homo sapien
cagtacacatcacttatgaatatgaattaagac

SEQ ID NO: 173455 - DNA, 33 bp, Homo sapien
cacccccaagaagaacccagagagtggcccagc

SEQ ID NO: 173456 - DNA, 33 bp, Homo sapien
cacccccaagaagaactcagagagtggcccagc

SEQ ID NO: 173457 - DNA, 33 bp, Homo sapien
ccttaaccatctgcaaagtcttttttgccatgt

SEQ ID NO: 173458 - DNA, 33 bp, Homo sapien
ccttaaccatctgcaatgtcttttttgccatgt

SEQ ID NO: 173459 - DNA, 33 bp, Homo sapien
caaaacttgaatggaaaacagctctttatttag

SEQ ID NO: 173460 - DNA, 33 bp, Homo sapien
caaaacttgaatggaagacagctctttatttag

SEQ ID NO: 173461 - DNA, 33 bp, Homo sapien
gataggaggcttgacacgtggagaaggccacac

SEQ ID NO: 173462 - DNA, 33 bp, Homo sapien
gataggaggcttgacaggtggagaaggccacac

SEQ ID NO: 173463 - DNA, 33 bp, Homo sapien
atggccaaagctggagcaatttgggaaataagg

SEQ ID NO: 173464 - DNA, 33 bp, Homo sapien
atggccaaagctggaggaatttgggaaataagg

SEQ ID NO: 173465 - DNA, 33 bp, Homo sapien
ataaacaccccttcacagtctcctaagtctctg

SEQ ID NO: 173466 - DNA, 33 bp, Homo sapien
ataaacaccccttcacggtctcctaagtctctg

SEQ ID NO: 173467 - DNA, 33 bp, Homo sapien
agtgagtccagcaagacgccagggttgaatagc

SEQ ID NO: 173468 - DNA, 33 bp, Homo sapien
agtgagtccagcaagatgccagggttgaatagc

SEQ ID NO: 173469 - DNA, 33 bp, Homo sapien
ccgtctgcttcctgaccgagacccgcaacatgc

SEQ ID NO: 173470 - DNA, 33 bp, Homo sapien
ccgtctgcttcctgactgagacccgcaacatgc

SEQ ID NO: 173471 - DNA, 33 bp, Homo sapien
aacaagtgaataaacaccaaacatctgccgtct

SEQ ID NO: 173472 - DNA, 33 bp, Homo sapien
aacaagtgaataaacagcaaacatctgccgtct

SEQ ID NO: 173473 - DNA, 33 bp, Homo sapien
tgtcatatgctggagccattcccatgactcaga

SEQ ID NO: 173474 - DNA, 33 bp, Homo sapien
tgtcatatgctggagctattcccatgactcaga

SEQ ID NO: 173475 - DNA, 33 bp, Homo sapien
gacctactgcatcttagagactcaccaccaggg

SEQ ID NO: 173476 - DNA, 33 bp, Homo sapien
gacctactgcatcttatagactcaccaccaggg

SEQ ID NO: 173477 - DNA, 33 bp, Homo sapien
tagttttctcaataaccctgtgaggtagctatc

SEQ ID NO: 173478 - DNA, 33 bp, Homo sapien
tagttttctcaataactctgtgaggtagctatc

SEQ ID NO: 173479 - DNA, 33 bp, Homo sapien
atcctgatatgtcaaaactcatttggtccaacc

SEQ ID NO: 173480 - DNA, 33 bp, Homo sapien
atcctgatatgtcaaagctcatttggtccaacc

SEQ ID NO: 173481 - DNA, 33 bp, Homo sapien
tattccctctttcctacaatcacctcccaaata

SEQ ID NO: 173482 - DNA, 33 bp, Homo sapien
tattccctctttcctagaatcacctcccaaata

SEQ ID NO: 173483 - DNA, 33 bp, Homo sapien
tttgatgagaaatagcaaacaacagaggaccac

SEQ ID NO: 173484 - DNA, 33 bp, Homo sapien
tttgatgagaaatagcgaacaacagaggaccac

SEQ ID NO: 173485 - DNA, 33 bp, Homo sapien
ctattattgtttgccaaagtaggacagcagtcg

SEQ ID NO: 173486 - DNA, 33 bp, Homo sapien
ctattattgtttgccagagtaggacagcagtcg

SEQ ID NO: 173487 - DNA, 33 bp, Homo sapien
cctcgctgtccccgtcaaactccagccacaaga

SEQ ID NO: 173488 - DNA, 33 bp, Homo sapien
cctcgctgtccccgtcgaactccagccacaaga

SEQ ID NO: 173489 - DNA, 33 bp, Homo sapien
aaatgttaaggcacaacggatgctcagaaaacg

SEQ ID NO: 173490 - DNA, 33 bp, Homo sapien
aaatgttaaggcacaatggatgctcagaaaacg

SEQ ID NO: 173491 - DNA, 33 bp, Homo sapien
agttgggtagtctgcccactttctttgaaatgt

SEQ ID NO: 173492 - DNA, 33 bp, Homo sapien
agttgggtagtctgcctactttctttgaaatgt

SEQ ID NO: 173493 - DNA, 33 bp, Homo sapien
ttcacttaaaacattacctggtcatctggtaag

SEQ ID NO: 173494 - DNA, 33 bp, Homo sapien
ttcacttaaaacattagctggtcatctggtaag

SEQ ID NO: 173495 - DNA, 33 bp, Homo sapien
aggttaccaaagactaaggggagagacaggtag

SEQ ID NO: 173496 - DNA, 33 bp, Homo sapien
aggttaccaaagactagggggagagacaggtag

SEQ ID NO: 173497 - DNA, 33 bp, Homo sapien
gttctgttgctaacacactgaattaattctttg

SEQ ID NO: 173498 - DNA, 33 bp, Homo sapien
gttctgttgctaacacgctgaattaattctttg

SEQ ID NO: 173499 - DNA, 33 bp, Homo sapien
tgcaggtttgttttacagatatattgcataatg

SEQ ID NO: 173500 - DNA, 33 bp, Homo sapien
tgcaggtttgttttacggatatattgcataatg

SEQ ID NO: 173501 - DNA, 33 bp, Homo sapien
tccaaaagtttttcagaattgttcaaatgcatc

SEQ ID NO: 173502 - DNA, 33 bp, Homo sapien
tccaaaagtttttcaggattgttcaaatgcatc

SEQ ID NO: 173503 - DNA, 33 bp, Homo sapien
ccgccactctggaaaacagttcagcagtttctt

SEQ ID NO: 173504 - DNA, 33 bp, Homo sapien
ccgccactctggaaaatagttcagcagtttctt

SEQ ID NO: 173505 - DNA, 33 bp, Homo sapien
agttgggcattttcaaacagagggactctccac

SEQ ID NO: 173506 - DNA, 33 bp, Homo sapien
agttgggcattttcaatcagagggactctccac

SEQ ID NO: 173507 - DNA, 33 bp, Homo sapien
taatgccagtcagcaaaggttgttgcacaatga

SEQ ID NO: 173508 - DNA, 33 bp, Homo sapien
taatgccagtcagcaagggttgttgcacaatga

SEQ ID NO: 173509 - DNA, 33 bp, Homo sapien
ttgcctctagggaaaaagcatcccagttcctca

SEQ ID NO: 173510 - DNA, 33 bp, Homo sapien
ttgcctctagggaaaacgcatcccagttcctca

SEQ ID NO: 173511 - DNA, 33 bp, Homo sapien
agacctgtatgagaaactccttagatattaact

SEQ ID NO: 173512 - DNA, 33 bp, Homo sapien
agacctgtatgagaaattccttagatattaact

SEQ ID NO: 173513 - DNA, 33 bp, Homo sapien
ctttctctcaaagactaagagtgtttagtgcag

SEQ ID NO: 173514 - DNA, 33 bp, Homo sapien
ctttctctcaaagactgagagtgtttagtgcag

SEQ ID NO: 173515 - DNA, 33 bp, Homo sapien
acagccagtaaatagcaatgtcaagacttaaag

SEQ ID NO: 173516 - DNA, 33 bp, Homo sapien
acagccagtaaatagcgatgtcaagacttaaag

SEQ ID NO: 173517 - DNA, 33 bp, Homo sapien
gggctacttagaattacggattttcaggattgg

SEQ ID NO: 173518 - DNA, 33 bp, Homo sapien
gggctacttagaattatggattttcaggattgg

SEQ ID NO: 173519 - DNA, 33 bp, Homo sapien
actcctttccttcaaacgcaggggtcattcctg

SEQ ID NO: 173520 - DNA, 33 bp, Homo sapien
actcctttccttcaaatgcaggggtcattcctg

SEQ ID NO: 173521 - DNA, 33 bp, Homo sapien
caacctatcatacaacactggtgtcctgatgcc

SEQ ID NO: 173522 - DNA, 33 bp, Homo sapien
caacctatcatacaaccctggtgtcctgatgcc

SEQ ID NO: 173523 - DNA, 33 bp, Homo sapien
agaagtttgtcactgacctgaactattcatgaa

SEQ ID NO: 173524 - DNA, 33 bp, Homo sapien
agaagtttgtcactgatctgaactattcatgaa

SEQ ID NO: 173525 - DNA, 33 bp, Homo sapien
agaggcttcagctccaatgctctcgtagtgagc

SEQ ID NO: 173526 - DNA, 33 bp, Homo sapien
agaggcttcagctccagtgctctcgtagtgagc

SEQ ID NO: 173527 - DNA, 33 bp, Homo sapien
tgagggtgtgtctgcacaaaactcggatctggt

SEQ ID NO: 173528 - DNA, 33 bp, Homo sapien
tgagggtgtgtctgcagaaaactcggatctggt

SEQ ID NO: 173529 - DNA, 33 bp, Homo sapien
tgaaaacaagggaggacgacctgagccacgaga

SEQ ID NO: 173530 - DNA, 33 bp, Homo sapien
tgaaaacaagggaggatgacctgagccacgaga

SEQ ID NO: 173531 - DNA, 33 bp, Homo sapien
tgtacaattggtcatacgtctgtctttattttt

SEQ ID NO: 173532 - DNA, 33 bp, Homo sapien
tgtacaattggtcatatgtctgtctttattttt

SEQ ID NO: 173533 - DNA, 33 bp, Homo sapien
aactcctcaaaagaatgaaggcggaacatgaca

SEQ ID NO: 173534 - DNA, 33 bp, Homo sapien
aactcctcaaaagaattaaggcggaacatgaca

SEQ ID NO: 173535 - DNA, 33 bp, Homo sapien
aacaatgtgcttcccaatgagtctccaattgac

SEQ ID NO: 173536 - DNA, 33 bp, Homo sapien
aacaatgtgcttcccagtgagtctccaattgac

SEQ ID NO: 173537 - DNA, 33 bp, Homo sapien
taaatacaaaatgacacatatcttgattccaag

SEQ ID NO: 173538 - DNA, 33 bp, Homo sapien
taaatacaaaatgacagatatcttgattccaag

SEQ ID NO: 173539 - DNA, 33 bp, Homo sapien
tttgcctcctctcctccatatcaggtgatccag

SEQ ID NO: 173540 - DNA, 33 bp, Homo sapien
tttgcctcctctcctctatatcaggtgatccag

SEQ ID NO: 173541 - DNA, 33 bp, Homo sapien
cctggctgcaggagtacgtccagcctatgcatc

SEQ ID NO: 173542 - DNA, 33 bp, Homo sapien
cctggctgcaggagtatgtccagcctatgcatc

SEQ ID NO: 173543 - DNA, 33 bp, Homo sapien
ttgatttttggatgccaatcatgtgctgaatac

SEQ ID NO: 173544 - DNA, 33 bp, Homo sapien
ttgatttttggatgcccatcatgtgctgaatac

SEQ ID NO: 173545 - DNA, 33 bp, Homo sapien
ataagataggtcggtacaagatacaggtcataa

SEQ ID NO: 173546 - DNA, 33 bp, Homo sapien
ataagataggtcggtagaagatacaggtcataa

SEQ ID NO: 173547 - DNA, 33 bp, Homo sapien
aaaccatctcttgttcccttcctctcttctact

SEQ ID NO: 173548 - DNA, 33 bp, Homo sapien
aaaccatctcttgttctcttcctctcttctact

SEQ ID NO: 173549 - DNA, 33 bp, Homo sapien
aatgactcatttgaacaatgttctgcctgtctc

SEQ ID NO: 173550 - DNA, 33 bp, Homo sapien
aatgactcatttgaaccatgttctgcctgtctc

SEQ ID NO: 173551 - DNA, 33 bp, Homo sapien
gttgacctggtgaagacacagaggctttacctg

SEQ ID NO: 173552 - DNA, 33 bp, Homo sapien
gttgacctggtgaagatacagaggctttacctg

SEQ ID NO: 173553 - DNA, 33 bp, Homo sapien
cgtggatggcatcatcacggaggtcaacgccca

SEQ ID NO: 173554 - DNA, 33 bp, Homo sapien
cgtggatggcatcatcgcggaggtcaacgccca

SEQ ID NO: 173555 - DNA, 33 bp, Homo sapien
aaatggagaagtttaactgccctccaagacaaa

SEQ ID NO: 173556 - DNA, 33 bp, Homo sapien
aaatggagaagtttaattgccctccaagacaaa

SEQ ID NO: 173557 - DNA, 33 bp, Homo sapien
gtaaacagactgtagccaacgcttgtggcaatc

SEQ ID NO: 173558 - DNA, 33 bp, Homo sapien
gtaaacagactgtagcgaacgcttgtggcaatc

SEQ ID NO: 173559 - DNA, 33 bp, Homo sapien
cgaggcggaaacctggcagatgatttgtctcag

SEQ ID NO: 173560 - DNA, 33 bp, Homo sapien
cgaggcggaaacctggtagatgatttgtctcag

SEQ ID NO: 173561 - DNA, 33 bp, Homo sapien
tggaccctctcttctccaccaagcctctcacct

SEQ ID NO: 173562 - DNA, 33 bp, Homo sapien
tggaccctctcttctctaccaagcctctcacct

SEQ ID NO: 173563 - DNA, 33 bp, Homo sapien
ctgcttttgggttccacagtgtttgtagtttgg

SEQ ID NO: 173564 - DNA, 33 bp, Homo sapien
ctgcttttgggttccatagtgtttgtagtttgg

SEQ ID NO: 173565 - DNA, 33 bp, Homo sapien
tggaaggaactcccgacgtccatccccgacatg

SEQ ID NO: 173566 - DNA, 33 bp, Homo sapien
tggaaggaactcccgatgtccatccccgacatg

SEQ ID NO: 173567 - DNA, 33 bp, Homo sapien
tcaaagcttcggttccgcatccaattcccagag

SEQ ID NO: 173568 - DNA, 33 bp, Homo sapien
tcaaagcttcggttcctcatccaattcccagag

SEQ ID NO: 173569 - DNA, 33 bp, Homo sapien
gctgagccaagatgaaacaagagtgacaccaag

SEQ ID NO: 173570 - DNA, 33 bp, Homo sapien
gctgagccaagatgaagcaagagtgacaccaag

SEQ ID NO: 173571 - DNA, 33 bp, Homo sapien
acgtgagtgcacgtctcaacgtgtgtgcgagtg

SEQ ID NO: 173572 - DNA, 33 bp, Homo sapien
acgtgagtgcacgtctgaacgtgtgtgcgagtg

SEQ ID NO: 173573 - DNA, 33 bp, Homo sapien
taaaagcgcatcagagaaaacagtcttttcatc

SEQ ID NO: 173574 - DNA, 33 bp, Homo sapien
taaaagcgcatcagaggaaacagtcttttcatc

SEQ ID NO: 173575 - DNA, 33 bp, Homo sapien
acagtgattacctagaaatgcaagtgctttgaa

SEQ ID NO: 173576 - DNA, 33 bp, Homo sapien
acagtgattacctagagatgcaagtgctttgaa

SEQ ID NO: 173577 - DNA, 33 bp, Homo sapien
agtgcaggaaataaccccgtcagcagcgctgtc

SEQ ID NO: 173578 - DNA, 33 bp, Homo sapien
agtgcaggaaataaccgcgtcagcagcgctgtc

SEQ ID NO: 173579 - DNA, 33 bp, Homo sapien
gttctgttctgtgctggattaggtcaggagtga

SEQ ID NO: 173580 - DNA, 33 bp, Homo sapien
gttctgttctgtgctgtattaggtcaggagtga

SEQ ID NO: 173581 - DNA, 33 bp, Homo sapien
tatttccagaatggtaactcaagtgactattaa

SEQ ID NO: 173582 - DNA, 33 bp, Homo sapien
tatttccagaatggtatctcaagtgactattaa

SEQ ID NO: 173583 - DNA, 33 bp, Homo sapien
acaagaattcagtaaacgttagctattataatc

SEQ ID NO: 173584 - DNA, 33 bp, Homo sapien
acaagaattcagtaaatgttagctattataatc

SEQ ID NO: 173585 - DNA, 33 bp, Homo sapien
ctcagcagcctgaagacgtgcgcctttgttttc

SEQ ID NO: 173586 - DNA, 33 bp, Homo sapien
ctcagcagcctgaagatgtgcgcctttgttttc

SEQ ID NO: 173587 - DNA, 33 bp, Homo sapien
gacacagcaatgaaaacaactgcttctccactc

SEQ ID NO: 173588 - DNA, 33 bp, Homo sapien
gacacagcaatgaaaataactgcttctccactc

SEQ ID NO: 173589 - DNA, 33 bp, Homo sapien
atgccacgtatacgtcaagaaaaggattctagg

SEQ ID NO: 173590 - DNA, 33 bp, Homo sapien
atgccacgtatacgtcgagaaaaggattctagg

SEQ ID NO: 173591 - DNA, 33 bp, Homo sapien
gtactgtgagtagcaaatgagtcagtagccggt

SEQ ID NO: 173592 - DNA, 33 bp, Homo sapien
gtactgtgagtagcaagtgagtcagtagccggt

SEQ ID NO: 173593 - DNA, 33 bp, Homo sapien
tccccggaactgcagaagaagccggccacgtga

SEQ ID NO: 173594 - DNA, 33 bp, Homo sapien
tccccggaactgcagaggaagccggccacgtga

SEQ ID NO: 173595 - DNA, 33 bp, Homo sapien
gaccacagcgcttcagccggaactagggaagtg

SEQ ID NO: 173596 - DNA, 33 bp, Homo sapien
gaccacagcgcttcagtcggaactagggaagtg

SEQ ID NO: 173597 - DNA, 33 bp, Homo sapien
gtaaacttgagctggaaccttctcttcgcacag

SEQ ID NO: 173598 - DNA, 33 bp, Homo sapien
gtaaacttgagctggagccttctcttcgcacag

SEQ ID NO: 173599 - DNA, 33 bp, Homo sapien
tccacatcggtctcaacccgaaactaggagctt

SEQ ID NO: 173600 - DNA, 33 bp, Homo sapien
tccacatcggtctcaatccgaaactaggagctt

SEQ ID NO: 173601 - DNA, 33 bp, Homo sapien
tctctcaaagtattgggattacaagtatgaacc

SEQ ID NO: 173602 - DNA, 33 bp, Homo sapien
tctctcaaagtattggtattacaagtatgaacc

SEQ ID NO: 173603 - DNA, 33 bp, Homo sapien
ggtaagtggggccagaacaggttcccagagggc

SEQ ID NO: 173604 - DNA, 33 bp, Homo sapien
ggtaagtggggccagaccaggttcccagagggc

SEQ ID NO: 173605 - DNA, 33 bp, Homo sapien
ggctacagcaagtcccagcagagtggggcggcc

SEQ ID NO: 173606 - DNA, 33 bp, Homo sapien
ggctacagcaagtcccggcagagtggggcggcc

SEQ ID NO: 173607 - DNA, 33 bp, Homo sapien
aaggatgtctagcctaaggtgctgaaatccagc

SEQ ID NO: 173608 - DNA, 33 bp, Homo sapien
aaggatgtctagcctagggtgctgaaatccagc

SEQ ID NO: 173609 - DNA, 33 bp, Homo sapien
ttggaacgctcatcccccgctatacctcccctt

SEQ ID NO: 173610 - DNA, 33 bp, Homo sapien
ttggaacgctcatccctcgctatacctcccctt

SEQ ID NO: 173611 - DNA, 33 bp, Homo sapien
gtcttcctccttgtcccatgaaggccacacccc

SEQ ID NO: 173612 - DNA, 33 bp, Homo sapien
gtcttcctccttgtcctatgaaggccacacccc

SEQ ID NO: 173613 - DNA, 33 bp, Homo sapien
ataagaaactgctgaacggttttccgaagtggt

SEQ ID NO: 173614 - DNA, 33 bp, Homo sapien
ataagaaactgctgaatggttttccgaagtggt

SEQ ID NO: 173615 - DNA, 33 bp, Homo sapien
tggcacccgtgctctgaacaatctaccaggggc

SEQ ID NO: 173616 - DNA, 33 bp, Homo sapien
tggcacccgtgctctggacaatctaccaggggc

SEQ ID NO: 173617 - DNA, 33 bp, Homo sapien
gacctgcttgtcggacaccgatcctgatcctgg

SEQ ID NO: 173618 - DNA, 33 bp, Homo sapien
gacctgcttgtcggacgccgatcctgatcctgg

SEQ ID NO: 173619 - DNA, 33 bp, Homo sapien
atactccctgcttcacagacctgttaggagtcc

SEQ ID NO: 173620 - DNA, 33 bp, Homo sapien
atactccctgcttcacggacctgttaggagtcc

SEQ ID NO: 173621 - DNA, 33 bp, Homo sapien
cttccacagcttcaacaaaaatgtaccgagcat

SEQ ID NO: 173622 - DNA, 33 bp, Homo sapien
cttccacagcttcaacgaaaatgtaccgagcat

SEQ ID NO: 173623 - DNA, 33 bp, Homo sapien
ccacaatgagttgccaagtaccagaatcctttg

SEQ ID NO: 173624 - DNA, 33 bp, Homo sapien
ccacaatgagttgccaggtaccagaatcctttg

SEQ ID NO: 173625 - DNA, 33 bp, Homo sapien
agccacgctataagagaaagtaaatgagaaaca

SEQ ID NO: 173626 - DNA, 33 bp, Homo sapien
agccacgctataagaggaagtaaatgagaaaca

SEQ ID NO: 173627 - DNA, 33 bp, Homo sapien
gccttttctcttcttacctacaggggactttct

SEQ ID NO: 173628 - DNA, 33 bp, Homo sapien
gccttttctcttcttatctacaggggactttct

SEQ ID NO: 173629 - DNA, 33 bp, Homo sapien
tctaggagatagaaccacttcctatggctttgg

SEQ ID NO: 173630 - DNA, 33 bp, Homo sapien
tctaggagatagaaccccttcctatggctttgg

SEQ ID NO: 173631 - DNA, 33 bp, Homo sapien
cctcttaaaaatagtaaggaagagtctccctgg

SEQ ID NO: 173632 - DNA, 33 bp, Homo sapien
cctcttaaaaatagtagggaagagtctccctgg

SEQ ID NO: 173633 - DNA, 33 bp, Homo sapien
gctcgtgggcccttagaagttccaggtcttcag

SEQ ID NO: 173634 - DNA, 33 bp, Homo sapien
gctcgtgggcccttaggagttccaggtcttcag

SEQ ID NO: 173635 - DNA, 33 bp, Homo sapien
tctgcacagacaatgactattatctcttcctac

SEQ ID NO: 173636 - DNA, 33 bp, Homo sapien
tctgcacagacaatgattattatctcttcctac

SEQ ID NO: 173637 - DNA, 33 bp, Homo sapien
atgatgatgtaaattacgaggatgggaatgatg

SEQ ID NO: 173638 - DNA, 33 bp, Homo sapien
atgatgatgtaaattatgaggatgggaatgatg

SEQ ID NO: 173639 - DNA, 33 bp, Homo sapien
aggcagacaccaataacgcagataggttctttc

SEQ ID NO: 173640 - DNA, 33 bp, Homo sapien
aggcagacaccaataatgcagataggttctttc

SEQ ID NO: 173641 - DNA, 33 bp, Homo sapien
gctccccatcaccaacaagagagctgtccttac

SEQ ID NO: 173642 - DNA, 33 bp, Homo sapien
gctccccatcaccaaccagagagctgtccttac

SEQ ID NO: 173643 - DNA, 33 bp, Homo sapien
ttcttccatctgctgaaaaactcttgtaataga

SEQ ID NO: 173644 - DNA, 33 bp, Homo sapien
ttcttccatctgctgataaactcttgtaataga

SEQ ID NO: 173645 - DNA, 33 bp, Homo sapien
aaagagttgctgatagcagtgtcctggttcttc

SEQ ID NO: 173646 - DNA, 33 bp, Homo sapien
aaagagttgctgatagtagtgtcctggttcttc

SEQ ID NO: 173647 - DNA, 33 bp, Homo sapien
agggactgctcttcaacgaaagggctgagtgac

SEQ ID NO: 173648 - DNA, 33 bp, Homo sapien
agggactgctcttcaatgaaagggctgagtgac

SEQ ID NO: 173649 - DNA, 33 bp, Homo sapien
ggaaggaataaaaaccaggccagactcacagtg

SEQ ID NO: 173650 - DNA, 33 bp, Homo sapien
ggaaggaataaaaaccgggccagactcacagtg

SEQ ID NO: 173651 - DNA, 33 bp, Homo sapien
cagctagagttcacagcatagagtactggagaa

SEQ ID NO: 173652 - DNA, 33 bp, Homo sapien
cagctagagttcacaggatagagtactggagaa

SEQ ID NO: 173653 - DNA, 33 bp, Homo sapien
tcattccagcacctacaacaacagtgacaactt

SEQ ID NO: 173654 - DNA, 33 bp, Homo sapien
tcattccagcacctactacaacagtgacaactt

SEQ ID NO: 173655 - DNA, 33 bp, Homo sapien
actaaaagtactgaaaatgttgaaaggatgaag

SEQ ID NO: 173656 - DNA, 33 bp, Homo sapien
actaaaagtactgaaagtgttgaaaggatgaag

SEQ ID NO: 173657 - DNA, 33 bp, Homo sapien
agaagagcaactgaaccggtttacagcttgcca

SEQ ID NO: 173658 - DNA, 33 bp, Homo sapien
agaagagcaactgaactggtttacagcttgcca

SEQ ID NO: 173659 - DNA, 33 bp, Homo sapien
ggtcaagtgactccgaaatcaattttacttaga

SEQ ID NO: 173660 - DNA, 33 bp, Homo sapien
ggtcaagtgactccgagatcaattttacttaga

SEQ ID NO: 173661 - DNA, 33 bp, Homo sapien
tgatttggctataaaaagaatgatacatggtgg

SEQ ID NO: 173662 - DNA, 33 bp, Homo sapien
tgatttggctataaaatgaatgatacatggtgg

SEQ ID NO: 173663 - DNA, 33 bp, Homo sapien
gcactcattataaccaactgctgatcatgttac

SEQ ID NO: 173664 - DNA, 33 bp, Homo sapien
gcactcattataaccagctgctgatcatgttac

SEQ ID NO: 173665 - DNA, 33 bp, Homo sapien
cattcacttttgagaccagtgtttgtaggatgt

SEQ ID NO: 173666 - DNA, 33 bp, Homo sapien
cattcacttttgagactagtgtttgtaggatgt

SEQ ID NO: 173667 - DNA, 33 bp, Homo sapien
ttggattattcatctacgttagtctaaacaagt

SEQ ID NO: 173668 - DNA, 33 bp, Homo sapien
ttggattattcatctatgttagtctaaacaagt

SEQ ID NO: 173669 - DNA, 33 bp, Homo sapien
cagactctgtggcccaagacctgtttttgtgta

SEQ ID NO: 173670 - DNA, 33 bp, Homo sapien
cagactctgtggcccacgacctgtttttgtgta

SEQ ID NO: 173671 - DNA, 33 bp, Homo sapien
aacttgcccaaagccactatgtccacagttttc

SEQ ID NO: 173672 - DNA, 33 bp, Homo sapien
aacttgcccaaagccattatgtccacagttttc

SEQ ID NO: 173673 - DNA, 33 bp, Homo sapien
caatgatacttgttggcatttagccagagaaac

SEQ ID NO: 173674 - DNA, 33 bp, Homo sapien
caatgatacttgttggtatttagccagagaaac

SEQ ID NO: 173675 - DNA, 33 bp, Homo sapien
aactccatctcaagaaatatgtacctatatgta

SEQ ID NO: 173676 - DNA, 33 bp, Homo sapien
aactccatctcaagaagtatgtacctatatgta

SEQ ID NO: 173677 - DNA, 33 bp, Homo sapien
cagacctagtgctctaccttgcaaaactagcta

SEQ ID NO: 173678 - DNA, 33 bp, Homo sapien
cagacctagtgctctatcttgcaaaactagcta

SEQ ID NO: 173679 - DNA, 33 bp, Homo sapien
tgaggacagaatcagaactttagtagttacagt

SEQ ID NO: 173680 - DNA, 33 bp, Homo sapien
tgaggacagaatcagacctttagtagttacagt

SEQ ID NO: 173681 - DNA, 33 bp, Homo sapien
cttgatttcatctcacaatttcaaatacaaagt

SEQ ID NO: 173682 - DNA, 33 bp, Homo sapien
cttgatttcatctcacgatttcaaatacaaagt

SEQ ID NO: 173683 - DNA, 33 bp, Homo sapien
ggtctctgttcttcaacacattagcgcaatgtg

SEQ ID NO: 173684 - DNA, 33 bp, Homo sapien
ggtctctgttcttcaatacattagcgcaatgtg

SEQ ID NO: 173685 - DNA, 33 bp, Homo sapien
acttgcatatgtctcaagtaaagcacttataag

SEQ ID NO: 173686 - DNA, 33 bp, Homo sapien
acttgcatatgtctcaggtaaagcacttataag

SEQ ID NO: 173687 - DNA, 33 bp, Homo sapien
accccatgaatatgtaagatcggtcaattttaa

SEQ ID NO: 173688 - DNA, 33 bp, Homo sapien
accccatgaatatgtacgatcggtcaattttaa

SEQ ID NO: 173689 - DNA, 33 bp, Homo sapien
ggtcaaagtctttacacattcttctcctgggag

SEQ ID NO: 173690 - DNA, 33 bp, Homo sapien
ggtcaaagtctttacatattcttctcctgggag

SEQ ID NO: 173691 - DNA, 33 bp, Homo sapien
tttgtgaccatttaaccatttcctgccaaatga

SEQ ID NO: 173692 - DNA, 33 bp, Homo sapien
tttgtgaccatttaactatttcctgccaaatga

SEQ ID NO: 173693 - DNA, 33 bp, Homo sapien
cttaagaatgttcttaagaaagcagtaaaacgt

SEQ ID NO: 173694 - DNA, 33 bp, Homo sapien
cttaagaatgttcttaggaaagcagtaaaacgt

SEQ ID NO: 173695 - DNA, 33 bp, Homo sapien
aacaagacaaggatcaccactttcaccactgtt

SEQ ID NO: 173696 - DNA, 33 bp, Homo sapien
aacaagacaaggatcatcactttcaccactgtt

SEQ ID NO: 173697 - DNA, 33 bp, Homo sapien
aaacacatggagaaaacacctgataaagtggca

SEQ ID NO: 173698 - DNA, 33 bp, Homo sapien
aaacacatggagaaaatacctgataaagtggca

SEQ ID NO: 173699 - DNA, 33 bp, Homo sapien
aattgagaggtggatacctgaggacaaggaaac

SEQ ID NO: 173700 - DNA, 33 bp, Homo sapien
aattgagaggtggatatctgaggacaaggaaac

SEQ ID NO: 173701 - DNA, 33 bp, Homo sapien
tagtaggctttattgggccaagaatccatagag

SEQ ID NO: 173702 - DNA, 33 bp, Homo sapien
tagtaggctttattggtccaagaatccatagag

SEQ ID NO: 173703 - DNA, 33 bp, Homo sapien
atttacaccttctctacatgatcagccaatgtt

SEQ ID NO: 173704 - DNA, 33 bp, Homo sapien
atttacaccttctctatatgatcagccaatgtt

SEQ ID NO: 173705 - DNA, 33 bp, Homo sapien
actcattttcttttcccgaaagcaagtggtcct

SEQ ID NO: 173706 - DNA, 33 bp, Homo sapien
actcattttcttttcctgaaagcaagtggtcct

SEQ ID NO: 173707 - DNA, 33 bp, Homo sapien
tcaccaaatgccaggcaaacaaggagagaaggg

SEQ ID NO: 173708 - DNA, 33 bp, Homo sapien
tcaccaaatgccaggcgaacaaggagagaaggg

SEQ ID NO: 173709 - DNA, 33 bp, Homo sapien
ttgcaggccctaaccacatgtgagaagcaaaga

SEQ ID NO: 173710 - DNA, 33 bp, Homo sapien
ttgcaggccctaaccatatgtgagaagcaaaga

SEQ ID NO: 173711 - DNA, 33 bp, Homo sapien
gaatcctcacaatagaaccagtttacagatgag

SEQ ID NO: 173712 - DNA, 33 bp, Homo sapien
gaatcctcacaatagacccagtttacagatgag

SEQ ID NO: 173713 - DNA, 33 bp, Homo sapien
gccacctttgcgtgaaaaggaaaacggtcccct

SEQ ID NO: 173714 - DNA, 33 bp, Homo sapien
gccacctttgcgtgaagaggaaaacggtcccct

SEQ ID NO: 173715 - DNA, 33 bp, Homo sapien
cttgaaactgagtggaacttcatagtagccttg

SEQ ID NO: 173716 - DNA, 33 bp, Homo sapien
cttgaaactgagtggaccttcatagtagccttg

SEQ ID NO: 173717 - DNA, 33 bp, Homo sapien
cacagcctgggcaagaatactgaggtggcagag

SEQ ID NO: 173718 - DNA, 33 bp, Homo sapien
cacagcctgggcaagactactgaggtggcagag

SEQ ID NO: 173719 - DNA, 33 bp, Homo sapien
tctggcattctagtgacggaaacagacaataaa

SEQ ID NO: 173720 - DNA, 33 bp, Homo sapien
tctggcattctagtgagggaaacagacaataaa

SEQ ID NO: 173721 - DNA, 33 bp, Homo sapien
tgggcgtcttctgatcacacacattgtgccttg

SEQ ID NO: 173722 - DNA, 33 bp, Homo sapien
tgggcgtcttctgatcgcacacattgtgccttg

SEQ ID NO: 173723 - DNA, 33 bp, Homo sapien
atttggcaagaaatgaacttctgcactggggtg

SEQ ID NO: 173724 - DNA, 33 bp, Homo sapien
atttggcaagaaatgagcttctgcactggggtg

SEQ ID NO: 173725 - DNA, 33 bp, Homo sapien
ttataggcacacctaaaacatattgcaggtttg

SEQ ID NO: 173726 - DNA, 33 bp, Homo sapien
ttataggcacacctaagacatattgcaggtttg

SEQ ID NO: 173727 - DNA, 33 bp, Homo sapien
agtcccagagagcacaagtaggcctattggtct

SEQ ID NO: 173728 - DNA, 33 bp, Homo sapien
agtcccagagagcacaggtaggcctattggtct

SEQ ID NO: 173729 - DNA, 33 bp, Homo sapien
ttttctggtagtccaaatggcctggtaatgcaa

SEQ ID NO: 173730 - DNA, 33 bp, Homo sapien
ttttctggtagtccaagtggcctggtaatgcaa

SEQ ID NO: 173731 - DNA, 33 bp, Homo sapien
ttcccctttggctttaagatctgacaggtaaac

SEQ ID NO: 173732 - DNA, 33 bp, Homo sapien
ttcccctttggctttaggatctgacaggtaaac

SEQ ID NO: 173733 - DNA, 33 bp, Homo sapien
atgatgtggttattaacatacaaaaatcccatg

SEQ ID NO: 173734 - DNA, 33 bp, Homo sapien
atgatgtggttattaatatacaaaaatcccatg

SEQ ID NO: 173735 - DNA, 33 bp, Homo sapien
aagagggacacataagaccataacacaggctaa

SEQ ID NO: 173736 - DNA, 33 bp, Homo sapien
aagagggacacataagcccataacacaggctaa

SEQ ID NO: 173737 - DNA, 33 bp, Homo sapien
ctgttttcacattacaatggaagagctgagtag

SEQ ID NO: 173738 - DNA, 33 bp, Homo sapien
ctgttttcacattacagtggaagagctgagtag

SEQ ID NO: 173739 - DNA, 33 bp, Homo sapien
tggccaccagccactgcagccatatcactctct

SEQ ID NO: 173740 - DNA, 33 bp, Homo sapien
tggccaccagccactgtagccatatcactctct

SEQ ID NO: 173741 - DNA, 33 bp, Homo sapien
gatactccttttgtcacctatacagagccctaa

SEQ ID NO: 173742 - DNA, 33 bp, Homo sapien
gatactccttttgtcatctatacagagccctaa

SEQ ID NO: 173743 - DNA, 33 bp, Homo sapien; identical to SEQ ID NO: 173741

SEQ ID NO: 173744 - DNA, 33 bp, Homo sapien; identical to SEQ ID NO: 173742

SEQ ID NO: 173745 - DNA, 33 bp, Homo sapien
cagtttctaggaatcacgaacttgaaagcagtt

SEQ ID NO: 173746 - DNA, 33 bp, Homo sapien
cagtttctaggaatcaggaacttgaaagcagtt

SEQ ID NO: 173747 - DNA, 33 bp, Homo sapien
tgggacagtttcaagcaaaatcatttattgctg

SEQ ID NO: 173748 - DNA, 33 bp, Homo sapien
tgggacagtttcaagccaaatcatttattgctg

SEQ ID NO: 173749 - DNA, 33 bp, Homo sapien
cagtagccctgggttcacagaggccgtgcagtg

SEQ ID NO: 173750 - DNA, 33 bp, Homo sapien
cagtagccctgggttcgcagaggccgtgcagtg

SEQ ID NO: 173751 - DNA, 33 bp, Homo sapien
aggaattcaggttcacgataacatcagcaagca

SEQ ID NO: 173752 - DNA, 33 bp, Homo sapien
aggaattcaggttcactataacatcagcaagca

SEQ ID NO: 173753 - DNA, 33 bp, Homo sapien
atcctcgacagaacaacgaatggatgtttctat

SEQ ID NO: 173754 - DNA, 33 bp, Homo sapien
atcctcgacagaacaatgaatggatgtttctat

SEQ ID NO: 173755 - DNA, 33 bp, Homo sapien
ataccacccttcaccccgacatcctcctaagct

SEQ ID NO: 173756 - DNA, 33 bp, Homo sapien
ataccacccttcaccctgacatcctcctaagct

SEQ ID NO: 173757 - DNA, 33 bp, Homo sapien
cacaggccccggacccacgatgcaagtagtagt

SEQ ID NO: 173758 - DNA, 33 bp, Homo sapien
cacaggccccggacccgcgatgcaagtagtagt

SEQ ID NO: 173759 - DNA, 33 bp, Homo sapien
gctcatgtctccccccaattatgaagtaacttc

SEQ ID NO: 173760 - DNA, 33 bp, Homo sapien
gctcatgtctcccccccattatgaagtaacttc

SEQ ID NO: 173761 - DNA, 33 bp, Homo sapien
tgaatactctcctgagaaaagagcctggcaaca

SEQ ID NO: 173762 - DNA, 33 bp, Homo sapien
tgaatactctcctgaggaaagagcctggcaaca

SEQ ID NO: 173763 - DNA, 33 bp, Homo sapien
cgagggctggaaaccaagatgctatgaagggga

SEQ ID NO: 173764 - DNA, 33 bp, Homo sapien
cgagggctggaaaccaggatgctatgaagggga

SEQ ID NO: 173765 - DNA, 33 bp, Homo sapien
ttctgagggaatattaaggaacaattctaacag

SEQ ID NO: 173766 - DNA, 33 bp, Homo sapien
ttctgagggaatattacggaacaattctaacag

SEQ ID NO: 173767 - DNA, 33 bp, Homo sapien
gagcttgggataaggccagtatgtctgaaggga

SEQ ID NO: 173768 - DNA, 33 bp, Homo sapien
gagcttgggataaggctagtatgtctgaaggga

SEQ ID NO: 173769 - DNA, 33 bp, Homo sapien
taggacagcttaacaacgattctggtcctataa

SEQ ID NO: 173770 - DNA, 33 bp, Homo sapien
taggacagcttaacaaggattctggtcctataa

SEQ ID NO: 173771 - DNA, 33 bp, Homo sapien
caacaagagctgtaaccctttaaagagtttgtg

SEQ ID NO: 173772 - DNA, 33 bp, Homo sapien
caacaagagctgtaacgctttaaagagtttgtg

SEQ ID NO: 173773 - DNA, 33 bp, Homo sapien
acatgccatcatacccaactaagtctgtttgtt

SEQ ID NO: 173774 - DNA, 33 bp, Homo sapien
acatgccatcatacccgactaagtctgtttgtt

SEQ ID NO: 173775 - DNA, 33 bp, Homo sapien
caagttctggctataccactgaacagctaagtg

SEQ ID NO: 173776 - DNA, 33 bp, Homo sapien
caagttctggctatactactgaacagctaagtg

SEQ ID NO: 173777 - DNA, 33 bp, Homo sapien
aaaatgctgatgcacaaaaaataatgtacactg

SEQ ID NO: 173778 - DNA, 33 bp, Homo sapien
aaaatgctgatgcacagaaaataatgtacactg

SEQ ID NO: 173779 - DNA, 33 bp, Homo sapien
accttaagagcccaataacaagtaaagacagtg

SEQ ID NO: 173780 - DNA, 33 bp, Homo sapien
accttaagagcccaatgacaagtaaagacagtg

SEQ ID NO: 173781 - DNA, 33 bp, Homo sapien
ccattcatctaaaccacgctctcgaagcccacc

SEQ ID NO: 173782 - DNA, 33 bp, Homo sapien
ccattcatctaaaccaggctctcgaagcccacc

SEQ ID NO: 173783 - DNA, 33 bp, Homo sapien
atgtccctgaaatcccactacttcagacctgaa

SEQ ID NO: 173784 - DNA, 33 bp, Homo sapien
atgtccctgaaatcccgctacttcagacctgaa

SEQ ID NO: 173785 - DNA, 33 bp, Homo sapien
ttttggtccaatccagcagcagcctgtgaagtg

SEQ ID NO: 173786 - DNA, 33 bp, Homo sapien
ttttggtccaatccagtagcagcctgtgaagtg

SEQ ID NO: 173787 - DNA, 33 bp, Homo sapien
ggtttgtgaccatacaatggcccgtgtcctggc

SEQ ID NO: 173788 - DNA, 33 bp, Homo sapien
ggtttgtgaccatacagtggcccgtgtcctggc

SEQ ID NO: 173789 - DNA, 33 bp, Homo sapien
accatgcagtttggtacggctggaacaccgggt

SEQ ID NO: 173790 - DNA, 33 bp, Homo sapien
accatgcagtttggtatggctggaacaccgggt

SEQ ID NO: 173791 - DNA, 33 bp, Homo sapien
aagatactaggtgctacagggaagcagagagag

SEQ ID NO: 173792 - DNA, 33 bp, Homo sapien
aagatactaggtgctatagggaagcagagagag

SEQ ID NO: 173793 - DNA, 33 bp, Homo sapien
gcaaatgtcaacacaccggaaaagtcaaagaac

SEQ ID NO: 173794 - DNA, 33 bp, Homo sapien
gcaaatgtcaacacactggaaaagtcaaagaac

SEQ ID NO: 173795 - DNA, 33 bp, Homo sapien
aggccattccctgttcaattatagctgtgatca

SEQ ID NO: 173796 - DNA, 33 bp, Homo sapien
aggccattccctgttcgattatagctgtgatca

SEQ ID NO: 173797 - DNA, 33 bp, Homo sapien
ggtttccagagggtgacgctcaacctttgccag

SEQ ID NO: 173798 - DNA, 33 bp, Homo sapien
ggtttccagagggtgatgctcaacctttgccag

SEQ ID NO: 173799 - DNA, 33 bp, Homo sapien
tagtcaatgaacagcaaaatggaaaaacaggcc

SEQ ID NO: 173800 - DNA, 33 bp, Homo sapien
tagtcaatgaacagcagaatggaaaaacaggcc

SEQ ID NO: 173801 - DNA, 33 bp, Homo sapien
caactgctgacaaacccattgggggagagagaa

SEQ ID NO: 173802 - DNA, 33 bp, Homo sapien
caactgctgacaaaccgattgggggagagagaa

SEQ ID NO: 173803 - DNA, 33 bp, Homo sapien
gcatatcacacatgcacaaaagtgtacaaatca

SEQ ID NO: 173804 - DNA, 33 bp, Homo sapien
gcatatcacacatgcagaaaagtgtacaaatca

SEQ ID NO: 173805 - DNA, 33 bp, Homo sapien
cgggtgatggggaagacggcatgagggttgtca

SEQ ID NO: 173806 - DNA, 33 bp, Homo sapien
cgggtgatggggaagatggcatgagggttgtca

SEQ ID NO: 173807 - DNA, 33 bp, Homo sapien
tcaaatttacattcccccaacagcgtgtgagat

SEQ ID NO: 173808 - DNA, 33 bp, Homo sapien
tcaaatttacattccctcaacagcgtgtgagat

SEQ ID NO: 173809 - DNA, 33 bp, Homo sapien
ctgagcacaagcaggacggtcgggcctacccca

SEQ ID NO: 173810 - DNA, 33 bp, Homo sapien
ctgagcacaagcaggatggtcgggcctacccca

SEQ ID NO: 173811 - DNA, 33 bp, Homo sapien
gctcggaacgtcagtacaaccttcactttctga

SEQ ID NO: 173812 - DNA, 33 bp, Homo sapien
gctcggaacgtcagtataaccttcactttctga

SEQ ID NO: 173813 - DNA, 33 bp, Homo sapien
taccgcagtgccgctacaaggattcagtgagat

SEQ ID NO: 173814 - DNA, 33 bp, Homo sapien
taccgcagtgccgctataaggattcagtgagat

SEQ ID NO: 173815 - DNA, 33 bp, Homo sapien
actccgccttctagaccgattcagaatcagccc

SEQ ID NO: 173816 - DNA, 33 bp, Homo sapien
actccgccttctagacggattcagaatcagccc

SEQ ID NO: 173817 - DNA, 33 bp, Homo sapien
gatctactctgctctacagcacttagaaccctg

SEQ ID NO: 173818 - DNA, 33 bp, Homo sapien
gatctactctgctctatagcacttagaaccctg

SEQ ID NO: 173819 - DNA, 33 bp, Homo sapien
atagtaagctagataaagccatactacactcca

SEQ ID NO: 173820 - DNA, 33 bp, Homo sapien
atagtaagctagataaggccatactacactcca

SEQ ID NO: 173821 - DNA, 33 bp, Homo sapien
gtgccttctagggcaacctttccaagaaaccga

SEQ ID NO: 173822 - DNA, 33 bp, Homo sapien
gtgccttctagggcaatctttccaagaaaccga

SEQ ID NO: 173823 - DNA, 33 bp, Homo sapien
taccaggcccctcttgaaaccattctttgattt

SEQ ID NO: 173824 - DNA, 33 bp, Homo sapien
taccaggcccctcttggaaccattctttgattt

SEQ ID NO: 173825 - DNA, 33 bp, Homo sapien
ttaggacttccagtgccacattgaatagaggca

SEQ ID NO: 173826 - DNA, 33 bp, Homo sapien
ttaggacttccagtgctacattgaatagaggca

SEQ ID NO: 173827 - DNA, 33 bp, Homo sapien
ccaggcacccgtccaacggccagagcaaaggca

SEQ ID NO: 173828 - DNA, 33 bp, Homo sapien
ccaggcacccgtccaatggccagagcaaaggca

SEQ ID NO: 173829 - DNA, 33 bp, Homo sapien
ccagcccacagcactccactttcttccttaaaa

SEQ ID NO: 173830 - DNA, 33 bp, Homo sapien
ccagcccacagcactctactttcttccttaaaa

SEQ ID NO: 173831 - DNA, 33 bp, Homo sapien
gtgcttcttgacacaccgactcccccaggctga

SEQ ID NO: 173832 - DNA, 33 bp, Homo sapien
gtgcttcttgacacactgactcccccaggctga

SEQ ID NO: 173833 - DNA, 33 bp, Homo sapien
gtcagggacggtgccaaccctaccaccaaggca

SEQ ID NO: 173834 - DNA, 33 bp, Homo sapien
gtcagggacggtgccacccctaccaccaaggca

SEQ ID NO: 173835 - DNA, 33 bp, Homo sapien
ggacaaaaaggacagccagttgtgctctatccc

SEQ ID NO: 173836 - DNA, 33 bp, Homo sapien
ggacaaaaaggacagctagttgtgctctatccc

SEQ ID NO: 173837 - DNA, 33 bp, Homo sapien
gcacttgagcttcctacgggtgcccatcttggc

SEQ ID NO: 173838 - DNA, 33 bp, Homo sapien
gcacttgagcttcctatgggtgcccatcttggc

SEQ ID NO: 173839 - DNA, 33 bp, Homo sapien
cagactaaagggcatcaccagctgtaaagttat

SEQ ID NO: 173840 - DNA, 33 bp, Homo sapien
cagactaaagggcatcgccagctgtaaagttat

SEQ ID NO: 173841 - DNA, 33 bp, Homo sapien
tgcttcaggagatccaatgagttttgttggtta

SEQ ID NO: 173842 - DNA, 33 bp, Homo sapien
tgcttcaggagatccagtgagttttgttggtta

SEQ ID NO: 173843 - DNA, 33 bp, Homo sapien
cctcagcctagcatcacatctctgcaacaagct

SEQ ID NO: 173844 - DNA, 33 bp, Homo sapien
cctcagcctagcatcatatctctgcaacaagct

SEQ ID NO: 173845 - DNA, 33 bp, Homo sapien
gacaggaaagactgcacgggataagacacctca

SEQ ID NO: 173846 - DNA, 33 bp, Homo sapien
gacaggaaagactgcatgggataagacacctca

SEQ ID NO: 173847 - DNA, 33 bp, Homo sapien
ggaagtcaccacttaacccctgcatcctctcct

SEQ ID NO: 173848 - DNA, 33 bp, Homo sapien
ggaagtcaccacttaatccctgcatcctctcct

SEQ ID NO: 173849 - DNA, 33 bp, Homo sapien
tctgctctgcccctgccaggaaagcctggacat

SEQ ID NO: 173850 - DNA, 33 bp, Homo sapien
tctgctctgcccctgctaggaaagcctggacat

SEQ ID NO: 173851 - DNA, 33 bp, Homo sapien
tgagggtgggatcagaacttaatagagaccggg

SEQ ID NO: 173852 - DNA, 33 bp, Homo sapien
tgagggtgggatcagagcttaatagagaccggg

SEQ ID NO: 173853 - DNA, 33 bp, Homo sapien
caaagtccttcccctcaatttgctgacatcctg

SEQ ID NO: 173854 - DNA, 33 bp, Homo sapien
caaagtccttcccctcgatttgctgacatcctg

SEQ ID NO: 173855 - DNA, 33 bp, Homo sapien
cgttctcaaatgcaaacgacctgtacatccctt

SEQ ID NO: 173856 - DNA, 33 bp, Homo sapien
cgttctcaaatgcaaatgacctgtacatccctt

SEQ ID NO: 173857 - DNA, 33 bp, Homo sapien
ccatctcctgggttcaactgattctctgcctta

SEQ ID NO: 173858 - DNA, 33 bp, Homo sapien
ccatctcctgggttcagctgattctctgcctta

SEQ ID NO: 173859 - DNA, 33 bp, Homo sapien
catgggccatgacagacgaagagaaggcaaagg

SEQ ID NO: 173860 - DNA, 33 bp, Homo sapien
catgggccatgacagatgaagagaaggcaaagg

SEQ ID NO: 173861 - DNA, 33 bp, Homo sapien
ggcccaggtcccaccaaaggctgatggcctaca

SEQ ID NO: 173862 - DNA, 33 bp, Homo sapien
ggcccaggtcccaccagaggctgatggcctaca

SEQ ID NO: 173863 - DNA, 33 bp, Homo sapien
tgagatttgaacccagacggttggctccagtcg

SEQ ID NO: 173864 - DNA, 33 bp, Homo sapien
tgagatttgaacccaggcggttggctccagtcg

SEQ ID NO: 173865 - DNA, 33 bp, Homo sapien
gggaaaggtcttcttacagtacttgctccacgc

SEQ ID NO: 173866 - DNA, 33 bp, Homo sapien
gggaaaggtcttcttatagtacttgctccacgc

SEQ ID NO: 173867 - DNA, 33 bp, Homo sapien
ccgatgaatgttttcaaagacgttaccgcctgg

SEQ ID NO: 173868 - DNA, 33 bp, Homo sapien
ccgatgaatgttttcagagacgttaccgcctgg

SEQ ID NO: 173869 - DNA, 33 bp, Homo sapien
gaataatgtttgaccaaatacttgggtgttggg

SEQ ID NO: 173870 - DNA, 33 bp, Homo sapien
gaataatgtttgaccagatacttgggtgttggg

SEQ ID NO: 173871 - DNA, 33 bp, Homo sapien
ttaaatgaagttttaaagatacaacataaacac

SEQ ID NO: 173872 - DNA, 33 bp, Homo sapien
ttaaatgaagttttaaggatacaacataaacac

SEQ ID NO: 173873 - DNA, 33 bp, Homo sapien
gtggagtggggtggcacggagttgaagacccag

SEQ ID NO: 173874 - DNA, 33 bp, Homo sapien
gtggagtggggtggcatggagttgaagacccag

SEQ ID NO: 173875 - DNA, 33 bp, Homo sapien
ctcctcaacctctcacactctgcactacagaca

SEQ ID NO: 173876 - DNA, 33 bp, Homo sapien
ctcctcaacctctcacgctctgcactacagaca

SEQ ID NO: 173877 - DNA, 33 bp, Homo sapien
gggggtgctcagtctaagggagacctcagacca

SEQ ID NO: 173878 - DNA, 33 bp, Homo sapien
gggggtgctcagtctaggggagacctcagacca

SEQ ID NO: 173879 - DNA, 33 bp, Homo sapien
ttagaacttttaaaaccggcaaaggcagaggag

SEQ ID NO: 173880 - DNA, 33 bp, Homo sapien
ttagaacttttaaaactggcaaaggcagaggag

SEQ ID NO: 173881 - DNA, 33 bp, Homo sapien
agacatactgccaacacgcatggggatgctcga

SEQ ID NO: 173882 - DNA, 33 bp, Homo sapien
agacatactgccaacatgcatggggatgctcga

SEQ ID NO: 173883 - DNA, 33 bp, Homo sapien
agtgtgatctggggcaacttccgagagggtgta

SEQ ID NO: 173884 - DNA, 33 bp, Homo sapien
agtgtgatctggggcagcttccgagagggtgta

SEQ ID NO: 173885 - DNA, 33 bp, Homo sapien
tttttgtagtttatccgcatggcttctgccact

SEQ ID NO: 173886 - DNA, 33 bp, Homo sapien
tttttgtagtttatcctcatggcttctgccact

SEQ ID NO: 173887 - DNA, 33 bp, Homo sapien
tagaaaagcagctttacgccagtataaactgat

SEQ ID NO: 173888 - DNA, 33 bp, Homo sapien
tagaaaagcagctttatgccagtataaactgat

SEQ ID NO: 173889 - DNA, 33 bp, Homo sapien
gcagagccaggtgtacagagcataacatgaatg

SEQ ID NO: 173890 - DNA, 33 bp, Homo sapien
gcagagccaggtgtacggagcataacatgaatg

SEQ ID NO: 173891 - DNA, 33 bp, Homo sapien; identical to SEQ ID NO: 173889

SEQ ID NO: 173892 - DNA, 33 bp, Homo sapien; identical to SEQ ID NO: 173890

SEQ ID NO: 173893 - DNA, 33 bp, Homo sapien
tccccaaacctgggccacatcatcaaccagaaa

SEQ ID NO: 173894 - DNA, 33 bp, Homo sapien
tccccaaacctgggccgcatcatcaaccagaaa

SEQ ID NO: 173895 - DNA, 33 bp, Homo sapien
aaccaatgaacaatgcaccatcctagagctaca

SEQ ID NO: 173896 - DNA, 33 bp, Homo sapien
aaccaatgaacaatgcgccatcctagagctaca

SEQ ID NO: 173897 - DNA, 33 bp, Homo sapien
gcaaatgtaacagaataagcatactctgacttc

SEQ ID NO: 173898 - DNA, 33 bp, Homo sapien
gcaaatgtaacagaatgagcatactctgacttc

SEQ ID NO: 173899 - DNA, 33 bp, Homo sapien
tttcccaaacgctgcacgtaaaaaggcaagaac

SEQ ID NO: 173900 - DNA, 33 bp, Homo sapien
tttcccaaacgctgcatgtaaaaaggcaagaac

SEQ ID NO: 173901 - DNA, 33 bp, Homo sapien
ggaggtctataataaccgctctgggaatgtctg

SEQ ID NO: 173902 - DNA, 33 bp, Homo sapien
ggaggtctataataactgctctgggaatgtctg

SEQ ID NO: 173903 - DNA, 33 bp, Homo sapien
tcgttgtaacacttcactaattaaatgtacaga

SEQ ID NO: 173904 - DNA, 33 bp, Homo sapien
tcgttgtaacacttcattaattaaatgtacaga

SEQ ID NO: 173905 - DNA, 33 bp, Homo sapien
agcatcagttaccaaacgctgcagccaagctgt

SEQ ID NO: 173906 - DNA, 33 bp, Homo sapien
agcatcagttaccaaatgctgcagccaagctgt

SEQ ID NO: 173907 - DNA, 33 bp, Homo sapien
tgggaaagttgttcaccacctaaagctcaaaat

SEQ ID NO: 173908 - DNA, 33 bp, Homo sapien
tgggaaagttgttcactacctaaagctcaaaat

SEQ ID NO: 173909 - DNA, 33 bp, Homo sapien
cagtgacacacagctaccacacatgggcagtcc

SEQ ID NO: 173910 - DNA, 33 bp, Homo sapien
cagtgacacacagctagcacacatgggcagtcc

SEQ ID NO: 173911 - DNA, 33 bp, Homo sapien
aagacctgaccgtccacgagcctgacaccagta

SEQ ID NO: 173912 - DNA, 33 bp, Homo sapien
aagacctgaccgtccatgagcctgacaccagta

SEQ ID NO: 173913 - DNA, 33 bp, Homo sapien
atgacttcaaatatcacggtggatgttcacaca

SEQ ID NO: 173914 - DNA, 33 bp, Homo sapien
atgacttcaaatatcatggtggatgttcacaca

SEQ ID NO: 173915 - DNA, 33 bp, Homo sapien
caggctaacagaagagcacatgcggaaacacca

SEQ ID NO: 173916 - DNA, 33 bp, Homo sapien
caggctaacagaagaggacatgcggaaacacca

SEQ ID NO: 173917 - DNA, 33 bp, Homo sapien
ctgaagttggaaccaacgcttaaaacaatttct

SEQ ID NO: 173918 - DNA, 33 bp, Homo sapien
ctgaagttggaaccaatgcttaaaacaatttct

SEQ ID NO: 173919 - DNA, 33 bp, Homo sapien
tttccagaggtcaggacaaaggaggaatgaatt

SEQ ID NO: 173920 - DNA, 33 bp, Homo sapien
tttccagaggtcaggagaaaggaggaatgaatt

SEQ ID NO: 173921 - DNA, 33 bp, Homo sapien
ttttttttgcctcacacaaacagtgagacgttg

SEQ ID NO: 173922 - DNA, 33 bp, Homo sapien
ttttttttgcctcacagaaacagtgagacgttg

SEQ ID NO: 173923 - DNA, 33 bp, Homo sapien
taaaaactcttcccacgagagtgacttgattct

SEQ ID NO: 173924 - DNA, 33 bp, Homo sapien
taaaaactcttcccactagagtgacttgattct

SEQ ID NO: 173925 - DNA, 33 bp, Homo sapien
ggcaaaatgaaagaacggctattcaatgtttag

SEQ ID NO: 173926 - DNA, 33 bp, Homo sapien
ggcaaaatgaaagaactgctattcaatgtttag

SEQ ID NO: 173927 - DNA, 33 bp, Homo sapien; identical to SEQ ID NO: 173925

SEQ ID NO: 173928 - DNA, 33 bp, Homo sapien; identical to SEQ ID NO: 173926

SEQ ID NO: 173929 - DNA, 33 bp, Homo sapien
agacagccagataacgcaggacatcgattcaag

SEQ ID NO: 173930 - DNA, 33 bp, Homo sapien
agacagccagataacgtaggacatcgattcaag

SEQ ID NO: 173931 - DNA, 33 bp, Homo sapien
ctggcagaaatgggtgcagcatggggcattgtg

SEQ ID NO: 173932 - DNA, 33 bp, Homo sapien
ctggcagaaatgggtgtagcatggggcattgtg

SEQ ID NO: 173933 - DNA, 33 bp, Homo sapien
taaagcagctaaatggacagtaaagaagtaagc

SEQ ID NO: 173934 - DNA, 33 bp, Homo sapien
taaagcagctaaatgggcagtaaagaagtaagc

SEQ ID NO: 173935 - DNA, 33 bp, Homo sapien
aatgcaagggaaaaaagttagagacagggccaa

SEQ ID NO: 173936 - DNA, 33 bp, Homo sapien
aatgcaagggaaaaaatttagagacagggccaa

SEQ ID NO: 173937 - DNA, 33 bp, Homo sapien
cctgtcagccgagaagaatttatatcatctcag

SEQ ID NO: 173938 - DNA, 33 bp, Homo sapien
cctgtcagccgagaaggatttatatcatctcag

SEQ ID NO: 173939 - DNA, 33 bp, Homo sapien; identical to SEQ ID NO: 173937

SEQ ID NO: 173940 - DNA, 33 bp, Homo sapien; identical to SEQ ID NO: 173938

SEQ ID NO: 173941 - DNA, 33 bp, Homo sapien
tcccatctcagcctggaagtaatcccaaagtgc

SEQ ID NO: 173942 - DNA, 33 bp, Homo sapien
tcccatctcagcctgggagtaatcccaaagtgc

SEQ ID NO: 173943 - DNA, 33 bp, Homo sapien
aactagaagatctccaactagctattaaaaatt

SEQ ID NO: 173944 - DNA, 33 bp, Homo sapien
aactagaagatctccatctagctattaaaaatt

SEQ ID NO: 173945 - DNA, 33 bp, Homo sapien
ccaagagcagaagacaatagcagcatagaaacc

SEQ ID NO: 173946 - DNA, 33 bp, Homo sapien
ccaagagcagaagacagtagcagcatagaaacc

SEQ ID NO: 173947 - DNA, 33 bp, Homo sapien
caaccaccatgatgaacgacacagtaactatct

SEQ ID NO: 173948 - DNA, 33 bp, Homo sapien
caaccaccatgatgaatgacacagtaactatct

SEQ ID NO: 173949 - DNA, 33 bp, Homo sapien
atgtggaatctaaaaaagttaaactcagccagg

SEQ ID NO: 173950 - DNA, 33 bp, Homo sapien
atgtggaatctaaaaatgttaaactcagccagg

SEQ ID NO: 173951 - DNA, 33 bp, Homo sapien
gtgccaagtctataaacgtgtctggaattggtg

SEQ ID NO: 173952 - DNA, 33 bp, Homo sapien
gtgccaagtctataaatgtgtctggaattggtg

SEQ ID NO: 173953 - DNA, 33 bp, Homo sapien
agcccgggatcagaaaaaaagccggtcatttgc

SEQ ID NO: 173954 - DNA, 33 bp, Homo sapien
agcccgggatcagaaagaaagccggtcatttgc

SEQ ID NO: 173955 - DNA, 33 bp, Homo sapien; identical to SEQ ID NO: 173953

SEQ ID NO: 173956 - DNA, 33 bp, Homo sapien; identical to SEQ ID NO: 173954

SEQ ID NO: 173957 - DNA, 33 bp, Homo sapien
tccctcagtccaataaaccttttgccaggttga

SEQ ID NO: 173958 - DNA, 33 bp, Homo sapien
tccctcagtccaataatccttttgccaggttga

SEQ ID NO: 173959 - DNA, 33 bp, Homo sapien
tatggcttggacctagcaaagacattgttgaaa

SEQ ID NO: 173960 - DNA, 33 bp, Homo sapien
tatggcttggacctagtaaagacattgttgaaa

SEQ ID NO: 173961 - DNA, 33 bp, Homo sapien
cccacgtgcatggaataacttgtttcagcctca

SEQ ID NO: 173962 - DNA, 33 bp, Homo sapien
cccacgtgcatggaatgacttgtttcagcctca

SEQ ID NO: 173963 - DNA, 33 bp, Homo sapien
gcctcacaatcacttacgtcccattttacagat

SEQ ID NO: 173964 - DNA, 33 bp, Homo sapien
gcctcacaatcacttatgtcccattttacagat

SEQ ID NO: 173965 - DNA, 33 bp, Homo sapien
ctgtgtggtctcatcactagctggcaggtgcca

SEQ ID NO: 173966 - DNA, 33 bp, Homo sapien
ctgtgtggtctcatcattagctggcaggtgcca

SEQ ID NO: 173967 - DNA, 33 bp, Homo sapien
cagtctcctggtatgacgtcacgcccttctttt

SEQ ID NO: 173968 - DNA, 33 bp, Homo sapien
cagtctcctggtatgaggtcacgcccttctttt

SEQ ID NO: 173969 - DNA, 33 bp, Homo sapien
accataatcattttaaaagtggaaacaggctca

SEQ ID NO: 173970 - DNA, 33 bp, Homo sapien
accataatcattttaagagtggaaacaggctca

SEQ ID NO: 173971 - DNA, 33 bp, Homo sapien
ccgtctataacacatcaccatctacaaaagcct

SEQ ID NO: 173972 - DNA, 33 bp, Homo sapien
ccgtctataacacatcgccatctacaaaagcct

SEQ ID NO: 173973 - DNA, 33 bp, Homo sapien
tctagtccaaagagcaccctagcatggagcatc

SEQ ID NO: 173974 - DNA, 33 bp, Homo sapien
tctagtccaaagagcagcctagcatggagcatc

SEQ ID NO: 173975 - DNA, 33 bp, Homo sapien
atgctatttaagaaaccaaatcattatcaatta

SEQ ID NO: 173976 - DNA, 33 bp, Homo sapien
atgctatttaagaaacgaaatcattatcaatta

SEQ ID NO: 173977 - DNA, 33 bp, Homo sapien
gtgtaagacacaatgccctgttaattttttttt

SEQ ID NO: 173978 - DNA, 33 bp, Homo sapien
gtgtaagacacaatgctctgttaattttttttt

SEQ ID NO: 173979 - DNA, 33 bp, Homo sapien
agtagaggaagataccaacaaaatatatgaaca

SEQ ID NO: 173980 - DNA, 33 bp, Homo sapien
agtagaggaagataccgacaaaatatatgaaca

SEQ ID NO: 173981 - DNA, 33 bp, Homo sapien
gcagaggcggtggacacctgcaaagtcctggag

SEQ ID NO: 173982 - DNA, 33 bp, Homo sapien
gcagaggcggtggacatctgcaaagtcctggag

SEQ ID NO: 173983 - DNA, 33 bp, Homo sapien
agtggcaaaagtgtaacgtgctttgcagacgtg

SEQ ID NO: 173984 - DNA, 33 bp, Homo sapien
agtggcaaaagtgtaatgtgctttgcagacgtg

SEQ ID NO: 173985 - DNA, 33 bp, Homo sapien
ggattcacagtttgaaacaagaacatacttaca

SEQ ID NO: 173986 - DNA, 33 bp, Homo sapien
ggattcacagtttgaaccaagaacatacttaca

SEQ ID NO: 173987 - DNA, 33 bp, Homo sapien
tttaggtctcaagttcaactaaaggaatataca

SEQ ID NO: 173988 - DNA, 33 bp, Homo sapien
tttaggtctcaagttccactaaaggaatataca

SEQ ID NO: 173989 - DNA, 33 bp, Homo sapien
gacagaaaacccttccactgcaaagaactttcc

SEQ ID NO: 173990 - DNA, 33 bp, Homo sapien
gacagaaaacccttccgctgcaaagaactttcc

SEQ ID NO: 173991 - DNA, 33 bp, Homo sapien
aactatctccattactaagagtattatcgttag

SEQ ID NO: 173992 - DNA, 33 bp, Homo sapien
aactatctccattactgagagtattatcgttag

SEQ ID NO: 173993 - DNA, 33 bp, Homo sapien
cctctttccttttcagccgagtcctatctgtaa

SEQ ID NO: 173994 - DNA, 33 bp, Homo sapien
cctctttccttttcagtcgagtcctatctgtaa

SEQ ID NO: 173995 - DNA, 33 bp, Homo sapien
tatgacaactgcatgaaaacaaaaccacctaac

SEQ ID NO: 173996 - DNA, 33 bp, Homo sapien
tatgacaactgcatgacaacaaaaccacctaac

SEQ ID NO: 173997 - DNA, 33 bp, Homo sapien
agccattgtgcccggccaagtgttcaaaaatta

SEQ ID NO: 173998 - DNA, 33 bp, Homo sapien
agccattgtgcccggcgaagtgttcaaaaatta

SEQ ID NO: 173999 - DNA, 33 bp, Homo sapien
accatttttacctgaaataattacagataatgt

SEQ ID NO: 174000 - DNA, 33 bp, Homo sapien
accatttttacctgaagtaattacagataatgt

SEQ ID NO: 174001 - DNA, 33 bp, Homo sapien
ttggagccaggcactacgaaaatcttggaaagt

SEQ ID NO: 174002 - DNA, 33 bp, Homo sapien
ttggagccaggcactatgaaaatcttggaaagt

SEQ ID NO: 174003 - DNA, 33 bp, Homo sapien
ctgcatcttggaagtacgggggcttcacaggac

SEQ ID NO: 174004 - DNA, 33 bp, Homo sapien
ctgcatcttggaagtatgggggcttcacaggac

SEQ ID NO: 174005 - DNA, 33 bp, Homo sapien
ttgtctgttatccaccactgttttcccagggcc

SEQ ID NO: 174006 - DNA, 33 bp, Homo sapien
ttgtctgttatccaccgctgttttcccagggcc

SEQ ID NO: 174007 - DNA, 33 bp, Homo sapien
acaccaagacacgttacaattaaacttttgagg

SEQ ID NO: 174008 - DNA, 33 bp, Homo sapien
acaccaagacacgttataattaaacttttgagg

SEQ ID NO: 174009 - DNA, 33 bp, Homo sapien
tccatctgtgtgaacacaccctggtccaagcca

SEQ ID NO: 174010 - DNA, 33 bp, Homo sapien
tccatctgtgtgaacataccctggtccaagcca

SEQ ID NO: 174011 - DNA, 33 bp, Homo sapien
acttgctgcgtgagtgcaacccactgtgtgtgt

SEQ ID NO: 174012 - DNA, 33 bp, Homo sapien
acttgctgcgtgagtgtaacccactgtgtgtgt

SEQ ID NO: 174013 - DNA, 33 bp, Homo sapien
taacaagccaaggttcagaacacaagaattcag

SEQ ID NO: 174014 - DNA, 33 bp, Homo sapien
taacaagccaaggttcggaacacaagaattcag

SEQ ID NO: 174015 - DNA, 33 bp, Homo sapien
tgttctcaccagtgaaatatcttctcacctgag

SEQ ID NO: 174016 - DNA, 33 bp, Homo sapien
tgttctcaccagtgaagtatcttctcacctgag

SEQ ID NO: 174017 - DNA, 33 bp, Homo sapien
tggatttttcttaacccgcatgggcacaaatgt

SEQ ID NO: 174018 - DNA, 33 bp, Homo sapien
tggatttttcttaacctgcatgggcacaaatgt

SEQ ID NO: 174019 - DNA, 33 bp, Homo sapien
agcataaacgtgcaagaagagccaatacgtctt

SEQ ID NO: 174020 - DNA, 33 bp, Homo sapien
agcataaacgtgcaagcagagccaatacgtctt

SEQ ID NO: 174021 - DNA, 33 bp, Homo sapien
cagagtccttgcggcacatgggaagccttcatg

SEQ ID NO: 174022 - DNA, 33 bp, Homo sapien
cagagtccttgcggcatatgggaagccttcatg

SEQ ID NO: 174023 - DNA, 33 bp, Homo sapien
ttctctcaggaagatcgctgctgtgcagtattc

SEQ ID NO: 174024 - DNA, 33 bp, Homo sapien
ttctctcaggaagatctctgctgtgcagtattc

SEQ ID NO: 174025 - DNA, 33 bp, Homo sapien; identical to SEQ ID NO: 174023

SEQ ID NO: 174026 - DNA, 33 bp, Homo sapien; identical to SEQ ID NO: 174024

SEQ ID NO: 174027 - DNA, 33 bp, Homo sapien
tgccactgaacttcacacttacaaatggttacg

SEQ ID NO: 174028 - DNA, 33 bp, Homo sapien
tgccactgaacttcacgcttacaaatggttacg

SEQ ID NO: 174029 - DNA, 33 bp, Homo sapien
actgagcacttcccaaacaacatagcaaaagcc

SEQ ID NO: 174030 - DNA, 33 bp, Homo sapien
actgagcacttcccaaccaacatagcaaaagcc

SEQ ID NO: 174031 - DNA, 33 bp, Homo sapien
gtacagctctaatcaccgagggccacacggaca

SEQ ID NO: 174032 - DNA, 33 bp, Homo sapien
gtacagctctaatcactgagggccacacggaca

SEQ ID NO: 174033 - DNA, 33 bp, Homo sapien
attagagctgtactgacgtcattagccttgatg

SEQ ID NO: 174034 - DNA, 33 bp, Homo sapien
attagagctgtactgatgtcattagccttgatg

SEQ ID NO: 174035 - DNA, 33 bp, Homo sapien
cttccttttattacccgagaactctcgtctttg

SEQ ID NO: 174036 - DNA, 33 bp, Homo sapien
cttccttttattaccctagaactctcgtctttg

SEQ ID NO: 174037 - DNA, 33 bp, Homo sapien
ctcaccgtcacagtccacctcgtctgagcggtc

SEQ ID NO: 174038 - DNA, 33 bp, Homo sapien
ctcaccgtcacagtccgcctcgtctgagcggtc

SEQ ID NO: 174039 - DNA, 33 bp, Homo sapien
tttcatgccaaaagcaagagaactgagtggtta

SEQ ID NO: 174040 - DNA, 33 bp, Homo sapien
tttcatgccaaaagcaggagaactgagtggtta

SEQ ID NO: 174041 - DNA, 33 bp, Homo sapien
agcctgagatatggaacgatctggaggaggcag

SEQ ID NO: 174042 - DNA, 33 bp, Homo sapien
agcctgagatatggaatgatctggaggaggcag

SEQ ID NO: 174043 - DNA, 33 bp, Homo sapien
cagtttggctatttccactgccggggaggccac

SEQ ID NO: 174044 - DNA, 33 bp, Homo sapien
cagtttggctatttccgctgccggggaggccac

SEQ ID NO: 174045 - DNA, 33 bp, Homo sapien
aaaactagcctcaacaaatttcaaagaatcaaa

SEQ ID NO: 174046 - DNA, 33 bp, Homo sapien
aaaactagcctcaacacatttcaaagaatcaaa

SEQ ID NO: 174047 - DNA, 33 bp, Homo sapien
tcatttaggttattaaaattttgagcatagaat

SEQ ID NO: 174048 - DNA, 33 bp, Homo sapien
tcatttaggttattaacattttgagcatagaat

SEQ ID NO: 174049 - DNA, 33 bp, Homo sapien
catccaagtatctatcaactgatgaatgaataa

SEQ ID NO: 174050 - DNA, 33 bp, Homo sapien
catccaagtatctatcgactgatgaatgaataa

SEQ ID NO: 174051 - DNA, 33 bp, Homo sapien
tcttgaaatgtaacaacttgggcagatattctt

SEQ ID NO: 174052 - DNA, 33 bp, Homo sapien
tcttgaaatgtaacaatttgggcagatattctt

SEQ ID NO: 174053 - DNA, 33 bp, Homo sapien
gtgtaaatgattttgccctctatgatctctatt

SEQ ID NO: 174054 - DNA, 33 bp, Homo sapien
gtgtaaatgattttgctctctatgatctctatt

SEQ ID NO: 174055 - DNA, 33 bp, Homo sapien
cttctcaacaatcaggaccactaagatcttgtt

SEQ ID NO: 174056 - DNA, 33 bp, Homo sapien
cttctcaacaatcaggtccactaagatcttgtt

SEQ ID NO: 174057 - DNA, 33 bp, Homo sapien
gtaggtggacagaggacatgtaaagccacaagg

SEQ ID NO: 174058 - DNA, 33 bp, Homo sapien
gtaggtggacagaggagatgtaaagccacaagg

SEQ ID NO: 174059 - DNA, 33 bp, Homo sapien
tgcaattcaaaggtacactattacagcttatcc

SEQ ID NO: 174060 - DNA, 33 bp, Homo sapien
tgcaattcaaaggtacgctattacagcttatcc

SEQ ID NO: 174061 - DNA, 33 bp, Homo sapien
catacatggtcgataaccttgaatgatttgttc

SEQ ID NO: 174062 - DNA, 33 bp, Homo sapien
catacatggtcgataagcttgaatgatttgttc

SEQ ID NO: 174063 - DNA, 33 bp, Homo sapien
aaggtaaacttcctaaactgatgaatattttgt

SEQ ID NO: 174064 - DNA, 33 bp, Homo sapien
aaggtaaacttcctaagctgatgaatattttgt

SEQ ID NO: 174065 - DNA, 33 bp, Homo sapien
gacttctctgttactccgagaactgagtgagtt

SEQ ID NO: 174066 - DNA, 33 bp, Homo sapien
gacttctctgttactctgagaactgagtgagtt

SEQ ID NO: 174067 - DNA, 33 bp, Homo sapien
tacatgaacataaatacaaccaaaaaacaacac

SEQ ID NO: 174068 - DNA, 33 bp, Homo sapien
tacatgaacataaatagaaccaaaaaacaacac

SEQ ID NO: 174069 - DNA, 33 bp, Homo sapien
cacaaatctttaagcaacaactcaactattgta

SEQ ID NO: 174070 - DNA, 33 bp, Homo sapien
cacaaatctttaagcaccaactcaactattgta

SEQ ID NO: 174071 - DNA, 33 bp, Homo sapien
ggtctgactgcacttcacccattctgcgggctc

SEQ ID NO: 174072 - DNA, 33 bp, Homo sapien
ggtctgactgcacttcgcccattctgcgggctc

SEQ ID NO: 174073 - DNA, 33 bp, Homo sapien
tccccaagtatgaatacagccatggtacatttg

SEQ ID NO: 174074 - DNA, 33 bp, Homo sapien
tccccaagtatgaatatagccatggtacatttg

SEQ ID NO: 174075 - DNA, 33 bp, Homo sapien
tgccaggtcagcggccgaagacttgagcacagc

SEQ ID NO: 174076 - DNA, 33 bp, Homo sapien
tgccaggtcagcggcctaagacttgagcacagc

SEQ ID NO: 174077 - DNA, 33 bp, Homo sapien
ctactcatgccttatacctgctggttatacagt

SEQ ID NO: 174078 - DNA, 33 bp, Homo sapien
ctactcatgccttatatctgctggttatacagt

SEQ ID NO: 174079 - DNA, 33 bp, Homo sapien
attgtttgtctatttacggtcccttgaggttct

SEQ ID NO: 174080 - DNA, 33 bp, Homo sapien
attgtttgtctatttatggtcccttgaggttct

SEQ ID NO: 174081 - DNA, 33 bp, Homo sapien
cagaatttgacccttacgtaacactatatacaa

SEQ ID NO: 174082 - DNA, 33 bp, Homo sapien
cagaatttgacccttatgtaacactatatacaa

SEQ ID NO: 174083 - DNA, 33 bp, Homo sapien
cactatatacaaaaatcaaactggatctaagac

SEQ ID NO: 174084 - DNA, 33 bp, Homo sapien
cactatatacaaaaatgaaactggatctaagac

SEQ ID NO: 174085 - DNA, 33 bp, Homo sapien
aagacaggcacatggacggagcggccacagctg

SEQ ID NO: 174086 - DNA, 33 bp, Homo sapien
aagacaggcacatggatggagcggccacagctg

SEQ ID NO: 174087 - DNA, 33 bp, Homo sapien
cttggacagtgatgccaactgaggccctggagc

SEQ ID NO: 174088 - DNA, 33 bp, Homo sapien
cttggacagtgatgccgactgaggccctggagc

SEQ ID NO: 174089 - DNA, 33 bp, Homo sapien
gttggactgcttgatacagtcttgtgggtctct

SEQ ID NO: 174090 - DNA, 33 bp, Homo sapien
gttggactgcttgatagagtcttgtgggtctct

SEQ ID NO: 174091 - DNA, 33 bp, Homo sapien
tcacagccaatgatgaactgatgcaggcaatta

SEQ ID NO: 174092 - DNA, 33 bp, Homo sapien
tcacagccaatgatgacctgatgcaggcaatta

SEQ ID NO: 174093 - DNA, 33 bp, Homo sapien
aagcaaagcccttcgacgttctcacgtttgtgg

SEQ ID NO: 174094 - DNA, 33 bp, Homo sapien
aagcaaagcccttcgatgttctcacgtttgtgg

SEQ ID NO: 174095 - DNA, 33 bp, Homo sapien
caccttctgtttcttacggatcagttatttcct

SEQ ID NO: 174096 - DNA, 33 bp, Homo sapien
caccttctgtttcttatggatcagttatttcct

SEQ ID NO: 174097 - DNA, 33 bp, Homo sapien
agggcacttgtcacaaatgtgggtgatgctggg

SEQ ID NO: 174098 - DNA, 33 bp, Homo sapien
agggcacttgtcacaactgtgggtgatgctggg

SEQ ID NO: 174099 - DNA, 33 bp, Homo sapien
agaactattcccacagcagacggcgagcggcaa

SEQ ID NO: 174100 - DNA, 33 bp, Homo sapien
agaactattcccacagtagacggcgagcggcaa

SEQ ID NO: 174101 - DNA, 33 bp, Homo sapien
ggcgagcggcaactcaaccatcctatgcaagtg

SEQ ID NO: 174102 - DNA, 33 bp, Homo sapien
ggcgagcggcaactcagccatcctatgcaagtg

SEQ ID NO: 174103 - DNA, 33 bp, Homo sapien
actgccaggcaatggacggttgagctcccgtgc

SEQ ID NO: 174104 - DNA, 33 bp, Homo sapien
actgccaggcaatggatggttgagctcccgtgc

SEQ ID NO: 174105 - DNA, 33 bp, Homo sapien
catcttccttagaagcactgtccaccaccagga

SEQ ID NO: 174106 - DNA, 33 bp, Homo sapien
catcttccttagaagcgctgtccaccaccagga

SEQ ID NO: 174107 - DNA, 33 bp, Homo sapien
cgagagggaatcctaacgtcagcatgggctttg

SEQ ID NO: 174108 - DNA, 33 bp, Homo sapien
cgagagggaatcctaatgtcagcatgggctttg

SEQ ID NO: 174109 - DNA, 33 bp, Homo sapien
tcaaactcctagcctcaaatgatcttccctcct

SEQ ID NO: 174110 - DNA, 33 bp, Homo sapien
tcaaactcctagcctcgaatgatcttccctcct

SEQ ID NO: 174111 - DNA, 33 bp, Homo sapien
gtactgtaggtagaaacggtgcactgttgagcg

SEQ ID NO: 174112 - DNA, 33 bp, Homo sapien
gtactgtaggtagaaatggtgcactgttgagcg

SEQ ID NO: 174113 - DNA, 33 bp, Homo sapien
ctccctaactcactaaaaaaaaacacaggtaaa

SEQ ID NO: 174114 - DNA, 33 bp, Homo sapien
ctccctaactcactaacaaaaaacacaggtaaa

SEQ ID NO: 174115 - DNA, 33 bp, Homo sapien
agacctggataacataccgtgtgtattgcttgg

SEQ ID NO: 174116 - DNA, 33 bp, Homo sapien
agacctggataacatatcgtgtgtattgcttgg

SEQ ID NO: 174117 - DNA, 33 bp, Homo sapien
ctacaaatatagccaacagaagcaagcgccaat

SEQ ID NO: 174118 - DNA, 33 bp, Homo sapien
ctacaaatatagccaatagaagcaagcgccaat

SEQ ID NO: 174119 - DNA, 33 bp, Homo sapien
agaggtctctcctgaaactgcaagccacgcaga

SEQ ID NO: 174120 - DNA, 33 bp, Homo sapien
agaggtctctcctgaacctgcaagccacgcaga

SEQ ID NO: 174121 - DNA, 33 bp, Homo sapien
tgattactgctttttcacttgcttatttttgcc

SEQ ID NO: 174122 - DNA, 33 bp, Homo sapien
tgattactgctttttcgcttgcttatttttgcc

SEQ ID NO: 174123 - DNA, 33 bp, Homo sapien
taggactaactcacgcaaagaaaattacattcc

SEQ ID NO: 174124 - DNA, 33 bp, Homo sapien
taggactaactcacgctaagaaaattacattcc

SEQ ID NO: 174125 - DNA, 33 bp, Homo sapien
tacctcattttgtccccagttacagtctacacc

SEQ ID NO: 174126 - DNA, 33 bp, Homo sapien
tacctcattttgtccctagttacagtctacacc

SEQ ID NO: 174127 - DNA, 33 bp, Homo sapien
tttcatggcacttgtaaaccaaataagtaccta

SEQ ID NO: 174128 - DNA, 33 bp, Homo sapien
tttcatggcacttgtagaccaaataagtaccta

SEQ ID NO: 174129 - DNA, 33 bp, Homo sapien
acacaggtcaggtgaacatggtccacgtttcat

SEQ ID NO: 174130 - DNA, 33 bp, Homo sapien
acacaggtcaggtgaatatggtccacgtttcat

SEQ ID NO: 174131 - DNA, 33 bp, Homo sapien
gtgtttaaagaggcaaaaatgaggagacattgc

SEQ ID NO: 174132 - DNA, 33 bp, Homo sapien
gtgtttaaagaggcaacaatgaggagacattgc

SEQ ID NO: 174133 - DNA, 33 bp, Homo sapien
aggacctgttgttatcacaaggcaactggggag

SEQ ID NO: 174134 - DNA, 33 bp, Homo sapien
aggacctgttgttatcgcaaggcaactggggag

SEQ ID NO: 174135 - DNA, 33 bp, Homo sapien
gtgccggccaccgtcaccgtcacctttgttccc

SEQ ID NO: 174136 - DNA, 33 bp, Homo sapien
gtgccggccaccgtcagcgtcacctttgttccc

SEQ ID NO: 174137 - DNA, 33 bp, Homo sapien
taagactggaaatgtcaaccagggcagccggca

SEQ ID NO: 174138 - DNA, 33 bp, Homo sapien
taagactggaaatgtccaccagggcagccggca

SEQ ID NO: 174139 - DNA, 33 bp, Homo sapien
cacgacagccctagaccctgaacttcgagcgca

SEQ ID NO: 174140 - DNA, 33 bp, Homo sapien
cacgacagccctagactctgaacttcgagcgca

SEQ ID NO: 174141 - DNA, 33 bp, Homo sapien
ttaacaactttgctcaatatcccccaaatcctt

SEQ ID NO: 174142 - DNA, 33 bp, Homo sapien
ttaacaactttgctcactatcccccaaatcctt

SEQ ID NO: 174143 - DNA, 33 bp, Homo sapien
tctttggaagttaacaatgaaagaaatcatgct

SEQ ID NO: 174144 - DNA, 33 bp, Homo sapien
tctttggaagttaacagtgaaagaaatcatgct

SEQ ID NO: 174145 - DNA, 33 bp, Homo sapien
atccagaagtgtgtacaacttttttggaactca

SEQ ID NO: 174146 - DNA, 33 bp, Homo sapien
atccagaagtgtgtacgacttttttggaactca

SEQ ID NO: 174147 - DNA, 33 bp, Homo sapien
aaaactgttcacttgaaaagataagacccagac

SEQ ID NO: 174148 - DNA, 33 bp, Homo sapien
aaaactgttcacttgataagataagacccagac

SEQ ID NO: 174149 - DNA, 33 bp, Homo sapien
gacatctgtatatacccgggaaaccatgaccac

SEQ ID NO: 174150 - DNA, 33 bp, Homo sapien
gacatctgtatatacctgggaaaccatgaccac

SEQ ID NO: 174151 - DNA, 33 bp, Homo sapien
ttttcagccagtcctcacccttctctaagcctc

SEQ ID NO: 174152 - DNA, 33 bp, Homo sapien
ttttcagccagtcctcgcccttctctaagcctc

SEQ ID NO: 174153 - DNA, 33 bp, Homo sapien
cgtggaaaaaagtcaacttaggaatggattcaa

SEQ ID NO: 174154 - DNA, 33 bp, Homo sapien
cgtggaaaaaagtcaagttaggaatggattcaa

SEQ ID NO: 174155 - DNA, 33 bp, Homo sapien
acttcttcctatgctcagaatgttttgccgctt

SEQ ID NO: 174156 - DNA, 33 bp, Homo sapien
acttcttcctatgctccgaatgttttgccgctt

SEQ ID NO: 174157 - DNA, 33 bp, Homo sapien
gtacctaatttgcttcaagctttgtttttgggt

SEQ ID NO: 174158 - DNA, 33 bp, Homo sapien
gtacctaatttgcttctagctttgtttttgggt

SEQ ID NO: 174159 - DNA, 33 bp, Homo sapien
tgtctttctctcctaacgcgtgagtctgtactt

SEQ ID NO: 174160 - DNA, 33 bp, Homo sapien
tgtctttctctcctaatgcgtgagtctgtactt

SEQ ID NO: 174161 - DNA, 33 bp, Homo sapien
atcctcctaaaatgcaaagctattcgcctccct

SEQ ID NO: 174162 - DNA, 33 bp, Homo sapien
atcctcctaaaatgcagagctattcgcctccct

SEQ ID NO: 174163 - DNA, 33 bp, Homo sapien
ctgagacagcgcaaataaaaccgcttctttctg

SEQ ID NO: 174164 - DNA, 33 bp, Homo sapien
ctgagacagcgcaaatgaaaccgcttctttctg

SEQ ID NO: 174165 - DNA, 33 bp, Homo sapien
aaagagaaattgaccacctgctgttaaagcttc

SEQ ID NO: 174166 - DNA, 33 bp, Homo sapien
aaagagaaattgaccatctgctgttaaagcttc

SEQ ID NO: 174167 - DNA, 33 bp, Homo sapien
agggagtgctgctgaacggactccaggaggcgg

SEQ ID NO: 174168 - DNA, 33 bp, Homo sapien
agggagtgctgctgaatggactccaggaggcgg

SEQ ID NO: 174169 - DNA, 33 bp, Homo sapien
gtcttcaaatctctcccctcggtgaccttctct

SEQ ID NO: 174170 - DNA, 33 bp, Homo sapien
gtcttcaaatctctcctctcggtgaccttctct

SEQ ID NO: 174171 - DNA, 33 bp, Homo sapien
caggtgtgaaccacagcaagtgaggaggacagg

SEQ ID NO: 174172 - DNA, 33 bp, Homo sapien
caggtgtgaaccacaggaagtgaggaggacagg

SEQ ID NO: 174173 - DNA, 33 bp, Homo sapien
gtttactaacatcatcgaatctgaatcgtatat

SEQ ID NO: 174174 - DNA, 33 bp, Homo sapien
gtttactaacatcatctaatctgaatcgtatat

SEQ ID NO: 174175 - DNA, 33 bp, Homo sapien
gacacgctgcagcaccaatgaagccgaaagaca

SEQ ID NO: 174176 - DNA, 33 bp, Homo sapien
gacacgctgcagcaccgatgaagccgaaagaca

SEQ ID NO: 174177 - DNA, 33 bp, Homo sapien
caacctccactctaacaccacttccacgctgac

SEQ ID NO: 174178 - DNA, 33 bp, Homo sapien
caacctccactctaactccacttccacgctgac

SEQ ID NO: 174179 - DNA, 33 bp, Homo sapien
gaggttatggcatgcacaattagaacatccatg

SEQ ID NO: 174180 - DNA, 33 bp, Homo sapien
gaggttatggcatgcagaattagaacatccatg

SEQ ID NO: 174181 - DNA, 33 bp, Homo sapien
acaaagctgcaggccaagcggcttacacaacag

SEQ ID NO: 174182 - DNA, 33 bp, Homo sapien
acaaagctgcaggccaggcggcttacacaacag

SEQ ID NO: 174183 - DNA, 33 bp, Homo sapien
agcatgttaaactcaaatgaagccagaagtgag

SEQ ID NO: 174184 - DNA, 33 bp, Homo sapien
agcatgttaaactcaagtgaagccagaagtgag

SEQ ID NO: 174185 - DNA, 33 bp, Homo sapien
gagggtaaatccagtaacttgtgccctggaagc

SEQ ID NO: 174186 - DNA, 33 bp, Homo sapien
gagggtaaatccagtaccttgtgccctggaagc

SEQ ID NO: 174187 - DNA, 33 bp, Homo sapien
acagcttgagggtcgacactgggcttgcagctg

SEQ ID NO: 174188 - DNA, 33 bp, Homo sapien
acagcttgagggtcgatactgggcttgcagctg

SEQ ID NO: 174189 - DNA, 33 bp, Homo sapien
acggttggtaggaagaacatctcgcttcttagc

SEQ ID NO: 174190 - DNA, 33 bp, Homo sapien
acggttggtaggaagaccatctcgcttcttagc

SEQ ID NO: 174191 - DNA, 33 bp, Homo sapien
gtgtagttaattctacactttgccctgaggtct

SEQ ID NO: 174192 - DNA, 33 bp, Homo sapien
gtgtagttaattctactctttgccctgaggtct

SEQ ID NO: 174193 - DNA, 33 bp, Homo sapien
tagggctggtccaataccagttagtccatcatg

SEQ ID NO: 174194 - DNA, 33 bp, Homo sapien
tagggctggtccaatatcagttagtccatcatg

SEQ ID NO: 174195 - DNA, 33 bp, Homo sapien
aaatcaacagtgctcccatacatcagcaaaaat

SEQ ID NO: 174196 - DNA, 33 bp, Homo sapien
aaatcaacagtgctcctatacatcagcaaaaat

SEQ ID NO: 174197 - DNA, 33 bp, Homo sapien
cccagaagagccagctcaagtctaatggacctg

SEQ ID NO: 174198 - DNA, 33 bp, Homo sapien
cccagaagagccagctgaagtctaatggacctg

SEQ ID NO: 174199 - DNA, 33 bp, Homo sapien
tagtttccactgaagccgacccaaaaagctgcc

SEQ ID NO: 174200 - DNA, 33 bp, Homo sapien
tagtttccactgaagctgacccaaaaagctgcc

SEQ ID NO: 174201 - DNA, 33 bp, Homo sapien
gtggggaattggaaaaagcagagagtcccacat

SEQ ID NO: 174202 - DNA, 33 bp, Homo sapien
gtggggaattggaaaaggcagagagtcccacat

SEQ ID NO: 174203 - DNA, 33 bp, Homo sapien
cgggtccttcttgggaggttcctgcaggggagc

SEQ ID NO: 174204 - DNA, 33 bp, Homo sapien
cgggtccttcttgggatgttcctgcaggggagc

SEQ ID NO: 174205 - DNA, 33 bp, Homo sapien
tagaacccaaaggcaccgccatgaggcttcatg

SEQ ID NO: 174206 - DNA, 33 bp, Homo sapien
tagaacccaaaggcactgccatgaggcttcatg

SEQ ID NO: 174207 - DNA, 33 bp, Homo sapien
aggacaggggcgtggacagagaagagtggaaga

SEQ ID NO: 174208 - DNA, 33 bp, Homo sapien
aggacaggggcgtggagagagaagagtggaaga

SEQ ID NO: 174209 - DNA, 33 bp, Homo sapien
gctgcacggatgctgcagaagggaaagctctgc

SEQ ID NO: 174210 - DNA, 33 bp, Homo sapien
gctgcacggatgctgcggaagggaaagctctgc

SEQ ID NO: 174211 - DNA, 33 bp, Homo sapien
tgaccgtccagtgacccctgcagtagcgctgtt

SEQ ID NO: 174212 - DNA, 33 bp, Homo sapien
tgaccgtccagtgaccgctgcagtagcgctgtt

SEQ ID NO: 174213 - DNA, 33 bp, Homo sapien
agggagacaaaattcaacccatagcaactgtca

SEQ ID NO: 174214 - DNA, 33 bp, Homo sapien
agggagacaaaattcagcccatagcaactgtca

SEQ ID NO: 174215 - DNA, 33 bp, Homo sapien
ccgctctactgggtcacggccaaagcaatccat

SEQ ID NO: 174216 - DNA, 33 bp, Homo sapien
ccgctctactgggtcatggccaaagcaatccat

SEQ ID NO: 174217 - DNA, 33 bp, Homo sapien
ctggaggtcccggcgacgctcttcccagggcac

SEQ ID NO: 174218 - DNA, 33 bp, Homo sapien
ctggaggtcccggcgatgctcttcccagggcac

SEQ ID NO: 174219 - DNA, 33 bp, Homo sapien
caaatttctcttcacccatgtgccgaggggcct

SEQ ID NO: 174220 - DNA, 33 bp, Homo sapien
caaatttctcttcacctatgtgccgaggggcct

SEQ ID NO: 174221 - DNA, 33 bp, Homo sapien
tctgtatcccaatttggaccttcaggccaggct

SEQ ID NO: 174222 - DNA, 33 bp, Homo sapien
tctgtatcccaatttgtaccttcaggccaggct

SEQ ID NO: 174223 - DNA, 33 bp, Homo sapien
gcagctgttctgtagacggttgttgggccacac

SEQ ID NO: 174224 - DNA, 33 bp, Homo sapien
gcagctgttctgtagatggttgttgggccacac

SEQ ID NO: 174225 - DNA, 33 bp, Homo sapien
ccagttattttcatcaataagtcttgcaaagaa

SEQ ID NO: 174226 - DNA, 33 bp, Homo sapien
ccagttattttcatcagtaagtcttgcaaagaa

SEQ ID NO: 174227 - DNA, 33 bp, Homo sapien
ttacatatttattgcaccttaatgaggcaggac

SEQ ID NO: 174228 - DNA, 33 bp, Homo sapien
ttacatatttattgcatcttaatgaggcaggac

SEQ ID NO: 174229 - DNA, 33 bp, Homo sapien
acatcatatttgagaaaaaagcattacgtttct

SEQ ID NO: 174230 - DNA, 33 bp, Homo sapien
acatcatatttgagaataaagcattacgtttct

SEQ ID NO: 174231 - DNA, 33 bp, Homo sapien
agtctccacacggcaccgtattattcatgtaaa

SEQ ID NO: 174232 - DNA, 33 bp, Homo sapien
agtctccacacggcacggtattattcatgtaaa

SEQ ID NO: 174233 - DNA, 33 bp, Homo sapien
tggccaggcttgaggaagtacacgtgtgaaaag

SEQ ID NO: 174234 - DNA, 33 bp, Homo sapien
tggccaggcttgaggatgtacacgtgtgaaaag

SEQ ID NO: 174235 - DNA, 33 bp, Homo sapien
tacgtccaggtgagaacgtgagcgccccatgcc

SEQ ID NO: 174236 - DNA, 33 bp, Homo sapien
tacgtccaggtgagaatgtgagcgccccatgcc

SEQ ID NO: 174237 - DNA, 33 bp, Homo sapien
tcctggctcacatcccaatgtttcccaacatgg

SEQ ID NO: 174238 - DNA, 33 bp, Homo sapien
tcctggctcacatcccgatgtttcccaacatgg

SEQ ID NO: 174239 - DNA, 33 bp, Homo sapien
ggaggctgagacagccagatcctttgaggccag

SEQ ID NO: 174240 - DNA, 33 bp, Homo sapien
ggaggctgagacagccggatcctttgaggccag

SEQ ID NO: 174241 - DNA, 33 bp, Homo sapien
gcatggccaggtagagaaggtaggcaggctaga

SEQ ID NO: 174242 - DNA, 33 bp, Homo sapien
gcatggccaggtagagtaggtaggcaggctaga

SEQ ID NO: 174243 - DNA, 33 bp, Homo sapien
gatgtgaattttaggaccacctgattctacctt

SEQ ID NO: 174244 - DNA, 33 bp, Homo sapien
gatgtgaattttaggagcacctgattctacctt

SEQ ID NO: 174245 - DNA, 33 bp, Homo sapien
ctgggatcagaaggaaaactggatgctagagcc

SEQ ID NO: 174246 - DNA, 33 bp, Homo sapien
ctgggatcagaaggaagactggatgctagagcc

SEQ ID NO: 174247 - DNA, 33 bp, Homo sapien
ttcattcatttatccactcaattaccatttatt

SEQ ID NO: 174248 - DNA, 33 bp, Homo sapien
ttcattcatttatccattcaattaccatttatt

SEQ ID NO: 174249 - DNA, 33 bp, Homo sapien
gatttttgagtctaaaaggaaaggaagtaggcc

SEQ ID NO: 174250 - DNA, 33 bp, Homo sapien
gatttttgagtctaaagggaaaggaagtaggcc

SEQ ID NO: 174251 - DNA, 33 bp, Homo sapien
cacattgggtcgcacaaccttatgcaaaagtca

SEQ ID NO: 174252 - DNA, 33 bp, Homo sapien
cacattgggtcgcacagccttatgcaaaagtca

SEQ ID NO: 174253 - DNA, 33 bp, Homo sapien
gacttgcattgaataacgttccactgctcccag

SEQ ID NO: 174254 - DNA, 33 bp, Homo sapien
gacttgcattgaataatgttccactgctcccag

SEQ ID NO: 174255 - DNA, 33 bp, Homo sapien
caggcagccggtccgactcctagctctgccact

SEQ ID NO: 174256 - DNA, 33 bp, Homo sapien
caggcagccggtccgattcctagctctgccact

SEQ ID NO: 174257 - DNA, 33 bp, Homo sapien
aagacatgacaggaacaagatccgaggccacgt

SEQ ID NO: 174258 - DNA, 33 bp, Homo sapien
aagacatgacaggaacgagatccgaggccacgt

SEQ ID NO: 174259 - DNA, 33 bp, Homo sapien
tcatcattgaaagtaacgacattgaaggaagag

SEQ ID NO: 174260 - DNA, 33 bp, Homo sapien
tcatcattgaaagtaatgacattgaaggaagag

SEQ ID NO: 174261 - DNA, 33 bp, Homo sapien
tgctctctgtgagatcacattagtttgttctca

SEQ ID NO: 174262 - DNA, 33 bp, Homo sapien
tgctctctgtgagatcgcattagtttgttctca

SEQ ID NO: 174263 - DNA, 33 bp, Homo sapien
caaggtacacacttgacaagtatcccactgact

SEQ ID NO: 174264 - DNA, 33 bp, Homo sapien
caaggtacacacttgataagtatcccactgact

SEQ ID NO: 174265 - DNA, 33 bp, Homo sapien
gccgtctaatgttcctaaattggaaaggctgtg

SEQ ID NO: 174266 - DNA, 33 bp, Homo sapien
gccgtctaatgttcctcaattggaaaggctgtg

SEQ ID NO: 174267 - DNA, 33 bp, Homo sapien
taaagactggaaaagaagacaaaatcctgtcat

SEQ ID NO: 174268 - DNA, 33 bp, Homo sapien
taaagactggaaaagaggacaaaatcctgtcat

SEQ ID NO: 174269 - DNA, 33 bp, Homo sapien
ggtccaccaattctcactatgaggtcctctgaa

SEQ ID NO: 174270 - DNA, 33 bp, Homo sapien
ggtccaccaattctcagtatgaggtcctctgaa

SEQ ID NO: 174271 - DNA, 33 bp, Homo sapien
gatgtctggtcacacacgggggatcagtcaggc

SEQ ID NO: 174272 - DNA, 33 bp, Homo sapien
gatgtctggtcacacatgggggatcagtcaggc

SEQ ID NO: 174273 - DNA, 33 bp, Homo sapien
ccagaaatggacgttggatacggaggcaccgtg

SEQ ID NO: 174274 - DNA, 33 bp, Homo sapien
ccagaaatggacgttgtatacggaggcaccgtg

SEQ ID NO: 174275 - DNA, 33 bp, Homo sapien
aaggagaaacagagaacgaagatgcagaaatta

SEQ ID NO: 174276 - DNA, 33 bp, Homo sapien
aaggagaaacagagaatgaagatgcagaaatta

SEQ ID NO: 174277 - DNA, 33 bp, Homo sapien
acacgggatatctctgaatgagacacaagaaac

SEQ ID NO: 174278 - DNA, 33 bp, Homo sapien
acacgggatatctctggatgagacacaagaaac

SEQ ID NO: 174279 - DNA, 33 bp, Homo sapien
taaggatagggtatgcacaacatgctattaatt

SEQ ID NO: 174280 - DNA, 33 bp, Homo sapien
taaggatagggtatgcgcaacatgctattaatt

SEQ ID NO: 174281 - DNA, 33 bp, Homo sapien
tgtctgaggactcttaccggcaaaggcagacag

SEQ ID NO: 174282 - DNA, 33 bp, Homo sapien
tgtctgaggactcttatcggcaaaggcagacag

SEQ ID NO: 174283 - DNA, 33 bp, Homo sapien
ctgtgagaagatcacaaccagggagcctgctgg

SEQ ID NO: 174284 - DNA, 33 bp, Homo sapien
ctgtgagaagatcacacccagggagcctgctgg

SEQ ID NO: 174285 - DNA, 33 bp, Homo sapien
aatcgcttcaatccgggaagtggaggttgcagt

SEQ ID NO: 174286 - DNA, 33 bp, Homo sapien
aatcgcttcaatccggtaagtggaggttgcagt

SEQ ID NO: 174287 - DNA, 33 bp, Homo sapien
gtgaagtcatcctatcacagatggagagtgctt

SEQ ID NO: 174288 - DNA, 33 bp, Homo sapien
gtgaagtcatcctatcccagatggagagtgctt

SEQ ID NO: 174289 - DNA, 33 bp, Homo sapien
tactatttcatgtcaggcccaaagagagagttt

SEQ ID NO: 174290 - DNA, 33 bp, Homo sapien
tactatttcatgtcagtcccaaagagagagttt

SEQ ID NO: 174291 - DNA, 33 bp, Homo sapien
agcaaagccaggtgccaagaaaagaagcagaaa

SEQ ID NO: 174292 - DNA, 33 bp, Homo sapien
agcaaagccaggtgcccagaaaagaagcagaaa

SEQ ID NO: 174293 - DNA, 33 bp, Homo sapien
ctgagctgggagtagaaataactcaccttggtt

SEQ ID NO: 174294 - DNA, 33 bp, Homo sapien
ctgagctgggagtagacataactcaccttggtt

SEQ ID NO: 174295 - DNA, 33 bp, Homo sapien
ctgaaagacagctaaaacaaactgatgataaga

SEQ ID NO: 174296 - DNA, 33 bp, Homo sapien
ctgaaagacagctaaagcaaactgatgataaga

SEQ ID NO: 174297 - DNA, 33 bp, Homo sapien
ctgcctattggataaaatataaaacaaagagcc

SEQ ID NO: 174298 - DNA, 33 bp, Homo sapien
ctgcctattggataaagtataaaacaaagagcc

SEQ ID NO: 174299 - DNA, 33 bp, Homo sapien
ttaagcttaaaatcaactagactaaatgctctc

SEQ ID NO: 174300 - DNA, 33 bp, Homo sapien
ttaagcttaaaatcaagtagactaaatgctctc

SEQ ID NO: 174301 - DNA, 33 bp, Homo sapien
atattgaacagaaatacactctatcagtgtatg

SEQ ID NO: 174302 - DNA, 33 bp, Homo sapien
atattgaacagaaatatactctatcagtgtatg

SEQ ID NO: 174303 - DNA, 33 bp, Homo sapien
catgtgtggagctgaccagatacttaaaaacaa

SEQ ID NO: 174304 - DNA, 33 bp, Homo sapien
catgtgtggagctgactagatacttaaaaacaa

SEQ ID NO: 174305 - DNA, 33 bp, Homo sapien
gcattgcagatggaagaagtcttctcttttgag

SEQ ID NO: 174306 - DNA, 33 bp, Homo sapien
gcattgcagatggaaggagtcttctcttttgag

SEQ ID NO: 174307 - DNA, 33 bp, Homo sapien
ccaaactgtacacggaaaatctatacaatttga

SEQ ID NO: 174308 - DNA, 33 bp, Homo sapien
ccaaactgtacacggagaatctatacaatttga

SEQ ID NO: 174309 - DNA, 33 bp, Homo sapien
gtttgtttacttttgacgtcttagggaaatttc

SEQ ID NO: 174310 - DNA, 33 bp, Homo sapien
gtttgtttacttttgatgtcttagggaaatttc

SEQ ID NO: 174311 - DNA, 33 bp, Homo sapien
taggtgattgaataaaaagatgcatgaatggac

SEQ ID NO: 174312 - DNA, 33 bp, Homo sapien
taggtgattgaataaacagatgcatgaatggac

SEQ ID NO: 174313 - DNA, 33 bp, Homo sapien
tttttttgatgtaccacagtgccaaattgtcta

SEQ ID NO: 174314 - DNA, 33 bp, Homo sapien
tttttttgatgtaccatagtgccaaattgtcta

SEQ ID NO: 174315 - DNA, 33 bp, Homo sapien
cagaggaagacagaaacgggaaatggagaaagt

SEQ ID NO: 174316 - DNA, 33 bp, Homo sapien
cagaggaagacagaaatgggaaatggagaaagt

SEQ ID NO: 174317 - DNA, 33 bp, Homo sapien
actgatgctagcccagacaaagcttggccaagg

SEQ ID NO: 174318 - DNA, 33 bp, Homo sapien
actgatgctagcccaggcaaagcttggccaagg

SEQ ID NO: 174319 - DNA, 33 bp, Homo sapien
tgtgccttcgaaaggaaggagagtccaacacac

SEQ ID NO: 174320 - DNA, 33 bp, Homo sapien
tgtgccttcgaaaggatggagagtccaacacac

SEQ ID NO: 174321 - DNA, 33 bp, Homo sapien
caaccacgtccgtagtaaatggtgtgtccccca

SEQ ID NO: 174322 - DNA, 33 bp, Homo sapien
caaccacgtccgtagtgaatggtgtgtccccca

SEQ ID NO: 174323 - DNA, 33 bp, Homo sapien
cagcagcagcaggaaccggactaaggactccac

SEQ ID NO: 174324 - DNA, 33 bp, Homo sapien
cagcagcagcaggaacgggactaaggactccac

SEQ ID NO: 174325 - DNA, 33 bp, Homo sapien
gggatcacatgctccccaaattgtccaagccat

SEQ ID NO: 174326 - DNA, 33 bp, Homo sapien
gggatcacatgctcccgaaattgtccaagccat

SEQ ID NO: 174327 - DNA, 33 bp, Homo sapien
atggaaggaaagttcccgacctcttgtaaagcc

SEQ ID NO: 174328 - DNA, 33 bp, Homo sapien
atggaaggaaagttcctgacctcttgtaaagcc

SEQ ID NO: 174329 - DNA, 33 bp, Homo sapien
agagcactgcagaggcagagtactggggccaga

SEQ ID NO: 174330 - DNA, 33 bp, Homo sapien
agagcactgcagaggcggagtactggggccaga

SEQ ID NO: 174331 - DNA, 33 bp, Homo sapien
tcttggactcctcaacaacccacaatgcaacat

SEQ ID NO: 174332 - DNA, 33 bp, Homo sapien
tcttggactcctcaacgacccacaatgcaacat

SEQ ID NO: 174333 - DNA, 33 bp, Homo sapien
ctagggacacatgtaaactcggtagggccagac

SEQ ID NO: 174334 - DNA, 33 bp, Homo sapien
ctagggacacatgtaagctcggtagggccagac

SEQ ID NO: 174335 - DNA, 33 bp, Homo sapien
ctggctagttttttgaagcatgagttaagaatt

SEQ ID NO: 174336 - DNA, 33 bp, Homo sapien
ctggctagttttttgaggcatgagttaagaatt

SEQ ID NO: 174337 - DNA, 33 bp, Homo sapien
ggtgtttgcagcccttcaaaatcagtgtagtga

SEQ ID NO: 174338 - DNA, 33 bp, Homo sapien
ggtgtttgcagccctttaaaatcagtgtagtga

SEQ ID NO: 174339 - DNA, 33 bp, Homo sapien
gcaacggcacctgctaggcacacactaatttag

SEQ ID NO: 174340 - DNA, 33 bp, Homo sapien
gcaacggcacctgctatgcacacactaatttag

SEQ ID NO: 174341 - DNA, 33 bp, Homo sapien
ccctgcctgctggccacgtacctagacagccac

SEQ ID NO: 174342 - DNA, 33 bp, Homo sapien
ccctgcctgctggccatgtacctagacagccac

SEQ ID NO: 174343 - DNA, 33 bp, Homo sapien
cacactccacagagcgccaatgggagcccaggg

SEQ ID NO: 174344 - DNA, 33 bp, Homo sapien
cacactccacagagcgtcaatgggagcccaggg

SEQ ID NO: 174345 - DNA, 33 bp, Homo sapien
aaaattagcaattccccggactccctttcagat

SEQ ID NO: 174346 - DNA, 33 bp, Homo sapien
aaaattagcaattccctggactccctttcagat

SEQ ID NO: 174347 - DNA, 33 bp, Homo sapien
gagtcagggtaggaaacagatgaggacctcagc

SEQ ID NO: 174348 - DNA, 33 bp, Homo sapien
gagtcagggtaggaaagagatgaggacctcagc

SEQ ID NO: 174349 - DNA, 33 bp, Homo sapien
gttaaacatagatgctgagaacatgactctgct

SEQ ID NO: 174350 - DNA, 33 bp, Homo sapien
gttaaacatagatgcttagaacatgactctgct

SEQ ID NO: 174351 - DNA, 33 bp, Homo sapien
atgtaatgttgccacgaaaattctaatccctcc

SEQ ID NO: 174352 - DNA, 33 bp, Homo sapien
atgtaatgttgccacggaaattctaatccctcc

SEQ ID NO: 174353 - DNA, 33 bp, Homo sapien
caaaggttcaacacaaatgtgcatgggtgtgtg

SEQ ID NO: 174354 - DNA, 33 bp, Homo sapien
caaaggttcaacacaagtgtgcatgggtgtgtg

SEQ ID NO: 174355 - DNA, 33 bp, Homo sapien
agtccggcacctttgccatataaagtaacctca

SEQ ID NO: 174356 - DNA, 33 bp, Homo sapien
agtccggcacctttgcgatataaagtaacctca

SEQ ID NO: 174357 - DNA, 33 bp, Homo sapien
tttgattaactcaaggacagctggttaggacct

SEQ ID NO: 174358 - DNA, 33 bp, Homo sapien
tttgattaactcaaggtcagctggttaggacct

SEQ ID NO: 174359 - DNA, 33 bp, Homo sapien
cagatacacaggtacactcatgctcaaagcaca

SEQ ID NO: 174360 - DNA, 33 bp, Homo sapien
cagatacacaggtacagtcatgctcaaagcaca

SEQ ID NO: 174361 - DNA, 33 bp, Homo sapien
caaattgacccatgccccatttataccccagcc

SEQ ID NO: 174362 - DNA, 33 bp, Homo sapien
caaattgacccatgcctcatttataccccagcc

SEQ ID NO: 174363 - DNA, 33 bp, Homo sapien
gactgaagatgtggaacgtgtgggaggctagag

SEQ ID NO: 174364 - DNA, 33 bp, Homo sapien
gactgaagatgtggaatgtgtgggaggctagag

SEQ ID NO: 174365 - DNA, 33 bp, Homo sapien
atccttccaaaaaagacgcagacccacattctc

SEQ ID NO: 174366 - DNA, 33 bp, Homo sapien
atccttccaaaaaagatgcagacccacattctc

SEQ ID NO: 174367 - DNA, 33 bp, Homo sapien
tggaaggaataaggagaagcactagatgagggc

SEQ ID NO: 174368 - DNA, 33 bp, Homo sapien
tggaaggaataaggagcagcactagatgagggc

SEQ ID NO: 174369 - DNA, 33 bp, Homo sapien
ttacttatatgcaaataatgctgccattcctgc

SEQ ID NO: 174370 - DNA, 33 bp, Homo sapien
ttacttatatgcaaatcatgctgccattcctgc

SEQ ID NO: 174371 - DNA, 33 bp, Homo sapien
tacacagacctcgtgaactgatgagtctcacca

SEQ ID NO: 174372 - DNA, 33 bp, Homo sapien
tacacagacctcgtgagctgatgagtctcacca

SEQ ID NO: 174373 - DNA, 33 bp, Homo sapien
ccaccatccagactataacacagaaccatccta

SEQ ID NO: 174374 - DNA, 33 bp, Homo sapien
ccaccatccagactatgacacagaaccatccta

SEQ ID NO: 174375 - DNA, 33 bp, Homo sapien
gtgcacgaggaatcaacgtgtgaggaatttgag

SEQ ID NO: 174376 - DNA, 33 bp, Homo sapien
gtgcacgaggaatcaatgtgtgaggaatttgag

SEQ ID NO: 174377 - DNA, 33 bp, Homo sapien
agcagcatccacatcaccaggagcttgctagac

SEQ ID NO: 174378 - DNA, 33 bp, Homo sapien
agcagcatccacatcatcaggagcttgctagac

SEQ ID NO: 174379 - DNA, 33 bp, Homo sapien
tagcctgtgtttgcaactgagtcatttctcagc

SEQ ID NO: 174380 - DNA, 33 bp, Homo sapien
tagcctgtgtttgcaattgagtcatttctcagc

SEQ ID NO: 174381 - DNA, 33 bp, Homo sapien
gaatgtaaatgatggaatccagagggaagcctg

SEQ ID NO: 174382 - DNA, 33 bp, Homo sapien
gaatgtaaatgatggagtccagagggaagcctg

SEQ ID NO: 174383 - DNA, 33 bp, Homo sapien
ccatgctgtcactgtgcgggttatccatgctct

SEQ ID NO: 174384 - DNA, 33 bp, Homo sapien
ccatgctgtcactgtgtgggttatccatgctct

SEQ ID NO: 174385 - DNA, 33 bp, Homo sapien
cttcaggaagcctctgcatccaaagcttggtgt

SEQ ID NO: 174386 - DNA, 33 bp, Homo sapien
cttcaggaagcctctgtatccaaagcttggtgt

SEQ ID NO: 174387 - DNA, 33 bp, Homo sapien
aacagcacacgtgttacctcacggttctggagg

SEQ ID NO: 174388 - DNA, 33 bp, Homo sapien
aacagcacacgtgttatctcacggttctggagg

SEQ ID NO: 174389 - DNA, 33 bp, Homo sapien
gctgcactctctcaggacccgtgtgattgagca

SEQ ID NO: 174390 - DNA, 33 bp, Homo sapien
gctgcactctctcaggtcccgtgtgattgagca

SEQ ID NO: 174391 - DNA, 33 bp, Homo sapien
tcatggtaaaggtctccatctttgtggtcttca

SEQ ID NO: 174392 - DNA, 33 bp, Homo sapien
tcatggtaaaggtctctatctttgtggtcttca

SEQ ID NO: 174393 - DNA, 33 bp, Homo sapien
cagtcccagcaaccacgaatccacgttctggct

SEQ ID NO: 174394 - DNA, 33 bp, Homo sapien
cagtcccagcaaccactaatccacgttctggct

SEQ ID NO: 174395 - DNA, 33 bp, Homo sapien
agtgtccccaatctgcagaactcctcaactctt

SEQ ID NO: 174396 - DNA, 33 bp, Homo sapien
agtgtccccaatctgcggaactcctcaactctt

SEQ ID NO: 174397 - DNA, 33 bp, Homo sapien
gaagcaagttgaaaaccggaatctctcatttgg

SEQ ID NO: 174398 - DNA, 33 bp, Homo sapien
gaagcaagttgaaaactggaatctctcatttgg

SEQ ID NO: 174399 - DNA, 33 bp, Homo sapien
taaagagatgtaatgcagagttgcagagaagcc

SEQ ID NO: 174400 - DNA, 33 bp, Homo sapien
taaagagatgtaatgcggagttgcagagaagcc

SEQ ID NO: 174401 - DNA, 33 bp, Homo sapien
tttgctcctctgtgaaacaagaagcatcagggc

SEQ ID NO: 174402 - DNA, 33 bp, Homo sapien
tttgctcctctgtgaagcaagaagcatcagggc

SEQ ID NO: 174403 - DNA, 33 bp, Homo sapien
tctcacaaccccacagaatggctctagcattga

SEQ ID NO: 174404 - DNA, 33 bp, Homo sapien
tctcacaaccccacagcatggctctagcattga

SEQ ID NO: 174405 - DNA, 33 bp, Homo sapien
atagagatgaatactcactgaattttaggaaga

SEQ ID NO: 174406 - DNA, 33 bp, Homo sapien
atagagatgaatactcgctgaattttaggaaga

SEQ ID NO: 174407 - DNA, 33 bp, Homo sapien
catcacttgcaagccacgacttggttccggtca

SEQ ID NO: 174408 - DNA, 33 bp, Homo sapien
catcacttgcaagccatgacttggttccggtca

SEQ ID NO: 174409 - DNA, 33 bp, Homo sapien
aactttctaaagaatcagaaggcatcgctctgt

SEQ ID NO: 174410 - DNA, 33 bp, Homo sapien
aactttctaaagaatctgaaggcatcgctctgt

SEQ ID NO: 174411 - DNA, 33 bp, Homo sapien
gatcaggaagtccttacacacagtgtccctgtc

SEQ ID NO: 174412 - DNA, 33 bp, Homo sapien
gatcaggaagtccttatacacagtgtccctgtc

SEQ ID NO: 174413 - DNA, 33 bp, Homo sapien
cataaccttcagaagaaccctgcctgggaatag

SEQ ID NO: 174414 - DNA, 33 bp, Homo sapien
cataaccttcagaagacccctgcctgggaatag

SEQ ID NO: 174415 - DNA, 33 bp, Homo sapien
ctctccttcttacctaccgatgaatcccacagt

SEQ ID NO: 174416 - DNA, 33 bp, Homo sapien
ctctccttcttacctatcgatgaatcccacagt

SEQ ID NO: 174417 - DNA, 33 bp, Homo sapien
gactttccggttatcaaggcctcttgacttagg

SEQ ID NO: 174418 - DNA, 33 bp, Homo sapien
gactttccggttatcatggcctcttgacttagg

SEQ ID NO: 174419 - DNA, 33 bp, Homo sapien
tttcttcataaatcacacaggtaattacttata

SEQ ID NO: 174420 - DNA, 33 bp, Homo sapien
tttcttcataaatcacgcaggtaattacttata

SEQ ID NO: 174421 - DNA, 33 bp, Homo sapien
cactgtgcctgtcttccagaggatggcattggg

SEQ ID NO: 174422 - DNA, 33 bp, Homo sapien
cactgtgcctgtcttctagaggatggcattggg

SEQ ID NO: 174423 - DNA, 33 bp, Homo sapien
ttgtgcttctcaacaggatcaaacagtgaaact

SEQ ID NO: 174424 - DNA, 33 bp, Homo sapien
ttgtgcttctcaacagtatcaaacagtgaaact

SEQ ID NO: 174425 - DNA, 33 bp, Homo sapien
tgatgtgacagataacagacagatgtggtggtg

SEQ ID NO: 174426 - DNA, 33 bp, Homo sapien
tgatgtgacagataaccgacagatgtggtggtg

SEQ ID NO: 174427 - DNA, 33 bp, Homo sapien
gactttgttacccaggacatgaagagaactcgg

SEQ ID NO: 174428 - DNA, 33 bp, Homo sapien
gactttgttacccagggcatgaagagaactcgg

SEQ ID NO: 174429 - DNA, 33 bp, Homo sapien
acagactatggcaaaaatagaaataagtagaat

SEQ ID NO: 174430 - DNA, 33 bp, Homo sapien
acagactatggcaaaagtagaaataagtagaat

SEQ ID NO: 174431 - DNA, 33 bp, Homo sapien
acagagatttccatacacagtgaacacacacac

SEQ ID NO: 174432 - DNA, 33 bp, Homo sapien
acagagatttccatacgcagtgaacacacacac

SEQ ID NO: 174433 - DNA, 33 bp, Homo sapien
agaccagtagaccgtgaattcaacaatcctggt

SEQ ID NO: 174434 - DNA, 33 bp, Homo sapien
agaccagtagaccgtggattcaacaatcctggt

SEQ ID NO: 174435 - DNA, 33 bp, Homo sapien
ccactgggctctcaacaatcccatttcacatgt

SEQ ID NO: 174436 - DNA, 33 bp, Homo sapien
ccactgggctctcaacgatcccatttcacatgt

SEQ ID NO: 174437 - DNA, 33 bp, Homo sapien
tatgatatataacatacaccccaatcaagttat

SEQ ID NO: 174438 - DNA, 33 bp, Homo sapien
tatgatatataacatagaccccaatcaagttat

SEQ ID NO: 174439 - DNA, 33 bp, Homo sapien
aacacagtgccgtccacccacatagaggaatgc

SEQ ID NO: 174440 - DNA, 33 bp, Homo sapien
aacacagtgccgtccatccacatagaggaatgc

SEQ ID NO: 174441 - DNA, 33 bp, Homo sapien
tgctctcctaagccaacgggaaatgcatggatt

SEQ ID NO: 174442 - DNA, 33 bp, Homo sapien
tgctctcctaagccaatgggaaatgcatggatt

SEQ ID NO: 174443 - DNA, 33 bp, Homo sapien
atggctgtcttgtagaataggtgtgtatccccc

SEQ ID NO: 174444 - DNA, 33 bp, Homo sapien
atggctgtcttgtagagtaggtgtgtatccccc

SEQ ID NO: 174445 - DNA, 33 bp, Homo sapien
tacacacaatcattgaataaagagacaaaatag

SEQ ID NO: 174446 - DNA, 33 bp, Homo sapien
tacacacaatcattgactaaagagacaaaatag

SEQ ID NO: 174447 - DNA, 33 bp, Homo sapien
ggagatggggcctctaagtaagtgactagggtt

SEQ ID NO: 174448 - DNA, 33 bp, Homo sapien
ggagatggggcctctacgtaagtgactagggtt

SEQ ID NO: 174449 - DNA, 33 bp, Homo sapien
gtgtcctgttcacgtaccatcgtgtatatagat

SEQ ID NO: 174450 - DNA, 33 bp, Homo sapien
gtgtcctgttcacgtatcatcgtgtatatagat

SEQ ID NO: 174451 - DNA, 33 bp, Homo sapien
tgttgctgttgaagaagaagaaaaagatctcta

SEQ ID NO: 174452 - DNA, 33 bp, Homo sapien
tgttgctgttgaagaataagaaaaagatctcta

SEQ ID NO: 174453 - DNA, 33 bp, Homo sapien
tccaggacaggcacacagtagggtccgttttgt

SEQ ID NO: 174454 - DNA, 33 bp, Homo sapien
tccaggacaggcacacggtagggtccgttttgt

SEQ ID NO: 174455 - DNA, 33 bp, Homo sapien
tctgtgggccttgttacgacatcctgagcaggg

SEQ ID NO: 174456 - DNA, 33 bp, Homo sapien
tctgtgggccttgttatgacatcctgagcaggg

SEQ ID NO: 174457 - DNA, 33 bp, Homo sapien
acaaggcccacagaccaagtggcctaacaatcg

SEQ ID NO: 174458 - DNA, 33 bp, Homo sapien
acaaggcccacagaccgagtggcctaacaatcg

SEQ ID NO: 174459 - DNA, 33 bp, Homo sapien
ccattccttttttctaagtaaatctcaggctgc

SEQ ID NO: 174460 - DNA, 33 bp, Homo sapien
ccattccttttttctacgtaaatctcaggctgc

SEQ ID NO: 174461 - DNA, 33 bp, Homo sapien
ctgcttcctcttgacaacacaaggactcagggg

SEQ ID NO: 174462 - DNA, 33 bp, Homo sapien
ctgcttcctcttgacagcacaaggactcagggg

SEQ ID NO: 174463 - DNA, 33 bp, Homo sapien
aagtgtggccctggtcaaattagggtgtagctc

SEQ ID NO: 174464 - DNA, 33 bp, Homo sapien
aagtgtggccctggtcgaattagggtgtagctc

SEQ ID NO: 174465 - DNA, 33 bp, Homo sapien
ctggaaaagataaagcaacaagttcaaacgtat

SEQ ID NO: 174466 - DNA, 33 bp, Homo sapien
ctggaaaagataaagcgacaagttcaaacgtat

SEQ ID NO: 174467 - DNA, 33 bp, Homo sapien
atgagtttcctgttaaacccttgatgaggtccc

SEQ ID NO: 174468 - DNA, 33 bp, Homo sapien
atgagtttcctgttaaccccttgatgaggtccc

SEQ ID NO: 174469 - DNA, 33 bp, Homo sapien
aattgtccgatatcaccgagccaaagctatctg

SEQ ID NO: 174470 - DNA, 33 bp, Homo sapien
aattgtccgatatcactgagccaaagctatctg

SEQ ID NO: 174471 - DNA, 33 bp, Homo sapien
ccctttgtgttattacccattcagtgacatggc

SEQ ID NO: 174472 - DNA, 33 bp, Homo sapien
ccctttgtgttattactcattcagtgacatggc

SEQ ID NO: 174473 - DNA, 33 bp, Homo sapien
tggatgacaatgccacagcgcagcatcactaca

SEQ ID NO: 174474 - DNA, 33 bp, Homo sapien
tggatgacaatgccacggcgcagcatcactaca

SEQ ID NO: 174475 - DNA, 33 bp, Homo sapien
ggaaaaagaccaaagcacctatcacgaatgcca

SEQ ID NO: 174476 - DNA, 33 bp, Homo sapien
ggaaaaagaccaaagcgcctatcacgaatgcca

SEQ ID NO: 174477 - DNA, 33 bp, Homo sapien
tgcctgttacacccaaagcaggtgggagtcaat

SEQ ID NO: 174478 - DNA, 33 bp, Homo sapien
tgcctgttacacccaaggcaggtgggagtcaat

SEQ ID NO: 174479 - DNA, 33 bp, Homo sapien
caatgggagtatgacacgattagagttttgaat

SEQ ID NO: 174480 - DNA, 33 bp, Homo sapien
caatgggagtatgacatgattagagttttgaat

SEQ ID NO: 174481 - DNA, 33 bp, Homo sapien
taatctttaaagcttcactgttcttagtttgat

SEQ ID NO: 174482 - DNA, 33 bp, Homo sapien
taatctttaaagcttcgctgttcttagtttgat

SEQ ID NO: 174483 - DNA, 33 bp, Homo sapien
attcaaaatcttgatcaaaaaagatgaaatgta

SEQ ID NO: 174484 - DNA, 33 bp, Homo sapien
attcaaaatcttgatccaaaaagatgaaatgta

SEQ ID NO: 174485 - DNA, 33 bp, Homo sapien
gatgatgaaaatgttcccagatggtgatggtgg

SEQ ID NO: 174486 - DNA, 33 bp, Homo sapien
gatgatgaaaatgttctcagatggtgatggtgg

SEQ ID NO: 174487 - DNA, 33 bp, Homo sapien
gagaaggcatctcagcgctaccacagctgaatg

SEQ ID NO: 174488 - DNA, 33 bp, Homo sapien
gagaaggcatctcagctctaccacagctgaatg

SEQ ID NO: 174489 - DNA, 33 bp, Homo sapien
ccaggaatgcctagtgcagggagaacacccagc

SEQ ID NO: 174490 - DNA, 33 bp, Homo sapien
ccaggaatgcctagtgtagggagaacacccagc

SEQ ID NO: 174491 - DNA, 33 bp, Homo sapien
ggcggtagtaggacagaaagttgttggggctcc

SEQ ID NO: 174492 - DNA, 33 bp, Homo sapien
ggcggtagtaggacaggaagttgttggggctcc

SEQ ID NO: 174493 - DNA, 33 bp, Homo sapien
atctatttattggccacgcacattgtggcccaa

SEQ ID NO: 174494 - DNA, 33 bp, Homo sapien
atctatttattggccatgcacattgtggcccaa

SEQ ID NO: 174495 - DNA, 33 bp, Homo sapien
cccaacagtggaactgccactatcttaacctgc

SEQ ID NO: 174496 - DNA, 33 bp, Homo sapien
cccaacagtggaactggcactatcttaacctgc

SEQ ID NO: 174497 - DNA, 33 bp, Homo sapien
acctgtattttaccacggcagatagaaccgaat

SEQ ID NO: 174498 - DNA, 33 bp, Homo sapien
acctgtattttaccactgcagatagaaccgaat

SEQ ID NO: 174499 - DNA, 33 bp, Homo sapien
taaattcaggacaccaactataatgtaatataa

SEQ ID NO: 174500 - DNA, 33 bp, Homo sapien
taaattcaggacaccatctataatgtaatataa

SEQ ID NO: 174501 - DNA, 33 bp, Homo sapien
taacatcaaagtggaaatggccaggaatctcac

SEQ ID NO: 174502 - DNA, 33 bp, Homo sapien
taacatcaaagtggaagtggccaggaatctcac

SEQ ID NO: 174503 - DNA, 33 bp, Homo sapien
ggaggaagcggctgtcacagtggctgggcttag

SEQ ID NO: 174504 - DNA, 33 bp, Homo sapien
ggaggaagcggctgtcgcagtggctgggcttag

SEQ ID NO: 174505 - DNA, 33 bp, Homo sapien
ctcttctgcaaaacacagacagtcatagcacct

SEQ ID NO: 174506 - DNA, 33 bp, Homo sapien
ctcttctgcaaaacacggacagtcatagcacct

SEQ ID NO: 174507 - DNA, 33 bp, Homo sapien
ttatttgtgacatgacaagtgagcctgggtggg

SEQ ID NO: 174508 - DNA, 33 bp, Homo sapien
ttatttgtgacatgaccagtgagcctgggtggg

SEQ ID NO: 174509 - DNA, 33 bp, Homo sapien
tgactatagcacaaacaatgtgaccattctcct

SEQ ID NO: 174510 - DNA, 33 bp, Homo sapien
tgactatagcacaaaccatgtgaccattctcct

SEQ ID NO: 174511 - DNA, 33 bp, Homo sapien
tggatgtttttggctcaagacctctcatgttga

SEQ ID NO: 174512 - DNA, 33 bp, Homo sapien
tggatgtttttggctcgagacctctcatgttga

SEQ ID NO: 174513 - DNA, 33 bp, Homo sapien
actcaggattagtgccaaaccaagtgattactg

SEQ ID NO: 174514 - DNA, 33 bp, Homo sapien
actcaggattagtgccgaaccaagtgattactg

SEQ ID NO: 174515 - DNA, 33 bp, Homo sapien
tcatgacaaaattagaagggacgcatatctctg

SEQ ID NO: 174516 - DNA, 33 bp, Homo sapien
tcatgacaaaattagacgggacgcatatctctg

SEQ ID NO: 174517 - DNA, 33 bp, Homo sapien
tctttcatccttagagcaaaggacctttgaatc

SEQ ID NO: 174518 - DNA, 33 bp, Homo sapien
tctttcatccttagagtaaaggacctttgaatc

SEQ ID NO: 174519 - DNA, 33 bp, Homo sapien
tgctggaattctgggacgaggctaaatccagtg

SEQ ID NO: 174520 - DNA, 33 bp, Homo sapien
tgctggaattctgggatgaggctaaatccagtg

SEQ ID NO: 174521 - DNA, 33 bp, Homo sapien
gtcttcagaaacacagcgagtggccctgtgctg

SEQ ID NO: 174522 - DNA, 33 bp, Homo sapien
gtcttcagaaacacagtgagtggccctgtgctg

SEQ ID NO: 174523 - DNA, 33 bp, Homo sapien
ggtgtaatctaacagacgacagtcactgcttac

SEQ ID NO: 174524 - DNA, 33 bp, Homo sapien
ggtgtaatctaacagatgacagtcactgcttac

SEQ ID NO: 174525 - DNA, 33 bp, Homo sapien
atgatttgttgaagaaatatctataagaagtgg

SEQ ID NO: 174526 - DNA, 33 bp, Homo sapien
atgatttgttgaagaactatctataagaagtgg

SEQ ID NO: 174527 - DNA, 33 bp, Homo sapien
ccgaagtaaaccgatacgtcccgattaatagca

SEQ ID NO: 174528 - DNA, 33 bp, Homo sapien
ccgaagtaaaccgatatgtcccgattaatagca

SEQ ID NO: 174529 - DNA, 33 bp, Homo sapien
tataggtccccttgtccctctgctgagaagtaa

SEQ ID NO: 174530 - DNA, 33 bp, Homo sapien
tataggtccccttgtctctctgctgagaagtaa

SEQ ID NO: 174531 - DNA, 33 bp, Homo sapien
caaatgaacaaatcaactggggttatgatatca

SEQ ID NO: 174532 - DNA, 33 bp, Homo sapien
caaatgaacaaatcaattggggttatgatatca

SEQ ID NO: 174533 - DNA, 33 bp, Homo sapien
cctgccttcagtgatccagatttacaaacccac

SEQ ID NO: 174534 - DNA, 33 bp, Homo sapien
cctgccttcagtgatctagatttacaaacccac

SEQ ID NO: 174535 - DNA, 33 bp, Homo sapien
ggaaagaaatagatataaacccgcaatgcattg

SEQ ID NO: 174536 - DNA, 33 bp, Homo sapien
ggaaagaaatagatatcaacccgcaatgcattg

SEQ ID NO: 174537 - DNA, 33 bp, Homo sapien
tacaattcattatttgcattcacagtgtgatgg

SEQ ID NO: 174538 - DNA, 33 bp, Homo sapien
tacaattcattatttgtattcacagtgtgatgg

SEQ ID NO: 174539 - DNA, 33 bp, Homo sapien
ggtcagagagcccagactcagagagcccagggt

SEQ ID NO: 174540 - DNA, 33 bp, Homo sapien
ggtcagagagcccagattcagagagcccagggt

SEQ ID NO: 174541 - DNA, 33 bp, Homo sapien
gctgactcagacactccaaccgaactcagcagc

SEQ ID NO: 174542 - DNA, 33 bp, Homo sapien
gctgactcagacactcgaaccgaactcagcagc

SEQ ID NO: 174543 - DNA, 33 bp, Homo sapien
cagggtcgctattagcacatggtgcaccccccg

SEQ ID NO: 174544 - DNA, 33 bp, Homo sapien
cagggtcgctattagcgcatggtgcaccccccg

SEQ ID NO: 174545 - DNA, 33 bp, Homo sapien
actgcgcccagcctcagtatctgtttcttaagc

SEQ ID NO: 174546 - DNA, 33 bp, Homo sapien
actgcgcccagcctcattatctgtttcttaagc

SEQ ID NO: 174547 - DNA, 33 bp, Homo sapien
caccctgctaagcgaacgcgtatgaaaatgctt

SEQ ID NO: 174548 - DNA, 33 bp, Homo sapien
caccctgctaagcgaatgcgtatgaaaatgctt

SEQ ID NO: 174549 - DNA, 33 bp, Homo sapien
tcttggctctaggccgcatcactccaatctctg

SEQ ID NO: 174550 - DNA, 33 bp, Homo sapien
tcttggctctaggccgtatcactccaatctctg

SEQ ID NO: 174551 - DNA, 33 bp, Homo sapien
ccaatgttcaccctcacggtgcccggttgagat

SEQ ID NO: 174552 - DNA, 33 bp, Homo sapien
ccaatgttcaccctcatggtgcccggttgagat

SEQ ID NO: 174553 - DNA, 33 bp, Homo sapien
atgaagtaatactcacaggtttcaggaattggg

SEQ ID NO: 174554 - DNA, 33 bp, Homo sapien
atgaagtaatactcacgggtttcaggaattggg

SEQ ID NO: 174555 - DNA, 33 bp, Homo sapien
aatgcacatcagatgccatcatgctcttctctt

SEQ ID NO: 174556 - DNA, 33 bp, Homo sapien
aatgcacatcagatgctatcatgctcttctctt

SEQ ID NO: 174557 - DNA, 33 bp, Homo sapien
agcagggactcaaacaaatatttgcatgccagt

SEQ ID NO: 174558 - DNA, 33 bp, Homo sapien
agcagggactcaaacagatatttgcatgccagt

SEQ ID NO: 174559 - DNA, 33 bp, Homo sapien
ttagtcacttagtatccgactctgttatgagat

SEQ ID NO: 174560 - DNA, 33 bp, Homo sapien
ttagtcacttagtatctgactctgttatgagat

SEQ ID NO: 174561 - DNA, 33 bp, Homo sapien
cccggtcagcacgcacgaggccactcttcattt

SEQ ID NO: 174562 - DNA, 33 bp, Homo sapien
cccggtcagcacgcactaggccactcttcattt

SEQ ID NO: 174563 - DNA, 33 bp, Homo sapien
tgaatgcctggtacagccgcctgtggctaagcc

SEQ ID NO: 174564 - DNA, 33 bp, Homo sapien
tgaatgcctggtacagtcgcctgtggctaagcc

SEQ ID NO: 174565 - DNA, 33 bp, Homo sapien
gcaggattagttttcaccactgagtgaccaggg

SEQ ID NO: 174566 - DNA, 33 bp, Homo sapien
gcaggattagttttcatcactgagtgaccaggg

SEQ ID NO: 174567 - DNA, 33 bp, Homo sapien
ttagcatttgctttgaagtttctgtgttaccat

SEQ ID NO: 174568 - DNA, 33 bp, Homo sapien
ttagcatttgctttgaggtttctgtgttaccat

SEQ ID NO: 174569 - DNA, 33 bp, Homo sapien
gggcagcctgcaaggacctggtgttagggtagc

SEQ ID NO: 174570 - DNA, 33 bp, Homo sapien
gggcagcctgcaaggagctggtgttagggtagc

SEQ ID NO: 174571 - DNA, 33 bp, Homo sapien
cgtgtaaggaaagagacgggctaaactgagatg

SEQ ID NO: 174572 - DNA, 33 bp, Homo sapien
cgtgtaaggaaagagaggggctaaactgagatg

SEQ ID NO: 174573 - DNA, 33 bp, Homo sapien
aaggactacgaaatgaaataatccgggattagg

SEQ ID NO: 174574 - DNA, 33 bp, Homo sapien
aaggactacgaaatgagataatccgggattagg

SEQ ID NO: 174575 - DNA, 33 bp, Homo sapien
tggggagagctgcaacaaatgctctctgaagtc

SEQ ID NO: 174576 - DNA, 33 bp, Homo sapien
tggggagagctgcaaccaatgctctctgaagtc

SEQ ID NO: 174577 - DNA, 33 bp, Homo sapien
taaacccaccgcccgaaagaagggcaatgtacc

SEQ ID NO: 174578 - DNA, 33 bp, Homo sapien
taaacccaccgcccgagagaagggcaatgtacc

SEQ ID NO: 174579 - DNA, 33 bp, Homo sapien
ccagctccctggagaaccacacgctgtctgtat

SEQ ID NO: 174580 - DNA, 33 bp, Homo sapien
ccagctccctggagaatcacacgctgtctgtat

SEQ ID NO: 174581 - DNA, 33 bp, Homo sapien
aatgaaaacatgtcaaaggctctgagcacaggg

SEQ ID NO: 174582 - DNA, 33 bp, Homo sapien
aatgaaaacatgtcaagggctctgagcacaggg

SEQ ID NO: 174583 - DNA, 33 bp, Homo sapien
ctgtgtagttggcataagagtaccattccctgc

SEQ ID NO: 174584 - DNA, 33 bp, Homo sapien
ctgtgtagttggcataggagtaccattccctgc

SEQ ID NO: 174585 - DNA, 33 bp, Homo sapien
actatcatgaacgaccactttacagatgaggaa

SEQ ID NO: 174586 - DNA, 33 bp, Homo sapien
actatcatgaacgaccgctttacagatgaggaa

SEQ ID NO: 174587 - DNA, 33 bp, Homo sapien
agctggtccagaatcccattgactggtaggagc

SEQ ID NO: 174588 - DNA, 33 bp, Homo sapien
agctggtccagaatcctattgactggtaggagc

SEQ ID NO: 174589 - DNA, 33 bp, Homo sapien
tttcagtgttctaccacgtttccctgtctgact

SEQ ID NO: 174590 - DNA, 33 bp, Homo sapien
tttcagtgttctaccatgtttccctgtctgact

SEQ ID NO: 174591 - DNA, 33 bp, Homo sapien
aatatgatgcaaataacaatgccctctaatccc

SEQ ID NO: 174592 - DNA, 33 bp, Homo sapien
aatatgatgcaaataataatgccctctaatccc

SEQ ID NO: 174593 - DNA, 33 bp, Homo sapien
aagttcaaatacaccaagtgctctgaatgacag

SEQ ID NO: 174594 - DNA, 33 bp, Homo sapien
aagttcaaatacaccacgtgctctgaatgacag

SEQ ID NO: 174595 - DNA, 33 bp, Homo sapien
ccctgtggacattcacaaggagacagactcaat

SEQ ID NO: 174596 - DNA, 33 bp, Homo sapien
ccctgtggacattcacgaggagacagactcaat

SEQ ID NO: 174597 - DNA, 33 bp, Homo sapien
agtgatgggcaagtacaagttgtgaacagaacc

SEQ ID NO: 174598 - DNA, 33 bp, Homo sapien
agtgatgggcaagtaccagttgtgaacagaacc

SEQ ID NO: 174599 - DNA, 33 bp, Homo sapien
tgaatgatgcatccaactgcagagacagaagtt

SEQ ID NO: 174600 - DNA, 33 bp, Homo sapien
tgaatgatgcatccaattgcagagacagaagtt

SEQ ID NO: 174601 - DNA, 33 bp, Homo sapien
ctgggctagggctagaaaaatgaacgagacttt

SEQ ID NO: 174602 - DNA, 33 bp, Homo sapien
ctgggctagggctagagaaatgaacgagacttt

SEQ ID NO: 174603 - DNA, 33 bp, Homo sapien
tgggtgggtagatgaacggatgatggatggata

SEQ ID NO: 174604 - DNA, 33 bp, Homo sapien
tgggtgggtagatgaatggatgatggatggata

SEQ ID NO: 174605 - DNA, 33 bp, Homo sapien
aatggatggatggacaactggatagatgaatgg

SEQ ID NO: 174606 - DNA, 33 bp, Homo sapien
aatggatggatggacagctggatagatgaatgg

SEQ ID NO: 174607 - DNA, 33 bp, Homo sapien
agagaacactcttggaggtgggaaattaggcac

SEQ ID NO: 174608 - DNA, 33 bp, Homo sapien
agagaacactcttggatgtgggaaattaggcac

SEQ ID NO: 174609 - DNA, 33 bp, Homo sapien
gagaaagggtgaagtacgacacacttttaaaac

SEQ ID NO: 174610 - DNA, 33 bp, Homo sapien
gagaaagggtgaagtatgacacacttttaaaac

SEQ ID NO: 174611 - DNA, 33 bp, Homo sapien
agaatggcctaatacaaccttcccagagcatct

SEQ ID NO: 174612 - DNA, 33 bp, Homo sapien
agaatggcctaatacatccttcccagagcatct

SEQ ID NO: 174613 - DNA, 33 bp, Homo sapien
cacctccaacagtgggaacgacatttcgatatg

SEQ ID NO: 174614 - DNA, 33 bp, Homo sapien
cacctccaacagtggggacgacatttcgatatg

SEQ ID NO: 174615 - DNA, 33 bp, Homo sapien
tctgagaacataacagcattctaatgtgttggc

SEQ ID NO: 174616 - DNA, 33 bp, Homo sapien
tctgagaacataacaggattctaatgtgttggc

SEQ ID NO: 174617 - DNA, 33 bp, Homo sapien
ccctagtactctcatcagacactccccagggtg

SEQ ID NO: 174618 - DNA, 33 bp, Homo sapien
ccctagtactctcatcggacactccccagggtg

SEQ ID NO: 174619 - DNA, 33 bp, Homo sapien
cataagaaaacctttgcaactgcaaccaagtga

SEQ ID NO: 174620 - DNA, 33 bp, Homo sapien
cataagaaaacctttgtaactgcaaccaagtga

SEQ ID NO: 174621 - DNA, 33 bp, Homo sapien
ccaaaaaaacacttaccattatgttgcctacag

SEQ ID NO: 174622 - DNA, 33 bp, Homo sapien
ccaaaaaaacacttacgattatgttgcctacag

SEQ ID NO: 174623 - DNA, 33 bp, Homo sapien
gtgttcttacacaaaccgagatgacgtagccac

SEQ ID NO: 174624 - DNA, 33 bp, Homo sapien
gtgttcttacacaaactgagatgacgtagccac

SEQ ID NO: 174625 - DNA, 33 bp, Homo sapien
caataggcaacttaccaccaaaatggctaacta

SEQ ID NO: 174626 - DNA, 33 bp, Homo sapien
caataggcaacttacccccaaaatggctaacta

SEQ ID NO: 174627 - DNA, 33 bp, Homo sapien
tggatttctctgattacgagtaaagctgtcttt

SEQ ID NO: 174628 - DNA, 33 bp, Homo sapien
tggatttctctgattatgagtaaagctgtcttt

SEQ ID NO: 174629 - DNA, 33 bp, Homo sapien
tcggtcaatattacaacggttcagcctgtggaa

SEQ ID NO: 174630 - DNA, 33 bp, Homo sapien
tcggtcaatattacaatggttcagcctgtggaa

SEQ ID NO: 174631 - DNA, 33 bp, Homo sapien
tgactaggcttcaacaacatgaatgtgttgtct

SEQ ID NO: 174632 - DNA, 33 bp, Homo sapien
tgactaggcttcaacagcatgaatgtgttgtct

SEQ ID NO: 174633 - DNA, 33 bp, Homo sapien
gggagtgaaaaccagcaatcggatatggtggcg

SEQ ID NO: 174634 - DNA, 33 bp, Homo sapien
gggagtgaaaaccagcgatcggatatggtggcg

SEQ ID NO: 174635 - DNA, 33 bp, Homo sapien
aaatattcccaccagacgaacagatgcataatg

SEQ ID NO: 174636 - DNA, 33 bp, Homo sapien
aaatattcccaccagatgaacagatgcataatg

SEQ ID NO: 174637 - DNA, 33 bp, Homo sapien
cctcttacttataagcaccctgtgatgatgttg

SEQ ID NO: 174638 - DNA, 33 bp, Homo sapien
cctcttacttataagctccctgtgatgatgttg

SEQ ID NO: 174639 - DNA, 33 bp, Homo sapien
ttgcttgggttgtaaaagacagaaaacccaaga

SEQ ID NO: 174640 - DNA, 33 bp, Homo sapien
ttgcttgggttgtaaatgacagaaaacccaaga

SEQ ID NO: 174641 - DNA, 33 bp, Homo sapien
ggtcacttggataatccagggtgatctcatctt

SEQ ID NO: 174642 - DNA, 33 bp, Homo sapien
ggtcacttggataatctagggtgatctcatctt

SEQ ID NO: 174643 - DNA, 33 bp, Homo sapien
agaagagtatcatcggaattcaaggcttctctg

SEQ ID NO: 174644 - DNA, 33 bp, Homo sapien
agaagagtatcatcgggattcaaggcttctctg

SEQ ID NO: 174645 - DNA, 33 bp, Homo sapien
ttaatacatttcaatcagaagaaacatgaagaa

SEQ ID NO: 174646 - DNA, 33 bp, Homo sapien
ttaatacatttcaatcggaagaaacatgaagaa

SEQ ID NO: 174647 - DNA, 33 bp, Homo sapien
cttcccctacataatacgtcctttttctctgac

SEQ ID NO: 174648 - DNA, 33 bp, Homo sapien
cttcccctacataatatgtcctttttctctgac

SEQ ID NO: 174649 - DNA, 33 bp, Homo sapien
attgtcctgttcactaccaaaatgatctgggag

SEQ ID NO: 174650 - DNA, 33 bp, Homo sapien
attgtcctgttcactatcaaaatgatctgggag

SEQ ID NO: 174651 - DNA, 33 bp, Homo sapien
acgacaactcatccccaaagggttaaaaatgga

SEQ ID NO: 174652 - DNA, 33 bp, Homo sapien
acgacaactcatccccgaagggttaaaaatgga

SEQ ID NO: 174653 - DNA, 33 bp, Homo sapien
ctcaccatgcactcacaattcatttattcactt

SEQ ID NO: 174654 - DNA, 33 bp, Homo sapien
ctcaccatgcactcacgattcatttattcactt

SEQ ID NO: 174655 - DNA, 33 bp, Homo sapien
acaagcaattattgagcatcggctgtgtgaacc

SEQ ID NO: 174656 - DNA, 33 bp, Homo sapien
acaagcaattattgagtatcggctgtgtgaacc

SEQ ID NO: 174657 - DNA, 33 bp, Homo sapien
gctgatgagctgggataaggcccgagactcctc

SEQ ID NO: 174658 - DNA, 33 bp, Homo sapien
gctgatgagctgggattaggcccgagactcctc

SEQ ID NO: 174659 - DNA, 33 bp, Homo sapien
acactggaccaccccaatgccaggacagattga

SEQ ID NO: 174660 - DNA, 33 bp, Homo sapien
acactggaccaccccattgccaggacagattga

SEQ ID NO: 174661 - DNA, 33 bp, Homo sapien
ctcagcacgaggggaccgtaaatccaccaggca

SEQ ID NO: 174662 - DNA, 33 bp, Homo sapien
ctcagcacgaggggactgtaaatccaccaggca

SEQ ID NO: 174663 - DNA, 33 bp, Homo sapien
ctccccttgccttaggacatggacttagagact

SEQ ID NO: 174664 - DNA, 33 bp, Homo sapien
ctccccttgccttaggtcatggacttagagact

SEQ ID NO: 174665 - DNA, 33 bp, Homo sapien
tcacactctgtgtgaaatgttgccccaggatga

SEQ ID NO: 174666 - DNA, 33 bp, Homo sapien
tcacactctgtgtgaattgttgccccaggatga

SEQ ID NO: 174667 - DNA, 33 bp, Homo sapien
actatagagaccccccactgacaaacagggagg

SEQ ID NO: 174668 - DNA, 33 bp, Homo sapien
actatagagaccccccgctgacaaacagggagg

SEQ ID NO: 174669 - DNA, 33 bp, Homo sapien
gtaaagatcaaggtagcccagacttggtgggga

SEQ ID NO: 174670 - DNA, 33 bp, Homo sapien
gtaaagatcaaggtagtccagacttggtgggga

SEQ ID NO: 174671 - DNA, 33 bp, Homo sapien
gcactttgcagcagcactgagttttaaacacga

SEQ ID NO: 174672 - DNA, 33 bp, Homo sapien
gcactttgcagcagcagtgagttttaaacacga

SEQ ID NO: 174673 - DNA, 33 bp, Homo sapien
tttgactttctggatacgctgaacttatgcgca

SEQ ID NO: 174674 - DNA, 33 bp, Homo sapien
tttgactttctggatatgctgaacttatgcgca

SEQ ID NO: 174675 - DNA, 33 bp, Homo sapien
agggccacggagggtacgagtagtcagttgagg

SEQ ID NO: 174676 - DNA, 33 bp, Homo sapien
agggccacggagggtatgagtagtcagttgagg

SEQ ID NO: 174677 - DNA, 33 bp, Homo sapien
ttcgcctccttatccgaaaatgggcacatgaag

SEQ ID NO: 174678 - DNA, 33 bp, Homo sapien
ttcgcctccttatccgtaaatgggcacatgaag

SEQ ID NO: 174679 - DNA, 33 bp, Homo sapien
ttgcggtctccgactcaagcataagacaggaaa

SEQ ID NO: 174680 - DNA, 33 bp, Homo sapien
ttgcggtctccgactcgagcataagacaggaaa

SEQ ID NO: 174681 - DNA, 33 bp, Homo sapien
ggcagcccccagacgcaatgaggtcagtgtggt

SEQ ID NO: 174682 - DNA, 33 bp, Homo sapien
ggcagcccccagacgcgatgaggtcagtgtggt

SEQ ID NO: 174683 - DNA, 33 bp, Homo sapien
gaggagctcagactcaaaattaacaaggactct

SEQ ID NO: 174684 - DNA, 33 bp, Homo sapien
gaggagctcagactcacaattaacaaggactct

SEQ ID NO: 174685 - DNA, 33 bp, Homo sapien
tgctgggaaagttaacccacagtggccaccata

SEQ ID NO: 174686 - DNA, 33 bp, Homo sapien
tgctgggaaagttaactcacagtggccaccata

SEQ ID NO: 174687 - DNA, 33 bp, Homo sapien
agcccatgtcaaatttaaaaaaatcatcgccaa

SEQ ID NO: 174688 - DNA, 33 bp, Homo sapien
agcccatgtcaaattttaaaaaatcatcgccaa

SEQ ID NO: 174689 - DNA, 33 bp, Homo sapien
gctgctttaggaggtacaagagactacatttcc

SEQ ID NO: 174690 - DNA, 33 bp, Homo sapien
gctgctttaggaggtataagagactacatttcc

SEQ ID NO: 174691 - DNA, 33 bp, Homo sapien
tgtctggttccaagataacttcaactctggctt

SEQ ID NO: 174692 - DNA, 33 bp, Homo sapien
tgtctggttccaagatgacttcaactctggctt

SEQ ID NO: 174693 - DNA, 33 bp, Homo sapien
cagggctcctgggtaaaaggtcatggcactgtg

SEQ ID NO: 174694 - DNA, 33 bp, Homo sapien
cagggctcctgggtaagaggtcatggcactgtg

SEQ ID NO: 174695 - DNA, 33 bp, Homo sapien
ggtgatgtagggaagcaaaagtgtccaaacaca

SEQ ID NO: 174696 - DNA, 33 bp, Homo sapien
ggtgatgtagggaagcgaaagtgtccaaacaca

SEQ ID NO: 174697 - DNA, 33 bp, Homo sapien
aaagtagtagcaggaaacattcacgaggcacct

SEQ ID NO: 174698 - DNA, 33 bp, Homo sapien
aaagtagtagcaggaagcattcacgaggcacct

SEQ ID NO: 174699 - DNA, 33 bp, Homo sapien
acggataatacatacacaaaccatgcaaacaca

SEQ ID NO: 174700 - DNA, 33 bp, Homo sapien
acggataatacatacataaaccatgcaaacaca

SEQ ID NO: 174701 - DNA, 33 bp, Homo sapien
acaatctatctgcaggcaactctcaaattcacc

SEQ ID NO: 174702 - DNA, 33 bp, Homo sapien
acaatctatctgcaggtaactctcaaattcacc

SEQ ID NO: 174703 - DNA, 33 bp, Homo sapien
tgactacaggtgcatacgcggctaatttttttc

SEQ ID NO: 174704 - DNA, 33 bp, Homo sapien
tgactacaggtgcatatgcggctaatttttttc

SEQ ID NO: 174705 - DNA, 33 bp, Homo sapien
atatgctggatattcccagtacagccagtttga

SEQ ID NO: 174706 - DNA, 33 bp, Homo sapien
atatgctggatattcctagtacagccagtttga

SEQ ID NO: 174707 - DNA, 33 bp, Homo sapien
gctttgaaggtacaaacttaggagctgaatgag

SEQ ID NO: 174708 - DNA, 33 bp, Homo sapien
gctttgaaggtacaaagttaggagctgaatgag

SEQ ID NO: 174709 - DNA, 33 bp, Homo sapien
actccttgatcacaacaacgtggggacaggacg

SEQ ID NO: 174710 - DNA, 33 bp, Homo sapien
actccttgatcacaacgacgtggggacaggacg

SEQ ID NO: 174711 - DNA, 33 bp, Homo sapien
tctctttcatgaccaacctcgtgtaacttcccc

SEQ ID NO: 174712 - DNA, 33 bp, Homo sapien
tctctttcatgaccaatctcgtgtaacttcccc

SEQ ID NO: 174713 - DNA, 33 bp, Homo sapien
cctagaacggtgcatgccacatacagacactca

SEQ ID NO: 174714 - DNA, 33 bp, Homo sapien
cctagaacggtgcatggcacatacagacactca

SEQ ID NO: 174715 - DNA, 33 bp, Homo sapien
aaccctttgtcttcaccgggttgactcccatgg

SEQ ID NO: 174716 - DNA, 33 bp, Homo sapien
aaccctttgtcttcactgggttgactcccatgg

SEQ ID NO: 174717 - DNA, 33 bp, Homo sapien
agaagacctgagtgaacgtttggagatggcgag

SEQ ID NO: 174718 - DNA, 33 bp, Homo sapien
agaagacctgagtgaatgtttggagatggcgag

SEQ ID NO: 174719 - DNA, 33 bp, Homo sapien
taataaacaggtatctcagaggaatcaaaggtc

SEQ ID NO: 174720 - DNA, 33 bp, Homo sapien
taataaacaggtatcttagaggaatcaaaggtc

SEQ ID NO: 174721 - DNA, 33 bp, Homo sapien
gtgtgtgagggcgaatgaggggtcctcagccag

SEQ ID NO: 174722 - DNA, 33 bp, Homo sapien
gtgtgtgagggcgaattaggggtcctcagccag

SEQ ID NO: 174723 - DNA, 33 bp, Homo sapien
cctgagaagggagtgactacgggaagagtatgt

SEQ ID NO: 174724 - DNA, 33 bp, Homo sapien
cctgagaagggagtgagtacgggaagagtatgt

SEQ ID NO: 174725 - DNA, 33 bp, Homo sapien
aatactgactgaaaacaactactgtgtgggatg

SEQ ID NO: 174726 - DNA, 33 bp, Homo sapien
aatactgactgaaaacgactactgtgtgggatg

SEQ ID NO: 174727 - DNA, 33 bp, Homo sapien
gactgctcttgctataactttttcctggatgtt

SEQ ID NO: 174728 - DNA, 33 bp, Homo sapien
gactgctcttgctatatctttttcctggatgtt

SEQ ID NO: 174729 - DNA, 33 bp, Homo sapien
atgcacactcatgctcacagacacaacagtgaa

SEQ ID NO: 174730 - DNA, 33 bp, Homo sapien
atgcacactcatgctctcagacacaacagtgaa

SEQ ID NO: 174731 - DNA, 33 bp, Homo sapien
gtagaacaaattactacggagctcagtggctta

SEQ ID NO: 174732 - DNA, 33 bp, Homo sapien
gtagaacaaattactatggagctcagtggctta

SEQ ID NO: 174733 - DNA, 33 bp, Homo sapien
tcctagtctcctctaaaccagtgtcttcctcat

SEQ ID NO: 174734 - DNA, 33 bp, Homo sapien
tcctagtctcctctaagccagtgtcttcctcat

SEQ ID NO: 174735 - DNA, 33 bp, Homo sapien
taaaaaaaatgagccaagtatggtagtgcatac

SEQ ID NO: 174736 - DNA, 33 bp, Homo sapien
taaaaaaaatgagccaggtatggtagtgcatac

SEQ ID NO: 174737 - DNA, 33 bp, Homo sapien
cagaaacgaaaagacaagtgcgctctgcatggg

SEQ ID NO: 174738 - DNA, 33 bp, Homo sapien
cagaaacgaaaagacaggtgcgctctgcatggg

SEQ ID NO: 174739 - DNA, 33 bp, Homo sapien
ggaccagctgaaatgcagacgctgcctctcctt

SEQ ID NO: 174740 - DNA, 33 bp, Homo sapien
ggaccagctgaaatgcggacgctgcctctcctt

SEQ ID NO: 174741 - DNA, 33 bp, Homo sapien
gcctgtcacagacacaaatttacaagtatgcct

SEQ ID NO: 174742 - DNA, 33 bp, Homo sapien
gcctgtcacagacacatatttacaagtatgcct

SEQ ID NO: 174743 - DNA, 33 bp, Homo sapien
catttcctaattaaaacgaacctagaatgtaag

SEQ ID NO: 174744 - DNA, 33 bp, Homo sapien
catttcctaattaaaatgaacctagaatgtaag

SEQ ID NO: 174745 - DNA, 33 bp, Homo sapien
gcagccgcacggccaccggagttccgaagctgc

SEQ ID NO: 174746 - DNA, 33 bp, Homo sapien
gcagccgcacggccactggagttccgaagctgc

SEQ ID NO: 174747 - DNA, 33 bp, Homo sapien
ggacccaggctttgcgcccaggtgttgttgcag

SEQ ID NO: 174748 - DNA, 33 bp, Homo sapien
ggacccaggctttgcgtccaggtgttgttgcag

SEQ ID NO: 174749 - DNA, 33 bp, Homo sapien
attctgagtagaactgaagtttctggaggatgc

SEQ ID NO: 174750 - DNA, 33 bp, Homo sapien
attctgagtagaactggagtttctggaggatgc

SEQ ID NO: 174751 - DNA, 33 bp, Homo sapien
agacaagaagcctggacgaggagcactgcaggc

SEQ ID NO: 174752 - DNA, 33 bp, Homo sapien
agacaagaagcctggatgaggagcactgcaggc

SEQ ID NO: 174753 - DNA, 33 bp, Homo sapien
ccatcccatgtgcaaacatactcagcccatttt

SEQ ID NO: 174754 - DNA, 33 bp, Homo sapien
ccatcccatgtgcaaatatactcagcccatttt

SEQ ID NO: 174755 - DNA, 33 bp, Homo sapien
cctgattccgtttataagaaatgctcagaatag

SEQ ID NO: 174756 - DNA, 33 bp, Homo sapien
cctgattccgtttatacgaaatgctcagaatag

SEQ ID NO: 174757 - DNA, 33 bp, Homo sapien
ccatgaccctttcactaagacactgcagcccac

SEQ ID NO: 174758 - DNA, 33 bp, Homo sapien
ccatgaccctttcactgagacactgcagcccac

SEQ ID NO: 174759 - DNA, 33 bp, Homo sapien
gatgcctctaatatgaggtacttttttctcttt

SEQ ID NO: 174760 - DNA, 33 bp, Homo sapien
gatgcctctaatatgatgtacttttttctcttt

SEQ ID NO: 174761 - DNA, 33 bp, Homo sapien
agtattcacaaaataactggctgtgatcgaact

SEQ ID NO: 174762 - DNA, 33 bp, Homo sapien
agtattcacaaaataattggctgtgatcgaact

SEQ ID NO: 174763 - DNA, 33 bp, Homo sapien
tattttgggcctcttacctttccatataaactt

SEQ ID NO: 174764 - DNA, 33 bp, Homo sapien
tattttgggcctcttagctttccatataaactt

SEQ ID NO: 174765 - DNA, 33 bp, Homo sapien
aatggtgtaactatgtaaagtccttagcccagg

SEQ ID NO: 174766 - DNA, 33 bp, Homo sapien
aatggtgtaactatgtgaagtccttagcccagg

SEQ ID NO: 174767 - DNA, 33 bp, Homo sapien
tactctggacattacacagaaatgcaatcatgc

SEQ ID NO: 174768 - DNA, 33 bp, Homo sapien
tactctggacattacatagaaatgcaatcatgc

SEQ ID NO: 174769 - DNA, 33 bp, Homo sapien
gctcatctcaattaaaaaaatatgcatgtcccc

SEQ ID NO: 174770 - DNA, 33 bp, Homo sapien
gctcatctcaattaaagaaatatgcatgtcccc

SEQ ID NO: 174771 - DNA, 33 bp, Homo sapien
gtctcctccctattcaatattctgctactcccc

SEQ ID NO: 174772 - DNA, 33 bp, Homo sapien
gtctcctccctattcagtattctgctactcccc

SEQ ID NO: 174773 - DNA, 33 bp, Homo sapien
gcacttggaagacaatgacgtagagtaagagct

SEQ ID NO: 174774 - DNA, 33 bp, Homo sapien
gcacttggaagacaattacgtagagtaagagct

SEQ ID NO: 174775 - DNA, 33 bp, Homo sapien
gattttgatctttctgaaaagagcctctgacac

SEQ ID NO: 174776 - DNA, 33 bp, Homo sapien
gattttgatctttctggaaagagcctctgacac

SEQ ID NO: 174777 - DNA, 33 bp, Homo sapien
attggtgttctcaaacaagaggacaatgtggac

SEQ ID NO: 174778 - DNA, 33 bp, Homo sapien
attggtgttctcaaaccagaggacaatgtggac

SEQ ID NO: 174779 - DNA, 33 bp, Homo sapien
tgtggatggatggttacggagaggaacttgtct

SEQ ID NO: 174780 - DNA, 33 bp, Homo sapien
tgtggatggatggttatggagaggaacttgtct

SEQ ID NO: 174781 - DNA, 33 bp, Homo sapien
gtgagcacttgaaatacggaagtggttgggtcc

SEQ ID NO: 174782 - DNA, 33 bp, Homo sapien
gtgagcacttgaaatatggaagtggttgggtcc

SEQ ID NO: 174783 - DNA, 33 bp, Homo sapien
ctgggctaccttagcaactacatgaaacacaga

SEQ ID NO: 174784 - DNA, 33 bp, Homo sapien
ctgggctaccttagcatctacatgaaacacaga

SEQ ID NO: 174785 - DNA, 33 bp, Homo sapien
ctgtgtgaccataagccgcaaaagggactttgc

SEQ ID NO: 174786 - DNA, 33 bp, Homo sapien
ctgtgtgaccataagctgcaaaagggactttgc

SEQ ID NO: 174787 - DNA, 33 bp, Homo sapien
gtatggcgagaccaacagatcagggggacagct

SEQ ID NO: 174788 - DNA, 33 bp, Homo sapien
gtatggcgagaccaacggatcagggggacagct

SEQ ID NO: 174789 - DNA, 33 bp, Homo sapien
gtatccccaaagcacaataaagcaaggggtaat

SEQ ID NO: 174790 - DNA, 33 bp, Homo sapien
gtatccccaaagcacagtaaagcaaggggtaat

SEQ ID NO: 174791 - DNA, 33 bp, Homo sapien
acctgctggtgtcagacgctgagtgaacccacg

SEQ ID NO: 174792 - DNA, 33 bp, Homo sapien
acctgctggtgtcagatgctgagtgaacccacg

SEQ ID NO: 174793 - DNA, 33 bp, Homo sapien
tctctgccagggtacaagaaaaacccaggctgg

SEQ ID NO: 174794 - DNA, 33 bp, Homo sapien
tctctgccagggtacaggaaaaacccaggctgg

SEQ ID NO: 174795 - DNA, 33 bp, Homo sapien
tcctcattgtctctacacagcaaccactcacca

SEQ ID NO: 174796 - DNA, 33 bp, Homo sapien
tcctcattgtctctacgcagcaaccactcacca

SEQ ID NO: 174797 - DNA, 33 bp, Homo sapien
tgctcacttccttaaacaatacatggattccct

SEQ ID NO: 174798 - DNA, 33 bp, Homo sapien
tgctcacttccttaaataatacatggattccct

SEQ ID NO: 174799 - DNA, 33 bp, Homo sapien
gcagccctaagaaataagtacaagcagcattcc

SEQ ID NO: 174800 - DNA, 33 bp, Homo sapien
gcagccctaagaaataggtacaagcagcattcc

SEQ ID NO: 174801 - DNA, 33 bp, Homo sapien
tggtctctatcggctccctcacctggtggcctg

SEQ ID NO: 174802 - DNA, 33 bp, Homo sapien
tggtctctatcggctctctcacctggtggcctg

SEQ ID NO: 174803 - DNA, 33 bp, Homo sapien
caggctatgtgtataaagcatacgtgaatttca

SEQ ID NO: 174804 - DNA, 33 bp, Homo sapien
caggctatgtgtataaggcatacgtgaatttca

SEQ ID NO: 174805 - DNA, 33 bp, Homo sapien
accgcctctttcgaacactctgaagggtttggt

SEQ ID NO: 174806 - DNA, 33 bp, Homo sapien
accgcctctttcgaactctctgaagggtttggt

SEQ ID NO: 174807 - DNA, 33 bp, Homo sapien
aagtagggtctttttcactctccctgtgtcttc

SEQ ID NO: 174808 - DNA, 33 bp, Homo sapien
aagtagggtctttttctctctccctgtgtcttc

SEQ ID NO: 174809 - DNA, 33 bp, Homo sapien
tgtgagtgaacgcatcactgttgtctcaggcca

SEQ ID NO: 174810 - DNA, 33 bp, Homo sapien
tgtgagtgaacgcatcgctgttgtctcaggcca

SEQ ID NO: 174811 - DNA, 33 bp, Homo sapien
ctggagagatccagcaatgctcttgctctgtgc

SEQ ID NO: 174812 - DNA, 33 bp, Homo sapien
ctggagagatccagcagtgctcttgctctgtgc

SEQ ID NO: 174813 - DNA, 33 bp, Homo sapien
tatagcctgaaattgaaatcactgatgcttcaa

SEQ ID NO: 174814 - DNA, 33 bp, Homo sapien
tatagcctgaaattgagatcactgatgcttcaa

SEQ ID NO: 174815 - DNA, 33 bp, Homo sapien
agcaagattcctgggccactcctcagcccgaac

SEQ ID NO: 174816 - DNA, 33 bp, Homo sapien
agcaagattcctgggctactcctcagcccgaac

SEQ ID NO: 174817 - DNA, 33 bp, Homo sapien
ctttcatggatgcccaactctcgcctcatgatt

SEQ ID NO: 174818 - DNA, 33 bp, Homo sapien
ctttcatggatgcccagctctcgcctcatgatt

SEQ ID NO: 174819 - DNA, 33 bp, Homo sapien
gtgaaccttttattaccacacagcttgagtgat

SEQ ID NO: 174820 - DNA, 33 bp, Homo sapien
gtgaaccttttattacgacacagcttgagtgat

SEQ ID NO: 174821 - DNA, 33 bp, Homo sapien
ggggcagggtagttataaattagaagatacggg

SEQ ID NO: 174822 - DNA, 33 bp, Homo sapien
ggggcagggtagttattaattagaagatacggg

SEQ ID NO: 174823 - DNA, 33 bp, Homo sapien
cccccatctgtgtcaccggggctcatgaatcct

SEQ ID NO: 174824 - DNA, 33 bp, Homo sapien
cccccatctgtgtcactggggctcatgaatcct

SEQ ID NO: 174825 - DNA, 33 bp, Homo sapien
ttcattcgagcgaggccaattttcagaatcgtg

SEQ ID NO: 174826 - DNA, 33 bp, Homo sapien
ttcattcgagcgaggctaattttcagaatcgtg

SEQ ID NO: 174827 - DNA, 33 bp, Homo sapien
gaaggagcgagcctacaactgggacaagcagct

SEQ ID NO: 174828 - DNA, 33 bp, Homo sapien
gaaggagcgagcctacgactgggacaagcagct

SEQ ID NO: 174829 - DNA, 33 bp, Homo sapien
gtgctcactgatggataaagggatgagcaaaat

SEQ ID NO: 174830 - DNA, 33 bp, Homo sapien
gtgctcactgatggatgaagggatgagcaaaat

SEQ ID NO: 174831 - DNA, 33 bp, Homo sapien
taatgggatccatttccattgtctagtaggtgg

SEQ ID NO: 174832 - DNA, 33 bp, Homo sapien
taatgggatccatttctattgtctagtaggtgg

SEQ ID NO: 174833 - DNA, 33 bp, Homo sapien
aagaaggcacttagcacggccacaaggcagtgc

SEQ ID NO: 174834 - DNA, 33 bp, Homo sapien
aagaaggcacttagcatggccacaaggcagtgc

SEQ ID NO: 174835 - DNA, 33 bp, Homo sapien
tgatttccatcttaccaataattcgtgattatc

SEQ ID NO: 174836 - DNA, 33 bp, Homo sapien
tgatttccatcttaccgataattcgtgattatc

SEQ ID NO: 174837 - DNA, 33 bp, Homo sapien
accggcagtccgggcaccttctctctgtgcccc

SEQ ID NO: 174838 - DNA, 33 bp, Homo sapien
accggcagtccgggcatcttctctctgtgcccc

SEQ ID NO: 174839 - DNA, 33 bp, Homo sapien
tccctgggatctgatcacccgagcccacaaggg

SEQ ID NO: 174840 - DNA, 33 bp, Homo sapien
tccctgggatctgatcgcccgagcccacaaggg

SEQ ID NO: 174841 - DNA, 33 bp, Homo sapien
ctttctctgctacaaaacgtttccctcactgcc

SEQ ID NO: 174842 - DNA, 33 bp, Homo sapien
ctttctctgctacaaagcgtttccctcactgcc

SEQ ID NO: 174843 - DNA, 33 bp, Homo sapien
gacattttgtaccttacatcctgaactgctctg

SEQ ID NO: 174844 - DNA, 33 bp, Homo sapien
gacattttgtaccttatatcctgaactgctctg

SEQ ID NO: 174845 - DNA, 33 bp, Homo sapien
aagagagcgaaatgcaaagaagtgacccaagca

SEQ ID NO: 174846 - DNA, 33 bp, Homo sapien
aagagagcgaaatgcagagaagtgacccaagca

SEQ ID NO: 174847 - DNA, 33 bp, Homo sapien
tcataaacagagaaccaacacaaacaccatcca

SEQ ID NO: 174848 - DNA, 33 bp, Homo sapien
tcataaacagagaaccgacacaaacaccatcca

SEQ ID NO: 174849 - DNA, 33 bp, Homo sapien
caggctgaaactcatacggctgtgagaccccgg

SEQ ID NO: 174850 - DNA, 33 bp, Homo sapien
caggctgaaactcatagggctgtgagaccccgg

SEQ ID NO: 174851 - DNA, 33 bp, Homo sapien
acccaactcttcatacacatcatctccaggctt

SEQ ID NO: 174852 - DNA, 33 bp, Homo sapien
acccaactcttcatacgcatcatctccaggctt

SEQ ID NO: 174853 - DNA, 33 bp, Homo sapien
ctccaaagtgctgtcccattttgttctcctacc

SEQ ID NO: 174854 - DNA, 33 bp, Homo sapien
ctccaaagtgctgtcctattttgttctcctacc

SEQ ID NO: 174855 - DNA, 33 bp, Homo sapien
atttctccttccgcacacttgtttagaagatcc

SEQ ID NO: 174856 - DNA, 33 bp, Homo sapien
atttctccttccgcacgcttgtttagaagatcc

SEQ ID NO: 174857 - DNA, 33 bp, Homo sapien
aataggttcctgattaataagccagcatgcctg

SEQ ID NO: 174858 - DNA, 33 bp, Homo sapien
aataggttcctgattagtaagccagcatgcctg

SEQ ID NO: 174859 - DNA, 33 bp, Homo sapien
ctcagcctctcttcccaaagtccctgcatctga

SEQ ID NO: 174860 - DNA, 33 bp, Homo sapien
ctcagcctctcttcccgaagtccctgcatctga

SEQ ID NO: 174861 - DNA, 33 bp, Homo sapien
tgcatacacgcttctggactgtaccattgtata

SEQ ID NO: 174862 - DNA, 33 bp, Homo sapien
tgcatacacgcttctgtactgtaccattgtata

SEQ ID NO: 174863 - DNA, 33 bp, Homo sapien
aggaatctagaccagaagcagctggacctcctt

SEQ ID NO: 174864 - DNA, 33 bp, Homo sapien
aggaatctagaccagaggcagctggacctcctt

SEQ ID NO: 174865 - DNA, 33 bp, Homo sapien
tttcgtggctggaaccaacaccaaccctagcac

SEQ ID NO: 174866 - DNA, 33 bp, Homo sapien
tttcgtggctggaaccgacaccaaccctagcac

SEQ ID NO: 174867 - DNA, 33 bp, Homo sapien
caccgcgttatattccagaccaactcaaaccaa

SEQ ID NO: 174868 - DNA, 33 bp, Homo sapien
caccgcgttatattccggaccaactcaaaccaa

SEQ ID NO: 174869 - DNA, 33 bp, Homo sapien
tgtgaatgcatcgtgaacaatagaccaggactt

SEQ ID NO: 174870 - DNA, 33 bp, Homo sapien
tgtgaatgcatcgtgagcaatagaccaggactt

SEQ ID NO: 174871 - DNA, 33 bp, Homo sapien
tctgtggtgtttgtaacgttcccgtcactggag

SEQ ID NO: 174872 - DNA, 33 bp, Homo sapien
tctgtggtgtttgtaatgttcccgtcactggag

SEQ ID NO: 174873 - DNA, 33 bp, Homo sapien
cacttgcccaggcctacaagcagctggtgttgg

SEQ ID NO: 174874 - DNA, 33 bp, Homo sapien
cacttgcccaggcctagaagcagctggtgttgg

SEQ ID NO: 174875 - DNA, 33 bp, Homo sapien
tatatagaatttgtccagcgtttgccactgtaa

SEQ ID NO: 174876 - DNA, 33 bp, Homo sapien
tatatagaatttgtcccgcgtttgccactgtaa

SEQ ID NO: 174877 - DNA, 33 bp, Homo sapien
tgccacttctgatctacagaccttctcaggcct

SEQ ID NO: 174878 - DNA, 33 bp, Homo sapien
tgccacttctgatctatagaccttctcaggcct

SEQ ID NO: 174879 - DNA, 33 bp, Homo sapien
tattggcgatatctgaaaactcaccaagcattt

SEQ ID NO: 174880 - DNA, 33 bp, Homo sapien
tattggcgatatctgacaactcaccaagcattt

SEQ ID NO: 174881 - DNA, 33 bp, Homo sapien
cggaagcaccaggagacatttgtgaactcctgg

SEQ ID NO: 174882 - DNA, 33 bp, Homo sapien
cggaagcaccaggagatatttgtgaactcctgg

SEQ ID NO: 174883 - DNA, 33 bp, Homo sapien
gtagagaaaaagacacaaatccacaatctattc

SEQ ID NO: 174884 - DNA, 33 bp, Homo sapien
gtagagaaaaagacaccaatccacaatctattc

SEQ ID NO: 174885 - DNA, 33 bp, Homo sapien
cttctagtcagttctgaatcccatcagactgct

SEQ ID NO: 174886 - DNA, 33 bp, Homo sapien
cttctagtcagttctggatcccatcagactgct

SEQ ID NO: 174887 - DNA, 33 bp, Homo sapien
ccatcagactgctggcaaatggggagaagctgg

SEQ ID NO: 174888 - DNA, 33 bp, Homo sapien
ccatcagactgctggcgaatggggagaagctgg

SEQ ID NO: 174889 - DNA, 33 bp, Homo sapien
gattcttgaaccccaaagttatagctctgacca

SEQ ID NO: 174890 - DNA, 33 bp, Homo sapien
gattcttgaaccccaatgttatagctctgacca

SEQ ID NO: 174891 - DNA, 33 bp, Homo sapien
ctcctatctccagcctaactttactacctcttc

SEQ ID NO: 174892 - DNA, 33 bp, Homo sapien
ctcctatctccagcctgactttactacctcttc

SEQ ID NO: 174893 - DNA, 33 bp, Homo sapien
tcagacaaatgcaaaacctgtttatctgcacaa

SEQ ID NO: 174894 - DNA, 33 bp, Homo sapien
tcagacaaatgcaaaatctgtttatctgcacaa

SEQ ID NO: 174895 - DNA, 33 bp, Homo sapien
gaatgaccattgaaaccgcactgggtcttctgg

SEQ ID NO: 174896 - DNA, 33 bp, Homo sapien
gaatgaccattgaaactgcactgggtcttctgg

SEQ ID NO: 174897 - DNA, 33 bp, Homo sapien
tgtggacagaacgtggcaacgaacatcaacaaa

SEQ ID NO: 174898 - DNA, 33 bp, Homo sapien
tgtggacagaacgtggtaacgaacatcaacaaa

SEQ ID NO: 174899 - DNA, 33 bp, Homo sapien
attttcatgtcagctgaaggggtcggtcacgtg

SEQ ID NO: 174900 - DNA, 33 bp, Homo sapien
attttcatgtcagctggaggggtcggtcacgtg

SEQ ID NO: 174901 - DNA, 33 bp, Homo sapien
gccaaccaccacactcacttctctcaaagcagt

SEQ ID NO: 174902 - DNA, 33 bp, Homo sapien
gccaaccaccacactcgcttctctcaaagcagt

SEQ ID NO: 174903 - DNA, 33 bp, Homo sapien
gtgagaaggatcagaccgccacaaggtgggtgc

SEQ ID NO: 174904 - DNA, 33 bp, Homo sapien
gtgagaaggatcagactgccacaaggtgggtgc

SEQ ID NO: 174905 - DNA, 33 bp, Homo sapien
gggagctgttctggaacgacataggcctcaact

SEQ ID NO: 174906 - DNA, 33 bp, Homo sapien
gggagctgttctggaatgacataggcctcaact

SEQ ID NO: 174907 - DNA, 33 bp, Homo sapien
ttcatctcccaaaggcagaacgcttgcagccgc

SEQ ID NO: 174908 - DNA, 33 bp, Homo sapien
ttcatctcccaaaggcggaacgcttgcagccgc

SEQ ID NO: 174909 - DNA, 33 bp, Homo sapien
cttagagatgacctacaaagggctggccctggt

SEQ ID NO: 174910 - DNA, 33 bp, Homo sapien
cttagagatgacctacgaagggctggccctggt

SEQ ID NO: 174911 - DNA, 33 bp, Homo sapien
tctgtggagcttattcgcaaaatgttcagaaaa

SEQ ID NO: 174912 - DNA, 33 bp, Homo sapien
tctgtggagcttattctcaaaatgttcagaaaa

SEQ ID NO: 174913 - DNA, 33 bp, Homo sapien
accaggacttgacctaaaccttttttctccaag

SEQ ID NO: 174914 - DNA, 33 bp, Homo sapien
accaggacttgacctagaccttttttctccaag

SEQ ID NO: 174915 - DNA, 33 bp, Homo sapien
gcagaacaacggcctaaaagagatcaagtccca

SEQ ID NO: 174916 - DNA, 33 bp, Homo sapien
gcagaacaacggcctagaagagatcaagtccca

SEQ ID NO: 174917 - DNA, 33 bp, Homo sapien
tacagcctatgtggggcattaaaacttcatgga

SEQ ID NO: 174918 - DNA, 33 bp, Homo sapien
tacagcctatgtggggtattaaaacttcatgga

SEQ ID NO: 174919 - DNA, 33 bp, Homo sapien
caaagatagagatttaagggtttgaatcccagg

SEQ ID NO: 174920 - DNA, 33 bp, Homo sapien
caaagatagagatttatgggtttgaatcccagg

SEQ ID NO: 174921 - DNA, 33 bp, Homo sapien
atgaaccaattttaccaacaagcttatgaggaa

SEQ ID NO: 174922 - DNA, 33 bp, Homo sapien
atgaaccaattttaccgacaagcttatgaggaa

SEQ ID NO: 174923 - DNA, 33 bp, Homo sapien
aaagaaataaaaataacgatttgcttggtcact

SEQ ID NO: 174924 - DNA, 33 bp, Homo sapien
aaagaaataaaaataatgatttgcttggtcact

SEQ ID NO: 174925 - DNA, 33 bp, Homo sapien
acagtcaaatgggaaaaaaaatcctaactgttt

SEQ ID NO: 174926 - DNA, 33 bp, Homo sapien
acagtcaaatgggaaagaaaatcctaactgttt

SEQ ID NO: 174927 - DNA, 33 bp, Homo sapien
ctgaggacagtacaaacgttttaggaactctgc

SEQ ID NO: 174928 - DNA, 33 bp, Homo sapien
ctgaggacagtacaaaggttttaggaactctgc

SEQ ID NO: 174929 - DNA, 33 bp, Homo sapien
cgcagaccccggggacaatcaagatgccagctc

SEQ ID NO: 174930 - DNA, 33 bp, Homo sapien
cgcagaccccggggacgatcaagatgccagctc

SEQ ID NO: 174931 - DNA, 33 bp, Homo sapien
acttacttcacttcaacttattgcttctaaagg

SEQ ID NO: 174932 - DNA, 33 bp, Homo sapien
acttacttcacttcaatttattgcttctaaagg

SEQ ID NO: 174933 - DNA, 33 bp, Homo sapien
gtgtttaacatgcttacgagccaggctatgggc

SEQ ID NO: 174934 - DNA, 33 bp, Homo sapien
gtgtttaacatgcttatgagccaggctatgggc

SEQ ID NO: 174935 - DNA, 33 bp, Homo sapien
ttgcccaagaggaagacgacaggaaaggtgggg

SEQ ID NO: 174936 - DNA, 33 bp, Homo sapien
ttgcccaagaggaagatgacaggaaaggtgggg

SEQ ID NO: 174937 - DNA, 33 bp, Homo sapien
ctataaatgattgttacgaaaagttcaagtaat

SEQ ID NO: 174938 - DNA, 33 bp, Homo sapien
ctataaatgattgttatgaaaagttcaagtaat

SEQ ID NO: 174939 - DNA, 33 bp, Homo sapien
tatgtgtagcgcaagacggttcttcttccagtg

SEQ ID NO: 174940 - DNA, 33 bp, Homo sapien
tatgtgtagcgcaagagggttcttcttccagtg

SEQ ID NO: 174941 - DNA, 33 bp, Homo sapien
tagttttcagttttgaagcaactggtttctatt

SEQ ID NO: 174942 - DNA, 33 bp, Homo sapien
tagttttcagttttgaggcaactggtttctatt

SEQ ID NO: 174943 - DNA, 33 bp, Homo sapien
tcatgcatatcaaatcacgagagctttaggaaa

SEQ ID NO: 174944 - DNA, 33 bp, Homo sapien
tcatgcatatcaaatcgcgagagctttaggaaa

SEQ ID NO: 174945 - DNA, 33 bp, Homo sapien
cctcagaaccagagaaggtgatggcgtaagtca

SEQ ID NO: 174946 - DNA, 33 bp, Homo sapien
cctcagaaccagagaatgtgatggcgtaagtca

SEQ ID NO: 174947 - DNA, 33 bp, Homo sapien
aaccttaattggccagcagaggtttgcatgaag

SEQ ID NO: 174948 - DNA, 33 bp, Homo sapien
aaccttaattggccagtagaggtttgcatgaag

SEQ ID NO: 174949 - DNA, 33 bp, Homo sapien
ctgtcaatccacgtaaaccacactacactaggc

SEQ ID NO: 174950 - DNA, 33 bp, Homo sapien
ctgtcaatccacgtaagccacactacactaggc

SEQ ID NO: 174951 - DNA, 33 bp, Homo sapien
tatatgcattaaaaataaaatcccttcgctgct

SEQ ID NO: 174952 - DNA, 33 bp, Homo sapien
tatatgcattaaaaatgaaatcccttcgctgct

SEQ ID NO: 174953 - DNA, 33 bp, Homo sapien
gataagagcgaggactcaataatggcagctgta

SEQ ID NO: 174954 - DNA, 33 bp, Homo sapien
gataagagcgaggactgaataatggcagctgta

SEQ ID NO: 174955 - DNA, 33 bp, Homo sapien
aaagggacgtctatacaacttctcagaagaagt

SEQ ID NO: 174956 - DNA, 33 bp, Homo sapien
aaagggacgtctataccacttctcagaagaagt

SEQ ID NO: 174957 - DNA, 33 bp, Homo sapien
tcaaagccatgggaaaatgccttggaaaaaacg

SEQ ID NO: 174958 - DNA, 33 bp, Homo sapien
tcaaagccatgggaaactgccttggaaaaaacg

SEQ ID NO: 174959 - DNA, 33 bp, Homo sapien
cttccatctgtggtgaaatgagcagagccaggg

SEQ ID NO: 174960 - DNA, 33 bp, Homo sapien
cttccatctgtggtgagatgagcagagccaggg

SEQ ID NO: 174961 - DNA, 33 bp, Homo sapien
ggacgaaagagtatgggaatcttggcgtcctca

SEQ ID NO: 174962 - DNA, 33 bp, Homo sapien
ggacgaaagagtatggtaatcttggcgtcctca

SEQ ID NO: 174963 - DNA, 33 bp, Homo sapien
agtgtgtcaggccataaaagggcaccatgaggg

SEQ ID NO: 174964 - DNA, 33 bp, Homo sapien
agtgtgtcaggccatataagggcaccatgaggg

SEQ ID NO: 174965 - DNA, 33 bp, Homo sapien
ggcaaactcaccaagacgggagacagattagtc

SEQ ID NO: 174966 - DNA, 33 bp, Homo sapien
ggcaaactcaccaagatgggagacagattagtc

SEQ ID NO: 174967 - DNA, 33 bp, Homo sapien
tgtgatctttaggttggagataacgacagctat

SEQ ID NO: 174968 - DNA, 33 bp, Homo sapien
tgtgatctttaggttgtagataacgacagctat

SEQ ID NO: 174969 - DNA, 33 bp, Homo sapien
ctcctgggactttgaacgtaagcatcttggctg

SEQ ID NO: 174970 - DNA, 33 bp, Homo sapien
ctcctgggactttgaatgtaagcatcttggctg

SEQ ID NO: 174971 - DNA, 33 bp, Homo sapien
agctagtgctttcgaacagtcttactaaactcc

SEQ ID NO: 174972 - DNA, 33 bp, Homo sapien
agctagtgctttcgaatagtcttactaaactcc

SEQ ID NO: 174973 - DNA, 33 bp, Homo sapien
cagtccctcttcttaaccacaatcttatgcttg

SEQ ID NO: 174974 - DNA, 33 bp, Homo sapien
cagtccctcttcttaatcacaatcttatgcttg

SEQ ID NO: 174975 - DNA, 33 bp, Homo sapien
cagaagtgcagtatagaacatcgcacacagtcc

SEQ ID NO: 174976 - DNA, 33 bp, Homo sapien
cagaagtgcagtataggacatcgcacacagtcc

SEQ ID NO: 174977 - DNA, 33 bp, Homo sapien
agcaagtcagagttcccagtggaaatttcttca

SEQ ID NO: 174978 - DNA, 33 bp, Homo sapien
agcaagtcagagttccgagtggaaatttcttca

SEQ ID NO: 174979 - DNA, 33 bp, Homo sapien
cccagccttccttgcccaattatcatcagcact

SEQ ID NO: 174980 - DNA, 33 bp, Homo sapien
cccagccttccttgcctaattatcatcagcact

SEQ ID NO: 174981 - DNA, 33 bp, Homo sapien
aactcacatcctcagacgagcattagagtttgg

SEQ ID NO: 174982 - DNA, 33 bp, Homo sapien
aactcacatcctcagatgagcattagagtttgg

SEQ ID NO: 174983 - DNA, 33 bp, Homo sapien
gtgcttgtgatcagaaaacgttaaggttttggg

SEQ ID NO: 174984 - DNA, 33 bp, Homo sapien
gtgcttgtgatcagaagacgttaaggttttggg

SEQ ID NO: 174985 - DNA, 33 bp, Homo sapien
aacctttctgttacgaatagttctgtgatggtg

SEQ ID NO: 174986 - DNA, 33 bp, Homo sapien
aacctttctgttacgactagttctgtgatggtg

SEQ ID NO: 174987 - DNA, 33 bp, Homo sapien
tagagcaccatcaaccaattgataaatgctgag

SEQ ID NO: 174988 - DNA, 33 bp, Homo sapien
tagagcaccatcaaccgattgataaatgctgag

SEQ ID NO: 174989 - DNA, 33 bp, Homo sapien
cctgcataatacatgaagaatttgtcctggtta

SEQ ID NO: 174990 - DNA, 33 bp, Homo sapien
cctgcataatacatgacgaatttgtcctggtta

SEQ ID NO: 174991 - DNA, 33 bp, Homo sapien
attcagaattcttccacgttagcagaattggca

SEQ ID NO: 174992 - DNA, 33 bp, Homo sapien
attcagaattcttccatgttagcagaattggca

SEQ ID NO: 174993 - DNA, 33 bp, Homo sapien
ccatgattactgggtcaccagctaaattgcaaa

SEQ ID NO: 174994 - DNA, 33 bp, Homo sapien
ccatgattactgggtctccagctaaattgcaaa

SEQ ID NO: 174995 - DNA, 33 bp, Homo sapien
gcgaatgtggttcccccggagcatagagcacaa

SEQ ID NO: 174996 - DNA, 33 bp, Homo sapien
gcgaatgtggttcccctggagcatagagcacaa

SEQ ID NO: 174997 - DNA, 33 bp, Homo sapien
tgcccggagaatgggaacagcactgtcagcaga

SEQ ID NO: 174998 - DNA, 33 bp, Homo sapien
tgcccggagaatgggagcagcactgtcagcaga

SEQ ID NO: 174999 - DNA, 33 bp, Homo sapien
ttgaggaggtgaaaagacagacaaaagtctcac

SEQ ID NO: 175000 - DNA, 33 bp, Homo sapien
ttgaggaggtgaaaagtcagacaaaagtctcac

SEQ ID NO: 175001 - DNA, 33 bp, Homo sapien
gattcagacccttcagaaatgagtgtctggttc

SEQ ID NO: 175002 - DNA, 33 bp, Homo sapien
gattcagacccttcaggaatgagtgtctggttc

SEQ ID NO: 175003 - DNA, 33 bp, Homo sapien
tcctttgggtctagaactagtctccttcctccc

SEQ ID NO: 175004 - DNA, 33 bp, Homo sapien
tcctttgggtctagaagtagtctccttcctccc

SEQ ID NO: 175005 - DNA, 33 bp, Homo sapien
ttgcgtgctctggtaacgagccagcccagaacc

SEQ ID NO: 175006 - DNA, 33 bp, Homo sapien
ttgcgtgctctggtaatgagccagcccagaacc

SEQ ID NO: 175007 - DNA, 33 bp, Homo sapien
aaactgcgtaaaggaacgggtataacgggctgt

SEQ ID NO: 175008 - DNA, 33 bp, Homo sapien
aaactgcgtaaaggaatgggtataacgggctgt

SEQ ID NO: 175009 - DNA, 33 bp, Homo sapien
gtaacaggccatcatacagtgtaagctccgagt

SEQ ID NO: 175010 - DNA, 33 bp, Homo sapien
gtaacaggccatcatatagtgtaagctccgagt

SEQ ID NO: 175011 - DNA, 33 bp, Homo sapien
ggaaccagccctgcgacgctttgatctcgactt

SEQ ID NO: 175012 - DNA, 33 bp, Homo sapien
ggaaccagccctgcgatgctttgatctcgactt

SEQ ID NO: 175013 - DNA, 33 bp, Homo sapien
tgatattaataatagcaatgtcacaaggaacag

SEQ ID NO: 175014 - DNA, 33 bp, Homo sapien
tgatattaataatagcgatgtcacaaggaacag

SEQ ID NO: 175015 - DNA, 33 bp, Homo sapien
aagtgaggagagacacagaagcattaggtatca

SEQ ID NO: 175016 - DNA, 33 bp, Homo sapien
aagtgaggagagacacggaagcattaggtatca

SEQ ID NO: 175017 - DNA, 33 bp, Homo sapien
agaaagccattgcttccgaaaaccagactcagt

SEQ ID NO: 175018 - DNA, 33 bp, Homo sapien
agaaagccattgcttctgaaaaccagactcagt

SEQ ID NO: 175019 - DNA, 33 bp, Homo sapien
taggagctggactgaaaatactggcagacatac

SEQ ID NO: 175020 - DNA, 33 bp, Homo sapien
taggagctggactgaagatactggcagacatac

SEQ ID NO: 175021 - DNA, 33 bp, Homo sapien
tgagagcaatcactgcacaaggaaacaccagtc

SEQ ID NO: 175022 - DNA, 33 bp, Homo sapien
tgagagcaatcactgcgcaaggaaacaccagtc

SEQ ID NO: 175023 - DNA, 33 bp, Homo sapien
ggccacagcagcatgaacctcttagacctgtct

SEQ ID NO: 175024 - DNA, 33 bp, Homo sapien
ggccacagcagcatgaccctcttagacctgtct

SEQ ID NO: 175025 - DNA, 33 bp, Homo sapien
gtcttggtaaggataacctgcccttctaagaca

SEQ ID NO: 175026 - DNA, 33 bp, Homo sapien
gtcttggtaaggataatctgcccttctaagaca

SEQ ID NO: 175027 - DNA, 33 bp, Homo sapien
gggcgatgcattagaaataacgagaagcttccc

SEQ ID NO: 175028 - DNA, 33 bp, Homo sapien
gggcgatgcattagaagtaacgagaagcttccc

SEQ ID NO: 175029 - DNA, 33 bp, Homo sapien
ctgatatctgctccacagacgtgtaaaatcaca

SEQ ID NO: 175030 - DNA, 33 bp, Homo sapien
ctgatatctgctccacggacgtgtaaaatcaca

SEQ ID NO: 175031 - DNA, 33 bp, Homo sapien
cactgattcgctccaacgacactggcggcacat

SEQ ID NO: 175032 - DNA, 33 bp, Homo sapien
cactgattcgctccaatgacactggcggcacat

SEQ ID NO: 175033 - DNA, 33 bp, Homo sapien
cttcctcttctcttgcaacctttattgacccta

SEQ ID NO: 175034 - DNA, 33 bp, Homo sapien
cttcctcttctcttgcgacctttattgacccta

SEQ ID NO: 175035 - DNA, 33 bp, Homo sapien
agttgaggttatgaacaaattcacctatgagct

SEQ ID NO: 175036 - DNA, 33 bp, Homo sapien
agttgaggttatgaaccaattcacctatgagct

SEQ ID NO: 175037 - DNA, 33 bp, Homo sapien
ttatttctatcttatccactggaatgaacatac

SEQ ID NO: 175038 - DNA, 33 bp, Homo sapien
ttatttctatcttatctactggaatgaacatac

SEQ ID NO: 175039 - DNA, 33 bp, Homo sapien
gtagagatgcttaaaactgatgaatcaagagat

SEQ ID NO: 175040 - DNA, 33 bp, Homo sapien
gtagagatgcttaaaattgatgaatcaagagat

SEQ ID NO: 175041 - DNA, 33 bp, Homo sapien
atgaaagtggttatcaaatacgggctctgggca

SEQ ID NO: 175042 - DNA, 33 bp, Homo sapien
atgaaagtggttatcagatacgggctctgggca

SEQ ID NO: 175043 - DNA, 33 bp, Homo sapien
tcctgggccccttgcacggatttgaacaaagta

SEQ ID NO: 175044 - DNA, 33 bp, Homo sapien
tcctgggccccttgcatggatttgaacaaagta

SEQ ID NO: 175045 - DNA, 33 bp, Homo sapien
ctcaagtgaaggaaataaagtgttctgggaggg

SEQ ID NO: 175046 - DNA, 33 bp, Homo sapien
ctcaagtgaaggaaatgaagtgttctgggaggg

SEQ ID NO: 175047 - DNA, 33 bp, Homo sapien
gagaaattttggagaaattatatgcagattttc

SEQ ID NO: 175048 - DNA, 33 bp, Homo sapien
gagaaattttggagaagttatatgcagattttc

SEQ ID NO: 175049 - DNA, 33 bp, Homo sapien
cttgcctggagcctcacgcagaaaactccccac

SEQ ID NO: 175050 - DNA, 33 bp, Homo sapien
cttgcctggagcctcatgcagaaaactccccac

SEQ ID NO: 175051 - DNA, 33 bp, Homo sapien
ggtcctggctctgttcgcttccagcccaggact

SEQ ID NO: 175052 - DNA, 33 bp, Homo sapien
ggtcctggctctgttctcttccagcccaggact

SEQ ID NO: 175053 - DNA, 33 bp, Homo sapien
agcggcactaccacccaacccgcagctcacatg

SEQ ID NO: 175054 - DNA, 33 bp, Homo sapien
agcggcactaccacccgacccgcagctcacatg

SEQ ID NO: 175055 - DNA, 33 bp, Homo sapien
tctggaattcagagagcctattggggaaggtgt

SEQ ID NO: 175056 - DNA, 33 bp, Homo sapien
tctggaattcagagaggctattggggaaggtgt

SEQ ID NO: 175057 - DNA, 33 bp, Homo sapien
tctataaaacgaggggaaataataataatcagt

SEQ ID NO: 175058 - DNA, 33 bp, Homo sapien
tctataaaacgagggggaataataataatcagt

SEQ ID NO: 175059 - DNA, 33 bp, Homo sapien
gagcgagtgaccttaaacttcctgagccccagg

SEQ ID NO: 175060 - DNA, 33 bp, Homo sapien
gagcgagtgaccttaaccttcctgagccccagg

SEQ ID NO: 175061 - DNA, 33 bp, Homo sapien
gtcttagaatcctaagcatgtcctgttattatc

SEQ ID NO: 175062 - DNA, 33 bp, Homo sapien
gtcttagaatcctaagtatgtcctgttattatc

SEQ ID NO: 175063 - DNA, 33 bp, Homo sapien
gaagcaataaacgtcacgaataaacatgaaggg

SEQ ID NO: 175064 - DNA, 33 bp, Homo sapien
gaagcaataaacgtcatgaataaacatgaaggg

SEQ ID NO: 175065 - DNA, 33 bp, Homo sapien
tgaacgcatcagatacaccaggcacggctcctg

SEQ ID NO: 175066 - DNA, 33 bp, Homo sapien
tgaacgcatcagatacgccaggcacggctcctg

SEQ ID NO: 175067 - DNA, 33 bp, Homo sapien
aggaggatgctgcctcaacaggaatctttttat

SEQ ID NO: 175068 - DNA, 33 bp, Homo sapien
aggaggatgctgcctcgacaggaatctttttat

SEQ ID NO: 175069 - DNA, 33 bp, Homo sapien
catcctccttcaggcaatctttgagaaatgaca

SEQ ID NO: 175070 - DNA, 33 bp, Homo sapien
catcctccttcaggcagtctttgagaaatgaca

SEQ ID NO: 175071 - DNA, 33 bp, Homo sapien
taacgaaagacaaagacccacacagctcgcact

SEQ ID NO: 175072 - DNA, 33 bp, Homo sapien
taacgaaagacaaagatccacacagctcgcact

SEQ ID NO: 175073 - DNA, 33 bp, Homo sapien
gacttcaagggtgtgacacaaactgggggctca

SEQ ID NO: 175074 - DNA, 33 bp, Homo sapien
gacttcaagggtgtgatacaaactgggggctca

SEQ ID NO: 175075 - DNA, 33 bp, Homo sapien
gactcttccaagctcacgtctggctgtgtccct

SEQ ID NO: 175076 - DNA, 33 bp, Homo sapien
gactcttccaagctcatgtctggctgtgtccct

SEQ ID NO: 175077 - DNA, 33 bp, Homo sapien
agtcaattaagcccaccggcaggaatgcatttc

SEQ ID NO: 175078 - DNA, 33 bp, Homo sapien
agtcaattaagcccactggcaggaatgcatttc

SEQ ID NO: 175079 - DNA, 33 bp, Homo sapien
agcctgttgtctcttcgatctttgtcctgctgt

SEQ ID NO: 175080 - DNA, 33 bp, Homo sapien
agcctgttgtctcttctatctttgtcctgctgt

SEQ ID NO: 175081 - DNA, 33 bp, Homo sapien
ctgctgccacctcctcgaacgtttctcagccac

SEQ ID NO: 175082 - DNA, 33 bp, Homo sapien
ctgctgccacctcctctaacgtttctcagccac

SEQ ID NO: 175083 - DNA, 33 bp, Homo sapien
tccctgctatgatccccgccacttggacaacga

SEQ ID NO: 175084 - DNA, 33 bp, Homo sapien
tccctgctatgatccctgccacttggacaacga

SEQ ID NO: 175085 - DNA, 33 bp, Homo sapien
gacgattggaacttccagaggatgagctccatg

SEQ ID NO: 175086 - DNA, 33 bp, Homo sapien
gacgattggaacttccggaggatgagctccatg

SEQ ID NO: 175087 - DNA, 33 bp, Homo sapien
tatttcatttttcatagctattgtaaatggcct

SEQ ID NO: 175088 - DNA, 33 bp, Homo sapien
tatttcatttttcatatctattgtaaatggcct

SEQ ID NO: 175089 - DNA, 33 bp, Homo sapien
actaggtgaagacaagcctgtctaaacttagag

SEQ ID NO: 175090 - DNA, 33 bp, Homo sapien
actaggtgaagacaaggctgtctaaacttagag

SEQ ID NO: 175091 - DNA, 33 bp, Homo sapien
ttcaacaatccccttaccttctctgtgttttcc

SEQ ID NO: 175092 - DNA, 33 bp, Homo sapien
ttcaacaatccccttagcttctctgtgttttcc

SEQ ID NO: 175093 - DNA, 33 bp, Homo sapien
tgctcttgggctactaaggcagagttgagtagt

SEQ ID NO: 175094 - DNA, 33 bp, Homo sapien
tgctcttgggctactacggcagagttgagtagt

SEQ ID NO: 175095 - DNA, 33 bp, Homo sapien
tctcagttataagagacagctaagcattgagta

SEQ ID NO: 175096 - DNA, 33 bp, Homo sapien
tctcagttataagagagagctaagcattgagta

SEQ ID NO: 175097 - DNA, 33 bp, Homo sapien
tgataggtgcaacacaccaccgtggcatacgtt

SEQ ID NO: 175098 - DNA, 33 bp, Homo sapien
tgataggtgcaacacatcaccgtggcatacgtt

SEQ ID NO: 175099 - DNA, 33 bp, Homo sapien
ggacagatcgctggaaagtcacacactccaaaa

SEQ ID NO: 175100 - DNA, 33 bp, Homo sapien
ggacagatcgctggaaggtcacacactccaaaa

SEQ ID NO: 175101 - DNA, 33 bp, Homo sapien
gatcatcaagacatcgaccgccaagctttctgg

SEQ ID NO: 175102 - DNA, 33 bp, Homo sapien
gatcatcaagacatcggccgccaagctttctgg

SEQ ID NO: 175103 - DNA, 33 bp, Homo sapien
tcctctcttagcctcagcgcatgtctccctgcc

SEQ ID NO: 175104 - DNA, 33 bp, Homo sapien
tcctctcttagcctcatcgcatgtctccctgcc

SEQ ID NO: 175105 - DNA, 33 bp, Homo sapien
aatttcttgacgtgaaggaacagaactcctacg

SEQ ID NO: 175106 - DNA, 33 bp, Homo sapien
aatttcttgacgtgaatgaacagaactcctacg

SEQ ID NO: 175107 - DNA, 33 bp, Homo sapien
ggcacttgcttagcagaacggtggggtggcctg

SEQ ID NO: 175108 - DNA, 33 bp, Homo sapien
ggcacttgcttagcagcacggtggggtggcctg

SEQ ID NO: 175109 - DNA, 33 bp, Homo sapien
gaacccgcaagccagaacgtattcccatgacct

SEQ ID NO: 175110 - DNA, 33 bp, Homo sapien
gaacccgcaagccagagcgtattcccatgacct

SEQ ID NO: 175111 - DNA, 33 bp, Homo sapien
gtgcttgggccccagaacgtaatctcagtgcaa

SEQ ID NO: 175112 - DNA, 33 bp, Homo sapien
gtgcttgggccccagaccgtaatctcagtgcaa

SEQ ID NO: 175113 - DNA, 33 bp, Homo sapien
tggtatgttcttagcaacgggtccagcctgatg

SEQ ID NO: 175114 - DNA, 33 bp, Homo sapien
tggtatgttcttagcagcgggtccagcctgatg

SEQ ID NO: 175115 - DNA, 33 bp, Homo sapien
ctcagagaagcgagggccatgtttccccacagg

SEQ ID NO: 175116 - DNA, 33 bp, Homo sapien
ctcagagaagcgagggtcatgtttccccacagg

SEQ ID NO: 175117 - DNA, 33 bp, Homo sapien
tcatggcttgtgaccaatacagctgcgccctga

SEQ ID NO: 175118 - DNA, 33 bp, Homo sapien
tcatggcttgtgaccagtacagctgcgccctga

SEQ ID NO: 175119 - DNA, 33 bp, Homo sapien
cctgaaataaccaaacaggtcagaatttagctt

SEQ ID NO: 175120 - DNA, 33 bp, Homo sapien
cctgaaataaccaaacgggtcagaatttagctt

SEQ ID NO: 175121 - DNA, 33 bp, Homo sapien
gctgagcaggtctccaagtagcttacaacctgc

SEQ ID NO: 175122 - DNA, 33 bp, Homo sapien
gctgagcaggtctccacgtagcttacaacctgc

SEQ ID NO: 175123 - DNA, 33 bp, Homo sapien
agggcatgaaaacccacgaaacggatccgttgg

SEQ ID NO: 175124 - DNA, 33 bp, Homo sapien
agggcatgaaaacccatgaaacggatccgttgg

SEQ ID NO: 175125 - DNA, 33 bp, Homo sapien
gtgacgggagactccacaagggccgctaggact

SEQ ID NO: 175126 - DNA, 33 bp, Homo sapien
gtgacgggagactccagaagggccgctaggact

SEQ ID NO: 175127 - DNA, 33 bp, Homo sapien
gatctggtcgttttaagagtgtgtagcgactgg

SEQ ID NO: 175128 - DNA, 33 bp, Homo sapien
gatctggtcgttttaatagtgtgtagcgactgg

SEQ ID NO: 175129 - DNA, 33 bp, Homo sapien
tgtctagtgtgtagtaaaaagtaggccagccct

SEQ ID NO: 175130 - DNA, 33 bp, Homo sapien
tgtctagtgtgtagtagaaagtaggccagccct

SEQ ID NO: 175131 - DNA, 33 bp, Homo sapien
cggtcctggcaaccacaagtctactgtctgtct

SEQ ID NO: 175132 - DNA, 33 bp, Homo sapien
cggtcctggcaaccacgagtctactgtctgtct

SEQ ID NO: 175133 - DNA, 33 bp, Homo sapien
aagatacagtaatcacaggatctgaagcccatg

SEQ ID NO: 175134 - DNA, 33 bp, Homo sapien
aagatacagtaatcacgggatctgaagcccatg

SEQ ID NO: 175135 - DNA, 33 bp, Homo sapien
cttgcctctggctagcacagactaagctcccca

SEQ ID NO: 175136 - DNA, 33 bp, Homo sapien
cttgcctctggctagcgcagactaagctcccca

SEQ ID NO: 175137 - DNA, 33 bp, Homo sapien
ggaagcaatatgagaaagggagtattttcagtc

SEQ ID NO: 175138 - DNA, 33 bp, Homo sapien
ggaagcaatatgagaaggggagtattttcagtc

SEQ ID NO: 175139 - DNA, 33 bp, Homo sapien
ccactgggtcattagtcacagtagctccacaaa

SEQ ID NO: 175140 - DNA, 33 bp, Homo sapien
ccactgggtcattagtgacagtagctccacaaa

SEQ ID NO: 175141 - DNA, 33 bp, Homo sapien
cacagccaggtaaacacgacatgaaacaagcct

SEQ ID NO: 175142 - DNA, 33 bp, Homo sapien
cacagccaggtaaacatgacatgaaacaagcct

SEQ ID NO: 175143 - DNA, 33 bp, Homo sapien
catgtcatgcactggagctgttgaacttacttc

SEQ ID NO: 175144 - DNA, 33 bp, Homo sapien
catgtcatgcactggatctgttgaacttacttc

SEQ ID NO: 175145 - DNA, 33 bp, Homo sapien
gaagcagagagtgcgacggtggctaccaggggc

SEQ ID NO: 175146 - DNA, 33 bp, Homo sapien
gaagcagagagtgcgatggtggctaccaggggc

SEQ ID NO: 175147 - DNA, 33 bp, Homo sapien
ttcaagattccacagacgaatcagaccatgcgg

SEQ ID NO: 175148 - DNA, 33 bp, Homo sapien
ttcaagattccacagatgaatcagaccatgcgg

SEQ ID NO: 175149 - DNA, 33 bp, Homo sapien
caccccattccataaacagacaaaggtgcccag

SEQ ID NO: 175150 - DNA, 33 bp, Homo sapien
caccccattccataaagagacaaaggtgcccag

SEQ ID NO: 175151 - DNA, 33 bp, Homo sapien
cattagagaaattccacgagattaggaagcatg

SEQ ID NO: 175152 - DNA, 33 bp, Homo sapien
cattagagaaattccatgagattaggaagcatg

SEQ ID NO: 175153 - DNA, 33 bp, Homo sapien
cactcttgtattctacacacctacaggcttaac

SEQ ID NO: 175154 - DNA, 33 bp, Homo sapien
cactcttgtattctacgcacctacaggcttaac

SEQ ID NO: 175155 - DNA, 33 bp, Homo sapien
ccttgtgactgtttacactatttttccagagct

SEQ ID NO: 175156 - DNA, 33 bp, Homo sapien
ccttgtgactgtttacgctatttttccagagct

SEQ ID NO: 175157 - DNA, 33 bp, Homo sapien
ttacacgaaacactacacgatgattaaaaaaga

SEQ ID NO: 175158 - DNA, 33 bp, Homo sapien
ttacacgaaacactacgcgatgattaaaaaaga

SEQ ID NO: 175159 - DNA, 33 bp, Homo sapien
ttctggatccaagtataagcccttcctcctgag

SEQ ID NO: 175160 - DNA, 33 bp, Homo sapien
ttctggatccaagtatgagcccttcctcctgag

SEQ ID NO: 175161 - DNA, 33 bp, Homo sapien
agcacatccccttctgaatctgaaaagagccct

SEQ ID NO: 175162 - DNA, 33 bp, Homo sapien
agcacatccccttctggatctgaaaagagccct

SEQ ID NO: 175163 - DNA, 33 bp, Homo sapien
aaagtttgaggactcacgttttccaatttctaa

SEQ ID NO: 175164 - DNA, 33 bp, Homo sapien
aaagtttgaggactcaggttttccaatttctaa

SEQ ID NO: 175165 - DNA, 33 bp, Homo sapien
taaaacattggctgaacatgatggctcatgcct

SEQ ID NO: 175166 - DNA, 33 bp, Homo sapien
taaaacattggctgaatatgatggctcatgcct

SEQ ID NO: 175167 - DNA, 33 bp, Homo sapien
cctatctatcaatccaagctaaatccaggtcat

SEQ ID NO: 175168 - DNA, 33 bp, Homo sapien
cctatctatcaatccatgctaaatccaggtcat

SEQ ID NO: 175169 - DNA, 33 bp, Homo sapien
gcgttcatgtctgctgccaccttctggagtttc

SEQ ID NO: 175170 - DNA, 33 bp, Homo sapien
gcgttcatgtctgctgtcaccttctggagtttc

SEQ ID NO: 175171 - DNA, 33 bp, Homo sapien
atctaacagagccgaaaacaggggaacctcaaa

SEQ ID NO: 175172 - DNA, 33 bp, Homo sapien
atctaacagagccgaatacaggggaacctcaaa

SEQ ID NO: 175173 - DNA, 33 bp, Homo sapien
caaggtcaaggctcagaatttgcagagcccaat

SEQ ID NO: 175174 - DNA, 33 bp, Homo sapien
caaggtcaaggctcaggatttgcagagcccaat

SEQ ID NO: 175175 - DNA, 33 bp, Homo sapien
tcgcttattcaaaggaatcacaaggtcaaggct

SEQ ID NO: 175176 - DNA, 33 bp, Homo sapien
tcgcttattcaaaggactcacaaggtcaaggct

SEQ ID NO: 175177 - DNA, 33 bp, Homo sapien
cctctgattagtaaacagcggctctgaacgggg

SEQ ID NO: 175178 - DNA, 33 bp, Homo sapien
cctctgattagtaaacggcggctctgaacgggg

SEQ ID NO: 175179 - DNA, 33 bp, Homo sapien
aattgcactgatgtaacgtatacagtttgagaa

SEQ ID NO: 175180 - DNA, 33 bp, Homo sapien
aattgcactgatgtaatgtatacagtttgagaa

SEQ ID NO: 175181 - DNA, 33 bp, Homo sapien
ctcaggtatctcctcccactacctattccctgt

SEQ ID NO: 175182 - DNA, 33 bp, Homo sapien
ctcaggtatctcctcctactacctattccctgt

SEQ ID NO: 175183 - DNA, 33 bp, Homo sapien
gcaccctagagaggcactaagagcagccccctg

SEQ ID NO: 175184 - DNA, 33 bp, Homo sapien
gcaccctagagaggcagtaagagcagccccctg

SEQ ID NO: 175185 - DNA, 33 bp, Homo sapien
gaatggctaagaagaaataaatcaaagtttagc

SEQ ID NO: 175186 - DNA, 33 bp, Homo sapien
gaatggctaagaagaagtaaatcaaagtttagc

SEQ ID NO: 175187 - DNA, 33 bp, Homo sapien
agcctcaaaacacaagactgtcaggacaagttt

SEQ ID NO: 175188 - DNA, 33 bp, Homo sapien
agcctcaaaacacaagcctgtcaggacaagttt

SEQ ID NO: 175189 - DNA, 33 bp, Homo sapien
ctctctctgattatacaatggaaaaggctttgt

SEQ ID NO: 175190 - DNA, 33 bp, Homo sapien
ctctctctgattatacgatggaaaaggctttgt

SEQ ID NO: 175191 - DNA, 33 bp, Homo sapien
tcttccgattgagaaccataacgtttgatttcg

SEQ ID NO: 175192 - DNA, 33 bp, Homo sapien
tcttccgattgagaactataacgtttgatttcg

SEQ ID NO: 175193 - DNA, 33 bp, Homo sapien
atatcacagagtgtacacacatgatgtacatcc

SEQ ID NO: 175194 - DNA, 33 bp, Homo sapien
atatcacagagtgtacccacatgatgtacatcc

SEQ ID NO: 175195 - DNA, 33 bp, Homo sapien; identical to SEQ ID NO: 175193

SEQ ID NO: 175196 - DNA, 33 bp, Homo sapien; identical to SEQ ID NO: 175194

SEQ ID NO: 175197 - DNA, 33 bp, Homo sapien
gagcatcttttcatgcacttattggccacttgt

SEQ ID NO: 175198 - DNA, 33 bp, Homo sapien
gagcatcttttcatgcgcttattggccacttgt

SEQ ID NO: 175199 - DNA, 33 bp, Homo sapien; identical to SEQ ID NO: 175197

SEQ ID NO: 175200 - DNA, 33 bp, Homo sapien; identical to SEQ ID NO: 175198

SEQ ID NO: 175201 - DNA, 33 bp, Homo sapien
gtaaatcggctttcaacgacttgccctatgaga

SEQ ID NO: 175202 - DNA, 33 bp, Homo sapien
gtaaatcggctttcaatgacttgccctatgaga

SEQ ID NO: 175203 - DNA, 33 bp, Homo sapien
tattacaaagctgtccaacaaaaagttttccaa

SEQ ID NO: 175204 - DNA, 33 bp, Homo sapien
tattacaaagctgtccgacaaaaagttttccaa

SEQ ID NO: 175205 - DNA, 33 bp, Homo sapien; identical to SEQ ID NO: 175203

SEQ ID NO: 175206 - DNA, 33 bp, Homo sapien; identical to SEQ ID NO: 175204

SEQ ID NO: 175207 - DNA, 33 bp, Homo sapien
gctctttcgtaagataagatcccccaataccca

SEQ ID NO: 175208 - DNA, 33 bp, Homo sapien
gctctttcgtaagataggatcccccaataccca

SEQ ID NO: 175209 - DNA, 33 bp, Homo sapien; identical to SEQ ID NO: 175207

SEQ ID NO: 175210 - DNA, 33 bp, Homo sapien; identical to SEQ ID NO: 175208

SEQ ID NO: 175211 - DNA, 33 bp, Homo sapien
atgagaaaactcacacaggagagagaccatata

SEQ ID NO: 175212 - DNA, 33 bp, Homo sapien
atgagaaaactcacacgggagagagaccatata

SEQ ID NO: 175213 - DNA, 33 bp, Homo sapien; identical to SEQ ID NO: 175211

SEQ ID NO: 175214 - DNA, 33 bp, Homo sapien; identical to SEQ ID NO: 175212

SEQ ID NO: 175215 - DNA, 33 bp, Homo sapien
tatggtcaaaacagaaatggaaaaggcacacaa

SEQ ID NO: 175216 - DNA, 33 bp, Homo sapien
tatggtcaaaacagaagtggaaaaggcacacaa

SEQ ID NO: 175217 - DNA, 33 bp, Homo sapien; identical to SEQ ID NO: 175215

SEQ ID NO: 175218 - DNA, 33 bp, Homo sapien; identical to SEQ ID NO: 175216

SEQ ID NO: 175219 - DNA, 33 bp, Homo sapien
gtactagaaagcattcacagtcaagggatacag

SEQ ID NO: 175220 - DNA, 33 bp, Homo sapien
gtactagaaagcattcgcagtcaagggatacag

SEQ ID NO: 175221 - DNA, 33 bp, Homo sapien
ttacttaataatggccccaaaatgcaagagtac

SEQ ID NO: 175222 - DNA, 33 bp, Homo sapien
ttacttaataatggccgcaaaatgcaagagtac

SEQ ID NO: 175223 - DNA, 33 bp, Homo sapien
aaagattgctgtaacacagaaataaagctgcac

SEQ ID NO: 175224 - DNA, 33 bp, Homo sapien
aaagattgctgtaacagagaaataaagctgcac

SEQ ID NO: 175225 - DNA, 33 bp, Homo sapien
aaggacttagaatcacactggaaaagaccctta

SEQ ID NO: 175226 - DNA, 33 bp, Homo sapien
aaggacttagaatcacgctggaaaagaccctta

SEQ ID NO: 175227 - DNA, 33 bp, Homo sapien; identical to SEQ ID NO: 175225

SEQ ID NO: 175228 - DNA, 33 bp, Homo sapien; identical to SEQ ID NO: 175226

SEQ ID NO: 175229 - DNA, 33 bp, Homo sapien
atgaggaatatgaatcagaatatgaattaagta

SEQ ID NO: 175230 - DNA, 33 bp, Homo sapien
atgaggaatatgaatctgaatatgaattaagta

SEQ ID NO: 175231 - DNA, 33 bp, Homo sapien
cactttctcttccacaatagtcttggaaaaaag

SEQ ID NO: 175232 - DNA, 33 bp, Homo sapien
cactttctcttccacagtagtcttggaaaaaag

SEQ ID NO: 175233 - DNA, 33 bp, Homo sapien
cctcatccagttctgaacaaatatcattttcat

SEQ ID NO: 175234 - DNA, 33 bp, Homo sapien
cctcatccagttctgaccaaatatcattttcat

SEQ ID NO: 175235 - DNA, 33 bp, Homo sapien; identical to SEQ ID NO: 175233

SEQ ID NO: 175236 - DNA, 33 bp, Homo sapien; identical to SEQ ID NO: 175234

SEQ ID NO: 175237 - DNA, 33 bp, Homo sapien
tattccacaatcaaaccatcaaaggtgtcaaag

SEQ ID NO: 175238 - DNA, 33 bp, Homo sapien
tattccacaatcaaacgatcaaaggtgtcaaag

SEQ ID NO: 175239 - DNA, 33 bp, Homo sapien
agaatgtgataccacacattaggatggatgtga

SEQ ID NO: 175240 - DNA, 33 bp, Homo sapien
agaatgtgataccacagattaggatggatgtga

SEQ ID NO: 175241 - DNA, 33 bp, Homo sapien
taaaataagacaattaaatttgccacatcaatc

SEQ ID NO: 175242 - DNA, 33 bp, Homo sapien
taaaataagacaattacatttgccacatcaatc

SEQ ID NO: 175243 - DNA, 33 bp, Homo sapien; identical to SEQ ID NO: 175241

SEQ ID NO: 175244 - DNA, 33 bp, Homo sapien; identical to SEQ ID NO: 175242

SEQ ID NO: 175245 - DNA, 33 bp, Homo sapien
cacccgtagaaaggccaggccaaaggactgatg

SEQ ID NO: 175246 - DNA, 33 bp, Homo sapien
cacccgtagaaaggcccggccaaaggactgatg

SEQ ID NO: 175247 - DNA, 33 bp, Homo sapien
tctcaggtatattaatcagcaggcatgatttgt

SEQ ID NO: 175248 - DNA, 33 bp, Homo sapien
tctcaggtatattaattagcaggcatgatttgt

SEQ ID NO: 175249 - DNA, 33 bp, Homo sapien
agactggtgtattaaaataccagtggtccttga

SEQ ID NO: 175250 - DNA, 33 bp, Homo sapien
agactggtgtattaaattaccagtggtccttga

SEQ ID NO: 175251 - DNA, 33 bp, Homo sapien
tattatactactagacactctcaagtccttcaa

SEQ ID NO: 175252 - DNA, 33 bp, Homo sapien
tattatactactagacgctctcaagtccttcaa

SEQ ID NO: 175253 - DNA, 33 bp, Homo sapien
ccttagttggtattcaagtttctactaatgtct

SEQ ID NO: 175254 - DNA, 33 bp, Homo sapien
ccttagttggtattcaggtttctactaatgtct

SEQ ID NO: 175255 - DNA, 33 bp, Homo sapien
accccttttcaggaggaatgattagcctgttgg

SEQ ID NO: 175256 - DNA, 33 bp, Homo sapien
accccttttcaggagggatgattagcctgttgg

SEQ ID NO: 175257 - DNA, 33 bp, Homo sapien
cattttggcagataaacaggacttgagagtgga

SEQ ID NO: 175258 - DNA, 33 bp, Homo sapien
cattttggcagataaataggacttgagagtgga

SEQ ID NO: 175259 - DNA, 33 bp, Homo sapien
gcttaggcacacttaccgactccacagttggaa

SEQ ID NO: 175260 - DNA, 33 bp, Homo sapien
gcttaggcacacttactgactccacagttggaa

SEQ ID NO: 175261 - DNA, 33 bp, Homo sapien; identical to SEQ ID NO: 175259

SEQ ID NO: 175262 - DNA, 33 bp, Homo sapien; identical to SEQ ID NO: 175260

SEQ ID NO: 175263 - DNA, 33 bp, Homo sapien
aggaatgaacgcccaaagtcaatgttgagaaat

SEQ ID NO: 175264 - DNA, 33 bp, Homo sapien
aggaatgaacgcccaaggtcaatgttgagaaat

SEQ ID NO: 175265 - DNA, 33 bp, Homo sapien
gtgtttttaagtgtgccctaccctcttagccta

SEQ ID NO: 175266 - DNA, 33 bp, Homo sapien
gtgtttttaagtgtgctctaccctcttagccta

SEQ ID NO: 175267 - DNA, 33 bp, Homo sapien
aaagcttatgactcaacttacatttgtatttga

SEQ ID NO: 175268 - DNA, 33 bp, Homo sapien
aaagcttatgactcaagttacatttgtatttga

SEQ ID NO: 175269 - DNA, 33 bp, Homo sapien
ctctctagttactaaacttccttgagcctttga

SEQ ID NO: 175270 - DNA, 33 bp, Homo sapien
ctctctagttactaaatttccttgagcctttga

SEQ ID NO: 175271 - DNA, 33 bp, Homo sapien
atatgaacaaataattcaaagaagccaaatgac

SEQ ID NO: 175272 - DNA, 33 bp, Homo sapien
atatgaacaaataattgaaagaagccaaatgac

SEQ ID NO: 175273 - DNA, 33 bp, Homo sapien
gacaactagtatttgaagaaggtgtgagaaatg

SEQ ID NO: 175274 - DNA, 33 bp, Homo sapien
gacaactagtatttgaggaaggtgtgagaaatg

SEQ ID NO: 175275 - DNA, 33 bp, Homo sapien
aacacaaagaacctcccaactgtggacagcaca

SEQ ID NO: 175276 - DNA, 33 bp, Homo sapien
aacacaaagaacctcctaactgtggacagcaca

SEQ ID NO: 175277 - DNA, 33 bp, Homo sapien
caaaataactgacatacgaaaagtgataaggtt

SEQ ID NO: 175278 - DNA, 33 bp, Homo sapien
caaaataactgacatatgaaaagtgataaggtt

SEQ ID NO: 175279 - DNA, 33 bp, Homo sapien
atgattaaaaatgcataaagtcacacatacaaa

SEQ ID NO: 175280 - DNA, 33 bp, Homo sapien
atgattaaaaatgcattaagtcacacatacaaa

SEQ ID NO: 175281 - DNA, 33 bp, Homo sapien
atccacaggccaaaaacgaaagaaatgatgtgt

SEQ ID NO: 175282 - DNA, 33 bp, Homo sapien
atccacaggccaaaaatgaaagaaatgatgtgt

SEQ ID NO: 175283 - DNA, 33 bp, Homo sapien
ttaactcactagaaatcattgatcttacaccac

SEQ ID NO: 175284 - DNA, 33 bp, Homo sapien
ttaactcactagaaattattgatcttacaccac

SEQ ID NO: 175285 - DNA, 33 bp, Homo sapien
tagtccttgcctcccccaactggtgacaatgac

SEQ ID NO: 175286 - DNA, 33 bp, Homo sapien
tagtccttgcctcccctaactggtgacaatgac

SEQ ID NO: 175287 - DNA, 33 bp, Homo sapien
tggtcatagtttgcccacacttgctctagcctt

SEQ ID NO: 175288 - DNA, 33 bp, Homo sapien
tggtcatagtttgcccgcacttgctctagcctt

SEQ ID NO: 175289 - DNA, 33 bp, Homo sapien
gatcaagtcttaatagccggtctccaatgggcc

SEQ ID NO: 175290 - DNA, 33 bp, Homo sapien
gatcaagtcttaatagtcggtctccaatgggcc

SEQ ID NO: 175291 - DNA, 33 bp, Homo sapien
tgggcagggaaagaacaagagtgtcaccagtgt

SEQ ID NO: 175292 - DNA, 33 bp, Homo sapien
tgggcagggaaagaacgagagtgtcaccagtgt

SEQ ID NO: 175293 - DNA, 33 bp, Homo sapien
aatacccttcttcctcagagactacaatgaagt

SEQ ID NO: 175294 - DNA, 33 bp, Homo sapien
aatacccttcttcctcggagactacaatgaagt

SEQ ID NO: 175295 - DNA, 33 bp, Homo sapien
ggttagtaagaaggtgaaaagatttgcaccttt

SEQ ID NO: 175296 - DNA, 33 bp, Homo sapien
ggttagtaagaaggtgtaaagatttgcaccttt

SEQ ID NO: 175297 - DNA, 33 bp, Homo sapien
gtgtttatgtgccatacgtggcagttaggaact

SEQ ID NO: 175298 - DNA, 33 bp, Homo sapien
gtgtttatgtgccatatgtggcagttaggaact

SEQ ID NO: 175299 - DNA, 33 bp, Homo sapien
ttgcgcctgtatgctcacgtagtccctgctact

SEQ ID NO: 175300 - DNA, 33 bp, Homo sapien
ttgcgcctgtatgctcgcgtagtccctgctact

SEQ ID NO: 175301 - DNA, 33 bp, Homo sapien
tgctcactgtctagtaagggaaagagatacgaa

SEQ ID NO: 175302 - DNA, 33 bp, Homo sapien
tgctcactgtctagtacgggaaagagatacgaa

SEQ ID NO: 175303 - DNA, 33 bp, Homo sapien
aaccacctgctcagacacaagaagcaggaccag

SEQ ID NO: 175304 - DNA, 33 bp, Homo sapien
aaccacctgctcagacgcaagaagcaggaccag

SEQ ID NO: 175305 - DNA, 33 bp, Homo sapien
agtgcatactatgtacacgacactattctactg

SEQ ID NO: 175306 - DNA, 33 bp, Homo sapien
agtgcatactatgtacgcgacactattctactg

SEQ ID NO: 175307 - DNA, 33 bp, Homo sapien
atgactagatcacgtaagtcacctaattcctga

SEQ ID NO: 175308 - DNA, 33 bp, Homo sapien
atgactagatcacgtaggtcacctaattcctga

SEQ ID NO: 175309 - DNA, 33 bp, Homo sapien
gaattgccagccatgacagctcacacctgtaat

SEQ ID NO: 175310 - DNA, 33 bp, Homo sapien
gaattgccagccatgatagctcacacctgtaat

SEQ ID NO: 175311 - DNA, 33 bp, Homo sapien
tctctttcttactctaaacattgttttcctcat

SEQ ID NO: 175312 - DNA, 33 bp, Homo sapien
tctctttcttactctagacattgttttcctcat

SEQ ID NO: 175313 - DNA, 33 bp, Homo sapien
gggcatttggaggtcaacaatcagacagagtcc

SEQ ID NO: 175314 - DNA, 33 bp, Homo sapien
gggcatttggaggtcagcaatcagacagagtcc

SEQ ID NO: 175315 - DNA, 33 bp, Homo sapien
cctcatcacctttcacagcgaacaagatacaac

SEQ ID NO: 175316 - DNA, 33 bp, Homo sapien
cctcatcacctttcacggcgaacaagatacaac

SEQ ID NO: 175317 - DNA, 33 bp, Homo sapien
aattgcaactaaataacactacaaaggagaggg

SEQ ID NO: 175318 - DNA, 33 bp, Homo sapien
aattgcaactaaataatactacaaaggagaggg

SEQ ID NO: 175319 - DNA, 33 bp, Homo sapien
agtaagcagataattacagtgttacgagtgcta

SEQ ID NO: 175320 - DNA, 33 bp, Homo sapien
agtaagcagataattatagtgttacgagtgcta

SEQ ID NO: 175321 - DNA, 33 bp, Homo sapien
gcactattctgcaaatcatctgttttatgactg

SEQ ID NO: 175322 - DNA, 33 bp, Homo sapien
gcactattctgcaaatgatctgttttatgactg

SEQ ID NO: 175323 - DNA, 33 bp, Homo sapien
ctgtctctctttccatgaatgttgagtacctac

SEQ ID NO: 175324 - DNA, 33 bp, Homo sapien
ctgtctctctttccattaatgttgagtacctac

SEQ ID NO: 175325 - DNA, 33 bp, Homo sapien
atcaaagtgtattccactgaagtgaattctata

SEQ ID NO: 175326 - DNA, 33 bp, Homo sapien
atcaaagtgtattccattgaagtgaattctata

SEQ ID NO: 175327 - DNA, 33 bp, Homo sapien
ccaaaaaagcaaagataatacccaagtctcact

SEQ ID NO: 175328 - DNA, 33 bp, Homo sapien
ccaaaaaagcaaagatgatacccaagtctcact

SEQ ID NO: 175329 - DNA, 33 bp, Homo sapien
gggtaggcagttaagccacagtctgccctgccc

SEQ ID NO: 175330 - DNA, 33 bp, Homo sapien
gggtaggcagttaagctacagtctgccctgccc

SEQ ID NO: 175331 - DNA, 33 bp, Homo sapien
ctaatttgactcttgccagacatccgtcatatt

SEQ ID NO: 175332 - DNA, 33 bp, Homo sapien
ctaatttgactcttgctagacatccgtcatatt

SEQ ID NO: 175333 - DNA, 33 bp, Homo sapien
actggggataaatctaggaatatggtcgcttcc

SEQ ID NO: 175334 - DNA, 33 bp, Homo sapien
actggggataaatctatgaatatggtcgcttcc

SEQ ID NO: 175335 - DNA, 33 bp, Homo sapien
gttaagcccactggtaaataagtaggaaaagag

SEQ ID NO: 175336 - DNA, 33 bp, Homo sapien
gttaagcccactggtagataagtaggaaaagag

SEQ ID NO: 175337 - DNA, 33 bp, Homo sapien
tccctttaacctgggacgcttagataggcctct

SEQ ID NO: 175338 - DNA, 33 bp, Homo sapien
tccctttaacctgggatgcttagataggcctct

SEQ ID NO: 175339 - DNA, 33 bp, Homo sapien
attcactaaaatatacactgaagaaagtcatac

SEQ ID NO: 175340 - DNA, 33 bp, Homo sapien
attcactaaaatataccctgaagaaagtcatac

SEQ ID NO: 175341 - DNA, 33 bp, Homo sapien
aaacaattttttctcactcaactgaattatttt

SEQ ID NO: 175342 - DNA, 33 bp, Homo sapien
aaacaattttttctcagtcaactgaattatttt

SEQ ID NO: 175343 - DNA, 33 bp, Homo sapien
accaaacttcttcacaatagcacagaagaccat

SEQ ID NO: 175344 - DNA, 33 bp, Homo sapien
accaaacttcttcacagtagcacagaagaccat

SEQ ID NO: 175345 - DNA, 33 bp, Homo sapien
agggaagggagtctcgcaattggttgaaattga

SEQ ID NO: 175346 - DNA, 33 bp, Homo sapien
agggaagggagtctcggaattggttgaaattga

SEQ ID NO: 175347 - DNA, 33 bp, Homo sapien
actcaacaaccaagaaagtgagttgttggcatt

SEQ ID NO: 175348 - DNA, 33 bp, Homo sapien
actcaacaaccaagaaggtgagttgttggcatt

SEQ ID NO: 175349 - DNA, 33 bp, Homo sapien
ttggagctatagtgaaaaataaaatcgagagct

SEQ ID NO: 175350 - DNA, 33 bp, Homo sapien
ttggagctatagtgaataataaaatcgagagct

SEQ ID NO: 175351 - DNA, 33 bp, Homo sapien
tgataacccacattcaacattgtagcttgagca

SEQ ID NO: 175352 - DNA, 33 bp, Homo sapien
tgataacccacattcagcattgtagcttgagca

SEQ ID NO: 175353 - DNA, 33 bp, Homo sapien
ctaacttgtcgtttaaccttgagcaggccacac

SEQ ID NO: 175354 - DNA, 33 bp, Homo sapien
ctaacttgtcgtttaatcttgagcaggccacac

SEQ ID NO: 175355 - DNA, 33 bp, Homo sapien
tttaatccttgcaggaaaaagctaagcctcaag

SEQ ID NO: 175356 - DNA, 33 bp, Homo sapien
tttaatccttgcaggagaaagctaagcctcaag

SEQ ID NO: 175357 - DNA, 33 bp, Homo sapien
ccttgagggccacgccagagaaatctgtactct

SEQ ID NO: 175358 - DNA, 33 bp, Homo sapien
ccttgagggccacgccggagaaatctgtactct

SEQ ID NO: 175359 - DNA, 33 bp, Homo sapien
cagagtcctcagactacggatttctagcaaaat

SEQ ID NO: 175360 - DNA, 33 bp, Homo sapien
cagagtcctcagactagggatttctagcaaaat

SEQ ID NO: 175361 - DNA, 33 bp, Homo sapien
atgctgtctaccagagactcactttagctccaa

SEQ ID NO: 175362 - DNA, 33 bp, Homo sapien
atgctgtctaccagagtctcactttagctccaa

SEQ ID NO: 175363 - DNA, 33 bp, Homo sapien
ttaattgaaaaatataggggaaattgtacaaat

SEQ ID NO: 175364 - DNA, 33 bp, Homo sapien
ttaattgaaaaatatatgggaaattgtacaaat

SEQ ID NO: 175365 - DNA, 33 bp, Homo sapien
cactgagcagatatcaaacaccataccaagtag

SEQ ID NO: 175366 - DNA, 33 bp, Homo sapien
cactgagcagatatcagacaccataccaagtag

SEQ ID NO: 175367 - DNA, 33 bp, Homo sapien
aagttggctaaattaacagtctaggttggaaac

SEQ ID NO: 175368 - DNA, 33 bp, Homo sapien
aagttggctaaattaagagtctaggttggaaac

SEQ ID NO: 175369 - DNA, 33 bp, Homo sapien
gcaaatgtatttacaaatgactcacttcaacat

SEQ ID NO: 175370 - DNA, 33 bp, Homo sapien
gcaaatgtatttacaactgactcacttcaacat

SEQ ID NO: 175371 - DNA, 33 bp, Homo sapien
gagttataccgtgaaccggttagttttccagga

SEQ ID NO: 175372 - DNA, 33 bp, Homo sapien
gagttataccgtgaactggttagttttccagga

SEQ ID NO: 175373 - DNA, 33 bp, Homo sapien
aaggcattatacccaaaaaatgttagcctgtca

SEQ ID NO: 175374 - DNA, 33 bp, Homo sapien
aaggcattatacccaacaaatgttagcctgtca

SEQ ID NO: 175375 - DNA, 33 bp, Homo sapien
gaatatgtcaggctcactcgaggcagcccattt

SEQ ID NO: 175376 - DNA, 33 bp, Homo sapien
gaatatgtcaggctcattcgaggcagcccattt

SEQ ID NO: 175377 - DNA, 33 bp, Homo sapien
tactcaccagacacaacatagactgacttgctg

SEQ ID NO: 175378 - DNA, 33 bp, Homo sapien
tactcaccagacacaatatagactgacttgctg

SEQ ID NO: 175379 - DNA, 33 bp, Homo sapien
catagtcccattcatagcactcatgagatgtgc

SEQ ID NO: 175380 - DNA, 33 bp, Homo sapien
catagtcccattcatatcactcatgagatgtgc

SEQ ID NO: 175381 - DNA, 33 bp, Homo sapien
gaatacttgctggatcaactgaataaagtgcaa

SEQ ID NO: 175382 - DNA, 33 bp, Homo sapien
gaatacttgctggatcgactgaataaagtgcaa

SEQ ID NO: 175383 - DNA, 33 bp, Homo sapien
gttgagacagttacaacgtcacaagaggatagg

SEQ ID NO: 175384 - DNA, 33 bp, Homo sapien
gttgagacagttacaatgtcacaagaggatagg

SEQ ID NO: 175385 - DNA, 33 bp, Homo sapien
taaaccacttttggaaatatgggctgggagttg

SEQ ID NO: 175386 - DNA, 33 bp, Homo sapien
taaaccacttttggaagtatgggctgggagttg

SEQ ID NO: 175387 - DNA, 33 bp, Homo sapien
agacaggaatgaatgaacgacttttttggtttt

SEQ ID NO: 175388 - DNA, 33 bp, Homo sapien
agacaggaatgaatgagcgacttttttggtttt

SEQ ID NO: 175389 - DNA, 33 bp, Homo sapien
ggcagcttgaataactgagacctgctacaggta

SEQ ID NO: 175390 - DNA, 33 bp, Homo sapien
ggcagcttgaataacttagacctgctacaggta

SEQ ID NO: 175391 - DNA, 33 bp, Homo sapien
tcctcatcaccatggacaatattggatggacac

SEQ ID NO: 175392 - DNA, 33 bp, Homo sapien
tcctcatcaccatggataatattggatggacac

SEQ ID NO: 175393 - DNA, 33 bp, Homo sapien
ctggtatcagaatgagaccctgttcctaaaaaa

SEQ ID NO: 175394 - DNA, 33 bp, Homo sapien
ctggtatcagaatgagtccctgttcctaaaaaa

SEQ ID NO: 175395 - DNA, 33 bp, Homo sapien
ttccagtaaggcccgacaggaattttgcaagcc

SEQ ID NO: 175396 - DNA, 33 bp, Homo sapien
ttccagtaaggcccgataggaattttgcaagcc

SEQ ID NO: 175397 - DNA, 33 bp, Homo sapien
catgatacatgaaaaacatggatgaatctcaaa

SEQ ID NO: 175398 - DNA, 33 bp, Homo sapien
catgatacatgaaaaatatggatgaatctcaaa

SEQ ID NO: 175399 - DNA, 33 bp, Homo sapien
aaaacagagagattcaaaagacaaaaaatccag

SEQ ID NO: 175400 - DNA, 33 bp, Homo sapien
aaaacagagagattcagaagacaaaaaatccag

SEQ ID NO: 175401 - DNA, 33 bp, Homo sapien
tctcatccctgctagacagtaacaagtttccct

SEQ ID NO: 175402 - DNA, 33 bp, Homo sapien
tctcatccctgctagatagtaacaagtttccct

SEQ ID NO: 175403 - DNA, 33 bp, Homo sapien
aagttccagcatttgagagcatagtagggaagt

SEQ ID NO: 175404 - DNA, 33 bp, Homo sapien
aagttccagcatttgatagcatagtagggaagt

SEQ ID NO: 175405 - DNA, 33 bp, Homo sapien
aatgatgatgtatccaataggtagttttctgag

SEQ ID NO: 175406 - DNA, 33 bp, Homo sapien
aatgatgatgtatccagtaggtagttttctgag

SEQ ID NO: 175407 - DNA, 33 bp, Homo sapien
ctattgaagccagtataaataggaaatccacta

SEQ ID NO: 175408 - DNA, 33 bp, Homo sapien
ctattgaagccagtatgaataggaaatccacta

SEQ ID NO: 175409 - DNA, 33 bp, Homo sapien
ggtcctggggctctaaaggtagtaggggctcta

SEQ ID NO: 175410 - DNA, 33 bp, Homo sapien
ggtcctggggctctaacggtagtaggggctcta

SEQ ID NO: 175411 - DNA, 33 bp, Homo sapien
ggtccaattagcatgacgtcaccaatatagtgg

SEQ ID NO: 175412 - DNA, 33 bp, Homo sapien
ggtccaattagcatgatgtcaccaatatagtgg

SEQ ID NO: 175413 - DNA, 33 bp, Homo sapien
atggactgatgtaacactcattcattcattgtc

SEQ ID NO: 175414 - DNA, 33 bp, Homo sapien
atggactgatgtaacattcattcattcattgtc

SEQ ID NO: 175415 - DNA, 33 bp, Homo sapien
aaggtcatgctggaacagtgttaaataaaaatc

SEQ ID NO: 175416 - DNA, 33 bp, Homo sapien
aaggtcatgctggaacggtgttaaataaaaatc

SEQ ID NO: 175417 - DNA, 33 bp, Homo sapien
gaaaatcccacattgaaattattttgagaaagt

SEQ ID NO: 175418 - DNA, 33 bp, Homo sapien
gaaaatcccacattgacattattttgagaaagt

SEQ ID NO: 175419 - DNA, 33 bp, Homo sapien
tgagttaacccaaggcaaacagatttccttact

SEQ ID NO: 175420 - DNA, 33 bp, Homo sapien
tgagttaacccaaggcgaacagatttccttact

SEQ ID NO: 175421 - DNA, 33 bp, Homo sapien
atgcacagatgtgagacatgctcttggtcatgg

SEQ ID NO: 175422 - DNA, 33 bp, Homo sapien
atgcacagatgtgagagatgctcttggtcatgg

SEQ ID NO: 175423 - DNA, 33 bp, Homo sapien
gcacacagaatgaaacagagaaaaagagagaag

SEQ ID NO: 175424 - DNA, 33 bp, Homo sapien
gcacacagaatgaaacggagaaaaagagagaag

SEQ ID NO: 175425 - DNA, 33 bp, Homo sapien
tacacaacaaatagaacttccacaagggccagg

SEQ ID NO: 175426 - DNA, 33 bp, Homo sapien
tacacaacaaatagaatttccacaagggccagg

SEQ ID NO: 175427 - DNA, 33 bp, Homo sapien
tcatggagcacattgcaatgcccatctacaagt

SEQ ID NO: 175428 - DNA, 33 bp, Homo sapien
tcatggagcacattgcgatgcccatctacaagt

SEQ ID NO: 175429 - DNA, 33 bp, Homo sapien
agaatgccgggggcaacggatgtgacagtagag

SEQ ID NO: 175430 - DNA, 33 bp, Homo sapien
agaatgccgggggcaatggatgtgacagtagag

SEQ ID NO: 175431 - DNA, 33 bp, Homo sapien
catgtatatggtagtcactgttcatttggacat

SEQ ID NO: 175432 - DNA, 33 bp, Homo sapien
catgtatatggtagtcgctgttcatttggacat

SEQ ID NO: 175433 - DNA, 33 bp, Homo sapien
gctatcagagcagaaccaactccttccacggga

SEQ ID NO: 175434 - DNA, 33 bp, Homo sapien
gctatcagagcagaactaactccttccacggga

SEQ ID NO: 175435 - DNA, 33 bp, Homo sapien
ttccagagacactgagccaggttccgtggtggg

SEQ ID NO: 175436 - DNA, 33 bp, Homo sapien
ttccagagacactgagtcaggttccgtggtggg

SEQ ID NO: 175437 - DNA, 33 bp, Homo sapien
agaccagccggggttacacagaaagtcctgccc

SEQ ID NO: 175438 - DNA, 33 bp, Homo sapien
agaccagccggggttatacagaaagtcctgccc

SEQ ID NO: 175439 - DNA, 33 bp, Homo sapien
aataaaaatgctcaaactgcaggccatattaat

SEQ ID NO: 175440 - DNA, 33 bp, Homo sapien
aataaaaatgctcaaattgcaggccatattaat

SEQ ID NO: 175441 - DNA, 33 bp, Homo sapien
caggagaggaggaggacgctgagtgtcccgctg

SEQ ID NO: 175442 - DNA, 33 bp, Homo sapien
caggagaggaggaggatgctgagtgtcccgctg

SEQ ID NO: 175443 - DNA, 33 bp, Homo sapien
ggccatcatttcctgaaggatgtaaactctctt

SEQ ID NO: 175444 - DNA, 33 bp, Homo sapien
ggccatcatttcctgagggatgtaaactctctt

SEQ ID NO: 175445 - DNA, 33 bp, Homo sapien
gacgaatgaatgaatgaagtgatctcccttctc

SEQ ID NO: 175446 - DNA, 33 bp, Homo sapien
gacgaatgaatgaatggagtgatctcccttctc

SEQ ID NO: 175447 - DNA, 33 bp, Homo sapien
ttacagctcagcaaacacctaccaacacctatg

SEQ ID NO: 175448 - DNA, 33 bp, Homo sapien
ttacagctcagcaaacgcctaccaacacctatg

SEQ ID NO: 175449 - DNA, 33 bp, Homo sapien
ctgggatttgctttaaaatatttcagcgaagca

SEQ ID NO: 175450 - DNA, 33 bp, Homo sapien
ctgggatttgctttaacatatttcagcgaagca

SEQ ID NO: 175451 - DNA, 33 bp, Homo sapien
gaggcactccatgataacagatgtgtacagtgg

SEQ ID NO: 175452 - DNA, 33 bp, Homo sapien
gaggcactccatgatagcagatgtgtacagtgg

SEQ ID NO: 175453 - DNA, 33 bp, Homo sapien
gctgcatgactttggacgaatgacctcaggtcc

SEQ ID NO: 175454 - DNA, 33 bp, Homo sapien
gctgcatgactttggatgaatgacctcaggtcc

SEQ ID NO: 175455 - DNA, 33 bp, Homo sapien
cagagacaccatcagacagcaagagagattcgg

SEQ ID NO: 175456 - DNA, 33 bp, Homo sapien
cagagacaccatcagagagcaagagagattcgg

SEQ ID NO: 175457 - DNA, 33 bp, Homo sapien
gtccacagcctttgggcagcccgcaacaggccc

SEQ ID NO: 175458 - DNA, 33 bp, Homo sapien
gtccacagcctttgggtagcccgcaacaggccc

SEQ ID NO: 175459 - DNA, 33 bp, Homo sapien
tccagggttataaatcagagagaatgagacgct

SEQ ID NO: 175460 - DNA, 33 bp, Homo sapien
tccagggttataaatcggagagaatgagacgct

SEQ ID NO: 175461 - DNA, 33 bp, Homo sapien
ggtaggggtgacatccaaacaggagcctcaggg

SEQ ID NO: 175462 - DNA, 33 bp, Homo sapien
ggtaggggtgacatcccaacaggagcctcaggg

SEQ ID NO: 175463 - DNA, 33 bp, Homo sapien
tggttgaggtgagaaaggtattttatggtaaag

SEQ ID NO: 175464 - DNA, 33 bp, Homo sapien
tggttgaggtgagaaatgtattttatggtaaag

SEQ ID NO: 175465 - DNA, 33 bp, Homo sapien
gcttctgggcagccaacgtgccccccagtgagg

SEQ ID NO: 175466 - DNA, 33 bp, Homo sapien
gcttctgggcagccaatgtgccccccagtgagg

SEQ ID NO: 175467 - DNA, 33 bp, Homo sapien
tccaggttaactgggcactgctgtatggagagt

SEQ ID NO: 175468 - DNA, 33 bp, Homo sapien
tccaggttaactgggcgctgctgtatggagagt

SEQ ID NO: 175469 - DNA, 33 bp, Homo sapien
acactcagctttcccacaggccagccctgctgt

SEQ ID NO: 175470 - DNA, 33 bp, Homo sapien
acactcagctttcccataggccagccctgctgt

SEQ ID NO: 175471 - DNA, 33 bp, Homo sapien
tctactcagctcttaaatgccgcagacatgagc

SEQ ID NO: 175472 - DNA, 33 bp, Homo sapien
tctactcagctcttaagtgccgcagacatgagc

SEQ ID NO: 175473 - DNA, 33 bp, Homo sapien
aagggacatgaaagaccaagggacagtaggcat

SEQ ID NO: 175474 - DNA, 33 bp, Homo sapien
aagggacatgaaagactaagggacagtaggcat

SEQ ID NO: 175475 - DNA, 33 bp, Homo sapien
ccttagccctaccaccagaagacacggtctact

SEQ ID NO: 175476 - DNA, 33 bp, Homo sapien
ccttagccctaccaccggaagacacggtctact

SEQ ID NO: 175477 - DNA, 33 bp, Homo sapien
ggttgttatgtcctgcaagtcagtcccacccag

SEQ ID NO: 175478 - DNA, 33 bp, Homo sapien
ggttgttatgtcctgccagtcagtcccacccag

SEQ ID NO: 175479 - DNA, 33 bp, Homo sapien
aattgtttagggtgacacaaacaatattgcagt

SEQ ID NO: 175480 - DNA, 33 bp, Homo sapien
aattgtttagggtgacgcaaacaatattgcagt

SEQ ID NO: 175481 - DNA, 33 bp, Homo sapien
caacagccccaacctcaataaccattaccattg

SEQ ID NO: 175482 - DNA, 33 bp, Homo sapien
caacagccccaacctccataaccattaccattg

SEQ ID NO: 175483 - DNA, 33 bp, Homo sapien
actggagttacctgaagactcagctgggcaggt

SEQ ID NO: 175484 - DNA, 33 bp, Homo sapien
actggagttacctgaatactcagctgggcaggt

SEQ ID NO: 175485 - DNA, 33 bp, Homo sapien
ttgatctagcaattccacttttatgaatacatc

SEQ ID NO: 175486 - DNA, 33 bp, Homo sapien
ttgatctagcaattccgcttttatgaatacatc

SEQ ID NO: 175487 - DNA, 33 bp, Homo sapien
ttggaaagcagctagaacaatgcagaagcatat

SEQ ID NO: 175488 - DNA, 33 bp, Homo sapien
ttggaaagcagctagagcaatgcagaagcatat

SEQ ID NO: 175489 - DNA, 33 bp, Homo sapien
cactaaatttctgatgcatgatctttccctgtt

SEQ ID NO: 175490 - DNA, 33 bp, Homo sapien
cactaaatttctgatgtatgatctttccctgtt

SEQ ID NO: 175491 - DNA, 33 bp, Homo sapien
ggcttgtagttggccaccttcttctggtatctt

SEQ ID NO: 175492 - DNA, 33 bp, Homo sapien
ggcttgtagttggccatcttcttctggtatctt

SEQ ID NO: 175493 - DNA, 33 bp, Homo sapien
ttttacctttaaaatacgatggtataaacagag

SEQ ID NO: 175494 - DNA, 33 bp, Homo sapien
ttttacctttaaaatatgatggtataaacagag

SEQ ID NO: 175495 - DNA, 33 bp, Homo sapien
tgacttatcttttgcaaactttttttgatcaaa

SEQ ID NO: 175496 - DNA, 33 bp, Homo sapien
tgacttatcttttgcagactttttttgatcaaa

SEQ ID NO: 175497 - DNA, 33 bp, Homo sapien
gtccatgaacacatcaagtgaacaaaagcactg

SEQ ID NO: 175498 - DNA, 33 bp, Homo sapien
gtccatgaacacatcaggtgaacaaaagcactg

SEQ ID NO: 175499 - DNA, 33 bp, Homo sapien
gagtatgtttataagcagagaccttagagatta

SEQ ID NO: 175500 - DNA, 33 bp, Homo sapien
gagtatgtttataagcggagaccttagagatta

SEQ ID NO: 175501 - DNA, 33 bp, Homo sapien
tgttgaaaaattatcactaaccttacaaatttg

SEQ ID NO: 175502 - DNA, 33 bp, Homo sapien
tgttgaaaaattatcattaaccttacaaatttg

SEQ ID NO: 175503 - DNA, 33 bp, Homo sapien
tgcaaatcaattgtcaacctatggattttattt

SEQ ID NO: 175504 - DNA, 33 bp, Homo sapien
tgcaaatcaattgtcaccctatggattttattt

SEQ ID NO: 175505 - DNA, 33 bp, Homo sapien
acctcacaaacgctcaatctttttagtcaatca

SEQ ID NO: 175506 - DNA, 33 bp, Homo sapien
acctcacaaacgctcagtctttttagtcaatca

SEQ ID NO: 175507 - DNA, 33 bp, Homo sapien
aggatgaaagaaagcaaataccacttccagata

SEQ ID NO: 175508 - DNA, 33 bp, Homo sapien
aggatgaaagaaagcatataccacttccagata

SEQ ID NO: 175509 - DNA, 33 bp, Homo sapien
gaggtgtgttaaaatcccctactatgatgacag

SEQ ID NO: 175510 - DNA, 33 bp, Homo sapien
gaggtgtgttaaaatctcctactatgatgacag

SEQ ID NO: 175511 - DNA, 33 bp, Homo sapien
gtgtacccaatgctgaacttaaaggttttgatc

SEQ ID NO: 175512 - DNA, 33 bp, Homo sapien
gtgtacccaatgctgatcttaaaggttttgatc

SEQ ID NO: 175513 - DNA, 33 bp, Homo sapien
ataacctcacaccttaacatcaactcccaagag

SEQ ID NO: 175514 - DNA, 33 bp, Homo sapien
ataacctcacaccttagcatcaactcccaagag

SEQ ID NO: 175515 - DNA, 33 bp, Homo sapien
ggagggcctcgaatgccaggccaaggagccaga

SEQ ID NO: 175516 - DNA, 33 bp, Homo sapien
ggagggcctcgaatgctaggccaaggagccaga

SEQ ID NO: 175517 - DNA, 33 bp, Homo sapien
taaataaaaatacaaaagcaaaggtgctcaagt

SEQ ID NO: 175518 - DNA, 33 bp, Homo sapien
taaataaaaatacaaaggcaaaggtgctcaagt

SEQ ID NO: 175519 - DNA, 33 bp, Homo sapien
tagaatatgcaacaggccaggggcaagaaatga

SEQ ID NO: 175520 - DNA, 33 bp, Homo sapien
tagaatatgcaacaggtcaggggcaagaaatga

SEQ ID NO: 175521 - DNA, 33 bp, Homo sapien
agtgattctccccatccgaccactgaagaaccc

SEQ ID NO: 175522 - DNA, 33 bp, Homo sapien
agtgattctccccatctgaccactgaagaaccc

SEQ ID NO: 175523 - DNA, 33 bp, Homo sapien
gttcttgcctcttgaagctggaggcatttggct

SEQ ID NO: 175524 - DNA, 33 bp, Homo sapien
gttcttgcctcttgaatctggaggcatttggct

SEQ ID NO: 175525 - DNA, 33 bp, Homo sapien
tcaaggtctagtgttccaattattgtcagtgtg

SEQ ID NO: 175526 - DNA, 33 bp, Homo sapien
tcaaggtctagtgttctaattattgtcagtgtg

SEQ ID NO: 175527 - DNA, 33 bp, Homo sapien
cacgaatcctaccatacattgttgagccatgtt

SEQ ID NO: 175528 - DNA, 33 bp, Homo sapien
cacgaatcctaccatatattgttgagccatgtt

SEQ ID NO: 175529 - DNA, 33 bp, Homo sapien
tggttgctccaggtcaagtcaccaaagctacct

SEQ ID NO: 175530 - DNA, 33 bp, Homo sapien
tggttgctccaggtcaggtcaccaaagctacct

SEQ ID NO: 175531 - DNA, 33 bp, Homo sapien
caaagcaattgtaaaacgtgggggaggaaatta

SEQ ID NO: 175532 - DNA, 33 bp, Homo sapien
caaagcaattgtaaaatgtgggggaggaaatta

SEQ ID NO: 175533 - DNA, 33 bp, Homo sapien
gttcatccaccacacccgagatgcctgtaattt

SEQ ID NO: 175534 - DNA, 33 bp, Homo sapien
gttcatccaccacacctgagatgcctgtaattt

SEQ ID NO: 175535 - DNA, 33 bp, Homo sapien
gtgaaatgcctgttcacgtctttcaatcatttt

SEQ ID NO: 175536 - DNA, 33 bp, Homo sapien
gtgaaatgcctgttcatgtctttcaatcatttt

SEQ ID NO: 175537 - DNA, 33 bp, Homo sapien
tgcaagcttgaagtggaccaactctttttagga

SEQ ID NO: 175538 - DNA, 33 bp, Homo sapien
tgcaagcttgaagtgggccaactctttttagga

SEQ ID NO: 175539 - DNA, 33 bp, Homo sapien
caaactgtcccagatgccacgggagatttgtgg

SEQ ID NO: 175540 - DNA, 33 bp, Homo sapien
caaactgtcccagatgtcacgggagatttgtgg

SEQ ID NO: 175541 - DNA, 33 bp, Homo sapien
gctcattgctgccgcaagaaaccattaacctgg

SEQ ID NO: 175542 - DNA, 33 bp, Homo sapien
gctcattgctgccgcaggaaaccattaacctgg

SEQ ID NO: 175543 - DNA, 33 bp, Homo sapien
acaattatttgatcaccaatccttcctactcat

SEQ ID NO: 175544 - DNA, 33 bp, Homo sapien
acaattatttgatcactaatccttcctactcat

SEQ ID NO: 175545 - DNA, 33 bp, Homo sapien
gctccccagaaaacccagagttcttcaaatccc

SEQ ID NO: 175546 - DNA, 33 bp, Homo sapien
gctccccagaaaacccggagttcttcaaatccc

SEQ ID NO: 175547 - DNA, 33 bp, Homo sapien
gtggagtttatgttcaatcatgagagagagaca

SEQ ID NO: 175548 - DNA, 33 bp, Homo sapien
gtggagtttatgttcagtcatgagagagagaca

SEQ ID NO: 175549 - DNA, 33 bp, Homo sapien
tgggcggatcctgaagacactaactgtggccat

SEQ ID NO: 175550 - DNA, 33 bp, Homo sapien
tgggcggatcctgaaggcactaactgtggccat

SEQ ID NO: 175551 - DNA, 33 bp, Homo sapien
ttccatctctgtaaacaaacggttgactcggtc

SEQ ID NO: 175552 - DNA, 33 bp, Homo sapien
ttccatctctgtaaacgaacggttgactcggtc

SEQ ID NO: 175553 - DNA, 33 bp, Homo sapien
tagccctggtccatacaggctcccaactgctgg

SEQ ID NO: 175554 - DNA, 33 bp, Homo sapien
tagccctggtccatacgggctcccaactgctgg

SEQ ID NO: 175555 - DNA, 33 bp, Homo sapien
gtcttgtgtgctaccagtcccctttgctgcttc

SEQ ID NO: 175556 - DNA, 33 bp, Homo sapien
gtcttgtgtgctaccattcccctttgctgcttc

SEQ ID NO: 175557 - DNA, 33 bp, Homo sapien
tcagggtctctgaggcaatatctggatttgaca

SEQ ID NO: 175558 - DNA, 33 bp, Homo sapien
tcagggtctctgaggcgatatctggatttgaca

SEQ ID NO: 175559 - DNA, 33 bp, Homo sapien
gtccaaagcaaaatccaccctttctttctgtgc

SEQ ID NO: 175560 - DNA, 33 bp, Homo sapien
gtccaaagcaaaatccgccctttctttctgtgc

SEQ ID NO: 175561 - DNA, 33 bp, Homo sapien
cacaggcaaagcttgaagagcatcgcatatagg

SEQ ID NO: 175562 - DNA, 33 bp, Homo sapien
cacaggcaaagcttgaggagcatcgcatatagg

SEQ ID NO: 175563 - DNA, 33 bp, Homo sapien
tacttgtcccccgagaatctcaatgacctggcc

SEQ ID NO: 175564 - DNA, 33 bp, Homo sapien
tacttgtcccccgagagtctcaatgacctggcc

SEQ ID NO: 175565 - DNA, 33 bp, Homo sapien
ctagagtttcggccttcaaaactcagggtcttt

SEQ ID NO: 175566 - DNA, 33 bp, Homo sapien
ctagagtttcggcctttaaaactcagggtcttt

SEQ ID NO: 175567 - DNA, 33 bp, Homo sapien
agcctgagccaaacccagggtatactctcctga

SEQ ID NO: 175568 - DNA, 33 bp, Homo sapien
agcctgagccaaacccggggtatactctcctga

SEQ ID NO: 175569 - DNA, 33 bp, Homo sapien
tgagttactgcaagcaaagggttgattggagcc

SEQ ID NO: 175570 - DNA, 33 bp, Homo sapien
tgagttactgcaagcacagggttgattggagcc

SEQ ID NO: 175571 - DNA, 33 bp, Homo sapien
tcacacagcctggcaacggcagaagtgggactt

SEQ ID NO: 175572 - DNA, 33 bp, Homo sapien
tcacacagcctggcaatggcagaagtgggactt

SEQ ID NO: 175573 - DNA, 33 bp, Homo sapien
cttttctgctccagaacatccctcctgatgtcc

SEQ ID NO: 175574 - DNA, 33 bp, Homo sapien
cttttctgctccagaatatccctcctgatgtcc

SEQ ID NO: 175575 - DNA, 33 bp, Homo sapien
gggccagttgggacccacccgcagagctgaaga

SEQ ID NO: 175576 - DNA, 33 bp, Homo sapien
gggccagttgggacccgcccgcagagctgaaga

SEQ ID NO: 175577 - DNA, 33 bp, Homo sapien
gcatgctggtatccgccaggcttcccagaaccc

SEQ ID NO: 175578 - DNA, 33 bp, Homo sapien
gcatgctggtatccgctaggcttcccagaaccc

SEQ ID NO: 175579 - DNA, 33 bp, Homo sapien
ctcatgtcatccaccacaccacggtcgtccagc

SEQ ID NO: 175580 - DNA, 33 bp, Homo sapien
ctcatgtcatccaccataccacggtcgtccagc

SEQ ID NO: 175581 - DNA, 33 bp, Homo sapien
aactaactggaagtgcaactatgagctgagtga

SEQ ID NO: 175582 - DNA, 33 bp, Homo sapien
aactaactggaagtgcgactatgagctgagtga

SEQ ID NO: 175583 - DNA, 33 bp, Homo sapien
ggtgtagagaaacctaacagagctgaaagcatc

SEQ ID NO: 175584 - DNA, 33 bp, Homo sapien
ggtgtagagaaacctagcagagctgaaagcatc

SEQ ID NO: 175585 - DNA, 33 bp, Homo sapien
tcaattcctctcagggaatatcctcatttggac

SEQ ID NO: 175586 - DNA, 33 bp, Homo sapien
tcaattcctctcaggggatatcctcatttggac

SEQ ID NO: 175587 - DNA, 33 bp, Homo sapien
gaacaatgacatgaaaatagaataatcaaatgt

SEQ ID NO: 175588 - DNA, 33 bp, Homo sapien
gaacaatgacatgaaagtagaataatcaaatgt

SEQ ID NO: 175589 - DNA, 33 bp, Homo sapien
ccagcaatatttgagaaaactggaaatgtaatt

SEQ ID NO: 175590 - DNA, 33 bp, Homo sapien
ccagcaatatttgagagaactggaaatgtaatt

SEQ ID NO: 175591 - DNA, 33 bp, Homo sapien
tatacaatcaacaccccatagaaggttagccat

SEQ ID NO: 175592 - DNA, 33 bp, Homo sapien
tatacaatcaacaccctatagaaggttagccat

SEQ ID NO: 175593 - DNA, 33 bp, Homo sapien
ctaaaaggactactgcaaccagagtgggctgat

SEQ ID NO: 175594 - DNA, 33 bp, Homo sapien
ctaaaaggactactgctaccagagtgggctgat

SEQ ID NO: 175595 - DNA, 33 bp, Homo sapien
tttctggtttctctcaatcatctttcctagctc

SEQ ID NO: 175596 - DNA, 33 bp, Homo sapien
tttctggtttctctcactcatctttcctagctc

SEQ ID NO: 175597 - DNA, 33 bp, Homo sapien
tttgtttttagtaagaccattcgtattttattc

SEQ ID NO: 175598 - DNA, 33 bp, Homo sapien
tttgtttttagtaagatcattcgtattttattc

SEQ ID NO: 175599 - DNA, 33 bp, Homo sapien
acttaagagagatgacactaagacccaaagagg

SEQ ID NO: 175600 - DNA, 33 bp, Homo sapien
acttaagagagatgacgctaagacccaaagagg

SEQ ID NO: 175601 - DNA, 33 bp, Homo sapien
aggctagaaatgcaaaagagagaactatgttgt

SEQ ID NO: 175602 - DNA, 33 bp, Homo sapien
aggctagaaatgcaaacgagagaactatgttgt

SEQ ID NO: 175603 - DNA, 33 bp, Homo sapien
tacagacatcttcataaagttgataaactgaat

SEQ ID NO: 175604 - DNA, 33 bp, Homo sapien
tacagacatcttcatagagttgataaactgaat

SEQ ID NO: 175605 - DNA, 33 bp, Homo sapien
gtgactaccagagacactctaatggtcccccta

SEQ ID NO: 175606 - DNA, 33 bp, Homo sapien
gtgactaccagagacattctaatggtcccccta

SEQ ID NO: 175607 - DNA, 33 bp, Homo sapien
tacttaattggatgccacaagagcctggtgaaa

SEQ ID NO: 175608 - DNA, 33 bp, Homo sapien
tacttaattggatgccgcaagagcctggtgaaa

SEQ ID NO: 175609 - DNA, 33 bp, Homo sapien
gaccttgtacagaataagcatcagtaaagacat

SEQ ID NO: 175610 - DNA, 33 bp, Homo sapien
gaccttgtacagaataggcatcagtaaagacat

SEQ ID NO: 175611 - DNA, 33 bp, Homo sapien
gctgtctctcaccagaactaatgccggagcttc

SEQ ID NO: 175612 - DNA, 33 bp, Homo sapien
gctgtctctcaccagagctaatgccggagcttc

SEQ ID NO: 175613 - DNA, 33 bp, Homo sapien
tgtctagtatacaataagggttcaataaatgcc

SEQ ID NO: 175614 - DNA, 33 bp, Homo sapien
tgtctagtatacaataggggttcaataaatgcc

SEQ ID NO: 175615 - DNA, 33 bp, Homo sapien
tactctcctggggaatcaatgggagagagttaa

SEQ ID NO: 175616 - DNA, 33 bp, Homo sapien
tactctcctggggaattaatgggagagagttaa

SEQ ID NO: 175617 - DNA, 33 bp, Homo sapien
ccgcacaaagggccgaagcgcgagggtagctcg

SEQ ID NO: 175618 - DNA, 33 bp, Homo sapien
ccgcacaaagggccgaggcgcgagggtagctcg

SEQ ID NO: 175619 - DNA, 33 bp, Homo sapien
cccccagtaaagcaggaacaggaataggaattg

SEQ ID NO: 175620 - DNA, 33 bp, Homo sapien
cccccagtaaagcagggacaggaataggaattg

SEQ ID NO: 175621 - DNA, 33 bp, Homo sapien
ccagaaggcccaatgaaaagggggcacatggta

SEQ ID NO: 175622 - DNA, 33 bp, Homo sapien
ccagaaggcccaatgagaagggggcacatggta

SEQ ID NO: 175623 - DNA, 33 bp, Homo sapien
gttcctggtctttagcagcctctgaggtgagcc

SEQ ID NO: 175624 - DNA, 33 bp, Homo sapien
gttcctggtctttagcggcctctgaggtgagcc

SEQ ID NO: 175625 - DNA, 33 bp, Homo sapien
gggaggtgacttgtccaaagcttatactcttaa

SEQ ID NO: 175626 - DNA, 33 bp, Homo sapien
gggaggtgacttgtccgaagcttatactcttaa

SEQ ID NO: 175627 - DNA, 33 bp, Homo sapien
tgggctagaggacagaagggagtcgccctgtcc

SEQ ID NO: 175628 - DNA, 33 bp, Homo sapien
tgggctagaggacagatgggagtcgccctgtcc

SEQ ID NO: 175629 - DNA, 33 bp, Homo sapien
tagaagataaaatcacaagacctggtggctgat

SEQ ID NO: 175630 - DNA, 33 bp, Homo sapien
tagaagataaaatcacgagacctggtggctgat

SEQ ID NO: 175631 - DNA, 33 bp, Homo sapien
gtgacagtcacagctacaaagagagggccgagc

SEQ ID NO: 175632 - DNA, 33 bp, Homo sapien
gtgacagtcacagctataaagagagggccgagc

SEQ ID NO: 175633 - DNA, 33 bp, Homo sapien
tggtgacagcatattaactgagtcatttggggc

SEQ ID NO: 175634 - DNA, 33 bp, Homo sapien
tggtgacagcatattagctgagtcatttggggc

SEQ ID NO: 175635 - DNA, 33 bp, Homo sapien
cacagaggtttgcagacatcttaagtggtcatc

SEQ ID NO: 175636 - DNA, 33 bp, Homo sapien
cacagaggtttgcagatatcttaagtggtcatc

SEQ ID NO: 175637 - DNA, 33 bp, Homo sapien
ttccagttgatctagggactccaatgtgcatct

SEQ ID NO: 175638 - DNA, 33 bp, Homo sapien
ttccagttgatctaggtactccaatgtgcatct

SEQ ID NO: 175639 - DNA, 33 bp, Homo sapien
aaagcctgtctgataaagtgatatttgagcaaa

SEQ ID NO: 175640 - DNA, 33 bp, Homo sapien
aaagcctgtctgataaggtgatatttgagcaaa

SEQ ID NO: 175641 - DNA, 33 bp, Homo sapien
gacagttctttacataaaaaaagtcaacagata

SEQ ID NO: 175642 - DNA, 33 bp, Homo sapien
gacagttctttacatacaaaaagtcaacagata

SEQ ID NO: 175643 - DNA, 33 bp, Homo sapien
caacgatgtattgttcactttgctgattagttc

SEQ ID NO: 175644 - DNA, 33 bp, Homo sapien
caacgatgtattgttcgctttgctgattagttc

SEQ ID NO: 175645 - DNA, 33 bp, Homo sapien
ttatcaagccattttccacaagataggtcagcc

SEQ ID NO: 175646 - DNA, 33 bp, Homo sapien
ttatcaagccattttctacaagataggtcagcc

SEQ ID NO: 175647 - DNA, 33 bp, Homo sapien
ctatattacaggaagaaaagcctgaaaacaagt

SEQ ID NO: 175648 - DNA, 33 bp, Homo sapien
ctatattacaggaagagaagcctgaaaacaagt

SEQ ID NO: 175649 - DNA, 33 bp, Homo sapien
attttctcttccatgaaaaaaacattcacttga

SEQ ID NO: 175650 - DNA, 33 bp, Homo sapien
attttctcttccatgacaaaaacattcacttga

SEQ ID NO: 175651 - DNA, 33 bp, Homo sapien
tgacacaatcaagactcacagtagcctcaacct

SEQ ID NO: 175652 - DNA, 33 bp, Homo sapien
tgacacaatcaagactgacagtagcctcaacct

SEQ ID NO: 175653 - DNA, 33 bp, Homo sapien
cacatcatataggcacggggaaactccacaata

SEQ ID NO: 175654 - DNA, 33 bp, Homo sapien
cacatcatataggcactgggaaactccacaata

SEQ ID NO: 175655 - DNA, 33 bp, Homo sapien
gcgcatactcagcctaatactgtttttttcact

SEQ ID NO: 175656 - DNA, 33 bp, Homo sapien
gcgcatactcagcctactactgtttttttcact

SEQ ID NO: 175657 - DNA, 33 bp, Homo sapien
gggctttctcccgttcccttaacagatttaaca

SEQ ID NO: 175658 - DNA, 33 bp, Homo sapien
gggctttctcccgttctcttaacagatttaaca

SEQ ID NO: 175659 - DNA, 33 bp, Homo sapien
cagtgcctatgttccacgcctgtgaagtagata

SEQ ID NO: 175660 - DNA, 33 bp, Homo sapien
cagtgcctatgttccatgcctgtgaagtagata

SEQ ID NO: 175661 - DNA, 33 bp, Homo sapien
taggaaattaggaggcagaaagataaaacttaa

SEQ ID NO: 175662 - DNA, 33 bp, Homo sapien
taggaaattaggaggcggaaagataaaacttaa

SEQ ID NO: 175663 - DNA, 33 bp, Homo sapien
tagggtaggcagcaacaattatactgcacaatc

SEQ ID NO: 175664 - DNA, 33 bp, Homo sapien
tagggtaggcagcaaccattatactgcacaatc

SEQ ID NO: 175665 - DNA, 33 bp, Homo sapien
tgtcccagggtggctaatacagtagtgctggat

SEQ ID NO: 175666 - DNA, 33 bp, Homo sapien
tgtcccagggtggctagtacagtagtgctggat

SEQ ID NO: 175667 - DNA, 33 bp, Homo sapien
atcctgacttatgaaaccatagagttattttgc

SEQ ID NO: 175668 - DNA, 33 bp, Homo sapien
atcctgacttatgaaatcatagagttattttgc

SEQ ID NO: 175669 - DNA, 33 bp, Homo sapien
aactaccctataaacactgcaactaggccaggc

SEQ ID NO: 175670 - DNA, 33 bp, Homo sapien
aactaccctataaacattgcaactaggccaggc

SEQ ID NO: 175671 - DNA, 33 bp, Homo sapien
aaagtgtaattttgtacgtatgaatttcacctc

SEQ ID NO: 175672 - DNA, 33 bp, Homo sapien
aaagtgtaattttgtatgtatgaatttcacctc

SEQ ID NO: 175673 - DNA, 33 bp, Homo sapien
taataatccccgtggaataactttcattctcag

SEQ ID NO: 175674 - DNA, 33 bp, Homo sapien
taataatccccgtggagtaactttcattctcag

SEQ ID NO: 175675 - DNA, 33 bp, Homo sapien
catctagtaaaacacactgcagtgcacctttgt

SEQ ID NO: 175676 - DNA, 33 bp, Homo sapien
catctagtaaaacacattgcagtgcacctttgt

SEQ ID NO: 175677 - DNA, 33 bp, Homo sapien
gagagaagcataaaagacctctttggcaggaag

SEQ ID NO: 175678 - DNA, 33 bp, Homo sapien
gagagaagcataaaaggcctctttggcaggaag

SEQ ID NO: 175679 - DNA, 33 bp, Homo sapien
tagaaattatcatcaagaaagtcccagttgaag

SEQ ID NO: 175680 - DNA, 33 bp, Homo sapien
tagaaattatcatcaataaagtcccagttgaag

SEQ ID NO: 175681 - DNA, 33 bp, Homo sapien
tgacaacaaatgtactcagcttggttttggact

SEQ ID NO: 175682 - DNA, 33 bp, Homo sapien
tgacaacaaatgtacttagcttggttttggact

SEQ ID NO: 175683 - DNA, 33 bp, Homo sapien
cttttcaaattgtaaccgaggtggtaccattct

SEQ ID NO: 175684 - DNA, 33 bp, Homo sapien
cttttcaaattgtaactgaggtggtaccattct

SEQ ID NO: 175685 - DNA, 33 bp, Homo sapien
ggtattataggtatcacaagatctaagtcttag

SEQ ID NO: 175686 - DNA, 33 bp, Homo sapien
ggtattataggtatcagaagatctaagtcttag

SEQ ID NO: 175687 - DNA, 33 bp, Homo sapien
tgggaaaaacctgcaacaattcacatcaaacac

SEQ ID NO: 175688 - DNA, 33 bp, Homo sapien
tgggaaaaacctgcaagaattcacatcaaacac

SEQ ID NO: 175689 - DNA, 33 bp, Homo sapien
aagccttttggagaaaccacacttcatacctcc

SEQ ID NO: 175690 - DNA, 33 bp, Homo sapien
aagccttttggagaaagcacacttcatacctcc

SEQ ID NO: 175691 - DNA, 33 bp, Homo sapien
tccccagaaatgaatcactgaaaaggtagaaac

SEQ ID NO: 175692 - DNA, 33 bp, Homo sapien
tccccagaaatgaatcgctgaaaaggtagaaac

SEQ ID NO: 175693 - DNA, 33 bp, Homo sapien
actcaagtacaaaggcaatattagcaaaaatgg

SEQ ID NO: 175694 - DNA, 33 bp, Homo sapien
actcaagtacaaaggcgatattagcaaaaatgg

SEQ ID NO: 175695 - DNA, 33 bp, Homo sapien
tgatcactattataaaatcacacttacatatat

SEQ ID NO: 175696 - DNA, 33 bp, Homo sapien
tgatcactattataaagtcacacttacatatat

SEQ ID NO: 175697 - DNA, 33 bp, Homo sapien
taaacagttaggaaaggatactgcttcacttaa

SEQ ID NO: 175698 - DNA, 33 bp, Homo sapien
taaacagttaggaaagtatactgcttcacttaa

SEQ ID NO: 175699 - DNA, 33 bp, Homo sapien
ggtgcagatgagcagacgggaccaagtggatgg

SEQ ID NO: 175700 - DNA, 33 bp, Homo sapien
ggtgcagatgagcagatgggaccaagtggatgg

SEQ ID NO: 175701 - DNA, 33 bp, Homo sapien
ggctgataaaacagcaagaacgaactgaggagc

SEQ ID NO: 175702 - DNA, 33 bp, Homo sapien
ggctgataaaacagcaggaacgaactgaggagc

SEQ ID NO: 175703 - DNA, 33 bp, Homo sapien
gcgcagggagatgcaacgaggaagcgcttcctt

SEQ ID NO: 175704 - DNA, 33 bp, Homo sapien
gcgcagggagatgcaatgaggaagcgcttcctt

SEQ ID NO: 175705 - DNA, 33 bp, Homo sapien
ggaggctctgagtggacatcaaggaagctgcag

SEQ ID NO: 175706 - DNA, 33 bp, Homo sapien
ggaggctctgagtggatatcaaggaagctgcag

SEQ ID NO: 175707 - DNA, 33 bp, Homo sapien
ctggtcttatacacacaggctgacctgaaacct

SEQ ID NO: 175708 - DNA, 33 bp, Homo sapien
ctggtcttatacacacgggctgacctgaaacct

SEQ ID NO: 175709 - DNA, 33 bp, Homo sapien
actggtttgctcccgaaagtcaggagagtgggt

SEQ ID NO: 175710 - DNA, 33 bp, Homo sapien
actggtttgctcccgatagtcaggagagtgggt

SEQ ID NO: 175711 - DNA, 33 bp, Homo sapien
ctgtcatctggaccaacctgattctggaggagc

SEQ ID NO: 175712 - DNA, 33 bp, Homo sapien
ctgtcatctggaccaatctgattctggaggagc

SEQ ID NO: 175713 - DNA, 33 bp, Homo sapien
ttcaatgctaaagatcagactttgctggggaga

SEQ ID NO: 175714 - DNA, 33 bp, Homo sapien
ttcaatgctaaagatcggactttgctggggaga

SEQ ID NO: 175715 - DNA, 33 bp, Homo sapien
aacacaaaagcaggaacagcaattctgcttgga

SEQ ID NO: 175716 - DNA, 33 bp, Homo sapien
aacacaaaagcaggaagagcaattctgcttgga

SEQ ID NO: 175717 - DNA, 33 bp, Homo sapien
gagaattaccctagaggaaaaaagcaggccctc

SEQ ID NO: 175718 - DNA, 33 bp, Homo sapien
gagaattaccctagagtaaaaaagcaggccctc

SEQ ID NO: 175719 - DNA, 33 bp, Homo sapien
actcaaccttcccgagacacactttccttaaaa

SEQ ID NO: 175720 - DNA, 33 bp, Homo sapien
actcaaccttcccgaggcacactttccttaaaa

SEQ ID NO: 175721 - DNA, 33 bp, Homo sapien
gaataatacactttaaataggtgaattgtatgg

SEQ ID NO: 175722 - DNA, 33 bp, Homo sapien
gaataatacactttaagtaggtgaattgtatgg

SEQ ID NO: 175723 - DNA, 33 bp, Homo sapien
caaaaagcaactggtccatccttttcaccaagc

SEQ ID NO: 175724 - DNA, 33 bp, Homo sapien
caaaaagcaactggtctatccttttcaccaagc

SEQ ID NO: 175725 - DNA, 33 bp, Homo sapien
taatttggacctaacaatgaccttataaaaatg

SEQ ID NO: 175726 - DNA, 33 bp, Homo sapien
taatttggacctaacagtgaccttataaaaatg

SEQ ID NO: 175727 - DNA, 33 bp, Homo sapien
cagtcagtaaattacacagatggagttggagac

SEQ ID NO: 175728 - DNA, 33 bp, Homo sapien
cagtcagtaaattacagagatggagttggagac

SEQ ID NO: 175729 - DNA, 33 bp, Homo sapien
gagaggtcctctcactaaacaatttttgagcat

SEQ ID NO: 175730 - DNA, 33 bp, Homo sapien
gagaggtcctctcactgaacaatttttgagcat

SEQ ID NO: 175731 - DNA, 33 bp, Homo sapien
tgtcaggattacagataaaggaaaagagatgag

SEQ ID NO: 175732 - DNA, 33 bp, Homo sapien
tgtcaggattacagatgaaggaaaagagatgag

SEQ ID NO: 175733 - DNA, 33 bp, Homo sapien
acaggttctagttccacctactctgacaagcct

SEQ ID NO: 175734 - DNA, 33 bp, Homo sapien
acaggttctagttccatctactctgacaagcct

SEQ ID NO: 175735 - DNA, 33 bp, Homo sapien
tctggtcaacaaatataaccttgcctctccaca

SEQ ID NO: 175736 - DNA, 33 bp, Homo sapien
tctggtcaacaaatatgaccttgcctctccaca

SEQ ID NO: 175737 - DNA, 33 bp, Homo sapien
tgttgcatatcgtaaagtccccagtccagccac

SEQ ID NO: 175738 - DNA, 33 bp, Homo sapien
tgttgcatatcgtaaattccccagtccagccac

SEQ ID NO: 175739 - DNA, 33 bp, Homo sapien
agtgcattgctctttccactaggatgctgactg

SEQ ID NO: 175740 - DNA, 33 bp, Homo sapien
agtgcattgctctttctactaggatgctgactg

SEQ ID NO: 175741 - DNA, 33 bp, Homo sapien
agaagtatgagagaaacggatgatctgaaaagc

SEQ ID NO: 175742 - DNA, 33 bp, Homo sapien
agaagtatgagagaaatggatgatctgaaaagc

SEQ ID NO: 175743 - DNA, 33 bp, Homo sapien
tgatcacctagatacactcagttctcctctagc

SEQ ID NO: 175744 - DNA, 33 bp, Homo sapien
tgatcacctagatacattcagttctcctctagc

SEQ ID NO: 175745 - DNA, 33 bp, Homo sapien
tggtttgcataagtgacctcgttttggtctgtg

SEQ ID NO: 175746 - DNA, 33 bp, Homo sapien
tggtttgcataagtgatctcgttttggtctgtg

SEQ ID NO: 175747 - DNA, 33 bp, Homo sapien
aggaaggaacccagaactctactttagggatat

SEQ ID NO: 175748 - DNA, 33 bp, Homo sapien
aggaaggaacccagaagtctactttagggatat

SEQ ID NO: 175749 - DNA, 33 bp, Homo sapien
aatccctcaaaatgtgcagaatcactaatttag

SEQ ID NO: 175750 - DNA, 33 bp, Homo sapien
aatccctcaaaatgtggagaatcactaatttag

SEQ ID NO: 175751 - DNA, 33 bp, Homo sapien
ctgtgtggagaatagacggcaagaggaaagagg

SEQ ID NO: 175752 - DNA, 33 bp, Homo sapien
ctgtgtggagaatagatggcaagaggaaagagg

SEQ ID NO: 175753 - DNA, 33 bp, Homo sapien
aaagctgccactcaaaggataacttaaaggcaa

SEQ ID NO: 175754 - DNA, 33 bp, Homo sapien
aaagctgccactcaaatgataacttaaaggcaa

SEQ ID NO: 175755 - DNA, 33 bp, Homo sapien
aaacttcagatcaaacaaattggaggttttgtt

SEQ ID NO: 175756 - DNA, 33 bp, Homo sapien
aaacttcagatcaaactaattggaggttttgtt

SEQ ID NO: 175757 - DNA, 33 bp, Homo sapien
tggctgcgtcctaataaaactatttacaaatat

SEQ ID NO: 175758 - DNA, 33 bp, Homo sapien
tggctgcgtcctaatacaactatttacaaatat

SEQ ID NO: 175759 - DNA, 33 bp, Homo sapien
tgtgtcagtacactgacgttcgcacaaggatga

SEQ ID NO: 175760 - DNA, 33 bp, Homo sapien
tgtgtcagtacactgatgttcgcacaaggatga

SEQ ID NO: 175761 - DNA, 33 bp, Homo sapien
aaaaagaatgaaatcccgctatttgtgacaaca

SEQ ID NO: 175762 - DNA, 33 bp, Homo sapien
aaaaagaatgaaatcctgctatttgtgacaaca

SEQ ID NO: 175763 - DNA, 33 bp, Homo sapien
tacatgataaatgctcaaattttattgacttga

SEQ ID NO: 175764 - DNA, 33 bp, Homo sapien
tacatgataaatgctcgaattttattgacttga

SEQ ID NO: 175765 - DNA, 33 bp, Homo sapien
ttaacaaaatcttcacaccagatatcatccttg

SEQ ID NO: 175766 - DNA, 33 bp, Homo sapien
ttaacaaaatcttcacgccagatatcatccttg

SEQ ID NO: 175767 - DNA, 33 bp, Homo sapien
gtaaaattgtgaaatacatgtaagtgtttatgt

SEQ ID NO: 175768 - DNA, 33 bp, Homo sapien
gtaaaattgtgaaatatatgtaagtgtttatgt

SEQ ID NO: 175769 - DNA, 33 bp, Homo sapien
acttcctgaatataataaaaggcatcatttgtt

SEQ ID NO: 175770 - DNA, 33 bp, Homo sapien
acttcctgaatataatgaaaggcatcatttgtt

SEQ ID NO: 175771 - DNA, 33 bp, Homo sapien
ataatcagagagaactcacatacaccaacaaca

SEQ ID NO: 175772 - DNA, 33 bp, Homo sapien
ataatcagagagaacttacatacaccaacaaca

SEQ ID NO: 175773 - DNA, 33 bp, Homo sapien
gtacccctcccacacaaggttttgacaaacaga

SEQ ID NO: 175774 - DNA, 33 bp, Homo sapien
gtacccctcccacacacggttttgacaaacaga

SEQ ID NO: 175775 - DNA, 33 bp, Homo sapien
ggtagacgggcaccccaagatgtaccaaccttt

SEQ ID NO: 175776 - DNA, 33 bp, Homo sapien
ggtagacgggcaccccgagatgtaccaaccttt

SEQ ID NO: 175777 - DNA, 33 bp, Homo sapien
caagactgcaaatgtgaagggagaaggagggct

SEQ ID NO: 175778 - DNA, 33 bp, Homo sapien
caagactgcaaatgtggagggagaaggagggct

SEQ ID NO: 175779 - DNA, 33 bp, Homo sapien
tttccagtgtttgttaactccatctttatgtcc

SEQ ID NO: 175780 - DNA, 33 bp, Homo sapien
tttccagtgtttgttacctccatctttatgtcc

SEQ ID NO: 175781 - DNA, 33 bp, Homo sapien
tgttttcagttttctacgtcatgccctgagcct

SEQ ID NO: 175782 - DNA, 33 bp, Homo sapien
tgttttcagttttctatgtcatgccctgagcct

SEQ ID NO: 175783 - DNA, 33 bp, Homo sapien
ccaaaaagtgctctgaaaaagaaccaaaggagg

SEQ ID NO: 175784 - DNA, 33 bp, Homo sapien
ccaaaaagtgctctgagaaagaaccaaaggagg

SEQ ID NO: 175785 - DNA, 33 bp, Homo sapien
acacggccatgaatgactaaatagacatctctg

SEQ ID NO: 175786 - DNA, 33 bp, Homo sapien
acacggccatgaatgattaaatagacatctctg

SEQ ID NO: 175787 - DNA, 33 bp, Homo sapien
taatgtcaaatattaactcaaggtcatagcttt

SEQ ID NO: 175788 - DNA, 33 bp, Homo sapien
taatgtcaaatattaattcaaggtcatagcttt

SEQ ID NO: 175789 - DNA, 33 bp, Homo sapien
ggggtgaggaggaacacaaaccatctataagat

SEQ ID NO: 175790 - DNA, 33 bp, Homo sapien
ggggtgaggaggaacataaaccatctataagat

SEQ ID NO: 175791 - DNA, 33 bp, Homo sapien
tgggtaatatctgtgacgaattatgagttgctg

SEQ ID NO: 175792 - DNA, 33 bp, Homo sapien
tgggtaatatctgtgatgaattatgagttgctg

SEQ ID NO: 175793 - DNA, 33 bp, Homo sapien
agttaatgggttcataataaatgtagatcactc

SEQ ID NO: 175794 - DNA, 33 bp, Homo sapien
agttaatgggttcatagtaaatgtagatcactc

SEQ ID NO: 175795 - DNA, 33 bp, Homo sapien
atagtccaaccaaaaacccatgcaagcccaaag

SEQ ID NO: 175796 - DNA, 33 bp, Homo sapien
atagtccaaccaaaaagccatgcaagcccaaag

SEQ ID NO: 175797 - DNA, 33 bp, Homo sapien
aattaactggaaagatgatcacttcaggcccta

SEQ ID NO: 175798 - DNA, 33 bp, Homo sapien
aattaactggaaagattatcacttcaggcccta

SEQ ID NO: 175799 - DNA, 33 bp, Homo sapien
ctgtgggagaattgacaccacagaaattggcaa

SEQ ID NO: 175800 - DNA, 33 bp, Homo sapien
ctgtgggagaattgacgccacagaaattggcaa

SEQ ID NO: 175801 - DNA, 33 bp, Homo sapien
ttacagagcctggaacgcaatatatttttagta

SEQ ID NO: 175802 - DNA, 33 bp, Homo sapien
ttacagagcctggaactcaatatatttttagta

SEQ ID NO: 175803 - DNA, 33 bp, Homo sapien
gattttttaagactccaaggcattgccacagtg

SEQ ID NO: 175804 - DNA, 33 bp, Homo sapien
gattttttaagactccgaggcattgccacagtg

SEQ ID NO: 175805 - DNA, 33 bp, Homo sapien
caaaagagagagccaaagcatgcaaggcctctg

SEQ ID NO: 175806 - DNA, 33 bp, Homo sapien
caaaagagagagccaacgcatgcaaggcctctg

SEQ ID NO: 175807 - DNA, 33 bp, Homo sapien
agttgtgtcatttggagtatggaatagactgaa

SEQ ID NO: 175808 - DNA, 33 bp, Homo sapien
agttgtgtcatttggattatggaatagactgaa

SEQ ID NO: 175809 - DNA, 33 bp, Homo sapien
ctgcctcttactagaactcaggaggaagctaag

SEQ ID NO: 175810 - DNA, 33 bp, Homo sapien
ctgcctcttactagaagtcaggaggaagctaag

SEQ ID NO: 175811 - DNA, 33 bp, Homo sapien
ctgttttttctgttcacaccagaccctgagaag

SEQ ID NO: 175812 - DNA, 33 bp, Homo sapien
ctgttttttctgttcataccagaccctgagaag

SEQ ID NO: 175813 - DNA, 33 bp, Homo sapien
tgattgttatgaaaaactgtcattgtgacatca

SEQ ID NO: 175814 - DNA, 33 bp, Homo sapien
tgattgttatgaaaaagtgtcattgtgacatca

SEQ ID NO: 175815 - DNA, 33 bp, Homo sapien
ttccttcattttcaacaagatgtagcattaccc

SEQ ID NO: 175816 - DNA, 33 bp, Homo sapien
ttccttcattttcaaccagatgtagcattaccc

SEQ ID NO: 175817 - DNA, 33 bp, Homo sapien
tccagagcatttttcactctgctaacttatctc

SEQ ID NO: 175818 - DNA, 33 bp, Homo sapien
tccagagcatttttcagtctgctaacttatctc

SEQ ID NO: 175819 - DNA, 33 bp, Homo sapien
cttagtatggacataactcttcattcctttcag

SEQ ID NO: 175820 - DNA, 33 bp, Homo sapien
cttagtatggacataagtcttcattcctttcag

SEQ ID NO: 175821 - DNA, 33 bp, Homo sapien
taccacggtaatattaaccataactgcatcaag

SEQ ID NO: 175822 - DNA, 33 bp, Homo sapien
taccacggtaatattagccataactgcatcaag

SEQ ID NO: 175823 - DNA, 33 bp, Homo sapien
gggaggtgtttgaaaagcaatttctacagaagt

SEQ ID NO: 175824 - DNA, 33 bp, Homo sapien
gggaggtgtttgaaaatcaatttctacagaagt

SEQ ID NO: 175825 - DNA, 33 bp, Homo sapien
cagtttctatgggttaagaattcagaaagggca

SEQ ID NO: 175826 - DNA, 33 bp, Homo sapien
cagtttctatgggttaggaattcagaaagggca

SEQ ID NO: 175827 - DNA, 33 bp, Homo sapien
aataatcacggattcacgttatgatttagtcat

SEQ ID NO: 175828 - DNA, 33 bp, Homo sapien
aataatcacggattcatgttatgatttagtcat

SEQ ID NO: 175829 - DNA, 33 bp, Homo sapien
ataaaccatacatgcaatacaattccaaatttg

SEQ ID NO: 175830 - DNA, 33 bp, Homo sapien
ataaaccatacatgcagtacaattccaaatttg

SEQ ID NO: 175831 - DNA, 33 bp, Homo sapien
tactttaagacatccagcaaaaaggaaatggtt

SEQ ID NO: 175832 - DNA, 33 bp, Homo sapien
tactttaagacatccatcaaaaaggaaatggtt

SEQ ID NO: 175833 - DNA, 33 bp, Homo sapien
cccagctcaaattctacctcttacaaaaaatct

SEQ ID NO: 175834 - DNA, 33 bp, Homo sapien
cccagctcaaattctatctcttacaaaaaatct

SEQ ID NO: 175835 - DNA, 33 bp, Homo sapien
ccatcaaagaaaattaggagacaatctgggaaa

SEQ ID NO: 175836 - DNA, 33 bp, Homo sapien
ccatcaaagaaaattatgagacaatctgggaaa

SEQ ID NO: 175837 - DNA, 33 bp, Homo sapien
gccagtggggcagaaaagttttgtgtaaacaca

SEQ ID NO: 175838 - DNA, 33 bp, Homo sapien
gccagtggggcagaaaggttttgtgtaaacaca

SEQ ID NO: 175839 - DNA, 33 bp, Homo sapien
aaactaattaaagctaggagacagcatgggaaa

SEQ ID NO: 175840 - DNA, 33 bp, Homo sapien
aaactaattaaagctatgagacagcatgggaaa

SEQ ID NO: 175841 - DNA, 33 bp, Homo sapien
ttattattagggaaaagttggaaacagtgtgag

SEQ ID NO: 175842 - DNA, 33 bp, Homo sapien
ttattattagggaaaatttggaaacagtgtgag

SEQ ID NO: 175843 - DNA, 33 bp, Homo sapien
gacttagccaatgcaaaaaggtaagaaaacaca

SEQ ID NO: 175844 - DNA, 33 bp, Homo sapien
gacttagccaatgcaacaaggtaagaaaacaca

SEQ ID NO: 175845 - DNA, 33 bp, Homo sapien
tagaattatgacaccaactagacagaaattaca

SEQ ID NO: 175846 - DNA, 33 bp, Homo sapien
tagaattatgacaccagctagacagaaattaca

SEQ ID NO: 175847 - DNA, 33 bp, Homo sapien
ggcccaagaaatgcaacggaaactaacattgga

SEQ ID NO: 175848 - DNA, 33 bp, Homo sapien
ggcccaagaaatgcaatggaaactaacattgga

SEQ ID NO: 175849 - DNA, 33 bp, Homo sapien
taggagctggaaatcacagaatctctcaccctt

SEQ ID NO: 175850 - DNA, 33 bp, Homo sapien
taggagctggaaatcatagaatctctcaccctt

SEQ ID NO: 175851 - DNA, 33 bp, Homo sapien
aggtatttgataaaagcaaagtgacgagctgat

SEQ ID NO: 175852 - DNA, 33 bp, Homo sapien
aggtatttgataaaagtaaagtgacgagctgat

SEQ ID NO: 175853 - DNA, 33 bp, Homo sapien
acacagacaaaacatacactaggatcccaaaat

SEQ ID NO: 175854 - DNA, 33 bp, Homo sapien
acacagacaaaacatatactaggatcccaaaat

SEQ ID NO: 175855 - DNA, 33 bp, Homo sapien
tgaatagcagagccaacattccaagctagtcca

SEQ ID NO: 175856 - DNA, 33 bp, Homo sapien
tgaatagcagagccaagattccaagctagtcca

SEQ ID NO: 175857 - DNA, 33 bp, Homo sapien
tcctgaaaaatacttcccatcaataaatgtctg

SEQ ID NO: 175858 - DNA, 33 bp, Homo sapien
tcctgaaaaatacttctcatcaataaatgtctg

SEQ ID NO: 175859 - DNA, 33 bp, Homo sapien
accacacctggccatccgacagacatttattga

SEQ ID NO: 175860 - DNA, 33 bp, Homo sapien
accacacctggccatctgacagacatttattga

SEQ ID NO: 175861 - DNA, 33 bp, Homo sapien
agcatggatctgaacaatctccagagatgaatg

SEQ ID NO: 175862 - DNA, 33 bp, Homo sapien
agcatggatctgaacagtctccagagatgaatg

SEQ ID NO: 175863 - DNA, 33 bp, Homo sapien
gccttacacttgtccaacccctaacttggaagt

SEQ ID NO: 175864 - DNA, 33 bp, Homo sapien
gccttacacttgtccatcccctaacttggaagt

SEQ ID NO: 175865 - DNA, 33 bp, Homo sapien
aggtgtggagtcaaccaatagaggagacaattg

SEQ ID NO: 175866 - DNA, 33 bp, Homo sapien
aggtgtggagtcaaccgatagaggagacaattg

SEQ ID NO: 175867 - DNA, 33 bp, Homo sapien
acctttcctctgagcaacgaactcccatatcca

SEQ ID NO: 175868 - DNA, 33 bp, Homo sapien
acctttcctctgagcatcgaactcccatatcca

SEQ ID NO: 175869 - DNA, 33 bp, Homo sapien
atcatccatccagttccctgtttgttttcttca

SEQ ID NO: 175870 - DNA, 33 bp, Homo sapien
atcatccatccagttctctgtttgttttcttca

SEQ ID NO: 175871 - DNA, 33 bp, Homo sapien
gtctactaaatttaaaatacacatatcctttga

SEQ ID NO: 175872 - DNA, 33 bp, Homo sapien
gtctactaaatttaaagtacacatatcctttga

SEQ ID NO: 175873 - DNA, 33 bp, Homo sapien
tgaagcaacaatgtacccttagtaaagctgcta

SEQ ID NO: 175874 - DNA, 33 bp, Homo sapien
tgaagcaacaatgtacgcttagtaaagctgcta

SEQ ID NO: 175875 - DNA, 33 bp, Homo sapien
aatctgtttattttgaagaaaagactctgaaca

SEQ ID NO: 175876 - DNA, 33 bp, Homo sapien
aatctgtttattttgaggaaaagactctgaaca

SEQ ID NO: 175877 - DNA, 33 bp, Homo sapien
ggtgcatagcgtatgaaaaagatctgtcctggt

SEQ ID NO: 175878 - DNA, 33 bp, Homo sapien
ggtgcatagcgtatgagaaagatctgtcctggt

SEQ ID NO: 175879 - DNA, 33 bp, Homo sapien
catcaataaaaagaaacgcgctattgatacatg

SEQ ID NO: 175880 - DNA, 33 bp, Homo sapien
catcaataaaaagaaatgcgctattgatacatg

SEQ ID NO: 175881 - DNA, 33 bp, Homo sapien
tcatgcaacatccccaatgggaaaaaagacccc

SEQ ID NO: 175882 - DNA, 33 bp, Homo sapien
tcatgcaacatccccagtgggaaaaaagacccc

SEQ ID NO: 175883 - DNA, 33 bp, Homo sapien
taagcaaaaaaatgcaatgagtaatgcacacag

SEQ ID NO: 175884 - DNA, 33 bp, Homo sapien
taagcaaaaaaatgcagtgagtaatgcacacag

SEQ ID NO: 175885 - DNA, 33 bp, Homo sapien
agaagtttactggcaagttcagtaatgatgatg

SEQ ID NO: 175886 - DNA, 33 bp, Homo sapien
agaagtttactggcaatttcagtaatgatgatg

SEQ ID NO: 175887 - DNA, 33 bp, Homo sapien
ggtcatgaatgctctccattcagaaccctccca

SEQ ID NO: 175888 - DNA, 33 bp, Homo sapien
ggtcatgaatgctctctattcagaaccctccca

SEQ ID NO: 175889 - DNA, 33 bp, Homo sapien
tcatgaggccactaaccagagaaggaatgcagg

SEQ ID NO: 175890 - DNA, 33 bp, Homo sapien
tcatgaggccactaacgagagaaggaatgcagg

SEQ ID NO: 175891 - DNA, 33 bp, Homo sapien
atttaatatcttgatgcaccagaaagtaggtgc

SEQ ID NO: 175892 - DNA, 33 bp, Homo sapien
atttaatatcttgatgtaccagaaagtaggtgc

SEQ ID NO: 175893 - DNA, 33 bp, Homo sapien
ttggaagagaatctgaaagatcacccagcccgc

SEQ ID NO: 175894 - DNA, 33 bp, Homo sapien
ttggaagagaatctgagagatcacccagcccgc

SEQ ID NO: 175895 - DNA, 33 bp, Homo sapien
gaatttatttatctaaacacatctacacataga

SEQ ID NO: 175896 - DNA, 33 bp, Homo sapien
gaatttatttatctaagcacatctacacataga

SEQ ID NO: 175897 - DNA, 33 bp, Homo sapien
cagagaaggatctgaaaatagttattataactt

SEQ ID NO: 175898 - DNA, 33 bp, Homo sapien
cagagaaggatctgaagatagttattataactt

SEQ ID NO: 175899 - DNA, 33 bp, Homo sapien
gaaccatcctgaaggaatagaggtgacgatgct

SEQ ID NO: 175900 - DNA, 33 bp, Homo sapien
gaaccatcctgaaggactagaggtgacgatgct

SEQ ID NO: 175901 - DNA, 33 bp, Homo sapien
attggaatagtcaagacgtggcaaaatgctcca

SEQ ID NO: 175902 - DNA, 33 bp, Homo sapien
attggaatagtcaagatgtggcaaaatgctcca

SEQ ID NO: 175903 - DNA, 33 bp, Homo sapien
tgtgctgcagtgttgaaatactttatggtgcag

SEQ ID NO: 175904 - DNA, 33 bp, Homo sapien
tgtgctgcagtgttgagatactttatggtgcag

SEQ ID NO: 175905 - DNA, 33 bp, Homo sapien
taatgcacttaatgacaacccacattctctgag

SEQ ID NO: 175906 - DNA, 33 bp, Homo sapien
taatgcacttaatgacgacccacattctctgag

SEQ ID NO: 175907 - DNA, 33 bp, Homo sapien
aaaaaataacaaaatgaaagttctggaagtgaa

SEQ ID NO: 175908 - DNA, 33 bp, Homo sapien
aaaaaataacaaaatggaagttctggaagtgaa

SEQ ID NO: 175909 - DNA, 33 bp, Homo sapien
atcatttaaagtctccacaaattggccaggcat

SEQ ID NO: 175910 - DNA, 33 bp, Homo sapien
atcatttaaagtctccgcaaattggccaggcat

SEQ ID NO: 175911 - DNA, 33 bp, Homo sapien
atgtgaaaacttgctacgattccttgagtgttc

SEQ ID NO: 175912 - DNA, 33 bp, Homo sapien
atgtgaaaacttgctatgattccttgagtgttc

SEQ ID NO: 175913 - DNA, 33 bp, Homo sapien
atcacgaacacaatccaagagtgagtgagtctt

SEQ ID NO: 175914 - DNA, 33 bp, Homo sapien
atcacgaacacaatcccagagtgagtgagtctt

SEQ ID NO: 175915 - DNA, 33 bp, Homo sapien
aattagcttccagaacaggtattagaacctatg

SEQ ID NO: 175916 - DNA, 33 bp, Homo sapien
aattagcttccagaactggtattagaacctatg

SEQ ID NO: 175917 - DNA, 33 bp, Homo sapien
ggacctctggaacatacataacccatcagtgtt

SEQ ID NO: 175918 - DNA, 33 bp, Homo sapien
ggacctctggaacatagataacccatcagtgtt

SEQ ID NO: 175919 - DNA, 33 bp, Homo sapien
tgtttgaaggcaatgcagagaactcagaccctc

SEQ ID NO: 175920 - DNA, 33 bp, Homo sapien
tgtttgaaggcaatgcggagaactcagaccctc

SEQ ID NO: 175921 - DNA, 33 bp, Homo sapien
cccctcccctgtgtaccgattgtcacccagtta

SEQ ID NO: 175922 - DNA, 33 bp, Homo sapien
cccctcccctgtgtactgattgtcacccagtta

SEQ ID NO: 175923 - DNA, 33 bp, Homo sapien
tacttcaataggcatcaatgataaatcaatctt

SEQ ID NO: 175924 - DNA, 33 bp, Homo sapien
tacttcaataggcatcgatgataaatcaatctt

SEQ ID NO: 175925 - DNA, 33 bp, Homo sapien
gggaatccagcatagaccagctaaattggccaa

SEQ ID NO: 175926 - DNA, 33 bp, Homo sapien
gggaatccagcatagatcagctaaattggccaa

SEQ ID NO: 175927 - DNA, 33 bp, Homo sapien
taccatgtgtttagtacaatgctagccaccacc

SEQ ID NO: 175928 - DNA, 33 bp, Homo sapien
taccatgtgtttagtataatgctagccaccacc

SEQ ID NO: 175929 - DNA, 33 bp, Homo sapien
gggtttttaaacaatccaacggtagcactgata

SEQ ID NO: 175930 - DNA, 33 bp, Homo sapien
gggtttttaaacaatcgaacggtagcactgata

SEQ ID NO: 175931 - DNA, 33 bp, Homo sapien
tgtgaagtatacagcaagggaactaatttagca

SEQ ID NO: 175932 - DNA, 33 bp, Homo sapien
tgtgaagtatacagcacgggaactaatttagca

SEQ ID NO: 175933 - DNA, 33 bp, Homo sapien
ctggttgttgagatccaagattgtcagatttga

SEQ ID NO: 175934 - DNA, 33 bp, Homo sapien
ctggttgttgagatcccagattgtcagatttga

SEQ ID NO: 175935 - DNA, 33 bp, Homo sapien
tgcttatttgcccaacaactatggtggctactg

SEQ ID NO: 175936 - DNA, 33 bp, Homo sapien
tgcttatttgcccaacgactatggtggctactg

SEQ ID NO: 175937 - DNA, 33 bp, Homo sapien
taaatgatttgcccaacaagtggcaaaggtgag

SEQ ID NO: 175938 - DNA, 33 bp, Homo sapien
taaatgatttgcccaataagtggcaaaggtgag

SEQ ID NO: 175939 - DNA, 33 bp, Homo sapien
cacccctaaaatacagcaacagctatcctgaag

SEQ ID NO: 175940 - DNA, 33 bp, Homo sapien
cacccctaaaatacaggaacagctatcctgaag

SEQ ID NO: 175941 - DNA, 33 bp, Homo sapien
ttttcagtggttgctcgcaggtttacaatacgc

SEQ ID NO: 175942 - DNA, 33 bp, Homo sapien
ttttcagtggttgctctcaggtttacaatacgc

SEQ ID NO: 175943 - DNA, 33 bp, Homo sapien
aaactactgaccctcaagtaaaaatagtgggag

SEQ ID NO: 175944 - DNA, 33 bp, Homo sapien
aaactactgaccctcaggtaaaaatagtgggag

SEQ ID NO: 175945 - DNA, 33 bp, Homo sapien
accagcttggtcaccagagtaattgtgctacaa

SEQ ID NO: 175946 - DNA, 33 bp, Homo sapien
accagcttggtcaccatagtaattgtgctacaa

SEQ ID NO: 175947 - DNA, 33 bp, Homo sapien
caagaatttaagaacgaaaatgaaacaaacgag

SEQ ID NO: 175948 - DNA, 33 bp, Homo sapien
caagaatttaagaacggaaatgaaacaaacgag

SEQ ID NO: 175949 - DNA, 33 bp, Homo sapien
aaatattcagagaaacaggaacatgtaacacat

SEQ ID NO: 175950 - DNA, 33 bp, Homo sapien
aaatattcagagaaacgggaacatgtaacacat

SEQ ID NO: 175951 - DNA, 33 bp, Homo sapien
ccatttagcaggttgaggatgttttcttctatt

SEQ ID NO: 175952 - DNA, 33 bp, Homo sapien
ccatttagcaggttgatgatgttttcttctatt

SEQ ID NO: 175953 - DNA, 33 bp, Homo sapien
actgctttatactacaacttttccatttccatg

SEQ ID NO: 175954 - DNA, 33 bp, Homo sapien
actgctttatactacatcttttccatttccatg

SEQ ID NO: 175955 - DNA, 33 bp, Homo sapien
ttccttgtagcaggaaaaacctaaacatgccac

SEQ ID NO: 175956 - DNA, 33 bp, Homo sapien
ttccttgtagcaggaacaacctaaacatgccac

SEQ ID NO: 175957 - DNA, 33 bp, Homo sapien
ctaaggctccgcttcaataccccggcgatggga

SEQ ID NO: 175958 - DNA, 33 bp, Homo sapien
ctaaggctccgcttcagtaccccggcgatggga

SEQ ID NO: 175959 - DNA, 33 bp, Homo sapien
cctacctgtgctccaaaccttagctgggaagtc

SEQ ID NO: 175960 - DNA, 33 bp, Homo sapien
cctacctgtgctccaagccttagctgggaagtc

SEQ ID NO: 175961 - DNA, 33 bp, Homo sapien
acctctggaagctggtaaaaggtgagtgctggc

SEQ ID NO: 175962 - DNA, 33 bp, Homo sapien
acctctggaagctggtgaaaggtgagtgctggc

SEQ ID NO: 175963 - DNA, 33 bp, Homo sapien
ctgcaataaaaataaggaacacatcagcttctg

SEQ ID NO: 175964 - DNA, 33 bp, Homo sapien
ctgcaataaaaataagtaacacatcagcttctg

SEQ ID NO: 175965 - DNA, 33 bp, Homo sapien
cctgcccaattctctcacttgctatgcttaaaa

SEQ ID NO: 175966 - DNA, 33 bp, Homo sapien
cctgcccaattctctcgcttgctatgcttaaaa

SEQ ID NO: 175967 - DNA, 33 bp, Homo sapien
caattctgaagttggcaaagtttgtttctagcc

SEQ ID NO: 175968 - DNA, 33 bp, Homo sapien
caattctgaagttggcgaagtttgtttctagcc

SEQ ID NO: 175969 - DNA, 33 bp, Homo sapien
catctgggccactcagacaaaagagaatctgct

SEQ ID NO: 175970 - DNA, 33 bp, Homo sapien
catctgggccactcaggcaaaagagaatctgct

SEQ ID NO: 175971 - DNA, 33 bp, Homo sapien
agctttgcttcctaaccaaactgggaccttctt

SEQ ID NO: 175972 - DNA, 33 bp, Homo sapien
agctttgcttcctaactaaactgggaccttctt

SEQ ID NO: 175973 - DNA, 33 bp, Homo sapien
ctgaggtcttcactcactcatgtagcaattatt

SEQ ID NO: 175974 - DNA, 33 bp, Homo sapien
ctgaggtcttcactcattcatgtagcaattatt

SEQ ID NO: 175975 - DNA, 33 bp, Homo sapien
ctcttagtgcaacaaactgctatggggagatgc

SEQ ID NO: 175976 - DNA, 33 bp, Homo sapien
ctcttagtgcaacaaattgctatggggagatgc

SEQ ID NO: 175977 - DNA, 33 bp, Homo sapien
cactgtggccaattcacgctaccaatgtgacat

SEQ ID NO: 175978 - DNA, 33 bp, Homo sapien
cactgtggccaattcatgctaccaatgtgacat

SEQ ID NO: 175979 - DNA, 33 bp, Homo sapien
tcaaaacctaacagaaaggcaaaagtagaaaaa

SEQ ID NO: 175980 - DNA, 33 bp, Homo sapien
tcaaaacctaacagaagggcaaaagtagaaaaa

SEQ ID NO: 175981 - DNA, 33 bp, Homo sapien
tccacatcactacaaaacttccctctagctgat

SEQ ID NO: 175982 - DNA, 33 bp, Homo sapien
tccacatcactacaaaccttccctctagctgat

SEQ ID NO: 175983 - DNA, 33 bp, Homo sapien
ttgtttttgaagtgtcacctaaaaatggttgtc

SEQ ID NO: 175984 - DNA, 33 bp, Homo sapien
ttgtttttgaagtgtcgcctaaaaatggttgtc

SEQ ID NO: 175985 - DNA, 33 bp, Homo sapien
caaagcaattcctaaacaggcactggacttcaa

SEQ ID NO: 175986 - DNA, 33 bp, Homo sapien
caaagcaattcctaaagaggcactggacttcaa

SEQ ID NO: 175987 - DNA, 33 bp, Homo sapien
ttttatacagtcaacactggcttagtctaccta

SEQ ID NO: 175988 - DNA, 33 bp, Homo sapien
ttttatacagtcaacattggcttagtctaccta

SEQ ID NO: 175989 - DNA, 33 bp, Homo sapien
catcaaaaaagaaatacgatggctatcgcttag

SEQ ID NO: 175990 - DNA, 33 bp, Homo sapien
catcaaaaaagaaatatgatggctatcgcttag

SEQ ID NO: 175991 - DNA, 33 bp, Homo sapien
gctcgcagttcctccacgaataatgtacatgag

SEQ ID NO: 175992 - DNA, 33 bp, Homo sapien
gctcgcagttcctccatgaataatgtacatgag

SEQ ID NO: 175993 - DNA, 33 bp, Homo sapien
atttctcaactagtcaatctttaacaccaatct

SEQ ID NO: 175994 - DNA, 33 bp, Homo sapien
atttctcaactagtcagtctttaacaccaatct

SEQ ID NO: 175995 - DNA, 33 bp, Homo sapien
cctggggtaccttggaagtctttcttggtgact

SEQ ID NO: 175996 - DNA, 33 bp, Homo sapien
cctggggtaccttggacgtctttcttggtgact

SEQ ID NO: 175997 - DNA, 33 bp, Homo sapien
ttatatatatgtatgaacctaacaaccccatac

SEQ ID NO: 175998 - DNA, 33 bp, Homo sapien
ttatatatatgtatgagcctaacaaccccatac

SEQ ID NO: 175999 - DNA, 33 bp, Homo sapien
ggttgagaacatttcacacgttgtcacaactcc

SEQ ID NO: 176000 - DNA, 33 bp, Homo sapien
ggttgagaacatttcatacgttgtcacaactcc

SEQ ID NO: 176001 - DNA, 33 bp, Homo sapien
aatataaatgaagcacaaagattcaggtcaaca

SEQ ID NO: 176002 - DNA, 33 bp, Homo sapien
aatataaatgaagcacgaagattcaggtcaaca

SEQ ID NO: 176003 - DNA, 33 bp, Homo sapien
aagtacttggtgaagacctatgtgcaagatatt

SEQ ID NO: 176004 - DNA, 33 bp, Homo sapien
aagtacttggtgaagagctatgtgcaagatatt

SEQ ID NO: 176005 - DNA, 33 bp, Homo sapien
aaaataaaatgatgcaactgaaacagtaaatta

SEQ ID NO: 176006 - DNA, 33 bp, Homo sapien
aaaataaaatgatgcacctgaaacagtaaatta

SEQ ID NO: 176007 - DNA, 33 bp, Homo sapien
cttggccgaagtgtacaaacagttacaatgctg

SEQ ID NO: 176008 - DNA, 33 bp, Homo sapien
cttggccgaagtgtactaacagttacaatgctg

SEQ ID NO: 176009 - DNA, 33 bp, Homo sapien
aatggattccatcacaatggtgtttaagatagc

SEQ ID NO: 176010 - DNA, 33 bp, Homo sapien
aatggattccatcacagtggtgtttaagatagc

SEQ ID NO: 176011 - DNA, 33 bp, Homo sapien
aatccttgcagtgacacctaaaacaatgttgta

SEQ ID NO: 176012 - DNA, 33 bp, Homo sapien
aatccttgcagtgacatctaaaacaatgttgta

SEQ ID NO: 176013 - DNA, 33 bp, Homo sapien
cagatggtttctgggacgtctagttaggctaaa

SEQ ID NO: 176014 - DNA, 33 bp, Homo sapien
cagatggtttctgggatgtctagttaggctaaa

SEQ ID NO: 176015 - DNA, 33 bp, Homo sapien
aaatcacctttacaacaaacagatttttctttt

SEQ ID NO: 176016 - DNA, 33 bp, Homo sapien
aaatcacctttacaaccaacagatttttctttt

SEQ ID NO: 176017 - DNA, 33 bp, Homo sapien
cctctgcacatggtcaggaaataaactattcca

SEQ ID NO: 176018 - DNA, 33 bp, Homo sapien
cctctgcacatggtcatgaaataaactattcca

SEQ ID NO: 176019 - DNA, 33 bp, Homo sapien
ttttttgaacctgatacactgtttgtttactct

SEQ ID NO: 176020 - DNA, 33 bp, Homo sapien
ttttttgaacctgatatactgtttgtttactct

SEQ ID NO: 176021 - DNA, 33 bp, Homo sapien
agatagagtcaatgcagaggggcagtaggaagt

SEQ ID NO: 176022 - DNA, 33 bp, Homo sapien
agatagagtcaatgcataggggcagtaggaagt

SEQ ID NO: 176023 - DNA, 33 bp, Homo sapien
gctgggaaaagctcaagaatctggccattctgg

SEQ ID NO: 176024 - DNA, 33 bp, Homo sapien
gctgggaaaagctcaataatctggccattctgg

SEQ ID NO: 176025 - DNA, 33 bp, Homo sapien
taatcctcacagtagaagaagcaacagactcag

SEQ ID NO: 176026 - DNA, 33 bp, Homo sapien
taatcctcacagtagatgaagcaacagactcag

SEQ ID NO: 176027 - DNA, 33 bp, Homo sapien
tataatgtatgcaaaccaacctggctgtagagc

SEQ ID NO: 176028 - DNA, 33 bp, Homo sapien
tataatgtatgcaaactaacctggctgtagagc

SEQ ID NO: 176029 - DNA, 33 bp, Homo sapien
tatgaaagacgaactcacagagagatgggaaga

SEQ ID NO: 176030 - DNA, 33 bp, Homo sapien
tatgaaagacgaactcgcagagagatgggaaga

SEQ ID NO: 176031 - DNA, 33 bp, Homo sapien
aaaattacattcacccaaaccaggtgattaaaa

SEQ ID NO: 176032 - DNA, 33 bp, Homo sapien
aaaattacattcacccgaaccaggtgattaaaa

SEQ ID NO: 176033 - DNA, 33 bp, Homo sapien
aacttttcttgagtccaatagagagctaacatc

SEQ ID NO: 176034 - DNA, 33 bp, Homo sapien
aacttttcttgagtcccatagagagctaacatc

SEQ ID NO: 176035 - DNA, 33 bp, Homo sapien
ctcccagcagtaggagacctctaatgtgctagg

SEQ ID NO: 176036 - DNA, 33 bp, Homo sapien
ctcccagcagtaggaggcctctaatgtgctagg

SEQ ID NO: 176037 - DNA, 33 bp, Homo sapien
cttttctcagtggtccaacccctctcccagcag

SEQ ID NO: 176038 - DNA, 33 bp, Homo sapien
cttttctcagtggtcctacccctctcccagcag

SEQ ID NO: 176039 - DNA, 33 bp, Homo sapien
tgcctgcacctcagagaagtttatctccacatg

SEQ ID NO: 176040 - DNA, 33 bp, Homo sapien
tgcctgcacctcagaggagtttatctccacatg

SEQ ID NO: 176041 - DNA, 33 bp, Homo sapien
gtggtattgctggatccaatagtaattctgttt

SEQ ID NO: 176042 - DNA, 33 bp, Homo sapien
gtggtattgctggatcgaatagtaattctgttt

SEQ ID NO: 176043 - DNA, 33 bp, Homo sapien
cagtagtaaaggacaacatatgtggagagtaaa

SEQ ID NO: 176044 - DNA, 33 bp, Homo sapien
cagtagtaaaggacaatatatgtggagagtaaa

SEQ ID NO: 176045 - DNA, 33 bp, Homo sapien
gcctgcacattgttctaaaatggcaaattagtt

SEQ ID NO: 176046 - DNA, 33 bp, Homo sapien
gcctgcacattgttctgaaatggcaaattagtt

SEQ ID NO: 176047 - DNA, 33 bp, Homo sapien
tgtataatcttttttacagcctggaattatatg

SEQ ID NO: 176048 - DNA, 33 bp, Homo sapien
tgtataatcttttttagagcctggaattatatg

SEQ ID NO: 176049 - DNA, 33 bp, Homo sapien
tgcggtagtttactgagaatgatatatcccttg

SEQ ID NO: 176050 - DNA, 33 bp, Homo sapien
tgcggtagtttactgataatgatatatcccttg

SEQ ID NO: 176051 - DNA, 33 bp, Homo sapien
gttcacaattccctaccatgtggtgcgagatag

SEQ ID NO: 176052 - DNA, 33 bp, Homo sapien
gttcacaattccctactatgtggtgcgagatag

SEQ ID NO: 176053 - DNA, 33 bp, Homo sapien
gagggaggaggaaagaatcctgagaaaagtcct

SEQ ID NO: 176054 - DNA, 33 bp, Homo sapien
gagggaggaggaaagagtcctgagaaaagtcct

SEQ ID NO: 176055 - DNA, 33 bp, Homo sapien
aatatatcagaagacagctttagcgactttgca

SEQ ID NO: 176056 - DNA, 33 bp, Homo sapien
aatatatcagaagacatctttagcgactttgca

SEQ ID NO: 176057 - DNA, 33 bp, Homo sapien
tctccaagtgattaaaaatagaatggccattaa

SEQ ID NO: 176058 - DNA, 33 bp, Homo sapien
tctccaagtgattaaatatagaatggccattaa

SEQ ID NO: 176059 - DNA, 33 bp, Homo sapien
gagcaaaaaaatgaaacgaaaatgtaagcaggg

SEQ ID NO: 176060 - DNA, 33 bp, Homo sapien
gagcaaaaaaatgaaaggaaaatgtaagcaggg

SEQ ID NO: 176061 - DNA, 33 bp, Homo sapien
cacctcataccatacaccagaacaaacccaaca

SEQ ID NO: 176062 - DNA, 33 bp, Homo sapien
cacctcataccatacatcagaacaaacccaaca

SEQ ID NO: 176063 - DNA, 33 bp, Homo sapien
tgcttgatgttgtatcacaggtcttttaggctc

SEQ ID NO: 176064 - DNA, 33 bp, Homo sapien
tgcttgatgttgtatcgcaggtcttttaggctc

SEQ ID NO: 176065 - DNA, 33 bp, Homo sapien
ttctctgtaaatgggccatattttcctgttttt

SEQ ID NO: 176066 - DNA, 33 bp, Homo sapien
ttctctgtaaatgggcgatattttcctgttttt

SEQ ID NO: 176067 - DNA, 33 bp, Homo sapien
gttcaggaacaaatcacatcctttgttgaattg

SEQ ID NO: 176068 - DNA, 33 bp, Homo sapien
gttcaggaacaaatcatatcctttgttgaattg

SEQ ID NO: 176069 - DNA, 33 bp, Homo sapien
tcactgtacggatgagaaaagacccatagtcac

SEQ ID NO: 176070 - DNA, 33 bp, Homo sapien
tcactgtacggatgagcaaagacccatagtcac

SEQ ID NO: 176071 - DNA, 33 bp, Homo sapien
ctgcaaaatgcagaggaacactcagaaaatagc

SEQ ID NO: 176072 - DNA, 33 bp, Homo sapien
ctgcaaaatgcagagggacactcagaaaatagc

SEQ ID NO: 176073 - DNA, 33 bp, Homo sapien
tagtggcatgaccacaaagaaaattactgtaag

SEQ ID NO: 176074 - DNA, 33 bp, Homo sapien
tagtggcatgaccacatagaaaattactgtaag

SEQ ID NO: 176075 - DNA, 33 bp, Homo sapien
gataaatgagagattcaaagacagatgtgtcat

SEQ ID NO: 176076 - DNA, 33 bp, Homo sapien
gataaatgagagattcgaagacagatgtgtcat

SEQ ID NO: 176077 - DNA, 33 bp, Homo sapien
ccagccactcatatgaccttgggcaagtcacct

SEQ ID NO: 176078 - DNA, 33 bp, Homo sapien
ccagccactcatatgatcttgggcaagtcacct

SEQ ID NO: 176079 - DNA, 33 bp, Homo sapien
ttttccatttcttagacgtgatgagatccctaa

SEQ ID NO: 176080 - DNA, 33 bp, Homo sapien
ttttccatttcttagatgtgatgagatccctaa

SEQ ID NO: 176081 - DNA, 33 bp, Homo sapien
gtgaagagaaggtgtgaaaaagtcattgagaag

SEQ ID NO: 176082 - DNA, 33 bp, Homo sapien
gtgaagagaaggtgtggaaaagtcattgagaag

SEQ ID NO: 176083 - DNA, 33 bp, Homo sapien
tacaaccaatggggcaacttttaactaccttat

SEQ ID NO: 176084 - DNA, 33 bp, Homo sapien
tacaaccaatggggcagcttttaactaccttat

SEQ ID NO: 176085 - DNA, 33 bp, Homo sapien
tgttctagccagttggcagcccattggatggtg

SEQ ID NO: 176086 - DNA, 33 bp, Homo sapien
tgttctagccagttggtagcccattggatggtg

SEQ ID NO: 176087 - DNA, 33 bp, Homo sapien
tgaaaatgaaccagccaccttggtcttgggcta

SEQ ID NO: 176088 - DNA, 33 bp, Homo sapien
tgaaaatgaaccagccgccttggtcttgggcta

SEQ ID NO: 176089 - DNA, 33 bp, Homo sapien
ctttctgttttgggagaaaaagctaaccttgca

SEQ ID NO: 176090 - DNA, 33 bp, Homo sapien
ctttctgttttgggaggaaaagctaaccttgca

SEQ ID NO: 176091 - DNA, 33 bp, Homo sapien
aaagctaaccttgcaactggctgtgtttcgtat

SEQ ID NO: 176092 - DNA, 33 bp, Homo sapien
aaagctaaccttgcaattggctgtgtttcgtat

SEQ ID NO: 176093 - DNA, 33 bp, Homo sapien
ctgcattaagtggaaacatctgactgtcactct

SEQ ID NO: 176094 - DNA, 33 bp, Homo sapien
ctgcattaagtggaaatatctgactgtcactct

SEQ ID NO: 176095 - DNA, 33 bp, Homo sapien
aatctgtttatgataccggggttaattccttaa

SEQ ID NO: 176096 - DNA, 33 bp, Homo sapien
aatctgtttatgatactggggttaattccttaa

SEQ ID NO: 176097 - DNA, 33 bp, Homo sapien
aacccatactctgaaccgagaattatatgtagt

SEQ ID NO: 176098 - DNA, 33 bp, Homo sapien
aacccatactctgaactgagaattatatgtagt

SEQ ID NO: 176099 - DNA, 33 bp, Homo sapien
actttcttagagccacagattcttggtagtttt

SEQ ID NO: 176100 - DNA, 33 bp, Homo sapien
actttcttagagccacggattcttggtagtttt

SEQ ID NO: 176101 - DNA, 33 bp, Homo sapien
ctgggtccagacaggacgcttagagggccacag

SEQ ID NO: 176102 - DNA, 33 bp, Homo sapien
ctgggtccagacaggatgcttagagggccacag

SEQ ID NO: 176103 - DNA, 33 bp, Homo sapien
ggctgtaactcttcataagaaataaagtctcat

SEQ ID NO: 176104 - DNA, 33 bp, Homo sapien
ggctgtaactcttcatgagaaataaagtctcat

SEQ ID NO: 176105 - DNA, 33 bp, Homo sapien
ttccctgcattctctcactgatacctgttgata

SEQ ID NO: 176106 - DNA, 33 bp, Homo sapien
ttccctgcattctctcgctgatacctgttgata

SEQ ID NO: 176107 - DNA, 33 bp, Homo sapien
acattggagccttcagcacagatttgtccagaa

SEQ ID NO: 176108 - DNA, 33 bp, Homo sapien
acattggagccttcagtacagatttgtccagaa

SEQ ID NO: 176109 - DNA, 33 bp, Homo sapien
tttagttcaattcaacaatcttgttcttttatt

SEQ ID NO: 176110 - DNA, 33 bp, Homo sapien
tttagttcaattcaaccatcttgttcttttatt

SEQ ID NO: 176111 - DNA, 33 bp, Homo sapien
tttcactttacagactcacactgaattctttct

SEQ ID NO: 176112 - DNA, 33 bp, Homo sapien
tttcactttacagactgacactgaattctttct

SEQ ID NO: 176113 - DNA, 33 bp, Homo sapien
gtcccaggactcaagcccaggtaagtgttaaac

SEQ ID NO: 176114 - DNA, 33 bp, Homo sapien
gtcccaggactcaagctcaggtaagtgttaaac

SEQ ID NO: 176115 - DNA, 33 bp, Homo sapien
tctccaggctattccactcacttattcttcatc

SEQ ID NO: 176116 - DNA, 33 bp, Homo sapien
tctccaggctattccattcacttattcttcatc

SEQ ID NO: 176117 - DNA, 33 bp, Homo sapien
cctagctaactgactgacactctcataggagac

SEQ ID NO: 176118 - DNA, 33 bp, Homo sapien
cctagctaactgactgccactctcataggagac

SEQ ID NO: 176119 - DNA, 33 bp, Homo sapien
accaagttctgctccaaaagttctctccagtgt

SEQ ID NO: 176120 - DNA, 33 bp, Homo sapien
accaagttctgctccagaagttctctccagtgt

SEQ ID NO: 176121 - DNA, 33 bp, Homo sapien
gcaaaagctggggaacaagaagcagcgtctgca

SEQ ID NO: 176122 - DNA, 33 bp, Homo sapien
gcaaaagctggggaacgagaagcagcgtctgca

SEQ ID NO: 176123 - DNA, 33 bp, Homo sapien
gagcttcagtttcggcaaaaggtcttagcagtc

SEQ ID NO: 176124 - DNA, 33 bp, Homo sapien
gagcttcagtttcggcgaaaggtcttagcagtc

SEQ ID NO: 176125 - DNA, 33 bp, Homo sapien
agcctggcattggctacacccacttctggttag

SEQ ID NO: 176126 - DNA, 33 bp, Homo sapien
agcctggcattggctatacccacttctggttag

SEQ ID NO: 176127 - DNA, 33 bp, Homo sapien
ctgggggctagattaccgatatcccaacatcaa

SEQ ID NO: 176128 - DNA, 33 bp, Homo sapien
ctgggggctagattactgatatcccaacatcaa

SEQ ID NO: 176129 - DNA, 33 bp, Homo sapien
ctccattcagggactacgtaacctccatcagag

SEQ ID NO: 176130 - DNA, 33 bp, Homo sapien
ctccattcagggactatgtaacctccatcagag

SEQ ID NO: 176131 - DNA, 33 bp, Homo sapien
tgatttctatctctccaattctccctcacacct

SEQ ID NO: 176132 - DNA, 33 bp, Homo sapien
tgatttctatctctccgattctccctcacacct

SEQ ID NO: 176133 - DNA, 33 bp, Homo sapien
gagtagagactgtatccgacacatggttgtgtc

SEQ ID NO: 176134 - DNA, 33 bp, Homo sapien
gagtagagactgtatctgacacatggttgtgtc

SEQ ID NO: 176135 - DNA, 33 bp, Homo sapien
gggtagtcaccctcgaagctcagaatgggaaat

SEQ ID NO: 176136 - DNA, 33 bp, Homo sapien
gggtagtcaccctcgaggctcagaatgggaaat

SEQ ID NO: 176137 - DNA, 33 bp, Homo sapien
ttaatgaggccagaagaagttggaatgaggatt

SEQ ID NO: 176138 - DNA, 33 bp, Homo sapien
ttaatgaggccagaagcagttggaatgaggatt

SEQ ID NO: 176139 - DNA, 33 bp, Homo sapien
atatcattggttaggaaggtagaaaattgatta

SEQ ID NO: 176140 - DNA, 33 bp, Homo sapien
atatcattggttaggagggtagaaaattgatta

SEQ ID NO: 176141 - DNA, 33 bp, Homo sapien
ctcttcttccaattcccagatggttacactgaa

SEQ ID NO: 176142 - DNA, 33 bp, Homo sapien
ctcttcttccaattccgagatggttacactgaa

SEQ ID NO: 176143 - DNA, 33 bp, Homo sapien
caagaagaccttgaagcctggccagtacattga

SEQ ID NO: 176144 - DNA, 33 bp, Homo sapien
caagaagaccttgaaggctggccagtacattga

SEQ ID NO: 176145 - DNA, 33 bp, Homo sapien
atttgtgcaaaacagacgacatttgccttattc

SEQ ID NO: 176146 - DNA, 33 bp, Homo sapien
atttgtgcaaaacagaggacatttgccttattc

SEQ ID NO: 176147 - DNA, 33 bp, Homo sapien
agaggtgggtgcctcaaaaactcggggtatggt

SEQ ID NO: 176148 - DNA, 33 bp, Homo sapien
agaggtgggtgcctcacaaactcggggtatggt

SEQ ID NO: 176149 - DNA, 33 bp, Homo sapien
taggtgaaaatgtgaaactcagggcacagcaag

SEQ ID NO: 176150 - DNA, 33 bp, Homo sapien
taggtgaaaatgtgaagctcagggcacagcaag

SEQ ID NO: 176151 - DNA, 33 bp, Homo sapien
tcttccttgactgtagcatgcattttcttgaag

SEQ ID NO: 176152 - DNA, 33 bp, Homo sapien
tcttccttgactgtagtatgcattttcttgaag

SEQ ID NO: 176153 - DNA, 33 bp, Homo sapien
gggcttgtcgccctgacgctcagtgtttggcag

SEQ ID NO: 176154 - DNA, 33 bp, Homo sapien
gggcttgtcgccctgatgctcagtgtttggcag

SEQ ID NO: 176155 - DNA, 33 bp, Homo sapien
caaatattctcaccaaaaggctaaataaggcat

SEQ ID NO: 176156 - DNA, 33 bp, Homo sapien
caaatattctcaccaagaggctaaataaggcat

SEQ ID NO: 176157 - DNA, 33 bp, Homo sapien
actggatagtcgcacaaaaaaaaacaaagttag

SEQ ID NO: 176158 - DNA, 33 bp, Homo sapien
actggatagtcgcacacaaaaaaacaaagttag

SEQ ID NO: 176159 - DNA, 33 bp, Homo sapien
aataaatataggatgaatatggttaaatgaatg

SEQ ID NO: 176160 - DNA, 33 bp, Homo sapien
aataaatataggatgactatggttaaatgaatg

SEQ ID NO: 176161 - DNA, 33 bp, Homo sapien
acacaaatactaaacaataacacacctgcatca

SEQ ID NO: 176162 - DNA, 33 bp, Homo sapien
acacaaatactaaacagtaacacacctgcatca

SEQ ID NO: 176163 - DNA, 33 bp, Homo sapien
aggcagcagctacggacggagatgggcacttat

SEQ ID NO: 176164 - DNA, 33 bp, Homo sapien
aggcagcagctacggatggagatgggcacttat

SEQ ID NO: 176165 - DNA, 33 bp, Homo sapien
ggggggcaagttctcaaatgaatgattcccacc

SEQ ID NO: 176166 - DNA, 33 bp, Homo sapien
ggggggcaagttctcagatgaatgattcccacc

SEQ ID NO: 176167 - DNA, 33 bp, Homo sapien
gaccaaaggctcctccacttcctgcaggtgttc

SEQ ID NO: 176168 - DNA, 33 bp, Homo sapien
gaccaaaggctcctccgcttcctgcaggtgttc

SEQ ID NO: 176169 - DNA, 33 bp, Homo sapien
catctgtaagacaaggcccctggcagtccacac

SEQ ID NO: 176170 - DNA, 33 bp, Homo sapien
catctgtaagacaaggtccctggcagtccacac

SEQ ID NO: 176171 - DNA, 33 bp, Homo sapien
ctttggacctccagaactgtaaagaatatattt

SEQ ID NO: 176172 - DNA, 33 bp, Homo sapien
ctttggacctccagaagtgtaaagaatatattt

SEQ ID NO: 176173 - DNA, 33 bp, Homo sapien
aggccctgtgctaagaactgtgcttaggcatca

SEQ ID NO: 176174 - DNA, 33 bp, Homo sapien
aggccctgtgctaagagctgtgcttaggcatca

SEQ ID NO: 176175 - DNA, 33 bp, Homo sapien
tgcttattcccaggccaacatcacatccactga

SEQ ID NO: 176176 - DNA, 33 bp, Homo sapien
tgcttattcccaggccgacatcacatccactga

SEQ ID NO: 176177 - DNA, 33 bp, Homo sapien
cgaatcgagatactacaagttaatagcatagga

SEQ ID NO: 176178 - DNA, 33 bp, Homo sapien
cgaatcgagatactacgagttaatagcatagga

SEQ ID NO: 176179 - DNA, 33 bp, Homo sapien
ctgcggctcatgctaaaaacaggtaggggctga

SEQ ID NO: 176180 - DNA, 33 bp, Homo sapien
ctgcggctcatgctaagaacaggtaggggctga

SEQ ID NO: 176181 - DNA, 33 bp, Homo sapien
gatccagggtgctcttaaaaagttcttgacctc

SEQ ID NO: 176182 - DNA, 33 bp, Homo sapien
gatccagggtgctcttgaaaagttcttgacctc

SEQ ID NO: 176183 - DNA, 33 bp, Homo sapien
tcgccctagttggaacacagttggagatgacca

SEQ ID NO: 176184 - DNA, 33 bp, Homo sapien
tcgccctagttggaacgcagttggagatgacca

SEQ ID NO: 176185 - DNA, 33 bp, Homo sapien
caatcattttcaaataacaatgtcccctctcat

SEQ ID NO: 176186 - DNA, 33 bp, Homo sapien
caatcattttcaaatagcaatgtcccctctcat

SEQ ID NO: 176187 - DNA, 33 bp, Homo sapien
atattcaatgcatataaaagcacttggatgtac

SEQ ID NO: 176188 - DNA, 33 bp, Homo sapien
atattcaatgcatatataagcacttggatgtac

SEQ ID NO: 176189 - DNA, 33 bp, Homo sapien
taagtaatttgatttacgggactagatgtttgg

SEQ ID NO: 176190 - DNA, 33 bp, Homo sapien
taagtaatttgatttatgggactagatgtttgg

SEQ ID NO: 176191 - DNA, 33 bp, Homo sapien
attctcacaaatgctaaatgtaactttaaatct

SEQ ID NO: 176192 - DNA, 33 bp, Homo sapien
attctcacaaatgctagatgtaactttaaatct

SEQ ID NO: 176193 - DNA, 33 bp, Homo sapien
gaacttcctgttgaaaccttaccagtagaccct

SEQ ID NO: 176194 - DNA, 33 bp, Homo sapien
gaacttcctgttgaaatcttaccagtagaccct

SEQ ID NO: 176195 - DNA, 33 bp, Homo sapien
atgtgcaggggagagaaggtacaataactccac

SEQ ID NO: 176196 - DNA, 33 bp, Homo sapien
atgtgcaggggagagagggtacaataactccac

SEQ ID NO: 176197 - DNA, 33 bp, Homo sapien
ttgtaggatccaagtacgaaccaggcaaagggg

SEQ ID NO: 176198 - DNA, 33 bp, Homo sapien
ttgtaggatccaagtatgaaccaggcaaagggg

SEQ ID NO: 176199 - DNA, 33 bp, Homo sapien
gtgcactggcagcaacgcaggaaacttcgcttc

SEQ ID NO: 176200 - DNA, 33 bp, Homo sapien
gtgcactggcagcaactcaggaaacttcgcttc

SEQ ID NO: 176201 - DNA, 33 bp, Homo sapien
cactctcagagctttcacgacctccacccaagc

SEQ ID NO: 176202 - DNA, 33 bp, Homo sapien
cactctcagagctttcgcgacctccacccaagc

SEQ ID NO: 176203 - DNA, 33 bp, Homo sapien
cacagtaagtgcttaacaaatagcaactgtttt

SEQ ID NO: 176204 - DNA, 33 bp, Homo sapien
cacagtaagtgcttaataaatagcaactgtttt

SEQ ID NO: 176205 - DNA, 33 bp, Homo sapien
actaactctgaagctaagactcttttttaatag

SEQ ID NO: 176206 - DNA, 33 bp, Homo sapien
actaactctgaagctaggactcttttttaatag

SEQ ID NO: 176207 - DNA, 33 bp, Homo sapien
ttttcgagacaataaaaggaaattgaacatgga

SEQ ID NO: 176208 - DNA, 33 bp, Homo sapien
ttttcgagacaataaagggaaattgaacatgga

SEQ ID NO: 176209 - DNA, 33 bp, Homo sapien
gatctgccaggcagtaaattttcccctggactc

SEQ ID NO: 176210 - DNA, 33 bp, Homo sapien
gatctgccaggcagtagattttcccctggactc

SEQ ID NO: 176211 - DNA, 33 bp, Homo sapien
ctgtctctgctgactcactctggacaggccaat

SEQ ID NO: 176212 - DNA, 33 bp, Homo sapien
ctgtctctgctgactcgctctggacaggccaat

SEQ ID NO: 176213 - DNA, 33 bp, Homo sapien
agaggaggggaaagagaaggaagccatgcaggt

SEQ ID NO: 176214 - DNA, 33 bp, Homo sapien
agaggaggggaaagaggaggaagccatgcaggt

SEQ ID NO: 176215 - DNA, 33 bp, Homo sapien
tgcaccatgttacatccccaaagtatcatcatc

SEQ ID NO: 176216 - DNA, 33 bp, Homo sapien
tgcaccatgttacatctccaaagtatcatcatc

SEQ ID NO: 176217 - DNA, 33 bp, Homo sapien
gtagtggctgacatgaaagtagagaaccctgtc

SEQ ID NO: 176218 - DNA, 33 bp, Homo sapien
gtagtggctgacatgacagtagagaaccctgtc

SEQ ID NO: 176219 - DNA, 33 bp, Homo sapien
gaatggagagatccccagctgccaccaactcac

SEQ ID NO: 176220 - DNA, 33 bp, Homo sapien
gaatggagagatccccggctgccaccaactcac

SEQ ID NO: 176221 - DNA, 33 bp, Homo sapien
tacactagatatggtacagaaatgtgcaaatgg

SEQ ID NO: 176222 - DNA, 33 bp, Homo sapien
tacactagatatggtatagaaatgtgcaaatgg

SEQ ID NO: 176223 - DNA, 33 bp, Homo sapien
ccttgaaggttcatgccaattccatgatataag

SEQ ID NO: 176224 - DNA, 33 bp, Homo sapien
ccttgaaggttcatgctaattccatgatataag

SEQ ID NO: 176225 - DNA, 33 bp, Homo sapien
taacatgtatttaatgcagcaagtttctaaatg

SEQ ID NO: 176226 - DNA, 33 bp, Homo sapien
taacatgtatttaatggagcaagtttctaaatg

SEQ ID NO: 176227 - DNA, 33 bp, Homo sapien
gacaagtatctggaacactgtactaagcaagag

SEQ ID NO: 176228 - DNA, 33 bp, Homo sapien
gacaagtatctggaacgctgtactaagcaagag

SEQ ID NO: 176229 - DNA, 33 bp, Homo sapien
ggcctctccatttctcaaacttgaagaacaaaa

SEQ ID NO: 176230 - DNA, 33 bp, Homo sapien
ggcctctccatttctcgaacttgaagaacaaaa

SEQ ID NO: 176231 - DNA, 33 bp, Homo sapien
aggcccatccaacttcaaaactccctactcttg

SEQ ID NO: 176232 - DNA, 33 bp, Homo sapien
aggcccatccaacttccaaactccctactcttg

SEQ ID NO: 176233 - DNA, 33 bp, Homo sapien
gtcatcccgactgacacctcctggcatgaacag

SEQ ID NO: 176234 - DNA, 33 bp, Homo sapien
gtcatcccgactgacagctcctggcatgaacag

SEQ ID NO: 176235 - DNA, 33 bp, Homo sapien
ctaatataaatgtagacgtgaaagtgaatgtct

SEQ ID NO: 176236 - DNA, 33 bp, Homo sapien
ctaatataaatgtagatgtgaaagtgaatgtct

SEQ ID NO: 176237 - DNA, 33 bp, Homo sapien
aaattccaaacatgaaacccacctatcatggcc

SEQ ID NO: 176238 - DNA, 33 bp, Homo sapien
aaattccaaacatgaaccccacctatcatggcc

SEQ ID NO: 176239 - DNA, 33 bp, Homo sapien
cccaactgagctaaccagcctgaaggagctact

SEQ ID NO: 176240 - DNA, 33 bp, Homo sapien
cccaactgagctaaccggcctgaaggagctact

SEQ ID NO: 176241 - DNA, 33 bp, Homo sapien
gaatctgtcatttcacagcaaactgacagtatt

SEQ ID NO: 176242 - DNA, 33 bp, Homo sapien
gaatctgtcatttcacggcaaactgacagtatt

SEQ ID NO: 176243 - DNA, 33 bp, Homo sapien
atatactggtccttgaatatacatctttttaat

SEQ ID NO: 176244 - DNA, 33 bp, Homo sapien
atatactggtccttgagtatacatctttttaat

SEQ ID NO: 176245 - DNA, 33 bp, Homo sapien
tcatgttttaatttaacgttctcataccagaag

SEQ ID NO: 176246 - DNA, 33 bp, Homo sapien
tcatgttttaatttaatgttctcataccagaag

SEQ ID NO: 176247 - DNA, 33 bp, Homo sapien
ttgaaccagcatcccacgtttatcactccactg

SEQ ID NO: 176248 - DNA, 33 bp, Homo sapien
ttgaaccagcatcccatgtttatcactccactg

SEQ ID NO: 176249 - DNA, 33 bp, Homo sapien
caggatatacagagagacaggggacaatggaga

SEQ ID NO: 176250 - DNA, 33 bp, Homo sapien
caggatatacagagagtcaggggacaatggaga

SEQ ID NO: 176251 - DNA, 33 bp, Homo sapien
ttagggagttgcaacaggcttcattccactagc

SEQ ID NO: 176252 - DNA, 33 bp, Homo sapien
ttagggagttgcaacatgcttcattccactagc

SEQ ID NO: 176253 - DNA, 33 bp, Homo sapien
gtcagagtggcgtctacgggttgtgtaagattt

SEQ ID NO: 176254 - DNA, 33 bp, Homo sapien
gtcagagtggcgtctatgggttgtgtaagattt

SEQ ID NO: 176255 - DNA, 33 bp, Homo sapien
tgctaagacaagggagaacagccctgtagccca

SEQ ID NO: 176256 - DNA, 33 bp, Homo sapien
tgctaagacaagggaggacagccctgtagccca

SEQ ID NO: 176257 - DNA, 33 bp, Homo sapien
taaggaagaatgttccaattttcagcatgaaga

SEQ ID NO: 176258 - DNA, 33 bp, Homo sapien
taaggaagaatgttccgattttcagcatgaaga

SEQ ID NO: 176259 - DNA, 33 bp, Homo sapien
ggaacagagactgtccaaattggaggccccaga

SEQ ID NO: 176260 - DNA, 33 bp, Homo sapien
ggaacagagactgtcccaattggaggccccaga

SEQ ID NO: 176261 - DNA, 33 bp, Homo sapien
aacatggcgttgactaacagggcgccgtccgtg

SEQ ID NO: 176262 - DNA, 33 bp, Homo sapien
aacatggcgttgactagcagggcgccgtccgtg

SEQ ID NO: 176263 - DNA, 33 bp, Homo sapien; identical to SEQ ID NO: 176261

SEQ ID NO: 176264 - DNA, 33 bp, Homo sapien; identical to SEQ ID NO: 176262

SEQ ID NO: 176265 - DNA, 33 bp, Homo sapien
agccaccatgtgcggccaagacccagaatcctt

SEQ ID NO: 176266 - DNA, 33 bp, Homo sapien
agccaccatgtgcggctaagacccagaatcctt

SEQ ID NO: 176267 - DNA, 33 bp, Homo sapien
tggcactcaggtgtaacaaatgccacgtcttta

SEQ ID NO: 176268 - DNA, 33 bp, Homo sapien
tggcactcaggtgtaagaaatgccacgtcttta

SEQ ID NO: 176269 - DNA, 33 bp, Homo sapien
gtcggagactggtactaaaaaggatttcccggt

SEQ ID NO: 176270 - DNA, 33 bp, Homo sapien
gtcggagactggtactgaaaaggatttcccggt

SEQ ID NO: 176271 - DNA, 33 bp, Homo sapien
ggagttctcaaaacaactctcgctccgcctcta

SEQ ID NO: 176272 - DNA, 33 bp, Homo sapien
ggagttctcaaaacaattctcgctccgcctcta

SEQ ID NO: 176273 - DNA, 33 bp, Homo sapien
gcctctatcctcaaccagactctgtgggagtgt

SEQ ID NO: 176274 - DNA, 33 bp, Homo sapien
gcctctatcctcaaccggactctgtgggagtgt

SEQ ID NO: 176275 - DNA, 33 bp, Homo sapien
aggaggctgcctcaccaggcatgtgcagcccac

SEQ ID NO: 176276 - DNA, 33 bp, Homo sapien
aggaggctgcctcaccgggcatgtgcagcccac

SEQ ID NO: 176277 - DNA, 33 bp, Homo sapien
tagatttggcctgctaaggagaactaaataaat

SEQ ID NO: 176278 - DNA, 33 bp, Homo sapien
tagatttggcctgctagggagaactaaataaat

SEQ ID NO: 176279 - DNA, 33 bp, Homo sapien
gctatcctgaactctgaaaacaaacaggtcgaa

SEQ ID NO: 176280 - DNA, 33 bp, Homo sapien
gctatcctgaactctggaaacaaacaggtcgaa

SEQ ID NO: 176281 - DNA, 33 bp, Homo sapien
cagaggccagccagtagaaaaccagccattgac

SEQ ID NO: 176282 - DNA, 33 bp, Homo sapien
cagaggccagccagtataaaaccagccattgac

SEQ ID NO: 176283 - DNA, 33 bp, Homo sapien
tttggcaggaatcaccagcttaattgtttttgt

SEQ ID NO: 176284 - DNA, 33 bp, Homo sapien
tttggcaggaatcaccggcttaattgtttttgt

SEQ ID NO: 176285 - DNA, 33 bp, Homo sapien
gggagggccttggataacagagagagggatttg

SEQ ID NO: 176286 - DNA, 33 bp, Homo sapien
gggagggccttggatagcagagagagggatttg

SEQ ID NO: 176287 - DNA, 33 bp, Homo sapien
acaggaaattgtactccatctcacactatacac

SEQ ID NO: 176288 - DNA, 33 bp, Homo sapien
acaggaaattgtactctatctcacactatacac

SEQ ID NO: 176289 - DNA, 33 bp, Homo sapien
tgtgcttaataaggcaaagccgaaccaagtatt

SEQ ID NO: 176290 - DNA, 33 bp, Homo sapien
tgtgcttaataaggcacagccgaaccaagtatt

SEQ ID NO: 176291 - DNA, 33 bp, Homo sapien
cattttcattctgtaccgaacatctccatgtag

SEQ ID NO: 176292 - DNA, 33 bp, Homo sapien
cattttcattctgtactgaacatctccatgtag

SEQ ID NO: 176293 - DNA, 33 bp, Homo sapien
gcgatagaggaaggggaatcataagctctaaca

SEQ ID NO: 176294 - DNA, 33 bp, Homo sapien
gcgatagaggaagggggatcataagctctaaca

SEQ ID NO: 176295 - DNA, 33 bp, Homo sapien
aaatctatatttacagcccaggcctctccctaa

SEQ ID NO: 176296 - DNA, 33 bp, Homo sapien
aaatctatatttacagtccaggcctctccctaa

SEQ ID NO: 176297 - DNA, 33 bp, Homo sapien
attcaagtagtatccaagatagctttgggatta

SEQ ID NO: 176298 - DNA, 33 bp, Homo sapien
attcaagtagtatccaggatagctttgggatta

SEQ ID NO: 176299 - DNA, 33 bp, Homo sapien
agaagatatcctagaaacatagcaaggaaaaga

SEQ ID NO: 176300 - DNA, 33 bp, Homo sapien
agaagatatcctagaatcatagcaaggaaaaga

SEQ ID NO: 176301 - DNA, 33 bp, Homo sapien
tgcctactatatgccaagcagtgtgccggacat

SEQ ID NO: 176302 - DNA, 33 bp, Homo sapien
tgcctactatatgccaggcagtgtgccggacat

SEQ ID NO: 176303 - DNA, 33 bp, Homo sapien
catcacagacgctccacccttgtgaactcatgt

SEQ ID NO: 176304 - DNA, 33 bp, Homo sapien
catcacagacgctccagccttgtgaactcatgt

SEQ ID NO: 176305 - DNA, 33 bp, Homo sapien
ggacttcccaggctcccgaagtgtaataagtaa

SEQ ID NO: 176306 - DNA, 33 bp, Homo sapien
ggacttcccaggctcctgaagtgtaataagtaa

SEQ ID NO: 176307 - DNA, 33 bp, Homo sapien
tatttatcctagagaactgaaaatgcgttcaca

SEQ ID NO: 176308 - DNA, 33 bp, Homo sapien
tatttatcctagagaattgaaaatgcgttcaca

SEQ ID NO: 176309 - DNA, 33 bp, Homo sapien
gttaaacagacacttaccttataatctggaaat

SEQ ID NO: 176310 - DNA, 33 bp, Homo sapien
gttaaacagacacttagcttataatctggaaat

SEQ ID NO: 176311 - DNA, 33 bp, Homo sapien
cattgccactccaggccgactctccttttcttt

SEQ ID NO: 176312 - DNA, 33 bp, Homo sapien
cattgccactccaggctgactctccttttcttt

SEQ ID NO: 176313 - DNA, 33 bp, Homo sapien
atcagaaggatgaaagaaaggcagtgtggttaa

SEQ ID NO: 176314 - DNA, 33 bp, Homo sapien
atcagaaggatgaaaggaaggcagtgtggttaa

SEQ ID NO: 176315 - DNA, 33 bp, Homo sapien
tgagaagcagaaccgggacctgtcattcttctg

SEQ ID NO: 176316 - DNA, 33 bp, Homo sapien
tgagaagcagaaccggtacctgtcattcttctg

SEQ ID NO: 176317 - DNA, 33 bp, Homo sapien
tgctgattctattcaaccaacaagtggtaaata

SEQ ID NO: 176318 - DNA, 33 bp, Homo sapien
tgctgattctattcaatcaacaagtggtaaata

SEQ ID NO: 176319 - DNA, 33 bp, Homo sapien
agacatttctctgtccacttaggatttgtgcat

SEQ ID NO: 176320 - DNA, 33 bp, Homo sapien
agacatttctctgtccgcttaggatttgtgcat

SEQ ID NO: 176321 - DNA, 33 bp, Homo sapien
actctgcccataggcccggcactagcagcactg

SEQ ID NO: 176322 - DNA, 33 bp, Homo sapien
actctgcccataggcctggcactagcagcactg

SEQ ID NO: 176323 - DNA, 33 bp, Homo sapien
agatggaagaggttagcacagaaagataccaat

SEQ ID NO: 176324 - DNA, 33 bp, Homo sapien
agatggaagaggttagtacagaaagataccaat

SEQ ID NO: 176325 - DNA, 33 bp, Homo sapien
tagggaatactgataaaggaaaaaagtctgtat

SEQ ID NO: 176326 - DNA, 33 bp, Homo sapien
tagggaatactgataagggaaaaaagtctgtat

SEQ ID NO: 176327 - DNA, 33 bp, Homo sapien
ctaggatggagtacaaagtggccattagacaga

SEQ ID NO: 176328 - DNA, 33 bp, Homo sapien
ctaggatggagtacaaggtggccattagacaga

SEQ ID NO: 176329 - DNA, 33 bp, Homo sapien
agggactctagagtctaagaaatgccctaacct

SEQ ID NO: 176330 - DNA, 33 bp, Homo sapien
agggactctagagtcttagaaatgccctaacct

SEQ ID NO: 176331 - DNA, 33 bp, Homo sapien
caacccctgctggaaaaccaacctgtttccctt

SEQ ID NO: 176332 - DNA, 33 bp, Homo sapien
caacccctgctggaaatccaacctgtttccctt

SEQ ID NO: 176333 - DNA, 33 bp, Homo sapien
tatgatgagaatggcaaatcactcctgtggcct

SEQ ID NO: 176334 - DNA, 33 bp, Homo sapien
tatgatgagaatggcacatcactcctgtggcct

SEQ ID NO: 176335 - DNA, 33 bp, Homo sapien
agaaaaacatcagataaatccatattgaggaac

SEQ ID NO: 176336 - DNA, 33 bp, Homo sapien
agaaaaacatcagatagatccatattgaggaac

SEQ ID NO: 176337 - DNA, 33 bp, Homo sapien
agttgtgacaaatgtgcaatagttctgaacatt

SEQ ID NO: 176338 - DNA, 33 bp, Homo sapien
agttgtgacaaatgtgtaatagttctgaacatt

SEQ ID NO: 176339 - DNA, 33 bp, Homo sapien
tacatcctagtctctacaacctgtggatgttag

SEQ ID NO: 176340 - DNA, 33 bp, Homo sapien
tacatcctagtctctagaacctgtggatgttag

SEQ ID NO: 176341 - DNA, 33 bp, Homo sapien
atatatcacttccagacgaggaacctgagtctc

SEQ ID NO: 176342 - DNA, 33 bp, Homo sapien
atatatcacttccagatgaggaacctgagtctc

SEQ ID NO: 176343 - DNA, 33 bp, Homo sapien
cagccctcctaatttacttcacatttgcatata

SEQ ID NO: 176344 - DNA, 33 bp, Homo sapien
cagccctcctaatttatttcacatttgcatata

SEQ ID NO: 176345 - DNA, 33 bp, Homo sapien
tttgagccccagtgaactaaaatgttatcttcc

SEQ ID NO: 176346 - DNA, 33 bp, Homo sapien
tttgagccccagtgaattaaaatgttatcttcc

SEQ ID NO: 176347 - DNA, 33 bp, Homo sapien
gccagaaggatctttccaatgtaagtctgacca

SEQ ID NO: 176348 - DNA, 33 bp, Homo sapien
gccagaaggatctttctaatgtaagtctgacca

SEQ ID NO: 176349 - DNA, 33 bp, Homo sapien
ctccctgcaccaccaacgtacaaagaggacact

SEQ ID NO: 176350 - DNA, 33 bp, Homo sapien
ctccctgcaccaccaatgtacaaagaggacact

SEQ ID NO: 176351 - DNA, 33 bp, Homo sapien
ttcccaactccaatgcagattactccctcctct

SEQ ID NO: 176352 - DNA, 33 bp, Homo sapien
ttcccaactccaatgcggattactccctcctct

SEQ ID NO: 176353 - DNA, 33 bp, Homo sapien
tggatggcagagccgacggaatggggtctccag

SEQ ID NO: 176354 - DNA, 33 bp, Homo sapien
tggatggcagagccgagggaatggggtctccag

SEQ ID NO: 176355 - DNA, 33 bp, Homo sapien
cgcatggctggctttacaacagtcaatctcctc

SEQ ID NO: 176356 - DNA, 33 bp, Homo sapien
cgcatggctggctttagaacagtcaatctcctc

SEQ ID NO: 176357 - DNA, 33 bp, Homo sapien
tcttgccacccacagaaataacctatttgaaga

SEQ ID NO: 176358 - DNA, 33 bp, Homo sapien
tcttgccacccacagagataacctatttgaaga

SEQ ID NO: 176359 - DNA, 33 bp, Homo sapien
gcctttttttcctgccaaatagaaggtggtgtt

SEQ ID NO: 176360 - DNA, 33 bp, Homo sapien
gcctttttttcctgccgaatagaaggtggtgtt

SEQ ID NO: 176361 - DNA, 33 bp, Homo sapien
aggggtgtgacatcgcagaagggaagacaagtt

SEQ ID NO: 176362 - DNA, 33 bp, Homo sapien
aggggtgtgacatcgcggaagggaagacaagtt

SEQ ID NO: 176363 - DNA, 33 bp, Homo sapien
ggtgtttgactagacaagtaagtgaatggaaga

SEQ ID NO: 176364 - DNA, 33 bp, Homo sapien
ggtgtttgactagacaggtaagtgaatggaaga

SEQ ID NO: 176365 - DNA, 33 bp, Homo sapien
cttagctttttggccccggaaactgaatgtttg

SEQ ID NO: 176366 - DNA, 33 bp, Homo sapien
cttagctttttggccctggaaactgaatgtttg

SEQ ID NO: 176367 - DNA, 33 bp, Homo sapien
aaaaaaggaagatcaacatcctgcagaatgact

SEQ ID NO: 176368 - DNA, 33 bp, Homo sapien
aaaaaaggaagatcaatatcctgcagaatgact

SEQ ID NO: 176369 - DNA, 33 bp, Homo sapien
acaattctttgtggtacaaaattcagaagtgaa

SEQ ID NO: 176370 - DNA, 33 bp, Homo sapien
acaattctttgtggtagaaaattcagaagtgaa

SEQ ID NO: 176371 - DNA, 33 bp, Homo sapien
ttaagaagccaaacaaaatgggtcatagttaag

SEQ ID NO: 176372 - DNA, 33 bp, Homo sapien
ttaagaagccaaacaagatgggtcatagttaag

SEQ ID NO: 176373 - DNA, 33 bp, Homo sapien
cagaattgaactgaacacaaggatacccagctg

SEQ ID NO: 176374 - DNA, 33 bp, Homo sapien
cagaattgaactgaacgcaaggatacccagctg

SEQ ID NO: 176375 - DNA, 33 bp, Homo sapien
ttcagttcaattctgacgctatttacccggagt

SEQ ID NO: 176376 - DNA, 33 bp, Homo sapien
ttcagttcaattctgatgctatttacccggagt

SEQ ID NO: 176377 - DNA, 33 bp, Homo sapien
tgtgacactggtatgacaagaaatgtatgtctt

SEQ ID NO: 176378 - DNA, 33 bp, Homo sapien
tgtgacactggtatgataagaaatgtatgtctt

SEQ ID NO: 176379 - DNA, 33 bp, Homo sapien
gatggatattactagaacacaactcagccacct

SEQ ID NO: 176380 - DNA, 33 bp, Homo sapien
gatggatattactagagcacaactcagccacct

SEQ ID NO: 176381 - DNA, 33 bp, Homo sapien
tccttcaactgctctcaagtataaggtctagtg

SEQ ID NO: 176382 - DNA, 33 bp, Homo sapien
tccttcaactgctctcgagtataaggtctagtg

SEQ ID NO: 176383 - DNA, 33 bp, Homo sapien
gtctaatgactgaaacgcggtaagtcttaataa

SEQ ID NO: 176384 - DNA, 33 bp, Homo sapien
gtctaatgactgaaactcggtaagtcttaataa

SEQ ID NO: 176385 - DNA, 33 bp, Homo sapien
tctgagtggtctgaaacccttacctgattctga

SEQ ID NO: 176386 - DNA, 33 bp, Homo sapien
tctgagtggtctgaaatccttacctgattctga

SEQ ID NO: 176387 - DNA, 33 bp, Homo sapien
ctcagaaccattgcaaagcctaagaaaaaccaa

SEQ ID NO: 176388 - DNA, 33 bp, Homo sapien
ctcagaaccattgcaaggcctaagaaaaaccaa

SEQ ID NO: 176389 - DNA, 33 bp, Homo sapien
ctggctctggaatgaacgttattaaaaaagaag

SEQ ID NO: 176390 - DNA, 33 bp, Homo sapien
ctggctctggaatgaatgttattaaaaaagaag

SEQ ID NO: 176391 - DNA, 33 bp, Homo sapien
aggacagctgccaagacagaacctgataaagaa

SEQ ID NO: 176392 - DNA, 33 bp, Homo sapien
aggacagctgccaagagagaacctgataaagaa

SEQ ID NO: 176393 - DNA, 33 bp, Homo sapien
acagagatgggaacaacgtgatcctagtagact

SEQ ID NO: 176394 - DNA, 33 bp, Homo sapien
acagagatgggaacaatgtgatcctagtagact

SEQ ID NO: 176395 - DNA, 33 bp, Homo sapien
tagctaaaactgacgtaaacaaatcttagcctg

SEQ ID NO: 176396 - DNA, 33 bp, Homo sapien
tagctaaaactgacgtgaacaaatcttagcctg

SEQ ID NO: 176397 - DNA, 33 bp, Homo sapien
gggagcaagatgaagaagtgtaagctaaatgac

SEQ ID NO: 176398 - DNA, 33 bp, Homo sapien
gggagcaagatgaagaggtgtaagctaaatgac

SEQ ID NO: 176399 - DNA, 33 bp, Homo sapien
ctaccccaagtttgcaagagatagtcctacatt

SEQ ID NO: 176400 - DNA, 33 bp, Homo sapien
ctaccccaagtttgcaggagatagtcctacatt

SEQ ID NO: 176401 - DNA, 33 bp, Homo sapien
tgagactcctaatcacagtcccaaaggattttt

SEQ ID NO: 176402 - DNA, 33 bp, Homo sapien
tgagactcctaatcacggtcccaaaggattttt

SEQ ID NO: 176403 - DNA, 33 bp, Homo sapien
acttaattaccagcaccatccttttaatgaaaa

SEQ ID NO: 176404 - DNA, 33 bp, Homo sapien
acttaattaccagcactatccttttaatgaaaa

SEQ ID NO: 176405 - DNA, 33 bp, Homo sapien
tcctcaaaaagtattccatatttcactcacaat

SEQ ID NO: 176406 - DNA, 33 bp, Homo sapien
tcctcaaaaagtattctatatttcactcacaat

SEQ ID NO: 176407 - DNA, 33 bp, Homo sapien
attcaatactctattcccagtcataaatggaac

SEQ ID NO: 176408 - DNA, 33 bp, Homo sapien
attcaatactctattctcagtcataaatggaac

SEQ ID NO: 176409 - DNA, 33 bp, Homo sapien
aagagaaaatatgagacgtatgtgccaaccaaa

SEQ ID NO: 176410 - DNA, 33 bp, Homo sapien
aagagaaaatatgagatgtatgtgccaaccaaa

SEQ ID NO: 176411 - DNA, 33 bp, Homo sapien
ttatgtcagtggaaggcacatttagcatttttc

SEQ ID NO: 176412 - DNA, 33 bp, Homo sapien
ttatgtcagtggaaggtacatttagcatttttc

SEQ ID NO: 176413 - DNA, 33 bp, Homo sapien
acactctagtgaactccacagttgataatccct

SEQ ID NO: 176414 - DNA, 33 bp, Homo sapien
acactctagtgaactctacagttgataatccct

SEQ ID NO: 176415 - DNA, 33 bp, Homo sapien
cctgacaaatacactagaattttattccttgga

SEQ ID NO: 176416 - DNA, 33 bp, Homo sapien
cctgacaaatacactataattttattccttgga

SEQ ID NO: 176417 - DNA, 33 bp, Homo sapien
cccagctcatatcctacctcattcattcactca

SEQ ID NO: 176418 - DNA, 33 bp, Homo sapien
cccagctcatatcctatctcattcattcactca

SEQ ID NO: 176419 - DNA, 33 bp, Homo sapien
ctactgagggaatacacacttatctctgtagct

SEQ ID NO: 176420 - DNA, 33 bp, Homo sapien
ctactgagggaatacatacttatctctgtagct

SEQ ID NO: 176421 - DNA, 33 bp, Homo sapien
acattgatgtatgtgacgtatgtgtacttgtct

SEQ ID NO: 176422 - DNA, 33 bp, Homo sapien
acattgatgtatgtgatgtatgtgtacttgtct

SEQ ID NO: 176423 - DNA, 33 bp, Homo sapien
agccctatataaatgacatcaagatgggctatg

SEQ ID NO: 176424 - DNA, 33 bp, Homo sapien
agccctatataaatgatatcaagatgggctatg

SEQ ID NO: 176425 - DNA, 33 bp, Homo sapien
gctcacttcacttatcagaactcctgcgcggcc

SEQ ID NO: 176426 - DNA, 33 bp, Homo sapien
gctcacttcacttatcggaactcctgcgcggcc

SEQ ID NO: 176427 - DNA, 33 bp, Homo sapien
gaatgcttggacacaaaataaagtgacggtgag

SEQ ID NO: 176428 - DNA, 33 bp, Homo sapien
gaatgcttggacacaatataaagtgacggtgag

SEQ ID NO: 176429 - DNA, 33 bp, Homo sapien
ctcttctctactccaaccccctgcacaggctct

SEQ ID NO: 176430 - DNA, 33 bp, Homo sapien
ctcttctctactccaagcccctgcacaggctct

SEQ ID NO: 176431 - DNA, 33 bp, Homo sapien
ggttgtgggagagctacagaccttagtttatat

SEQ ID NO: 176432 - DNA, 33 bp, Homo sapien
ggttgtgggagagctatagaccttagtttatat

SEQ ID NO: 176433 - DNA, 33 bp, Homo sapien
ggtgtgagagtgctgccatgattcttacctctt

SEQ ID NO: 176434 - DNA, 33 bp, Homo sapien
ggtgtgagagtgctgctatgattcttacctctt

SEQ ID NO: 176435 - DNA, 33 bp, Homo sapien
gctggagcaggtggtacagagtagagttcagaa

SEQ ID NO: 176436 - DNA, 33 bp, Homo sapien
gctggagcaggtggtagagagtagagttcagaa

SEQ ID NO: 176437 - DNA, 33 bp, Homo sapien
aatgggcaaactccgacgacagcaggatgacag

SEQ ID NO: 176438 - DNA, 33 bp, Homo sapien
aatgggcaaactccgaggacagcaggatgacag

SEQ ID NO: 176439 - DNA, 33 bp, Homo sapien
aacagagccacacgtcaaaggggcattttcaga

SEQ ID NO: 176440 - DNA, 33 bp, Homo sapien
aacagagccacacgtcgaaggggcattttcaga

SEQ ID NO: 176441 - DNA, 33 bp, Homo sapien
gcgcttgttaagggaacgagtgagcaactgagg

SEQ ID NO: 176442 - DNA, 33 bp, Homo sapien
gcgcttgttaagggaatgagtgagcaactgagg

SEQ ID NO: 176443 - DNA, 33 bp, Homo sapien
cgaactccaaactcaaatgtgcagcccagaatg

SEQ ID NO: 176444 - DNA, 33 bp, Homo sapien
cgaactccaaactcaagtgtgcagcccagaatg

SEQ ID NO: 176445 - DNA, 33 bp, Homo sapien
tcctcaggctcctcgaagcctctcaggggtcct

SEQ ID NO: 176446 - DNA, 33 bp, Homo sapien
tcctcaggctcctcgacgcctctcaggggtcct

SEQ ID NO: 176447 - DNA, 33 bp, Homo sapien
ccggtcacccagggataaaatggtagagctggg

SEQ ID NO: 176448 - DNA, 33 bp, Homo sapien
ccggtcacccagggattaaatggtagagctggg

SEQ ID NO: 176449 - DNA, 33 bp, Homo sapien
tcggaagttctcagtaagggctggttgtgtgct

SEQ ID NO: 176450 - DNA, 33 bp, Homo sapien
tcggaagttctcagtacgggctggttgtgtgct

SEQ ID NO: 176451 - DNA, 33 bp, Homo sapien
aagagactgtaattgaagggtgagcaaagtggg

SEQ ID NO: 176452 - DNA, 33 bp, Homo sapien
aagagactgtaattgaggggtgagcaaagtggg

SEQ ID NO: 176453 - DNA, 33 bp, Homo sapien
tgttgtaaggctcaaactaggtaatgcacatca

SEQ ID NO: 176454 - DNA, 33 bp, Homo sapien
tgttgtaaggctcaaagtaggtaatgcacatca

SEQ ID NO: 176455 - DNA, 33 bp, Homo sapien
gggagcaaagggaccactaaacgtgcggctgtt

SEQ ID NO: 176456 - DNA, 33 bp, Homo sapien
gggagcaaagggaccattaaacgtgcggctgtt

SEQ ID NO: 176457 - DNA, 33 bp, Homo sapien
ggtctccacagcctcacgaaccacagaccagtg

SEQ ID NO: 176458 - DNA, 33 bp, Homo sapien
ggtctccacagcctcaggaaccacagaccagtg

SEQ ID NO: 176459 - DNA, 33 bp, Homo sapien
ctgagagcagtggaagaatgtttgcattttata

SEQ ID NO: 176460 - DNA, 33 bp, Homo sapien
ctgagagcagtggaaggatgtttgcattttata

SEQ ID NO: 176461 - DNA, 33 bp, Homo sapien
aaggcctaatctgcagacaatattccaaaccct

SEQ ID NO: 176462 - DNA, 33 bp, Homo sapien
aaggcctaatctgcagtcaatattccaaaccct

SEQ ID NO: 176463 - DNA, 33 bp, Homo sapien
tcctgctgacttcatccctgtgacctccacaga

SEQ ID NO: 176464 - DNA, 33 bp, Homo sapien
tcctgctgacttcatctctgtgacctccacaga

SEQ ID NO: 176465 - DNA, 33 bp, Homo sapien
catgtggagtcctttaaggttgtggggtcctta

SEQ ID NO: 176466 - DNA, 33 bp, Homo sapien
catgtggagtcctttagggttgtggggtcctta

SEQ ID NO: 176467 - DNA, 33 bp, Homo sapien
aagcagatcaagttcactcatgtccagaagcag

SEQ ID NO: 176468 - DNA, 33 bp, Homo sapien
aagcagatcaagttcattcatgtccagaagcag

SEQ ID NO: 176469 - DNA, 33 bp, Homo sapien
ggtctgatgcttctcaaccaagaaaccaaacgg

SEQ ID NO: 176470 - DNA, 33 bp, Homo sapien
ggtctgatgcttctcagccaagaaaccaaacgg

SEQ ID NO: 176471 - DNA, 33 bp, Homo sapien
tggggcatatcaccccacatatggttacaaaca

SEQ ID NO: 176472 - DNA, 33 bp, Homo sapien
tggggcatatcaccccgcatatggttacaaaca

SEQ ID NO: 176473 - DNA, 33 bp, Homo sapien
tgcactgattctatcacattttcaaacttttcc

SEQ ID NO: 176474 - DNA, 33 bp, Homo sapien
tgcactgattctatcatattttcaaacttttcc

SEQ ID NO: 176475 - DNA, 33 bp, Homo sapien
ttggcaccctcatcaacgtcacacagcctggct

SEQ ID NO: 176476 - DNA, 33 bp, Homo sapien
ttggcaccctcatcaatgtcacacagcctggct

SEQ ID NO: 176477 - DNA, 33 bp, Homo sapien
ctggacactgaaccaagaatgttgctctctgta

SEQ ID NO: 176478 - DNA, 33 bp, Homo sapien
ctggacactgaaccaataatgttgctctctgta

SEQ ID NO: 176479 - DNA, 33 bp, Homo sapien
cacaaatgagacttccagataagcctttcttgg

SEQ ID NO: 176480 - DNA, 33 bp, Homo sapien
cacaaatgagacttccggataagcctttcttgg

SEQ ID NO: 176481 - DNA, 33 bp, Homo sapien
ctgggtatggactctgcatctgttatgggatcc

SEQ ID NO: 176482 - DNA, 33 bp, Homo sapien
ctgggtatggactctggatctgttatgggatcc

SEQ ID NO: 176483 - DNA, 33 bp, Homo sapien
cacattgtacctcatcagaggaatgggctaagc

SEQ ID NO: 176484 - DNA, 33 bp, Homo sapien
cacattgtacctcatcggaggaatgggctaagc

SEQ ID NO: 176485 - DNA, 33 bp, Homo sapien
atgatgtctacctatacgtttgactccccactt

SEQ ID NO: 176486 - DNA, 33 bp, Homo sapien
atgatgtctacctatatgtttgactccccactt

SEQ ID NO: 176487 - DNA, 33 bp, Homo sapien
agctactgactcattcaccttcccccagccaag

SEQ ID NO: 176488 - DNA, 33 bp, Homo sapien
agctactgactcattcgccttcccccagccaag

SEQ ID NO: 176489 - DNA, 33 bp, Homo sapien
gcctctgtaaaggagcacagttctgacactctg

SEQ ID NO: 176490 - DNA, 33 bp, Homo sapien
gcctctgtaaaggagcgcagttctgacactctg

SEQ ID NO: 176491 - DNA, 33 bp, Homo sapien
cctggagctctggagaaaattcacattccattc

SEQ ID NO: 176492 - DNA, 33 bp, Homo sapien
cctggagctctggagacaattcacattccattc

SEQ ID NO: 176493 - DNA, 33 bp, Homo sapien
agatccctagggaaaacggatgcccttcccatt

SEQ ID NO: 176494 - DNA, 33 bp, Homo sapien
agatccctagggaaaatggatgcccttcccatt

SEQ ID NO: 176495 - DNA, 33 bp, Homo sapien
agagtggccgagtcagaatgcaaacccggatgt

SEQ ID NO: 176496 - DNA, 33 bp, Homo sapien
agagtggccgagtcaggatgcaaacccggatgt

SEQ ID NO: 176497 - DNA, 33 bp, Homo sapien
taataaattatcaaaaatgaacacatccgggta

SEQ ID NO: 176498 - DNA, 33 bp, Homo sapien
taataaattatcaaaagtgaacacatccgggta

SEQ ID NO: 176499 - DNA, 33 bp, Homo sapien
agttattcactgtttagctgaaattcacatttg

SEQ ID NO: 176500 - DNA, 33 bp, Homo sapien
agttattcactgtttatctgaaattcacatttg

SEQ ID NO: 176501 - DNA, 33 bp, Homo sapien
tgagccctgcaacgcaaccttgtctactcctct

SEQ ID NO: 176502 - DNA, 33 bp, Homo sapien
tgagccctgcaacgcatccttgtctactcctct

SEQ ID NO: 176503 - DNA, 33 bp, Homo sapien
acttactgagcatctacaatacatgaaacctat

SEQ ID NO: 176504 - DNA, 33 bp, Homo sapien
acttactgagcatctataatacatgaaacctat

SEQ ID NO: 176505 - DNA, 33 bp, Homo sapien
tgattttgtaaaatcacgctatattcttattct

SEQ ID NO: 176506 - DNA, 33 bp, Homo sapien
tgattttgtaaaatcatgctatattcttattct

SEQ ID NO: 176507 - DNA, 33 bp, Homo sapien
atggattccaacgtccaagcagaaatccttcta

SEQ ID NO: 176508 - DNA, 33 bp, Homo sapien
atggattccaacgtccgagcagaaatccttcta

SEQ ID NO: 176509 - DNA, 33 bp, Homo sapien
gtggctgtgagattcaatgaaatagtgtgtgtg

SEQ ID NO: 176510 - DNA, 33 bp, Homo sapien
gtggctgtgagattcagtgaaatagtgtgtgtg

SEQ ID NO: 176511 - DNA, 33 bp, Homo sapien
tttagatagaagtaaccggatagcagcgatctt

SEQ ID NO: 176512 - DNA, 33 bp, Homo sapien
tttagatagaagtaacgggatagcagcgatctt

SEQ ID NO: 176513 - DNA, 33 bp, Homo sapien
ttcttgcattgctgtaaagaactacctgagact

SEQ ID NO: 176514 - DNA, 33 bp, Homo sapien
ttcttgcattgctgtagagaactacctgagact

SEQ ID NO: 176515 - DNA, 33 bp, Homo sapien
aatgcactgatgcctaaataaatcaagtgactt

SEQ ID NO: 176516 - DNA, 33 bp, Homo sapien
aatgcactgatgcctagataaatcaagtgactt

SEQ ID NO: 176517 - DNA, 33 bp, Homo sapien
aaagacagatgactaaatccttgtgccttaaaa

SEQ ID NO: 176518 - DNA, 33 bp, Homo sapien
aaagacagatgactaagtccttgtgccttaaaa

SEQ ID NO: 176519 - DNA, 33 bp, Homo sapien
gtattaggttagtctcacacttccttctcagtg

SEQ ID NO: 176520 - DNA, 33 bp, Homo sapien
gtattaggttagtctctcacttccttctcagtg

SEQ ID NO: 176521 - DNA, 33 bp, Homo sapien
caatggactcacattcaaaatatatatgaagaa

SEQ ID NO: 176522 - DNA, 33 bp, Homo sapien
caatggactcacattcgaaatatatatgaagaa

SEQ ID NO: 176523 - DNA, 33 bp, Homo sapien
gaaacacgcagtcctcaaattattaatgcagct

SEQ ID NO: 176524 - DNA, 33 bp, Homo sapien
gaaacacgcagtcctctaattattaatgcagct

SEQ ID NO: 176525 - DNA, 33 bp, Homo sapien
tttatgtttctgaagaatatttgacagcatggc

SEQ ID NO: 176526 - DNA, 33 bp, Homo sapien
tttatgtttctgaagagtatttgacagcatggc

SEQ ID NO: 176527 - DNA, 33 bp, Homo sapien
tccccagccagggtaacagcttgatcagatgtg

SEQ ID NO: 176528 - DNA, 33 bp, Homo sapien
tccccagccagggtaagagcttgatcagatgtg

SEQ ID NO: 176529 - DNA, 33 bp, Homo sapien
cgttgaattcaggcccactcaggtcatattaca

SEQ ID NO: 176530 - DNA, 33 bp, Homo sapien
cgttgaattcaggcccgctcaggtcatattaca

SEQ ID NO: 176531 - DNA, 33 bp, Homo sapien
aacaccaacatcaatcaatccaagatccctctt

SEQ ID NO: 176532 - DNA, 33 bp, Homo sapien
aacaccaacatcaatcgatccaagatccctctt

SEQ ID NO: 176533 - DNA, 33 bp, Homo sapien
gacagctggaaatgggcatgaaggaagaaagga

SEQ ID NO: 176534 - DNA, 33 bp, Homo sapien
gacagctggaaatgggtatgaaggaagaaagga

SEQ ID NO: 176535 - DNA, 33 bp, Homo sapien
gtaataaaggaacacacgcttatggagagccca

SEQ ID NO: 176536 - DNA, 33 bp, Homo sapien
gtaataaaggaacacatgcttatggagagccca

SEQ ID NO: 176537 - DNA, 33 bp, Homo sapien
atagcattgaaattcaaatccctgtaaatataa

SEQ ID NO: 176538 - DNA, 33 bp, Homo sapien
atagcattgaaattcatatccctgtaaatataa

SEQ ID NO: 176539 - DNA, 33 bp, Homo sapien
gtgatgctgtatgtaacattttagaatttattt

SEQ ID NO: 176540 - DNA, 33 bp, Homo sapien
gtgatgctgtatgtaatattttagaatttattt

SEQ ID NO: 176541 - DNA, 33 bp, Homo sapien
catttttagatgataacgtctctactccagata

SEQ ID NO: 176542 - DNA, 33 bp, Homo sapien
catttttagatgataatgtctctactccagata

SEQ ID NO: 176543 - DNA, 33 bp, Homo sapien
gcaaacagatgctgaacggcttcctaattgtga

SEQ ID NO: 176544 - DNA, 33 bp, Homo sapien
gcaaacagatgctgaatggcttcctaattgtga

SEQ ID NO: 176545 - DNA, 33 bp, Homo sapien
gtgaaatatactttacacaaagcagactgccta

SEQ ID NO: 176546 - DNA, 33 bp, Homo sapien
gtgaaatatactttacgcaaagcagactgccta

SEQ ID NO: 176547 - DNA, 33 bp, Homo sapien
catatcaaagtccaaagtacagaaatctacaga

SEQ ID NO: 176548 - DNA, 33 bp, Homo sapien
catatcaaagtccaaattacagaaatctacaga

SEQ ID NO: 176549 - DNA, 33 bp, Homo sapien
ggtgcatgctactacacctggttaagttttaaa

SEQ ID NO: 176550 - DNA, 33 bp, Homo sapien
ggtgcatgctactacatctggttaagttttaaa

SEQ ID NO: 176551 - DNA, 33 bp, Homo sapien
ataattcaaacagcacagaggacaaagagtttt

SEQ ID NO: 176552 - DNA, 33 bp, Homo sapien
ataattcaaacagcaccgaggacaaagagtttt

SEQ ID NO: 176553 - DNA, 33 bp, Homo sapien
cccaccctcaccttgacgtactgagatcatgaa

SEQ ID NO: 176554 - DNA, 33 bp, Homo sapien
cccaccctcaccttgatgtactgagatcatgaa

SEQ ID NO: 176555 - DNA, 33 bp, Homo sapien
gacagtttccttacaactctgcacagttataac

SEQ ID NO: 176556 - DNA, 33 bp, Homo sapien
gacagtttccttacaattctgcacagttataac

SEQ ID NO: 176557 - DNA, 33 bp, Homo sapien
gattctaatgttcatacaccctgatctataatt

SEQ ID NO: 176558 - DNA, 33 bp, Homo sapien
gattctaatgttcatataccctgatctataatt

SEQ ID NO: 176559 - DNA, 33 bp, Homo sapien
atgagtgacctcttcaaattcacttggctgttt

SEQ ID NO: 176560 - DNA, 33 bp, Homo sapien
atgagtgacctcttcagattcacttggctgttt

SEQ ID NO: 176561 - DNA, 33 bp, Homo sapien
cagaccgcctgactacgatttcctttgtactaa

SEQ ID NO: 176562 - DNA, 33 bp, Homo sapien
cagaccgcctgactactatttcctttgtactaa

SEQ ID NO: 176563 - DNA, 33 bp, Homo sapien
ggggttatattgaacaacataaatttatagcaa

SEQ ID NO: 176564 - DNA, 33 bp, Homo sapien
ggggttatattgaacatcataaatttatagcaa

SEQ ID NO: 176565 - DNA, 33 bp, Homo sapien
attgcctttttcttgacgcttccaccttactga

SEQ ID NO: 176566 - DNA, 33 bp, Homo sapien
attgcctttttcttgatgcttccaccttactga

SEQ ID NO: 176567 - DNA, 33 bp, Homo sapien
ccatctcgtttcttcaaaatcattatgatgagc

SEQ ID NO: 176568 - DNA, 33 bp, Homo sapien
ccatctcgtttcttcagaatcattatgatgagc

SEQ ID NO: 176569 - DNA, 33 bp, Homo sapien
tggagcagagaggaaacgttggtctctgccagg

SEQ ID NO: 176570 - DNA, 33 bp, Homo sapien
tggagcagagaggaaatgttggtctctgccagg

SEQ ID NO: 176571 - DNA, 33 bp, Homo sapien
tccatattgcccagaaacagaagactatggcct

SEQ ID NO: 176572 - DNA, 33 bp, Homo sapien
tccatattgcccagaatcagaagactatggcct

SEQ ID NO: 176573 - DNA, 33 bp, Homo sapien
cagtctaaaacaattacagtggtagtatcaaag

SEQ ID NO: 176574 - DNA, 33 bp, Homo sapien
cagtctaaaacaattatagtggtagtatcaaag

SEQ ID NO: 176575 - DNA, 33 bp, Homo sapien
aatatcaaactagatgccaatcaaagcaataag

SEQ ID NO: 176576 - DNA, 33 bp, Homo sapien
aatatcaaactagatgtcaatcaaagcaataag

SEQ ID NO: 176577 - DNA, 33 bp, Homo sapien
tacacatcaaatgcccaattcaaaactctatcc

SEQ ID NO: 176578 - DNA, 33 bp, Homo sapien
tacacatcaaatgcccgattcaaaactctatcc

SEQ ID NO: 176579 - DNA, 33 bp, Homo sapien
ctggttccctgccccacgagaaggaactggacg

SEQ ID NO: 176580 - DNA, 33 bp, Homo sapien
ctggttccctgccccatgagaaggaactggacg

SEQ ID NO: 176581 - DNA, 33 bp, Homo sapien
agctgtcccctttgaccggcagccagggccagg

SEQ ID NO: 176582 - DNA, 33 bp, Homo sapien
agctgtcccctttgactggcagccagggccagg

SEQ ID NO: 176583 - DNA, 33 bp, Homo sapien
tactaaatcactgaacgatacacttttaataaa

SEQ ID NO: 176584 - DNA, 33 bp, Homo sapien
tactaaatcactgaactatacacttttaataaa

SEQ ID NO: 176585 - DNA, 33 bp, Homo sapien
aggatttcaattcttacccgtctgactccaaac

SEQ ID NO: 176586 - DNA, 33 bp, Homo sapien
aggatttcaattcttatccgtctgactccaaac

SEQ ID NO: 176587 - DNA, 33 bp, Homo sapien
cagctgatacagatacaaacaagatacaccctc

SEQ ID NO: 176588 - DNA, 33 bp, Homo sapien
cagctgatacagatacgaacaagatacaccctc

SEQ ID NO: 176589 - DNA, 33 bp, Homo sapien
gcctgcacacaacccaaaaaatgtttgtccctt

SEQ ID NO: 176590 - DNA, 33 bp, Homo sapien
gcctgcacacaacccacaaaatgtttgtccctt

SEQ ID NO: 176591 - DNA, 33 bp, Homo sapien
tttctggttggtagcacaggaaacatttctctc

SEQ ID NO: 176592 - DNA, 33 bp, Homo sapien
tttctggttggtagcataggaaacatttctctc

SEQ ID NO: 176593 - DNA, 33 bp, Homo sapien
ctttcctgtctcagaactgctgctgtaccctag

SEQ ID NO: 176594 - DNA, 33 bp, Homo sapien
ctttcctgtctcagaattgctgctgtaccctag

SEQ ID NO: 176595 - DNA, 33 bp, Homo sapien
atgtttaataatgttacgtttggggtgaattta

SEQ ID NO: 176596 - DNA, 33 bp, Homo sapien
atgtttaataatgttatgtttggggtgaattta

SEQ ID NO: 176597 - DNA, 33 bp, Homo sapien
tagggggcccctataacgcaaagaatacaaaat

SEQ ID NO: 176598 - DNA, 33 bp, Homo sapien
tagggggcccctataatgcaaagaatacaaaat

SEQ ID NO: 176599 - DNA, 33 bp, Homo sapien
tggtccatgccttttcccgatctgaatcttccg

SEQ ID NO: 176600 - DNA, 33 bp, Homo sapien
tggtccatgccttttctcgatctgaatcttccg

SEQ ID NO: 176601 - DNA, 33 bp, Homo sapien
gcaggaaggaaacaaacggaagccctcagcctc

SEQ ID NO: 176602 - DNA, 33 bp, Homo sapien
gcaggaaggaaacaaatggaagccctcagcctc

SEQ ID NO: 176603 - DNA, 33 bp, Homo sapien
attcgtgtatgaggtcaatgcatgcttgttgct

SEQ ID NO: 176604 - DNA, 33 bp, Homo sapien
attcgtgtatgaggtcgatgcatgcttgttgct

SEQ ID NO: 176605 - DNA, 33 bp, Homo sapien
gcaccaacctaatagaaggagatgatatacgtc

SEQ ID NO: 176606 - DNA, 33 bp, Homo sapien
gcaccaacctaatagacggagatgatatacgtc

SEQ ID NO: 176607 - DNA, 33 bp, Homo sapien
gttgctttcctgaaaactagggtacgccgccac

SEQ ID NO: 176608 - DNA, 33 bp, Homo sapien
gttgctttcctgaaaagtagggtacgccgccac

SEQ ID NO: 176609 - DNA, 33 bp, Homo sapien
ccacttcatacctcataaattgttttgctgaat

SEQ ID NO: 176610 - DNA, 33 bp, Homo sapien
ccacttcatacctcatgaattgttttgctgaat

SEQ ID NO: 176611 - DNA, 33 bp, Homo sapien
ggggccactcacggggaaatcatctgacagagc

SEQ ID NO: 176612 - DNA, 33 bp, Homo sapien
ggggccactcacgggggaatcatctgacagagc

SEQ ID NO: 176613 - DNA, 33 bp, Homo sapien
cctatctggagagttaagccagggttagttatc

SEQ ID NO: 176614 - DNA, 33 bp, Homo sapien
cctatctggagagttaggccagggttagttatc

SEQ ID NO: 176615 - DNA, 33 bp, Homo sapien
actcacagggcttgcactgagctaagtgagctg

SEQ ID NO: 176616 - DNA, 33 bp, Homo sapien
actcacagggcttgcattgagctaagtgagctg

SEQ ID NO: 176617 - DNA, 33 bp, Homo sapien
cctcagcactgtccataaatcatggctatgcct

SEQ ID NO: 176618 - DNA, 33 bp, Homo sapien
cctcagcactgtccatcaatcatggctatgcct

SEQ ID NO: 176619 - DNA, 33 bp, Homo sapien
ctctctgagcctcactgaactctaaaagggggg

SEQ ID NO: 176620 - DNA, 33 bp, Homo sapien
ctctctgagcctcacttaactctaaaagggggg

SEQ ID NO: 176621 - DNA, 33 bp, Homo sapien
ctgcaagccatgccacaagtgcaaggcgctcca

SEQ ID NO: 176622 - DNA, 33 bp, Homo sapien
ctgcaagccatgccaccagtgcaaggcgctcca

SEQ ID NO: 176623 - DNA, 33 bp, Homo sapien
aaggggggccttataacaccatttgttcaacac

SEQ ID NO: 176624 - DNA, 33 bp, Homo sapien
aaggggggccttataagaccatttgttcaacac

SEQ ID NO: 176625 - DNA, 33 bp, Homo sapien
tcctctttgagaccaacctggatcagtaagggt

SEQ ID NO: 176626 - DNA, 33 bp, Homo sapien
tcctctttgagaccaatctggatcagtaagggt

SEQ ID NO: 176627 - DNA, 33 bp, Homo sapien
agcccaaaatggccacacaatagtttcagtttt

SEQ ID NO: 176628 - DNA, 33 bp, Homo sapien
agcccaaaatggccacgcaatagtttcagtttt

SEQ ID NO: 176629 - DNA, 33 bp, Homo sapien
ccctgaatttttgcaaagtgtacctccttctct

SEQ ID NO: 176630 - DNA, 33 bp, Homo sapien
ccctgaatttttgcaaggtgtacctccttctct

SEQ ID NO: 176631 - DNA, 33 bp, Homo sapien
acatcatgctggttcactatattgatgtcattt

SEQ ID NO: 176632 - DNA, 33 bp, Homo sapien
acatcatgctggttcattatattgatgtcattt

SEQ ID NO: 176633 - DNA, 33 bp, Homo sapien
aagaacaaaaatgcccaagggccactgggaaag

SEQ ID NO: 176634 - DNA, 33 bp, Homo sapien
aagaacaaaaatgcccgagggccactgggaaag

SEQ ID NO: 176635 - DNA, 33 bp, Homo sapien
gaaggcttccatgacaccttgaaggagtacctc

SEQ ID NO: 176636 - DNA, 33 bp, Homo sapien
gaaggcttccatgacagcttgaaggagtacctc

SEQ ID NO: 176637 - DNA, 33 bp, Homo sapien
tatctgattctaagagacaaaacaaaataaaac

SEQ ID NO: 176638 - DNA, 33 bp, Homo sapien
tatctgattctaagagtcaaaacaaaataaaac

SEQ ID NO: 176639 - DNA, 33 bp, Homo sapien
taggacaattctagagaaactgttcacacaggg

SEQ ID NO: 176640 - DNA, 33 bp, Homo sapien
taggacaattctagaggaactgttcacacaggg

SEQ ID NO: 176641 - DNA, 33 bp, Homo sapien
acttaaaactccttccacggtgaaggacttcca

SEQ ID NO: 176642 - DNA, 33 bp, Homo sapien
acttaaaactccttcctcggtgaaggacttcca

SEQ ID NO: 176643 - DNA, 33 bp, Homo sapien
acccagaaaggccaagcagcatgatgcagtaga

SEQ ID NO: 176644 - DNA, 33 bp, Homo sapien
acccagaaaggccaaggagcatgatgcagtaga

SEQ ID NO: 176645 - DNA, 33 bp, Homo sapien
tagatgaaaggacaaacgggtgtatggatggat

SEQ ID NO: 176646 - DNA, 33 bp, Homo sapien
tagatgaaaggacaaatgggtgtatggatggat

SEQ ID NO: 176647 - DNA, 33 bp, Homo sapien
agaaacatttcagaggaactcaaagagaagcca

SEQ ID NO: 176648 - DNA, 33 bp, Homo sapien
agaaacatttcagagggactcaaagagaagcca

SEQ ID NO: 176649 - DNA, 33 bp, Homo sapien
gccttcatagctgggacgagctcttaaaaaata

SEQ ID NO: 176650 - DNA, 33 bp, Homo sapien
gccttcatagctgggatgagctcttaaaaaata

SEQ ID NO: 176651 - DNA, 33 bp, Homo sapien
aagcaggtcagttcaactaacgtcagcctttac

SEQ ID NO: 176652 - DNA, 33 bp, Homo sapien
aagcaggtcagttcaattaacgtcagcctttac

SEQ ID NO: 176653 - DNA, 33 bp, Homo sapien
actctcttcctgggacaaaactggggaaggcgg

SEQ ID NO: 176654 - DNA, 33 bp, Homo sapien
actctcttcctgggacgaaactggggaaggcgg

SEQ ID NO: 176655 - DNA, 33 bp, Homo sapien
gcagagaaggacgcgaaaggacgtgagagggac

SEQ ID NO: 176656 - DNA, 33 bp, Homo sapien
gcagagaaggacgcgagaggacgtgagagggac

SEQ ID NO: 176657 - DNA, 33 bp, Homo sapien
tgtggtaattaggaaaaaggacaagttccctct

SEQ ID NO: 176658 - DNA, 33 bp, Homo sapien
tgtggtaattaggaaagaggacaagttccctct

SEQ ID NO: 176659 - DNA, 33 bp, Homo sapien
cacaactaccttcccactggcctctggactcca

SEQ ID NO: 176660 - DNA, 33 bp, Homo sapien
cacaactaccttcccattggcctctggactcca

SEQ ID NO: 176661 - DNA, 33 bp, Homo sapien
ctaagttgctgttgctaaatcaaattcctggag

SEQ ID NO: 176662 - DNA, 33 bp, Homo sapien
ctaagttgctgttgctgaatcaaattcctggag

SEQ ID NO: 176663 - DNA, 33 bp, Homo sapien
gaagatctcttttctccaagagcccttgagtgg

SEQ ID NO: 176664 - DNA, 33 bp, Homo sapien
gaagatctcttttctcgaagagcccttgagtgg

SEQ ID NO: 176665 - DNA, 33 bp, Homo sapien
aggtggctttttgaatcaaatgtgtgagagttt

SEQ ID NO: 176666 - DNA, 33 bp, Homo sapien
aggtggctttttgaatgaaatgtgtgagagttt

SEQ ID NO: 176667 - DNA, 33 bp, Homo sapien
cagtgctggtcctaacaggtcactgtgatgatt

SEQ ID NO: 176668 - DNA, 33 bp, Homo sapien
cagtgctggtcctaacgggtcactgtgatgatt

SEQ ID NO: 176669 - DNA, 33 bp, Homo sapien
atgggcaaggctcccaataagattttctccttt

SEQ ID NO: 176670 - DNA, 33 bp, Homo sapien
atgggcaaggctcccagtaagattttctccttt

SEQ ID NO: 176671 - DNA, 33 bp, Homo sapien
tctactggataggaagaaggttgagagacaggg

SEQ ID NO: 176672 - DNA, 33 bp, Homo sapien
tctactggataggaaggaggttgagagacaggg

SEQ ID NO: 176673 - DNA, 33 bp, Homo sapien
tcaggccttcacctgactagggaacctggcttt

SEQ ID NO: 176674 - DNA, 33 bp, Homo sapien
tcaggccttcacctgattagggaacctggcttt

SEQ ID NO: 176675 - DNA, 33 bp, Homo sapien
gcatgaggacatttcccaagcactgtgtcttta

SEQ ID NO: 176676 - DNA, 33 bp, Homo sapien
gcatgaggacatttcctaagcactgtgtcttta

SEQ ID NO: 176677 - DNA, 33 bp, Homo sapien
atctctcaaatcacagcaggtcagtgactgcca

SEQ ID NO: 176678 - DNA, 33 bp, Homo sapien
atctctcaaatcacagtaggtcagtgactgcca

SEQ ID NO: 176679 - DNA, 33 bp, Homo sapien
actgcaatacaaggtgaaaagtgactgcatagg

SEQ ID NO: 176680 - DNA, 33 bp, Homo sapien
actgcaatacaaggtggaaagtgactgcatagg

SEQ ID NO: 176681 - DNA, 33 bp, Homo sapien
atctgacaagaggggcaaactaggtgaaaactt

SEQ ID NO: 176682 - DNA, 33 bp, Homo sapien
atctgacaagaggggccaactaggtgaaaactt

SEQ ID NO: 176683 - DNA, 33 bp, Homo sapien
ggcggagtgtgttgcacgtctccaacttgtcac

SEQ ID NO: 176684 - DNA, 33 bp, Homo sapien
ggcggagtgtgttgcaggtctccaacttgtcac

SEQ ID NO: 176685 - DNA, 33 bp, Homo sapien
caagctcttcctgcagcagtcaaattacacctt

SEQ ID NO: 176686 - DNA, 33 bp, Homo sapien
caagctcttcctgcagtagtcaaattacacctt

SEQ ID NO: 176687 - DNA, 33 bp, Homo sapien
ctggccctttgcttaacaagtctcatgtccttc

SEQ ID NO: 176688 - DNA, 33 bp, Homo sapien
ctggccctttgcttaagaagtctcatgtccttc

SEQ ID NO: 176689 - DNA, 33 bp, Homo sapien
ttccaggcggagttacaatccttgctccaggca

SEQ ID NO: 176690 - DNA, 33 bp, Homo sapien
ttccaggcggagttacgatccttgctccaggca

SEQ ID NO: 176691 - DNA, 33 bp, Homo sapien
ggtattcgatgggataagtttttcaaattgttg

SEQ ID NO: 176692 - DNA, 33 bp, Homo sapien
ggtattcgatgggataggtttttcaaattgttg

SEQ ID NO: 176693 - DNA, 33 bp, Homo sapien
gaagaacagcaagggaataaaacacagaaaatt

SEQ ID NO: 176694 - DNA, 33 bp, Homo sapien
gaagaacagcaagggactaaaacacagaaaatt

SEQ ID NO: 176695 - DNA, 33 bp, Homo sapien
gtggcttaatggagtacaaagtcaagggctctg

SEQ ID NO: 176696 - DNA, 33 bp, Homo sapien
gtggcttaatggagtataaagtcaagggctctg

SEQ ID NO: 176697 - DNA, 33 bp, Homo sapien
tgatggagctagaactcaaactcaaaggctgat

SEQ ID NO: 176698 - DNA, 33 bp, Homo sapien
tgatggagctagaactgaaactcaaaggctgat

SEQ ID NO: 176699 - DNA, 33 bp, Homo sapien
aagcactactttgaaccgcatacactaacaact

SEQ ID NO: 176700 - DNA, 33 bp, Homo sapien
aagcactactttgaactgcatacactaacaact

SEQ ID NO: 176701 - DNA, 33 bp, Homo sapien
gatactacctatcaacaagctatgcgttatttg

SEQ ID NO: 176702 - DNA, 33 bp, Homo sapien
gatactacctatcaaccagctatgcgttatttg

SEQ ID NO: 176703 - DNA, 33 bp, Homo sapien
tgtccaatgggactcaactgaaaaacttgtctc

SEQ ID NO: 176704 - DNA, 33 bp, Homo sapien
tgtccaatgggactcagctgaaaaacttgtctc

SEQ ID NO: 176705 - DNA, 33 bp, Homo sapien
aaaaactagtgaggcacgatgatgcgcctgtag

SEQ ID NO: 176706 - DNA, 33 bp, Homo sapien
aaaaactagtgaggcatgatgatgcgcctgtag

SEQ ID NO: 176707 - DNA, 33 bp, Homo sapien
gctggactctcaattcgattcctttgatctaca

SEQ ID NO: 176708 - DNA, 33 bp, Homo sapien
gctggactctcaattctattcctttgatctaca

SEQ ID NO: 176709 - DNA, 33 bp, Homo sapien
tagaatatgagataaaatgactagaaatagatg

SEQ ID NO: 176710 - DNA, 33 bp, Homo sapien
tagaatatgagataaagtgactagaaatagatg

SEQ ID NO: 176711 - DNA, 33 bp, Homo sapien
gcagtgtattttaatacgaatagtagcctctct

SEQ ID NO: 176712 - DNA, 33 bp, Homo sapien
gcagtgtattttaataggaatagtagcctctct

SEQ ID NO: 176713 - DNA, 33 bp, Homo sapien
gtatcttgctctctcagagtccacatgacttac

SEQ ID NO: 176714 - DNA, 33 bp, Homo sapien
gtatcttgctctctcatagtccacatgacttac

SEQ ID NO: 176715 - DNA, 33 bp, Homo sapien
aaaacccttatcttaaaccagatactgattgct

SEQ ID NO: 176716 - DNA, 33 bp, Homo sapien
aaaacccttatcttaacccagatactgattgct

SEQ ID NO: 176717 - DNA, 33 bp, Homo sapien
aatgtagaagcttgcacaataaggcaactatat

SEQ ID NO: 176718 - DNA, 33 bp, Homo sapien
aatgtagaagcttgcagaataaggcaactatat

SEQ ID NO: 176719 - DNA, 33 bp, Homo sapien
gttgtctgaggatatacatttccctctggtatc

SEQ ID NO: 176720 - DNA, 33 bp, Homo sapien
gttgtctgaggatatagatttccctctggtatc

SEQ ID NO: 176721 - DNA, 33 bp, Homo sapien
gaaacatgggcatacaactttattccttcctgc

SEQ ID NO: 176722 - DNA, 33 bp, Homo sapien
gaaacatgggcatacagctttattccttcctgc

SEQ ID NO: 176723 - DNA, 33 bp, Homo sapien
atgctaacgtatctcccaagtgttatactgtca

SEQ ID NO: 176724 - DNA, 33 bp, Homo sapien
atgctaacgtatctcctaagtgttatactgtca

SEQ ID NO: 176725 - DNA, 33 bp, Homo sapien
tcattttatccagccactattcaagatggagtt

SEQ ID NO: 176726 - DNA, 33 bp, Homo sapien
tcattttatccagccagtattcaagatggagtt

SEQ ID NO: 176727 - DNA, 33 bp, Homo sapien
atgcttctgacagataaaaagatatgcaggaat

SEQ ID NO: 176728 - DNA, 33 bp, Homo sapien
atgcttctgacagatacaaagatatgcaggaat

SEQ ID NO: 176729 - DNA, 33 bp, Homo sapien
gttcacacagctagaacgtggtagtagataaga

SEQ ID NO: 176730 - DNA, 33 bp, Homo sapien
gttcacacagctagaaggtggtagtagataaga

SEQ ID NO: 176731 - DNA, 33 bp, Homo sapien
tttaacattatttgaacatctgcataatcagta

SEQ ID NO: 176732 - DNA, 33 bp, Homo sapien
tttaacattatttgaagatctgcataatcagta

SEQ ID NO: 176733 - DNA, 33 bp, Homo sapien
atctaaacggttttccaacatttggctgaatac

SEQ ID NO: 176734 - DNA, 33 bp, Homo sapien
atctaaacggttttccgacatttggctgaatac

SEQ ID NO: 176735 - DNA, 33 bp, Homo sapien
tattactaactttagaaagctgcttaaatctct

SEQ ID NO: 176736 - DNA, 33 bp, Homo sapien
tattactaactttagagagctgcttaaatctct

SEQ ID NO: 176737 - DNA, 33 bp, Homo sapien
aaattgtagtgtgtcaataatgaaaactgttct

SEQ ID NO: 176738 - DNA, 33 bp, Homo sapien
aaattgtagtgtgtcagtaatgaaaactgttct

SEQ ID NO: 176739 - DNA, 33 bp, Homo sapien
ttgtggtttagtatgtcaatgagcatataatga

SEQ ID NO: 176740 - DNA, 33 bp, Homo sapien
ttgtggtttagtatgttaatgagcatataatga

SEQ ID NO: 176741 - DNA, 33 bp, Homo sapien
gacttctgggcttccactgcatcccaaatgttc

SEQ ID NO: 176742 - DNA, 33 bp, Homo sapien
gacttctgggcttccagtgcatcccaaatgttc

SEQ ID NO: 176743 - DNA, 33 bp, Homo sapien
aaacttaccatgtcaggcactagaaatacagag

SEQ ID NO: 176744 - DNA, 33 bp, Homo sapien
aaacttaccatgtcagtcactagaaatacagag

SEQ ID NO: 176745 - DNA, 33 bp, Homo sapien
aaatgtgctagtttcacgcttctgtatttttaa

SEQ ID NO: 176746 - DNA, 33 bp, Homo sapien
aaatgtgctagtttcatgcttctgtatttttaa

SEQ ID NO: 176747 - DNA, 33 bp, Homo sapien
cagatctaaaacattcgactcaccataacaggg

SEQ ID NO: 176748 - DNA, 33 bp, Homo sapien
cagatctaaaacattctactcaccataacaggg

SEQ ID NO: 176749 - DNA, 33 bp, Homo sapien
ttaaggtaaaagagccaatattccatcaggtaa

SEQ ID NO: 176750 - DNA, 33 bp, Homo sapien
ttaaggtaaaagagccgatattccatcaggtaa

SEQ ID NO: 176751 - DNA, 33 bp, Homo sapien
atttgcagcaaatcttaaaaacaaatctacagg

SEQ ID NO: 176752 - DNA, 33 bp, Homo sapien
atttgcagcaaatcttcaaaacaaatctacagg

SEQ ID NO: 176753 - DNA, 33 bp, Homo sapien
tctctgatctttaaaacaactctgcaatgtagt

SEQ ID NO: 176754 - DNA, 33 bp, Homo sapien
tctctgatctttaaaataactctgcaatgtagt

SEQ ID NO: 176755 - DNA, 33 bp, Homo sapien
acccacacagagaataaggagtagggcctgctg

SEQ ID NO: 176756 - DNA, 33 bp, Homo sapien
acccacacagagaatatggagtagggcctgctg

SEQ ID NO: 176757 - DNA, 33 bp, Homo sapien
ttattgaatactggaaaaaatgacaacagtgtt

SEQ ID NO: 176758 - DNA, 33 bp, Homo sapien
ttattgaatactggaagaaatgacaacagtgtt

SEQ ID NO: 176759 - DNA, 33 bp, Homo sapien
ctggaggttcataaaaataggtggaagaatcag

SEQ ID NO: 176760 - DNA, 33 bp, Homo sapien
ctggaggttcataaaagtaggtggaagaatcag

SEQ ID NO: 176761 - DNA, 33 bp, Homo sapien
aagggtacagaaagcaaaccttgatactgaggc

SEQ ID NO: 176762 - DNA, 33 bp, Homo sapien
aagggtacagaaagcacaccttgatactgaggc

SEQ ID NO: 176763 - DNA, 33 bp, Homo sapien
tcatctgtgaactctacagcaaattatatttta

SEQ ID NO: 176764 - DNA, 33 bp, Homo sapien
tcatctgtgaactctatagcaaattatatttta

SEQ ID NO: 176765 - DNA, 33 bp, Homo sapien
aagagtgaaaatggagacacaagaaggatattc

SEQ ID NO: 176766 - DNA, 33 bp, Homo sapien
aagagtgaaaatggaggcacaagaaggatattc

SEQ ID NO: 176767 - DNA, 33 bp, Homo sapien
gaaaatgggtggtcagaacctgcttagctttcc

SEQ ID NO: 176768 - DNA, 33 bp, Homo sapien
gaaaatgggtggtcagtacctgcttagctttcc

SEQ ID NO: 176769 - DNA, 33 bp, Homo sapien; identical to SEQ ID NO: 176767

SEQ ID NO: 176770 - DNA, 33 bp, Homo sapien; identical to SEQ ID NO: 176768

SEQ ID NO: 176771 - DNA, 33 bp, Homo sapien
ctagatagaggaagaacggtggatagtggcagt

SEQ ID NO: 176772 - DNA, 33 bp, Homo sapien
ctagatagaggaagaatggtggatagtggcagt

SEQ ID NO: 176773 - DNA, 33 bp, Homo sapien
ggcaataactctcacaagacactgcattgaaac

SEQ ID NO: 176774 - DNA, 33 bp, Homo sapien
ggcaataactctcacacgacactgcattgaaac

SEQ ID NO: 176775 - DNA, 33 bp, Homo sapien
caatagggttcggtgcaataacacctatgtgca

SEQ ID NO: 176776 - DNA, 33 bp, Homo sapien
caatagggttcggtgcgataacacctatgtgca

SEQ ID NO: 176777 - DNA, 33 bp, Homo sapien
agtattcagtaaatataagctgttaggattatc

SEQ ID NO: 176778 - DNA, 33 bp, Homo sapien
agtattcagtaaatattagctgttaggattatc

SEQ ID NO: 176779 - DNA, 33 bp, Homo sapien
aggaaaagagcatgagaagcggcataaatctac

SEQ ID NO: 176780 - DNA, 33 bp, Homo sapien
aggaaaagagcatgaggagcggcataaatctac

SEQ ID NO: 176781 - DNA, 33 bp, Homo sapien
aaaaacctttgaattacgtagatttatgccgct

SEQ ID NO: 176782 - DNA, 33 bp, Homo sapien
aaaaacctttgaattatgtagatttatgccgct

SEQ ID NO: 176783 - DNA, 33 bp, Homo sapien
gttgatagagggaatgaaagcaggtaggttgat

SEQ ID NO: 176784 - DNA, 33 bp, Homo sapien
gttgatagagggaatggaagcaggtaggttgat

SEQ ID NO: 176785 - DNA, 33 bp, Homo sapien
agtagcaacaagctatcaggaaaagtctttttt

SEQ ID NO: 176786 - DNA, 33 bp, Homo sapien
agtagcaacaagctatgaggaaaagtctttttt

SEQ ID NO: 176787 - DNA, 33 bp, Homo sapien
gaggccgggtctccaaacttcagagaaaggagg

SEQ ID NO: 176788 - DNA, 33 bp, Homo sapien
gaggccgggtctccaagcttcagagaaaggagg

SEQ ID NO: 176789 - DNA, 33 bp, Homo sapien
actctacagaaaatataaatcaggattattgcc

SEQ ID NO: 176790 - DNA, 33 bp, Homo sapien
actctacagaaaatatgaatcaggattattgcc

SEQ ID NO: 176791 - DNA, 33 bp, Homo sapien
tctaatattgatttaacgctaagagcctggcag

SEQ ID NO: 176792 - DNA, 33 bp, Homo sapien
tctaatattgatttaatgctaagagcctggcag

SEQ ID NO: 176793 - DNA, 33 bp, Homo sapien
actcagtgctaaaggacggctttgactcactgt

SEQ ID NO: 176794 - DNA, 33 bp, Homo sapien
actcagtgctaaaggatggctttgactcactgt

SEQ ID NO: 176795 - DNA, 33 bp, Homo sapien
tacccattcatgatcaaaacactcagtgaaata

SEQ ID NO: 176796 - DNA, 33 bp, Homo sapien
tacccattcatgatcagaacactcagtgaaata

SEQ ID NO: 176797 - DNA, 33 bp, Homo sapien
gaaatcctattacacacaggagcagtgaagata

SEQ ID NO: 176798 - DNA, 33 bp, Homo sapien
gaaatcctattacacagaggagcagtgaagata

SEQ ID NO: 176799 - DNA, 33 bp, Homo sapien
agacataaggccaaatgaagtatgtgtcattca

SEQ ID NO: 176800 - DNA, 33 bp, Homo sapien
agacataaggccaaattaagtatgtgtcattca

SEQ ID NO: 176801 - DNA, 33 bp, Homo sapien
ggagtcaacccattaactgaaggctgaggagcc

SEQ ID NO: 176802 - DNA, 33 bp, Homo sapien
ggagtcaacccattaagtgaaggctgaggagcc

SEQ ID NO: 176803 - DNA, 33 bp, Homo sapien
tactcatcagcaaaataaggacaatcggagtag

SEQ ID NO: 176804 - DNA, 33 bp, Homo sapien
tactcatcagcaaaatgaggacaatcggagtag

SEQ ID NO: 176805 - DNA, 33 bp, Homo sapien
gtatactttacatggccgaattgcatgctctgt

SEQ ID NO: 176806 - DNA, 33 bp, Homo sapien
gtatactttacatggctgaattgcatgctctgt

SEQ ID NO: 176807 - DNA, 33 bp, Homo sapien
aacaggcaaatctataataacagaagcggattc

SEQ ID NO: 176808 - DNA, 33 bp, Homo sapien
aacaggcaaatctatagtaacagaagcggattc

SEQ ID NO: 176809 - DNA, 33 bp, Homo sapien
gacattcacactgggccaaccaggaacctgcag

SEQ ID NO: 176810 - DNA, 33 bp, Homo sapien
gacattcacactgggctaaccaggaacctgcag

SEQ ID NO: 176811 - DNA, 33 bp, Homo sapien
gctgtgtgccaagccccctgctggcgttatggg

SEQ ID NO: 176812 - DNA, 33 bp, Homo sapien
gctgtgtgccaagccctctgctggcgttatggg

SEQ ID NO: 176813 - DNA, 33 bp, Homo sapien
cctgctgggttagagacggcctactccctgatc

SEQ ID NO: 176814 - DNA, 33 bp, Homo sapien
cctgctgggttagagatggcctactccctgatc

SEQ ID NO: 176815 - DNA, 33 bp, Homo sapien
gctatcctatgtctccaggactgatctgcctct

SEQ ID NO: 176816 - DNA, 33 bp, Homo sapien
gctatcctatgtctccgggactgatctgcctct

SEQ ID NO: 176817 - DNA, 33 bp, Homo sapien
ctgtactttagtctgaacctgtactcagtgaag

SEQ ID NO: 176818 - DNA, 33 bp, Homo sapien
ctgtactttagtctgagcctgtactcagtgaag

SEQ ID NO: 176819 - DNA, 33 bp, Homo sapien
atctaaacatacacataaaaggtacagtaaaat

SEQ ID NO: 176820 - DNA, 33 bp, Homo sapien
atctaaacatacacatgaaaggtacagtaaaat

SEQ ID NO: 176821 - DNA, 33 bp, Homo sapien
tagaggtggtgacaaaaaactgagcaaatagat

SEQ ID NO: 176822 - DNA, 33 bp, Homo sapien
tagaggtggtgacaaacaactgagcaaatagat

SEQ ID NO: 176823 - DNA, 33 bp, Homo sapien
gtcgaactcctgccccaatctcaggtccatcca

SEQ ID NO: 176824 - DNA, 33 bp, Homo sapien
gtcgaactcctgccccgatctcaggtccatcca

SEQ ID NO: 176825 - DNA, 33 bp, Homo sapien
cagtttcaagcggagacgatgcctcctccagga

SEQ ID NO: 176826 - DNA, 33 bp, Homo sapien
cagtttcaagcggagatgatgcctcctccagga

SEQ ID NO: 176827 - DNA, 33 bp, Homo sapien
ttcttctttaaagtcacatgtcttagagagagg

SEQ ID NO: 176828 - DNA, 33 bp, Homo sapien
ttcttctttaaagtcagatgtcttagagagagg

SEQ ID NO: 176829 - DNA, 33 bp, Homo sapien
cggtgccacagcctcacggaacaagctctccct

SEQ ID NO: 176830 - DNA, 33 bp, Homo sapien
cggtgccacagcctcagggaacaagctctccct

SEQ ID NO: 176831 - DNA, 33 bp, Homo sapien
aagctgacacttctagaaaacacggtgccagga

SEQ ID NO: 176832 - DNA, 33 bp, Homo sapien
aagctgacacttctaggaaacacggtgccagga

SEQ ID NO: 176833 - DNA, 33 bp, Homo sapien
ccacagactagtgagacattatcacctgcagct

SEQ ID NO: 176834 - DNA, 33 bp, Homo sapien
ccacagactagtgagatattatcacctgcagct

SEQ ID NO: 176835 - DNA, 33 bp, Homo sapien
cacagccacaggtgaccatgctaatgagaagca

SEQ ID NO: 176836 - DNA, 33 bp, Homo sapien
cacagccacaggtgactatgctaatgagaagca

SEQ ID NO: 176837 - DNA, 33 bp, Homo sapien
cccagattttccacaaagtctacttccctgatg

SEQ ID NO: 176838 - DNA, 33 bp, Homo sapien
cccagattttccacaaggtctacttccctgatg

SEQ ID NO: 176839 - DNA, 33 bp, Homo sapien
atttgctggggccataagaacttacggacagca

SEQ ID NO: 176840 - DNA, 33 bp, Homo sapien
atttgctggggccataggaacttacggacagca

SEQ ID NO: 176841 - DNA, 33 bp, Homo sapien
cctgggaggctggctaagctgcaggcaaggcag

SEQ ID NO: 176842 - DNA, 33 bp, Homo sapien
cctgggaggctggctacgctgcaggcaaggcag

SEQ ID NO: 176843 - DNA, 33 bp, Homo sapien
gcacttgttctggacaatattcaagccctgtca

SEQ ID NO: 176844 - DNA, 33 bp, Homo sapien
gcacttgttctggacagtattcaagccctgtca

SEQ ID NO: 176845 - DNA, 33 bp, Homo sapien
accaagcctggaagaacaatctggacaaccagc

SEQ ID NO: 176846 - DNA, 33 bp, Homo sapien
accaagcctggaagaataatctggacaaccagc

SEQ ID NO: 176847 - DNA, 33 bp, Homo sapien
tttatagagacagggaaaaaataagtggaggaa

SEQ ID NO: 176848 - DNA, 33 bp, Homo sapien
tttatagagacagggagaaaataagtggaggaa

SEQ ID NO: 176849 - DNA, 33 bp, Homo sapien
gtattatcttgacttacgggagagaaggctgga

SEQ ID NO: 176850 - DNA, 33 bp, Homo sapien
gtattatcttgacttatgggagagaaggctgga

SEQ ID NO: 176851 - DNA, 33 bp, Homo sapien
gatttttttatagtaacgcaattaatggtagat

SEQ ID NO: 176852 - DNA, 33 bp, Homo sapien
gatttttttatagtaatgcaattaatggtagat

SEQ ID NO: 176853 - DNA, 33 bp, Homo sapien
agacaaattgtttttcaaagcctcagaaggttc

SEQ ID NO: 176854 - DNA, 33 bp, Homo sapien
agacaaattgtttttcgaagcctcagaaggttc

SEQ ID NO: 176855 - DNA, 33 bp, Homo sapien
ctttctcaagatagatgaaagaaaacaaaacaa

SEQ ID NO: 176856 - DNA, 33 bp, Homo sapien
ctttctcaagatagattaaagaaaacaaaacaa

SEQ ID NO: 176857 - DNA, 33 bp, Homo sapien
cattgccataatctcccatcaacatgttttcca

SEQ ID NO: 176858 - DNA, 33 bp, Homo sapien
cattgccataatctccgatcaacatgttttcca

SEQ ID NO: 176859 - DNA, 33 bp, Homo sapien
tgtaattttgaggcaactatgaatggttcctct

SEQ ID NO: 176860 - DNA, 33 bp, Homo sapien
tgtaattttgaggcaagtatgaatggttcctct

SEQ ID NO: 176861 - DNA, 33 bp, Homo sapien
cataatacctgaggataacaataaacaactgtt

SEQ ID NO: 176862 - DNA, 33 bp, Homo sapien
cataatacctgaggatgacaataaacaactgtt

SEQ ID NO: 176863 - DNA, 33 bp, Homo sapien
atggtatttttccttcaaggctcaacccaaaca

SEQ ID NO: 176864 - DNA, 33 bp, Homo sapien
atggtatttttccttcgaggctcaacccaaaca

SEQ ID NO: 176865 - DNA, 33 bp, Homo sapien
atgatgtcctttgagaaagctgttgaacatgga

SEQ ID NO: 176866 - DNA, 33 bp, Homo sapien
atgatgtcctttgagagagctgttgaacatgga

SEQ ID NO: 176867 - DNA, 33 bp, Homo sapien
ctttttcaggcaaacaacatggaaaactcccag

SEQ ID NO: 176868 - DNA, 33 bp, Homo sapien
ctttttcaggcaaacagcatggaaaactcccag

SEQ ID NO: 176869 - DNA, 33 bp, Homo sapien
agataatatatgcaaacgtgcttctcaaattgc

SEQ ID NO: 176870 - DNA, 33 bp, Homo sapien
agataatatatgcaaatgtgcttctcaaattgc

SEQ ID NO: 176871 - DNA, 33 bp, Homo sapien
gtcacttattagtcaacgatggtattttcatgt

SEQ ID NO: 176872 - DNA, 33 bp, Homo sapien
gtcacttattagtcaatgatggtattttcatgt

SEQ ID NO: 176873 - DNA, 33 bp, Homo sapien
ttttccctctaaaatcgattcctcctgcaatct

SEQ ID NO: 176874 - DNA, 33 bp, Homo sapien
ttttccctctaaaatctattcctcctgcaatct

SEQ ID NO: 176875 - DNA, 33 bp, Homo sapien
ttaaaaatgcaaatctaactatgcctaaaacac

SEQ ID NO: 176876 - DNA, 33 bp, Homo sapien
ttaaaaatgcaaatctgactatgcctaaaacac

SEQ ID NO: 176877 - DNA, 33 bp, Homo sapien
ggtgtaacggaccagaagccacggttctaccag

SEQ ID NO: 176878 - DNA, 33 bp, Homo sapien
ggtgtaacggaccagaggccacggttctaccag

SEQ ID NO: 176879 - DNA, 33 bp, Homo sapien
tttaaatccaccttaacctaaggaatgtgtgtg

SEQ ID NO: 176880 - DNA, 33 bp, Homo sapien
tttaaatccaccttaatctaaggaatgtgtgtg

SEQ ID NO: 176881 - DNA, 33 bp, Homo sapien
aaagctttgaaaaaaaataagatgaatggataa

SEQ ID NO: 176882 - DNA, 33 bp, Homo sapien
aaagctttgaaaaaaattaagatgaatggataa

SEQ ID NO: 176883 - DNA, 33 bp, Homo sapien
atttcctattgaacccggaagagaaatagaagg

SEQ ID NO: 176884 - DNA, 33 bp, Homo sapien
atttcctattgaaccctgaagagaaatagaagg

SEQ ID NO: 176885 - DNA, 33 bp, Homo sapien
taatcccaaatctggcaactaggtccttgtctt

SEQ ID NO: 176886 - DNA, 33 bp, Homo sapien
taatcccaaatctggcgactaggtccttgtctt

SEQ ID NO: 176887 - DNA, 33 bp, Homo sapien
acaaatgtctgtagaaaggaagatggcaagaga

SEQ ID NO: 176888 - DNA, 33 bp, Homo sapien
acaaatgtctgtagaacggaagatggcaagaga

SEQ ID NO: 176889 - DNA, 33 bp, Homo sapien
ttgctaaaaatacccccgcagtgacagtgagag

SEQ ID NO: 176890 - DNA, 33 bp, Homo sapien
ttgctaaaaatacccctgcagtgacagtgagag

SEQ ID NO: 176891 - DNA, 33 bp, Homo sapien
cctgcaactggatcctcaaggacggataggttt

SEQ ID NO: 176892 - DNA, 33 bp, Homo sapien
cctgcaactggatcctgaaggacggataggttt

SEQ ID NO: 176893 - DNA, 33 bp, Homo sapien
gactatctgcaaaccaatgataaataaacacat

SEQ ID NO: 176894 - DNA, 33 bp, Homo sapien
gactatctgcaaaccagtgataaataaacacat

SEQ ID NO: 176895 - DNA, 33 bp, Homo sapien
cacaacagttgatttacgtcatgcttttgtttc

SEQ ID NO: 176896 - DNA, 33 bp, Homo sapien
cacaacagttgatttatgtcatgcttttgtttc

SEQ ID NO: 176897 - DNA, 33 bp, Homo sapien
aatatagtgttaagtaagcatcaggtaatgata

SEQ ID NO: 176898 - DNA, 33 bp, Homo sapien
aatatagtgttaagtaggcatcaggtaatgata

SEQ ID NO: 176899 - DNA, 33 bp, Homo sapien
agggagaagtgaggaacgactgcaatgagtatg

SEQ ID NO: 176900 - DNA, 33 bp, Homo sapien
agggagaagtgaggaatgactgcaatgagtatg

SEQ ID NO: 176901 - DNA, 33 bp, Homo sapien
gttggcagagaactcactatgtggaatgctgtt

SEQ ID NO: 176902 - DNA, 33 bp, Homo sapien
gttggcagagaactcagtatgtggaatgctgtt

SEQ ID NO: 176903 - DNA, 33 bp, Homo sapien
gaggtcagacagtgtgaaactttataggccaca

SEQ ID NO: 176904 - DNA, 33 bp, Homo sapien
gaggtcagacagtgtggaactttataggccaca

SEQ ID NO: 176905 - DNA, 33 bp, Homo sapien
acagactaatgggaaaagcagatacattaacca

SEQ ID NO: 176906 - DNA, 33 bp, Homo sapien
acagactaatgggaaaggcagatacattaacca

SEQ ID NO: 176907 - DNA, 33 bp, Homo sapien
agaggccagtggaagcaaaaatgcctagcctag

SEQ ID NO: 176908 - DNA, 33 bp, Homo sapien
agaggccagtggaagcgaaaatgcctagcctag

SEQ ID NO: 176909 - DNA, 33 bp, Homo sapien
gtttcccaacagtggcgctattgacattttggg

SEQ ID NO: 176910 - DNA, 33 bp, Homo sapien
gtttcccaacagtggctctattgacattttggg

SEQ ID NO: 176911 - DNA, 33 bp, Homo sapien
ctccaactatcgccaccggctactccttagaca

SEQ ID NO: 176912 - DNA, 33 bp, Homo sapien
ctccaactatcgccactggctactccttagaca

SEQ ID NO: 176913 - DNA, 33 bp, Homo sapien
cattttatagcagagtaacaaaatcagtactga

SEQ ID NO: 176914 - DNA, 33 bp, Homo sapien
cattttatagcagagtgacaaaatcagtactga

SEQ ID NO: 176915 - DNA, 33 bp, Homo sapien
agatataaagaaagaaaaagccataagccacct

SEQ ID NO: 176916 - DNA, 33 bp, Homo sapien
agatataaagaaagaagaagccataagccacct

SEQ ID NO: 176917 - DNA, 33 bp, Homo sapien
attcaagtgcatagccaaaattaaaaccactgc

SEQ ID NO: 176918 - DNA, 33 bp, Homo sapien
attcaagtgcatagccgaaattaaaaccactgc

SEQ ID NO: 176919 - DNA, 33 bp, Homo sapien
tttgtgctcttccttaaaccctcccttggtaag

SEQ ID NO: 176920 - DNA, 33 bp, Homo sapien
tttgtgctcttccttataccctcccttggtaag

SEQ ID NO: 176921 - DNA, 33 bp, Homo sapien
aagatgtgcacattaaattaactggcatgtttc

SEQ ID NO: 176922 - DNA, 33 bp, Homo sapien
aagatgtgcacattaagttaactggcatgtttc

SEQ ID NO: 176923 - DNA, 33 bp, Homo sapien
tacctgtttgtagtcaatcactgctcttacccc

SEQ ID NO: 176924 - DNA, 33 bp, Homo sapien
tacctgtttgtagtcagtcactgctcttacccc

SEQ ID NO: 176925 - DNA, 33 bp, Homo sapien
tgctcaacctgtattccaagctcgttttagtgt

SEQ ID NO: 176926 - DNA, 33 bp, Homo sapien
tgctcaacctgtattctaagctcgttttagtgt

SEQ ID NO: 176927 - DNA, 33 bp, Homo sapien
taatcagttcataaaaatgaaaattcacaaaca

SEQ ID NO: 176928 - DNA, 33 bp, Homo sapien
taatcagttcataaaattgaaaattcacaaaca

SEQ ID NO: 176929 - DNA, 33 bp, Homo sapien
tttaagcacattaagaacaacatgcatgttaag

SEQ ID NO: 176930 - DNA, 33 bp, Homo sapien
tttaagcacattaagagcaacatgcatgttaag

SEQ ID NO: 176931 - DNA, 33 bp, Homo sapien
gcatgaaatcgagctactaaaatatgcaccatc

SEQ ID NO: 176932 - DNA, 33 bp, Homo sapien
gcatgaaatcgagctattaaaatatgcaccatc

SEQ ID NO: 176933 - DNA, 33 bp, Homo sapien
agatctgtgactgacccagtttttaaaagttaa

SEQ ID NO: 176934 - DNA, 33 bp, Homo sapien
agatctgtgactgaccgagtttttaaaagttaa

SEQ ID NO: 176935 - DNA, 33 bp, Homo sapien
ctaagccaattaatgcagaatggaaagtcaaac

SEQ ID NO: 176936 - DNA, 33 bp, Homo sapien
ctaagccaattaatgcggaatggaaagtcaaac

SEQ ID NO: 176937 - DNA, 33 bp, Homo sapien
taaaacatttgcatcacgctaaaaggaaagtct

SEQ ID NO: 176938 - DNA, 33 bp, Homo sapien
taaaacatttgcatcatgctaaaaggaaagtct

SEQ ID NO: 176939 - DNA, 33 bp, Homo sapien
acaaaatctcaggctgaaaggagtttttctcat

SEQ ID NO: 176940 - DNA, 33 bp, Homo sapien
acaaaatctcaggctggaaggagtttttctcat

SEQ ID NO: 176941 - DNA, 33 bp, Homo sapien
ctacattaatgtgtccagagaagtggaaactga

SEQ ID NO: 176942 - DNA, 33 bp, Homo sapien
ctacattaatgtgtccggagaagtggaaactga

SEQ ID NO: 176943 - DNA, 33 bp, Homo sapien
gaatgcctgactgctacggtttaggcgttttga

SEQ ID NO: 176944 - DNA, 33 bp, Homo sapien
gaatgcctgactgctatggtttaggcgttttga

SEQ ID NO: 176945 - DNA, 33 bp, Homo sapien; identical to SEQ ID NO: 176943

SEQ ID NO: 176946 - DNA, 33 bp, Homo sapien; identical to SEQ ID NO: 176944

SEQ ID NO: 176947 - DNA, 33 bp, Homo sapien
ctccacttctaaatacaggctgtaaccatcttt

SEQ ID NO: 176948 - DNA, 33 bp, Homo sapien
ctccacttctaaatacgggctgtaaccatcttt

SEQ ID NO: 176949 - DNA, 33 bp, Homo sapien
aaacaacaggtaactgaagaggtctgtttccaa

SEQ ID NO: 176950 - DNA, 33 bp, Homo sapien
aaacaacaggtaactggagaggtctgtttccaa

SEQ ID NO: 176951 - DNA, 33 bp, Homo sapien
aggcatggaactatcaaaagatggcttcaaaaa

SEQ ID NO: 176952 - DNA, 33 bp, Homo sapien
aggcatggaactatcagaagatggcttcaaaaa

SEQ ID NO: 176953 - DNA, 33 bp, Homo sapien
ccaaatgaaataaagaaataaagcgacacatta

SEQ ID NO: 176954 - DNA, 33 bp, Homo sapien
ccaaatgaaataaagacataaagcgacacatta

SEQ ID NO: 176955 - DNA, 33 bp, Homo sapien
atctttgtatctgtcaccaagaagtataactgt

SEQ ID NO: 176956 - DNA, 33 bp, Homo sapien
atctttgtatctgtcatcaagaagtataactgt

SEQ ID NO: 176957 - DNA, 33 bp, Homo sapien
atgtgatgatgactggccaagtaagctgcttaa

SEQ ID NO: 176958 - DNA, 33 bp, Homo sapien
atgtgatgatgactggtcaagtaagctgcttaa

SEQ ID NO: 176959 - DNA, 33 bp, Homo sapien
tcatttatttaagagccctttccgattgcctcc

SEQ ID NO: 176960 - DNA, 33 bp, Homo sapien
tcatttatttaagagctctttccgattgcctcc

SEQ ID NO: 176961 - DNA, 33 bp, Homo sapien
tgagtattgacaaggaaatctttgataattggg

SEQ ID NO: 176962 - DNA, 33 bp, Homo sapien
tgagtattgacaaggagatctttgataattggg

SEQ ID NO: 176963 - DNA, 33 bp, Homo sapien
tgcttacaagcttagcacttcactagtgcctgg

SEQ ID NO: 176964 - DNA, 33 bp, Homo sapien
tgcttacaagcttagcccttcactagtgcctgg

SEQ ID NO: 176965 - DNA, 33 bp, Homo sapien
gaattaagtccactgaataaccaaatagaccaa

SEQ ID NO: 176966 - DNA, 33 bp, Homo sapien
gaattaagtccactgactaaccaaatagaccaa

SEQ ID NO: 176967 - DNA, 33 bp, Homo sapien
ccgtctcaatccggtgcagccgtttgcgggatg

SEQ ID NO: 176968 - DNA, 33 bp, Homo sapien
ccgtctcaatccggtgtagccgtttgcgggatg

SEQ ID NO: 176969 - DNA, 33 bp, Homo sapien
agaactctgaagatgacgagctagctaaagaat

SEQ ID NO: 176970 - DNA, 33 bp, Homo sapien
agaactctgaagatgatgagctagctaaagaat

SEQ ID NO: 176971 - DNA, 33 bp, Homo sapien
agcctagtttgcgccacgatactccagcctggg

SEQ ID NO: 176972 - DNA, 33 bp, Homo sapien
agcctagtttgcgccatgatactccagcctggg

SEQ ID NO: 176973 - DNA, 33 bp, Homo sapien
ctttaaaacatatccacaatgtgactgctttca

SEQ ID NO: 176974 - DNA, 33 bp, Homo sapien
ctttaaaacatatccataatgtgactgctttca

SEQ ID NO: 176975 - DNA, 33 bp, Homo sapien
tgtgctttggcccaaacgtttctcaccttacac

SEQ ID NO: 176976 - DNA, 33 bp, Homo sapien
tgtgctttggcccaaatgtttctcaccttacac

SEQ ID NO: 176977 - DNA, 33 bp, Homo sapien
actagactggaagataaggttttagaagataag

SEQ ID NO: 176978 - DNA, 33 bp, Homo sapien
actagactggaagatagggttttagaagataag

SEQ ID NO: 176979 - DNA, 33 bp, Homo sapien
aaatcacaagcttaaaaggcctgtcaagttatt

SEQ ID NO: 176980 - DNA, 33 bp, Homo sapien
aaatcacaagcttaaatggcctgtcaagttatt

SEQ ID NO: 176981 - DNA, 33 bp, Homo sapien
aaaacataactgaatggaaagggacctgcaaga

SEQ ID NO: 176982 - DNA, 33 bp, Homo sapien
aaaacataactgaatgtaaagggacctgcaaga

SEQ ID NO: 176983 - DNA, 33 bp, Homo sapien
ggccacattttttgcacggttcatcatcatctg

SEQ ID NO: 176984 - DNA, 33 bp, Homo sapien
ggccacattttttgcatggttcatcatcatctg

SEQ ID NO: 176985 - DNA, 33 bp, Homo sapien
atgagaatttaacaccaccattgatctgacagg

SEQ ID NO: 176986 - DNA, 33 bp, Homo sapien
atgagaatttaacaccgccattgatctgacagg

SEQ ID NO: 176987 - DNA, 33 bp, Homo sapien
gtaatcctgataccaccgtcaaaaagcaactga

SEQ ID NO: 176988 - DNA, 33 bp, Homo sapien
gtaatcctgataccactgtcaaaaagcaactga

SEQ ID NO: 176989 - DNA, 33 bp, Homo sapien
ctcagtagaaggaagaagataaccaagatatga

SEQ ID NO: 176990 - DNA, 33 bp, Homo sapien
ctcagtagaaggaagaggataaccaagatatga

SEQ ID NO: 176991 - DNA, 33 bp, Homo sapien
ggctcacagtgtcacaaattccaaaaacaacaa

SEQ ID NO: 176992 - DNA, 33 bp, Homo sapien
ggctcacagtgtcacagattccaaaaacaacaa

SEQ ID NO: 176993 - DNA, 33 bp, Homo sapien
ttgttattgtgctgtaacttgcatttgctaacg

SEQ ID NO: 176994 - DNA, 33 bp, Homo sapien
ttgttattgtgctgtatcttgcatttgctaacg

SEQ ID NO: 176995 - DNA, 33 bp, Homo sapien
ccaggccctgggcagaataattgacttggggac

SEQ ID NO: 176996 - DNA, 33 bp, Homo sapien
ccaggccctgggcagagtaattgacttggggac

SEQ ID NO: 176997 - DNA, 33 bp, Homo sapien
gaacattcagtaatgccgcaagagacaaaaatc

SEQ ID NO: 176998 - DNA, 33 bp, Homo sapien
gaacattcagtaatgctgcaagagacaaaaatc

SEQ ID NO: 176999 - DNA, 33 bp, Homo sapien
ctgagggtgccgtgaacctagaatgtttgagaa

SEQ ID NO: 177000 - DNA, 33 bp, Homo sapien
ctgagggtgccgtgaagctagaatgtttgagaa

SEQ ID NO: 177001 - DNA, 33 bp, Homo sapien
agggtcaagagatatacacttgcccgtttggga

SEQ ID NO: 177002 - DNA, 33 bp, Homo sapien
agggtcaagagatatatacttgcccgtttggga

SEQ ID NO: 177003 - DNA, 33 bp, Homo sapien
cagtagagagagaaagccttactgcctcaaggt

SEQ ID NO: 177004 - DNA, 33 bp, Homo sapien
cagtagagagagaaagtcttactgcctcaaggt

SEQ ID NO: 177005 - DNA, 33 bp, Homo sapien
atatatacatttttaaaggacacacatattaag

SEQ ID NO: 177006 - DNA, 33 bp, Homo sapien
atatatacatttttaagggacacacatattaag

SEQ ID NO: 177007 - DNA, 33 bp, Homo sapien
tgaatatgagttttcactaaatcctgtaataat

SEQ ID NO: 177008 - DNA, 33 bp, Homo sapien
tgaatatgagttttcattaaatcctgtaataat

SEQ ID NO: 177009 - DNA, 33 bp, Homo sapien
agaaacgtatggggaggatgaatatgagttttc

SEQ ID NO: 177010 - DNA, 33 bp, Homo sapien
agaaacgtatggggagtatgaatatgagttttc

SEQ ID NO: 177011 - DNA, 33 bp, Homo sapien
gatggagccttaagagaagaataaatcactaag

SEQ ID NO: 177012 - DNA, 33 bp, Homo sapien
gatggagccttaagaggagaataaatcactaag

SEQ ID NO: 177013 - DNA, 33 bp, Homo sapien
ctgaatggtcgctacccagtcactattacaaat

SEQ ID NO: 177014 - DNA, 33 bp, Homo sapien
ctgaatggtcgctacctagtcactattacaaat

SEQ ID NO: 177015 - DNA, 33 bp, Homo sapien
tcagtcttctttttaaataggcaaaataattta

SEQ ID NO: 177016 - DNA, 33 bp, Homo sapien
tcagtcttctttttaagtaggcaaaataattta

SEQ ID NO: 177017 - DNA, 33 bp, Homo sapien; identical to SEQ ID NO: 177015

SEQ ID NO: 177018 - DNA, 33 bp, Homo sapien; identical to SEQ ID NO: 177016

SEQ ID NO: 177019 - DNA, 33 bp, Homo sapien
gacatctggaaaaataccttagtcatgcaactg

SEQ ID NO: 177020 - DNA, 33 bp, Homo sapien
gacatctggaaaaatatcttagtcatgcaactg

SEQ ID NO: 177021 - DNA, 33 bp, Homo sapien
gctggctccagaaccaagtcttgcattctgcct

SEQ ID NO: 177022 - DNA, 33 bp, Homo sapien
gctggctccagaaccatgtcttgcattctgcct

SEQ ID NO: 177023 - DNA, 33 bp, Homo sapien
ggacaacagatacaaaatcacaatgaagagaaa

SEQ ID NO: 177024 - DNA, 33 bp, Homo sapien
ggacaacagatacaaagtcacaatgaagagaaa

SEQ ID NO: 177025 - DNA, 33 bp, Homo sapien
attgaaacagaggccaatgatttcagaccaagg

SEQ ID NO: 177026 - DNA, 33 bp, Homo sapien
attgaaacagaggccagtgatttcagaccaagg

SEQ ID NO: 177027 - DNA, 33 bp, Homo sapien
tcttcaggtactctcactctcatactgaacttt

SEQ ID NO: 177028 - DNA, 33 bp, Homo sapien
tcttcaggtactctcattctcatactgaacttt

SEQ ID NO: 177029 - DNA, 33 bp, Homo sapien
ttacatagtaaataaaacaggagacaaatggaa

SEQ ID NO: 177030 - DNA, 33 bp, Homo sapien
ttacatagtaaataaagcaggagacaaatggaa

SEQ ID NO: 177031 - DNA, 33 bp, Homo sapien
ttttttaagagtcttcaccacatttatgcagcc

SEQ ID NO: 177032 - DNA, 33 bp, Homo sapien
ttttttaagagtcttcgccacatttatgcagcc

SEQ ID NO: 177033 - DNA, 33 bp, Homo sapien
tattataaaccagaaacagtaccgggttggtga

SEQ ID NO: 177034 - DNA, 33 bp, Homo sapien
tattataaaccagaaagagtaccgggttggtga

SEQ ID NO: 177035 - DNA, 33 bp, Homo sapien
tgggaagagaggaaatcacattgtgcaacagtg

SEQ ID NO: 177036 - DNA, 33 bp, Homo sapien
tgggaagagaggaaattacattgtgcaacagtg

SEQ ID NO: 177037 - DNA, 33 bp, Homo sapien
taaatggctttaggaacgagtttggtgcattcc

SEQ ID NO: 177038 - DNA, 33 bp, Homo sapien
taaatggctttaggaaggagtttggtgcattcc

SEQ ID NO: 177039 - DNA, 33 bp, Homo sapien
cagttttagaccatcacgataaagcgaatatca

SEQ ID NO: 177040 - DNA, 33 bp, Homo sapien
cagttttagaccatcatgataaagcgaatatca

SEQ ID NO: 177041 - DNA, 33 bp, Homo sapien
tttccagtctctcttgcatactgtgtagaggtg

SEQ ID NO: 177042 - DNA, 33 bp, Homo sapien
tttccagtctctcttgtatactgtgtagaggtg

SEQ ID NO: 177043 - DNA, 33 bp, Homo sapien
tctagatgttctgacccaaagatgtagtctaca

SEQ ID NO: 177044 - DNA, 33 bp, Homo sapien
tctagatgttctgacctaaagatgtagtctaca

SEQ ID NO: 177045 - DNA, 33 bp, Homo sapien
ctcttgaagtccaataacaagaccaagtaagaa

SEQ ID NO: 177046 - DNA, 33 bp, Homo sapien
ctcttgaagtccaatagcaagaccaagtaagaa

SEQ ID NO: 177047 - DNA, 33 bp, Homo sapien
tgtgacttctgtctgaactttccttgcctgtaa

SEQ ID NO: 177048 - DNA, 33 bp, Homo sapien
tgtgacttctgtctgagctttccttgcctgtaa

SEQ ID NO: 177049 - DNA, 33 bp, Homo sapien
ctttaataacgggattcaagcaatatgtttaag

SEQ ID NO: 177050 - DNA, 33 bp, Homo sapien
ctttaataacgggatttaagcaatatgtttaag

SEQ ID NO: 177051 - DNA, 33 bp, Homo sapien
ccatgcctgtccccaacaaaatatcttgcttcc

SEQ ID NO: 177052 - DNA, 33 bp, Homo sapien
ccatgcctgtccccaataaaatatcttgcttcc

SEQ ID NO: 177053 - DNA, 33 bp, Homo sapien
ccctcggtcacctaaccggaaactccaggggta

SEQ ID NO: 177054 - DNA, 33 bp, Homo sapien
ccctcggtcacctaactggaaactccaggggta

SEQ ID NO: 177055 - DNA, 33 bp, Homo sapien
ggcctctttagaatgccagaagtgacagatata

SEQ ID NO: 177056 - DNA, 33 bp, Homo sapien
ggcctctttagaatgcgagaagtgacagatata

SEQ ID NO: 177057 - DNA, 33 bp, Homo sapien
tgtgtctatgctgtacacttgacagtctcaaac

SEQ ID NO: 177058 - DNA, 33 bp, Homo sapien
tgtgtctatgctgtacgcttgacagtctcaaac

SEQ ID NO: 177059 - DNA, 33 bp, Homo sapien
ggacagaacgaagtagccaacatgggcagcgtc

SEQ ID NO: 177060 - DNA, 33 bp, Homo sapien
ggacagaacgaagtagtcaacatgggcagcgtc

SEQ ID NO: 177061 - DNA, 33 bp, Homo sapien
cagctgaaattctgagcctactggaaagtcttc

SEQ ID NO: 177062 - DNA, 33 bp, Homo sapien
cagctgaaattctgaggctactggaaagtcttc

SEQ ID NO: 177063 - DNA, 33 bp, Homo sapien
agaggcagcatgaaaacgtgttcctggctttga

SEQ ID NO: 177064 - DNA, 33 bp, Homo sapien
agaggcagcatgaaaaggtgttcctggctttga

SEQ ID NO: 177065 - DNA, 33 bp, Homo sapien
ctactgtaacagtcacagaaggtgtttgagtga

SEQ ID NO: 177066 - DNA, 33 bp, Homo sapien
ctactgtaacagtcacggaaggtgtttgagtga

SEQ ID NO: 177067 - DNA, 33 bp, Homo sapien
tgcagtttgtaaactacgacaatatgaccacgc

SEQ ID NO: 177068 - DNA, 33 bp, Homo sapien
tgcagtttgtaaactatgacaatatgaccacgc

SEQ ID NO: 177069 - DNA, 33 bp, Homo sapien
tctctacgctgacccacgttcctcacagaaaga

SEQ ID NO: 177070 - DNA, 33 bp, Homo sapien
tctctacgctgacccatgttcctcacagaaaga

SEQ ID NO: 177071 - DNA, 33 bp, Homo sapien
aatcaacctcgccttcaatgtgtacaataatag

SEQ ID NO: 177072 - DNA, 33 bp, Homo sapien
aatcaacctcgccttcgatgtgtacaataatag

SEQ ID NO: 177073 - DNA, 33 bp, Homo sapien
cacgtgaaaactggcccaacatcatttattatt

SEQ ID NO: 177074 - DNA, 33 bp, Homo sapien
cacgtgaaaactggccgaacatcatttattatt

SEQ ID NO: 177075 - DNA, 33 bp, Homo sapien
aagtctaaaggtgtacaaatagtaataataata

SEQ ID NO: 177076 - DNA, 33 bp, Homo sapien
aagtctaaaggtgtacgaatagtaataataata

SEQ ID NO: 177077 - DNA, 33 bp, Homo sapien
ctagagacatactagtgaaaatgttcaagaatt

SEQ ID NO: 177078 - DNA, 33 bp, Homo sapien
ctagagacatactagttaaaatgttcaagaatt

SEQ ID NO: 177079 - DNA, 33 bp, Homo sapien
gtctgttgccattgccaaactttaatttttgcc

SEQ ID NO: 177080 - DNA, 33 bp, Homo sapien
gtctgttgccattgccgaactttaatttttgcc

SEQ ID NO: 177081 - DNA, 33 bp, Homo sapien
atcaatatcagtattccattctgcctgtgtgct

SEQ ID NO: 177082 - DNA, 33 bp, Homo sapien
atcaatatcagtattctattctgcctgtgtgct

SEQ ID NO: 177083 - DNA, 33 bp, Homo sapien
tcagaaatgccccctaggtatagcccatgcagc

SEQ ID NO: 177084 - DNA, 33 bp, Homo sapien
tcagaaatgccccctatgtatagcccatgcagc

SEQ ID NO: 177085 - DNA, 33 bp, Homo sapien
cacattcagattcagcaaacgtttatctagtca

SEQ ID NO: 177086 - DNA, 33 bp, Homo sapien
cacattcagattcagccaacgtttatctagtca

SEQ ID NO: 177087 - DNA, 33 bp, Homo sapien
taaggaaatataaatgaaatgctattttgtatg

SEQ ID NO: 177088 - DNA, 33 bp, Homo sapien
taaggaaatataaatgcaatgctattttgtatg

SEQ ID NO: 177089 - DNA, 33 bp, Homo sapien
tatgcggttaatcagactccctgtttggcttga

SEQ ID NO: 177090 - DNA, 33 bp, Homo sapien
tatgcggttaatcagattccctgtttggcttga

SEQ ID NO: 177091 - DNA, 33 bp, Homo sapien
accaagtgtggaagaacggtgctctgaacagtt

SEQ ID NO: 177092 - DNA, 33 bp, Homo sapien
accaagtgtggaagaatggtgctctgaacagtt

SEQ ID NO: 177093 - DNA, 33 bp, Homo sapien
aagattattgtgaggcgcaaaagaaagaatgca

SEQ ID NO: 177094 - DNA, 33 bp, Homo sapien
aagattattgtgaggctcaaaagaaagaatgca

SEQ ID NO: 177095 - DNA, 33 bp, Homo sapien
gagatcatggaagacactggatactatgtttag

SEQ ID NO: 177096 - DNA, 33 bp, Homo sapien
gagatcatggaagacattggatactatgtttag

SEQ ID NO: 177097 - DNA, 33 bp, Homo sapien
aacacagtaagggaaaaatcgaaaatgtttttg

SEQ ID NO: 177098 - DNA, 33 bp, Homo sapien
aacacagtaagggaaagatcgaaaatgtttttg

SEQ ID NO: 177099 - DNA, 33 bp, Homo sapien
ttgacctatttgggcaactatgataaggccagt

SEQ ID NO: 177100 - DNA, 33 bp, Homo sapien
ttgacctatttgggcagctatgataaggccagt

SEQ ID NO: 177101 - DNA, 33 bp, Homo sapien
ttaaggtgtgtgctaccataccctgctaatttt

SEQ ID NO: 177102 - DNA, 33 bp, Homo sapien
ttaaggtgtgtgctactataccctgctaatttt

SEQ ID NO: 177103 - DNA, 33 bp, Homo sapien
ctgacacaacagatacactctatatttgttgaa

SEQ ID NO: 177104 - DNA, 33 bp, Homo sapien
ctgacacaacagatacgctctatatttgttgaa

SEQ ID NO: 177105 - DNA, 33 bp, Homo sapien
tataaacaatcatcccaaagtctaaaaacatat

SEQ ID NO: 177106 - DNA, 33 bp, Homo sapien
tataaacaatcatcccgaagtctaaaaacatat

SEQ ID NO: 177107 - DNA, 33 bp, Homo sapien
gtctcccatgcttgagaaatcagttgtcctcag

SEQ ID NO: 177108 - DNA, 33 bp, Homo sapien
gtctcccatgcttgagtaatcagttgtcctcag

SEQ ID NO: 177109 - DNA, 33 bp, Homo sapien
agtttagttttatgtgccaatatggctaggata

SEQ ID NO: 177110 - DNA, 33 bp, Homo sapien
agtttagttttatgtgtcaatatggctaggata

SEQ ID NO: 177111 - DNA, 33 bp, Homo sapien
cgtgagccaccaagtccgaccatgaagtttagt

SEQ ID NO: 177112 - DNA, 33 bp, Homo sapien
cgtgagccaccaagtctgaccatgaagtttagt

SEQ ID NO: 177113 - DNA, 33 bp, Homo sapien
ttatagctgatgaaacaaacttgaaaaaattaa

SEQ ID NO: 177114 - DNA, 33 bp, Homo sapien
ttatagctgatgaaacgaacttgaaaaaattaa

SEQ ID NO: 177115 - DNA, 33 bp, Homo sapien
atgtgcccttcatcataacgcagaattttaaca

SEQ ID NO: 177116 - DNA, 33 bp, Homo sapien
atgtgcccttcatcatcacgcagaattttaaca

SEQ ID NO: 177117 - DNA, 33 bp, Homo sapien
tgagagccaaaaactacaggtccaagctgggat

SEQ ID NO: 177118 - DNA, 33 bp, Homo sapien
tgagagccaaaaactagaggtccaagctgggat

SEQ ID NO: 177119 - DNA, 33 bp, Homo sapien
gaatcttcctcttccaacagaaaatggtcgaaa

SEQ ID NO: 177120 - DNA, 33 bp, Homo sapien
gaatcttcctcttccagcagaaaatggtcgaaa

SEQ ID NO: 177121 - DNA, 33 bp, Homo sapien
ttcagctgccatgctcaactctgtggcaggggc

SEQ ID NO: 177122 - DNA, 33 bp, Homo sapien
ttcagctgccatgctcgactctgtggcaggggc

SEQ ID NO: 177123 - DNA, 33 bp, Homo sapien
attgaaggtgagtacacagaacaatggaaacct

SEQ ID NO: 177124 - DNA, 33 bp, Homo sapien
attgaaggtgagtacatagaacaatggaaacct

SEQ ID NO: 177125 - DNA, 33 bp, Homo sapien
acagagtccaggcttccagtctagcccagccac

SEQ ID NO: 177126 - DNA, 33 bp, Homo sapien
acagagtccaggcttcgagtctagcccagccac

SEQ ID NO: 177127 - DNA, 33 bp, Homo sapien
gggaggtgctggaccacgctggccagggcgcta

SEQ ID NO: 177128 - DNA, 33 bp, Homo sapien
gggaggtgctggaccatgctggccagggcgcta

SEQ ID NO: 177129 - DNA, 33 bp, Homo sapien
cccacctaactggtaactcacagctactccctc

SEQ ID NO: 177130 - DNA, 33 bp, Homo sapien
cccacctaactggtaattcacagctactccctc

SEQ ID NO: 177131 - DNA, 33 bp, Homo sapien
ccatgagtgatggagtcggctctttcctggtga

SEQ ID NO: 177132 - DNA, 33 bp, Homo sapien
ccatgagtgatggagttggctctttcctggtga

SEQ ID NO: 177133 - DNA, 33 bp, Homo sapien
atcacagtctgttggcagagataagtagtaatg

SEQ ID NO: 177134 - DNA, 33 bp, Homo sapien
atcacagtctgttggcggagataagtagtaatg

SEQ ID NO: 177135 - DNA, 33 bp, Homo sapien
gagttgaacaagggacgcttgcccaaagttaca

SEQ ID NO: 177136 - DNA, 33 bp, Homo sapien
gagttgaacaagggactcttgcccaaagttaca

SEQ ID NO: 177137 - DNA, 33 bp, Homo sapien
aagaggatggggcataagaagaacaggtaaaat

SEQ ID NO: 177138 - DNA, 33 bp, Homo sapien
aagaggatggggcataggaagaacaggtaaaat

SEQ ID NO: 177139 - DNA, 33 bp, Homo sapien
aatagctctgtgaatgaaaaaggaaggaaatgt

SEQ ID NO: 177140 - DNA, 33 bp, Homo sapien
aatagctctgtgaatggaaaaggaaggaaatgt

SEQ ID NO: 177141 - DNA, 33 bp, Homo sapien
tgaaataccaggtagacatgagttttggaagga

SEQ ID NO: 177142 - DNA, 33 bp, Homo sapien
tgaaataccaggtagatatgagttttggaagga

SEQ ID NO: 177143 - DNA, 33 bp, Homo sapien
gaatgactggtgccttaaaagtcaggacctctt

SEQ ID NO: 177144 - DNA, 33 bp, Homo sapien
gaatgactggtgccttgaaagtcaggacctctt

SEQ ID NO: 177145 - DNA, 33 bp, Homo sapien
taggatatctagttcaagaatgactggctacat

SEQ ID NO: 177146 - DNA, 33 bp, Homo sapien
taggatatctagttcaggaatgactggctacat

SEQ ID NO: 177147 - DNA, 33 bp, Homo sapien
taacaatgttacacacagtaagtagcagaaaaa

SEQ ID NO: 177148 - DNA, 33 bp, Homo sapien
taacaatgttacacacggtaagtagcagaaaaa

SEQ ID NO: 177149 - DNA, 33 bp, Homo sapien
ctcaattttcatttcaatctaaggcttattggg

SEQ ID NO: 177150 - DNA, 33 bp, Homo sapien
ctcaattttcatttcagtctaaggcttattggg

SEQ ID NO: 177151 - DNA, 33 bp, Homo sapien
aggcagccatttatcagcctacaccacttactt

SEQ ID NO: 177152 - DNA, 33 bp, Homo sapien
aggcagccatttatcatcctacaccacttactt

SEQ ID NO: 177153 - DNA, 33 bp, Homo sapien
cttctctccacttccacgttttatttatttata

SEQ ID NO: 177154 - DNA, 33 bp, Homo sapien
cttctctccacttccaggttttatttatttata

SEQ ID NO: 177155 - DNA, 33 bp, Homo sapien
gtaaaagcaattcaatcaagaaaacagctagtt

SEQ ID NO: 177156 - DNA, 33 bp, Homo sapien
gtaaaagcaattcaatgaagaaaacagctagtt

SEQ ID NO: 177157 - DNA, 33 bp, Homo sapien
attagggtagtaataacggagacaaaagacaat

SEQ ID NO: 177158 - DNA, 33 bp, Homo sapien
attagggtagtaataatggagacaaaagacaat

SEQ ID NO: 177159 - DNA, 33 bp, Homo sapien
gaagtgctgttagccaagagttcagtcttactg

SEQ ID NO: 177160 - DNA, 33 bp, Homo sapien
gaagtgctgttagccatgagttcagtcttactg

SEQ ID NO: 177161 - DNA, 33 bp, Homo sapien
tgtttacaggatgagaagtgaaataagtacaca

SEQ ID NO: 177162 - DNA, 33 bp, Homo sapien
tgtttacaggatgagaggtgaaataagtacaca

SEQ ID NO: 177163 - DNA, 33 bp, Homo sapien
tcagtccagctgcttgaagtattgcatatgtag

SEQ ID NO: 177164 - DNA, 33 bp, Homo sapien
tcagtccagctgcttggagtattgcatatgtag

SEQ ID NO: 177165 - DNA, 33 bp, Homo sapien
ggatgcaaaagcaaaagaaagaatgatgcaatg

SEQ ID NO: 177166 - DNA, 33 bp, Homo sapien
ggatgcaaaagcaaaataaagaatgatgcaatg

SEQ ID NO: 177167 - DNA, 33 bp, Homo sapien
taattcttaccttgtacggtcttttggacttcg

SEQ ID NO: 177168 - DNA, 33 bp, Homo sapien
taattcttaccttgtatggtcttttggacttcg

SEQ ID NO: 177169 - DNA, 33 bp, Homo sapien
ctttgggagttttatcaagaggcataattctta

SEQ ID NO: 177170 - DNA, 33 bp, Homo sapien
ctttgggagttttatccagaggcataattctta

SEQ ID NO: 177171 - DNA, 33 bp, Homo sapien
caaatttgtttgcaggcagtctgccaattactt

SEQ ID NO: 177172 - DNA, 33 bp, Homo sapien
caaatttgtttgcaggtagtctgccaattactt

SEQ ID NO: 177173 - DNA, 33 bp, Homo sapien
ggagatgaacttatcacctttactcatgacagc

SEQ ID NO: 177174 - DNA, 33 bp, Homo sapien
ggagatgaacttatcagctttactcatgacagc

SEQ ID NO: 177175 - DNA, 33 bp, Homo sapien
gtactggtcattaagagatctggtttttttgac

SEQ ID NO: 177176 - DNA, 33 bp, Homo sapien
gtactggtcattaagatatctggtttttttgac

SEQ ID NO: 177177 - DNA, 33 bp, Homo sapien
atggatttatagtccggcactctcttgcataca

SEQ ID NO: 177178 - DNA, 33 bp, Homo sapien
atggatttatagtccgtcactctcttgcataca

SEQ ID NO: 177179 - DNA, 33 bp, Homo sapien
ctactctgacagcaaggaaataaataagaagcc

SEQ ID NO: 177180 - DNA, 33 bp, Homo sapien
ctactctgacagcaagtaaataaataagaagcc

SEQ ID NO: 177181 - DNA, 33 bp, Homo sapien
gcacatggggtgtgggaccagtaaaattccatc

SEQ ID NO: 177182 - DNA, 33 bp, Homo sapien
gcacatggggtgtggggccagtaaaattccatc

SEQ ID NO: 177183 - DNA, 33 bp, Homo sapien
cagcctagcaagagacaaaactgctaaacaata

SEQ ID NO: 177184 - DNA, 33 bp, Homo sapien
cagcctagcaagagacgaaactgctaaacaata

SEQ ID NO: 177185 - DNA, 33 bp, Homo sapien
ttctccttcaaaggaaaattgaaatgatgaggg

SEQ ID NO: 177186 - DNA, 33 bp, Homo sapien
ttctccttcaaaggaagattgaaatgatgaggg

SEQ ID NO: 177187 - DNA, 33 bp, Homo sapien
ttctgtttttgtgactcagattattaaaaaatt

SEQ ID NO: 177188 - DNA, 33 bp, Homo sapien
ttctgtttttgtgacttagattattaaaaaatt

SEQ ID NO: 177189 - DNA, 33 bp, Homo sapien
atttcaaactcactcaagatccaatggagatgg

SEQ ID NO: 177190 - DNA, 33 bp, Homo sapien
atttcaaactcactcacgatccaatggagatgg

SEQ ID NO: 177191 - DNA, 33 bp, Homo sapien
gtcaagaactaaatgacagtgaaacttgacaca

SEQ ID NO: 177192 - DNA, 33 bp, Homo sapien
gtcaagaactaaatgatagtgaaacttgacaca

SEQ ID NO: 177193 - DNA, 33 bp, Homo sapien
taacctaccaagaaataaaagaggcgtatattt

SEQ ID NO: 177194 - DNA, 33 bp, Homo sapien
taacctaccaagaaatgaaagaggcgtatattt

SEQ ID NO: 177195 - DNA, 33 bp, Homo sapien
agtatggaagaacttaccaaaataggctatttt

SEQ ID NO: 177196 - DNA, 33 bp, Homo sapien
agtatggaagaacttatcaaaataggctatttt

SEQ ID NO: 177197 - DNA, 33 bp, Homo sapien
tcctcctgcataccataaaattagtaccaagta

SEQ ID NO: 177198 - DNA, 33 bp, Homo sapien
tcctcctgcataccattaaattagtaccaagta

SEQ ID NO: 177199 - DNA, 33 bp, Homo sapien
atgtgctctagagtccagctatttggagagcct

SEQ ID NO: 177200 - DNA, 33 bp, Homo sapien
atgtgctctagagtccggctatttggagagcct

SEQ ID NO: 177201 - DNA, 33 bp, Homo sapien
taggtaatttgaaaacactctttctgcaaaaca

SEQ ID NO: 177202 - DNA, 33 bp, Homo sapien
taggtaatttgaaaaccctctttctgcaaaaca

SEQ ID NO: 177203 - DNA, 33 bp, Homo sapien
acatatgtataaagtacaggctgccttaaaggc

SEQ ID NO: 177204 - DNA, 33 bp, Homo sapien
acatatgtataaagtagaggctgccttaaaggc

SEQ ID NO: 177205 - DNA, 33 bp, Homo sapien
ttcctctgttgcataccagtagatcctcttgag

SEQ ID NO: 177206 - DNA, 33 bp, Homo sapien
ttcctctgttgcatactagtagatcctcttgag

SEQ ID NO: 177207 - DNA, 33 bp, Homo sapien
tccctttacacttcccactgagcattttggatc

SEQ ID NO: 177208 - DNA, 33 bp, Homo sapien
tccctttacacttcccgctgagcattttggatc

SEQ ID NO: 177209 - DNA, 33 bp, Homo sapien
tgaaaatttcatgagcaactatatacatatata

SEQ ID NO: 177210 - DNA, 33 bp, Homo sapien
tgaaaatttcatgagcgactatatacatatata

SEQ ID NO: 177211 - DNA, 33 bp, Homo sapien
acagccaaccctccacagctatataggaaatac

SEQ ID NO: 177212 - DNA, 33 bp, Homo sapien
acagccaaccctccactgctatataggaaatac

SEQ ID NO: 177213 - DNA, 33 bp, Homo sapien
cagcttcctggtactacctgtactctgtctgag

SEQ ID NO: 177214 - DNA, 33 bp, Homo sapien
cagcttcctggtactatctgtactctgtctgag

SEQ ID NO: 177215 - DNA, 33 bp, Homo sapien
aaggagcgagagtaaacagcagtaagctgaaca

SEQ ID NO: 177216 - DNA, 33 bp, Homo sapien
aaggagcgagagtaaatagcagtaagctgaaca

SEQ ID NO: 177217 - DNA, 33 bp, Homo sapien
ttgtggtaactgtccaaagatagctgcctagtg

SEQ ID NO: 177218 - DNA, 33 bp, Homo sapien
ttgtggtaactgtccagagatagctgcctagtg

SEQ ID NO: 177219 - DNA, 33 bp, Homo sapien
ttgtgtggttcaagcactactgaaaatccacat

SEQ ID NO: 177220 - DNA, 33 bp, Homo sapien
ttgtgtggttcaagcagtactgaaaatccacat

SEQ ID NO: 177221 - DNA, 33 bp, Homo sapien
ggcatcctctggagtacctgcgacaatatcctc

SEQ ID NO: 177222 - DNA, 33 bp, Homo sapien
ggcatcctctggagtatctgcgacaatatcctc

SEQ ID NO: 177223 - DNA, 33 bp, Homo sapien
taaacctggatattcagtataagggataaagat

SEQ ID NO: 177224 - DNA, 33 bp, Homo sapien
taaacctggatattcattataagggataaagat

SEQ ID NO: 177225 - DNA, 33 bp, Homo sapien
gacaagcaagaaaagagactactgaaatataaa

SEQ ID NO: 177226 - DNA, 33 bp, Homo sapien
gacaagcaagaaaagatactactgaaatataaa

SEQ ID NO: 177227 - DNA, 33 bp, Homo sapien
tccttgaacgggccacactaatctctgtaacct

SEQ ID NO: 177228 - DNA, 33 bp, Homo sapien
tccttgaacgggccacgctaatctctgtaacct

SEQ ID NO: 177229 - DNA, 33 bp, Homo sapien
cacttccccaccaatacggctgctagagcaagt

SEQ ID NO: 177230 - DNA, 33 bp, Homo sapien
cacttccccaccaatatggctgctagagcaagt

SEQ ID NO: 177231 - DNA, 33 bp, Homo sapien
gaataatgatagacacaataccacagatccaag

SEQ ID NO: 177232 - DNA, 33 bp, Homo sapien
gaataatgatagacaccataccacagatccaag

SEQ ID NO: 177233 - DNA, 33 bp, Homo sapien
tgactgaggttaagcaagttttcacatatggaa

SEQ ID NO: 177234 - DNA, 33 bp, Homo sapien
tgactgaggttaagcatgttttcacatatggaa

SEQ ID NO: 177235 - DNA, 33 bp, Homo sapien
agctctacacaagtccaactattctgattgcta

SEQ ID NO: 177236 - DNA, 33 bp, Homo sapien
agctctacacaagtccgactattctgattgcta

SEQ ID NO: 177237 - DNA, 33 bp, Homo sapien
aaagaatgaaacataacgaagtacacttacaag

SEQ ID NO: 177238 - DNA, 33 bp, Homo sapien
aaagaatgaaacataatgaagtacacttacaag

SEQ ID NO: 177239 - DNA, 33 bp, Homo sapien
agagccattccctctaccagacaaccacactag

SEQ ID NO: 177240 - DNA, 33 bp, Homo sapien
agagccattccctctatcagacaaccacactag

SEQ ID NO: 177241 - DNA, 33 bp, Homo sapien
ggcttggagagatttaacttaggcatctttaaa

SEQ ID NO: 177242 - DNA, 33 bp, Homo sapien
ggcttggagagatttaccttaggcatctttaaa

SEQ ID NO: 177243 - DNA, 33 bp, Homo sapien
gaaagatcacgttacaaggacaattctgaaggc

SEQ ID NO: 177244 - DNA, 33 bp, Homo sapien
gaaagatcacgttacagggacaattctgaaggc

SEQ ID NO: 177245 - DNA, 33 bp, Homo sapien
ggagtgggtcctacatcaaacatcaaccattgt

SEQ ID NO: 177246 - DNA, 33 bp, Homo sapien
ggagtgggtcctacattaaacatcaaccattgt

SEQ ID NO: 177247 - DNA, 33 bp, Homo sapien
tcctgaagtctggaaccaattttgagaagtttt

SEQ ID NO: 177248 - DNA, 33 bp, Homo sapien
tcctgaagtctggaactaattttgagaagtttt

SEQ ID NO: 177249 - DNA, 33 bp, Homo sapien
tcatctgtgtgtggataagctcgtaggagggtt

SEQ ID NO: 177250 - DNA, 33 bp, Homo sapien
tcatctgtgtgtggatgagctcgtaggagggtt

SEQ ID NO: 177251 - DNA, 33 bp, Homo sapien
gtctctttgcaagtcaatcattaaaatcttttc

SEQ ID NO: 177252 - DNA, 33 bp, Homo sapien
gtctctttgcaagtcagtcattaaaatcttttc

SEQ ID NO: 177253 - DNA, 33 bp, Homo sapien
agggccacacaaggagactattgttagaaacca

SEQ ID NO: 177254 - DNA, 33 bp, Homo sapien
agggccacacaaggagtctattgttagaaacca

SEQ ID NO: 177255 - DNA, 33 bp, Homo sapien
ccaagacatattcttcccagaggtgctgggagg

SEQ ID NO: 177256 - DNA, 33 bp, Homo sapien
ccaagacatattcttctcagaggtgctgggagg

SEQ ID NO: 177257 - DNA, 33 bp, Homo sapien
ttggagaatttgttcactaacggagcagtgact

SEQ ID NO: 177258 - DNA, 33 bp, Homo sapien
ttggagaatttgttcattaacggagcagtgact

SEQ ID NO: 177259 - DNA, 33 bp, Homo sapien
ccattctagcagaaaagattcagtgagggtttc

SEQ ID NO: 177260 - DNA, 33 bp, Homo sapien
ccattctagcagaaaatattcagtgagggtttc

SEQ ID NO: 177261 - DNA, 33 bp, Homo sapien
tcctatgcacagcctgaaatttaaggcatctgc

SEQ ID NO: 177262 - DNA, 33 bp, Homo sapien
tcctatgcacagcctggaatttaaggcatctgc

SEQ ID NO: 177263 - DNA, 33 bp, Homo sapien
ctgacctcaagcactcacagtccaaagaggggg

SEQ ID NO: 177264 - DNA, 33 bp, Homo sapien
ctgacctcaagcactcccagtccaaagaggggg

SEQ ID NO: 177265 - DNA, 33 bp, Homo sapien
ctcatgaagctaaaggaagaaaattcactagat

SEQ ID NO: 177266 - DNA, 33 bp, Homo sapien
ctcatgaagctaaaggtagaaaattcactagat

SEQ ID NO: 177267 - DNA, 33 bp, Homo sapien
tcagtcctagtgcccacctcaagtagctcattt

SEQ ID NO: 177268 - DNA, 33 bp, Homo sapien
tcagtcctagtgcccatctcaagtagctcattt

SEQ ID NO: 177269 - DNA, 33 bp, Homo sapien
gaatgggattacagataagctgaacctcagaag

SEQ ID NO: 177270 - DNA, 33 bp, Homo sapien
gaatgggattacagatgagctgaacctcagaag

SEQ ID NO: 177271 - DNA, 33 bp, Homo sapien
gtgtggctccaacactcaacctcttcccactgg

SEQ ID NO: 177272 - DNA, 33 bp, Homo sapien
gtgtggctccaacacttaacctcttcccactgg

SEQ ID NO: 177273 - DNA, 33 bp, Homo sapien
aactcagagcccttaactgtcccgggaaatagg

SEQ ID NO: 177274 - DNA, 33 bp, Homo sapien
aactcagagcccttaattgtcccgggaaatagg

SEQ ID NO: 177275 - DNA, 33 bp, Homo sapien
ggtttggcgatagaacactatagtccatgtaaa

SEQ ID NO: 177276 - DNA, 33 bp, Homo sapien
ggtttggcgatagaacgctatagtccatgtaaa

SEQ ID NO: 177277 - DNA, 33 bp, Homo sapien
ctttgggggaagaggactaggttgacacattct

SEQ ID NO: 177278 - DNA, 33 bp, Homo sapien
ctttgggggaagaggagtaggttgacacattct

SEQ ID NO: 177279 - DNA, 33 bp, Homo sapien
actgacctgggaagagaaattaaactaagcttt

SEQ ID NO: 177280 - DNA, 33 bp, Homo sapien
actgacctgggaagagtaattaaactaagcttt

SEQ ID NO: 177281 - DNA, 33 bp, Homo sapien
ttatttgtttggtcaacatctcgtagtgtctgt

SEQ ID NO: 177282 - DNA, 33 bp, Homo sapien
ttatttgtttggtcaatatctcgtagtgtctgt

SEQ ID NO: 177283 - DNA, 33 bp, Homo sapien
gctggattttgcataacaggctgatgggacctg

SEQ ID NO: 177284 - DNA, 33 bp, Homo sapien
gctggattttgcataataggctgatgggacctg

SEQ ID NO: 177285 - DNA, 33 bp, Homo sapien
aatctcatactacccaatccagctaaagcagcc

SEQ ID NO: 177286 - DNA, 33 bp, Homo sapien
aatctcatactacccagtccagctaaagcagcc

SEQ ID NO: 177287 - DNA, 33 bp, Homo sapien
gttaactaagagattcaaaatgatcaacaatct

SEQ ID NO: 177288 - DNA, 33 bp, Homo sapien
gttaactaagagattccaaatgatcaacaatct

SEQ ID NO: 177289 - DNA, 33 bp, Homo sapien
aaggactcagcggagaagaagacaggctcagta

SEQ ID NO: 177290 - DNA, 33 bp, Homo sapien
aaggactcagcggagatgaagacaggctcagta

SEQ ID NO: 177291 - DNA, 33 bp, Homo sapien
gtgacattattttccacatcaaaggtcagaaga

SEQ ID NO: 177292 - DNA, 33 bp, Homo sapien
gtgacattattttccatatcaaaggtcagaaga

SEQ ID NO: 177293 - DNA, 33 bp, Homo sapien
actttccaggacaatcagagaatggagaaaatt

SEQ ID NO: 177294 - DNA, 33 bp, Homo sapien
actttccaggacaatcggagaatggagaaaatt

SEQ ID NO: 177295 - DNA, 33 bp, Homo sapien
tgaataggttttctccccactccggctctgcca

SEQ ID NO: 177296 - DNA, 33 bp, Homo sapien
tgaataggttttctcctcactccggctctgcca

SEQ ID NO: 177297 - DNA, 33 bp, Homo sapien
gaaacaagatccctcacgtgactcgatgactgc

SEQ ID NO: 177298 - DNA, 33 bp, Homo sapien
gaaacaagatccctcatgtgactcgatgactgc

SEQ ID NO: 177299 - DNA, 33 bp, Homo sapien
gtgagtgaataaactacgtgcaagctcatttca

SEQ ID NO: 177300 - DNA, 33 bp, Homo sapien
gtgagtgaataaactatgtgcaagctcatttca

SEQ ID NO: 177301 - DNA, 33 bp, Homo sapien
ttgttctataacctacacttgtatgtataccgg

SEQ ID NO: 177302 - DNA, 33 bp, Homo sapien
ttgttctataacctacgcttgtatgtataccgg

SEQ ID NO: 177303 - DNA, 33 bp, Homo sapien
atgtggggaaagggcgcacctctctccctaccg

SEQ ID NO: 177304 - DNA, 33 bp, Homo sapien
atgtggggaaagggcgtacctctctccctaccg

SEQ ID NO: 177305 - DNA, 33 bp, Homo sapien
aaacccacaccttctgcatctaaaagcccctct

SEQ ID NO: 177306 - DNA, 33 bp, Homo sapien
aaacccacaccttctggatctaaaagcccctct

SEQ ID NO: 177307 - DNA, 33 bp, Homo sapien
tgtttcctttgtgctaaacagccgccagagata

SEQ ID NO: 177308 - DNA, 33 bp, Homo sapien
tgtttcctttgtgctatacagccgccagagata

SEQ ID NO: 177309 - DNA, 33 bp, Homo sapien
tacaaaccaggcttaactgaaaacaagtcccgg

SEQ ID NO: 177310 - DNA, 33 bp, Homo sapien
tacaaaccaggcttaattgaaaacaagtcccgg

SEQ ID NO: 177311 - DNA, 33 bp, Homo sapien
attgtagaaagtcacaatgaatatcaatatatt

SEQ ID NO: 177312 - DNA, 33 bp, Homo sapien
attgtagaaagtcacactgaatatcaatatatt

SEQ ID NO: 177313 - DNA, 33 bp, Homo sapien
cttatttgaggatgagcatcaaaggttgctctg

SEQ ID NO: 177314 - DNA, 33 bp, Homo sapien
cttatttgaggatgagtatcaaaggttgctctg

SEQ ID NO: 177315 - DNA, 33 bp, Homo sapien
ggacctgtggtttgacaagacagatgctgacaa

SEQ ID NO: 177316 - DNA, 33 bp, Homo sapien
ggacctgtggtttgacgagacagatgctgacaa

SEQ ID NO: 177317 - DNA, 33 bp, Homo sapien
actcatgaggtataggaccctgtgataacgcta

SEQ ID NO: 177318 - DNA, 33 bp, Homo sapien
actcatgaggtataggcccctgtgataacgcta

SEQ ID NO: 177319 - DNA, 33 bp, Homo sapien
gtgattgtaaggaggacaaaataatgcagctaa

SEQ ID NO: 177320 - DNA, 33 bp, Homo sapien
gtgattgtaaggaggataaaataatgcagctaa

SEQ ID NO: 177321 - DNA, 33 bp, Homo sapien
atgtgaagaccttagcaaaggctggcatacagt

SEQ ID NO: 177322 - DNA, 33 bp, Homo sapien
atgtgaagaccttagcgaaggctggcatacagt

SEQ ID NO: 177323 - DNA, 33 bp, Homo sapien
taccatttggcctcaactcatagtccctattgt

SEQ ID NO: 177324 - DNA, 33 bp, Homo sapien
taccatttggcctcaagtcatagtccctattgt

SEQ ID NO: 177325 - DNA, 33 bp, Homo sapien
aggactgtttggataacttaaatctaatcatgc

SEQ ID NO: 177326 - DNA, 33 bp, Homo sapien
aggactgtttggataatttaaatctaatcatgc

SEQ ID NO: 177327 - DNA, 33 bp, Homo sapien
gatggctctttgttaccctatcctgtggcttgt

SEQ ID NO: 177328 - DNA, 33 bp, Homo sapien
gatggctctttgttactctatcctgtggcttgt

SEQ ID NO: 177329 - DNA, 33 bp, Homo sapien
tacctgaggcagtttgaattaaatccaggccct

SEQ ID NO: 177330 - DNA, 33 bp, Homo sapien
tacctgaggcagtttgtattaaatccaggccct

SEQ ID NO: 177331 - DNA, 33 bp, Homo sapien
actcttcccccaaaaaacccagtgcctgttctg

SEQ ID NO: 177332 - DNA, 33 bp, Homo sapien
actcttcccccaaaaagcccagtgcctgttctg

SEQ ID NO: 177333 - DNA, 33 bp, Homo sapien
aagcacagagcagttacgtaattggaccatgga

SEQ ID NO: 177334 - DNA, 33 bp, Homo sapien
aagcacagagcagttatgtaattggaccatgga

SEQ ID NO: 177335 - DNA, 33 bp, Homo sapien
acattaggaagaataaacagactctcatggcat

SEQ ID NO: 177336 - DNA, 33 bp, Homo sapien
acattaggaagaataagcagactctcatggcat

SEQ ID NO: 177337 - DNA, 33 bp, Homo sapien
cggcatcaagctcgcacgtccacagaggtttgc

SEQ ID NO: 177338 - DNA, 33 bp, Homo sapien
cggcatcaagctcgcatgtccacagaggtttgc

SEQ ID NO: 177339 - DNA, 33 bp, Homo sapien
caaggcccactcgacactctcattctctccttt

SEQ ID NO: 177340 - DNA, 33 bp, Homo sapien
caaggcccactcgacattctcattctctccttt

SEQ ID NO: 177341 - DNA, 33 bp, Homo sapien
atttgtgaaatggggtcaacagtaacacacacc

SEQ ID NO: 177342 - DNA, 33 bp, Homo sapien
atttgtgaaatggggtgaacagtaacacacacc

SEQ ID NO: 177343 - DNA, 33 bp, Homo sapien
aggccttcagtctacaacagtctaggtcaatgc

SEQ ID NO: 177344 - DNA, 33 bp, Homo sapien
aggccttcagtctacagcagtctaggtcaatgc

SEQ ID NO: 177345 - DNA, 33 bp, Homo sapien
cgaatgacctaggtgacctacaaagtcatatat

SEQ ID NO: 177346 - DNA, 33 bp, Homo sapien
cgaatgacctaggtgatctacaaagtcatatat

SEQ ID NO: 177347 - DNA, 33 bp, Homo sapien
ttggaagatgtcatacacttcatctttaatacc

SEQ ID NO: 177348 - DNA, 33 bp, Homo sapien
ttggaagatgtcatacgcttcatctttaatacc

SEQ ID NO: 177349 - DNA, 33 bp, Homo sapien
atacggaactgttgtaagaatgaaataaaactg

SEQ ID NO: 177350 - DNA, 33 bp, Homo sapien
atacggaactgttgtaggaatgaaataaaactg

SEQ ID NO: 177351 - DNA, 33 bp, Homo sapien
cctcgagaataaggaccatgctttggatcctcc

SEQ ID NO: 177352 - DNA, 33 bp, Homo sapien
cctcgagaataaggactatgctttggatcctcc

SEQ ID NO: 177353 - DNA, 33 bp, Homo sapien
gtcatttgatatttaaaaagtgttgactgccca

SEQ ID NO: 177354 - DNA, 33 bp, Homo sapien
gtcatttgatatttaacaagtgttgactgccca

SEQ ID NO: 177355 - DNA, 33 bp, Homo sapien
cacaaaggagatagcaaagtagaattagaaccc

SEQ ID NO: 177356 - DNA, 33 bp, Homo sapien
cacaaaggagatagcagagtagaattagaaccc

SEQ ID NO: 177357 - DNA, 33 bp, Homo sapien
caaaaatccaagatgaaaagctgcttgaagtat

SEQ ID NO: 177358 - DNA, 33 bp, Homo sapien
caaaaatccaagatgagaagctgcttgaagtat

SEQ ID NO: 177359 - DNA, 33 bp, Homo sapien
aaagcaaaagcaaatcaatttacaaacatatgt

SEQ ID NO: 177360 - DNA, 33 bp, Homo sapien
aaagcaaaagcaaatccatttacaaacatatgt

SEQ ID NO: 177361 - DNA, 33 bp, Homo sapien
cataagctttagccataacctgtaagatcataa

SEQ ID NO: 177362 - DNA, 33 bp, Homo sapien
cataagctttagccattacctgtaagatcataa

SEQ ID NO: 177363 - DNA, 33 bp, Homo sapien
ccacagctcataactaatacagcccgcatctaa

SEQ ID NO: 177364 - DNA, 33 bp, Homo sapien
ccacagctcataactagtacagcccgcatctaa

SEQ ID NO: 177365 - DNA, 33 bp, Homo sapien
tgagaaacctcaaggccaagtaccatgtctgcc

SEQ ID NO: 177366 - DNA, 33 bp, Homo sapien
tgagaaacctcaaggctaagtaccatgtctgcc

SEQ ID NO: 177367 - DNA, 33 bp, Homo sapien
ataaccaaaatccccaatagagtagcatttaag

SEQ ID NO: 177368 - DNA, 33 bp, Homo sapien
ataaccaaaatccccactagagtagcatttaag

SEQ ID NO: 177369 - DNA, 33 bp, Homo sapien
ataggcattcatcaggcattcctaggccaaatg

SEQ ID NO: 177370 - DNA, 33 bp, Homo sapien
ataggcattcatcaggtattcctaggccaaatg

SEQ ID NO: 177371 - DNA, 33 bp, Homo sapien
tcattgtacaatagaacttcacacccacatctc

SEQ ID NO: 177372 - DNA, 33 bp, Homo sapien
tcattgtacaatagaatttcacacccacatctc

SEQ ID NO: 177373 - DNA, 33 bp, Homo sapien
ctgcgttttacatacacattcagaacacaaggg

SEQ ID NO: 177374 - DNA, 33 bp, Homo sapien
ctgcgttttacatacagattcagaacacaaggg

SEQ ID NO: 177375 - DNA, 33 bp, Homo sapien
tgttgcaagttgaacacggacttggtgatgagc

SEQ ID NO: 177376 - DNA, 33 bp, Homo sapien
tgttgcaagttgaacatggacttggtgatgagc

SEQ ID NO: 177377 - DNA, 33 bp, Homo sapien
gcaatgggtcagtgtgaaagccacatgtgcaag

SEQ ID NO: 177378 - DNA, 33 bp, Homo sapien
gcaatgggtcagtgtgcaagccacatgtgcaag

SEQ ID NO: 177379 - DNA, 33 bp, Homo sapien
tctacaggtgaggaaactgagatgtggagaggt

SEQ ID NO: 177380 - DNA, 33 bp, Homo sapien
tctacaggtgaggaaagtgagatgtggagaggt

SEQ ID NO: 177381 - DNA, 33 bp, Homo sapien
atggctttagaagacaatggccaaaaatgctaa

SEQ ID NO: 177382 - DNA, 33 bp, Homo sapien
atggctttagaagacagtggccaaaaatgctaa

SEQ ID NO: 177383 - DNA, 33 bp, Homo sapien
acactatttgcaggtacagtgctgagtatgcag

SEQ ID NO: 177384 - DNA, 33 bp, Homo sapien
acactatttgcaggtagagtgctgagtatgcag

SEQ ID NO: 177385 - DNA, 33 bp, Homo sapien
tgctcattgaaagaccaaacatgactggaagaa

SEQ ID NO: 177386 - DNA, 33 bp, Homo sapien
tgctcattgaaagaccgaacatgactggaagaa

SEQ ID NO: 177387 - DNA, 33 bp, Homo sapien
ttttacttaattgatacagtttctgctatgtat

SEQ ID NO: 177388 - DNA, 33 bp, Homo sapien
ttttacttaattgatatagtttctgctatgtat

SEQ ID NO: 177389 - DNA, 33 bp, Homo sapien
acacggtgtattcaacagtcctagatggaagaa

SEQ ID NO: 177390 - DNA, 33 bp, Homo sapien
acacggtgtattcaacggtcctagatggaagaa

SEQ ID NO: 177391 - DNA, 33 bp, Homo sapien
tgaggacctgagctaacgtagtggcagtagggg

SEQ ID NO: 177392 - DNA, 33 bp, Homo sapien
tgaggacctgagctaatgtagtggcagtagggg

SEQ ID NO: 177393 - DNA, 33 bp, Homo sapien
ttatcctcctttcacaagtaagaaaatggagac

SEQ ID NO: 177394 - DNA, 33 bp, Homo sapien
ttatcctcctttcacaggtaagaaaatggagac

SEQ ID NO: 177395 - DNA, 33 bp, Homo sapien
gttagtctgcaaagcacctttaggccactgtct

SEQ ID NO: 177396 - DNA, 33 bp, Homo sapien
gttagtctgcaaagcatctttaggccactgtct

SEQ ID NO: 177397 - DNA, 33 bp, Homo sapien
gtcgccgttaagagcacgggagtcgaagccaga

SEQ ID NO: 177398 - DNA, 33 bp, Homo sapien
gtcgccgttaagagcatgggagtcgaagccaga

SEQ ID NO: 177399 - DNA, 33 bp, Homo sapien
gtagacatagtgaatacacatttagattagatt

SEQ ID NO: 177400 - DNA, 33 bp, Homo sapien
gtagacatagtgaatagacatttagattagatt

SEQ ID NO: 177401 - DNA, 33 bp, Homo sapien
gatctaggcattcagacgtcttaatgaatccct

SEQ ID NO: 177402 - DNA, 33 bp, Homo sapien
gatctaggcattcagatgtcttaatgaatccct

SEQ ID NO: 177403 - DNA, 33 bp, Homo sapien
tctgtccacctggaaacggacgttaatattact

SEQ ID NO: 177404 - DNA, 33 bp, Homo sapien
tctgtccacctggaaatggacgttaatattact

SEQ ID NO: 177405 - DNA, 33 bp, Homo sapien
atgtcgaaagcctccaagaagatacagtctgac

SEQ ID NO: 177406 - DNA, 33 bp, Homo sapien
atgtcgaaagcctccatgaagatacagtctgac

SEQ ID NO: 177407 - DNA, 33 bp, Homo sapien
tgtcagtctactgggaaagcaggattccccagg

SEQ ID NO: 177408 - DNA, 33 bp, Homo sapien
tgtcagtctactgggagagcaggattccccagg

SEQ ID NO: 177409 - DNA, 33 bp, Homo sapien
gtgaccttcaaccggtcaatgaaacgctgtgct

SEQ ID NO: 177410 - DNA, 33 bp, Homo sapien
gtgaccttcaaccggttaatgaaacgctgtgct

SEQ ID NO: 177411 - DNA, 33 bp, Homo sapien
ctttcactcagagggcacttacagatctcactg

SEQ ID NO: 177412 - DNA, 33 bp, Homo sapien
ctttcactcagagggcccttacagatctcactg

SEQ ID NO: 177413 - DNA, 33 bp, Homo sapien
ctctcctgatttcttaaaaggccagatgaacag

SEQ ID NO: 177414 - DNA, 33 bp, Homo sapien
ctctcctgatttcttagaaggccagatgaacag

SEQ ID NO: 177415 - DNA, 33 bp, Homo sapien
taggctaagtcccacactaaacagaggaccccc

SEQ ID NO: 177416 - DNA, 33 bp, Homo sapien
taggctaagtcccacattaaacagaggaccccc

SEQ ID NO: 177417 - DNA, 33 bp, Homo sapien
ctgccatctcccaggaagaatgttaatgggatg

SEQ ID NO: 177418 - DNA, 33 bp, Homo sapien
ctgccatctcccaggaggaatgttaatgggatg

SEQ ID NO: 177419 - DNA, 33 bp, Homo sapien
tctctccctttcttgacaaccctcaggcagcca

SEQ ID NO: 177420 - DNA, 33 bp, Homo sapien
tctctccctttcttgataaccctcaggcagcca

SEQ ID NO: 177421 - DNA, 33 bp, Homo sapien
actccaacaaccaagaagaccagtgaaggtgga

SEQ ID NO: 177422 - DNA, 33 bp, Homo sapien
actccaacaaccaagaggaccagtgaaggtgga

SEQ ID NO: 177423 - DNA, 33 bp, Homo sapien
tatttttaaaaactcaatgaaagtcctcatcaa

SEQ ID NO: 177424 - DNA, 33 bp, Homo sapien
tatttttaaaaactcagtgaaagtcctcatcaa

SEQ ID NO: 177425 - DNA, 33 bp, Homo sapien
attttgattttaggcaaattgtttgatctttta

SEQ ID NO: 177426 - DNA, 33 bp, Homo sapien
attttgattttaggcagattgtttgatctttta

SEQ ID NO: 177427 - DNA, 33 bp, Homo sapien
cttgctcctgagtgaccaggtctggttcttaaa

SEQ ID NO: 177428 - DNA, 33 bp, Homo sapien
cttgctcctgagtgactaggtctggttcttaaa

SEQ ID NO: 177429 - DNA, 33 bp, Homo sapien
tgaagtgagatttctgaaagttctataactcaa

SEQ ID NO: 177430 - DNA, 33 bp, Homo sapien
tgaagtgagatttctgcaagttctataactcaa

SEQ ID NO: 177431 - DNA, 33 bp, Homo sapien
cccctggcatagtagtcaaaggctgtaggagcc

SEQ ID NO: 177432 - DNA, 33 bp, Homo sapien
cccctggcatagtagttaaaggctgtaggagcc

SEQ ID NO: 177433 - DNA, 33 bp, Homo sapien
agtgagctaccttagtcaccaatggtccagccc

SEQ ID NO: 177434 - DNA, 33 bp, Homo sapien
agtgagctaccttagtgaccaatggtccagccc

SEQ ID NO: 177435 - DNA, 33 bp, Homo sapien
ttcaacccataatagacgccagtccagaactta

SEQ ID NO: 177436 - DNA, 33 bp, Homo sapien
ttcaacccataatagatgccagtccagaactta

SEQ ID NO: 177437 - DNA, 33 bp, Homo sapien
catagctcctttgtcagcaaaccatgcctgacc

SEQ ID NO: 177438 - DNA, 33 bp, Homo sapien
catagctcctttgtcatcaaaccatgcctgacc

SEQ ID NO: 177439 - DNA, 33 bp, Homo sapien
ctcagggttattacaaagatcaaatgagggaac

SEQ ID NO: 177440 - DNA, 33 bp, Homo sapien
ctcagggttattacaaggatcaaatgagggaac

SEQ ID NO: 177441 - DNA, 33 bp, Homo sapien
agtacccttgtttccaaaggagaaaattgaggc

SEQ ID NO: 177442 - DNA, 33 bp, Homo sapien
agtacccttgtttccagaggagaaaattgaggc

SEQ ID NO: 177443 - DNA, 33 bp, Homo sapien
atataggaggaggtacaggatgatgtttactga

SEQ ID NO: 177444 - DNA, 33 bp, Homo sapien
atataggaggaggtacgggatgatgtttactga

SEQ ID NO: 177445 - DNA, 33 bp, Homo sapien
ttcttttcagggagaactgcctttcacttgccg

SEQ ID NO: 177446 - DNA, 33 bp, Homo sapien
ttcttttcagggagaattgcctttcacttgccg

SEQ ID NO: 177447 - DNA, 33 bp, Homo sapien
atcccagacaagggagaattgtaggcatggtca

SEQ ID NO: 177448 - DNA, 33 bp, Homo sapien
atcccagacaagggagtattgtaggcatggtca

SEQ ID NO: 177449 - DNA, 33 bp, Homo sapien
agtgtagcctctcaaacgtaacataactaaaac

SEQ ID NO: 177450 - DNA, 33 bp, Homo sapien
agtgtagcctctcaaatgtaacataactaaaac

SEQ ID NO: 177451 - DNA, 33 bp, Homo sapien
acatgttattcactgacatttttttagccagac

SEQ ID NO: 177452 - DNA, 33 bp, Homo sapien
acatgttattcactgatatttttttagccagac

SEQ ID NO: 177453 - DNA, 33 bp, Homo sapien
agggtaggtattacccactctccaaggcaaggt

SEQ ID NO: 177454 - DNA, 33 bp, Homo sapien
agggtaggtattacccgctctccaaggcaaggt

SEQ ID NO: 177455 - DNA, 33 bp, Homo sapien
gtgatcgattatttgacgaaagcctgtccctcc

SEQ ID NO: 177456 - DNA, 33 bp, Homo sapien
gtgatcgattatttgatgaaagcctgtccctcc

SEQ ID NO: 177457 - DNA, 33 bp, Homo sapien
tgccttgtgcagagtaagagatcaggaaatatt

SEQ ID NO: 177458 - DNA, 33 bp, Homo sapien
tgccttgtgcagagtaggagatcaggaaatatt

SEQ ID NO: 177459 - DNA, 33 bp, Homo sapien
atcaggttttattgacccactggaaagagactg

SEQ ID NO: 177460 - DNA, 33 bp, Homo sapien
atcaggttttattgacgcactggaaagagactg

SEQ ID NO: 177461 - DNA, 33 bp, Homo sapien
aagatcaccctggttccacctgacagaggagag

SEQ ID NO: 177462 - DNA, 33 bp, Homo sapien
aagatcaccctggttctacctgacagaggagag

SEQ ID NO: 177463 - DNA, 33 bp, Homo sapien
agaagcagccaaaaaggctatttgctccagagt

SEQ ID NO: 177464 - DNA, 33 bp, Homo sapien
agaagcagccaaaaagtctatttgctccagagt

SEQ ID NO: 177465 - DNA, 33 bp, Homo sapien
cccagcttttgagctccagatattgagtttcat

SEQ ID NO: 177466 - DNA, 33 bp, Homo sapien
cccagcttttgagctctagatattgagtttcat

SEQ ID NO: 177467 - DNA, 33 bp, Homo sapien
cctgagtaggggggaaaagccgtgtccaaatga

SEQ ID NO: 177468 - DNA, 33 bp, Homo sapien
cctgagtaggggggaagagccgtgtccaaatga

SEQ ID NO: 177469 - DNA, 33 bp, Homo sapien
gggatctgctagggccactcactaatcaaacag

SEQ ID NO: 177470 - DNA, 33 bp, Homo sapien
gggatctgctagggccgctcactaatcaaacag

SEQ ID NO: 177471 - DNA, 33 bp, Homo sapien
atgcaccaaattccaaactcccggaaggaaata

SEQ ID NO: 177472 - DNA, 33 bp, Homo sapien
atgcaccaaattccaatctcccggaaggaaata

SEQ ID NO: 177473 - DNA, 33 bp, Homo sapien
aacactttgtaaatcacgaagtgcaatgcattt

SEQ ID NO: 177474 - DNA, 33 bp, Homo sapien
aacactttgtaaatcatgaagtgcaatgcattt

SEQ ID NO: 177475 - DNA, 33 bp, Homo sapien
gccagctagccagttaaaaagctgatagctaac

SEQ ID NO: 177476 - DNA, 33 bp, Homo sapien
gccagctagccagttacaaagctgatagctaac

SEQ ID NO: 177477 - DNA, 33 bp, Homo sapien
tatagagacacgttcaagttagctcaacccaaa

SEQ ID NO: 177478 - DNA, 33 bp, Homo sapien
tatagagacacgttcatgttagctcaacccaaa

SEQ ID NO: 177479 - DNA, 33 bp, Homo sapien
cctaattaggcagccaaattgctcattcagagt

SEQ ID NO: 177480 - DNA, 33 bp, Homo sapien
cctaattaggcagccacattgctcattcagagt

SEQ ID NO: 177481 - DNA, 33 bp, Homo sapien
ccaaaaatgtgcaaccaagttctcagagatcct

SEQ ID NO: 177482 - DNA, 33 bp, Homo sapien
ccaaaaatgtgcaaccgagttctcagagatcct

SEQ ID NO: 177483 - DNA, 33 bp, Homo sapien
ctaaaatctttactctcacagccctagttacag

SEQ ID NO: 177484 - DNA, 33 bp, Homo sapien
ctaaaatctttactcttacagccctagttacag

SEQ ID NO: 177485 - DNA, 33 bp, Homo sapien
agaggcaatcacttgaacaaaggcatgggcata

SEQ ID NO: 177486 - DNA, 33 bp, Homo sapien
agaggcaatcacttgagcaaaggcatgggcata

SEQ ID NO: 177487 - DNA, 33 bp, Homo sapien
tgcaacacattcctggaaatactagaagtacag

SEQ ID NO: 177488 - DNA, 33 bp, Homo sapien
tgcaacacattcctgggaatactagaagtacag

SEQ ID NO: 177489 - DNA, 33 bp, Homo sapien
gccaggactgaataggacaagcctgcaaaggaa

SEQ ID NO: 177490 - DNA, 33 bp, Homo sapien
gccaggactgaatagggcaagcctgcaaaggaa

SEQ ID NO: 177491 - DNA, 33 bp, Homo sapien
aatcaaatttatttgcaacaaacagcctgggct

SEQ ID NO: 177492 - DNA, 33 bp, Homo sapien
aatcaaatttatttgccacaaacagcctgggct

SEQ ID NO: 177493 - DNA, 33 bp, Homo sapien
gtgggggatgcataccgcaagcctgggctacct

SEQ ID NO: 177494 - DNA, 33 bp, Homo sapien
gtgggggatgcatacctcaagcctgggctacct

SEQ ID NO: 177495 - DNA, 33 bp, Homo sapien
cactgcttcctgcatacgtcattctatattcta

SEQ ID NO: 177496 - DNA, 33 bp, Homo sapien
cactgcttcctgcataggtcattctatattcta

SEQ ID NO: 177497 - DNA, 33 bp, Homo sapien
gcggatgcagtcttgaacctcgaagagcccaca

SEQ ID NO: 177498 - DNA, 33 bp, Homo sapien
gcggatgcagtcttgatcctcgaagagcccaca

SEQ ID NO: 177499 - DNA, 33 bp, Homo sapien
gactggaatccactggaagcctcttggtgcagc

SEQ ID NO: 177500 - DNA, 33 bp, Homo sapien
gactggaatccactgggagcctcttggtgcagc

SEQ ID NO: 177501 - DNA, 33 bp, Homo sapien
ataaacagccaagtgcgaagcctgttctaagct

SEQ ID NO: 177502 - DNA, 33 bp, Homo sapien
ataaacagccaagtgctaagcctgttctaagct

SEQ ID NO: 177503 - DNA, 33 bp, Homo sapien
cactattgcattaagacgaatgttcctgttcag

SEQ ID NO: 177504 - DNA, 33 bp, Homo sapien
cactattgcattaagatgaatgttcctgttcag

SEQ ID NO: 177505 - DNA, 33 bp, Homo sapien
agcctgattgctcctgcagattcatagcccttg

SEQ ID NO: 177506 - DNA, 33 bp, Homo sapien
agcctgattgctcctgtagattcatagcccttg

SEQ ID NO: 177507 - DNA, 33 bp, Homo sapien
catgtacgtacactcactactttgaaagtcagt

SEQ ID NO: 177508 - DNA, 33 bp, Homo sapien
catgtacgtacactcattactttgaaagtcagt

SEQ ID NO: 177509 - DNA, 33 bp, Homo sapien
cattgagcaggggataagaatgaagagaactgg

SEQ ID NO: 177510 - DNA, 33 bp, Homo sapien
cattgagcaggggataggaatgaagagaactgg

SEQ ID NO: 177511 - DNA, 33 bp, Homo sapien
acttggtaagttgcacaatgctatactaattgt

SEQ ID NO: 177512 - DNA, 33 bp, Homo sapien
acttggtaagttgcacgatgctatactaattgt

SEQ ID NO: 177513 - DNA, 33 bp, Homo sapien
gccaggctgacccctaactctgctacttactat

SEQ ID NO: 177514 - DNA, 33 bp, Homo sapien
gccaggctgacccctatctctgctacttactat

SEQ ID NO: 177515 - DNA, 33 bp, Homo sapien
atcatggctatggccaacttttatgttccttgt

SEQ ID NO: 177516 - DNA, 33 bp, Homo sapien
atcatggctatggccagcttttatgttccttgt

SEQ ID NO: 177517 - DNA, 33 bp, Homo sapien
tactttgcccaagccaatagaaagtgttgctag

SEQ ID NO: 177518 - DNA, 33 bp, Homo sapien
tactttgcccaagccagtagaaagtgttgctag

SEQ ID NO: 177519 - DNA, 33 bp, Homo sapien
agtgacttagccattacaggttttagtcataga

SEQ ID NO: 177520 - DNA, 33 bp, Homo sapien
agtgacttagccattagaggttttagtcataga

SEQ ID NO: 177521 - DNA, 33 bp, Homo sapien
tgttattgcttccttgaaattctagttgagctg

SEQ ID NO: 177522 - DNA, 33 bp, Homo sapien
tgttattgcttccttgcaattctagttgagctg

SEQ ID NO: 177523 - DNA, 33 bp, Homo sapien
tagattctagtcaccacgctaatgtctcacaca

SEQ ID NO: 177524 - DNA, 33 bp, Homo sapien
tagattctagtcaccatgctaatgtctcacaca

SEQ ID NO: 177525 - DNA, 33 bp, Homo sapien
caaaggtgtgatccatcaataaaagcatcatta

SEQ ID NO: 177526 - DNA, 33 bp, Homo sapien
caaaggtgtgatccatgaataaaagcatcatta

SEQ ID NO: 177527 - DNA, 33 bp, Homo sapien
agggcttcagtgtctccaagtgtaatgcaaaga

SEQ ID NO: 177528 - DNA, 33 bp, Homo sapien
agggcttcagtgtctctaagtgtaatgcaaaga

SEQ ID NO: 177529 - DNA, 33 bp, Homo sapien
caggcaagaggaccgacgtctgtcaagcaccta

SEQ ID NO: 177530 - DNA, 33 bp, Homo sapien
caggcaagaggaccgatgtctgtcaagcaccta

SEQ ID NO: 177531 - DNA, 33 bp, Homo sapien
gtgagcagggacatgcaacacttcaaggaagca

SEQ ID NO: 177532 - DNA, 33 bp, Homo sapien
gtgagcagggacatgcgacacttcaaggaagca

SEQ ID NO: 177533 - DNA, 33 bp, Homo sapien
gctatgaagtgtcaaacggttgccgagtaggta

SEQ ID NO: 177534 - DNA, 33 bp, Homo sapien
gctatgaagtgtcaaagggttgccgagtaggta

SEQ ID NO: 177535 - DNA, 33 bp, Homo sapien
ttcctctttcagggctaactcattcactaaaag

SEQ ID NO: 177536 - DNA, 33 bp, Homo sapien
ttcctctttcagggctgactcattcactaaaag

SEQ ID NO: 177537 - DNA, 33 bp, Homo sapien
taagtcgtacttattgaagaaaatttgcacaag

SEQ ID NO: 177538 - DNA, 33 bp, Homo sapien
taagtcgtacttattgcagaaaatttgcacaag

SEQ ID NO: 177539 - DNA, 33 bp, Homo sapien
aaggcattggccaggagagataggaaaccctgc

SEQ ID NO: 177540 - DNA, 33 bp, Homo sapien
aaggcattggccaggatagataggaaaccctgc

SEQ ID NO: 177541 - DNA, 33 bp, Homo sapien
tgctcaagatgcttaacaaacatgtgctaaata

SEQ ID NO: 177542 - DNA, 33 bp, Homo sapien
tgctcaagatgcttaataaacatgtgctaaata

SEQ ID NO: 177543 - DNA, 33 bp, Homo sapien
atctccattcatgaaaccatactttgtgattct

SEQ ID NO: 177544 - DNA, 33 bp, Homo sapien
atctccattcatgaaatcatactttgtgattct

SEQ ID NO: 177545 - DNA, 33 bp, Homo sapien
gacccacagcacaaaacacatgggatatctact

SEQ ID NO: 177546 - DNA, 33 bp, Homo sapien
gacccacagcacaaaagacatgggatatctact

SEQ ID NO: 177547 - DNA, 33 bp, Homo sapien
ttcacaataaccacacaaggtagacattattaa

SEQ ID NO: 177548 - DNA, 33 bp, Homo sapien
ttcacaataaccacacgaggtagacattattaa

SEQ ID NO: 177549 - DNA, 33 bp, Homo sapien
actccttgagcataatcacctgaaagatgcctg

SEQ ID NO: 177550 - DNA, 33 bp, Homo sapien
actccttgagcataattacctgaaagatgcctg

SEQ ID NO: 177551 - DNA, 33 bp, Homo sapien
tgacttcttttccttcccttctgttgctttctc

SEQ ID NO: 177552 - DNA, 33 bp, Homo sapien
tgacttcttttccttctcttctgttgctttctc

SEQ ID NO: 177553 - DNA, 33 bp, Homo sapien
gcagaggtaagctgcacagcataattgtgctag

SEQ ID NO: 177554 - DNA, 33 bp, Homo sapien
gcagaggtaagctgcatagcataattgtgctag

SEQ ID NO: 177555 - DNA, 33 bp, Homo sapien
tgggcaagctgggatcaacttctgagagcagag

SEQ ID NO: 177556 - DNA, 33 bp, Homo sapien
tgggcaagctgggatcgacttctgagagcagag

SEQ ID NO: 177557 - DNA, 33 bp, Homo sapien
ggtggtggaagaggaaatggaaggcatctgtaa

SEQ ID NO: 177558 - DNA, 33 bp, Homo sapien
ggtggtggaagaggaagtggaaggcatctgtaa

SEQ ID NO: 177559 - DNA, 33 bp, Homo sapien
atgacctctcagccaaagactagatttcccgga

SEQ ID NO: 177560 - DNA, 33 bp, Homo sapien
atgacctctcagccaacgactagatttcccgga

SEQ ID NO: 177561 - DNA, 33 bp, Homo sapien
gttgctgacttaaaacaacagaaacatatgcta

SEQ ID NO: 177562 - DNA, 33 bp, Homo sapien
gttgctgacttaaaacgacagaaacatatgcta

SEQ ID NO: 177563 - DNA, 33 bp, Homo sapien
atcacctcaactaatcaatagagcaacctagat

SEQ ID NO: 177564 - DNA, 33 bp, Homo sapien
atcacctcaactaatccatagagcaacctagat

SEQ ID NO: 177565 - DNA, 33 bp, Homo sapien
caccttcacctccaaccgggctaccaaccctgc

SEQ ID NO: 177566 - DNA, 33 bp, Homo sapien
caccttcacctccaactgggctaccaaccctgc

SEQ ID NO: 177567 - DNA, 33 bp, Homo sapien
tgtgcatgtctgtgtcactatttccactgctta

SEQ ID NO: 177568 - DNA, 33 bp, Homo sapien
tgtgcatgtctgtgtcgctatttccactgctta

SEQ ID NO: 177569 - DNA, 33 bp, Homo sapien
tacaggagtaggagccggagagacctttttatg

SEQ ID NO: 177570 - DNA, 33 bp, Homo sapien
tacaggagtaggagcctgagagacctttttatg

SEQ ID NO: 177571 - DNA, 33 bp, Homo sapien
atcttctcacaggtaaaataggagaagatgcct

SEQ ID NO: 177572 - DNA, 33 bp, Homo sapien
atcttctcacaggtaagataggagaagatgcct

SEQ ID NO: 177573 - DNA, 33 bp, Homo sapien
caagtatgaaaatggacagacgagggccaggca

SEQ ID NO: 177574 - DNA, 33 bp, Homo sapien
caagtatgaaaatggagagacgagggccaggca

SEQ ID NO: 177575 - DNA, 33 bp, Homo sapien
cttctccctggcaaaacacattcatggccatga

SEQ ID NO: 177576 - DNA, 33 bp, Homo sapien
cttctccctggcaaaagacattcatggccatga

SEQ ID NO: 177577 - DNA, 33 bp, Homo sapien
ggggatgaatggataacgtctgtgccatgtggt

SEQ ID NO: 177578 - DNA, 33 bp, Homo sapien
ggggatgaatggataatgtctgtgccatgtggt

SEQ ID NO: 177579 - DNA, 33 bp, Homo sapien
agtgttggaacctaaagtcctcaatgtggtagt

SEQ ID NO: 177580 - DNA, 33 bp, Homo sapien
agtgttggaacctaaattcctcaatgtggtagt

SEQ ID NO: 177581 - DNA, 33 bp, Homo sapien
ttgtgaacactgagaacgttgaggaccactcgt

SEQ ID NO: 177582 - DNA, 33 bp, Homo sapien
ttgtgaacactgagaatgttgaggaccactcgt

SEQ ID NO: 177583 - DNA, 33 bp, Homo sapien
aaggttcagattttcacagcacacctatgccta

SEQ ID NO: 177584 - DNA, 33 bp, Homo sapien
aaggttcagattttcatagcacacctatgccta

SEQ ID NO: 177585 - DNA, 33 bp, Homo sapien
cagttattaaaatgtcaagaacaacagattctg

SEQ ID NO: 177586 - DNA, 33 bp, Homo sapien
cagttattaaaatgtcgagaacaacagattctg

SEQ ID NO: 177587 - DNA, 33 bp, Homo sapien
acactaagtctagttcgcaaccactggagttgt

SEQ ID NO: 177588 - DNA, 33 bp, Homo sapien
acactaagtctagttctcaaccactggagttgt

SEQ ID NO: 177589 - DNA, 33 bp, Homo sapien
tctctttctcagtcccagcctgtgtcggtctgt

SEQ ID NO: 177590 - DNA, 33 bp, Homo sapien
tctctttctcagtcccggcctgtgtcggtctgt

SEQ ID NO: 177591 - DNA, 33 bp, Homo sapien
atcttcttcacctgctaactcatttgattcacc

SEQ ID NO: 177592 - DNA, 33 bp, Homo sapien
atcttcttcacctgcttactcatttgattcacc

SEQ ID NO: 177593 - DNA, 33 bp, Homo sapien
atgttaattgaaataaacttgcatatgcctggc

SEQ ID NO: 177594 - DNA, 33 bp, Homo sapien
atgttaattgaaataagcttgcatatgcctggc

SEQ ID NO: 177595 - DNA, 33 bp, Homo sapien
agagacctggatgcatgaactcaagggcccatg

SEQ ID NO: 177596 - DNA, 33 bp, Homo sapien
agagacctggatgcattaactcaagggcccatg

SEQ ID NO: 177597 - DNA, 33 bp, Homo sapien
gttatattatgttgtcaaacagagcttcctgct

SEQ ID NO: 177598 - DNA, 33 bp, Homo sapien
gttatattatgttgtcgaacagagcttcctgct

SEQ ID NO: 177599 - DNA, 33 bp, Homo sapien
tacagaagaacaaatacgaacagctagtaaaca

SEQ ID NO: 177600 - DNA, 33 bp, Homo sapien
tacagaagaacaaatatgaacagctagtaaaca

SEQ ID NO: 177601 - DNA, 33 bp, Homo sapien
tataatgtgttcaatgccacgctggtgaggtga

SEQ ID NO: 177602 - DNA, 33 bp, Homo sapien
tataatgtgttcaatgtcacgctggtgaggtga

SEQ ID NO: 177603 - DNA, 33 bp, Homo sapien
ggatcaaataagatacagaatgtaaagtgtaaa

SEQ ID NO: 177604 - DNA, 33 bp, Homo sapien
ggatcaaataagatacggaatgtaaagtgtaaa

SEQ ID NO: 177605 - DNA, 33 bp, Homo sapien
ggttctaaagtggccacaattgagtgacaattt

SEQ ID NO: 177606 - DNA, 33 bp, Homo sapien
ggttctaaagtggccataattgagtgacaattt

SEQ ID NO: 177607 - DNA, 33 bp, Homo sapien
gatctccaggtatgaaattatgtctggacccag

SEQ ID NO: 177608 - DNA, 33 bp, Homo sapien
gatctccaggtatgaagttatgtctggacccag

SEQ ID NO: 177609 - DNA, 33 bp, Homo sapien
ctgtaccaaaccctgcaccaggggctgtggaat

SEQ ID NO: 177610 - DNA, 33 bp, Homo sapien
ctgtaccaaaccctgctccaggggctgtggaat

SEQ ID NO: 177611 - DNA, 33 bp, Homo sapien
ttcccccagcatttcacggaatcacagcaagca

SEQ ID NO: 177612 - DNA, 33 bp, Homo sapien
ttcccccagcatttcatggaatcacagcaagca

SEQ ID NO: 177613 - DNA, 33 bp, Homo sapien
ggctccacccagccccaccattaaacagctggt

SEQ ID NO: 177614 - DNA, 33 bp, Homo sapien
ggctccacccagccccgccattaaacagctggt

SEQ ID NO: 177615 - DNA, 33 bp, Homo sapien
agcggacacccagtaaagtatgcaattttgctt

SEQ ID NO: 177616 - DNA, 33 bp, Homo sapien
agcggacacccagtaatgtatgcaattttgctt

SEQ ID NO: 177617 - DNA, 33 bp, Homo sapien
tcttctttgtttaaggcagctccctgcatcttc

SEQ ID NO: 177618 - DNA, 33 bp, Homo sapien
tcttctttgtttaaggtagctccctgcatcttc

SEQ ID NO: 177619 - DNA, 33 bp, Homo sapien
cgagagccactgagcaatcccaactccctgcag

SEQ ID NO: 177620 - DNA, 33 bp, Homo sapien
cgagagccactgagcattcccaactccctgcag

SEQ ID NO: 177621 - DNA, 33 bp, Homo sapien
aagacttgggaaacttgaacaagtctgcagtgg

SEQ ID NO: 177622 - DNA, 33 bp, Homo sapien
aagacttgggaaactttaacaagtctgcagtgg

SEQ ID NO: 177623 - DNA, 33 bp, Homo sapien
atatgatccaaagagaaatggaaattacttttg

SEQ ID NO: 177624 - DNA, 33 bp, Homo sapien
atatgatccaaagagacatggaaattacttttg

SEQ ID NO: 177625 - DNA, 33 bp, Homo sapien
atgggaaagctcttccaatgtctggagtctggg

SEQ ID NO: 177626 - DNA, 33 bp, Homo sapien
atgggaaagctcttccgatgtctggagtctggg

SEQ ID NO: 177627 - DNA, 33 bp, Homo sapien
gttagaacagagaagcaagagtatgagattgca

SEQ ID NO: 177628 - DNA, 33 bp, Homo sapien
gttagaacagagaagccagagtatgagattgca

SEQ ID NO: 177629 - DNA, 33 bp, Homo sapien
acatggctatttgctaagcatagtgctaagtgc

SEQ ID NO: 177630 - DNA, 33 bp, Homo sapien
acatggctatttgctaggcatagtgctaagtgc

SEQ ID NO: 177631 - DNA, 33 bp, Homo sapien
acagaagtcagaaaaaataggatgggcacggtg

SEQ ID NO: 177632 - DNA, 33 bp, Homo sapien
acagaagtcagaaaaagtaggatgggcacggtg

SEQ ID NO: 177633 - DNA, 33 bp, Homo sapien
tagcttcttactgaaccagcctactcacattct

SEQ ID NO: 177634 - DNA, 33 bp, Homo sapien
tagcttcttactgaacgagcctactcacattct

SEQ ID NO: 177635 - DNA, 33 bp, Homo sapien
aagaagttgtgatccacataaacaaagagcata

SEQ ID NO: 177636 - DNA, 33 bp, Homo sapien
aagaagttgtgatccatataaacaaagagcata

SEQ ID NO: 177637 - DNA, 33 bp, Homo sapien
agtgaaaaattagaaacaatgctgtgtccatca

SEQ ID NO: 177638 - DNA, 33 bp, Homo sapien
agtgaaaaattagaaataatgctgtgtccatca

SEQ ID NO: 177639 - DNA, 33 bp, Homo sapien
gcctggctgaaaagaagtgacagtatgaggcaa

SEQ ID NO: 177640 - DNA, 33 bp, Homo sapien
gcctggctgaaaagaattgacagtatgaggcaa

SEQ ID NO: 177641 - DNA, 33 bp, Homo sapien
gtcacacaacttacataagccagagctgggatt

SEQ ID NO: 177642 - DNA, 33 bp, Homo sapien
gtcacacaacttacatgagccagagctgggatt

SEQ ID NO: 177643 - DNA, 33 bp, Homo sapien
tacttaactcctctgaccatcagcttctttatc

SEQ ID NO: 177644 - DNA, 33 bp, Homo sapien
tacttaactcctctgagcatcagcttctttatc

SEQ ID NO: 177645 - DNA, 33 bp, Homo sapien
cagcttctttatctgcaaagtgaagatctttat

SEQ ID NO: 177646 - DNA, 33 bp, Homo sapien
cagcttctttatctgcgaagtgaagatctttat

SEQ ID NO: 177647 - DNA, 33 bp, Homo sapien
tagcatttctcaaacacctagctgaggccttca

SEQ ID NO: 177648 - DNA, 33 bp, Homo sapien
tagcatttctcaaacatctagctgaggccttca

SEQ ID NO: 177649 - DNA, 33 bp, Homo sapien
gctgtgtctcttttaccataaagctcgtgtgcc

SEQ ID NO: 177650 - DNA, 33 bp, Homo sapien
gctgtgtctcttttactataaagctcgtgtgcc

SEQ ID NO: 177651 - DNA, 33 bp, Homo sapien
tcagccctctcttgagcattttccagcactcag

SEQ ID NO: 177652 - DNA, 33 bp, Homo sapien
tcagccctctcttgagtattttccagcactcag

SEQ ID NO: 177653 - DNA, 33 bp, Homo sapien
gattatgtggcctacccgaggctgctgaggcag

SEQ ID NO: 177654 - DNA, 33 bp, Homo sapien
gattatgtggcctacctgaggctgctgaggcag

SEQ ID NO: 177655 - DNA, 33 bp, Homo sapien
gtggtgcttgggcccaactgttcacctcaaact

SEQ ID NO: 177656 - DNA, 33 bp, Homo sapien
gtggtgcttgggcccacctgttcacctcaaact

SEQ ID NO: 177657 - DNA, 33 bp, Homo sapien
gccttctctgcaaaagaacaagaattgcccagg

SEQ ID NO: 177658 - DNA, 33 bp, Homo sapien
gccttctctgcaaaagcacaagaattgcccagg

SEQ ID NO: 177659 - DNA, 33 bp, Homo sapien
tcatccatttaggatacgggggaattcagtgta

SEQ ID NO: 177660 - DNA, 33 bp, Homo sapien
tcatccatttaggatatgggggaattcagtgta

SEQ ID NO: 177661 - DNA, 33 bp, Homo sapien
atgttatgagacaaaaagtttgttaacactcac

SEQ ID NO: 177662 - DNA, 33 bp, Homo sapien
atgttatgagacaaaaggtttgttaacactcac

SEQ ID NO: 177663 - DNA, 33 bp, Homo sapien
ctgacttcatggctcactatggaggataggctg

SEQ ID NO: 177664 - DNA, 33 bp, Homo sapien
ctgacttcatggctcattatggaggataggctg

SEQ ID NO: 177665 - DNA, 33 bp, Homo sapien
ttcagctcaatataataaaggattttcttccca

SEQ ID NO: 177666 - DNA, 33 bp, Homo sapien
ttcagctcaatataatgaaggattttcttccca

SEQ ID NO: 177667 - DNA, 33 bp, Homo sapien
caaactagatacctaacgtgagcaggacaacat

SEQ ID NO: 177668 - DNA, 33 bp, Homo sapien
caaactagatacctaatgtgagcaggacaacat

SEQ ID NO: 177669 - DNA, 33 bp, Homo sapien
gagcaggacaacattacctctgtgttgaaagat

SEQ ID NO: 177670 - DNA, 33 bp, Homo sapien
gagcaggacaacattatctctgtgttgaaagat

SEQ ID NO: 177671 - DNA, 33 bp, Homo sapien
tgtttcctgtcatttacatcaattccagtccca

SEQ ID NO: 177672 - DNA, 33 bp, Homo sapien
tgtttcctgtcatttatatcaattccagtccca

SEQ ID NO: 177673 - DNA, 33 bp, Homo sapien
atgggcagagccagctaaaagatgccattgcca

SEQ ID NO: 177674 - DNA, 33 bp, Homo sapien
atgggcagagccagctcaaagatgccattgcca

SEQ ID NO: 177675 - DNA, 33 bp, Homo sapien
atgccttcctgagcgagtactgggtagcctgat

SEQ ID NO: 177676 - DNA, 33 bp, Homo sapien
atgccttcctgagcgattactgggtagcctgat

SEQ ID NO: 177677 - DNA, 33 bp, Homo sapien
tctcgtggagacatgacagagatctggtgaatc

SEQ ID NO: 177678 - DNA, 33 bp, Homo sapien
tctcgtggagacatgatagagatctggtgaatc

SEQ ID NO: 177679 - DNA, 33 bp, Homo sapien
gaaccatcacatccaaataggaccatagaaaga

SEQ ID NO: 177680 - DNA, 33 bp, Homo sapien
gaaccatcacatccaagtaggaccatagaaaga

SEQ ID NO: 177681 - DNA, 33 bp, Homo sapien
ccagatctggagacgacggaacagaaatctaca

SEQ ID NO: 177682 - DNA, 33 bp, Homo sapien
ccagatctggagacgatggaacagaaatctaca

SEQ ID NO: 177683 - DNA, 33 bp, Homo sapien
aatggtgtgttgttaaatgcttaatgactggct

SEQ ID NO: 177684 - DNA, 33 bp, Homo sapien
aatggtgtgttgttaagtgcttaatgactggct

SEQ ID NO: 177685 - DNA, 33 bp, Homo sapien
tgctcagcataatggcaactgtgttccccttgt

SEQ ID NO: 177686 - DNA, 33 bp, Homo sapien
tgctcagcataatggcgactgtgttccccttgt

SEQ ID NO: 177687 - DNA, 33 bp, Homo sapien
aagttttgaaggtggcaaaagaagaataacaca

SEQ ID NO: 177688 - DNA, 33 bp, Homo sapien
aagttttgaaggtggcgaaagaagaataacaca

SEQ ID NO: 177689 - DNA, 33 bp, Homo sapien
aataggtcacttcaggaagattcaaaatagatg

SEQ ID NO: 177690 - DNA, 33 bp, Homo sapien
aataggtcacttcagggagattcaaaatagatg

SEQ ID NO: 177691 - DNA, 33 bp, Homo sapien
tagcaatgccaagtgacgtagcaggatggcatc

SEQ ID NO: 177692 - DNA, 33 bp, Homo sapien
tagcaatgccaagtgatgtagcaggatggcatc

SEQ ID NO: 177693 - DNA, 33 bp, Homo sapien
cagcaaatataccctaagcctcaatttcttcat

SEQ ID NO: 177694 - DNA, 33 bp, Homo sapien
cagcaaatataccctatgcctcaatttcttcat

SEQ ID NO: 177695 - DNA, 33 bp, Homo sapien
actcgtaatagaataaacgtgtgtatgtggtgg

SEQ ID NO: 177696 - DNA, 33 bp, Homo sapien
actcgtaatagaataagcgtgtgtatgtggtgg

SEQ ID NO: 177697 - DNA, 33 bp, Homo sapien
gcaggccacgtcaaaaatgtgtctgctacataa

SEQ ID NO: 177698 - DNA, 33 bp, Homo sapien
gcaggccacgtcaaaagtgtgtctgctacataa

SEQ ID NO: 177699 - DNA, 33 bp, Homo sapien
tctgaggcatcttgtacgatccctgtgttttgg

SEQ ID NO: 177700 - DNA, 33 bp, Homo sapien
tctgaggcatcttgtatgatccctgtgttttgg

SEQ ID NO: 177701 - DNA, 33 bp, Homo sapien
acagtccagactcacaaagcagttagatagtag

SEQ ID NO: 177702 - DNA, 33 bp, Homo sapien
acagtccagactcacacagcagttagatagtag

SEQ ID NO: 177703 - DNA, 33 bp, Homo sapien
agagcattctgtttgtaaaacctaacctgggga

SEQ ID NO: 177704 - DNA, 33 bp, Homo sapien
agagcattctgtttgtgaaacctaacctgggga

SEQ ID NO: 177705 - DNA, 33 bp, Homo sapien
acctagcattctgcctcaatccaactatgatga

SEQ ID NO: 177706 - DNA, 33 bp, Homo sapien
acctagcattctgccttaatccaactatgatga

SEQ ID NO: 177707 - DNA, 33 bp, Homo sapien
agcaaatgtaggacaaatagtacagtagacagg

SEQ ID NO: 177708 - DNA, 33 bp, Homo sapien
agcaaatgtaggacaattagtacagtagacagg

SEQ ID NO: 177709 - DNA, 33 bp, Homo sapien
ctctgatgctgtgaaaaggtttccaccgatgac

SEQ ID NO: 177710 - DNA, 33 bp, Homo sapien
ctctgatgctgtgaaagggtttccaccgatgac

SEQ ID NO: 177711 - DNA, 33 bp, Homo sapien
aaggagcttacaatgaatatggcagagacaggg

SEQ ID NO: 177712 - DNA, 33 bp, Homo sapien
aaggagcttacaatgagtatggcagagacaggg

SEQ ID NO: 177713 - DNA, 33 bp, Homo sapien
tctggcagagaatgagaaaaggaagatctcttt

SEQ ID NO: 177714 - DNA, 33 bp, Homo sapien
tctggcagagaatgaggaaaggaagatctcttt

SEQ ID NO: 177715 - DNA, 33 bp, Homo sapien
tttattttttccaatcccagtctcaaagggtca

SEQ ID NO: 177716 - DNA, 33 bp, Homo sapien
tttattttttccaatctcagtctcaaagggtca

SEQ ID NO: 177717 - DNA, 33 bp, Homo sapien
atttggatggcagaaccattttcttttgcagta

SEQ ID NO: 177718 - DNA, 33 bp, Homo sapien
atttggatggcagaactattttcttttgcagta

SEQ ID NO: 177719 - DNA, 33 bp, Homo sapien
taccagattctgttacaagtcctctctgctgac

SEQ ID NO: 177720 - DNA, 33 bp, Homo sapien
taccagattctgttactagtcctctctgctgac

SEQ ID NO: 177721 - DNA, 33 bp, Homo sapien
atccctgcaaaagtacaggtattgctattaatt

SEQ ID NO: 177722 - DNA, 33 bp, Homo sapien
atccctgcaaaagtacgggtattgctattaatt

SEQ ID NO: 177723 - DNA, 33 bp, Homo sapien
atggagggatatgaggcacaaagatagtaggtg

SEQ ID NO: 177724 - DNA, 33 bp, Homo sapien
atggagggatatgaggtacaaagatagtaggtg

SEQ ID NO: 177725 - DNA, 33 bp, Homo sapien
aagaagggaagtcttccagtagcaggccaggct

SEQ ID NO: 177726 - DNA, 33 bp, Homo sapien
aagaagggaagtcttctagtagcaggccaggct

SEQ ID NO: 177727 - DNA, 33 bp, Homo sapien
aggttagaaaggcaacagcttctccccaggaac

SEQ ID NO: 177728 - DNA, 33 bp, Homo sapien
aggttagaaaggcaactgcttctccccaggaac

SEQ ID NO: 177729 - DNA, 33 bp, Homo sapien
taggaaatcttgtgcacgcctggatcttgggca

SEQ ID NO: 177730 - DNA, 33 bp, Homo sapien
taggaaatcttgtgcatgcctggatcttgggca

SEQ ID NO: 177731 - DNA, 33 bp, Homo sapien
agtgtggtgtatgggccctggaacaggatggcc

SEQ ID NO: 177732 - DNA, 33 bp, Homo sapien
agtgtggtgtatgggctctggaacaggatggcc

SEQ ID NO: 177733 - DNA, 33 bp, Homo sapien
ccagaaatgcagcaaacgttgaatgagaaaagc

SEQ ID NO: 177734 - DNA, 33 bp, Homo sapien
ccagaaatgcagcaaatgttgaatgagaaaagc

SEQ ID NO: 177735 - DNA, 33 bp, Homo sapien
acggaaaggcaatagaaccattactcagaattg

SEQ ID NO: 177736 - DNA, 33 bp, Homo sapien
acggaaaggcaatagacccattactcagaattg

SEQ ID NO: 177737 - DNA, 33 bp, Homo sapien
ctgtgtttcaagagtccccaacgtttgctcacc

SEQ ID NO: 177738 - DNA, 33 bp, Homo sapien
ctgtgtttcaagagtctccaacgtttgctcacc

SEQ ID NO: 177739 - DNA, 33 bp, Homo sapien
ctaaattctggactgacagtggcatgtacataa

SEQ ID NO: 177740 - DNA, 33 bp, Homo sapien
ctaaattctggactgagagtggcatgtacataa

SEQ ID NO: 177741 - DNA, 33 bp, Homo sapien
tggtatttctgaagccaaaagagagcaaggcct

SEQ ID NO: 177742 - DNA, 33 bp, Homo sapien
tggtatttctgaagccgaaagagagcaaggcct

SEQ ID NO: 177743 - DNA, 33 bp, Homo sapien
ctcacaaacggcaatactatgcagcaatgaaat

SEQ ID NO: 177744 - DNA, 33 bp, Homo sapien
ctcacaaacggcaatagtatgcagcaatgaaat

SEQ ID NO: 177745 - DNA, 33 bp, Homo sapien
gttctgggagtttctacatggaaggagacagtt

SEQ ID NO: 177746 - DNA, 33 bp, Homo sapien
gttctgggagtttctatatggaaggagacagtt

SEQ ID NO: 177747 - DNA, 33 bp, Homo sapien
ggtaagtactcacataatagactcaatttcacc

SEQ ID NO: 177748 - DNA, 33 bp, Homo sapien
ggtaagtactcacatagtagactcaatttcacc

SEQ ID NO: 177749 - DNA, 33 bp, Homo sapien
aagtatcacccactataacagtcagggcaggta

SEQ ID NO: 177750 - DNA, 33 bp, Homo sapien
aagtatcacccactatgacagtcagggcaggta

SEQ ID NO: 177751 - DNA, 33 bp, Homo sapien
aagccaggctcaagcaaacaagagttagactgg

SEQ ID NO: 177752 - DNA, 33 bp, Homo sapien
aagccaggctcaagcagacaagagttagactgg

SEQ ID NO: 177753 - DNA, 33 bp, Homo sapien
tcacacttttaatgacactgcctcttatgtaaa

SEQ ID NO: 177754 - DNA, 33 bp, Homo sapien
tcacacttttaatgacgctgcctcttatgtaaa

SEQ ID NO: 177755 - DNA, 33 bp, Homo sapien
gatcaggccctgaggaaggaactgagaaacatt

SEQ ID NO: 177756 - DNA, 33 bp, Homo sapien
gatcaggccctgaggagggaactgagaaacatt

SEQ ID NO: 177757 - DNA, 33 bp, Homo sapien
gcatttattatttctacgggacagctgtgagca

SEQ ID NO: 177758 - DNA, 33 bp, Homo sapien
gcatttattatttctatgggacagctgtgagca

SEQ ID NO: 177759 - DNA, 33 bp, Homo sapien
agctgggtctcagagcagaaaccttaatcccct

SEQ ID NO: 177760 - DNA, 33 bp, Homo sapien
agctgggtctcagagcggaaaccttaatcccct

SEQ ID NO: 177761 - DNA, 33 bp, Homo sapien
gacagcaagggactggaaggaaaatagctgatg

SEQ ID NO: 177762 - DNA, 33 bp, Homo sapien
gacagcaagggactgggaggaaaatagctgatg

SEQ ID NO: 177763 - DNA, 33 bp, Homo sapien
tgttgacaaattcgcccaagttccaaaaggcca

SEQ ID NO: 177764 - DNA, 33 bp, Homo sapien
tgttgacaaattcgcctaagttccaaaaggcca

SEQ ID NO: 177765 - DNA, 33 bp, Homo sapien
ttgaggggaattctgaataaaatccaagaggta

SEQ ID NO: 177766 - DNA, 33 bp, Homo sapien
ttgaggggaattctgagtaaaatccaagaggta

SEQ ID NO: 177767 - DNA, 33 bp, Homo sapien
acagataacataagaagagaagtgacaattgca

SEQ ID NO: 177768 - DNA, 33 bp, Homo sapien
acagataacataagaatagaagtgacaattgca

SEQ ID NO: 177769 - DNA, 33 bp, Homo sapien
tcttacaactctggatcactgcagcctattcca

SEQ ID NO: 177770 - DNA, 33 bp, Homo sapien
tcttacaactctggattactgcagcctattcca

SEQ ID NO: 177771 - DNA, 33 bp, Homo sapien
tttagttattaccacaccattaggacatgctgt

SEQ ID NO: 177772 - DNA, 33 bp, Homo sapien
tttagttattaccacatcattaggacatgctgt

SEQ ID NO: 177773 - DNA, 33 bp, Homo sapien
gttccaagttgctggccactggaaacagatgta

SEQ ID NO: 177774 - DNA, 33 bp, Homo sapien
gttccaagttgctggctactggaaacagatgta

SEQ ID NO: 177775 - DNA, 33 bp, Homo sapien
aggcaggtgtgtttcacgcgttgactcttacgt

SEQ ID NO: 177776 - DNA, 33 bp, Homo sapien
aggcaggtgtgtttcatgcgttgactcttacgt

SEQ ID NO: 177777 - DNA, 33 bp, Homo sapien
gcagctgtgttggaatcagaagaggacaggctg

SEQ ID NO: 177778 - DNA, 33 bp, Homo sapien
gcagctgtgttggaatgagaagaggacaggctg

SEQ ID NO: 177779 - DNA, 33 bp, Homo sapien
agagtgataattttgcaaatcactttcagtcta

SEQ ID NO: 177780 - DNA, 33 bp, Homo sapien
agagtgataattttgctaatcactttcagtcta

SEQ ID NO: 177781 - DNA, 33 bp, Homo sapien
aatagaaagcgctgcacggtacataaagagctc

SEQ ID NO: 177782 - DNA, 33 bp, Homo sapien
aatagaaagcgctgcatggtacataaagagctc

SEQ ID NO: 177783 - DNA, 33 bp, Homo sapien
tggatggagagctggacgtcctgaaaaatctga

SEQ ID NO: 177784 - DNA, 33 bp, Homo sapien
tggatggagagctggaggtcctgaaaaatctga

SEQ ID NO: 177785 - DNA, 33 bp, Homo sapien
tcagagtgtcaaagaaagaagccatagggatgg

SEQ ID NO: 177786 - DNA, 33 bp, Homo sapien
tcagagtgtcaaagaaggaagccatagggatgg

SEQ ID NO: 177787 - DNA, 33 bp, Homo sapien
aaagagatgcagtttaactttgccattatttta

SEQ ID NO: 177788 - DNA, 33 bp, Homo sapien
aaagagatgcagtttagctttgccattatttta

SEQ ID NO: 177789 - DNA, 33 bp, Homo sapien
gatgcaaccttagagtaacacttgccactggac

SEQ ID NO: 177790 - DNA, 33 bp, Homo sapien
gatgcaaccttagagtgacacttgccactggac

SEQ ID NO: 177791 - DNA, 33 bp, Homo sapien
actctgaatgaactctaaagtttagtctcacaa

SEQ ID NO: 177792 - DNA, 33 bp, Homo sapien
actctgaatgaactctgaagtttagtctcacaa

SEQ ID NO: 177793 - DNA, 33 bp, Homo sapien
agcaagcaaaacaaacccagtctctgccttcct

SEQ ID NO: 177794 - DNA, 33 bp, Homo sapien
agcaagcaaaacaaactcagtctctgccttcct

SEQ ID NO: 177795 - DNA, 33 bp, Homo sapien
cctacactgttctgcacgggaagctcctacaaa

SEQ ID NO: 177796 - DNA, 33 bp, Homo sapien
cctacactgttctgcatgggaagctcctacaaa

SEQ ID NO: 177797 - DNA, 33 bp, Homo sapien
gcattttgtgtattacgcaggtctgttcagctg

SEQ ID NO: 177798 - DNA, 33 bp, Homo sapien
gcattttgtgtattactcaggtctgttcagctg

SEQ ID NO: 177799 - DNA, 33 bp, Homo sapien
gtaggtcttatttccccattttgctaacagcca

SEQ ID NO: 177800 - DNA, 33 bp, Homo sapien
gtaggtcttatttccctattttgctaacagcca

SEQ ID NO: 177801 - DNA, 33 bp, Homo sapien
ttagctcatcgttaaaatatttcttctaaaaat

SEQ ID NO: 177802 - DNA, 33 bp, Homo sapien
ttagctcatcgttaaattatttcttctaaaaat

SEQ ID NO: 177803 - DNA, 33 bp, Homo sapien
ttccaggctaggagcaactgtaagggctgagaa

SEQ ID NO: 177804 - DNA, 33 bp, Homo sapien
ttccaggctaggagcagctgtaagggctgagaa

SEQ ID NO: 177805 - DNA, 33 bp, Homo sapien
ttgttttttctctcccaaggctttctttcctct

SEQ ID NO: 177806 - DNA, 33 bp, Homo sapien
ttgttttttctctcccgaggctttctttcctct

SEQ ID NO: 177807 - DNA, 33 bp, Homo sapien
tgaaatatggaaggacagagtacaggaaacatc

SEQ ID NO: 177808 - DNA, 33 bp, Homo sapien
tgaaatatggaaggacggagtacaggaaacatc

SEQ ID NO: 177809 - DNA, 33 bp, Homo sapien
actttcaggctgtcacccagttttctatgcaac

SEQ ID NO: 177810 - DNA, 33 bp, Homo sapien
actttcaggctgtcactcagttttctatgcaac

SEQ ID NO: 177811 - DNA, 33 bp, Homo sapien
catcttgtggctccacactcatttaagtcctct

SEQ ID NO: 177812 - DNA, 33 bp, Homo sapien
catcttgtggctccaccctcatttaagtcctct

SEQ ID NO: 177813 - DNA, 33 bp, Homo sapien
aataagcaataataaaaatgtgacttttacagc

SEQ ID NO: 177814 - DNA, 33 bp, Homo sapien
aataagcaataataaagatgtgacttttacagc

SEQ ID NO: 177815 - DNA, 33 bp, Homo sapien
ttgtggttttccaatcactttcatatactataa

SEQ ID NO: 177816 - DNA, 33 bp, Homo sapien
ttgtggttttccaatcgctttcatatactataa

SEQ ID NO: 177817 - DNA, 33 bp, Homo sapien
gcagccagccagtgaaactgtcctttcagtcag

SEQ ID NO: 177818 - DNA, 33 bp, Homo sapien
gcagccagccagtgaatctgtcctttcagtcag

SEQ ID NO: 177819 - DNA, 33 bp, Homo sapien
gggagttttgctaaaacccgaaggcttggacct

SEQ ID NO: 177820 - DNA, 33 bp, Homo sapien
gggagttttgctaaaatccgaaggcttggacct

SEQ ID NO: 177821 - DNA, 33 bp, Homo sapien
agtttaggcaaggaataagggttgtccaatgac

SEQ ID NO: 177822 - DNA, 33 bp, Homo sapien
agtttaggcaaggaatgagggttgtccaatgac

SEQ ID NO: 177823 - DNA, 33 bp, Homo sapien
cttacatggaggccggcaacagcggttgtggag

SEQ ID NO: 177824 - DNA, 33 bp, Homo sapien
cttacatggaggccggtaacagcggttgtggag

SEQ ID NO: 177825 - DNA, 33 bp, Homo sapien
tttcttttcgtctttcccgacatggacaatttt

SEQ ID NO: 177826 - DNA, 33 bp, Homo sapien
tttcttttcgtctttctcgacatggacaatttt

SEQ ID NO: 177827 - DNA, 33 bp, Homo sapien
tctgaattccatgaaacaaggactcagtgatga

SEQ ID NO: 177828 - DNA, 33 bp, Homo sapien
tctgaattccatgaaataaggactcagtgatga

SEQ ID NO: 177829 - DNA, 33 bp, Homo sapien
caaaattgattcaaaaataagaataattggtct

SEQ ID NO: 177830 - DNA, 33 bp, Homo sapien
caaaattgattcaaaagtaagaataattggtct

SEQ ID NO: 177831 - DNA, 33 bp, Homo sapien
acaaaagatcatgttcacataggtaaatcccta

SEQ ID NO: 177832 - DNA, 33 bp, Homo sapien
acaaaagatcatgttcgcataggtaaatcccta

SEQ ID NO: 177833 - DNA, 33 bp, Homo sapien
acaagatatttcaatgccaatagaagaaagagc

SEQ ID NO: 177834 - DNA, 33 bp, Homo sapien
acaagatatttcaatgtcaatagaagaaagagc

SEQ ID NO: 177835 - DNA, 33 bp, Homo sapien
atgccatgggtcacctaagaacttactgccatt

SEQ ID NO: 177836 - DNA, 33 bp, Homo sapien
atgccatgggtcacctgagaacttactgccatt

SEQ ID NO: 177837 - DNA, 33 bp, Homo sapien
gcccagtctggtgaagaataaatgtttctgttg

SEQ ID NO: 177838 - DNA, 33 bp, Homo sapien
gcccagtctggtgaaggataaatgtttctgttg

SEQ ID NO: 177839 - DNA, 33 bp, Homo sapien
gcatattctagaaagaaggtgattctgtgcaat

SEQ ID NO: 177840 - DNA, 33 bp, Homo sapien
gcatattctagaaagagggtgattctgtgcaat

SEQ ID NO: 177841 - DNA, 33 bp, Homo sapien
accagcttatctctcccaacctgtgaggcgtaa

SEQ ID NO: 177842 - DNA, 33 bp, Homo sapien
accagcttatctctcctaacctgtgaggcgtaa

SEQ ID NO: 177843 - DNA, 33 bp, Homo sapien
gacatctagtatattcaaaaactccaggttata

SEQ ID NO: 177844 - DNA, 33 bp, Homo sapien
gacatctagtatattcgaaaactccaggttata

SEQ ID NO: 177845 - DNA, 33 bp, Homo sapien
aggacttcagcatacgaatttgcagaggccaca

SEQ ID NO: 177846 - DNA, 33 bp, Homo sapien
aggacttcagcatacggatttgcagaggccaca

SEQ ID NO: 177847 - DNA, 33 bp, Homo sapien
ttctaatgcaaagtgcaagtcttgtcttagtgt

SEQ ID NO: 177848 - DNA, 33 bp, Homo sapien
ttctaatgcaaagtgcgagtcttgtcttagtgt

SEQ ID NO: 177849 - DNA, 33 bp, Homo sapien
acctgaaagcaatgagaaaagtatgaaatctgc

SEQ ID NO: 177850 - DNA, 33 bp, Homo sapien
acctgaaagcaatgaggaaagtatgaaatctgc

SEQ ID NO: 177851 - DNA, 33 bp, Homo sapien
ttaaattgctacagaacgttccatcctatatag

SEQ ID NO: 177852 - DNA, 33 bp, Homo sapien
ttaaattgctacagaatgttccatcctatatag

SEQ ID NO: 177853 - DNA, 33 bp, Homo sapien
ctgtttgaaggccaggaagaatggtatttggag

SEQ ID NO: 177854 - DNA, 33 bp, Homo sapien
ctgtttgaaggccaggcagaatggtatttggag

SEQ ID NO: 177855 - DNA, 33 bp, Homo sapien
tgatctccaaattgctaaataacgtgtttatat

SEQ ID NO: 177856 - DNA, 33 bp, Homo sapien
tgatctccaaattgcttaataacgtgtttatat

SEQ ID NO: 177857 - DNA, 33 bp, Homo sapien
ttctgtgtacttagagaaactaacagggaccag

SEQ ID NO: 177858 - DNA, 33 bp, Homo sapien
ttctgtgtacttagagcaactaacagggaccag

SEQ ID NO: 177859 - DNA, 33 bp, Homo sapien
caaaaggaacaaaggcccagacatacacaaaaa

SEQ ID NO: 177860 - DNA, 33 bp, Homo sapien
caaaaggaacaaaggctcagacatacacaaaaa

SEQ ID NO: 177861 - DNA, 33 bp, Homo sapien
aaggaggaaacaacaaatagtctaagaacaatt

SEQ ID NO: 177862 - DNA, 33 bp, Homo sapien
aaggaggaaacaacaagtagtctaagaacaatt

SEQ ID NO: 177863 - DNA, 33 bp, Homo sapien
ttcccagtatctgccacggagcttggtagttgc

SEQ ID NO: 177864 - DNA, 33 bp, Homo sapien
ttcccagtatctgccatggagcttggtagttgc

SEQ ID NO: 177865 - DNA, 33 bp, Homo sapien
gagtgccagatgagcacaaagacaggagttggt

SEQ ID NO: 177866 - DNA, 33 bp, Homo sapien
gagtgccagatgagcataaagacaggagttggt

SEQ ID NO: 177867 - DNA, 33 bp, Homo sapien
aggtctttagagtaggaacttaaggcttttcag

SEQ ID NO: 177868 - DNA, 33 bp, Homo sapien
aggtctttagagtaggcacttaaggcttttcag

SEQ ID NO: 177869 - DNA, 33 bp, Homo sapien
atagaggaagggaaatgaacatacattcaacat

SEQ ID NO: 177870 - DNA, 33 bp, Homo sapien
atagaggaagggaaattaacatacattcaacat

SEQ ID NO: 177871 - DNA, 33 bp, Homo sapien
gatctattttcatacacggggcttgtttcactt

SEQ ID NO: 177872 - DNA, 33 bp, Homo sapien
gatctattttcatacatggggcttgtttcactt

SEQ ID NO: 177873 - DNA, 33 bp, Homo sapien
gttatgcacgtggactcacacgacctgtggaag

SEQ ID NO: 177874 - DNA, 33 bp, Homo sapien
gttatgcacgtggacttacacgacctgtggaag

SEQ ID NO: 177875 - DNA, 33 bp, Homo sapien
ctgctggggcaggaaacagttttgcgctaatga

SEQ ID NO: 177876 - DNA, 33 bp, Homo sapien
ctgctggggcaggaaatagttttgcgctaatga

SEQ ID NO: 177877 - DNA, 33 bp, Homo sapien
agacttaactcaaaaaactcctcctctattaaa

SEQ ID NO: 177878 - DNA, 33 bp, Homo sapien
agacttaactcaaaaagctcctcctctattaaa

SEQ ID NO: 177879 - DNA, 33 bp, Homo sapien
atgaagccaattactccagggatgctcatgagc

SEQ ID NO: 177880 - DNA, 33 bp, Homo sapien
atgaagccaattactcgagggatgctcatgagc

SEQ ID NO: 177881 - DNA, 33 bp, Homo sapien
gattacttcctaatacaatggggtacaagtatt

SEQ ID NO: 177882 - DNA, 33 bp, Homo sapien
gattacttcctaatacgatggggtacaagtatt

SEQ ID NO: 177883 - DNA, 33 bp, Homo sapien
gcccaagtcagggtataagaattacttagaaaa

SEQ ID NO: 177884 - DNA, 33 bp, Homo sapien
gcccaagtcagggtatgagaattacttagaaaa

SEQ ID NO: 177885 - DNA, 33 bp, Homo sapien
ttacttagaaaagacacacctggccagatgcgg

SEQ ID NO: 177886 - DNA, 33 bp, Homo sapien
ttacttagaaaagacagacctggccagatgcgg

SEQ ID NO: 177887 - DNA, 33 bp, Homo sapien
gaataagcagtaaacaaaccaaatgaaattcta

SEQ ID NO: 177888 - DNA, 33 bp, Homo sapien
gaataagcagtaaacacaccaaatgaaattcta

SEQ ID NO: 177889 - DNA, 33 bp, Homo sapien
tctcattgactggaaaggacagacagattgatc

SEQ ID NO: 177890 - DNA, 33 bp, Homo sapien
tctcattgactggaaatgacagacagattgatc

SEQ ID NO: 177891 - DNA, 33 bp, Homo sapien
tgtccctggaacatagaaattgcccaaagtaaa

SEQ ID NO: 177892 - DNA, 33 bp, Homo sapien
tgtccctggaacataggaattgcccaaagtaaa

SEQ ID NO: 177893 - DNA, 33 bp, Homo sapien
gcatggagaaaaggcccacaagaaagaaatctt

SEQ ID NO: 177894 - DNA, 33 bp, Homo sapien
gcatggagaaaaggcctacaagaaagaaatctt

SEQ ID NO: 177895 - DNA, 33 bp, Homo sapien
cctgagcagtgtccaaacccttatattggttag

SEQ ID NO: 177896 - DNA, 33 bp, Homo sapien
cctgagcagtgtccaagcccttatattggttag

SEQ ID NO: 177897 - DNA, 33 bp, Homo sapien
acaagttgccaagttggatggaaaagcagctca

SEQ ID NO: 177898 - DNA, 33 bp, Homo sapien
acaagttgccaagttgtatggaaaagcagctca

SEQ ID NO: 177899 - DNA, 33 bp, Homo sapien
tcttaaaacaaatctccatttctggcctggttg

SEQ ID NO: 177900 - DNA, 33 bp, Homo sapien
tcttaaaacaaatctctatttctggcctggttg

SEQ ID NO: 177901 - DNA, 33 bp, Homo sapien
tagaatagtctaattacgatgtgatgagggcct

SEQ ID NO: 177902 - DNA, 33 bp, Homo sapien
tagaatagtctaattatgatgtgatgagggcct

SEQ ID NO: 177903 - DNA, 33 bp, Homo sapien
tttgatctatgaggaaattataaatacagtcat

SEQ ID NO: 177904 - DNA, 33 bp, Homo sapien
tttgatctatgaggaatttataaatacagtcat

SEQ ID NO: 177905 - DNA, 33 bp, Homo sapien
ctagatccacagactcggaaatgaaaattgaca

SEQ ID NO: 177906 - DNA, 33 bp, Homo sapien
ctagatccacagactctgaaatgaaaattgaca

SEQ ID NO: 177907 - DNA, 33 bp, Homo sapien
ttttgtaaatgagaaaatgttgtcattactatc

SEQ ID NO: 177908 - DNA, 33 bp, Homo sapien
ttttgtaaatgagaaagtgttgtcattactatc

SEQ ID NO: 177909 - DNA, 33 bp, Homo sapien
ggtggtgcctgatagaaatgtcactcggcgaac

SEQ ID NO: 177910 - DNA, 33 bp, Homo sapien
ggtggtgcctgatagatatgtcactcggcgaac

SEQ ID NO: 177911 - DNA, 33 bp, Homo sapien
aggcacagaaagattaagtaaccagaccagaat

SEQ ID NO: 177912 - DNA, 33 bp, Homo sapien
aggcacagaaagattaggtaaccagaccagaat

SEQ ID NO: 177913 - DNA, 33 bp, Homo sapien
ctgaaagaggctaccactcactaggactcattc

SEQ ID NO: 177914 - DNA, 33 bp, Homo sapien
ctgaaagaggctaccattcactaggactcattc

SEQ ID NO: 177915 - DNA, 33 bp, Homo sapien
accatgaataatgaagaacatgagggtaatcaa

SEQ ID NO: 177916 - DNA, 33 bp, Homo sapien
accatgaataatgaaggacatgagggtaatcaa

SEQ ID NO: 177917 - DNA, 33 bp, Homo sapien
agtagggggaaatgaaatatttgtatccttttt

SEQ ID NO: 177918 - DNA, 33 bp, Homo sapien
agtagggggaaatgaactatttgtatccttttt

SEQ ID NO: 177919 - DNA, 33 bp, Homo sapien
agatatttagtaagcaggggtaaatcagtgtat

SEQ ID NO: 177920 - DNA, 33 bp, Homo sapien
agatatttagtaagcatgggtaaatcagtgtat

SEQ ID NO: 177921 - DNA, 33 bp, Homo sapien
tatttctcatcctagacgtgtagttctcaggtg

SEQ ID NO: 177922 - DNA, 33 bp, Homo sapien
tatttctcatcctagatgtgtagttctcaggtg

SEQ ID NO: 177923 - DNA, 33 bp, Homo sapien
atcccctctacattaccctcaagcactgctctc

SEQ ID NO: 177924 - DNA, 33 bp, Homo sapien
atcccctctacattactctcaagcactgctctc

SEQ ID NO: 177925 - DNA, 33 bp, Homo sapien
atacttttcacccacacagtaggtgctcaaaaa

SEQ ID NO: 177926 - DNA, 33 bp, Homo sapien
atacttttcacccacatagtaggtgctcaaaaa

SEQ ID NO: 177927 - DNA, 33 bp, Homo sapien
cacaccttccatactacgttgtaagttgtcgat

SEQ ID NO: 177928 - DNA, 33 bp, Homo sapien
cacaccttccatactatgttgtaagttgtcgat

SEQ ID NO: 177929 - DNA, 33 bp, Homo sapien
aggggatctagctgaaaaagatcagaagtttgg

SEQ ID NO: 177930 - DNA, 33 bp, Homo sapien
aggggatctagctgaacaagatcagaagtttgg

SEQ ID NO: 177931 - DNA, 33 bp, Homo sapien
ggattcattggatttgaaggggatctagctgaa

SEQ ID NO: 177932 - DNA, 33 bp, Homo sapien
ggattcattggatttggaggggatctagctgaa

SEQ ID NO: 177933 - DNA, 33 bp, Homo sapien
tgtcctgaactcagaaaaggtagatattgaaaa

SEQ ID NO: 177934 - DNA, 33 bp, Homo sapien
tgtcctgaactcagaataggtagatattgaaaa

SEQ ID NO: 177935 - DNA, 33 bp, Homo sapien
caaagaccagtaagagactcaaaggttaattta

SEQ ID NO: 177936 - DNA, 33 bp, Homo sapien
caaagaccagtaagaggctcaaaggttaattta

SEQ ID NO: 177937 - DNA, 33 bp, Homo sapien
cctttatatagcaataccaatgcttgatcaagt

SEQ ID NO: 177938 - DNA, 33 bp, Homo sapien
cctttatatagcaatagcaatgcttgatcaagt

SEQ ID NO: 177939 - DNA, 33 bp, Homo sapien
cccagtatgctctccaatctatgcttccccagc

SEQ ID NO: 177940 - DNA, 33 bp, Homo sapien
cccagtatgctctccagtctatgcttccccagc

SEQ ID NO: 177941 - DNA, 33 bp, Homo sapien
aaacattagcaagcacaatctaattaaccacac

SEQ ID NO: 177942 - DNA, 33 bp, Homo sapien
aaacattagcaagcacgatctaattaaccacac

SEQ ID NO: 177943 - DNA, 33 bp, Homo sapien
tgccaggaccttttcacagctgatttgttaatt

SEQ ID NO: 177944 - DNA, 33 bp, Homo sapien
tgccaggaccttttcatagctgatttgttaatt

SEQ ID NO: 177945 - DNA, 33 bp, Homo sapien
aaaaaaaaggataataggagaatgtgatgttaa

SEQ ID NO: 177946 - DNA, 33 bp, Homo sapien
aaaaaaaaggataatatgagaatgtgatgttaa

SEQ ID NO: 177947 - DNA, 33 bp, Homo sapien
aaagtattcgcacaacaggagacttactccaga

SEQ ID NO: 177948 - DNA, 33 bp, Homo sapien
aaagtattcgcacaacgggagacttactccaga

SEQ ID NO: 177949 - DNA, 33 bp, Homo sapien
actactgccaaaagtacgatttcttgtgaattt

SEQ ID NO: 177950 - DNA, 33 bp, Homo sapien
actactgccaaaagtatgatttcttgtgaattt

SEQ ID NO: 177951 - DNA, 33 bp, Homo sapien
aacacatattctaccccctcatcttatgaaacc

SEQ ID NO: 177952 - DNA, 33 bp, Homo sapien
aacacatattctaccctctcatcttatgaaacc

SEQ ID NO: 177953 - DNA, 33 bp, Homo sapien
tcttccacagttatctcaccaaaacagtaagat

SEQ ID NO: 177954 - DNA, 33 bp, Homo sapien
tcttccacagttatctgaccaaaacagtaagat

SEQ ID NO: 177955 - DNA, 33 bp, Homo sapien
ccaatttaattcaactaaccaccattgaacatt

SEQ ID NO: 177956 - DNA, 33 bp, Homo sapien
ccaatttaattcaactgaccaccattgaacatt

SEQ ID NO: 177957 - DNA, 33 bp, Homo sapien
aagtacaccaagaataaaacagagaaagaagaa

SEQ ID NO: 177958 - DNA, 33 bp, Homo sapien
aagtacaccaagaatataacagagaaagaagaa

SEQ ID NO: 177959 - DNA, 33 bp, Homo sapien
catacattctgtcacccaaaagaactcagcttt

SEQ ID NO: 177960 - DNA, 33 bp, Homo sapien
catacattctgtcacctaaaagaactcagcttt

SEQ ID NO: 177961 - DNA, 33 bp, Homo sapien
gggatttggttctaaactccaacccagctgcct

SEQ ID NO: 177962 - DNA, 33 bp, Homo sapien
gggatttggttctaaattccaacccagctgcct

SEQ ID NO: 177963 - DNA, 33 bp, Homo sapien
gtgaggatgctttgtgaatcagcctttgtgtgc

SEQ ID NO: 177964 - DNA, 33 bp, Homo sapien
gtgaggatgctttgtggatcagcctttgtgtgc

SEQ ID NO: 177965 - DNA, 33 bp, Homo sapien
gtgtcattttataggacaggcttgagcatcagt

SEQ ID NO: 177966 - DNA, 33 bp, Homo sapien
gtgtcattttataggagaggcttgagcatcagt

SEQ ID NO: 177967 - DNA, 33 bp, Homo sapien
acacgattgctgtgctcactgttgcagaatgtg

SEQ ID NO: 177968 - DNA, 33 bp, Homo sapien
acacgattgctgtgcttactgttgcagaatgtg

SEQ ID NO: 177969 - DNA, 33 bp, Homo sapien
cttttttcattcacctcaatagctactgcaaag

SEQ ID NO: 177970 - DNA, 33 bp, Homo sapien
cttttttcattcacctgaatagctactgcaaag

SEQ ID NO: 177971 - DNA, 33 bp, Homo sapien
aagtatttagctacccaatacctcagtttcccc

SEQ ID NO: 177972 - DNA, 33 bp, Homo sapien
aagtatttagctacccgatacctcagtttcccc

SEQ ID NO: 177973 - DNA, 33 bp, Homo sapien
acaggtgttgaactaacgtgtaacgatttgata

SEQ ID NO: 177974 - DNA, 33 bp, Homo sapien
acaggtgttgaactaatgtgtaacgatttgata

SEQ ID NO: 177975 - DNA, 33 bp, Homo sapien
atggctgactatgatacaacaaaacccaataat

SEQ ID NO: 177976 - DNA, 33 bp, Homo sapien
atggctgactatgatataacaaaacccaataat

SEQ ID NO: 177977 - DNA, 33 bp, Homo sapien
cgtggacagccagcgacggagacagaatacaac

SEQ ID NO: 177978 - DNA, 33 bp, Homo sapien
cgtggacagccagcgatggagacagaatacaac

SEQ ID NO: 177979 - DNA, 33 bp, Homo sapien
ctcctgtacttaactagctatgcaacctttaac

SEQ ID NO: 177980 - DNA, 33 bp, Homo sapien
ctcctgtacttaactatctatgcaacctttaac

SEQ ID NO: 177981 - DNA, 33 bp, Homo sapien
atgggggaggactgcacgtgtagatacaggatt

SEQ ID NO: 177982 - DNA, 33 bp, Homo sapien
atgggggaggactgcatgtgtagatacaggatt

SEQ ID NO: 177983 - DNA, 33 bp, Homo sapien
gtatccaattatttcacaagtttgttcatctca

SEQ ID NO: 177984 - DNA, 33 bp, Homo sapien
gtatccaattatttcagaagtttgttcatctca

SEQ ID NO: 177985 - DNA, 33 bp, Homo sapien
acaattatattcaccaacttggatatttgggtc

SEQ ID NO: 177986 - DNA, 33 bp, Homo sapien
acaattatattcaccatcttggatatttgggtc

SEQ ID NO: 177987 - DNA, 33 bp, Homo sapien
tagtgaattgtgaatgaattccattgtctggat

SEQ ID NO: 177988 - DNA, 33 bp, Homo sapien
tagtgaattgtgaatgcattccattgtctggat

SEQ ID NO: 177989 - DNA, 33 bp, Homo sapien
ccatgtaaaaattctacataggaagacagaaca

SEQ ID NO: 177990 - DNA, 33 bp, Homo sapien
ccatgtaaaaattctatataggaagacagaaca

SEQ ID NO: 177991 - DNA, 33 bp, Homo sapien
tggatgcttttcaagtaaataatgcactggggc

SEQ ID NO: 177992 - DNA, 33 bp, Homo sapien
tggatgcttttcaagttaataatgcactggggc

SEQ ID NO: 177993 - DNA, 33 bp, Homo sapien
caactttccttccacaaagattttctgtaaaga

SEQ ID NO: 177994 - DNA, 33 bp, Homo sapien
caactttccttccacagagattttctgtaaaga

SEQ ID NO: 177995 - DNA, 33 bp, Homo sapien
tgatgaagggcaagaggcatttggttttgtgac

SEQ ID NO: 177996 - DNA, 33 bp, Homo sapien
tgatgaagggcaagagtcatttggttttgtgac

SEQ ID NO: 177997 - DNA, 33 bp, Homo sapien
atatgttcaagggatcaaaattcaatctttatt

SEQ ID NO: 177998 - DNA, 33 bp, Homo sapien
atatgttcaagggatcgaaattcaatctttatt

SEQ ID NO: 177999 - DNA, 33 bp, Homo sapien
gtgagtgaatctgatcccttagctgcattcact

SEQ ID NO: 178000 - DNA, 33 bp, Homo sapien
gtgagtgaatctgatctcttagctgcattcact

SEQ ID NO: 178001 - DNA, 33 bp, Homo sapien
tgataaggaggcaagacgtggagaagaaatgct

SEQ ID NO: 178002 - DNA, 33 bp, Homo sapien
tgataaggaggcaagatgtggagaagaaatgct

SEQ ID NO: 178003 - DNA, 33 bp, Homo sapien
caggggaagaaattacagtaatgaatataaccc

SEQ ID NO: 178004 - DNA, 33 bp, Homo sapien
caggggaagaaattacggtaatgaatataaccc

SEQ ID NO: 178005 - DNA, 33 bp, Homo sapien
gctggttgaccatatcaaatcagtttttttttt

SEQ ID NO: 178006 - DNA, 33 bp, Homo sapien
gctggttgaccatatcgaatcagtttttttttt

SEQ ID NO: 178007 - DNA, 33 bp, Homo sapien
atagataaggaggggacagttaattgaaattgg

SEQ ID NO: 178008 - DNA, 33 bp, Homo sapien
atagataaggaggggatagttaattgaaattgg

SEQ ID NO: 178009 - DNA, 33 bp, Homo sapien
tattggaaagataatacagctgggagttaagca

SEQ ID NO: 178010 - DNA, 33 bp, Homo sapien
tattggaaagataatatagctgggagttaagca

SEQ ID NO: 178011 - DNA, 33 bp, Homo sapien
ttcaaaagcgttcttcacatgaaattaacattt

SEQ ID NO: 178012 - DNA, 33 bp, Homo sapien
ttcaaaagcgttcttctcatgaaattaacattt

SEQ ID NO: 178013 - DNA, 33 bp, Homo sapien
aacttccctcaaacaagaaattctgctaacaga

SEQ ID NO: 178014 - DNA, 33 bp, Homo sapien
aacttccctcaaacaataaattctgctaacaga

SEQ ID NO: 178015 - DNA, 33 bp, Homo sapien
ttcagatagatgacaacttagatagcaggtgac

SEQ ID NO: 178016 - DNA, 33 bp, Homo sapien
ttcagatagatgacaatttagatagcaggtgac

SEQ ID NO: 178017 - DNA, 33 bp, Homo sapien
tcgcctgtatttgtgacaacttcctaaaataca

SEQ ID NO: 178018 - DNA, 33 bp, Homo sapien
tcgcctgtatttgtgagaacttcctaaaataca

SEQ ID NO: 178019 - DNA, 33 bp, Homo sapien
tcctggttaatttctacgagcaagtgacacacg

SEQ ID NO: 178020 - DNA, 33 bp, Homo sapien
tcctggttaatttctatgagcaagtgacacacg

SEQ ID NO: 178021 - DNA, 33 bp, Homo sapien
ctttgaaaaacaataaaattcagccaagaaatc

SEQ ID NO: 178022 - DNA, 33 bp, Homo sapien
ctttgaaaaacaataatattcagccaagaaatc

SEQ ID NO: 178023 - DNA, 33 bp, Homo sapien
tctcaactggtgctccaaataaagacttctttt

SEQ ID NO: 178024 - DNA, 33 bp, Homo sapien
tctcaactggtgctccgaataaagacttctttt

SEQ ID NO: 178025 - DNA, 33 bp, Homo sapien
tgtcacctaagtcaccaagtcattcctcggcca

SEQ ID NO: 178026 - DNA, 33 bp, Homo sapien
tgtcacctaagtcaccgagtcattcctcggcca

SEQ ID NO: 178027 - DNA, 33 bp, Homo sapien
ctgcctctaataaaacaaaagcaagtatatgaa

SEQ ID NO: 178028 - DNA, 33 bp, Homo sapien
ctgcctctaataaaactaaagcaagtatatgaa

SEQ ID NO: 178029 - DNA, 33 bp, Homo sapien
gtgattggaataattccacagcaaaaaggtata

SEQ ID NO: 178030 - DNA, 33 bp, Homo sapien
gtgattggaataattctacagcaaaaaggtata

SEQ ID NO: 178031 - DNA, 33 bp, Homo sapien
agccatttatctactaagtaaccttcagtaaat

SEQ ID NO: 178032 - DNA, 33 bp, Homo sapien
agccatttatctactatgtaaccttcagtaaat

SEQ ID NO: 178033 - DNA, 33 bp, Homo sapien
agcaaaaaacttgggaactaacatagtgattga

SEQ ID NO: 178034 - DNA, 33 bp, Homo sapien
agcaaaaaacttgggagctaacatagtgattga

SEQ ID NO: 178035 - DNA, 33 bp, Homo sapien
tgtctcgtgagcaaacactgccctttagtcact

SEQ ID NO: 178036 - DNA, 33 bp, Homo sapien
tgtctcgtgagcaaacgctgccctttagtcact

SEQ ID NO: 178037 - DNA, 33 bp, Homo sapien
ccatatttctgaggatcaatggactccagggct

SEQ ID NO: 178038 - DNA, 33 bp, Homo sapien
ccatatttctgaggattaatggactccagggct

SEQ ID NO: 178039 - DNA, 33 bp, Homo sapien
aaaaacataatgcacagggagagagtatgtgga

SEQ ID NO: 178040 - DNA, 33 bp, Homo sapien
aaaaacataatgcacatggagagagtatgtgga

SEQ ID NO: 178041 - DNA, 33 bp, Homo sapien
ggaatttgaattttaacgcaagggcagtcagga

SEQ ID NO: 178042 - DNA, 33 bp, Homo sapien
ggaatttgaattttaatgcaagggcagtcagga

SEQ ID NO: 178043 - DNA, 33 bp, Homo sapien
cctaggtcgatacctgaaactgggctaaccaca

SEQ ID NO: 178044 - DNA, 33 bp, Homo sapien
cctaggtcgatacctgcaactgggctaaccaca

SEQ ID NO: 178045 - DNA, 33 bp, Homo sapien
tacttaattcttgtcaaagggctatggagtaag

SEQ ID NO: 178046 - DNA, 33 bp, Homo sapien
tacttaattcttgtcagagggctatggagtaag

SEQ ID NO: 178047 - DNA, 33 bp, Homo sapien
ctgtgcaatctgaacaaaggaacctaacttttc

SEQ ID NO: 178048 - DNA, 33 bp, Homo sapien
ctgtgcaatctgaacagaggaacctaacttttc

SEQ ID NO: 178049 - DNA, 33 bp, Homo sapien
tttgagtcagatttcacaaacaagagtaattcc

SEQ ID NO: 178050 - DNA, 33 bp, Homo sapien
tttgagtcagatttcagaaacaagagtaattcc

SEQ ID NO: 178051 - DNA, 33 bp, Homo sapien
actgcagcttattaaccgtaaattgcatcatga

SEQ ID NO: 178052 - DNA, 33 bp, Homo sapien
actgcagcttattaactgtaaattgcatcatga

SEQ ID NO: 178053 - DNA, 33 bp, Homo sapien
tgtttccccattaaaactgccagcttttgtcat

SEQ ID NO: 178054 - DNA, 33 bp, Homo sapien
tgtttccccattaaaattgccagcttttgtcat

SEQ ID NO: 178055 - DNA, 33 bp, Homo sapien
acttccagatgcattccaaacatggcaacatga

SEQ ID NO: 178056 - DNA, 33 bp, Homo sapien
acttccagatgcattctaaacatggcaacatga

SEQ ID NO: 178057 - DNA, 33 bp, Homo sapien
caaatcccctgcagaaaccaaatagacttgact

SEQ ID NO: 178058 - DNA, 33 bp, Homo sapien
caaatcccctgcagaagccaaatagacttgact

SEQ ID NO: 178059 - DNA, 33 bp, Homo sapien
tggaacctggctgccaaatgagcgtattgatta

SEQ ID NO: 178060 - DNA, 33 bp, Homo sapien
tggaacctggctgccagatgagcgtattgatta

SEQ ID NO: 178061 - DNA, 33 bp, Homo sapien
aactagtggattttagcactgctgttagtagtc

SEQ ID NO: 178062 - DNA, 33 bp, Homo sapien
aactagtggattttagtactgctgttagtagtc

SEQ ID NO: 178063 - DNA, 33 bp, Homo sapien
aaagatggaaaataacaacgtctactttgaatg

SEQ ID NO: 178064 - DNA, 33 bp, Homo sapien
aaagatggaaaataacgacgtctactttgaatg

SEQ ID NO: 178065 - DNA, 33 bp, Homo sapien
cgaggcttagatttgaaccgagatatgaatgtc

SEQ ID NO: 178066 - DNA, 33 bp, Homo sapien
cgaggcttagatttgatccgagatatgaatgtc

SEQ ID NO: 178067 - DNA, 33 bp, Homo sapien
atgtgcaatagataaacgtcaaggaaagtcata

SEQ ID NO: 178068 - DNA, 33 bp, Homo sapien
atgtgcaatagataaatgtcaaggaaagtcata

SEQ ID NO: 178069 - DNA, 33 bp, Homo sapien
gacatttaagctaagacgaaggatgagaagaag

SEQ ID NO: 178070 - DNA, 33 bp, Homo sapien
gacatttaagctaagatgaaggatgagaagaag

SEQ ID NO: 178071 - DNA, 33 bp, Homo sapien
ctggcctaggtactaaatctctaaaagtgcaat

SEQ ID NO: 178072 - DNA, 33 bp, Homo sapien
ctggcctaggtactaagtctctaaaagtgcaat

SEQ ID NO: 178073 - DNA, 33 bp, Homo sapien
aatacacataacaagaaaagggcatggtggttt

SEQ ID NO: 178074 - DNA, 33 bp, Homo sapien
aatacacataacaagagaagggcatggtggttt

SEQ ID NO: 178075 - DNA, 33 bp, Homo sapien
ctgcagctaatcaatcacatcttgagttcccat

SEQ ID NO: 178076 - DNA, 33 bp, Homo sapien
ctgcagctaatcaatcgcatcttgagttcccat

SEQ ID NO: 178077 - DNA, 33 bp, Homo sapien
agaataaacatcagagacactccaaatcaaagt

SEQ ID NO: 178078 - DNA, 33 bp, Homo sapien
agaataaacatcagaggcactccaaatcaaagt

SEQ ID NO: 178079 - DNA, 33 bp, Homo sapien
gcctggctgcttcctacaatagatgtgggagca

SEQ ID NO: 178080 - DNA, 33 bp, Homo sapien
gcctggctgcttcctataatagatgtgggagca

SEQ ID NO: 178081 - DNA, 33 bp, Homo sapien
gattgttaacgaaatgcatttggctccaaaaga

SEQ ID NO: 178082 - DNA, 33 bp, Homo sapien
gattgttaacgaaatgtatttggctccaaaaga

SEQ ID NO: 178083 - DNA, 33 bp, Homo sapien
tataatgagataagaaataggggcctgttcatt

SEQ ID NO: 178084 - DNA, 33 bp, Homo sapien
tataatgagataagaattaggggcctgttcatt

SEQ ID NO: 178085 - DNA, 33 bp, Homo sapien
ttcaaaatgtgatagtaaatgttgagactggtt

SEQ ID NO: 178086 - DNA, 33 bp, Homo sapien
ttcaaaatgtgatagtcaatgttgagactggtt

SEQ ID NO: 178087 - DNA, 33 bp, Homo sapien
tctaagatctacagaaaagagagtcagttagtt

SEQ ID NO: 178088 - DNA, 33 bp, Homo sapien
tctaagatctacagaagagagagtcagttagtt

SEQ ID NO: 178089 - DNA, 33 bp, Homo sapien
acggttcctatcttgccgaattcactcttttct

SEQ ID NO: 178090 - DNA, 33 bp, Homo sapien
acggttcctatcttgctgaattcactcttttct

SEQ ID NO: 178091 - DNA, 33 bp, Homo sapien
aaataaatgaggaagaaaagttagaataagacc

SEQ ID NO: 178092 - DNA, 33 bp, Homo sapien
aaataaatgaggaagagaagttagaataagacc

SEQ ID NO: 178093 - DNA, 33 bp, Homo sapien
ctttttatagatgtggaaactaaagtgcagaga

SEQ ID NO: 178094 - DNA, 33 bp, Homo sapien
ctttttatagatgtggcaactaaagtgcagaga

SEQ ID NO: 178095 - DNA, 33 bp, Homo sapien
gttcttttgctaataaacccatttaatcagctt

SEQ ID NO: 178096 - DNA, 33 bp, Homo sapien
gttcttttgctaataaccccatttaatcagctt

SEQ ID NO: 178097 - DNA, 33 bp, Homo sapien
attgctaatttcattcgcagacattagtgggtg

SEQ ID NO: 178098 - DNA, 33 bp, Homo sapien
attgctaatttcattctcagacattagtgggtg

SEQ ID NO: 178099 - DNA, 33 bp, Homo sapien
tatatctctaaataaaattaattctgctccaac

SEQ ID NO: 178100 - DNA, 33 bp, Homo sapien
tatatctctaaataaatttaattctgctccaac

SEQ ID NO: 178101 - DNA, 33 bp, Homo sapien
tatttgtgtagacatcaattatgtgggttttaa

SEQ ID NO: 178102 - DNA, 33 bp, Homo sapien
tatttgtgtagacatccattatgtgggttttaa

SEQ ID NO: 178103 - DNA, 33 bp, Homo sapien
tcgttagtgctctcaccattcaaaaacaaaaac

SEQ ID NO: 178104 - DNA, 33 bp, Homo sapien
tcgttagtgctctcactattcaaaaacaaaaac

SEQ ID NO: 178105 - DNA, 33 bp, Homo sapien
gaaggatgaacactcaaaaattcagtatgtcag

SEQ ID NO: 178106 - DNA, 33 bp, Homo sapien
gaaggatgaacactcacaaattcagtatgtcag

SEQ ID NO: 178107 - DNA, 33 bp, Homo sapien
gtattgtgtaatagtaacagttaaagggtgagc

SEQ ID NO: 178108 - DNA, 33 bp, Homo sapien
gtattgtgtaatagtagcagttaaagggtgagc

SEQ ID NO: 178109 - DNA, 33 bp, Homo sapien
gtgcagtgcccactaaaataaaatgtgctcata

SEQ ID NO: 178110 - DNA, 33 bp, Homo sapien
gtgcagtgcccactaagataaaatgtgctcata

SEQ ID NO: 178111 - DNA, 33 bp, Homo sapien
gatgcatctcagacatcacattatcactaacaa

SEQ ID NO: 178112 - DNA, 33 bp, Homo sapien
gatgcatctcagacattacattatcactaacaa

SEQ ID NO: 178113 - DNA, 33 bp, Homo sapien
taatttcctcatctacccgaagtgcacaattat

SEQ ID NO: 178114 - DNA, 33 bp, Homo sapien
taatttcctcatctacgcgaagtgcacaattat

SEQ ID NO: 178115 - DNA, 33 bp, Homo sapien
actggcaggtaagagactaggtttttctgttaa

SEQ ID NO: 178116 - DNA, 33 bp, Homo sapien
actggcaggtaagagattaggtttttctgttaa

SEQ ID NO: 178117 - DNA, 33 bp, Homo sapien
ctcctggaaaattggcaagagaagaaaaacaga

SEQ ID NO: 178118 - DNA, 33 bp, Homo sapien
ctcctggaaaattggcgagagaagaaaaacaga

SEQ ID NO: 178119 - DNA, 33 bp, Homo sapien
ttcccaaagccatatacctaggcagtaagagaa

SEQ ID NO: 178120 - DNA, 33 bp, Homo sapien
ttcccaaagccatatagctaggcagtaagagaa

SEQ ID NO: 178121 - DNA, 33 bp, Homo sapien
tctctggtcaaacctcaattactgtccttgtca

SEQ ID NO: 178122 - DNA, 33 bp, Homo sapien
tctctggtcaaacctcgattactgtccttgtca

SEQ ID NO: 178123 - DNA, 33 bp, Homo sapien
ctgtcttgtaccaccaatagaatgttttataaa

SEQ ID NO: 178124 - DNA, 33 bp, Homo sapien
ctgtcttgtaccaccagtagaatgttttataaa

SEQ ID NO: 178125 - DNA, 33 bp, Homo sapien
atattagcaatgaataaagaaaattagcagata

SEQ ID NO: 178126 - DNA, 33 bp, Homo sapien
atattagcaatgaatatagaaaattagcagata

SEQ ID NO: 178127 - DNA, 33 bp, Homo sapien
atcattcaccagttccccttctctcactggttg

SEQ ID NO: 178128 - DNA, 33 bp, Homo sapien
atcattcaccagttcctcttctctcactggttg

SEQ ID NO: 178129 - DNA, 33 bp, Homo sapien
tccaaaccataacagcagatgtgtgtttagttc

SEQ ID NO: 178130 - DNA, 33 bp, Homo sapien
tccaaaccataacagccgatgtgtgtttagttc

SEQ ID NO: 178131 - DNA, 33 bp, Homo sapien
aagggtccttgtaccaatcaagtagaatatact

SEQ ID NO: 178132 - DNA, 33 bp, Homo sapien
aagggtccttgtaccagtcaagtagaatatact

SEQ ID NO: 178133 - DNA, 33 bp, Homo sapien
gtctgttatttgctcaactcatactgtaagatc

SEQ ID NO: 178134 - DNA, 33 bp, Homo sapien
gtctgttatttgctcatctcatactgtaagatc

SEQ ID NO: 178135 - DNA, 33 bp, Homo sapien
ttattttatacactcaagaagatataatcatta

SEQ ID NO: 178136 - DNA, 33 bp, Homo sapien
ttattttatacactcaggaagatataatcatta

SEQ ID NO: 178137 - DNA, 33 bp, Homo sapien
acattctcttagacagacacccacctgattatg

SEQ ID NO: 178138 - DNA, 33 bp, Homo sapien
acattctcttagacagtcacccacctgattatg

SEQ ID NO: 178139 - DNA, 33 bp, Homo sapien
aagccaggagagatgccaacaggagaaacagag

SEQ ID NO: 178140 - DNA, 33 bp, Homo sapien
aagccaggagagatgcgaacaggagaaacagag

SEQ ID NO: 178141 - DNA, 33 bp, Homo sapien
ttttcattccggtgcccctgttcacagattaat

SEQ ID NO: 178142 - DNA, 33 bp, Homo sapien
ttttcattccggtgcctctgttcacagattaat

SEQ ID NO: 178143 - DNA, 33 bp, Homo sapien
aataccatgttaagagaataataacaagctaca

SEQ ID NO: 178144 - DNA, 33 bp, Homo sapien
aataccatgttaagaggataataacaagctaca

SEQ ID NO: 178145 - DNA, 33 bp, Homo sapien
ctacaaccgacataaacgaagcattcttctccc

SEQ ID NO: 178146 - DNA, 33 bp, Homo sapien
ctacaaccgacataaatgaagcattcttctccc

SEQ ID NO: 178147 - DNA, 33 bp, Homo sapien
ctgaatgtgtataaggcatcgagaacaaaacta

SEQ ID NO: 178148 - DNA, 33 bp, Homo sapien
ctgaatgtgtataagggatcgagaacaaaacta

SEQ ID NO: 178149 - DNA, 33 bp, Homo sapien
tttccaagctacctcacagtttaggttggagta

SEQ ID NO: 178150 - DNA, 33 bp, Homo sapien
tttccaagctacctcatagtttaggttggagta

SEQ ID NO: 178151 - DNA, 33 bp, Homo sapien
agcacaaagatctctcactgtctgtagtctgcc

SEQ ID NO: 178152 - DNA, 33 bp, Homo sapien
agcacaaagatctctcgctgtctgtagtctgcc

SEQ ID NO: 178153 - DNA, 33 bp, Homo sapien
cacaacagtaataaaacttggattttagtacca

SEQ ID NO: 178154 - DNA, 33 bp, Homo sapien
cacaacagtaataaaagttggattttagtacca

SEQ ID NO: 178155 - DNA, 33 bp, Homo sapien
agagcttcatcataaagaactcagtacttgagt

SEQ ID NO: 178156 - DNA, 33 bp, Homo sapien
agagcttcatcataaataactcagtacttgagt

SEQ ID NO: 178157 - DNA, 33 bp, Homo sapien
gctcctaaatggccatcataggtatgacaagta

SEQ ID NO: 178158 - DNA, 33 bp, Homo sapien
gctcctaaatggccatgataggtatgacaagta

SEQ ID NO: 178159 - DNA, 33 bp, Homo sapien
tgtgccatagaacaccaacactgaatgtgaaag

SEQ ID NO: 178160 - DNA, 33 bp, Homo sapien
tgtgccatagaacaccgacactgaatgtgaaag

SEQ ID NO: 178161 - DNA, 33 bp, Homo sapien
actacacattcattgcactttcacattcagtgt

SEQ ID NO: 178162 - DNA, 33 bp, Homo sapien
actacacattcattgcgctttcacattcagtgt

SEQ ID NO: 178163 - DNA, 33 bp, Homo sapien
ttttagtggaataagacgatacttggaatcaaa

SEQ ID NO: 178164 - DNA, 33 bp, Homo sapien
ttttagtggaataagatgatacttggaatcaaa

SEQ ID NO: 178165 - DNA, 33 bp, Homo sapien
aagcagcaagataaaaatgacctgtaacataga

SEQ ID NO: 178166 - DNA, 33 bp, Homo sapien
aagcagcaagataaaagtgacctgtaacataga

SEQ ID NO: 178167 - DNA, 33 bp, Homo sapien
actttcctaagcaaacacaaactgagcgagttt

SEQ ID NO: 178168 - DNA, 33 bp, Homo sapien
actttcctaagcaaacgcaaactgagcgagttt

SEQ ID NO: 178169 - DNA, 33 bp, Homo sapien
agtttttttccagttacatggtttcagttctta

SEQ ID NO: 178170 - DNA, 33 bp, Homo sapien
agtttttttccagttatatggtttcagttctta

SEQ ID NO: 178171 - DNA, 33 bp, Homo sapien
atgtgtattagtggctcaacatatgattaaatg

SEQ ID NO: 178172 - DNA, 33 bp, Homo sapien
atgtgtattagtggctgaacatatgattaaatg

SEQ ID NO: 178173 - DNA, 33 bp, Homo sapien
ttaagaaactgtgctgcaacaagacaggagtgt

SEQ ID NO: 178174 - DNA, 33 bp, Homo sapien
ttaagaaactgtgctggaacaagacaggagtgt

SEQ ID NO: 178175 - DNA, 33 bp, Homo sapien
gaactagtcttagtagcagtctacagagcagga

SEQ ID NO: 178176 - DNA, 33 bp, Homo sapien
gaactagtcttagtagtagtctacagagcagga

SEQ ID NO: 178177 - DNA, 33 bp, Homo sapien
tgatttgagcaaaagaacttaaccaatactgtc

SEQ ID NO: 178178 - DNA, 33 bp, Homo sapien
tgatttgagcaaaagagcttaaccaatactgtc

SEQ ID NO: 178179 - DNA, 33 bp, Homo sapien
gttctcttgaaaataaaggaagtgagcctgtta

SEQ ID NO: 178180 - DNA, 33 bp, Homo sapien
gttctcttgaaaataacggaagtgagcctgtta

SEQ ID NO: 178181 - DNA, 33 bp, Homo sapien
cacatttcaaaataaactgtgccttcgcagtag

SEQ ID NO: 178182 - DNA, 33 bp, Homo sapien
cacatttcaaaataaattgtgccttcgcagtag

SEQ ID NO: 178183 - DNA, 33 bp, Homo sapien
ggctgtctcagtcctactaaaatcaccatgtcc

SEQ ID NO: 178184 - DNA, 33 bp, Homo sapien
ggctgtctcagtcctattaaaatcaccatgtcc

SEQ ID NO: 178185 - DNA, 33 bp, Homo sapien
cttcccaagtttagagactagaaatgaaaaaaa

SEQ ID NO: 178186 - DNA, 33 bp, Homo sapien
cttcccaagtttagaggctagaaatgaaaaaaa

SEQ ID NO: 178187 - DNA, 33 bp, Homo sapien
tgctcatgctaatctccataagtatggaaggaa

SEQ ID NO: 178188 - DNA, 33 bp, Homo sapien
tgctcatgctaatctctataagtatggaaggaa

SEQ ID NO: 178189 - DNA, 33 bp, Homo sapien
tttatgcaaccagaacacagaattcaagaccac

SEQ ID NO: 178190 - DNA, 33 bp, Homo sapien
tttatgcaaccagaactcagaattcaagaccac

SEQ ID NO: 178191 - DNA, 33 bp, Homo sapien
ctcctttcagttgtcaatacagaggattttcac

SEQ ID NO: 178192 - DNA, 33 bp, Homo sapien
ctcctttcagttgtcagtacagaggattttcac

SEQ ID NO: 178193 - DNA, 33 bp, Homo sapien
gaggtgggcaagcaacagcaagaaaactttccc

SEQ ID NO: 178194 - DNA, 33 bp, Homo sapien
gaggtgggcaagcaaccgcaagaaaactttccc

SEQ ID NO: 178195 - DNA, 33 bp, Homo sapien
aagaaaactttcccaccattatgcctgaaaagt

SEQ ID NO: 178196 - DNA, 33 bp, Homo sapien
aagaaaactttcccacgattatgcctgaaaagt

SEQ ID NO: 178197 - DNA, 33 bp, Homo sapien
aaagtggggaatcagcaacttaggttaaataat

SEQ ID NO: 178198 - DNA, 33 bp, Homo sapien
aaagtggggaatcagcgacttaggttaaataat

SEQ ID NO: 178199 - DNA, 33 bp, Homo sapien
aagctcttttataacaagaagtcttacttgcta

SEQ ID NO: 178200 - DNA, 33 bp, Homo sapien
aagctcttttataacaggaagtcttacttgcta

SEQ ID NO: 178201 - DNA, 33 bp, Homo sapien
ctgtcagaacttatcaaggaaagagcaagaagc

SEQ ID NO: 178202 - DNA, 33 bp, Homo sapien
ctgtcagaacttatcagggaaagagcaagaagc

SEQ ID NO: 178203 - DNA, 33 bp, Homo sapien
ctgcagcagagagggcaaagtctttgatgacca

SEQ ID NO: 178204 - DNA, 33 bp, Homo sapien
ctgcagcagagagggcgaagtctttgatgacca

SEQ ID NO: 178205 - DNA, 33 bp, Homo sapien
cggacgttcagcatcaaaccttaataaatgtta

SEQ ID NO: 178206 - DNA, 33 bp, Homo sapien
cggacgttcagcatcagaccttaataaatgtta

SEQ ID NO: 178207 - DNA, 33 bp, Homo sapien
cctaaagaaatctaaaacgtatgatgataaaca

SEQ ID NO: 178208 - DNA, 33 bp, Homo sapien
cctaaagaaatctaaagcgtatgatgataaaca

SEQ ID NO: 178209 - DNA, 33 bp, Homo sapien
gtgcctagactacagactaaattccaagtattt

SEQ ID NO: 178210 - DNA, 33 bp, Homo sapien
gtgcctagactacagattaaattccaagtattt

SEQ ID NO: 178211 - DNA, 33 bp, Homo sapien
ccaccgattcagcaagaaaactctacctgatac

SEQ ID NO: 178212 - DNA, 33 bp, Homo sapien
ccaccgattcagcaagcaaactctacctgatac

SEQ ID NO: 178213 - DNA, 33 bp, Homo sapien
tggctactccttatcaaacgaaaattacctgct

SEQ ID NO: 178214 - DNA, 33 bp, Homo sapien
tggctactccttatcatacgaaaattacctgct

SEQ ID NO: 178215 - DNA, 33 bp, Homo sapien
tgagaagtcatggggcagagtcacgttcctgca

SEQ ID NO: 178216 - DNA, 33 bp, Homo sapien
tgagaagtcatggggcggagtcacgttcctgca

SEQ ID NO: 178217 - DNA, 33 bp, Homo sapien
cacaatggcaaaatgcactactttttatatttc

SEQ ID NO: 178218 - DNA, 33 bp, Homo sapien
cacaatggcaaaatgcgctactttttatatttc

SEQ ID NO: 178219 - DNA, 33 bp, Homo sapien
tctaattgatctctccacttccatgaagtcatc

SEQ ID NO: 178220 - DNA, 33 bp, Homo sapien
tctaattgatctctccgcttccatgaagtcatc

SEQ ID NO: 178221 - DNA, 33 bp, Homo sapien
gaaaaagtcatatgaagcttgctacagaattta

SEQ ID NO: 178222 - DNA, 33 bp, Homo sapien
gaaaaagtcatatgaatcttgctacagaattta

SEQ ID NO: 178223 - DNA, 33 bp, Homo sapien
acactatttgaggaccagctatagattgtcccc

SEQ ID NO: 178224 - DNA, 33 bp, Homo sapien
acactatttgaggaccggctatagattgtcccc

SEQ ID NO: 178225 - DNA, 33 bp, Homo sapien
tgtagttgatgacggtaaaaagataagaggaat

SEQ ID NO: 178226 - DNA, 33 bp, Homo sapien
tgtagttgatgacggtgaaaagataagaggaat

SEQ ID NO: 178227 - DNA, 33 bp, Homo sapien
aggctctgtctcaatcaatcagtcaatccacca

SEQ ID NO: 178228 - DNA, 33 bp, Homo sapien
aggctctgtctcaatccatcagtcaatccacca

SEQ ID NO: 178229 - DNA, 33 bp, Homo sapien
ataggatgtgtaattcaatcacgttctgtttag

SEQ ID NO: 178230 - DNA, 33 bp, Homo sapien
ataggatgtgtaattcgatcacgttctgtttag

SEQ ID NO: 178231 - DNA, 33 bp, Homo sapien
atcattagtcatttcaatcacaaatacctgtca

SEQ ID NO: 178232 - DNA, 33 bp, Homo sapien
atcattagtcatttcagtcacaaatacctgtca

SEQ ID NO: 178233 - DNA, 33 bp, Homo sapien
gaatgttttctgaaacagtccaggatgacaaaa

SEQ ID NO: 178234 - DNA, 33 bp, Homo sapien
gaatgttttctgaaacggtccaggatgacaaaa

SEQ ID NO: 178235 - DNA, 33 bp, Homo sapien
atgtgactttagtgtgcaatgaaagtgcatcat

SEQ ID NO: 178236 - DNA, 33 bp, Homo sapien
atgtgactttagtgtgtaatgaaagtgcatcat

SEQ ID NO: 178237 - DNA, 33 bp, Homo sapien
gcaaatgcaagtaatacgtgattaaaacagaag

SEQ ID NO: 178238 - DNA, 33 bp, Homo sapien
gcaaatgcaagtaatatgtgattaaaacagaag

SEQ ID NO: 178239 - DNA, 33 bp, Homo sapien
agccactaaagaataacgtgttttacagaatat

SEQ ID NO: 178240 - DNA, 33 bp, Homo sapien
agccactaaagaataatgtgttttacagaatat

SEQ ID NO: 178241 - DNA, 33 bp, Homo sapien
ggtgtatacccgtccaaattggccacagcctac

SEQ ID NO: 178242 - DNA, 33 bp, Homo sapien
ggtgtatacccgtccacattggccacagcctac

SEQ ID NO: 178243 - DNA, 33 bp, Homo sapien
tttttatctgactacactgatttgaaggactag

SEQ ID NO: 178244 - DNA, 33 bp, Homo sapien
tttttatctgactacattgatttgaaggactag

SEQ ID NO: 178245 - DNA, 33 bp, Homo sapien
cttctcttccttcctcggagcttctaatgtttt

SEQ ID NO: 178246 - DNA, 33 bp, Homo sapien
cttctcttccttcctctgagcttctaatgtttt

SEQ ID NO: 178247 - DNA, 33 bp, Homo sapien
ccatattcagcaaccacctggtttataaatgtt

SEQ ID NO: 178248 - DNA, 33 bp, Homo sapien
ccatattcagcaaccatctggtttataaatgtt

SEQ ID NO: 178249 - DNA, 33 bp, Homo sapien
ttgcttaaaattatcaatcatactgctctttct

SEQ ID NO: 178250 - DNA, 33 bp, Homo sapien
ttgcttaaaattatcagtcatactgctctttct

SEQ ID NO: 178251 - DNA, 33 bp, Homo sapien
tagataagaaatttcaacaacagggctaaagtt

SEQ ID NO: 178252 - DNA, 33 bp, Homo sapien
tagataagaaatttcagcaacagggctaaagtt

SEQ ID NO: 178253 - DNA, 33 bp, Homo sapien
ctcatacatccagtcacctagtcaagcaacaga

SEQ ID NO: 178254 - DNA, 33 bp, Homo sapien
ctcatacatccagtcatctagtcaagcaacaga

SEQ ID NO: 178255 - DNA, 33 bp, Homo sapien
ttctcagtgaatcctcacgtggcgaaagggaca

SEQ ID NO: 178256 - DNA, 33 bp, Homo sapien
ttctcagtgaatcctcgcgtggcgaaagggaca

SEQ ID NO: 178257 - DNA, 33 bp, Homo sapien
gaaggtaattagatcacgaaagccctttcctca

SEQ ID NO: 178258 - DNA, 33 bp, Homo sapien
gaaggtaattagatcatgaaagccctttcctca

SEQ ID NO: 178259 - DNA, 33 bp, Homo sapien
gttgtgtaatctttcacggatatgcttttggct

SEQ ID NO: 178260 - DNA, 33 bp, Homo sapien
gttgtgtaatctttcatggatatgcttttggct

SEQ ID NO: 178261 - DNA, 33 bp, Homo sapien
cataaaataaagatcaataccaccactttgcat

SEQ ID NO: 178262 - DNA, 33 bp, Homo sapien
cataaaataaagatcagtaccaccactttgcat

SEQ ID NO: 178263 - DNA, 33 bp, Homo sapien
gtatctgtacctgcaacgagctgaggtgcagtt

SEQ ID NO: 178264 - DNA, 33 bp, Homo sapien
gtatctgtacctgcaatgagctgaggtgcagtt

SEQ ID NO: 178265 - DNA, 33 bp, Homo sapien
ttcctcatttctcagcaatgctcagccctctca

SEQ ID NO: 178266 - DNA, 33 bp, Homo sapien
ttcctcatttctcagcgatgctcagccctctca

SEQ ID NO: 178267 - DNA, 33 bp, Homo sapien
aaagtttgggagacgaaaggtgaccgatgctgg

SEQ ID NO: 178268 - DNA, 33 bp, Homo sapien
aaagtttgggagacgagaggtgaccgatgctgg

SEQ ID NO: 178269 - DNA, 33 bp, Homo sapien
aatttgaggtcgtagaaatattgcagttacaaa

SEQ ID NO: 178270 - DNA, 33 bp, Homo sapien
aatttgaggtcgtagatatattgcagttacaaa

SEQ ID NO: 178271 - DNA, 33 bp, Homo sapien
ccatctctctgaccacaatatcttaactttcca

SEQ ID NO: 178272 - DNA, 33 bp, Homo sapien
ccatctctctgaccacgatatcttaactttcca

SEQ ID NO: 178273 - DNA, 33 bp, Homo sapien
gtagaccttgacactacagagttgaaatgtctg

SEQ ID NO: 178274 - DNA, 33 bp, Homo sapien
gtagaccttgacactatagagttgaaatgtctg

SEQ ID NO: 178275 - DNA, 33 bp, Homo sapien
agatctaaaaatagcaaccttgtacctactgat

SEQ ID NO: 178276 - DNA, 33 bp, Homo sapien
agatctaaaaatagcagccttgtacctactgat

SEQ ID NO: 178277 - DNA, 33 bp, Homo sapien
agttgagccttcttggacacctgttagaacttt

SEQ ID NO: 178278 - DNA, 33 bp, Homo sapien
agttgagccttcttgggcacctgttagaacttt

SEQ ID NO: 178279 - DNA, 33 bp, Homo sapien
gacatggataggataccggaaaaattcttaaaa

SEQ ID NO: 178280 - DNA, 33 bp, Homo sapien
gacatggataggatactggaaaaattcttaaaa

SEQ ID NO: 178281 - DNA, 33 bp, Homo sapien
caattgaccatgtaaaagaggaatttaaagcta

SEQ ID NO: 178282 - DNA, 33 bp, Homo sapien
caattgaccatgtaaaggaggaatttaaagcta

SEQ ID NO: 178283 - DNA, 33 bp, Homo sapien
ggggaaggaaggggaacattttcagttgaaagt

SEQ ID NO: 178284 - DNA, 33 bp, Homo sapien
ggggaaggaaggggaatattttcagttgaaagt

SEQ ID NO: 178285 - DNA, 33 bp, Homo sapien
aagataattcaaagacaacattcaaaattgaag

SEQ ID NO: 178286 - DNA, 33 bp, Homo sapien
aagataattcaaagacgacattcaaaattgaag

SEQ ID NO: 178287 - DNA, 33 bp, Homo sapien
tggacaaagatcaccacgacagaaattgacagt

SEQ ID NO: 178288 - DNA, 33 bp, Homo sapien
tggacaaagatcaccatgacagaaattgacagt

SEQ ID NO: 178289 - DNA, 33 bp, Homo sapien
ttgtgaatattttaaaaccaggttatcagatac

SEQ ID NO: 178290 - DNA, 33 bp, Homo sapien
ttgtgaatattttaaacccaggttatcagatac

SEQ ID NO: 178291 - DNA, 33 bp, Homo sapien
cgtagtgaggagaaacagggttgggacatgctt

SEQ ID NO: 178292 - DNA, 33 bp, Homo sapien
cgtagtgaggagaaacggggttgggacatgctt

SEQ ID NO: 178293 - DNA, 33 bp, Homo sapien
ctttctggtcaggaccaaacattgctgtttcta

SEQ ID NO: 178294 - DNA, 33 bp, Homo sapien
ctttctggtcaggacccaacattgctgtttcta

SEQ ID NO: 178295 - DNA, 33 bp, Homo sapien
aatttaaaattgggccaaagtttcagacatttt

SEQ ID NO: 178296 - DNA, 33 bp, Homo sapien
aatttaaaattgggccgaagtttcagacatttt

SEQ ID NO: 178297 - DNA, 33 bp, Homo sapien
agcatggagccacaccaacctgggttaatgttc

SEQ ID NO: 178298 - DNA, 33 bp, Homo sapien
agcatggagccacaccgacctgggttaatgttc

SEQ ID NO: 178299 - DNA, 33 bp, Homo sapien
aatctagtaactattgcagcatttcagagtcta

SEQ ID NO: 178300 - DNA, 33 bp, Homo sapien
aatctagtaactattgtagcatttcagagtcta

SEQ ID NO: 178301 - DNA, 33 bp, Homo sapien
atttttttctggtggacaaattgatctgaatgt

SEQ ID NO: 178302 - DNA, 33 bp, Homo sapien
atttttttctggtggataaattgatctgaatgt

SEQ ID NO: 178303 - DNA, 33 bp, Homo sapien
tttcgtatttatggtaccttagatctcatttga

SEQ ID NO: 178304 - DNA, 33 bp, Homo sapien
tttcgtatttatggtatcttagatctcatttga

SEQ ID NO: 178305 - DNA, 33 bp, Homo sapien
gactactacttggaaactgcgttttattttcaa

SEQ ID NO: 178306 - DNA, 33 bp, Homo sapien
gactactacttggaaattgcgttttattttcaa

SEQ ID NO: 178307 - DNA, 33 bp, Homo sapien
acacatgctatgatagacctatacatcatagtt

SEQ ID NO: 178308 - DNA, 33 bp, Homo sapien
acacatgctatgataggcctatacatcatagtt

SEQ ID NO: 178309 - DNA, 33 bp, Homo sapien
gatgttgaaacagagacccaaatgaatatctag

SEQ ID NO: 178310 - DNA, 33 bp, Homo sapien
gatgttgaaacagagatccaaatgaatatctag

SEQ ID NO: 178311 - DNA, 33 bp, Homo sapien
aacattgtaggagtcccatcattggttgtctta

SEQ ID NO: 178312 - DNA, 33 bp, Homo sapien
aacattgtaggagtcctatcattggttgtctta

SEQ ID NO: 178313 - DNA, 33 bp, Homo sapien
tttgtaagataagatacagagtaactatggtag

SEQ ID NO: 178314 - DNA, 33 bp, Homo sapien
tttgtaagataagatatagagtaactatggtag

SEQ ID NO: 178315 - DNA, 33 bp, Homo sapien
aatgcaaactattgaaatcagtgacgaactcac

SEQ ID NO: 178316 - DNA, 33 bp, Homo sapien
aatgcaaactattgaagtcagtgacgaactcac

SEQ ID NO: 178317 - DNA, 33 bp, Homo sapien
aagaaatgtgcttaacaggagataaactcagtg

SEQ ID NO: 178318 - DNA, 33 bp, Homo sapien
aagaaatgtgcttaacgggagataaactcagtg

SEQ ID NO: 178319 - DNA, 33 bp, Homo sapien
gggaaggtaggtaacaaaaacgatattctgtct

SEQ ID NO: 178320 - DNA, 33 bp, Homo sapien
gggaaggtaggtaacagaaacgatattctgtct

SEQ ID NO: 178321 - DNA, 33 bp, Homo sapien
tggaagccatgatgccaattagctaacaccaga

SEQ ID NO: 178322 - DNA, 33 bp, Homo sapien
tggaagccatgatgccgattagctaacaccaga

SEQ ID NO: 178323 - DNA, 33 bp, Homo sapien
gctttgcaatggcacaagaaactaagcaacaca

SEQ ID NO: 178324 - DNA, 33 bp, Homo sapien
gctttgcaatggcacaggaaactaagcaacaca

SEQ ID NO: 178325 - DNA, 33 bp, Homo sapien
ggacctgaaatctaggcattgacaatcgagacg

SEQ ID NO: 178326 - DNA, 33 bp, Homo sapien
ggacctgaaatctaggtattgacaatcgagacg

SEQ ID NO: 178327 - DNA, 33 bp, Homo sapien
gctgtaaatacatgaacttatttctggactccc

SEQ ID NO: 178328 - DNA, 33 bp, Homo sapien
gctgtaaatacatgaatttatttctggactccc

SEQ ID NO: 178329 - DNA, 33 bp, Homo sapien
gtacaagctcaaattacatggatttggataaaa

SEQ ID NO: 178330 - DNA, 33 bp, Homo sapien
gtacaagctcaaattatatggatttggataaaa

SEQ ID NO: 178331 - DNA, 33 bp, Homo sapien
aagaaatagaatgtaaactcatgcatgaatggc

SEQ ID NO: 178332 - DNA, 33 bp, Homo sapien
aagaaatagaatgtaagctcatgcatgaatggc

SEQ ID NO: 178333 - DNA, 33 bp, Homo sapien
ggaatgtcaaccacaactctgctgtatttattt

SEQ ID NO: 178334 - DNA, 33 bp, Homo sapien
ggaatgtcaaccacaagtctgctgtatttattt

SEQ ID NO: 178335 - DNA, 33 bp, Homo sapien
ttagctcaagactaaaagctaagtaaagcacta

SEQ ID NO: 178336 - DNA, 33 bp, Homo sapien
ttagctcaagactaaaggctaagtaaagcacta

SEQ ID NO: 178337 - DNA, 33 bp, Homo sapien
atatttgagtattcgacagtgacatcaaaaagc

SEQ ID NO: 178338 - DNA, 33 bp, Homo sapien
atatttgagtattcgatagtgacatcaaaaagc

SEQ ID NO: 178339 - DNA, 33 bp, Homo sapien; identical to SEQ ID NO: 178337

SEQ ID NO: 178340 - DNA, 33 bp, Homo sapien; identical to SEQ ID NO: 178338

SEQ ID NO: 178341 - DNA, 33 bp, Homo sapien
ctttgttcctgtttgcactgttgaagatcagtt

SEQ ID NO: 178342 - DNA, 33 bp, Homo sapien
ctttgttcctgtttgctctgttgaagatcagtt

SEQ ID NO: 178343 - DNA, 33 bp, Homo sapien
atgtgcagaggacctaaaacggcaagttacttt

SEQ ID NO: 178344 - DNA, 33 bp, Homo sapien
atgtgcagaggacctacaacggcaagttacttt

SEQ ID NO: 178345 - DNA, 33 bp, Homo sapien
tttgctttttatgaaccgtggacatgacttgtg

SEQ ID NO: 178346 - DNA, 33 bp, Homo sapien
tttgctttttatgaactgtggacatgacttgtg

SEQ ID NO: 178347 - DNA, 33 bp, Homo sapien
aaagcacgtcctatcaatcatgacctgtaagtg

SEQ ID NO: 178348 - DNA, 33 bp, Homo sapien
aaagcacgtcctatcagtcatgacctgtaagtg

SEQ ID NO: 178349 - DNA, 33 bp, Homo sapien
catcaaagatattaacaatcaggaaatttgata

SEQ ID NO: 178350 - DNA, 33 bp, Homo sapien
catcaaagatattaaccatcaggaaatttgata

SEQ ID NO: 178351 - DNA, 33 bp, Homo sapien
gaatgagccttcaataaacagcataatcttaag

SEQ ID NO: 178352 - DNA, 33 bp, Homo sapien
gaatgagccttcaatagacagcataatcttaag

SEQ ID NO: 178353 - DNA, 33 bp, Homo sapien
agaccaatagagatcacgggtagcaataataca

SEQ ID NO: 178354 - DNA, 33 bp, Homo sapien
agaccaatagagatcatgggtagcaataataca

SEQ ID NO: 178355 - DNA, 33 bp, Homo sapien
gtatgaatctatccacagaatattactagaaag

SEQ ID NO: 178356 - DNA, 33 bp, Homo sapien
gtatgaatctatccacggaatattactagaaag

SEQ ID NO: 178357 - DNA, 33 bp, Homo sapien; identical to SEQ ID NO: 178355

SEQ ID NO: 178358 - DNA, 33 bp, Homo sapien; identical to SEQ ID NO: 178356

SEQ ID NO: 178359 - DNA, 33 bp, Homo sapien
gtatatgctctcattacgttcatattcaaaaga

SEQ ID NO: 178360 - DNA, 33 bp, Homo sapien
gtatatgctctcattatgttcatattcaaaaga

SEQ ID NO: 178361 - DNA, 33 bp, Homo sapien
gaagtgtgaagtaggcagaaaaaaatatgttga

SEQ ID NO: 178362 - DNA, 33 bp, Homo sapien
gaagtgtgaagtaggccgaaaaaaatatgttga

SEQ ID NO: 178363 - DNA, 33 bp, Homo sapien
agttagaacaagggtaacaagaatatcctaaca

SEQ ID NO: 178364 - DNA, 33 bp, Homo sapien
agttagaacaagggtatcaagaatatcctaaca

SEQ ID NO: 178365 - DNA, 33 bp, Homo sapien
cagggtagttaagaaaacattgtaagattatat

SEQ ID NO: 178366 - DNA, 33 bp, Homo sapien
cagggtagttaagaaagcattgtaagattatat

SEQ ID NO: 178367 - DNA, 33 bp, Homo sapien
tctaaaaataaactacaaagaagtgtgaagata

SEQ ID NO: 178368 - DNA, 33 bp, Homo sapien
tctaaaaataaactacgaagaagtgtgaagata

SEQ ID NO: 178369 - DNA, 33 bp, Homo sapien
ttgagaagagtctgtacgggtcctttgcccata

SEQ ID NO: 178370 - DNA, 33 bp, Homo sapien
ttgagaagagtctgtatgggtcctttgcccata

SEQ ID NO: 178371 - DNA, 33 bp, Homo sapien
gaagacacagtagaaaatcactctgtctttggc

SEQ ID NO: 178372 - DNA, 33 bp, Homo sapien
gaagacacagtagaaagtcactctgtctttggc

SEQ ID NO: 178373 - DNA, 33 bp, Homo sapien
aatgtatcagctacatcaaggccagagcacagt

SEQ ID NO: 178374 - DNA, 33 bp, Homo sapien
aatgtatcagctacatgaaggccagagcacagt

SEQ ID NO: 178375 - DNA, 33 bp, Homo sapien; identical to SEQ ID NO: 178373

SEQ ID NO: 178376 - DNA, 33 bp, Homo sapien; identical to SEQ ID NO: 178374

SEQ ID NO: 178377 - DNA, 33 bp, Homo sapien
ggacgcaatattttcaaccctaacagattgctg

SEQ ID NO: 178378 - DNA, 33 bp, Homo sapien
ggacgcaatattttcagccctaacagattgctg

SEQ ID NO: 178379 - DNA, 33 bp, Homo sapien; identical to SEQ ID NO: 178377

SEQ ID NO: 178380 - DNA, 33 bp, Homo sapien; identical to SEQ ID NO: 178378

SEQ ID NO: 178381 - DNA, 33 bp, Homo sapien
aacatttcccgagacacgaaatacaattaaaca

SEQ ID NO: 178382 - DNA, 33 bp, Homo sapien
aacatttcccgagacatgaaatacaattaaaca

SEQ ID NO: 178383 - DNA, 33 bp, Homo sapien
gtatttgagaaagataaccccctgatcctgata

SEQ ID NO: 178384 - DNA, 33 bp, Homo sapien
gtatttgagaaagatagccccctgatcctgata

SEQ ID NO: 178385 - DNA, 33 bp, Homo sapien
ctaaatttctagctaccgagaagttaagaatga

SEQ ID NO: 178386 - DNA, 33 bp, Homo sapien
ctaaatttctagctactgagaagttaagaatga

SEQ ID NO: 178387 - DNA, 33 bp, Homo sapien; identical to SEQ ID NO: 178385

SEQ ID NO: 178388 - DNA, 33 bp, Homo sapien; identical to SEQ ID NO: 178386

SEQ ID NO: 178389 - DNA, 33 bp, Homo sapien
tggtaaacttggtctccatattcacaaagtcag

SEQ ID NO: 178390 - DNA, 33 bp, Homo sapien
tggtaaacttggtctctatattcacaaagtcag

SEQ ID NO: 178391 - DNA, 33 bp, Homo sapien
gtatccagatagtacaccagaaaccattcccag

SEQ ID NO: 178392 - DNA, 33 bp, Homo sapien
gtatccagatagtacagcagaaaccattcccag

SEQ ID NO: 178393 - DNA, 33 bp, Homo sapien
tggaataaacaaaggcacacataaatgaatgaa

SEQ ID NO: 178394 - DNA, 33 bp, Homo sapien
tggaataaacaaaggctcacataaatgaatgaa

SEQ ID NO: 178395 - DNA, 33 bp, Homo sapien
tgcttggtatcaccaaccttcagttcgaacact

SEQ ID NO: 178396 - DNA, 33 bp, Homo sapien
tgcttggtatcaccaatcttcagttcgaacact

SEQ ID NO: 178397 - DNA, 33 bp, Homo sapien
aaaaaggcttttcttaagatagctcatgctgct

SEQ ID NO: 178398 - DNA, 33 bp, Homo sapien
aaaaaggcttttcttacgatagctcatgctgct

SEQ ID NO: 178399 - DNA, 33 bp, Homo sapien; identical to SEQ ID NO: 178397

SEQ ID NO: 178400 - DNA, 33 bp, Homo sapien; identical to SEQ ID NO: 178398

SEQ ID NO: 178401 - DNA, 33 bp, Homo sapien
gatctattaggatatcaaacttcatctctctgc

SEQ ID NO: 178402 - DNA, 33 bp, Homo sapien
gatctattaggatatccaacttcatctctctgc

SEQ ID NO: 178403 - DNA, 33 bp, Homo sapien
tcacgacacagtaataaggagctctcaggagga

SEQ ID NO: 178404 - DNA, 33 bp, Homo sapien
tcacgacacagtaatagggagctctcaggagga

SEQ ID NO: 178405 - DNA, 33 bp, Homo sapien
cagaactgtacaattacaaatttgtgaagaatg

SEQ ID NO: 178406 - DNA, 33 bp, Homo sapien
cagaactgtacaattataaatttgtgaagaatg

SEQ ID NO: 178407 - DNA, 33 bp, Homo sapien
aaaattattttggcaacgtctgtaaaaagttaa

SEQ ID NO: 178408 - DNA, 33 bp, Homo sapien
aaaattattttggcaatgtctgtaaaaagttaa

SEQ ID NO: 178409 - DNA, 33 bp, Homo sapien
tgaaaagatctcaacagtattagtcatctagga

SEQ ID NO: 178410 - DNA, 33 bp, Homo sapien
tgaaaagatctcaacattattagtcatctagga

SEQ ID NO: 178411 - DNA, 33 bp, Homo sapien
ttgtattgtattcaaacgctcatggttttggaa

SEQ ID NO: 178412 - DNA, 33 bp, Homo sapien
ttgtattgtattcaaaggctcatggttttggaa

SEQ ID NO: 178413 - DNA, 33 bp, Homo sapien
tcattcctccctcaaactgttcagaaaaagact

SEQ ID NO: 178414 - DNA, 33 bp, Homo sapien
tcattcctccctcaaattgttcagaaaaagact

SEQ ID NO: 178415 - DNA, 33 bp, Homo sapien; identical to SEQ ID NO: 178413

SEQ ID NO: 178416 - DNA, 33 bp, Homo sapien; identical to SEQ ID NO: 178414

SEQ ID NO: 178417 - DNA, 33 bp, Homo sapien
actcaaatcacagtctaacatgagtgctggata

SEQ ID NO: 178418 - DNA, 33 bp, Homo sapien
actcaaatcacagtcttacatgagtgctggata

SEQ ID NO: 178419 - DNA, 33 bp, Homo sapien
tactagaaactgaagaggcaaaattgaatccgc

SEQ ID NO: 178420 - DNA, 33 bp, Homo sapien
tactagaaactgaagatgcaaaattgaatccgc

SEQ ID NO: 178421 - DNA, 33 bp, Homo sapien
gtaacggaaaaaacgacagcatggagaccagat

SEQ ID NO: 178422 - DNA, 33 bp, Homo sapien
gtaacggaaaaaacgagagcatggagaccagat

SEQ ID NO: 178423 - DNA, 33 bp, Homo sapien
tatacataatttgacaatccttctagaatctta

SEQ ID NO: 178424 - DNA, 33 bp, Homo sapien
tatacataatttgacagtccttctagaatctta

SEQ ID NO: 178425 - DNA, 33 bp, Homo sapien
tttctgtttcagggtaaccgctaaaagagatct

SEQ ID NO: 178426 - DNA, 33 bp, Homo sapien
tttctgtttcagggtatccgctaaaagagatct

SEQ ID NO: 178427 - DNA, 33 bp, Homo sapien
ctagctaatgcattgaagtagtaaagagacagg

SEQ ID NO: 178428 - DNA, 33 bp, Homo sapien
ctagctaatgcattgaggtagtaaagagacagg

SEQ ID NO: 178429 - DNA, 33 bp, Homo sapien; identical to SEQ ID NO: 178427

SEQ ID NO: 178430 - DNA, 33 bp, Homo sapien; identical to SEQ ID NO: 178428

SEQ ID NO: 178431 - DNA, 33 bp, Homo sapien
ctagtccaattaggttcaaatcatgactctacc

SEQ ID NO: 178432 - DNA, 33 bp, Homo sapien
ctagtccaattaggtttaaatcatgactctacc

SEQ ID NO: 178433 - DNA, 33 bp, Homo sapien
gaagagtaaggaaagcaagtatctgaaaagcat

SEQ ID NO: 178434 - DNA, 33 bp, Homo sapien
gaagagtaaggaaagcgagtatctgaaaagcat

SEQ ID NO: 178435 - DNA, 33 bp, Homo sapien
atgcacactaagaatacggtacacatcatctgt

SEQ ID NO: 178436 - DNA, 33 bp, Homo sapien
atgcacactaagaatatggtacacatcatctgt

SEQ ID NO: 178437 - DNA, 33 bp, Homo sapien
gtgctttatcaaactcacctcccattccacatg

SEQ ID NO: 178438 - DNA, 33 bp, Homo sapien
gtgctttatcaaactcgcctcccattccacatg

SEQ ID NO: 178439 - DNA, 33 bp, Homo sapien
tgcactaaggtagtgacagttgaaagaaaagag

SEQ ID NO: 178440 - DNA, 33 bp, Homo sapien
tgcactaaggtagtgatagttgaaagaaaagag

SEQ ID NO: 178441 - DNA, 33 bp, Homo sapien
tttccaagcttactgaacaatgggaatttagtt

SEQ ID NO: 178442 - DNA, 33 bp, Homo sapien
tttccaagcttactgagcaatgggaatttagtt

SEQ ID NO: 178443 - DNA, 33 bp, Homo sapien
agtaggccaagtatgaaagcaacctgcaatgtt

SEQ ID NO: 178444 - DNA, 33 bp, Homo sapien
agtaggccaagtatgagagcaacctgcaatgtt

SEQ ID NO: 178445 - DNA, 33 bp, Homo sapien
ctcattttgctacaataacttataggtctatac

SEQ ID NO: 178446 - DNA, 33 bp, Homo sapien
ctcattttgctacaatgacttataggtctatac

SEQ ID NO: 178447 - DNA, 33 bp, Homo sapien
tttccatccttatatcagaatgtctagcacaca

SEQ ID NO: 178448 - DNA, 33 bp, Homo sapien
tttccatccttatatctgaatgtctagcacaca

SEQ ID NO: 178449 - DNA, 33 bp, Homo sapien
ggacgccctctccgtacgtattagtctggaaaa

SEQ ID NO: 178450 - DNA, 33 bp, Homo sapien
ggacgccctctccgtatgtattagtctggaaaa

SEQ ID NO: 178451 - DNA, 33 bp, Homo sapien
ataaataagaggaaaaattgattactgacctaa

SEQ ID NO: 178452 - DNA, 33 bp, Homo sapien
ataaataagaggaaaatttgattactgacctaa

SEQ ID NO: 178453 - DNA, 33 bp, Homo sapien
attaaatagccaaacaaaggaagcaatcaaaat

SEQ ID NO: 178454 - DNA, 33 bp, Homo sapien
attaaatagccaaacagaggaagcaatcaaaat

SEQ ID NO: 178455 - DNA, 33 bp, Homo sapien
caacaatcattttgcacagttgtataagcccgt

SEQ ID NO: 178456 - DNA, 33 bp, Homo sapien
caacaatcattttgcatagttgtataagcccgt

SEQ ID NO: 178457 - DNA, 33 bp, Homo sapien
aagttgctgttcttcaagccttacagaataatc

SEQ ID NO: 178458 - DNA, 33 bp, Homo sapien
aagttgctgttcttcaggccttacagaataatc

SEQ ID NO: 178459 - DNA, 33 bp, Homo sapien
attccaaagggggccacctctaactctattctt

SEQ ID NO: 178460 - DNA, 33 bp, Homo sapien
attccaaagggggccatctctaactctattctt

SEQ ID NO: 178461 - DNA, 33 bp, Homo sapien
caggaactgattatgaaagagctaagttgtgag

SEQ ID NO: 178462 - DNA, 33 bp, Homo sapien
caggaactgattatgagagagctaagttgtgag

SEQ ID NO: 178463 - DNA, 33 bp, Homo sapien
agatgggaggcagcacagatctttagagctatc

SEQ ID NO: 178464 - DNA, 33 bp, Homo sapien
agatgggaggcagcacggatctttagagctatc

SEQ ID NO: 178465 - DNA, 33 bp, Homo sapien
ggagttgaaagaccaacgaatgacttggacaag

SEQ ID NO: 178466 - DNA, 33 bp, Homo sapien
ggagttgaaagaccaatgaatgacttggacaag

SEQ ID NO: 178467 - DNA, 33 bp, Homo sapien
taaatattggattaggccaaagaagggggaaaa

SEQ ID NO: 178468 - DNA, 33 bp, Homo sapien
taaatattggattaggtcaaagaagggggaaaa

SEQ ID NO: 178469 - DNA, 33 bp, Homo sapien
tgatggacgaattagcagcaagtaaggtaactg

SEQ ID NO: 178470 - DNA, 33 bp, Homo sapien
tgatggacgaattagctgcaagtaaggtaactg

SEQ ID NO: 178471 - DNA, 33 bp, Homo sapien
tgacacatttaaagaaccactagactaaaaaca

SEQ ID NO: 178472 - DNA, 33 bp, Homo sapien
tgacacatttaaagaagcactagactaaaaaca

SEQ ID NO: 178473 - DNA, 33 bp, Homo sapien
aatgtataaatgctgacagtgacagataacagg

SEQ ID NO: 178474 - DNA, 33 bp, Homo sapien
aatgtataaatgctgatagtgacagataacagg

SEQ ID NO: 178475 - DNA, 33 bp, Homo sapien
atcttccacccttagaatcagcatttctgcctt

SEQ ID NO: 178476 - DNA, 33 bp, Homo sapien
atcttccacccttagagtcagcatttctgcctt

SEQ ID NO: 178477 - DNA, 33 bp, Homo sapien
aactctataggaaagaagtccaaataaagagca

SEQ ID NO: 178478 - DNA, 33 bp, Homo sapien
aactctataggaaagaggtccaaataaagagca

SEQ ID NO: 178479 - DNA, 33 bp, Homo sapien
tttctctgacattccaatgaagattacctactc

SEQ ID NO: 178480 - DNA, 33 bp, Homo sapien
tttctctgacattccagtgaagattacctactc

SEQ ID NO: 178481 - DNA, 33 bp, Homo sapien
gtaaatgtgtaacttcacaatgtttaacatgat

SEQ ID NO: 178482 - DNA, 33 bp, Homo sapien
gtaaatgtgtaacttctcaatgtttaacatgat

SEQ ID NO: 178483 - DNA, 33 bp, Homo sapien
gcattatacattgataaccccaaactattttcc

SEQ ID NO: 178484 - DNA, 33 bp, Homo sapien
gcattatacattgatacccccaaactattttcc

SEQ ID NO: 178485 - DNA, 33 bp, Homo sapien
acctcagtgctataccaatcatagtgaaactga

SEQ ID NO: 178486 - DNA, 33 bp, Homo sapien
acctcagtgctataccgatcatagtgaaactga

SEQ ID NO: 178487 - DNA, 33 bp, Homo sapien
ctgctgtttcttctaacagtcttgctataaata

SEQ ID NO: 178488 - DNA, 33 bp, Homo sapien
ctgctgtttcttctaatagtcttgctataaata

SEQ ID NO: 178489 - DNA, 33 bp, Homo sapien
atttaaatagtctgtacgtggagatgtttatat

SEQ ID NO: 178490 - DNA, 33 bp, Homo sapien
atttaaatagtctgtatgtggagatgtttatat

SEQ ID NO: 178491 - DNA, 33 bp, Homo sapien
tatcaactgtcactttgaaagcaataatagcaa

SEQ ID NO: 178492 - DNA, 33 bp, Homo sapien
tatcaactgtcacttttaaagcaataatagcaa

SEQ ID NO: 178493 - DNA, 33 bp, Homo sapien
ggatgtgggtaacagacagggacaccagacaaa

SEQ ID NO: 178494 - DNA, 33 bp, Homo sapien
ggatgtgggtaacagatagggacaccagacaaa

SEQ ID NO: 178495 - DNA, 33 bp, Homo sapien
agaacacccgaaatggaaaatacatggctgaat

SEQ ID NO: 178496 - DNA, 33 bp, Homo sapien
agaacacccgaaatggtaaatacatggctgaat

SEQ ID NO: 178497 - DNA, 33 bp, Homo sapien
aaatcacacatcattacctactagggaaataca

SEQ ID NO: 178498 - DNA, 33 bp, Homo sapien
aaatcacacatcattatctactagggaaataca

SEQ ID NO: 178499 - DNA, 33 bp, Homo sapien
tctctctgcaactccacacttttcgtttcagtt

SEQ ID NO: 178500 - DNA, 33 bp, Homo sapien
tctctctgcaactccatacttttcgtttcagtt

SEQ ID NO: 178501 - DNA, 33 bp, Homo sapien
ataaggagataaatgcacagaatttagcagaga

SEQ ID NO: 178502 - DNA, 33 bp, Homo sapien
ataaggagataaatgcgcagaatttagcagaga

SEQ ID NO: 178503 - DNA, 33 bp, Homo sapien
aggaaaatataggataaggagacattgtgaaca

SEQ ID NO: 178504 - DNA, 33 bp, Homo sapien
aggaaaatataggatacggagacattgtgaaca

SEQ ID NO: 178505 - DNA, 33 bp, Homo sapien
tggtggggtggcgaaacggactcttttagattt

SEQ ID NO: 178506 - DNA, 33 bp, Homo sapien
tggtggggtggcgaaatggactcttttagattt

SEQ ID NO: 178507 - DNA, 33 bp, Homo sapien
tttctcgtatttggacagctaggtctctagcaa

SEQ ID NO: 178508 - DNA, 33 bp, Homo sapien
tttctcgtatttggacggctaggtctctagcaa

SEQ ID NO: 178509 - DNA, 33 bp, Homo sapien
tatgcatcatagtctgcaatggttagagtgaaa

SEQ ID NO: 178510 - DNA, 33 bp, Homo sapien
tatgcatcatagtctgtaatggttagagtgaaa

SEQ ID NO: 178511 - DNA, 33 bp, Homo sapien
ctctattgcaatcactcagggagactaggaaga

SEQ ID NO: 178512 - DNA, 33 bp, Homo sapien
ctctattgcaatcacttagggagactaggaaga

SEQ ID NO: 178513 - DNA, 33 bp, Homo sapien
ccaccacgcatggcccagaatttcttaaatgtg

SEQ ID NO: 178514 - DNA, 33 bp, Homo sapien
ccaccacgcatggcccggaatttcttaaatgtg

SEQ ID NO: 178515 - DNA, 33 bp, Homo sapien
tattaatgaatagttacggaatggttgactgag

SEQ ID NO: 178516 - DNA, 33 bp, Homo sapien
tattaatgaatagttatggaatggttgactgag

SEQ ID NO: 178517 - DNA, 33 bp, Homo sapien
aggaagcttagggttacagtgtcagaatactgg

SEQ ID NO: 178518 - DNA, 33 bp, Homo sapien
aggaagcttagggttatagtgtcagaatactgg

SEQ ID NO: 178519 - DNA, 33 bp, Homo sapien
ttcttagcaacagaaaaaacaggagaacttctc

SEQ ID NO: 178520 - DNA, 33 bp, Homo sapien
ttcttagcaacagaaagaacaggagaacttctc

SEQ ID NO: 178521 - DNA, 33 bp, Homo sapien
tgtaatttatgtatccaccttacctgaatatta

SEQ ID NO: 178522 - DNA, 33 bp, Homo sapien
tgtaatttatgtatccgccttacctgaatatta

SEQ ID NO: 178523 - DNA, 33 bp, Homo sapien
agacctcagctttgccacttctcagttgtgtgg

SEQ ID NO: 178524 - DNA, 33 bp, Homo sapien
agacctcagctttgccgcttctcagttgtgtgg

SEQ ID NO: 178525 - DNA, 33 bp, Homo sapien
gcaaagctgaggtctacgctcagatgtgtctgt

SEQ ID NO: 178526 - DNA, 33 bp, Homo sapien
gcaaagctgaggtctatgctcagatgtgtctgt

SEQ ID NO: 178527 - DNA, 33 bp, Homo sapien
ttggtccaactaaacactatcttggaatctttt

SEQ ID NO: 178528 - DNA, 33 bp, Homo sapien
ttggtccaactaaacagtatcttggaatctttt

SEQ ID NO: 178529 - DNA, 33 bp, Homo sapien
ctcttgagtcaaccctcagagacaaactctcag

SEQ ID NO: 178530 - DNA, 33 bp, Homo sapien
ctcttgagtcaacccttagagacaaactctcag

SEQ ID NO: 178531 - DNA, 33 bp, Homo sapien
ccatcagtttcctcatcacagtgtggagataaa

SEQ ID NO: 178532 - DNA, 33 bp, Homo sapien
ccatcagtttcctcatgacagtgtggagataaa

SEQ ID NO: 178533 - DNA, 33 bp, Homo sapien
tccagatctttaaaaacggctacagctttgggc

SEQ ID NO: 178534 - DNA, 33 bp, Homo sapien
tccagatctttaaaaatggctacagctttgggc

SEQ ID NO: 178535 - DNA, 33 bp, Homo sapien
ataatgctcactatgacgtataatatggaaata

SEQ ID NO: 178536 - DNA, 33 bp, Homo sapien
ataatgctcactatgatgtataatatggaaata

SEQ ID NO: 178537 - DNA, 33 bp, Homo sapien
aaaaaaaatttgccaccgagtagacttaaaaaa

SEQ ID NO: 178538 - DNA, 33 bp, Homo sapien
aaaaaaaatttgccactgagtagacttaaaaaa

SEQ ID NO: 178539 - DNA, 33 bp, Homo sapien
ttgttagctggcacaaatcaactctgtgtcttg

SEQ ID NO: 178540 - DNA, 33 bp, Homo sapien
ttgttagctggcacaagtcaactctgtgtcttg

SEQ ID NO: 178541 - DNA, 33 bp, Homo sapien
gtgttatttaaaacaacgtttatcaatagctct

SEQ ID NO: 178542 - DNA, 33 bp, Homo sapien
gtgttatttaaaacaatgtttatcaatagctct

SEQ ID NO: 178543 - DNA, 33 bp, Homo sapien
tctatactttcactaacaccatctgagaatgcc

SEQ ID NO: 178544 - DNA, 33 bp, Homo sapien
tctatactttcactaataccatctgagaatgcc

SEQ ID NO: 178545 - DNA, 33 bp, Homo sapien
cctgccaagtggcctcagaagtggaagaccacc

SEQ ID NO: 178546 - DNA, 33 bp, Homo sapien
cctgccaagtggcctcggaagtggaagaccacc

SEQ ID NO: 178547 - DNA, 33 bp, Homo sapien
ataaatcacatccctaagttcattagaatatcc

SEQ ID NO: 178548 - DNA, 33 bp, Homo sapien
ataaatcacatccctaggttcattagaatatcc

SEQ ID NO: 178549 - DNA, 33 bp, Homo sapien
aacatacctatggatgcatttcatcagcttttt

SEQ ID NO: 178550 - DNA, 33 bp, Homo sapien
aacatacctatggatgtatttcatcagcttttt

SEQ ID NO: 178551 - DNA, 33 bp, Homo sapien
aaggtgaagagaccgcacagtcagtaagtcatt

SEQ ID NO: 178552 - DNA, 33 bp, Homo sapien
aaggtgaagagaccgcgcagtcagtaagtcatt

SEQ ID NO: 178553 - DNA, 33 bp, Homo sapien
gccaggtaacactacaaatgattccactatcct

SEQ ID NO: 178554 - DNA, 33 bp, Homo sapien
gccaggtaacactacatatgattccactatcct

SEQ ID NO: 178555 - DNA, 33 bp, Homo sapien
gggaggttttgcaaaagctttgggagaggatta

SEQ ID NO: 178556 - DNA, 33 bp, Homo sapien
gggaggttttgcaaaatctttgggagaggatta

SEQ ID NO: 178557 - DNA, 33 bp, Homo sapien
tagcaggcataaaaacaattttaaccttcttat

SEQ ID NO: 178558 - DNA, 33 bp, Homo sapien
tagcaggcataaaaacgattttaaccttcttat

SEQ ID NO: 178559 - DNA, 33 bp, Homo sapien
ctatctgaaatattgcaattcaaaacaagctct

SEQ ID NO: 178560 - DNA, 33 bp, Homo sapien
ctatctgaaatattgcgattcaaaacaagctct

SEQ ID NO: 178561 - DNA, 33 bp, Homo sapien
agctctgaatcctgagaaaacttttaaagatat

SEQ ID NO: 178562 - DNA, 33 bp, Homo sapien
agctctgaatcctgaggaaacttttaaagatat

SEQ ID NO: 178563 - DNA, 33 bp, Homo sapien
catggaccaaagatctaacaaaatgctaatcaa

SEQ ID NO: 178564 - DNA, 33 bp, Homo sapien
catggaccaaagatctgacaaaatgctaatcaa

SEQ ID NO: 178565 - DNA, 33 bp, Homo sapien
ttaagtgccatgctacagaatttggacattata

SEQ ID NO: 178566 - DNA, 33 bp, Homo sapien
ttaagtgccatgctacggaatttggacattata

SEQ ID NO: 178567 - DNA, 33 bp, Homo sapien
ctccttaacgtataaccgacagcgctgcacatt

SEQ ID NO: 178568 - DNA, 33 bp, Homo sapien
ctccttaacgtataactgacagcgctgcacatt

SEQ ID NO: 178569 - DNA, 33 bp, Homo sapien
tagtactctcacaagacgggatattatgtgaca

SEQ ID NO: 178570 - DNA, 33 bp, Homo sapien
tagtactctcacaagatgggatattatgtgaca

SEQ ID NO: 178571 - DNA, 33 bp, Homo sapien
ttctgcattgagtaacaattgccttcagagttt

SEQ ID NO: 178572 - DNA, 33 bp, Homo sapien
ttctgcattgagtaacgattgccttcagagttt

SEQ ID NO: 178573 - DNA, 33 bp, Homo sapien
tcccctagaaagatggaaagactatcaatttga

SEQ ID NO: 178574 - DNA, 33 bp, Homo sapien
tcccctagaaagatggcaagactatcaatttga

SEQ ID NO: 178575 - DNA, 33 bp, Homo sapien
acttcttgaaggcataacaatggaaactatcca

SEQ ID NO: 178576 - DNA, 33 bp, Homo sapien
acttcttgaaggcatatcaatggaaactatcca

SEQ ID NO: 178577 - DNA, 33 bp, Homo sapien
tgtgtgcatgtctgcaaggatataagtttttct

SEQ ID NO: 178578 - DNA, 33 bp, Homo sapien
tgtgtgcatgtctgcatggatataagtttttct

SEQ ID NO: 178579 - DNA, 33 bp, Homo sapien
actcctgttgtttcccaattcacattttcagtt

SEQ ID NO: 178580 - DNA, 33 bp, Homo sapien
actcctgttgtttcccgattcacattttcagtt

SEQ ID NO: 178581 - DNA, 33 bp, Homo sapien
ttttatcatgaaataaagttgggttttatcaaa

SEQ ID NO: 178582 - DNA, 33 bp, Homo sapien
ttttatcatgaaataatgttgggttttatcaaa

SEQ ID NO: 178583 - DNA, 33 bp, Homo sapien
tcttccctaggacagaacaaataaaagggagaa

SEQ ID NO: 178584 - DNA, 33 bp, Homo sapien
tcttccctaggacagatcaaataaaagggagaa

SEQ ID NO: 178585 - DNA, 33 bp, Homo sapien
agctgtccccgtctccaatacttttcagcacag

SEQ ID NO: 178586 - DNA, 33 bp, Homo sapien
agctgtccccgtctccgatacttttcagcacag

SEQ ID NO: 178587 - DNA, 33 bp, Homo sapien
atggggttggacattccattttgtgaccatagg

SEQ ID NO: 178588 - DNA, 33 bp, Homo sapien
atggggttggacattcgattttgtgaccatagg

SEQ ID NO: 178589 - DNA, 33 bp, Homo sapien
cctttgcttctgggcactgatatcttggacatt

SEQ ID NO: 178590 - DNA, 33 bp, Homo sapien
cctttgcttctgggcattgatatcttggacatt

SEQ ID NO: 178591 - DNA, 33 bp, Homo sapien
ttagcttacgtgcttaactctataccaggtgag

SEQ ID NO: 178592 - DNA, 33 bp, Homo sapien
ttagcttacgtgcttatctctataccaggtgag

SEQ ID NO: 178593 - DNA, 33 bp, Homo sapien
taacatttagataaaaacaaaagccaattcaga

SEQ ID NO: 178594 - DNA, 33 bp, Homo sapien
taacatttagataaaatcaaaagccaattcaga

SEQ ID NO: 178595 - DNA, 33 bp, Homo sapien
gacaggaggtcttgaccggagcagagcagagga

SEQ ID NO: 178596 - DNA, 33 bp, Homo sapien
gacaggaggtcttgactggagcagagcagagga

SEQ ID NO: 178597 - DNA, 33 bp, Homo sapien
gtctactaactgtatagcatttcttttataaaa

SEQ ID NO: 178598 - DNA, 33 bp, Homo sapien
gtctactaactgtatatcatttcttttataaaa

SEQ ID NO: 178599 - DNA, 33 bp, Homo sapien
agatgctcagcaaataagggataagtgaacaaa

SEQ ID NO: 178600 - DNA, 33 bp, Homo sapien
agatgctcagcaaatacgggataagtgaacaaa

SEQ ID NO: 178601 - DNA, 33 bp, Homo sapien
atttagtcaattgtgcacacttatctacaagag

SEQ ID NO: 178602 - DNA, 33 bp, Homo sapien
atttagtcaattgtgcgcacttatctacaagag

SEQ ID NO: 178603 - DNA, 33 bp, Homo sapien
aaaataaatgtatgcacggttcttagtacttaa

SEQ ID NO: 178604 - DNA, 33 bp, Homo sapien
aaaataaatgtatgcatggttcttagtacttaa

SEQ ID NO: 178605 - DNA, 33 bp, Homo sapien
gttgatttgagtatcaagttgatgaacacatat

SEQ ID NO: 178606 - DNA, 33 bp, Homo sapien
gttgatttgagtatcatgttgatgaacacatat

SEQ ID NO: 178607 - DNA, 33 bp, Homo sapien
agggccatgtagggaaagatggcagcctattta

SEQ ID NO: 178608 - DNA, 33 bp, Homo sapien
agggccatgtagggaaggatggcagcctattta

SEQ ID NO: 178609 - DNA, 33 bp, Homo sapien
tttgttttttctcgtacgctacctctgacaaat

SEQ ID NO: 178610 - DNA, 33 bp, Homo sapien
tttgttttttctcgtatgctacctctgacaaat

SEQ ID NO: 178611 - DNA, 33 bp, Homo sapien
cttttctaaagagtaaatctacttaagcacata

SEQ ID NO: 178612 - DNA, 33 bp, Homo sapien
cttttctaaagagtaattctacttaagcacata

SEQ ID NO: 178613 - DNA, 33 bp, Homo sapien
agcctaaggaaaatacgaatggttcagctcttc

SEQ ID NO: 178614 - DNA, 33 bp, Homo sapien
agcctaaggaaaatactaatggttcagctcttc

SEQ ID NO: 178615 - DNA, 33 bp, Homo sapien
ttcagattctaaatgaacctttcttaaattcac

SEQ ID NO: 178616 - DNA, 33 bp, Homo sapien
ttcagattctaaatgaccctttcttaaattcac

SEQ ID NO: 178617 - DNA, 33 bp, Homo sapien
cctagttttatgatggaatctacactagaattt

SEQ ID NO: 178618 - DNA, 33 bp, Homo sapien
cctagttttatgatgggatctacactagaattt

SEQ ID NO: 178619 - DNA, 33 bp, Homo sapien
aacaaaaactctatgacatcgagagcataattt

SEQ ID NO: 178620 - DNA, 33 bp, Homo sapien
aacaaaaactctatgatatcgagagcataattt

SEQ ID NO: 178621 - DNA, 33 bp, Homo sapien
aaggcccatgtggcagaagtgtactgggctagg

SEQ ID NO: 178622 - DNA, 33 bp, Homo sapien
aaggcccatgtggcaggagtgtactgggctagg

SEQ ID NO: 178623 - DNA, 33 bp, Homo sapien
attctaagtacattctcagaacagttattcaaa

SEQ ID NO: 178624 - DNA, 33 bp, Homo sapien
attctaagtacattctgagaacagttattcaaa

SEQ ID NO: 178625 - DNA, 33 bp, Homo sapien
atatctttccaaaacactctgatctaagtacat

SEQ ID NO: 178626 - DNA, 33 bp, Homo sapien
atatctttccaaaacattctgatctaagtacat

SEQ ID NO: 178627 - DNA, 33 bp, Homo sapien
ctgtttagttcaaggacacatcatactagctgt

SEQ ID NO: 178628 - DNA, 33 bp, Homo sapien
ctgtttagttcaaggatacatcatactagctgt

SEQ ID NO: 178629 - DNA, 33 bp, Homo sapien
agcaattgtcaaaaaacatgatgattggcttct

SEQ ID NO: 178630 - DNA, 33 bp, Homo sapien
agcaattgtcaaaaaatatgatgattggcttct

SEQ ID NO: 178631 - DNA, 33 bp, Homo sapien
attgagaaattattgggataagctatgtgaatt

SEQ ID NO: 178632 - DNA, 33 bp, Homo sapien
attgagaaattattggtataagctatgtgaatt

SEQ ID NO: 178633 - DNA, 33 bp, Homo sapien
ttctcaggttattcaacgttttcaaaaacaaag

SEQ ID NO: 178634 - DNA, 33 bp, Homo sapien
ttctcaggttattcaaggttttcaaaaacaaag

SEQ ID NO: 178635 - DNA, 33 bp, Homo sapien
ttgttatagatgttgaagttatagatcttgatc

SEQ ID NO: 178636 - DNA, 33 bp, Homo sapien
ttgttatagatgttgaggttatagatcttgatc

SEQ ID NO: 178637 - DNA, 33 bp, Homo sapien
tggagacagcaaatgaaataatacaaggaaaat

SEQ ID NO: 178638 - DNA, 33 bp, Homo sapien
tggagacagcaaatgagataatacaaggaaaat

SEQ ID NO: 178639 - DNA, 33 bp, Homo sapien
ggaacaaagtgctaagactctttatgtatctgc

SEQ ID NO: 178640 - DNA, 33 bp, Homo sapien
ggaacaaagtgctaaggctctttatgtatctgc

SEQ ID NO: 178641 - DNA, 33 bp, Homo sapien
agattatatggttaaactgcatacatttgtagt

SEQ ID NO: 178642 - DNA, 33 bp, Homo sapien
agattatatggttaaagtgcatacatttgtagt

SEQ ID NO: 178643 - DNA, 33 bp, Homo sapien
tttgcctgtgtactcaatccccctactggaggt

SEQ ID NO: 178644 - DNA, 33 bp, Homo sapien
tttgcctgtgtactcagtccccctactggaggt

SEQ ID NO: 178645 - DNA, 33 bp, Homo sapien
gagaccccaagaggaaagaattgagctatactt

SEQ ID NO: 178646 - DNA, 33 bp, Homo sapien
gagaccccaagaggaaggaattgagctatactt

SEQ ID NO: 178647 - DNA, 33 bp, Homo sapien
ctcacctcaacagaaacaaattcctagactgcc

SEQ ID NO: 178648 - DNA, 33 bp, Homo sapien
ctcacctcaacagaaataaattcctagactgcc

SEQ ID NO: 178649 - DNA, 33 bp, Homo sapien
gcaagtgtcagaatctcacttctttctactcaa

SEQ ID NO: 178650 - DNA, 33 bp, Homo sapien
gcaagtgtcagaatcttacttctttctactcaa

SEQ ID NO: 178651 - DNA, 33 bp, Homo sapien
aggtgaaggacttaataatataggtcatgggag

SEQ ID NO: 178652 - DNA, 33 bp, Homo sapien
aggtgaaggacttaattatataggtcatgggag

SEQ ID NO: 178653 - DNA, 33 bp, Homo sapien
ggcctgcttgacagcacataaaaacagtcccat

SEQ ID NO: 178654 - DNA, 33 bp, Homo sapien
ggcctgcttgacagcatataaaaacagtcccat

SEQ ID NO: 178655 - DNA, 33 bp, Homo sapien
tcctaaatacctgacacagtatactagccagtg

SEQ ID NO: 178656 - DNA, 33 bp, Homo sapien
tcctaaatacctgacatagtatactagccagtg

SEQ ID NO: 178657 - DNA, 33 bp, Homo sapien
gtgggttcagaggatgaaaatcttaagctttgg

SEQ ID NO: 178658 - DNA, 33 bp, Homo sapien
gtgggttcagaggatgcaaatcttaagctttgg

SEQ ID NO: 178659 - DNA, 33 bp, Homo sapien
tgtctatcataacaaacggacagaatagacact

SEQ ID NO: 178660 - DNA, 33 bp, Homo sapien
tgtctatcataacaaatggacagaatagacact

SEQ ID NO: 178661 - DNA, 33 bp, Homo sapien
attatctatctccacacgaattggcattgtttt

SEQ ID NO: 178662 - DNA, 33 bp, Homo sapien
attatctatctccacatgaattggcattgtttt

SEQ ID NO: 178663 - DNA, 33 bp, Homo sapien
gaatcttctgtatttaaaaaacaattttccaat

SEQ ID NO: 178664 - DNA, 33 bp, Homo sapien
gaatcttctgtatttagaaaacaattttccaat

SEQ ID NO: 178665 - DNA, 33 bp, Homo sapien
gagctgattaaagttaccttattgccaagaagg

SEQ ID NO: 178666 - DNA, 33 bp, Homo sapien
gagctgattaaagttagcttattgccaagaagg

SEQ ID NO: 178667 - DNA, 33 bp, Homo sapien
cattaattatgcatccaatgttgtgtattttaa

SEQ ID NO: 178668 - DNA, 33 bp, Homo sapien
cattaattatgcatccgatgttgtgtattttaa

SEQ ID NO: 178669 - DNA, 33 bp, Homo sapien
tggaccttcgtgtactcagagacaaatattggt

SEQ ID NO: 178670 - DNA, 33 bp, Homo sapien
tggaccttcgtgtactgagagacaaatattggt

SEQ ID NO: 178671 - DNA, 33 bp, Homo sapien
tttatttgaatcctcacgtgaatttcatcttta

SEQ ID NO: 178672 - DNA, 33 bp, Homo sapien
tttatttgaatcctcatgtgaatttcatcttta

SEQ ID NO: 178673 - DNA, 33 bp, Homo sapien
tatgaagtattatagaaaaacagtgctggttag

SEQ ID NO: 178674 - DNA, 33 bp, Homo sapien
tatgaagtattatagagaaacagtgctggttag

SEQ ID NO: 178675 - DNA, 33 bp, Homo sapien
attatggcattattaccacagcccaaagttatg

SEQ ID NO: 178676 - DNA, 33 bp, Homo sapien
attatggcattattactacagcccaaagttatg

SEQ ID NO: 178677 - DNA, 33 bp, Homo sapien
aaggcagaactaggaaaatgattcagggctttt

SEQ ID NO: 178678 - DNA, 33 bp, Homo sapien
aaggcagaactaggaatatgattcagggctttt

SEQ ID NO: 178679 - DNA, 33 bp, Homo sapien
ctatgaagggggtttaacaagagcagtcattaa

SEQ ID NO: 178680 - DNA, 33 bp, Homo sapien
ctatgaagggggtttaccaagagcagtcattaa

SEQ ID NO: 178681 - DNA, 33 bp, Homo sapien
gattggcccagacagtaaaaatcatagctagca

SEQ ID NO: 178682 - DNA, 33 bp, Homo sapien
gattggcccagacagtgaaaatcatagctagca

SEQ ID NO: 178683 - DNA, 33 bp, Homo sapien
catataatgtgaaacaaatgaccagtactatac

SEQ ID NO: 178684 - DNA, 33 bp, Homo sapien
catataatgtgaaacagatgaccagtactatac

SEQ ID NO: 178685 - DNA, 33 bp, Homo sapien
tgaagatgtattttaactggtgtaatataatat

SEQ ID NO: 178686 - DNA, 33 bp, Homo sapien
tgaagatgtattttaagtggtgtaatataatat

SEQ ID NO: 178687 - DNA, 33 bp, Homo sapien
ttaaaatacatcttcaataatccttacattaag

SEQ ID NO: 178688 - DNA, 33 bp, Homo sapien
ttaaaatacatcttcagtaatccttacattaag

SEQ ID NO: 178689 - DNA, 33 bp, Homo sapien
ataattattgaacacccaaaatcaactacagga

SEQ ID NO: 178690 - DNA, 33 bp, Homo sapien
ataattattgaacacctaaaatcaactacagga

SEQ ID NO: 178691 - DNA, 33 bp, Homo sapien
cttcgaaacaaaaccacgttaggtcaatttcct

SEQ ID NO: 178692 - DNA, 33 bp, Homo sapien
cttcgaaacaaaaccatgttaggtcaatttcct

SEQ ID NO: 178693 - DNA, 33 bp, Homo sapien
ggagacattgctctagaaaaagtatttgtcaaa

SEQ ID NO: 178694 - DNA, 33 bp, Homo sapien
ggagacattgctctaggaaaagtatttgtcaaa

SEQ ID NO: 178695 - DNA, 33 bp, Homo sapien
gaatgattgctgtaatgatatcaaaagacaaaa

SEQ ID NO: 178696 - DNA, 33 bp, Homo sapien
gaatgattgctgtaattatatcaaaagacaaaa

SEQ ID NO: 178697 - DNA, 33 bp, Homo sapien
ttcagtaaatctgaacagcttcttttccaagta

SEQ ID NO: 178698 - DNA, 33 bp, Homo sapien
ttcagtaaatctgaactgcttcttttccaagta

SEQ ID NO: 178699 - DNA, 33 bp, Homo sapien
atttggatccgaatagcacacaaatttattggt

SEQ ID NO: 178700 - DNA, 33 bp, Homo sapien
atttggatccgaatagtacacaaatttattggt

SEQ ID NO: 178701 - DNA, 33 bp, Homo sapien
gaccttttctggttaccgcaatccaataaaact

SEQ ID NO: 178702 - DNA, 33 bp, Homo sapien
gaccttttctggttactgcaatccaataaaact

SEQ ID NO: 178703 - DNA, 33 bp, Homo sapien
aaagaggccttaacctaaactgagacagaatta

SEQ ID NO: 178704 - DNA, 33 bp, Homo sapien
aaagaggccttaacctgaactgagacagaatta

SEQ ID NO: 178705 - DNA, 33 bp, Homo sapien
caagctcatgtcaaacacctaggaaagaaaact

SEQ ID NO: 178706 - DNA, 33 bp, Homo sapien
caagctcatgtcaaacgcctaggaaagaaaact

SEQ ID NO: 178707 - DNA, 33 bp, Homo sapien
attcctgccaattaacccaagcttcccatttca

SEQ ID NO: 178708 - DNA, 33 bp, Homo sapien
attcctgccaattaactcaagcttcccatttca

SEQ ID NO: 178709 - DNA, 33 bp, Homo sapien
gatttgggtaggtaaaagaaaatcacagtcaga

SEQ ID NO: 178710 - DNA, 33 bp, Homo sapien
gatttgggtaggtaaaggaaaatcacagtcaga

SEQ ID NO: 178711 - DNA, 33 bp, Homo sapien; identical to SEQ ID NO: 178709

SEQ ID NO: 178712 - DNA, 33 bp, Homo sapien; identical to SEQ ID NO: 178710

SEQ ID NO: 178713 - DNA, 33 bp, Homo sapien
acaggcctcgatttacctgtggtttccctttct

SEQ ID NO: 178714 - DNA, 33 bp, Homo sapien
acaggcctcgatttacttgtggtttccctttct

SEQ ID NO: 178715 - DNA, 33 bp, Homo sapien
gttgctctatcaaagaataagtagctactgcca

SEQ ID NO: 178716 - DNA, 33 bp, Homo sapien
gttgctctatcaaagagtaagtagctactgcca

SEQ ID NO: 178717 - DNA, 33 bp, Homo sapien
ctgatagtggcctctacgataaatttaaaacca

SEQ ID NO: 178718 - DNA, 33 bp, Homo sapien
ctgatagtggcctctatgataaatttaaaacca

SEQ ID NO: 178719 - DNA, 33 bp, Homo sapien
ttttttttacattttaagtcaatggtatctgca

SEQ ID NO: 178720 - DNA, 33 bp, Homo sapien
ttttttttacattttaggtcaatggtatctgca

SEQ ID NO: 178721 - DNA, 33 bp, Homo sapien
aacagtgttgaactgaaactaatagctgtaaca

SEQ ID NO: 178722 - DNA, 33 bp, Homo sapien
aacagtgttgaactgagactaatagctgtaaca

SEQ ID NO: 178723 - DNA, 33 bp, Homo sapien
atatactctgaccctacggaatgtttggctaga

SEQ ID NO: 178724 - DNA, 33 bp, Homo sapien
atatactctgaccctatggaatgtttggctaga

SEQ ID NO: 178725 - DNA, 33 bp, Homo sapien
tagtatgacaaatgcaaccaagtccaaatcagc

SEQ ID NO: 178726 - DNA, 33 bp, Homo sapien
tagtatgacaaatgcatccaagtccaaatcagc

SEQ ID NO: 178727 - DNA, 33 bp, Homo sapien
tgtgtagcataaaaaaattgggatcagggtaaa

SEQ ID NO: 178728 - DNA, 33 bp, Homo sapien
tgtgtagcataaaaaatttgggatcagggtaaa

SEQ ID NO: 178729 - DNA, 33 bp, Homo sapien
agttccctggaagagagaacttatgaactgagg

SEQ ID NO: 178730 - DNA, 33 bp, Homo sapien
agttccctggaagagataacttatgaactgagg

SEQ ID NO: 178731 - DNA, 33 bp, Homo sapien
ttaggaattgaatgacagagacattttaaatct

SEQ ID NO: 178732 - DNA, 33 bp, Homo sapien
ttaggaattgaatgacggagacattttaaatct

SEQ ID NO: 178733 - DNA, 33 bp, Homo sapien
gtgataatttcagaagccattttcattgaacaa

SEQ ID NO: 178734 - DNA, 33 bp, Homo sapien
gtgataatttcagaaggcattttcattgaacaa

SEQ ID NO: 178735 - DNA, 33 bp, Homo sapien
agaggacattttgccacgatgtaagttgtttaa

SEQ ID NO: 178736 - DNA, 33 bp, Homo sapien
agaggacattttgccatgatgtaagttgtttaa

SEQ ID NO: 178737 - DNA, 33 bp, Homo sapien
cactaactctttagtacagtccaggaggcttga

SEQ ID NO: 178738 - DNA, 33 bp, Homo sapien
cactaactctttagtatagtccaggaggcttga

SEQ ID NO: 178739 - DNA, 33 bp, Homo sapien
ttgaccacccttctgacagccaaagaatattcc

SEQ ID NO: 178740 - DNA, 33 bp, Homo sapien
ttgaccacccttctgatagccaaagaatattcc

SEQ ID NO: 178741 - DNA, 33 bp, Homo sapien
gtgaaggccgctgaaaaatgttcctgcaatgag

SEQ ID NO: 178742 - DNA, 33 bp, Homo sapien
gtgaaggccgctgaaagatgttcctgcaatgag

SEQ ID NO: 178743 - DNA, 33 bp, Homo sapien
tcagcaactctacgtacaccagtttagattact

SEQ ID NO: 178744 - DNA, 33 bp, Homo sapien
tcagcaactctacgtataccagtttagattact

SEQ ID NO: 178745 - DNA, 33 bp, Homo sapien
ctagccttttccaacgcagcactagagaagtag

SEQ ID NO: 178746 - DNA, 33 bp, Homo sapien
ctagccttttccaacggagcactagagaagtag

SEQ ID NO: 178747 - DNA, 33 bp, Homo sapien
ggctcaaatgtgaataaaaaacctgaataaacc

SEQ ID NO: 178748 - DNA, 33 bp, Homo sapien
ggctcaaatgtgaatacaaaacctgaataaacc

SEQ ID NO: 178749 - DNA, 33 bp, Homo sapien
acttttaaatctagtacctcatttgagccttca

SEQ ID NO: 178750 - DNA, 33 bp, Homo sapien
acttttaaatctagtatctcatttgagccttca

SEQ ID NO: 178751 - DNA, 33 bp, Homo sapien
gcactaattgttgaggaaggactctgtgaagtg

SEQ ID NO: 178752 - DNA, 33 bp, Homo sapien
gcactaattgttgagggaggactctgtgaagtg

SEQ ID NO: 178753 - DNA, 33 bp, Homo sapien
aaaatagcaaacagtgaaagtataatgacaggc

SEQ ID NO: 178754 - DNA, 33 bp, Homo sapien
aaaatagcaaacagtggaagtataatgacaggc

SEQ ID NO: 178755 - DNA, 33 bp, Homo sapien
tgaacattttattgcactctattgcagttggag

SEQ ID NO: 178756 - DNA, 33 bp, Homo sapien
tgaacattttattgcattctattgcagttggag

SEQ ID NO: 178757 - DNA, 33 bp, Homo sapien
taattctttgccaagagaatttgtatggttcaa

SEQ ID NO: 178758 - DNA, 33 bp, Homo sapien
taattctttgccaagataatttgtatggttcaa

SEQ ID NO: 178759 - DNA, 33 bp, Homo sapien
agtgtttttattcaccaaagaattgaaccatac

SEQ ID NO: 178760 - DNA, 33 bp, Homo sapien
agtgtttttattcacccaagaattgaaccatac

SEQ ID NO: 178761 - DNA, 33 bp, Homo sapien
ttttagtagattagcaaaaatgctccattgtgg

SEQ ID NO: 178762 - DNA, 33 bp, Homo sapien
ttttagtagattagcagaaatgctccattgtgg

SEQ ID NO: 178763 - DNA, 33 bp, Homo sapien
ggctgttgtcaggtgaataactttaacatataa

SEQ ID NO: 178764 - DNA, 33 bp, Homo sapien
ggctgttgtcaggtgagtaactttaacatataa

SEQ ID NO: 178765 - DNA, 33 bp, Homo sapien
tcctaagcacattacactggggaagctgtcttt

SEQ ID NO: 178766 - DNA, 33 bp, Homo sapien
tcctaagcacattacattggggaagctgtcttt

SEQ ID NO: 178767 - DNA, 33 bp, Homo sapien
ttgtctcctagcccaacacaatgcgtaaacacc

SEQ ID NO: 178768 - DNA, 33 bp, Homo sapien
ttgtctcctagcccaatacaatgcgtaaacacc

SEQ ID NO: 178769 - DNA, 33 bp, Homo sapien
gctgtatcatacatacaattttcatcttgtgaa

SEQ ID NO: 178770 - DNA, 33 bp, Homo sapien
gctgtatcatacatactattttcatcttgtgaa

SEQ ID NO: 178771 - DNA, 33 bp, Homo sapien
ctctgttgtacataataaaacaagcggtttggc

SEQ ID NO: 178772 - DNA, 33 bp, Homo sapien
ctctgttgtacataatgaaacaagcggtttggc

SEQ ID NO: 178773 - DNA, 33 bp, Homo sapien
cacactgtcaaggagaatagaaagtcacagtac

SEQ ID NO: 178774 - DNA, 33 bp, Homo sapien
cacactgtcaaggagagtagaaagtcacagtac

SEQ ID NO: 178775 - DNA, 33 bp, Homo sapien
ttttaagtttgcaaaaatgtactgagataaaaa

SEQ ID NO: 178776 - DNA, 33 bp, Homo sapien
ttttaagtttgcaaaagtgtactgagataaaaa

SEQ ID NO: 178777 - DNA, 33 bp, Homo sapien
tctttaatatacagcactgatgttttctcattt

SEQ ID NO: 178778 - DNA, 33 bp, Homo sapien
tctttaatatacagcattgatgttttctcattt

SEQ ID NO: 178779 - DNA, 33 bp, Homo sapien
ctcagaaactgaacagaaatcatgctagtggtt

SEQ ID NO: 178780 - DNA, 33 bp, Homo sapien
ctcagaaactgaacagtaatcatgctagtggtt

SEQ ID NO: 178781 - DNA, 33 bp, Homo sapien
caattctgaaccgctaaacattttaaagcttat

SEQ ID NO: 178782 - DNA, 33 bp, Homo sapien
caattctgaaccgctatacattttaaagcttat

SEQ ID NO: 178783 - DNA, 33 bp, Homo sapien
ttcaggaagttgggggaaaatcttctgaaggaa

SEQ ID NO: 178784 - DNA, 33 bp, Homo sapien
ttcaggaagttggggggaaatcttctgaaggaa

SEQ ID NO: 178785 - DNA, 33 bp, Homo sapien
acaggtgctattttacactgctaagtctttggt

SEQ ID NO: 178786 - DNA, 33 bp, Homo sapien
acaggtgctattttacgctgctaagtctttggt

SEQ ID NO: 178787 - DNA, 33 bp, Homo sapien
actagagttatgaaaacaggtgtgataaatgca

SEQ ID NO: 178788 - DNA, 33 bp, Homo sapien
actagagttatgaaaagaggtgtgataaatgca

SEQ ID NO: 178789 - DNA, 33 bp, Homo sapien
gcaagcaaactggtcacatagtaggcactgccc

SEQ ID NO: 178790 - DNA, 33 bp, Homo sapien
gcaagcaaactggtcagatagtaggcactgccc

SEQ ID NO: 178791 - DNA, 33 bp, Homo sapien
catcctcatcactaccaaatatttactgagggc

SEQ ID NO: 178792 - DNA, 33 bp, Homo sapien
catcctcatcactacctaatatttactgagggc

SEQ ID NO: 178793 - DNA, 33 bp, Homo sapien
ctaccatggaagttcacgtggagctctcatctt

SEQ ID NO: 178794 - DNA, 33 bp, Homo sapien
ctaccatggaagttcatgtggagctctcatctt

SEQ ID NO: 178795 - DNA, 33 bp, Homo sapien
agggctcttggccttgcatggagactcctggaa

SEQ ID NO: 178796 - DNA, 33 bp, Homo sapien
agggctcttggccttgtatggagactcctggaa

SEQ ID NO: 178797 - DNA, 33 bp, Homo sapien
cttttagagcattcataagaagataggctatcc

SEQ ID NO: 178798 - DNA, 33 bp, Homo sapien
cttttagagcattcatgagaagataggctatcc

SEQ ID NO: 178799 - DNA, 33 bp, Homo sapien
tttctattagtcaccacgatactgagaaaaaaa

SEQ ID NO: 178800 - DNA, 33 bp, Homo sapien
tttctattagtcaccatgatactgagaaaaaaa

SEQ ID NO: 178801 - DNA, 33 bp, Homo sapien
ttaccaacctttccacacagttcaagttataaa

SEQ ID NO: 178802 - DNA, 33 bp, Homo sapien
ttaccaacctttccacgcagttcaagttataaa

SEQ ID NO: 178803 - DNA, 33 bp, Homo sapien
gttggcatccttcctaaccccctagaaacatca

SEQ ID NO: 178804 - DNA, 33 bp, Homo sapien
gttggcatccttcctatccccctagaaacatca

SEQ ID NO: 178805 - DNA, 33 bp, Homo sapien
cttactgacagatacactgcttgaaatcagatg

SEQ ID NO: 178806 - DNA, 33 bp, Homo sapien
cttactgacagatacattgcttgaaatcagatg

SEQ ID NO: 178807 - DNA, 33 bp, Homo sapien
catgctgttgctcaccaagtagaaaatagtgtt

SEQ ID NO: 178808 - DNA, 33 bp, Homo sapien
catgctgttgctcaccgagtagaaaatagtgtt

SEQ ID NO: 178809 - DNA, 33 bp, Homo sapien
gtataaaactgagtgaacttcctattgtctatc

SEQ ID NO: 178810 - DNA, 33 bp, Homo sapien
gtataaaactgagtgatcttcctattgtctatc

SEQ ID NO: 178811 - DNA, 33 bp, Homo sapien
tatgtagagatgacaaataggctttatagaata

SEQ ID NO: 178812 - DNA, 33 bp, Homo sapien
tatgtagagatgacaagtaggctttatagaata

SEQ ID NO: 178813 - DNA, 33 bp, Homo sapien
atgtattatatgatgaagttgatcacagtagat

SEQ ID NO: 178814 - DNA, 33 bp, Homo sapien
atgtattatatgatgatgttgatcacagtagat

SEQ ID NO: 178815 - DNA, 33 bp, Homo sapien
tctgttgatgattagggagtttaagccaaatag

SEQ ID NO: 178816 - DNA, 33 bp, Homo sapien
tctgttgatgattaggtagtttaagccaaatag

SEQ ID NO: 178817 - DNA, 33 bp, Homo sapien
gggctttgtatagttgcaaaattatttcactgc

SEQ ID NO: 178818 - DNA, 33 bp, Homo sapien
gggctttgtatagttggaaaattatttcactgc

SEQ ID NO: 178819 - DNA, 33 bp, Homo sapien
ttaagaattgttactacgtctctagtcctcaaa

SEQ ID NO: 178820 - DNA, 33 bp, Homo sapien
ttaagaattgttactatgtctctagtcctcaaa

SEQ ID NO: 178821 - DNA, 33 bp, Homo sapien
aggatactcagtgaagaagaactttccagagtt

SEQ ID NO: 178822 - DNA, 33 bp, Homo sapien
aggatactcagtgaaggagaactttccagagtt

SEQ ID NO: 178823 - DNA, 33 bp, Homo sapien
tctcaatggcagacaaattagatttcatcagta

SEQ ID NO: 178824 - DNA, 33 bp, Homo sapien
tctcaatggcagacaagttagatttcatcagta

SEQ ID NO: 178825 - DNA, 33 bp, Homo sapien
ttctgtttaacacagacggaaatggcaaagtca

SEQ ID NO: 178826 - DNA, 33 bp, Homo sapien
ttctgtttaacacagagggaaatggcaaagtca

SEQ ID NO: 178827 - DNA, 33 bp, Homo sapien
aagggagaactactaacgtatggccacctatgt

SEQ ID NO: 178828 - DNA, 33 bp, Homo sapien
aagggagaactactaatgtatggccacctatgt

SEQ ID NO: 178829 - DNA, 33 bp, Homo sapien
cttggtgtagcataaactgaaaagccataggat

SEQ ID NO: 178830 - DNA, 33 bp, Homo sapien
cttggtgtagcataaattgaaaagccataggat

SEQ ID NO: 178831 - DNA, 33 bp, Homo sapien
attgtaatgaatatgacaatcgaaatgtaacaa

SEQ ID NO: 178832 - DNA, 33 bp, Homo sapien
attgtaatgaatatgataatcgaaatgtaacaa

SEQ ID NO: 178833 - DNA, 33 bp, Homo sapien
gcccctcataacatcaaaagccgtcactaatga

SEQ ID NO: 178834 - DNA, 33 bp, Homo sapien
gcccctcataacatcagaagccgtcactaatga

SEQ ID NO: 178835 - DNA, 33 bp, Homo sapien
taattatagcattatccaagcttccatgaaaat

SEQ ID NO: 178836 - DNA, 33 bp, Homo sapien
taattatagcattatcgaagcttccatgaaaat

SEQ ID NO: 178837 - DNA, 33 bp, Homo sapien
cagccaaataaatacaactcctcaacaggtgaa

SEQ ID NO: 178838 - DNA, 33 bp, Homo sapien
cagccaaataaatacagctcctcaacaggtgaa

SEQ ID NO: 178839 - DNA, 33 bp, Homo sapien
aggggcatgagtttaaagctgtgcagtgtgtgt

SEQ ID NO: 178840 - DNA, 33 bp, Homo sapien
aggggcatgagtttaacgctgtgcagtgtgtgt

SEQ ID NO: 178841 - DNA, 33 bp, Homo sapien
catgctagtcttaaaaacctgtgatgcctactc

SEQ ID NO: 178842 - DNA, 33 bp, Homo sapien
catgctagtcttaaaagcctgtgatgcctactc

SEQ ID NO: 178843 - DNA, 33 bp, Homo sapien
gacgtgtgttacatagaagttgttgatctttgg

SEQ ID NO: 178844 - DNA, 33 bp, Homo sapien
gacgtgtgttacatagtagttgttgatctttgg

SEQ ID NO: 178845 - DNA, 33 bp, Homo sapien
gtgtgaactttggcaccgaacatattctgctat

SEQ ID NO: 178846 - DNA, 33 bp, Homo sapien
gtgtgaactttggcactgaacatattctgctat

SEQ ID NO: 178847 - DNA, 33 bp, Homo sapien
ttgtttatagttttcacggtcttcctaggacta

SEQ ID NO: 178848 - DNA, 33 bp, Homo sapien
ttgtttatagttttcatggtcttcctaggacta

SEQ ID NO: 178849 - DNA, 33 bp, Homo sapien
atattaagttaaattgcagtaagagtcaaaagt

SEQ ID NO: 178850 - DNA, 33 bp, Homo sapien
atattaagttaaattgtagtaagagtcaaaagt

SEQ ID NO: 178851 - DNA, 33 bp, Homo sapien
gtgacgtcaatggaataataaagtgtgtactct

SEQ ID NO: 178852 - DNA, 33 bp, Homo sapien
gtgacgtcaatggaatcataaagtgtgtactct

SEQ ID NO: 178853 - DNA, 33 bp, Homo sapien
gtaattctttacaacacagtagaaagcatagaa

SEQ ID NO: 178854 - DNA, 33 bp, Homo sapien
gtaattctttacaacatagtagaaagcatagaa

SEQ ID NO: 178855 - DNA, 33 bp, Homo sapien
aaacagggtaacatgaacaagcatccatattac

SEQ ID NO: 178856 - DNA, 33 bp, Homo sapien
aaacagggtaacatgagcaagcatccatattac

SEQ ID NO: 178857 - DNA, 33 bp, Homo sapien
tttcttatcacataaaacattatgccatgatct

SEQ ID NO: 178858 - DNA, 33 bp, Homo sapien
tttcttatcacataaaccattatgccatgatct

SEQ ID NO: 178859 - DNA, 33 bp, Homo sapien
aaggaggatcccaccacgtattttcatcctagc

SEQ ID NO: 178860 - DNA, 33 bp, Homo sapien
aaggaggatcccaccatgtattttcatcctagc

SEQ ID NO: 178861 - DNA, 33 bp, Homo sapien
atgtggctaacgcaggaataagcaataagtgat

SEQ ID NO: 178862 - DNA, 33 bp, Homo sapien
atgtggctaacgcaggcataagcaataagtgat

SEQ ID NO: 178863 - DNA, 33 bp, Homo sapien; identical to SEQ ID NO: 178861

SEQ ID NO: 178864 - DNA, 33 bp, Homo sapien; identical to SEQ ID NO: 178862

SEQ ID NO: 178865 - DNA, 33 bp, Homo sapien
attattcaactgtctacgctatttaaatcaatc

SEQ ID NO: 178866 - DNA, 33 bp, Homo sapien
attattcaactgtctatgctatttaaatcaatc

SEQ ID NO: 178867 - DNA, 33 bp, Homo sapien; identical to SEQ ID NO: 178865

SEQ ID NO: 178868 - DNA, 33 bp, Homo sapien; identical to SEQ ID NO: 178866

SEQ ID NO: 178869 - DNA, 33 bp, Homo sapien
tgcttaataaataaacaggggatgaatgtagca

SEQ ID NO: 178870 - DNA, 33 bp, Homo sapien
tgcttaataaataaaccggggatgaatgtagca

SEQ ID NO: 178871 - DNA, 33 bp, Homo sapien
gtttactatagatttgaaaagcatctgaaggct

SEQ ID NO: 178872 - DNA, 33 bp, Homo sapien
gtttactatagatttggaaagcatctgaaggct

SEQ ID NO: 178873 - DNA, 33 bp, Homo sapien
gttccttgtagattctgaatactagctctttgt

SEQ ID NO: 178874 - DNA, 33 bp, Homo sapien
gttccttgtagattcttaatactagctctttgt

SEQ ID NO: 178875 - DNA, 33 bp, Homo sapien
gtgagccattgtgccaagtaagatttattctta

SEQ ID NO: 178876 - DNA, 33 bp, Homo sapien
gtgagccattgtgccaggtaagatttattctta

SEQ ID NO: 178877 - DNA, 33 bp, Homo sapien
tgttctaggcctttaaactaaattaagccttat

SEQ ID NO: 178878 - DNA, 33 bp, Homo sapien
tgttctaggcctttaacctaaattaagccttat

SEQ ID NO: 178879 - DNA, 33 bp, Homo sapien
atatttgttgtgattaagtacagctgaaggaca

SEQ ID NO: 178880 - DNA, 33 bp, Homo sapien
atatttgttgtgattaggtacagctgaaggaca

SEQ ID NO: 178881 - DNA, 33 bp, Homo sapien
ccatgaataatgataaccaactctgtgtatatt

SEQ ID NO: 178882 - DNA, 33 bp, Homo sapien
ccatgaataatgataatcaactctgtgtatatt

SEQ ID NO: 178883 - DNA, 33 bp, Homo sapien
aaaataaaggctcagacataatgtttgacagtg

SEQ ID NO: 178884 - DNA, 33 bp, Homo sapien
aaaataaaggctcagatataatgtttgacagtg

SEQ ID NO: 178885 - DNA, 33 bp, Homo sapien
tgttctctaatgtctaccacaattcctagatac

SEQ ID NO: 178886 - DNA, 33 bp, Homo sapien
tgttctctaatgtctatcacaattcctagatac

SEQ ID NO: 178887 - DNA, 33 bp, Homo sapien
aaaataataatgttagcatattgtagcactaat

SEQ ID NO: 178888 - DNA, 33 bp, Homo sapien
aaaataataatgttaggatattgtagcactaat

SEQ ID NO: 178889 - DNA, 33 bp, Homo sapien
tggaggtaaagagcaacggagatgaaaatggaa

SEQ ID NO: 178890 - DNA, 33 bp, Homo sapien
tggaggtaaagagcaatggagatgaaaatggaa

SEQ ID NO: 178891 - DNA, 33 bp, Homo sapien
ggagacatacaagttggaggaataaagaaaaaa

SEQ ID NO: 178892 - DNA, 33 bp, Homo sapien
ggagacatacaagttgtaggaataaagaaaaaa

SEQ ID NO: 178893 - DNA, 33 bp, Homo sapien
acattatatacacaagaaattttacccactgta

SEQ ID NO: 178894 - DNA, 33 bp, Homo sapien
acattatatacacaaggaattttacccactgta

SEQ ID NO: 178895 - DNA, 33 bp, Homo sapien
ttgcacattaagctgccgatattggttgctgag

SEQ ID NO: 178896 - DNA, 33 bp, Homo sapien
ttgcacattaagctgcggatattggttgctgag

SEQ ID NO: 178897 - DNA, 33 bp, Homo sapien
aatgtattatttaaacccctggatccatccatg

SEQ ID NO: 178898 - DNA, 33 bp, Homo sapien
aatgtattatttaaactcctggatccatccatg

SEQ ID NO: 178899 - DNA, 33 bp, Homo sapien
ttcgcaacctccttgacgatagaaaatgcattt

SEQ ID NO: 178900 - DNA, 33 bp, Homo sapien
ttcgcaacctccttgatgatagaaaatgcattt

SEQ ID NO: 178901 - DNA, 33 bp, Homo sapien
tgtctccagattagacaataaggtcattggatt

SEQ ID NO: 178902 - DNA, 33 bp, Homo sapien
tgtctccagattagacgataaggtcattggatt

SEQ ID NO: 178903 - DNA, 33 bp, Homo sapien
ggatttgggtttctctaaatagcaagtaaatca

SEQ ID NO: 178904 - DNA, 33 bp, Homo sapien
ggatttgggtttctctgaatagcaagtaaatca

SEQ ID NO: 178905 - DNA, 33 bp, Homo sapien
tggcttaggtatgctcactgatttacttgctat

SEQ ID NO: 178906 - DNA, 33 bp, Homo sapien
tggcttaggtatgctctctgatttacttgctat

SEQ ID NO: 178907 - DNA, 33 bp, Homo sapien
aatagcctttttggaccctgtgtgctgctacct

SEQ ID NO: 178908 - DNA, 33 bp, Homo sapien
aatagcctttttggacgctgtgtgctgctacct

SEQ ID NO: 178909 - DNA, 33 bp, Homo sapien
agcaaatctaggggacccggtttcagctccagc

SEQ ID NO: 178910 - DNA, 33 bp, Homo sapien
agcaaatctaggggacgcggtttcagctccagc

SEQ ID NO: 178911 - DNA, 33 bp, Homo sapien
cggacagcattcccacacaactcaggcccttgg

SEQ ID NO: 178912 - DNA, 33 bp, Homo sapien
cggacagcattcccacgcaactcaggcccttgg

SEQ ID NO: 178913 - DNA, 33 bp, Homo sapien
atataaaaccatactacatatgtaagcaagtca

SEQ ID NO: 178914 - DNA, 33 bp, Homo sapien
atataaaaccatactatatatgtaagcaagtca

SEQ ID NO: 178915 - DNA, 33 bp, Homo sapien
ggtaggattcagagtcaattaatgtttgaatat

SEQ ID NO: 178916 - DNA, 33 bp, Homo sapien
ggtaggattcagagtccattaatgtttgaatat

SEQ ID NO: 178917 - DNA, 33 bp, Homo sapien
atgtgaaatctgtgataagcccaagaaaaccta

SEQ ID NO: 178918 - DNA, 33 bp, Homo sapien
atgtgaaatctgtgatgagcccaagaaaaccta

SEQ ID NO: 178919 - DNA, 33 bp, Homo sapien
gtttcccttcagactccagaggaatgtcatcgt

SEQ ID NO: 178920 - DNA, 33 bp, Homo sapien
gtttcccttcagactctagaggaatgtcatcgt

SEQ ID NO: 178921 - DNA, 33 bp, Homo sapien
tcagatacagtaggaacaaaattgtgtaaaaac

SEQ ID NO: 178922 - DNA, 33 bp, Homo sapien
tcagatacagtaggaataaaattgtgtaaaaac

SEQ ID NO: 178923 - DNA, 33 bp, Homo sapien
caagcagaaaaaaagaagtttcaagcctgagga

SEQ ID NO: 178924 - DNA, 33 bp, Homo sapien
caagcagaaaaaaagacgtttcaagcctgagga

SEQ ID NO: 178925 - DNA, 33 bp, Homo sapien
atactctcatggaaaaaaagtcccatcgaaact

SEQ ID NO: 178926 - DNA, 33 bp, Homo sapien
atactctcatggaaaagaagtcccatcgaaact

SEQ ID NO: 178927 - DNA, 33 bp, Homo sapien
tgcttccgagaaacagaatgctctccctttgcc

SEQ ID NO: 178928 - DNA, 33 bp, Homo sapien
tgcttccgagaaacaggatgctctccctttgcc

SEQ ID NO: 178929 - DNA, 33 bp, Homo sapien
ctgcttgtagcataaaaaaggattcagctagtg

SEQ ID NO: 178930 - DNA, 33 bp, Homo sapien
ctgcttgtagcataaacaaggattcagctagtg

SEQ ID NO: 178931 - DNA, 33 bp, Homo sapien
ctagggtagaaagtgaataagtagaaaagctaa

SEQ ID NO: 178932 - DNA, 33 bp, Homo sapien
ctagggtagaaagtgagtaagtagaaaagctaa

SEQ ID NO: 178933 - DNA, 33 bp, Homo sapien
ctagggaactgagacacggaaaagcctagaaag

SEQ ID NO: 178934 - DNA, 33 bp, Homo sapien
ctagggaactgagacatggaaaagcctagaaag

SEQ ID NO: 178935 - DNA, 33 bp, Homo sapien
gatcaatggaaaagaacggataatcaagaatta

SEQ ID NO: 178936 - DNA, 33 bp, Homo sapien
gatcaatggaaaagaatggataatcaagaatta

SEQ ID NO: 178937 - DNA, 33 bp, Homo sapien
tgttattatacatccacagttgatacttactga

SEQ ID NO: 178938 - DNA, 33 bp, Homo sapien
tgttattatacatccatagttgatacttactga

SEQ ID NO: 178939 - DNA, 33 bp, Homo sapien
actggagactcagaaaagtggaagattgagagc

SEQ ID NO: 178940 - DNA, 33 bp, Homo sapien
actggagactcagaaacgtggaagattgagagc

SEQ ID NO: 178941 - DNA, 33 bp, Homo sapien
tcatgccatctctaccaacctaacacagggtcc

SEQ ID NO: 178942 - DNA, 33 bp, Homo sapien
tcatgccatctctacctacctaacacagggtcc

SEQ ID NO: 178943 - DNA, 33 bp, Homo sapien
gcaaagtcttatgtcaaagagtggctcaggggc

SEQ ID NO: 178944 - DNA, 33 bp, Homo sapien
gcaaagtcttatgtcatagagtggctcaggggc

SEQ ID NO: 178945 - DNA, 33 bp, Homo sapien
taacaccaatgattctcacactattcaaaataa

SEQ ID NO: 178946 - DNA, 33 bp, Homo sapien
taacaccaatgattcttacactattcaaaataa

SEQ ID NO: 178947 - DNA, 33 bp, Homo sapien
tttcctgagaagcaaaatttcaaagaaagttaa

SEQ ID NO: 178948 - DNA, 33 bp, Homo sapien
tttcctgagaagcaaagtttcaaagaaagttaa

SEQ ID NO: 178949 - DNA, 33 bp, Homo sapien
aggtatctgcttattaacttacaagggtagatt

SEQ ID NO: 178950 - DNA, 33 bp, Homo sapien
aggtatctgcttattatcttacaagggtagatt

SEQ ID NO: 178951 - DNA, 33 bp, Homo sapien
atttctcaccatgcaccgggcatcagtattctg

SEQ ID NO: 178952 - DNA, 33 bp, Homo sapien
atttctcaccatgcactgggcatcagtattctg

SEQ ID NO: 178953 - DNA, 33 bp, Homo sapien
aacaaccaatagagatgaaagtttctgtagtag

SEQ ID NO: 178954 - DNA, 33 bp, Homo sapien
aacaaccaatagagattaaagtttctgtagtag

SEQ ID NO: 178955 - DNA, 33 bp, Homo sapien
ttcacctctcagtacaccaattttaattcattt

SEQ ID NO: 178956 - DNA, 33 bp, Homo sapien
ttcacctctcagtacatcaattttaattcattt

SEQ ID NO: 178957 - DNA, 33 bp, Homo sapien
gttgtctgggttacaaggattacatctgctagg

SEQ ID NO: 178958 - DNA, 33 bp, Homo sapien
gttgtctgggttacaatgattacatctgctagg

SEQ ID NO: 178959 - DNA, 33 bp, Homo sapien
aggactttctcttgcaactttaataccagctca

SEQ ID NO: 178960 - DNA, 33 bp, Homo sapien
aggactttctcttgcagctttaataccagctca

SEQ ID NO: 178961 - DNA, 33 bp, Homo sapien
catgcctgtaccactcgaggatggtgtttcttt

SEQ ID NO: 178962 - DNA, 33 bp, Homo sapien
catgcctgtaccactctaggatggtgtttcttt

SEQ ID NO: 178963 - DNA, 33 bp, Homo sapien
ccagtgacaaacctgcagcacagccaccccatc

SEQ ID NO: 178964 - DNA, 33 bp, Homo sapien
ccagtgacaaacctgcggcacagccaccccatc

SEQ ID NO: 178965 - DNA, 33 bp, Homo sapien
atatgctgtgtactcaaaaactgcagcaattat

SEQ ID NO: 178966 - DNA, 33 bp, Homo sapien
atatgctgtgtactcagaaactgcagcaattat

SEQ ID NO: 178967 - DNA, 33 bp, Homo sapien
ctgtgcttcttatctccgaatttttattgtcta

SEQ ID NO: 178968 - DNA, 33 bp, Homo sapien
ctgtgcttcttatctctgaatttttattgtcta

SEQ ID NO: 178969 - DNA, 33 bp, Homo sapien
aaatacagacaatgcactaaataggcaggatat

SEQ ID NO: 178970 - DNA, 33 bp, Homo sapien
aaatacagacaatgcagtaaataggcaggatat

SEQ ID NO: 178971 - DNA, 33 bp, Homo sapien
aatataaacttggaaagataatcctgaatataa

SEQ ID NO: 178972 - DNA, 33 bp, Homo sapien
aatataaacttggaaatataatcctgaatataa

SEQ ID NO: 178973 - DNA, 33 bp, Homo sapien
acctatactgtgcaaaaagtatgaccaacagaa

SEQ ID NO: 178974 - DNA, 33 bp, Homo sapien
acctatactgtgcaaagagtatgaccaacagaa

SEQ ID NO: 178975 - DNA, 33 bp, Homo sapien
aacagtcgatttgtcaactttaatcactacatt

SEQ ID NO: 178976 - DNA, 33 bp, Homo sapien
aacagtcgatttgtcatctttaatcactacatt

SEQ ID NO: 178977 - DNA, 33 bp, Homo sapien
ttcactggtatagatacggcatttgcagctgtg

SEQ ID NO: 178978 - DNA, 33 bp, Homo sapien
ttcactggtatagatatggcatttgcagctgtg

SEQ ID NO: 178979 - DNA, 33 bp, Homo sapien
tatacctgaatttatcaaaagtacagctctttc

SEQ ID NO: 178980 - DNA, 33 bp, Homo sapien
tatacctgaatttatccaaagtacagctctttc

SEQ ID NO: 178981 - DNA, 33 bp, Homo sapien
aaatgtgatttactccagaaagagaataattaa

SEQ ID NO: 178982 - DNA, 33 bp, Homo sapien
aaatgtgatttactccggaaagagaataattaa

SEQ ID NO: 178983 - DNA, 33 bp, Homo sapien
tgtcctagaatctggaagtgttagccatttggt

SEQ ID NO: 178984 - DNA, 33 bp, Homo sapien
tgtcctagaatctggaggtgttagccatttggt

SEQ ID NO: 178985 - DNA, 33 bp, Homo sapien
cttgtgagaagtatcacagaggcttgaaaaatg

SEQ ID NO: 178986 - DNA, 33 bp, Homo sapien
cttgtgagaagtatcatagaggcttgaaaaatg

SEQ ID NO: 178987 - DNA, 33 bp, Homo sapien
caaagtcataaaatacaaagcaggactggaata

SEQ ID NO: 178988 - DNA, 33 bp, Homo sapien
caaagtcataaaataccaagcaggactggaata

SEQ ID NO: 178989 - DNA, 33 bp, Homo sapien
aggcattataacaggaggagttgctttctattt

SEQ ID NO: 178990 - DNA, 33 bp, Homo sapien
aggcattataacaggatgagttgctttctattt

SEQ ID NO: 178991 - DNA, 33 bp, Homo sapien
ctcatttaatcaccataactcaaaaaataaggt

SEQ ID NO: 178992 - DNA, 33 bp, Homo sapien
ctcatttaatcaccatgactcaaaaaataaggt

SEQ ID NO: 178993 - DNA, 33 bp, Homo sapien
cgagaggatttggtcactattatccttaatgga

SEQ ID NO: 178994 - DNA, 33 bp, Homo sapien
cgagaggatttggtcattattatccttaatgga

SEQ ID NO: 178995 - DNA, 33 bp, Homo sapien
acacatacatacttctcactgatacgttaaaaa

SEQ ID NO: 178996 - DNA, 33 bp, Homo sapien
acacatacatacttcttactgatacgttaaaaa

SEQ ID NO: 178997 - DNA, 33 bp, Homo sapien
gccaatgcttggaaacagggaaacaaagatata

SEQ ID NO: 178998 - DNA, 33 bp, Homo sapien
gccaatgcttggaaacggggaaacaaagatata

SEQ ID NO: 178999 - DNA, 33 bp, Homo sapien
ctctcaattttgaaagacgaccaaccactcatt

SEQ ID NO: 179000 - DNA, 33 bp, Homo sapien
ctctcaattttgaaaggcgaccaaccactcatt

SEQ ID NO: 179001 - DNA, 33 bp, Homo sapien
attgacaggtagttagcagataataattgaatg

SEQ ID NO: 179002 - DNA, 33 bp, Homo sapien
attgacaggtagttagtagataataattgaatg

SEQ ID NO: 179003 - DNA, 33 bp, Homo sapien
agacaagccttagaagaagctgtacagaaccat

SEQ ID NO: 179004 - DNA, 33 bp, Homo sapien
agacaagccttagaaggagctgtacagaaccat

SEQ ID NO: 179005 - DNA, 33 bp, Homo sapien
gactcttgttttgatacccattttgcctcacat

SEQ ID NO: 179006 - DNA, 33 bp, Homo sapien
gactcttgttttgatatccattttgcctcacat

SEQ ID NO: 179007 - DNA, 33 bp, Homo sapien
attccaagcctatttgaaagtggtttccaccct

SEQ ID NO: 179008 - DNA, 33 bp, Homo sapien
attccaagcctatttggaagtggtttccaccct

SEQ ID NO: 179009 - DNA, 33 bp, Homo sapien
gtgatgtttcctgtaagcctaaagcacattttt

SEQ ID NO: 179010 - DNA, 33 bp, Homo sapien
gtgatgtttcctgtaatcctaaagcacattttt

SEQ ID NO: 179011 - DNA, 33 bp, Homo sapien
tattggaacaaatactaaacatgtagcttggcc

SEQ ID NO: 179012 - DNA, 33 bp, Homo sapien
tattggaacaaatactcaacatgtagcttggcc

SEQ ID NO: 179013 - DNA, 33 bp, Homo sapien
attaaaggactaacaggagtaatatgaagagga

SEQ ID NO: 179014 - DNA, 33 bp, Homo sapien
attaaaggactaacagtagtaatatgaagagga

SEQ ID NO: 179015 - DNA, 33 bp, Homo sapien
ggatttaatcttacaacgacaaggtactaaatt

SEQ ID NO: 179016 - DNA, 33 bp, Homo sapien
ggatttaatcttacaatgacaaggtactaaatt

SEQ ID NO: 179017 - DNA, 33 bp, Homo sapien
tgttaccttacattgcaaaagagattttacaag

SEQ ID NO: 179018 - DNA, 33 bp, Homo sapien
tgttaccttacattgccaaagagattttacaag

SEQ ID NO: 179019 - DNA, 33 bp, Homo sapien
ccacatcctaatcagcagaacttatgaatgtta

SEQ ID NO: 179020 - DNA, 33 bp, Homo sapien
ccacatcctaatcagcggaacttatgaatgtta

SEQ ID NO: 179021 - DNA, 33 bp, Homo sapien
aagagatgacttgggcactcttaaaaggattca

SEQ ID NO: 179022 - DNA, 33 bp, Homo sapien
aagagatgacttgggcgctcttaaaaggattca

SEQ ID NO: 179023 - DNA, 33 bp, Homo sapien
agctaccaacatgagaaagatgattgagggtat

SEQ ID NO: 179024 - DNA, 33 bp, Homo sapien
agctaccaacatgagagagatgattgagggtat

SEQ ID NO: 179025 - DNA, 33 bp, Homo sapien
ttatgccacttcttcagtcctttaattattcta

SEQ ID NO: 179026 - DNA, 33 bp, Homo sapien
ttatgccacttcttcattcctttaattattcta

SEQ ID NO: 179027 - DNA, 33 bp, Homo sapien
aaggtcttcatctataaagtggtgtagagataa

SEQ ID NO: 179028 - DNA, 33 bp, Homo sapien
aaggtcttcatctatagagtggtgtagagataa

SEQ ID NO: 179029 - DNA, 33 bp, Homo sapien
tattagtttggttaaaagacattatacagaaag

SEQ ID NO: 179030 - DNA, 33 bp, Homo sapien
tattagtttggttaaaggacattatacagaaag

SEQ ID NO: 179031 - DNA, 33 bp, Homo sapien
tactcaggtcttttaacacactggataatagga

SEQ ID NO: 179032 - DNA, 33 bp, Homo sapien
tactcaggtcttttaatacactggataatagga

SEQ ID NO: 179033 - DNA, 33 bp, Homo sapien
ggctgaagcaggaaaaattattgaacgtgggag

SEQ ID NO: 179034 - DNA, 33 bp, Homo sapien
ggctgaagcaggaaaatttattgaacgtgggag

SEQ ID NO: 179035 - DNA, 33 bp, Homo sapien
gtatgttcatgcagcaaattttacaatagcaaa

SEQ ID NO: 179036 - DNA, 33 bp, Homo sapien
gtatgttcatgcagcacattttacaatagcaaa

SEQ ID NO: 179037 - DNA, 33 bp, Homo sapien
actcagccttgagattaaacctccacattgctg

SEQ ID NO: 179038 - DNA, 33 bp, Homo sapien
actcagccttgagattcaacctccacattgctg

SEQ ID NO: 179039 - DNA, 33 bp, Homo sapien
attctgcataaactaaaaagctgtggatatttt

SEQ ID NO: 179040 - DNA, 33 bp, Homo sapien
attctgcataaactaagaagctgtggatatttt

SEQ ID NO: 179041 - DNA, 33 bp, Homo sapien
tccataatgatttgagaatttgatatacttttc

SEQ ID NO: 179042 - DNA, 33 bp, Homo sapien
tccataatgatttgagcatttgatatacttttc

SEQ ID NO: 179043 - DNA, 33 bp, Homo sapien
agttcagttgacagcactgaaagtacaaaagta

SEQ ID NO: 179044 - DNA, 33 bp, Homo sapien
agttcagttgacagcattgaaagtacaaaagta

SEQ ID NO: 179045 - DNA, 33 bp, Homo sapien
gaagggtaataaacaaactctgctcttttcatg

SEQ ID NO: 179046 - DNA, 33 bp, Homo sapien
gaagggtaataaacaagctctgctcttttcatg

SEQ ID NO: 179047 - DNA, 33 bp, Homo sapien
ttgttatttttaatgacactgattccacaattc

SEQ ID NO: 179048 - DNA, 33 bp, Homo sapien
ttgttatttttaatgagactgattccacaattc

SEQ ID NO: 179049 - DNA, 33 bp, Homo sapien
aatctctctatccttacgttctcctagactacc

SEQ ID NO: 179050 - DNA, 33 bp, Homo sapien
aatctctctatccttatgttctcctagactacc

SEQ ID NO: 179051 - DNA, 33 bp, Homo sapien
ttgtaacagaactctacgctgtttgcaaatgct

SEQ ID NO: 179052 - DNA, 33 bp, Homo sapien
ttgtaacagaactctatgctgtttgcaaatgct

SEQ ID NO: 179053 - DNA, 33 bp, Homo sapien
aactacagaagtaacaacagtagtatgtgtgta

SEQ ID NO: 179054 - DNA, 33 bp, Homo sapien
aactacagaagtaacaccagtagtatgtgtgta

SEQ ID NO: 179055 - DNA, 33 bp, Homo sapien
ctccagaggaaagagaagctcaaatacacagac

SEQ ID NO: 179056 - DNA, 33 bp, Homo sapien
ctccagaggaaagagaggctcaaatacacagac

SEQ ID NO: 179057 - DNA, 33 bp, Homo sapien
cactttgtaactttaagcctgaaactcagctct

SEQ ID NO: 179058 - DNA, 33 bp, Homo sapien
cactttgtaactttaatcctgaaactcagctct

SEQ ID NO: 179059 - DNA, 33 bp, Homo sapien
tctaatgtatattggactcacttattgactaca

SEQ ID NO: 179060 - DNA, 33 bp, Homo sapien
tctaatgtatattggattcacttattgactaca

SEQ ID NO: 179061 - DNA, 33 bp, Homo sapien
aactggagaaatgccaagtaataaggaatctca

SEQ ID NO: 179062 - DNA, 33 bp, Homo sapien
aactggagaaatgccatgtaataaggaatctca

SEQ ID NO: 179063 - DNA, 33 bp, Homo sapien
ttccatcctgatgatacctaagctgatggactg

SEQ ID NO: 179064 - DNA, 33 bp, Homo sapien
ttccatcctgatgatatctaagctgatggactg

SEQ ID NO: 179065 - DNA, 33 bp, Homo sapien
agagaatgtggctttacacatggctgagtagag

SEQ ID NO: 179066 - DNA, 33 bp, Homo sapien
agagaatgtggctttatacatggctgagtagag

SEQ ID NO: 179067 - DNA, 33 bp, Homo sapien
aaaatgtcagatttcccgatgactagaccactg

SEQ ID NO: 179068 - DNA, 33 bp, Homo sapien
aaaatgtcagatttcctgatgactagaccactg

SEQ ID NO: 179069 - DNA, 33 bp, Homo sapien
tctatattcagtaatactaccaaattaaagact

SEQ ID NO: 179070 - DNA, 33 bp, Homo sapien
tctatattcagtaatagtaccaaattaaagact

SEQ ID NO: 179071 - DNA, 33 bp, Homo sapien
ctgaaagtgcccctaaaaatcagataaaagtca

SEQ ID NO: 179072 - DNA, 33 bp, Homo sapien
ctgaaagtgcccctaagaatcagataaaagtca

SEQ ID NO: 179073 - DNA, 33 bp, Homo sapien
cttatagaaattagaaagaatgtggctgcttat

SEQ ID NO: 179074 - DNA, 33 bp, Homo sapien
cttatagaaattagaaggaatgtggctgcttat

SEQ ID NO: 179075 - DNA, 33 bp, Homo sapien
gaaactctgccaaagacggagaaatttcatgga

SEQ ID NO: 179076 - DNA, 33 bp, Homo sapien
gaaactctgccaaagatggagaaatttcatgga

SEQ ID NO: 179077 - DNA, 33 bp, Homo sapien
caaataattgagcatccgaataaataacacatg

SEQ ID NO: 179078 - DNA, 33 bp, Homo sapien
caaataattgagcatctgaataaataacacatg

SEQ ID NO: 179079 - DNA, 33 bp, Homo sapien
atattgaggtattttacgtatcatcacaatttt

SEQ ID NO: 179080 - DNA, 33 bp, Homo sapien
atattgaggtattttatgtatcatcacaatttt

SEQ ID NO: 179081 - DNA, 33 bp, Homo sapien
ttgacagcaccatatagaagataactagaaatg

SEQ ID NO: 179082 - DNA, 33 bp, Homo sapien
ttgacagcaccatatataagataactagaaatg

SEQ ID NO: 179083 - DNA, 33 bp, Homo sapien
taatgggtgttgtacaaatggtagttcttattt

SEQ ID NO: 179084 - DNA, 33 bp, Homo sapien
taatgggtgttgtacacatggtagttcttattt

SEQ ID NO: 179085 - DNA, 33 bp, Homo sapien
gaggtttaatatatgactgctgactttgcctag

SEQ ID NO: 179086 - DNA, 33 bp, Homo sapien
gaggtttaatatatgagtgctgactttgcctag

SEQ ID NO: 179087 - DNA, 33 bp, Homo sapien
gagctttactgagttaggattgacataaaataa

SEQ ID NO: 179088 - DNA, 33 bp, Homo sapien
gagctttactgagttatgattgacataaaataa

SEQ ID NO: 179089 - DNA, 33 bp, Homo sapien
gataatataagtcttcaaagttagatgtcaata

SEQ ID NO: 179090 - DNA, 33 bp, Homo sapien
gataatataagtcttcgaagttagatgtcaata

SEQ ID NO: 179091 - DNA, 33 bp, Homo sapien
aataccttgctcttgacgtggactgagtgtcat

SEQ ID NO: 179092 - DNA, 33 bp, Homo sapien
aataccttgctcttgatgtggactgagtgtcat

SEQ ID NO: 179093 - DNA, 33 bp, Homo sapien
tctgttaaatgctacaagaagaaagttagccag

SEQ ID NO: 179094 - DNA, 33 bp, Homo sapien
tctgttaaatgctacacgaagaaagttagccag

SEQ ID NO: 179095 - DNA, 33 bp, Homo sapien
gtgaaatgtactgagacaataggtcacccagct

SEQ ID NO: 179096 - DNA, 33 bp, Homo sapien
gtgaaatgtactgagataataggtcacccagct

SEQ ID NO: 179097 - DNA, 33 bp, Homo sapien
ataatggctgttcagactcatagacaataataa

SEQ ID NO: 179098 - DNA, 33 bp, Homo sapien
ataatggctgttcagattcatagacaataataa

SEQ ID NO: 179099 - DNA, 33 bp, Homo sapien
aggttgatgctgttcaataagcaggaacgaaat

SEQ ID NO: 179100 - DNA, 33 bp, Homo sapien
aggttgatgctgttcagtaagcaggaacgaaat

SEQ ID NO: 179101 - DNA, 33 bp, Homo sapien
gcaagaatgtaccaacagaaagtggagagaaac

SEQ ID NO: 179102 - DNA, 33 bp, Homo sapien
gcaagaatgtaccaactgaaagtggagagaaac

SEQ ID NO: 179103 - DNA, 33 bp, Homo sapien
ccatggaaattaataaacctgaagagtgcaaag

SEQ ID NO: 179104 - DNA, 33 bp, Homo sapien
ccatggaaattaataagcctgaagagtgcaaag

SEQ ID NO: 179105 - DNA, 33 bp, Homo sapien
cagcattaagtgtagccgataagagatgtggaa

SEQ ID NO: 179106 - DNA, 33 bp, Homo sapien
cagcattaagtgtagctgataagagatgtggaa

SEQ ID NO: 179107 - DNA, 33 bp, Homo sapien
gaactgtgaatttttaagtccccccaatgatca

SEQ ID NO: 179108 - DNA, 33 bp, Homo sapien
gaactgtgaatttttatgtccccccaatgatca

SEQ ID NO: 179109 - DNA, 33 bp, Homo sapien
gactctgggtattatacgatctaaaatgtgata

SEQ ID NO: 179110 - DNA, 33 bp, Homo sapien
gactctgggtattatatgatctaaaatgtgata

SEQ ID NO: 179111 - DNA, 33 bp, Homo sapien
caacttccaatatgagaatttaggaatgagtga

SEQ ID NO: 179112 - DNA, 33 bp, Homo sapien
caacttccaatatgaggatttaggaatgagtga

SEQ ID NO: 179113 - DNA, 33 bp, Homo sapien
tctcctttccctaaaaactttggcatcaatgta

SEQ ID NO: 179114 - DNA, 33 bp, Homo sapien
tctcctttccctaaaatctttggcatcaatgta

SEQ ID NO: 179115 - DNA, 33 bp, Homo sapien
ctttcattttccctaaatctgacttctttcatt

SEQ ID NO: 179116 - DNA, 33 bp, Homo sapien
ctttcattttccctaagtctgacttctttcatt

SEQ ID NO: 179117 - DNA, 33 bp, Homo sapien
gtttttgagcacaaaaatactcgttttaatatg

SEQ ID NO: 179118 - DNA, 33 bp, Homo sapien
gtttttgagcacaaaattactcgttttaatatg

SEQ ID NO: 179119 - DNA, 33 bp, Homo sapien
tagaatattaagtgtcccagaaaaacattgctc

SEQ ID NO: 179120 - DNA, 33 bp, Homo sapien
tagaatattaagtgtctcagaaaaacattgctc

SEQ ID NO: 179121 - DNA, 33 bp, Homo sapien
agattgaaaagcagcaatacaaatatagtttta

SEQ ID NO: 179122 - DNA, 33 bp, Homo sapien
agattgaaaagcagcattacaaatatagtttta

SEQ ID NO: 179123 - DNA, 33 bp, Homo sapien
gtaaaacataagataactgacagggagaaaata

SEQ ID NO: 179124 - DNA, 33 bp, Homo sapien
gtaaaacataagataattgacagggagaaaata

SEQ ID NO: 179125 - DNA, 33 bp, Homo sapien
aaacaaagtgtggagtcaaatgaatgccaattt

SEQ ID NO: 179126 - DNA, 33 bp, Homo sapien
aaacaaagtgtggagtgaaatgaatgccaattt

SEQ ID NO: 179127 - DNA, 33 bp, Homo sapien
gttaatcagtagattgaacatagcaaaagaaat

SEQ ID NO: 179128 - DNA, 33 bp, Homo sapien
gttaatcagtagattggacatagcaaaagaaat

SEQ ID NO: 179129 - DNA, 33 bp, Homo sapien
aatctgcatggctataagtagattatttgaaaa

SEQ ID NO: 179130 - DNA, 33 bp, Homo sapien
aatctgcatggctatacgtagattatttgaaaa

SEQ ID NO: 179131 - DNA, 33 bp, Homo sapien
aaacaataggatgctacctgcagaaaggctggt

SEQ ID NO: 179132 - DNA, 33 bp, Homo sapien
aaacaataggatgctatctgcagaaaggctggt

SEQ ID NO: 179133 - DNA, 33 bp, Homo sapien
actcttcatagctaacaggtctcccattaaata

SEQ ID NO: 179134 - DNA, 33 bp, Homo sapien
actcttcatagctaacgggtctcccattaaata

SEQ ID NO: 179135 - DNA, 33 bp, Homo sapien
aaccagaggaaggttacagtgattaaaagaatc

SEQ ID NO: 179136 - DNA, 33 bp, Homo sapien
aaccagaggaaggttagagtgattaaaagaatc

SEQ ID NO: 179137 - DNA, 33 bp, Homo sapien
ctttcccctgtggacaataactaccatttcatc

SEQ ID NO: 179138 - DNA, 33 bp, Homo sapien
ctttcccctgtggacagtaactaccatttcatc

SEQ ID NO: 179139 - DNA, 33 bp, Homo sapien
agatagatggcatcaaagttacctggatgcccc

SEQ ID NO: 179140 - DNA, 33 bp, Homo sapien
agatagatggcatcaatgttacctggatgcccc

SEQ ID NO: 179141 - DNA, 33 bp, Homo sapien
tgctaatctgtgaccaagaaaatacataggcct

SEQ ID NO: 179142 - DNA, 33 bp, Homo sapien
tgctaatctgtgaccaggaaaatacataggcct

SEQ ID NO: 179143 - DNA, 33 bp, Homo sapien
cctctcagatctgaaaactcacttcttactggg

SEQ ID NO: 179144 - DNA, 33 bp, Homo sapien
cctctcagatctgaaagctcacttcttactggg

SEQ ID NO: 179145 - DNA, 33 bp, Homo sapien
tttcctttttccttcccagcttctaaagactaa

SEQ ID NO: 179146 - DNA, 33 bp, Homo sapien
tttcctttttccttcctagcttctaaagactaa

SEQ ID NO: 179147 - DNA, 33 bp, Homo sapien
aagttatgccgagatacgcaaataggtttgtgt

SEQ ID NO: 179148 - DNA, 33 bp, Homo sapien
aagttatgccgagatatgcaaataggtttgtgt

SEQ ID NO: 179149 - DNA, 33 bp, Homo sapien
gattagtgatttttgacgtttctactgtaattg

SEQ ID NO: 179150 - DNA, 33 bp, Homo sapien
gattagtgatttttgatgtttctactgtaattg

SEQ ID NO: 179151 - DNA, 33 bp, Homo sapien
actgtcagagtaccaacgaatttttccttgtgg

SEQ ID NO: 179152 - DNA, 33 bp, Homo sapien
actgtcagagtaccaatgaatttttccttgtgg

SEQ ID NO: 179153 - DNA, 33 bp, Homo sapien
tttccagcatcatttagagtgagtccctttccc

SEQ ID NO: 179154 - DNA, 33 bp, Homo sapien
tttccagcatcatttatagtgagtccctttccc

SEQ ID NO: 179155 - DNA, 33 bp, Homo sapien
atctgggacagaaaatcatatgcttttaatgca

SEQ ID NO: 179156 - DNA, 33 bp, Homo sapien
atctgggacagaaaatgatatgcttttaatgca

SEQ ID NO: 179157 - DNA, 33 bp, Homo sapien
tctcttatttcagcccaatgctttttataacaa

SEQ ID NO: 179158 - DNA, 33 bp, Homo sapien
tctcttatttcagcccgatgctttttataacaa

SEQ ID NO: 179159 - DNA, 33 bp, Homo sapien
taagacactatgctcacgttttgataaattata

SEQ ID NO: 179160 - DNA, 33 bp, Homo sapien
taagacactatgctcaggttttgataaattata

SEQ ID NO: 179161 - DNA, 33 bp, Homo sapien
atccccattctccaaaccttacaatgactttta

SEQ ID NO: 179162 - DNA, 33 bp, Homo sapien
atccccattctccaaatcttacaatgactttta

SEQ ID NO: 179163 - DNA, 33 bp, Homo sapien
atctgaaaaatgcacaatattcaggagagggta

SEQ ID NO: 179164 - DNA, 33 bp, Homo sapien
atctgaaaaatgcacagtattcaggagagggta

SEQ ID NO: 179165 - DNA, 33 bp, Homo sapien
tttctgtcaacaaatacagatagggcatatgta

SEQ ID NO: 179166 - DNA, 33 bp, Homo sapien
tttctgtcaacaaatagagatagggcatatgta

SEQ ID NO: 179167 - DNA, 33 bp, Homo sapien
tgaaaaagtatgagataagtctggttcatttta

SEQ ID NO: 179168 - DNA, 33 bp, Homo sapien
tgaaaaagtatgagatgagtctggttcatttta

SEQ ID NO: 179169 - DNA, 33 bp, Homo sapien
aggtagatagatggaaagtgcaaattaaatcac

SEQ ID NO: 179170 - DNA, 33 bp, Homo sapien
aggtagatagatggaaggtgcaaattaaatcac

SEQ ID NO: 179171 - DNA, 33 bp, Homo sapien
caaattaaatcacaatcagataatgccagacac

SEQ ID NO: 179172 - DNA, 33 bp, Homo sapien
caaattaaatcacaattagataatgccagacac

SEQ ID NO: 179173 - DNA, 33 bp, Homo sapien
acaaaaacagccagaactactgattaatggcag

SEQ ID NO: 179174 - DNA, 33 bp, Homo sapien
acaaaaacagccagaattactgattaatggcag

SEQ ID NO: 179175 - DNA, 33 bp, Homo sapien
atgacataagactaaccgagaagagcactcctg

SEQ ID NO: 179176 - DNA, 33 bp, Homo sapien
atgacataagactaactgagaagagcactcctg

SEQ ID NO: 179177 - DNA, 33 bp, Homo sapien
atgaagatcaaatcataaacgtgtagagaaagg

SEQ ID NO: 179178 - DNA, 33 bp, Homo sapien
atgaagatcaaatcatgaacgtgtagagaaagg

SEQ ID NO: 179179 - DNA, 33 bp, Homo sapien
gagaaaatcaagcacaatatttattgaccaata

SEQ ID NO: 179180 - DNA, 33 bp, Homo sapien
gagaaaatcaagcacagtatttattgaccaata

SEQ ID NO: 179181 - DNA, 33 bp, Homo sapien
attcagtttccctcacaaaaaaagcttaccttt

SEQ ID NO: 179182 - DNA, 33 bp, Homo sapien
attcagtttccctcaccaaaaaagcttaccttt

SEQ ID NO: 179183 - DNA, 33 bp, Homo sapien
attcctgtgggaaaacagcactgatagacaact

SEQ ID NO: 179184 - DNA, 33 bp, Homo sapien
attcctgtgggaaaacggcactgatagacaact

SEQ ID NO: 179185 - DNA, 33 bp, Homo sapien
gtctgaggagtaaaaaggctcccactttaaggg

SEQ ID NO: 179186 - DNA, 33 bp, Homo sapien
gtctgaggagtaaaaatgctcccactttaaggg

SEQ ID NO: 179187 - DNA, 33 bp, Homo sapien
aatctctgcaataatcccattgtcttccctctt

SEQ ID NO: 179188 - DNA, 33 bp, Homo sapien
aatctctgcaataatcgcattgtcttccctctt

SEQ ID NO: 179189 - DNA, 33 bp, Homo sapien
ttctataactggaaaaataccatgtatgatagc

SEQ ID NO: 179190 - DNA, 33 bp, Homo sapien
ttctataactggaaaactaccatgtatgatagc

SEQ ID NO: 179191 - DNA, 33 bp, Homo sapien
tgacactgccacaaagcagaactgggcccagct

SEQ ID NO: 179192 - DNA, 33 bp, Homo sapien
tgacactgccacaaaggagaactgggcccagct

SEQ ID NO: 179193 - DNA, 33 bp, Homo sapien
ttttctcacgggcttaggtataagagaagctga

SEQ ID NO: 179194 - DNA, 33 bp, Homo sapien
ttttctcacgggcttatgtataagagaagctga

SEQ ID NO: 179195 - DNA, 33 bp, Homo sapien
caacttacaaaaggaacatagcttccatctttc

SEQ ID NO: 179196 - DNA, 33 bp, Homo sapien
caacttacaaaaggaatatagcttccatctttc

SEQ ID NO: 179197 - DNA, 33 bp, Homo sapien
gaggaagttgaggagaacatgaagaataagaac

SEQ ID NO: 179198 - DNA, 33 bp, Homo sapien
gaggaagttgaggagagcatgaagaataagaac

SEQ ID NO: 179199 - DNA, 33 bp, Homo sapien
gctctatcttggcctacaaaacagctctgcaac

SEQ ID NO: 179200 - DNA, 33 bp, Homo sapien
gctctatcttggcctataaaacagctctgcaac

SEQ ID NO: 179201 - DNA, 33 bp, Homo sapien
gggaaatgtagtttacagattgtatgcctctga

SEQ ID NO: 179202 - DNA, 33 bp, Homo sapien
gggaaatgtagtttacggattgtatgcctctga

SEQ ID NO: 179203 - DNA, 33 bp, Homo sapien
gcagaagctagagctacaaactgtgcaggaaac

SEQ ID NO: 179204 - DNA, 33 bp, Homo sapien
gcagaagctagagctataaactgtgcaggaaac

SEQ ID NO: 179205 - DNA, 33 bp, Homo sapien
tgtccaaacagacagcaaagttcatgaaaacaa

SEQ ID NO: 179206 - DNA, 33 bp, Homo sapien
tgtccaaacagacagcgaagttcatgaaaacaa

SEQ ID NO: 179207 - DNA, 33 bp, Homo sapien
tattcaagaaaaaacacagcgaaatgaagacat

SEQ ID NO: 179208 - DNA, 33 bp, Homo sapien
tattcaagaaaaaacatagcgaaatgaagacat

SEQ ID NO: 179209 - DNA, 33 bp, Homo sapien
ggagcacatgtttagacatttgacacgttatct

SEQ ID NO: 179210 - DNA, 33 bp, Homo sapien
ggagcacatgtttagatatttgacacgttatct

SEQ ID NO: 179211 - DNA, 33 bp, Homo sapien
tatgtctgaaagggcaaagaaagaaagcaaata

SEQ ID NO: 179212 - DNA, 33 bp, Homo sapien
tatgtctgaaagggcagagaaagaaagcaaata

SEQ ID NO: 179213 - DNA, 33 bp, Homo sapien
tagagatgtagctaaaagaagagaatcctaaag

SEQ ID NO: 179214 - DNA, 33 bp, Homo sapien
tagagatgtagctaaacgaagagaatcctaaag

SEQ ID NO: 179215 - DNA, 33 bp, Homo sapien
ataatttagtattaggaagttctaacagagtca

SEQ ID NO: 179216 - DNA, 33 bp, Homo sapien
ataatttagtattagggagttctaacagagtca

SEQ ID NO: 179217 - DNA, 33 bp, Homo sapien
tgtgattatgaggaaaagtgagaataattctat

SEQ ID NO: 179218 - DNA, 33 bp, Homo sapien
tgtgattatgaggaaaggtgagaataattctat

SEQ ID NO: 179219 - DNA, 33 bp, Homo sapien
aaccactaattggtccactagtgaaatcaagag

SEQ ID NO: 179220 - DNA, 33 bp, Homo sapien
aaccactaattggtcccctagtgaaatcaagag

SEQ ID NO: 179221 - DNA, 33 bp, Homo sapien
gtcaacctctggagaactgattgtgaacttcgc

SEQ ID NO: 179222 - DNA, 33 bp, Homo sapien
gtcaacctctggagaattgattgtgaacttcgc

SEQ ID NO: 179223 - DNA, 33 bp, Homo sapien
aaagtatcaatctcaccagggtataagtaggca

SEQ ID NO: 179224 - DNA, 33 bp, Homo sapien
aaagtatcaatctcactagggtataagtaggca

SEQ ID NO: 179225 - DNA, 33 bp, Homo sapien
agagatacaataaagcactttctcactctttgc

SEQ ID NO: 179226 - DNA, 33 bp, Homo sapien
agagatacaataaagccctttctcactctttgc

SEQ ID NO: 179227 - DNA, 33 bp, Homo sapien
ttcatgagcatcttagaaggatcacttttccag

SEQ ID NO: 179228 - DNA, 33 bp, Homo sapien
ttcatgagcatcttaggaggatcacttttccag

SEQ ID NO: 179229 - DNA, 33 bp, Homo sapien
tgcaaatctttaagtaatacctctcttcatcaa

SEQ ID NO: 179230 - DNA, 33 bp, Homo sapien
tgcaaatctttaagtagtacctctcttcatcaa

SEQ ID NO: 179231 - DNA, 33 bp, Homo sapien
gccacatcttctctgactatcaattgatgaaga

SEQ ID NO: 179232 - DNA, 33 bp, Homo sapien
gccacatcttctctgagtatcaattgatgaaga

SEQ ID NO: 179233 - DNA, 33 bp, Homo sapien
tagggtctttgaagacgggacaaaaatgtttag

SEQ ID NO: 179234 - DNA, 33 bp, Homo sapien
tagggtctttgaagactggacaaaaatgtttag

SEQ ID NO: 179235 - DNA, 33 bp, Homo sapien
gtagcagggctaaaaccaaagtgaagaggtagg

SEQ ID NO: 179236 - DNA, 33 bp, Homo sapien
gtagcagggctaaaacgaaagtgaagaggtagg

SEQ ID NO: 179237 - DNA, 33 bp, Homo sapien
tgtataaccttctgtgaatcaaatagcaacaga

SEQ ID NO: 179238 - DNA, 33 bp, Homo sapien
tgtataaccttctgtgcatcaaatagcaacaga

SEQ ID NO: 179239 - DNA, 33 bp, Homo sapien
taagacacttttcagaggtcactacttcctgca

SEQ ID NO: 179240 - DNA, 33 bp, Homo sapien
taagacacttttcagatgtcactacttcctgca

SEQ ID NO: 179241 - DNA, 33 bp, Homo sapien
gcgatggcctgagacacggttgctggctgaaag

SEQ ID NO: 179242 - DNA, 33 bp, Homo sapien
gcgatggcctgagacatggttgctggctgaaag

SEQ ID NO: 179243 - DNA, 33 bp, Homo sapien
tttagcctgaattatccaagcatctgatatctt

SEQ ID NO: 179244 - DNA, 33 bp, Homo sapien
tttagcctgaattatctaagcatctgatatctt

SEQ ID NO: 179245 - DNA, 33 bp, Homo sapien
tgaaaatctgtgttagacatagcctttattctt

SEQ ID NO: 179246 - DNA, 33 bp, Homo sapien
tgaaaatctgtgttagtcatagcctttattctt

SEQ ID NO: 179247 - DNA, 33 bp, Homo sapien
gagcatttactggagactaagccttgtttcaag

SEQ ID NO: 179248 - DNA, 33 bp, Homo sapien
gagcatttactggagattaagccttgtttcaag

SEQ ID NO: 179249 - DNA, 33 bp, Homo sapien
aaatgctactcttgataacttatgatcaaaatt

SEQ ID NO: 179250 - DNA, 33 bp, Homo sapien
aaatgctactcttgattacttatgatcaaaatt

SEQ ID NO: 179251 - DNA, 33 bp, Homo sapien
ctatgggagtcctacacctttttatccaagact

SEQ ID NO: 179252 - DNA, 33 bp, Homo sapien
ctatgggagtcctacagctttttatccaagact

SEQ ID NO: 179253 - DNA, 33 bp, Homo sapien
ctcatttaacagtggaagaaattttctcaagag

SEQ ID NO: 179254 - DNA, 33 bp, Homo sapien
ctcatttaacagtggaggaaattttctcaagag

SEQ ID NO: 179255 - DNA, 33 bp, Homo sapien
aagtaatggaaagtaaccttttggagcttatga

SEQ ID NO: 179256 - DNA, 33 bp, Homo sapien
aagtaatggaaagtaatcttttggagcttatga

SEQ ID NO: 179257 - DNA, 33 bp, Homo sapien
attcagtgagttaatacgtgtaaagaacttgga

SEQ ID NO: 179258 - DNA, 33 bp, Homo sapien
attcagtgagttaatatgtgtaaagaacttgga

SEQ ID NO: 179259 - DNA, 33 bp, Homo sapien
gccaaagaacagagccaaaggaacccactctcc

SEQ ID NO: 179260 - DNA, 33 bp, Homo sapien
gccaaagaacagagccgaaggaacccactctcc

SEQ ID NO: 179261 - DNA, 33 bp, Homo sapien
tcgtcttcatcttgtaagagacaaaacagacag

SEQ ID NO: 179262 - DNA, 33 bp, Homo sapien
tcgtcttcatcttgtacgagacaaaacagacag

SEQ ID NO: 179263 - DNA, 33 bp, Homo sapien
ggacttccatctaactgactcattcaattaagc

SEQ ID NO: 179264 - DNA, 33 bp, Homo sapien
ggacttccatctaacttactcattcaattaagc

SEQ ID NO: 179265 - DNA, 33 bp, Homo sapien
cagtcttccaaaatacaggattgaaagagcagt

SEQ ID NO: 179266 - DNA, 33 bp, Homo sapien
cagtcttccaaaatacgggattgaaagagcagt

SEQ ID NO: 179267 - DNA, 33 bp, Homo sapien
gtcataagctgactccagaagttccaatcaccg

SEQ ID NO: 179268 - DNA, 33 bp, Homo sapien
gtcataagctgactccggaagttccaatcaccg

SEQ ID NO: 179269 - DNA, 33 bp, Homo sapien
aaattatcttgtttcacctacctccattctgta

SEQ ID NO: 179270 - DNA, 33 bp, Homo sapien
aaattatcttgtttcatctacctccattctgta

SEQ ID NO: 179271 - DNA, 33 bp, Homo sapien
tgaatatcagttgtcacctgaagtgtttcttca

SEQ ID NO: 179272 - DNA, 33 bp, Homo sapien
tgaatatcagttgtcatctgaagtgtttcttca

SEQ ID NO: 179273 - DNA, 33 bp, Homo sapien
ttgacaagccctaaccagctgcatggcattaga

SEQ ID NO: 179274 - DNA, 33 bp, Homo sapien
ttgacaagccctaaccggctgcatggcattaga

SEQ ID NO: 179275 - DNA, 33 bp, Homo sapien
ggcctgtttcctttcactaattgttctcactct

SEQ ID NO: 179276 - DNA, 33 bp, Homo sapien
ggcctgtttcctttcattaattgttctcactct

SEQ ID NO: 179277 - DNA, 33 bp, Homo sapien
atctttgtatgcttcaacctttcctcatatgac

SEQ ID NO: 179278 - DNA, 33 bp, Homo sapien
atctttgtatgcttcagcctttcctcatatgac

SEQ ID NO: 179279 - DNA, 33 bp, Homo sapien
taagttaaatacgaaccccattatcaagaactt

SEQ ID NO: 179280 - DNA, 33 bp, Homo sapien
taagttaaatacgaactccattatcaagaactt

SEQ ID NO: 179281 - DNA, 33 bp, Homo sapien
ttctcaccagtatttcacattatcattatttct

SEQ ID NO: 179282 - DNA, 33 bp, Homo sapien
ttctcaccagtatttcgcattatcattatttct

SEQ ID NO: 179283 - DNA, 33 bp, Homo sapien
ctggtgagaatactgaaaaactggattattcag

SEQ ID NO: 179284 - DNA, 33 bp, Homo sapien
ctggtgagaatactgagaaactggattattcag

SEQ ID NO: 179285 - DNA, 33 bp, Homo sapien
ttttcaccatgacaagaatttcttacgttgctt

SEQ ID NO: 179286 - DNA, 33 bp, Homo sapien
ttttcaccatgacaaggatttcttacgttgctt

SEQ ID NO: 179287 - DNA, 33 bp, Homo sapien
ctggttgtgacattagcatagttttgaaactta

SEQ ID NO: 179288 - DNA, 33 bp, Homo sapien
ctggttgtgacattagtatagttttgaaactta

SEQ ID NO: 179289 - DNA, 33 bp, Homo sapien
tgtgggattttttccactgaagtgtaggaattc

SEQ ID NO: 179290 - DNA, 33 bp, Homo sapien
tgtgggattttttccattgaagtgtaggaattc

SEQ ID NO: 179291 - DNA, 33 bp, Homo sapien
actaagctaagcagtactaagccaagaccacag

SEQ ID NO: 179292 - DNA, 33 bp, Homo sapien
actaagctaagcagtattaagccaagaccacag

SEQ ID NO: 179293 - DNA, 33 bp, Homo sapien
taggcctgctatcaaaattgtcttctaagggtt

SEQ ID NO: 179294 - DNA, 33 bp, Homo sapien
taggcctgctatcaaatttgtcttctaagggtt

SEQ ID NO: 179295 - DNA, 33 bp, Homo sapien
aaaagccattgatctaacatttcctatgaagga

SEQ ID NO: 179296 - DNA, 33 bp, Homo sapien
aaaagccattgatctagcatttcctatgaagga

SEQ ID NO: 179297 - DNA, 33 bp, Homo sapien
aatagtcttaaattaacccagagccgttcctgt

SEQ ID NO: 179298 - DNA, 33 bp, Homo sapien
aatagtcttaaattaatccagagccgttcctgt

SEQ ID NO: 179299 - DNA, 33 bp, Homo sapien
ctttattgattttgaaaaagcacttcaattcac

SEQ ID NO: 179300 - DNA, 33 bp, Homo sapien
ctttattgattttgaagaagcacttcaattcac

SEQ ID NO: 179301 - DNA, 33 bp, Homo sapien
gtatccaattccaaccaattctacctctgcaag

SEQ ID NO: 179302 - DNA, 33 bp, Homo sapien
gtatccaattccaaccgattctacctctgcaag

SEQ ID NO: 179303 - DNA, 33 bp, Homo sapien
ctcaggtttaatgtcaatactatctggtttata

SEQ ID NO: 179304 - DNA, 33 bp, Homo sapien
ctcaggtttaatgtcagtactatctggtttata

SEQ ID NO: 179305 - DNA, 33 bp, Homo sapien
catccagaaattatccaataaatgtcactgaac

SEQ ID NO: 179306 - DNA, 33 bp, Homo sapien
catccagaaattatcccataaatgtcactgaac

SEQ ID NO: 179307 - DNA, 33 bp, Homo sapien
aggctggttgggataacgagatagaaactgagg

SEQ ID NO: 179308 - DNA, 33 bp, Homo sapien
aggctggttgggataatgagatagaaactgagg

SEQ ID NO: 179309 - DNA, 33 bp, Homo sapien
aggggactaggtccaaataaaatgccaatgtca

SEQ ID NO: 179310 - DNA, 33 bp, Homo sapien
aggggactaggtccaattaaaatgccaatgtca

SEQ ID NO: 179311 - DNA, 33 bp, Homo sapien
tgcaaaagacactaaactcaggaaagacactaa

SEQ ID NO: 179312 - DNA, 33 bp, Homo sapien
tgcaaaagacactaaattcaggaaagacactaa

SEQ ID NO: 179313 - DNA, 33 bp, Homo sapien
ttttttttgcgttaaccgatatgattgtatgct

SEQ ID NO: 179314 - DNA, 33 bp, Homo sapien
ttttttttgcgttaactgatatgattgtatgct

SEQ ID NO: 179315 - DNA, 33 bp, Homo sapien
gaataaaagatgaatacaatccaaaccctgcac

SEQ ID NO: 179316 - DNA, 33 bp, Homo sapien
gaataaaagatgaatataatccaaaccctgcac

SEQ ID NO: 179317 - DNA, 33 bp, Homo sapien
aatacagtgagagcaaaggtttaaaaggagaaa

SEQ ID NO: 179318 - DNA, 33 bp, Homo sapien
aatacagtgagagcaagggtttaaaaggagaaa

SEQ ID NO: 179319 - DNA, 33 bp, Homo sapien
ccacgttgctcctttcacattcatagtaatatt

SEQ ID NO: 179320 - DNA, 33 bp, Homo sapien
ccacgttgctcctttcgcattcatagtaatatt

SEQ ID NO: 179321 - DNA, 33 bp, Homo sapien
caccacgcatgaggcaatcttagagaaagctga

SEQ ID NO: 179322 - DNA, 33 bp, Homo sapien
caccacgcatgaggcagtcttagagaaagctga

SEQ ID NO: 179323 - DNA, 33 bp, Homo sapien
gtctcctttactctagaactttcgtatattgga

SEQ ID NO: 179324 - DNA, 33 bp, Homo sapien
gtctcctttactctaggactttcgtatattgga

SEQ ID NO: 179325 - DNA, 33 bp, Homo sapien
tatatatgcatattcccaaattcagtgtgagag

SEQ ID NO: 179326 - DNA, 33 bp, Homo sapien
tatatatgcatattcctaaattcagtgtgagag

SEQ ID NO: 179327 - DNA, 33 bp, Homo sapien
tcttaacagcttaccactctcaacttttatttt

SEQ ID NO: 179328 - DNA, 33 bp, Homo sapien
tcttaacagcttaccattctcaacttttatttt

SEQ ID NO: 179329 - DNA, 33 bp, Homo sapien
cagcataaccaccataactaggaatgtgccgag

SEQ ID NO: 179330 - DNA, 33 bp, Homo sapien
cagcataaccaccatagctaggaatgtgccgag

SEQ ID NO: 179331 - DNA, 33 bp, Homo sapien
agtttccaacacagtagctggatatattaggct

SEQ ID NO: 179332 - DNA, 33 bp, Homo sapien
agtttccaacacagtatctggatatattaggct

SEQ ID NO: 179333 - DNA, 33 bp, Homo sapien
catcaaacattcctcaccatcaggaatccttgc

SEQ ID NO: 179334 - DNA, 33 bp, Homo sapien
catcaaacattcctcatcatcaggaatccttgc

SEQ ID NO: 179335 - DNA, 33 bp, Homo sapien
ctctcactttaaatcaaagctaaaaatgattaa

SEQ ID NO: 179336 - DNA, 33 bp, Homo sapien
ctctcactttaaatcacagctaaaaatgattaa

SEQ ID NO: 179337 - DNA, 33 bp, Homo sapien
ccagataagactaagaaatgatttgctattttt

SEQ ID NO: 179338 - DNA, 33 bp, Homo sapien
ccagataagactaagagatgatttgctattttt

SEQ ID NO: 179339 - DNA, 33 bp, Homo sapien
ggcttaaggtgtcatcaagtgccaaaaaggaga

SEQ ID NO: 179340 - DNA, 33 bp, Homo sapien
ggcttaaggtgtcatcgagtgccaaaaaggaga

SEQ ID NO: 179341 - DNA, 33 bp, Homo sapien
agacagaggctacagcaagctaagatagcacca

SEQ ID NO: 179342 - DNA, 33 bp, Homo sapien
agacagaggctacagcgagctaagatagcacca

SEQ ID NO: 179343 - DNA, 33 bp, Homo sapien
gctttacaaggatgtcaagatgtttcagtctat

SEQ ID NO: 179344 - DNA, 33 bp, Homo sapien
gctttacaaggatgtcgagatgtttcagtctat

SEQ ID NO: 179345 - DNA, 33 bp, Homo sapien
gcaaataaggaaaccaaggctcatagaagttat

SEQ ID NO: 179346 - DNA, 33 bp, Homo sapien
gcaaataaggaaaccagggctcatagaagttat

SEQ ID NO: 179347 - DNA, 33 bp, Homo sapien
atgaggtatgtttcaaatcatgaaaggctttga

SEQ ID NO: 179348 - DNA, 33 bp, Homo sapien
atgaggtatgtttcaagtcatgaaaggctttga

SEQ ID NO: 179349 - DNA, 33 bp, Homo sapien
cccagtatctttgcgaacttgatgtttttaatt

SEQ ID NO: 179350 - DNA, 33 bp, Homo sapien
cccagtatctttgcgatcttgatgtttttaatt

SEQ ID NO: 179351 - DNA, 33 bp, Homo sapien
gtcccttgcacctagaataatgcctggcacatg

SEQ ID NO: 179352 - DNA, 33 bp, Homo sapien
gtcccttgcacctagattaatgcctggcacatg

SEQ ID NO: 179353 - DNA, 33 bp, Homo sapien
taatacatgatttggactcaatacaaaggataa

SEQ ID NO: 179354 - DNA, 33 bp, Homo sapien
taatacatgatttggattcaatacaaaggataa

SEQ ID NO: 179355 - DNA, 33 bp, Homo sapien
agctcatttggttcaacatcagactcaccttga

SEQ ID NO: 179356 - DNA, 33 bp, Homo sapien
agctcatttggttcaatatcagactcaccttga

SEQ ID NO: 179357 - DNA, 33 bp, Homo sapien
tgagaatctcttgatacatggttaagactgagc

SEQ ID NO: 179358 - DNA, 33 bp, Homo sapien
tgagaatctcttgatagatggttaagactgagc

SEQ ID NO: 179359 - DNA, 33 bp, Homo sapien
gggctttaaactacatcatctagggaggaaaaa

SEQ ID NO: 179360 - DNA, 33 bp, Homo sapien
gggctttaaactacatgatctagggaggaaaaa

SEQ ID NO: 179361 - DNA, 33 bp, Homo sapien
tggcctatcatcaacaccttctgatcatctaat

SEQ ID NO: 179362 - DNA, 33 bp, Homo sapien
tggcctatcatcaacatcttctgatcatctaat

SEQ ID NO: 179363 - DNA, 33 bp, Homo sapien
caggataatgctgtaaaatgagtgttcagataa

SEQ ID NO: 179364 - DNA, 33 bp, Homo sapien
caggataatgctgtaagatgagtgttcagataa

SEQ ID NO: 179365 - DNA, 33 bp, Homo sapien
acgtccagcctaaacaagtaagttacaaataaa

SEQ ID NO: 179366 - DNA, 33 bp, Homo sapien
acgtccagcctaaacacgtaagttacaaataaa

SEQ ID NO: 179367 - DNA, 33 bp, Homo sapien
atcgataaaagtgaaaattgcgaataggagatt

SEQ ID NO: 179368 - DNA, 33 bp, Homo sapien
atcgataaaagtgaaagttgcgaataggagatt

SEQ ID NO: 179369 - DNA, 33 bp, Homo sapien
aggaggaaatagctcacgccaaatcattgggat

SEQ ID NO: 179370 - DNA, 33 bp, Homo sapien
aggaggaaatagctcatgccaaatcattgggat

SEQ ID NO: 179371 - DNA, 33 bp, Homo sapien
aaggctgaattggtataacttagtaacttggtg

SEQ ID NO: 179372 - DNA, 33 bp, Homo sapien
aaggctgaattggtatgacttagtaacttggtg

SEQ ID NO: 179373 - DNA, 33 bp, Homo sapien
ttttcgatttcatctaacacttcgctctaataa

SEQ ID NO: 179374 - DNA, 33 bp, Homo sapien
ttttcgatttcatctaccacttcgctctaataa

SEQ ID NO: 179375 - DNA, 33 bp, Homo sapien
cactttactgaacaataaagaaggtgagagaga

SEQ ID NO: 179376 - DNA, 33 bp, Homo sapien
cactttactgaacaatgaagaaggtgagagaga

SEQ ID NO: 179377 - DNA, 33 bp, Homo sapien
aatatgcagtttttaacatgctctgtggcaagg

SEQ ID NO: 179378 - DNA, 33 bp, Homo sapien
aatatgcagtttttaagatgctctgtggcaagg

SEQ ID NO: 179379 - DNA, 33 bp, Homo sapien
agaggtaggggcacaacggtgaaaaataaatat

SEQ ID NO: 179380 - DNA, 33 bp, Homo sapien
agaggtaggggcacaatggtgaaaaataaatat

SEQ ID NO: 179381 - DNA, 33 bp, Homo sapien
aagtgccaaggggatacggagatgagggaagtc

SEQ ID NO: 179382 - DNA, 33 bp, Homo sapien
aagtgccaaggggatatggagatgagggaagtc

SEQ ID NO: 179383 - DNA, 33 bp, Homo sapien
tatctaaccagtgtctcacatacagaaaggtgt

SEQ ID NO: 179384 - DNA, 33 bp, Homo sapien
tatctaaccagtgtctgacatacagaaaggtgt

SEQ ID NO: 179385 - DNA, 33 bp, Homo sapien
cactcttcctcctgaagtcttatggccttttcc

SEQ ID NO: 179386 - DNA, 33 bp, Homo sapien
cactcttcctcctgaattcttatggccttttcc

SEQ ID NO: 179387 - DNA, 33 bp, Homo sapien
ttgcactagcttcctcaacattacttagagaag

SEQ ID NO: 179388 - DNA, 33 bp, Homo sapien
ttgcactagcttcctcgacattacttagagaag

SEQ ID NO: 179389 - DNA, 33 bp, Homo sapien
acaatctactttcttaacatcatagttaaatat

SEQ ID NO: 179390 - DNA, 33 bp, Homo sapien
acaatctactttcttatcatcatagttaaatat

SEQ ID NO: 179391 - DNA, 33 bp, Homo sapien
ttgttatttgtttctgaatcttttgtgtttagt

SEQ ID NO: 179392 - DNA, 33 bp, Homo sapien
ttgttatttgtttctgtatcttttgtgtttagt

SEQ ID NO: 179393 - DNA, 33 bp, Homo sapien
ttttactagtatagcaactctttttttagaagt

SEQ ID NO: 179394 - DNA, 33 bp, Homo sapien
ttttactagtatagcagctctttttttagaagt

SEQ ID NO: 179395 - DNA, 33 bp, Homo sapien
aacctactggtggtaggaaaaacaaagttttga

SEQ ID NO: 179396 - DNA, 33 bp, Homo sapien
aacctactggtggtagtaaaaacaaagttttga

SEQ ID NO: 179397 - DNA, 33 bp, Homo sapien
aataaccttctcctgcgagttattagattgttc

SEQ ID NO: 179398 - DNA, 33 bp, Homo sapien
aataaccttctcctgctagttattagattgttc

SEQ ID NO: 179399 - DNA, 33 bp, Homo sapien
atatagtgaaccttaaataaatgccaacttccc

SEQ ID NO: 179400 - DNA, 33 bp, Homo sapien
atatagtgaaccttaagtaaatgccaacttccc

SEQ ID NO: 179401 - DNA, 33 bp, Homo sapien
atcccttgatgaggtaggaaacaggcaatgtga

SEQ ID NO: 179402 - DNA, 33 bp, Homo sapien
atcccttgatgaggtatgaaacaggcaatgtga

SEQ ID NO: 179403 - DNA, 33 bp, Homo sapien
tgtctgctcacacaaccgttgtaagaattatag

SEQ ID NO: 179404 - DNA, 33 bp, Homo sapien
tgtctgctcacacaactgttgtaagaattatag

SEQ ID NO: 179405 - DNA, 33 bp, Homo sapien
tctggttgtaaattgacgaatcagattacatga

SEQ ID NO: 179406 - DNA, 33 bp, Homo sapien
tctggttgtaaattgaggaatcagattacatga

SEQ ID NO: 179407 - DNA, 33 bp, Homo sapien
gagttgaagctgtctgaactgttcaatacaaaa

SEQ ID NO: 179408 - DNA, 33 bp, Homo sapien
gagttgaagctgtctggactgttcaatacaaaa

SEQ ID NO: 179409 - DNA, 33 bp, Homo sapien
tcagactctcctaaaacgactctgtgattattt

SEQ ID NO: 179410 - DNA, 33 bp, Homo sapien
tcagactctcctaaaatgactctgtgattattt

SEQ ID NO: 179411 - DNA, 33 bp, Homo sapien
caatttcctcacctgtaaaatagagatagtaat

SEQ ID NO: 179412 - DNA, 33 bp, Homo sapien
caatttcctcacctgtgaaatagagatagtaat

SEQ ID NO: 179413 - DNA, 33 bp, Homo sapien
atcaggactgatacaccgagttcatgtaaaaga

SEQ ID NO: 179414 - DNA, 33 bp, Homo sapien
atcaggactgatacactgagttcatgtaaaaga

SEQ ID NO: 179415 - DNA, 33 bp, Homo sapien
taattaatattttctcagaatgactcagtgttg

SEQ ID NO: 179416 - DNA, 33 bp, Homo sapien
taattaatattttctccgaatgactcagtgttg

SEQ ID NO: 179417 - DNA, 33 bp, Homo sapien
tagcctcatgactaaacagttgtgtgagataat

SEQ ID NO: 179418 - DNA, 33 bp, Homo sapien
tagcctcatgactaaatagttgtgtgagataat

SEQ ID NO: 179419 - DNA, 33 bp, Homo sapien
gtaaataggagttagacgcagaatggaacacat

SEQ ID NO: 179420 - DNA, 33 bp, Homo sapien
gtaaataggagttagaggcagaatggaacacat

SEQ ID NO: 179421 - DNA, 33 bp, Homo sapien
ggaactgtaagaagcaaaaagtattcaacgaat

SEQ ID NO: 179422 - DNA, 33 bp, Homo sapien
ggaactgtaagaagcagaaagtattcaacgaat

SEQ ID NO: 179423 - DNA, 33 bp, Homo sapien
gtagacagagtggaaacggctttgtgtagcatc

SEQ ID NO: 179424 - DNA, 33 bp, Homo sapien
gtagacagagtggaaatggctttgtgtagcatc

SEQ ID NO: 179425 - DNA, 33 bp, Homo sapien
ccaggcacgcctggaaatgtcctaaaaaaagcc

SEQ ID NO: 179426 - DNA, 33 bp, Homo sapien
ccaggcacgcctggaagtgtcctaaaaaaagcc

SEQ ID NO: 179427 - DNA, 33 bp, Homo sapien
acacacagaaataagagaaaaagttgcaggcaa

SEQ ID NO: 179428 - DNA, 33 bp, Homo sapien
acacacagaaataagataaaaagttgcaggcaa

SEQ ID NO: 179429 - DNA, 33 bp, Homo sapien
ctatagattctgttgaaattctcaagatgggga

SEQ ID NO: 179430 - DNA, 33 bp, Homo sapien
ctatagattctgttgagattctcaagatgggga

SEQ ID NO: 179431 - DNA, 33 bp, Homo sapien
tacacttttttttccacgctaatcgagaaaagc

SEQ ID NO: 179432 - DNA, 33 bp, Homo sapien
tacacttttttttccatgctaatcgagaaaagc

SEQ ID NO: 179433 - DNA, 33 bp, Homo sapien
agcataggattataaaatgtgggttagccatca

SEQ ID NO: 179434 - DNA, 33 bp, Homo sapien
agcataggattataaagtgtgggttagccatca

SEQ ID NO: 179435 - DNA, 33 bp, Homo sapien
gcaatggcagcctccaatgatacaaccaggcaa

SEQ ID NO: 179436 - DNA, 33 bp, Homo sapien
gcaatggcagcctccagtgatacaaccaggcaa

SEQ ID NO: 179437 - DNA, 33 bp, Homo sapien
tttatgtccagataaacggattttctattactg

SEQ ID NO: 179438 - DNA, 33 bp, Homo sapien
tttatgtccagataaatggattttctattactg

SEQ ID NO: 179439 - DNA, 33 bp, Homo sapien
caagcacaaaagaataccagcccttgaatgaga

SEQ ID NO: 179440 - DNA, 33 bp, Homo sapien
caagcacaaaagaatatcagcccttgaatgaga

SEQ ID NO: 179441 - DNA, 33 bp, Homo sapien
acttcagctacggagccaaaataacagttctct

SEQ ID NO: 179442 - DNA, 33 bp, Homo sapien
acttcagctacggagctaaaataacagttctct

SEQ ID NO: 179443 - DNA, 33 bp, Homo sapien
caaagaggtctaatgcgattatagaaccccgat

SEQ ID NO: 179444 - DNA, 33 bp, Homo sapien
caaagaggtctaatgctattatagaaccccgat

SEQ ID NO: 179445 - DNA, 33 bp, Homo sapien
agtccaatagtaacaacgtgatttacagtaggt

SEQ ID NO: 179446 - DNA, 33 bp, Homo sapien
agtccaatagtaacaatgtgatttacagtaggt

SEQ ID NO: 179447 - DNA, 33 bp, Homo sapien
tgtaatagaagtccaaggtaaacaccaaggtat

SEQ ID NO: 179448 - DNA, 33 bp, Homo sapien
tgtaatagaagtccaatgtaaacaccaaggtat

SEQ ID NO: 179449 - DNA, 33 bp, Homo sapien
taataaatcataatcactgagtattatagcagc

SEQ ID NO: 179450 - DNA, 33 bp, Homo sapien
taataaatcataatcattgagtattatagcagc

SEQ ID NO: 179451 - DNA, 33 bp, Homo sapien
agtgagatggatggaaatactactcagtcaatc

SEQ ID NO: 179452 - DNA, 33 bp, Homo sapien
agtgagatggatggaagtactactcagtcaatc

SEQ ID NO: 179453 - DNA, 33 bp, Homo sapien
attaatttagtgttggcatttaagcatgattac

SEQ ID NO: 179454 - DNA, 33 bp, Homo sapien
attaatttagtgttggtatttaagcatgattac

SEQ ID NO: 179455 - DNA, 33 bp, Homo sapien
cagtcatattcttctacgttaaactggtccaca

SEQ ID NO: 179456 - DNA, 33 bp, Homo sapien
cagtcatattcttctatgttaaactggtccaca

SEQ ID NO: 179457 - DNA, 33 bp, Homo sapien
gtgaaatcattcaagaaagagggaatagtcaat

SEQ ID NO: 179458 - DNA, 33 bp, Homo sapien
gtgaaatcattcaagacagagggaatagtcaat

SEQ ID NO: 179459 - DNA, 33 bp, Homo sapien
tttgatgagtgttctcaatactcatatgaaaag

SEQ ID NO: 179460 - DNA, 33 bp, Homo sapien
tttgatgagtgttctcgatactcatatgaaaag

SEQ ID NO: 179461 - DNA, 33 bp, Homo sapien
ctggaccatccaacaaattgtcaaagcctgtga

SEQ ID NO: 179462 - DNA, 33 bp, Homo sapien
ctggaccatccaacaagttgtcaaagcctgtga

SEQ ID NO: 179463 - DNA, 33 bp, Homo sapien
tgtaacctatgatagacgttctttgtggtttta

SEQ ID NO: 179464 - DNA, 33 bp, Homo sapien
tgtaacctatgatagatgttctttgtggtttta

SEQ ID NO: 179465 - DNA, 33 bp, Homo sapien
gctaagtaagaccagtaaaaacttgatccctgg

SEQ ID NO: 179466 - DNA, 33 bp, Homo sapien
gctaagtaagaccagtgaaaacttgatccctgg

SEQ ID NO: 179467 - DNA, 33 bp, Homo sapien
ctatgttatatcctcaataaatgaaagcctctt

SEQ ID NO: 179468 - DNA, 33 bp, Homo sapien
ctatgttatatcctcagtaaatgaaagcctctt

SEQ ID NO: 179469 - DNA, 33 bp, Homo sapien
gccccagtcatctaaaccagaaacctggaagtc

SEQ ID NO: 179470 - DNA, 33 bp, Homo sapien
gccccagtcatctaaatcagaaacctggaagtc

SEQ ID NO: 179471 - DNA, 33 bp, Homo sapien
gtggtgtgtggagggggataaagcagggatcag

SEQ ID NO: 179472 - DNA, 33 bp, Homo sapien
gtggtgtgtggaggggtataaagcagggatcag

SEQ ID NO: 179473 - DNA, 33 bp, Homo sapien
cattaatctgaaggcacatttttctaatggatt

SEQ ID NO: 179474 - DNA, 33 bp, Homo sapien
cattaatctgaaggcatatttttctaatggatt

SEQ ID NO: 179475 - DNA, 33 bp, Homo sapien
tcctgtatcatcattcactttgccttttgctaa

SEQ ID NO: 179476 - DNA, 33 bp, Homo sapien
tcctgtatcatcattccctttgccttttgctaa

SEQ ID NO: 179477 - DNA, 33 bp, Homo sapien
caggagattctggggtgacagctcaaaaataca

SEQ ID NO: 179478 - DNA, 33 bp, Homo sapien
caggagattctggggttacagctcaaaaataca

SEQ ID NO: 179479 - DNA, 33 bp, Homo sapien
cactgcctgagctctacgtttgcctgtttcagc

SEQ ID NO: 179480 - DNA, 33 bp, Homo sapien
cactgcctgagctctatgtttgcctgtttcagc

SEQ ID NO: 179481 - DNA, 33 bp, Homo sapien
tataaactgttctgccaaagtttctaccagttt

SEQ ID NO: 179482 - DNA, 33 bp, Homo sapien
tataaactgttctgcccaagtttctaccagttt

SEQ ID NO: 179483 - DNA, 33 bp, Homo sapien
gtctgcaccaaagcaaaagcagtggcagaaggc

SEQ ID NO: 179484 - DNA, 33 bp, Homo sapien
gtctgcaccaaagcaacagcagtggcagaaggc

SEQ ID NO: 179485 - DNA, 33 bp, Homo sapien
gggtaacagaaatgagcaatatctggagtcctc

SEQ ID NO: 179486 - DNA, 33 bp, Homo sapien
gggtaacagaaatgaggaatatctggagtcctc

SEQ ID NO: 179487 - DNA, 33 bp, Homo sapien
agcagcaggcaacaagccattcactgaagtgaa

SEQ ID NO: 179488 - DNA, 33 bp, Homo sapien
agcagcaggcaacaaggcattcactgaagtgaa

SEQ ID NO: 179489 - DNA, 33 bp, Homo sapien
gagttccataagcctacgatcaaatacaagctc

SEQ ID NO: 179490 - DNA, 33 bp, Homo sapien
gagttccataagcctaggatcaaatacaagctc

SEQ ID NO: 179491 - DNA, 33 bp, Homo sapien
caccaatcacaggagcaaaagggtgtgacaaaa

SEQ ID NO: 179492 - DNA, 33 bp, Homo sapien
caccaatcacaggagcgaaagggtgtgacaaaa

SEQ ID NO: 179493 - DNA, 33 bp, Homo sapien
acagggaccagtaaggaaagacgtaagacagac

SEQ ID NO: 179494 - DNA, 33 bp, Homo sapien
acagggaccagtaagggaagacgtaagacagac

SEQ ID NO: 179495 - DNA, 33 bp, Homo sapien
aactcaattcctgcaaagtaactgcagagtctt

SEQ ID NO: 179496 - DNA, 33 bp, Homo sapien
aactcaattcctgcaaggtaactgcagagtctt

SEQ ID NO: 179497 - DNA, 33 bp, Homo sapien
atgttcacaaaatccaagtttgctcttgggact

SEQ ID NO: 179498 - DNA, 33 bp, Homo sapien
atgttcacaaaatccaggtttgctcttgggact

SEQ ID NO: 179499 - DNA, 33 bp, Homo sapien
ctctctgtcccacaaacttaggtaccactcgaa

SEQ ID NO: 179500 - DNA, 33 bp, Homo sapien
ctctctgtcccacaaagttaggtaccactcgaa

SEQ ID NO: 179501 - DNA, 33 bp, Homo sapien
ttttgttacatctgtacggagcccctttcctgg

SEQ ID NO: 179502 - DNA, 33 bp, Homo sapien
ttttgttacatctgtatggagcccctttcctgg

SEQ ID NO: 179503 - DNA, 33 bp, Homo sapien
ttcggaataagatgtccattaaatgtagagtac

SEQ ID NO: 179504 - DNA, 33 bp, Homo sapien
ttcggaataagatgtcgattaaatgtagagtac

SEQ ID NO: 179505 - DNA, 33 bp, Homo sapien
ttgaagatttctgctcgagactacatatatatg

SEQ ID NO: 179506 - DNA, 33 bp, Homo sapien
ttgaagatttctgctctagactacatatatatg

SEQ ID NO: 179507 - DNA, 33 bp, Homo sapien
atcactattttttacagggattgcgttctgcgc

SEQ ID NO: 179508 - DNA, 33 bp, Homo sapien
atcactattttttacatggattgcgttctgcgc

SEQ ID NO: 179509 - DNA, 33 bp, Homo sapien
ctctccacagaagaagaagccaggtcttaggag

SEQ ID NO: 179510 - DNA, 33 bp, Homo sapien
ctctccacagaagaagcagccaggtcttaggag

SEQ ID NO: 179511 - DNA, 33 bp, Homo sapien
aacagagtagttccacaaatgattaaagctcag

SEQ ID NO: 179512 - DNA, 33 bp, Homo sapien
aacagagtagttccacgaatgattaaagctcag

SEQ ID NO: 179513 - DNA, 33 bp, Homo sapien
gacctcttgtgagaagaaatacctcaaccttag

SEQ ID NO: 179514 - DNA, 33 bp, Homo sapien
gacctcttgtgagaagcaatacctcaaccttag

SEQ ID NO: 179515 - DNA, 33 bp, Homo sapien
agagaactactgtgagacccaagtcaaataata

SEQ ID NO: 179516 - DNA, 33 bp, Homo sapien
agagaactactgtgaggcccaagtcaaataata

SEQ ID NO: 179517 - DNA, 33 bp, Homo sapien
gatggataggtgaatagatatgtgacaaatcaa

SEQ ID NO: 179518 - DNA, 33 bp, Homo sapien
gatggataggtgaatatatatgtgacaaatcaa

SEQ ID NO: 179519 - DNA, 33 bp, Homo sapien
gcaatgatgcacactccatcttcctttggaaag

SEQ ID NO: 179520 - DNA, 33 bp, Homo sapien
gcaatgatgcacactctatcttcctttggaaag

SEQ ID NO: 179521 - DNA, 33 bp, Homo sapien
gagaattgagctaaaccgagagctaattaaaag

SEQ ID NO: 179522 - DNA, 33 bp, Homo sapien
gagaattgagctaaactgagagctaattaaaag

SEQ ID NO: 179523 - DNA, 33 bp, Homo sapien
tttttttgacttaccacgaaaaatcgagagttg

SEQ ID NO: 179524 - DNA, 33 bp, Homo sapien
tttttttgacttaccatgaaaaatcgagagttg

SEQ ID NO: 179525 - DNA, 33 bp, Homo sapien
tcataagatatattaaaccatctattgccaaca

SEQ ID NO: 179526 - DNA, 33 bp, Homo sapien
tcataagatatattaagccatctattgccaaca

SEQ ID NO: 179527 - DNA, 33 bp, Homo sapien
ttcaaaatgcagcacacaactacaaagtagaca

SEQ ID NO: 179528 - DNA, 33 bp, Homo sapien
ttcaaaatgcagcacataactacaaagtagaca

SEQ ID NO: 179529 - DNA, 33 bp, Homo sapien
gtagatggggaagggcaacaatgcaagctgggc

SEQ ID NO: 179530 - DNA, 33 bp, Homo sapien
gtagatggggaagggcgacaatgcaagctgggc

SEQ ID NO: 179531 - DNA, 33 bp, Homo sapien
atagggttgtgctgagaatctaataaaatgttg

SEQ ID NO: 179532 - DNA, 33 bp, Homo sapien
atagggttgtgctgaggatctaataaaatgttg

SEQ ID NO: 179533 - DNA, 33 bp, Homo sapien
aaattcatcaagctacacattttgatttgattt

SEQ ID NO: 179534 - DNA, 33 bp, Homo sapien
aaattcatcaagctacgcattttgatttgattt

SEQ ID NO: 179535 - DNA, 33 bp, Homo sapien
ttgtactggacatgaacgtttcttaatgattat

SEQ ID NO: 179536 - DNA, 33 bp, Homo sapien
ttgtactggacatgaatgtttcttaatgattat

SEQ ID NO: 179537 - DNA, 33 bp, Homo sapien
agtagacccttaactgcagcctcttgtcaacat

SEQ ID NO: 179538 - DNA, 33 bp, Homo sapien
agtagacccttaactgtagcctcttgtcaacat

SEQ ID NO: 179539 - DNA, 33 bp, Homo sapien
tgttctatctacaacaagctaactgcttcccag

SEQ ID NO: 179540 - DNA, 33 bp, Homo sapien
tgttctatctacaacacgctaactgcttcccag

SEQ ID NO: 179541 - DNA, 33 bp, Homo sapien
tgttgtgttataaatagaaagtgggatgatttg

SEQ ID NO: 179542 - DNA, 33 bp, Homo sapien
tgttgtgttataaatataaagtgggatgatttg

SEQ ID NO: 179543 - DNA, 33 bp, Homo sapien
tagagaatccaaaaataaagccacatgcttgca

SEQ ID NO: 179544 - DNA, 33 bp, Homo sapien
tagagaatccaaaaatcaagccacatgcttgca

SEQ ID NO: 179545 - DNA, 33 bp, Homo sapien
acctcgtccataaaaactgcttattttcctgaa

SEQ ID NO: 179546 - DNA, 33 bp, Homo sapien
acctcgtccataaaaagtgcttattttcctgaa

SEQ ID NO: 179547 - DNA, 33 bp, Homo sapien
gtacttagatgggagacagattaagttcttcac

SEQ ID NO: 179548 - DNA, 33 bp, Homo sapien
gtacttagatgggagagagattaagttcttcac

SEQ ID NO: 179549 - DNA, 33 bp, Homo sapien
aaactgcatcagttgaacaattatctatggccg

SEQ ID NO: 179550 - DNA, 33 bp, Homo sapien
aaactgcatcagttgagcaattatctatggccg

SEQ ID NO: 179551 - DNA, 33 bp, Homo sapien
ctgactttaaaaagaacggggatgattgttgtt

SEQ ID NO: 179552 - DNA, 33 bp, Homo sapien
ctgactttaaaaagaagggggatgattgttgtt

SEQ ID NO: 179553 - DNA, 33 bp, Homo sapien
ataactacaaataatagggacagaaggccaaca

SEQ ID NO: 179554 - DNA, 33 bp, Homo sapien
ataactacaaataatatggacagaaggccaaca

SEQ ID NO: 179555 - DNA, 33 bp, Homo sapien
aggtgttatatgagagccattttaactagaatc

SEQ ID NO: 179556 - DNA, 33 bp, Homo sapien
aggtgttatatgagaggcattttaactagaatc

SEQ ID NO: 179557 - DNA, 33 bp, Homo sapien
tctctttctacattaaactctttctggcctctg

SEQ ID NO: 179558 - DNA, 33 bp, Homo sapien
tctctttctacattaagctctttctggcctctg

SEQ ID NO: 179559 - DNA, 33 bp, Homo sapien
aggtgtgtgctagtaaaacctttcaaaatatat

SEQ ID NO: 179560 - DNA, 33 bp, Homo sapien
aggtgtgtgctagtaatacctttcaaaatatat

SEQ ID NO: 179561 - DNA, 33 bp, Homo sapien
gctcagtccatgagcaaattatccattttaagc

SEQ ID NO: 179562 - DNA, 33 bp, Homo sapien
gctcagtccatgagcagattatccattttaagc

SEQ ID NO: 179563 - DNA, 33 bp, Homo sapien
aggcaacatggtacaacggctgtgatgctgaca

SEQ ID NO: 179564 - DNA, 33 bp, Homo sapien
aggcaacatggtacaagggctgtgatgctgaca

SEQ ID NO: 179565 - DNA, 33 bp, Homo sapien
agaaagaagatagtcacaagtaattaaaggtgt

SEQ ID NO: 179566 - DNA, 33 bp, Homo sapien
agaaagaagatagtcagaagtaattaaaggtgt

SEQ ID NO: 179567 - DNA, 33 bp, Homo sapien
tttttatttttttatacggttctgacaggatat

SEQ ID NO: 179568 - DNA, 33 bp, Homo sapien
tttttatttttttatatggttctgacaggatat

SEQ ID NO: 179569 - DNA, 33 bp, Homo sapien
gtaggcagacgccatacgataaccagaattttc

SEQ ID NO: 179570 - DNA, 33 bp, Homo sapien
gtaggcagacgccatatgataaccagaattttc

SEQ ID NO: 179571 - DNA, 33 bp, Homo sapien
ctattctctttggctacgatattcttcccttag

SEQ ID NO: 179572 - DNA, 33 bp, Homo sapien
ctattctctttggctatgatattcttcccttag

SEQ ID NO: 179573 - DNA, 33 bp, Homo sapien
agtaaggactgtataccacactgcttctaagta

SEQ ID NO: 179574 - DNA, 33 bp, Homo sapien
agtaaggactgtatactacactgcttctaagta

SEQ ID NO: 179575 - DNA, 33 bp, Homo sapien
tttcttagaacttaaaatgacctcggaaaggac

SEQ ID NO: 179576 - DNA, 33 bp, Homo sapien
tttcttagaacttaaagtgacctcggaaaggac

SEQ ID NO: 179577 - DNA, 33 bp, Homo sapien
tggcaagtaaaatttcaaagttcattgcttcac

SEQ ID NO: 179578 - DNA, 33 bp, Homo sapien
tggcaagtaaaatttcgaagttcattgcttcac

SEQ ID NO: 179579 - DNA, 33 bp, Homo sapien
ttcacataattcattacaatggaaatgttaaca

SEQ ID NO: 179580 - DNA, 33 bp, Homo sapien
ttcacataattcattagaatggaaatgttaaca

SEQ ID NO: 179581 - DNA, 33 bp, Homo sapien
ggggagtcacagataaactgctgtggtctgcat

SEQ ID NO: 179582 - DNA, 33 bp, Homo sapien
ggggagtcacagataacctgctgtggtctgcat

SEQ ID NO: 179583 - DNA, 33 bp, Homo sapien
ttggtggcttaagacacggtctattcttgagag

SEQ ID NO: 179584 - DNA, 33 bp, Homo sapien
ttggtggcttaagacatggtctattcttgagag

SEQ ID NO: 179585 - DNA, 33 bp, Homo sapien
cccagccgtagttatggacccaggcatccctgt

SEQ ID NO: 179586 - DNA, 33 bp, Homo sapien
cccagccgtagttatgtacccaggcatccctgt

SEQ ID NO: 179587 - DNA, 33 bp, Homo sapien
aaggaaaatgatataaagtctgagatgaaagat

SEQ ID NO: 179588 - DNA, 33 bp, Homo sapien
aaggaaaatgatataaggtctgagatgaaagat

SEQ ID NO: 179589 - DNA, 33 bp, Homo sapien
cctagacttctgcatccagataaaatatctttt

SEQ ID NO: 179590 - DNA, 33 bp, Homo sapien
cctagacttctgcatcgagataaaatatctttt

SEQ ID NO: 179591 - DNA, 33 bp, Homo sapien
ggtggatgaaaaaagaaaaattgctttatcata

SEQ ID NO: 179592 - DNA, 33 bp, Homo sapien
ggtggatgaaaaaagagaaattgctttatcata

SEQ ID NO: 179593 - DNA, 33 bp, Homo sapien
tgctcaagactgataactagttttaagtatcct

SEQ ID NO: 179594 - DNA, 33 bp, Homo sapien
tgctcaagactgataagtagttttaagtatcct

SEQ ID NO: 179595 - DNA, 33 bp, Homo sapien
tgcttttaccaggataaggctttatgtgtatca

SEQ ID NO: 179596 - DNA, 33 bp, Homo sapien
tgcttttaccaggatagggctttatgtgtatca

SEQ ID NO: 179597 - DNA, 33 bp, Homo sapien
cagacctggagctcaaatgcctgcaggcttgta

SEQ ID NO: 179598 - DNA, 33 bp, Homo sapien
cagacctggagctcaattgcctgcaggcttgta

SEQ ID NO: 179599 - DNA, 33 bp, Homo sapien
caaaacagtaactacaacagattacctggagtt

SEQ ID NO: 179600 - DNA, 33 bp, Homo sapien
caaaacagtaactacagcagattacctggagtt

SEQ ID NO: 179601 - DNA, 33 bp, Homo sapien
ttgatttttgaactaagtaatctctctgaacct

SEQ ID NO: 179602 - DNA, 33 bp, Homo sapien
ttgatttttgaactaattaatctctctgaacct

SEQ ID NO: 179603 - DNA, 33 bp, Homo sapien
tctggctgcccccacaaagttgtctgtaagaag

SEQ ID NO: 179604 - DNA, 33 bp, Homo sapien
tctggctgcccccacatagttgtctgtaagaag

SEQ ID NO: 179605 - DNA, 33 bp, Homo sapien
caacctctgttcctcacacagacttctattatt

SEQ ID NO: 179606 - DNA, 33 bp, Homo sapien
caacctctgttcctcatacagacttctattatt

SEQ ID NO: 179607 - DNA, 33 bp, Homo sapien
tgtcacctgttttctacgcctaccctgttttac

SEQ ID NO: 179608 - DNA, 33 bp, Homo sapien
tgtcacctgttttctatgcctaccctgttttac

SEQ ID NO: 179609 - DNA, 33 bp, Homo sapien
tgttatatcactttccactgcatcagggacatt

SEQ ID NO: 179610 - DNA, 33 bp, Homo sapien
tgttatatcactttccgctgcatcagggacatt

SEQ ID NO: 179611 - DNA, 33 bp, Homo sapien
ttcactaagtggtataaaagaaacatcaagaga

SEQ ID NO: 179612 - DNA, 33 bp, Homo sapien
ttcactaagtggtatacaagaaacatcaagaga

SEQ ID NO: 179613 - DNA, 33 bp, Homo sapien
agttaacgtgtcaaaaccttggtaagtgttgaa

SEQ ID NO: 179614 - DNA, 33 bp, Homo sapien
agttaacgtgtcaaaatcttggtaagtgttgaa

SEQ ID NO: 179615 - DNA, 33 bp, Homo sapien
ttgagagctgaaaggacgccaaagaaagactgg

SEQ ID NO: 179616 - DNA, 33 bp, Homo sapien
ttgagagctgaaaggaggccaaagaaagactgg

SEQ ID NO: 179617 - DNA, 33 bp, Homo sapien
ttggaacccaggtctacctaattctagagtgct

SEQ ID NO: 179618 - DNA, 33 bp, Homo sapien
ttggaacccaggtctatctaattctagagtgct

SEQ ID NO: 179619 - DNA, 33 bp, Homo sapien
ggtaatgcatattccaaacttgcctttcaattc

SEQ ID NO: 179620 - DNA, 33 bp, Homo sapien
ggtaatgcatattccagacttgcctttcaattc

SEQ ID NO: 179621 - DNA, 33 bp, Homo sapien
ctgtctggagcctacactggggacagtacaagg

SEQ ID NO: 179622 - DNA, 33 bp, Homo sapien
ctgtctggagcctacattggggacagtacaagg

SEQ ID NO: 179623 - DNA, 33 bp, Homo sapien; identical to SEQ ID NO: 179621

SEQ ID NO: 179624 - DNA, 33 bp, Homo sapien; identical to SEQ ID NO: 179622

SEQ ID NO: 179625 - DNA, 33 bp, Homo sapien
ttgtaaatggagatgccctactgagggatggtg

SEQ ID NO: 179626 - DNA, 33 bp, Homo sapien
ttgtaaatggagatgctctactgagggatggtg

SEQ ID NO: 179627 - DNA, 33 bp, Homo sapien
aatgaggttcctaataaactatcacaaaatgct

SEQ ID NO: 179628 - DNA, 33 bp, Homo sapien
aatgaggttcctaatacactatcacaaaatgct

SEQ ID NO: 179629 - DNA, 33 bp, Homo sapien
gcgtgttttacagatgccagagcttgttcttaa

SEQ ID NO: 179630 - DNA, 33 bp, Homo sapien
gcgtgttttacagatgtcagagcttgttcttaa

SEQ ID NO: 179631 - DNA, 33 bp, Homo sapien
aggacacaaaccattcaaatcatagcactcctt

SEQ ID NO: 179632 - DNA, 33 bp, Homo sapien
aggacacaaaccattccaatcatagcactcctt

SEQ ID NO: 179633 - DNA, 33 bp, Homo sapien
tctatataattcaaaactctgagacccattgat

SEQ ID NO: 179634 - DNA, 33 bp, Homo sapien
tctatataattcaaaattctgagacccattgat

SEQ ID NO: 179635 - DNA, 33 bp, Homo sapien
tttttttcttgtgtcactgaaacagtgctgtgt

SEQ ID NO: 179636 - DNA, 33 bp, Homo sapien
tttttttcttgtgtcattgaaacagtgctgtgt

SEQ ID NO: 179637 - DNA, 33 bp, Homo sapien
aacatatttacgctcgacaagtttatcttcata

SEQ ID NO: 179638 - DNA, 33 bp, Homo sapien
aacatatttacgctcggcaagtttatcttcata

SEQ ID NO: 179639 - DNA, 33 bp, Homo sapien
acatcttgagagcaaactaaatcacatttggac

SEQ ID NO: 179640 - DNA, 33 bp, Homo sapien
acatcttgagagcaaattaaatcacatttggac

SEQ ID NO: 179641 - DNA, 33 bp, Homo sapien
agatgcagagaaaaaaatgcttgacatttattc

SEQ ID NO: 179642 - DNA, 33 bp, Homo sapien
agatgcagagaaaaaattgcttgacatttattc

SEQ ID NO: 179643 - DNA, 33 bp, Homo sapien
cttttaagcttgacctgaatttgctgtaaaacc

SEQ ID NO: 179644 - DNA, 33 bp, Homo sapien
cttttaagcttgaccttaatttgctgtaaaacc

SEQ ID NO: 179645 - DNA, 33 bp, Homo sapien
gcaggtggactatttccacatttgctctttata

SEQ ID NO: 179646 - DNA, 33 bp, Homo sapien
gcaggtggactatttctacatttgctctttata

SEQ ID NO: 179647 - DNA, 33 bp, Homo sapien
tttgtcttcttctggaaacagagtgatggcatt

SEQ ID NO: 179648 - DNA, 33 bp, Homo sapien
tttgtcttcttctggatacagagtgatggcatt

SEQ ID NO: 179649 - DNA, 33 bp, Homo sapien
ttctcttctccctgaaatattttccagctttca

SEQ ID NO: 179650 - DNA, 33 bp, Homo sapien
ttctcttctccctgaactattttccagctttca

SEQ ID NO: 179651 - DNA, 33 bp, Homo sapien
caaacaatttgaaccactagaaaggtagccctt

SEQ ID NO: 179652 - DNA, 33 bp, Homo sapien
caaacaatttgaaccattagaaaggtagccctt

SEQ ID NO: 179653 - DNA, 33 bp, Homo sapien
agagcaaattccctaccatgtattccctttctt

SEQ ID NO: 179654 - DNA, 33 bp, Homo sapien
agagcaaattccctacgatgtattccctttctt

SEQ ID NO: 179655 - DNA, 33 bp, Homo sapien
taggtcacagattaccaggaaacactgacgtta

SEQ ID NO: 179656 - DNA, 33 bp, Homo sapien
taggtcacagattaccgggaaacactgacgtta

SEQ ID NO: 179657 - DNA, 33 bp, Homo sapien
aaccttaggcaattcaactatcctctctgggat

SEQ ID NO: 179658 - DNA, 33 bp, Homo sapien
aaccttaggcaattcacctatcctctctgggat

SEQ ID NO: 179659 - DNA, 33 bp, Homo sapien
acaaatatttatttcccctctcatagttctata

SEQ ID NO: 179660 - DNA, 33 bp, Homo sapien
acaaatatttatttcctctctcatagttctata

SEQ ID NO: 179661 - DNA, 33 bp, Homo sapien
ttgttaatactttcacaagccagaaagtttttt

SEQ ID NO: 179662 - DNA, 33 bp, Homo sapien
ttgttaatactttcacgagccagaaagtttttt

SEQ ID NO: 179663 - DNA, 33 bp, Homo sapien
taaggtagccatagaactgattgaactgttctt

SEQ ID NO: 179664 - DNA, 33 bp, Homo sapien
taaggtagccatagaattgattgaactgttctt

SEQ ID NO: 179665 - DNA, 33 bp, Homo sapien
atgtgcacaccttacagatgctctcgttcccat

SEQ ID NO: 179666 - DNA, 33 bp, Homo sapien
atgtgcacaccttacatatgctctcgttcccat

SEQ ID NO: 179667 - DNA, 33 bp, Homo sapien
ctctccttcatccagccccaccgaagtgttaaa

SEQ ID NO: 179668 - DNA, 33 bp, Homo sapien
ctctccttcatccagcgccaccgaagtgttaaa

SEQ ID NO: 179669 - DNA, 33 bp, Homo sapien
agtattagagggcatgaaatttgaaataagtcc

SEQ ID NO: 179670 - DNA, 33 bp, Homo sapien
agtattagagggcatggaatttgaaataagtcc

SEQ ID NO: 179671 - DNA, 33 bp, Homo sapien
gacaattggataaacacctgaaggagctgagga

SEQ ID NO: 179672 - DNA, 33 bp, Homo sapien
gacaattggataaacatctgaaggagctgagga

SEQ ID NO: 179673 - DNA, 33 bp, Homo sapien
tgcatcaggttcccaactactctccctatttct

SEQ ID NO: 179674 - DNA, 33 bp, Homo sapien
tgcatcaggttcccaattactctccctatttct

SEQ ID NO: 179675 - DNA, 33 bp, Homo sapien
ataaaacaatcgtctacgttaaagatgaggaaa

SEQ ID NO: 179676 - DNA, 33 bp, Homo sapien
ataaaacaatcgtctatgttaaagatgaggaaa

SEQ ID NO: 179677 - DNA, 33 bp, Homo sapien
atatttttggaggaaccagaactaatataagtt

SEQ ID NO: 179678 - DNA, 33 bp, Homo sapien
atatttttggaggaactagaactaatataagtt

SEQ ID NO: 179679 - DNA, 33 bp, Homo sapien
atgtgattttagacaccaggaagctgtggcaga

SEQ ID NO: 179680 - DNA, 33 bp, Homo sapien
atgtgattttagacactaggaagctgtggcaga

SEQ ID NO: 179681 - DNA, 33 bp, Homo sapien
ccactgaccatgtcaactcatctgtaatataga

SEQ ID NO: 179682 - DNA, 33 bp, Homo sapien
ccactgaccatgtcaattcatctgtaatataga

SEQ ID NO: 179683 - DNA, 33 bp, Homo sapien
tataattagactcccaaataaattcttcctatc

SEQ ID NO: 179684 - DNA, 33 bp, Homo sapien
tataattagactcccagataaattcttcctatc

SEQ ID NO: 179685 - DNA, 33 bp, Homo sapien
agatcatacaaaaagcaagtccatcctgtaggt

SEQ ID NO: 179686 - DNA, 33 bp, Homo sapien
agatcatacaaaaagcgagtccatcctgtaggt

SEQ ID NO: 179687 - DNA, 33 bp, Homo sapien
cagagctgtctgtccacagagagagttatgtag

SEQ ID NO: 179688 - DNA, 33 bp, Homo sapien
cagagctgtctgtccagagagagagttatgtag

SEQ ID NO: 179689 - DNA, 33 bp, Homo sapien
tttaacacttgcttacagacccttagccagctg

SEQ ID NO: 179690 - DNA, 33 bp, Homo sapien
tttaacacttgcttacggacccttagccagctg

SEQ ID NO: 179691 - DNA, 33 bp, Homo sapien
tttacttgtttatgtcactctccttaagattgt

SEQ ID NO: 179692 - DNA, 33 bp, Homo sapien
tttacttgtttatgtctctctccttaagattgt

SEQ ID NO: 179693 - DNA, 33 bp, Homo sapien
caatgtttgctgaattaaagtcattaagaaaag

SEQ ID NO: 179694 - DNA, 33 bp, Homo sapien
caatgtttgctgaattgaagtcattaagaaaag

SEQ ID NO: 179695 - DNA, 33 bp, Homo sapien
aacacttaatatgaaacctgtagagttgctaaa

SEQ ID NO: 179696 - DNA, 33 bp, Homo sapien
aacacttaatatgaaatctgtagagttgctaaa

SEQ ID NO: 179697 - DNA, 33 bp, Homo sapien
tccataaagatttgaaagaggttagagaaaaaa

SEQ ID NO: 179698 - DNA, 33 bp, Homo sapien
tccataaagatttgaatgaggttagagaaaaaa

SEQ ID NO: 179699 - DNA, 33 bp, Homo sapien
caactactttctgtgccctaggtctcatctgtc

SEQ ID NO: 179700 - DNA, 33 bp, Homo sapien
caactactttctgtgctctaggtctcatctgtc

SEQ ID NO: 179701 - DNA, 33 bp, Homo sapien
accccaattccacccaatcttcatataattcct

SEQ ID NO: 179702 - DNA, 33 bp, Homo sapien
accccaattccacccagtcttcatataattcct

SEQ ID NO: 179703 - DNA, 33 bp, Homo sapien
gctcaaaaaatttcaaaatctcctgcaagtcca

SEQ ID NO: 179704 - DNA, 33 bp, Homo sapien
gctcaaaaaatttcaatatctcctgcaagtcca

SEQ ID NO: 179705 - DNA, 33 bp, Homo sapien
attcaaccttcagacactcttgaacaccccatg

SEQ ID NO: 179706 - DNA, 33 bp, Homo sapien
attcaaccttcagacattcttgaacaccccatg

SEQ ID NO: 179707 - DNA, 33 bp, Homo sapien
gagtagcacggtatcacgtacataggaatacaa

SEQ ID NO: 179708 - DNA, 33 bp, Homo sapien
gagtagcacggtatcaggtacataggaatacaa

SEQ ID NO: 179709 - DNA, 33 bp, Homo sapien
cttagacctgctaacaccagtgccagcatatgc

SEQ ID NO: 179710 - DNA, 33 bp, Homo sapien
cttagacctgctaacatcagtgccagcatatgc

SEQ ID NO: 179711 - DNA, 33 bp, Homo sapien
ggatagttacatacgcactatctgttggaactt

SEQ ID NO: 179712 - DNA, 33 bp, Homo sapien
ggatagttacatacgcgctatctgttggaactt

SEQ ID NO: 179713 - DNA, 33 bp, Homo sapien
ataaattttacatttacattgccgtgccgtcag

SEQ ID NO: 179714 - DNA, 33 bp, Homo sapien
ataaattttacatttagattgccgtgccgtcag

SEQ ID NO: 179715 - DNA, 33 bp, Homo sapien
ggaaaacctagaaaaccgagtcaagagtcctgt

SEQ ID NO: 179716 - DNA, 33 bp, Homo sapien
ggaaaacctagaaaactgagtcaagagtcctgt

SEQ ID NO: 179717 - DNA, 33 bp, Homo sapien
ttttcagagcctgtggcatatggaaaggccttt

SEQ ID NO: 179718 - DNA, 33 bp, Homo sapien
ttttcagagcctgtggtatatggaaaggccttt

SEQ ID NO: 179719 - DNA, 33 bp, Homo sapien
gagcaacagcatggcacgtgggaggtgttatgg

SEQ ID NO: 179720 - DNA, 33 bp, Homo sapien
gagcaacagcatggcaggtgggaggtgttatgg

SEQ ID NO: 179721 - DNA, 33 bp, Homo sapien
gtgccatgctaaagaactgaaggatgataaaga

SEQ ID NO: 179722 - DNA, 33 bp, Homo sapien
gtgccatgctaaagaattgaaggatgataaaga

SEQ ID NO: 179723 - DNA, 33 bp, Homo sapien
ctgctccaggaactgaactgtatgagctcctct

SEQ ID NO: 179724 - DNA, 33 bp, Homo sapien
ctgctccaggaactgacctgtatgagctcctct

SEQ ID NO: 179725 - DNA, 33 bp, Homo sapien
taaagcatctgtagaaacctctttagacataaa

SEQ ID NO: 179726 - DNA, 33 bp, Homo sapien
taaagcatctgtagaagcctctttagacataaa

SEQ ID NO: 179727 - DNA, 33 bp, Homo sapien
acacgagaagctaatacgattcagatcacaaag

SEQ ID NO: 179728 - DNA, 33 bp, Homo sapien
acacgagaagctaatatgattcagatcacaaag

SEQ ID NO: 179729 - DNA, 33 bp, Homo sapien
ttaacttaactcagacaatcttttctattgatt

SEQ ID NO: 179730 - DNA, 33 bp, Homo sapien
ttaacttaactcagactatcttttctattgatt

SEQ ID NO: 179731 - DNA, 33 bp, Homo sapien
atcatatgtaagatgaatattggttcagtctgg

SEQ ID NO: 179732 - DNA, 33 bp, Homo sapien
atcatatgtaagatgagtattggttcagtctgg

SEQ ID NO: 179733 - DNA, 33 bp, Homo sapien
gattttggggccacaacattcatttttcttcca

SEQ ID NO: 179734 - DNA, 33 bp, Homo sapien
gattttggggccacaagattcatttttcttcca

SEQ ID NO: 179735 - DNA, 33 bp, Homo sapien
ttactgtgaacacttaggtactgttgcttagtg

SEQ ID NO: 179736 - DNA, 33 bp, Homo sapien
ttactgtgaacacttatgtactgttgcttagtg

SEQ ID NO: 179737 - DNA, 33 bp, Homo sapien
ctttttccaaatgtgcacaagaggacatactta

SEQ ID NO: 179738 - DNA, 33 bp, Homo sapien
ctttttccaaatgtgcgcaagaggacatactta

SEQ ID NO: 179739 - DNA, 33 bp, Homo sapien
cctcaaccaggagacaaatacacacatactgag

SEQ ID NO: 179740 - DNA, 33 bp, Homo sapien
cctcaaccaggagacagatacacacatactgag

SEQ ID NO: 179741 - DNA, 33 bp, Homo sapien
tttgggggaaaaagataagtagaagagatacag

SEQ ID NO: 179742 - DNA, 33 bp, Homo sapien
tttgggggaaaaagatgagtagaagagatacag

SEQ ID NO: 179743 - DNA, 33 bp, Homo sapien
gaattacatgataacaataactacaattggaat

SEQ ID NO: 179744 - DNA, 33 bp, Homo sapien
gaattacatgataacagtaactacaattggaat

SEQ ID NO: 179745 - DNA, 33 bp, Homo sapien
tttccctgaactctcaccatactcttcactggt

SEQ ID NO: 179746 - DNA, 33 bp, Homo sapien
tttccctgaactctcatcatactcttcactggt

SEQ ID NO: 179747 - DNA, 33 bp, Homo sapien
gattggtgtagttactcagggctcccttcccct

SEQ ID NO: 179748 - DNA, 33 bp, Homo sapien
gattggtgtagttactgagggctcccttcccct

SEQ ID NO: 179749 - DNA, 33 bp, Homo sapien
aactacaccaatcaaaccctttctgtcaaggaa

SEQ ID NO: 179750 - DNA, 33 bp, Homo sapien
aactacaccaatcaaatcctttctgtcaaggaa

SEQ ID NO: 179751 - DNA, 33 bp, Homo sapien
ctttccatcatagaaacctatcctcaagcagat

SEQ ID NO: 179752 - DNA, 33 bp, Homo sapien
ctttccatcatagaaatctatcctcaagcagat

SEQ ID NO: 179753 - DNA, 33 bp, Homo sapien
tgacctttgtctgaaacgctggacaaaatttca

SEQ ID NO: 179754 - DNA, 33 bp, Homo sapien
tgacctttgtctgaaatgctggacaaaatttca

SEQ ID NO: 179755 - DNA, 33 bp, Homo sapien
ttagtcatccagaaccaccattcctaacaagtg

SEQ ID NO: 179756 - DNA, 33 bp, Homo sapien
ttagtcatccagaaccgccattcctaacaagtg

SEQ ID NO: 179757 - DNA, 33 bp, Homo sapien
ttgccaggtgaacaaacagtggtaggcaaggta

SEQ ID NO: 179758 - DNA, 33 bp, Homo sapien
ttgccaggtgaacaaagagtggtaggcaaggta

SEQ ID NO: 179759 - DNA, 33 bp, Homo sapien
ttgatgcaaaatttcacctctttcatgagtaga

SEQ ID NO: 179760 - DNA, 33 bp, Homo sapien
ttgatgcaaaatttcatctctttcatgagtaga

SEQ ID NO: 179761 - DNA, 33 bp, Homo sapien
gtatcattgtcttatacaccctggagctccaaa

SEQ ID NO: 179762 - DNA, 33 bp, Homo sapien
gtatcattgtcttatataccctggagctccaaa

SEQ ID NO: 179763 - DNA, 33 bp, Homo sapien
attggcactgctgagaggaagtgaaagtgctgt

SEQ ID NO: 179764 - DNA, 33 bp, Homo sapien
attggcactgctgagatgaagtgaaagtgctgt

SEQ ID NO: 179765 - DNA, 33 bp, Homo sapien
tggcagggtgaagggacattgccacatggaaag

SEQ ID NO: 179766 - DNA, 33 bp, Homo sapien
tggcagggtgaagggagattgccacatggaaag

SEQ ID NO: 179767 - DNA, 33 bp, Homo sapien
cccatctggcattccacaggagaaggtctactg

SEQ ID NO: 179768 - DNA, 33 bp, Homo sapien
cccatctggcattccataggagaaggtctactg

SEQ ID NO: 179769 - DNA, 33 bp, Homo sapien
acatttggtccggtgcaatattaggagacagtc

SEQ ID NO: 179770 - DNA, 33 bp, Homo sapien
acatttggtccggtgcgatattaggagacagtc

SEQ ID NO: 179771 - DNA, 33 bp, Homo sapien
ctcaatcttccacaccaaatgttgggcagggtg

SEQ ID NO: 179772 - DNA, 33 bp, Homo sapien
ctcaatcttccacaccgaatgttgggcagggtg

SEQ ID NO: 179773 - DNA, 33 bp, Homo sapien
cttattattgatttaggattgttcctatctgca

SEQ ID NO: 179774 - DNA, 33 bp, Homo sapien
cttattattgatttagtattgttcctatctgca

SEQ ID NO: 179775 - DNA, 33 bp, Homo sapien
aagacttcaagtattcactggactgtattcatt

SEQ ID NO: 179776 - DNA, 33 bp, Homo sapien
aagacttcaagtattccctggactgtattcatt

SEQ ID NO: 179777 - DNA, 33 bp, Homo sapien
ttagttctctatctgaagtttcaacgcacagtt

SEQ ID NO: 179778 - DNA, 33 bp, Homo sapien
ttagttctctatctgaggtttcaacgcacagtt

SEQ ID NO: 179779 - DNA, 33 bp, Homo sapien
cagaaggcttgtagcaaatgacattggaggggc

SEQ ID NO: 179780 - DNA, 33 bp, Homo sapien
cagaaggcttgtagcagatgacattggaggggc

SEQ ID NO: 179781 - DNA, 33 bp, Homo sapien
tagtctatcaatgccaagttttcctccttcaac

SEQ ID NO: 179782 - DNA, 33 bp, Homo sapien
tagtctatcaatgccaggttttcctccttcaac

SEQ ID NO: 179783 - DNA, 33 bp, Homo sapien
ttaatttctgcaacaaaactatttattagacat

SEQ ID NO: 179784 - DNA, 33 bp, Homo sapien
ttaatttctgcaacaatactatttattagacat

SEQ ID NO: 179785 - DNA, 33 bp, Homo sapien
ctgcatttttctagtgaattcctggcttttgct

SEQ ID NO: 179786 - DNA, 33 bp, Homo sapien
ctgcatttttctagtgcattcctggcttttgct

SEQ ID NO: 179787 - DNA, 33 bp, Homo sapien
actgaataatattttacgaatcagctcaatagt

SEQ ID NO: 179788 - DNA, 33 bp, Homo sapien
actgaataatattttaggaatcagctcaatagt

SEQ ID NO: 179789 - DNA, 33 bp, Homo sapien
atactcatggaatctcaagtagcttaaaatttg

SEQ ID NO: 179790 - DNA, 33 bp, Homo sapien
atactcatggaatctccagtagcttaaaatttg

SEQ ID NO: 179791 - DNA, 33 bp, Homo sapien
tgttccttttgactacaaaacagctcctttact

SEQ ID NO: 179792 - DNA, 33 bp, Homo sapien
tgttccttttgactacgaaacagctcctttact

SEQ ID NO: 179793 - DNA, 33 bp, Homo sapien
ggtggatatcatttagaatttgctatgaaattt

SEQ ID NO: 179794 - DNA, 33 bp, Homo sapien
ggtggatatcatttaggatttgctatgaaattt

SEQ ID NO: 179795 - DNA, 33 bp, Homo sapien
agagctggattatggacagcctttccagccatg

SEQ ID NO: 179796 - DNA, 33 bp, Homo sapien
agagctggattatggagagcctttccagccatg

SEQ ID NO: 179797 - DNA, 33 bp, Homo sapien
aggcagatggtgataaatgttgaaagagagaga

SEQ ID NO: 179798 - DNA, 33 bp, Homo sapien
aggcagatggtgataagtgttgaaagagagaga

SEQ ID NO: 179799 - DNA, 33 bp, Homo sapien
gtacctgtcatgctctaaatcccagagatacca

SEQ ID NO: 179800 - DNA, 33 bp, Homo sapien
gtacctgtcatgctctcaatcccagagatacca

SEQ ID NO: 179801 - DNA, 33 bp, Homo sapien
cattaagtaattgctacgtgttatcagaaatca

SEQ ID NO: 179802 - DNA, 33 bp, Homo sapien
cattaagtaattgctatgtgttatcagaaatca

SEQ ID NO: 179803 - DNA, 33 bp, Homo sapien
tgtttcctgatttctgccaacaacactcttttc

SEQ ID NO: 179804 - DNA, 33 bp, Homo sapien
tgtttcctgatttctggcaacaacactcttttc

SEQ ID NO: 179805 - DNA, 33 bp, Homo sapien
cggctttcagggtttacataggacacaccttaa

SEQ ID NO: 179806 - DNA, 33 bp, Homo sapien
cggctttcagggtttatataggacacaccttaa

SEQ ID NO: 179807 - DNA, 33 bp, Homo sapien
ttgctatcaacctatcactgtagcttctgcccc

SEQ ID NO: 179808 - DNA, 33 bp, Homo sapien
ttgctatcaacctatccctgtagcttctgcccc

SEQ ID NO: 179809 - DNA, 33 bp, Homo sapien
cgtgactctcagtatacgtatcggagtaatttc

SEQ ID NO: 179810 - DNA, 33 bp, Homo sapien
cgtgactctcagtatatgtatcggagtaatttc

SEQ ID NO: 179811 - DNA, 33 bp, Homo sapien
ataagacgatgactatcaagtgccagaccacct

SEQ ID NO: 179812 - DNA, 33 bp, Homo sapien
ataagacgatgactatgaagtgccagaccacct

SEQ ID NO: 179813 - DNA, 33 bp, Homo sapien
aaggctaatatatgcactgcaggatagctgtga

SEQ ID NO: 179814 - DNA, 33 bp, Homo sapien
aaggctaatatatgcattgcaggatagctgtga

SEQ ID NO: 179815 - DNA, 33 bp, Homo sapien
aattgtctggggaccaccttgaaactggcctat

SEQ ID NO: 179816 - DNA, 33 bp, Homo sapien
aattgtctggggaccatcttgaaactggcctat

SEQ ID NO: 179817 - DNA, 33 bp, Homo sapien
actccaagcaggaggacaatatggaatctataa

SEQ ID NO: 179818 - DNA, 33 bp, Homo sapien
actccaagcaggaggagaatatggaatctataa

SEQ ID NO: 179819 - DNA, 33 bp, Homo sapien
gttttggactaagtaaaggactacaactagagc

SEQ ID NO: 179820 - DNA, 33 bp, Homo sapien
gttttggactaagtaagggactacaactagagc

SEQ ID NO: 179821 - DNA, 33 bp, Homo sapien
actacctactcccggtaaaaaacagtgctagat

SEQ ID NO: 179822 - DNA, 33 bp, Homo sapien
actacctactcccggtgaaaaacagtgctagat

SEQ ID NO: 179823 - DNA, 33 bp, Homo sapien
tatatagtgagaaatactactgatgagcggact

SEQ ID NO: 179824 - DNA, 33 bp, Homo sapien
tatatagtgagaaatattactgatgagcggact

SEQ ID NO: 179825 - DNA, 33 bp, Homo sapien
gaattgagcattcaagacctgcctagtatagaa

SEQ ID NO: 179826 - DNA, 33 bp, Homo sapien
gaattgagcattcaaggcctgcctagtatagaa

SEQ ID NO: 179827 - DNA, 33 bp, Homo sapien
actgctgccttaaaaagaattattcttctctgg

SEQ ID NO: 179828 - DNA, 33 bp, Homo sapien
actgctgccttaaaaataattattcttctctgg

SEQ ID NO: 179829 - DNA, 33 bp, Homo sapien
attcttctctggaaaggctcagattcaagaaac

SEQ ID NO: 179830 - DNA, 33 bp, Homo sapien
attcttctctggaaagtctcagattcaagaaac

SEQ ID NO: 179831 - DNA, 33 bp, Homo sapien
aatagatatgattctacagaggaactttttgtt

SEQ ID NO: 179832 - DNA, 33 bp, Homo sapien
aatagatatgattctagagaggaactttttgtt

SEQ ID NO: 179833 - DNA, 33 bp, Homo sapien
taggggcacctatagacaagctacacaagctat

SEQ ID NO: 179834 - DNA, 33 bp, Homo sapien
taggggcacctatagagaagctacacaagctat

SEQ ID NO: 179835 - DNA, 33 bp, Homo sapien
gatgacaccagtataactagttgaggtgtgtag

SEQ ID NO: 179836 - DNA, 33 bp, Homo sapien
gatgacaccagtataagtagttgaggtgtgtag

SEQ ID NO: 179837 - DNA, 33 bp, Homo sapien
ataattgtctctttcccagtatttctgtcaagg

SEQ ID NO: 179838 - DNA, 33 bp, Homo sapien
ataattgtctctttcctagtatttctgtcaagg

SEQ ID NO: 179839 - DNA, 33 bp, Homo sapien
tcttgtttaaactgacaacatgcttaaagaaca

SEQ ID NO: 179840 - DNA, 33 bp, Homo sapien
tcttgtttaaactgacgacatgcttaaagaaca

SEQ ID NO: 179841 - DNA, 33 bp, Homo sapien
actatttagagtcccaagttactttacatgata

SEQ ID NO: 179842 - DNA, 33 bp, Homo sapien
actatttagagtcccaggttactttacatgata

SEQ ID NO: 179843 - DNA, 33 bp, Homo sapien
taaaaatctgatgacaatgaggaatctaaggta

SEQ ID NO: 179844 - DNA, 33 bp, Homo sapien
taaaaatctgatgacagtgaggaatctaaggta

SEQ ID NO: 179845 - DNA, 33 bp, Homo sapien
ttagcttctcaaacaacttgtataatcagccaa

SEQ ID NO: 179846 - DNA, 33 bp, Homo sapien
ttagcttctcaaacaatttgtataatcagccaa

SEQ ID NO: 179847 - DNA, 33 bp, Homo sapien
agttcatattttcacaatattaggtgccatcca

SEQ ID NO: 179848 - DNA, 33 bp, Homo sapien
agttcatattttcacagtattaggtgccatcca

SEQ ID NO: 179849 - DNA, 33 bp, Homo sapien
ggggcctgggcccggcagactgaatctgaattt

SEQ ID NO: 179850 - DNA, 33 bp, Homo sapien
ggggcctgggcccggccgactgaatctgaattt

SEQ ID NO: 179851 - DNA, 33 bp, Homo sapien
agcagctccttggccacgtttcagtcttagaac

SEQ ID NO: 179852 - DNA, 33 bp, Homo sapien
agcagctccttggccatgtttcagtcttagaac

SEQ ID NO: 179853 - DNA, 33 bp, Homo sapien
tatatccatacactcaatctaggcctatgcttt

SEQ ID NO: 179854 - DNA, 33 bp, Homo sapien
tatatccatacactcagtctaggcctatgcttt

SEQ ID NO: 179855 - DNA, 33 bp, Homo sapien
aaacctagttgtacctaaatttactgcaagccc

SEQ ID NO: 179856 - DNA, 33 bp, Homo sapien
aaacctagttgtacctgaatttactgcaagccc

SEQ ID NO: 179857 - DNA, 33 bp, Homo sapien
ttgatgaagtaggaaacaggctgagacctgatt

SEQ ID NO: 179858 - DNA, 33 bp, Homo sapien
ttgatgaagtaggaaagaggctgagacctgatt

SEQ ID NO: 179859 - DNA, 33 bp, Homo sapien
tcagagttcaagcaaacaacctctgagttttga

SEQ ID NO: 179860 - DNA, 33 bp, Homo sapien
tcagagttcaagcaaataacctctgagttttga

SEQ ID NO: 179861 - DNA, 33 bp, Homo sapien
agagcctcaaaatacacgcaataaaattcatat

SEQ ID NO: 179862 - DNA, 33 bp, Homo sapien
agagcctcaaaatacatgcaataaaattcatat

SEQ ID NO: 179863 - DNA, 33 bp, Homo sapien
aggaaatacacaatacaagtagcatattaaatc

SEQ ID NO: 179864 - DNA, 33 bp, Homo sapien
aggaaatacacaataccagtagcatattaaatc

SEQ ID NO: 179865 - DNA, 33 bp, Homo sapien
tgctgtgcaagtggaactgattattgctaatgt

SEQ ID NO: 179866 - DNA, 33 bp, Homo sapien
tgctgtgcaagtggaattgattattgctaatgt

SEQ ID NO: 179867 - DNA, 33 bp, Homo sapien
gcttctgcaagaccccaggaaggtacattctct

SEQ ID NO: 179868 - DNA, 33 bp, Homo sapien
gcttctgcaagaccccgggaaggtacattctct

SEQ ID NO: 179869 - DNA, 33 bp, Homo sapien
aaatctgtatattataacattgctattgtttca

SEQ ID NO: 179870 - DNA, 33 bp, Homo sapien
aaatctgtatattataccattgctattgtttca

SEQ ID NO: 179871 - DNA, 33 bp, Homo sapien
gtacttacgggaatataaagctaatgagatgtg

SEQ ID NO: 179872 - DNA, 33 bp, Homo sapien
gtacttacgggaatatgaagctaatgagatgtg

SEQ ID NO: 179873 - DNA, 33 bp, Homo sapien
tgacacaggtaaagaaactgtacaaagtagggg

SEQ ID NO: 179874 - DNA, 33 bp, Homo sapien
tgacacaggtaaagaagctgtacaaagtagggg

SEQ ID NO: 179875 - DNA, 33 bp, Homo sapien
gggcatttattatgagaagaatggacagtttca

SEQ ID NO: 179876 - DNA, 33 bp, Homo sapien
gggcatttattatgaggagaatggacagtttca

SEQ ID NO: 179877 - DNA, 33 bp, Homo sapien
tccccaagacatcttacccatgcccccatctct

SEQ ID NO: 179878 - DNA, 33 bp, Homo sapien
tccccaagacatcttatccatgcccccatctct

SEQ ID NO: 179879 - DNA, 33 bp, Homo sapien
accttggtaacactgcccatgtgactatagata

SEQ ID NO: 179880 - DNA, 33 bp, Homo sapien
accttggtaacactgctcatgtgactatagata

SEQ ID NO: 179881 - DNA, 33 bp, Homo sapien
ctctccaacagatcttaaacaacaccatactct

SEQ ID NO: 179882 - DNA, 33 bp, Homo sapien
ctctccaacagatctttaacaacaccatactct

SEQ ID NO: 179883 - DNA, 33 bp, Homo sapien
ggcaaactgcgatatacggtcaacgctttatct

SEQ ID NO: 179884 - DNA, 33 bp, Homo sapien
ggcaaactgcgatatatggtcaacgctttatct

SEQ ID NO: 179885 - DNA, 33 bp, Homo sapien
ctaatacagtgtcttgaacattgtgggaaatgg

SEQ ID NO: 179886 - DNA, 33 bp, Homo sapien
ctaatacagtgtcttgcacattgtgggaaatgg

SEQ ID NO: 179887 - DNA, 33 bp, Homo sapien
ccaggagtggccgagaaccttggagaatctgct

SEQ ID NO: 179888 - DNA, 33 bp, Homo sapien
ccaggagtggccgagacccttggagaatctgct

SEQ ID NO: 179889 - DNA, 33 bp, Homo sapien
tccacgatgaaagatcagaatgtggcacaagtt

SEQ ID NO: 179890 - DNA, 33 bp, Homo sapien
tccacgatgaaagatcggaatgtggcacaagtt

SEQ ID NO: 179891 - DNA, 33 bp, Homo sapien
gaggtgatcgctaagcacctcatatattttctt

SEQ ID NO: 179892 - DNA, 33 bp, Homo sapien
gaggtgatcgctaagctcctcatatattttctt

SEQ ID NO: 179893 - DNA, 33 bp, Homo sapien
tctttggataattagaggtcaagtatttgttat

SEQ ID NO: 179894 - DNA, 33 bp, Homo sapien
tctttggataattagatgtcaagtatttgttat

SEQ ID NO: 179895 - DNA, 33 bp, Homo sapien
tttgaattagtattacaacaagccagtggcctg

SEQ ID NO: 179896 - DNA, 33 bp, Homo sapien
tttgaattagtattactacaagccagtggcctg

SEQ ID NO: 179897 - DNA, 33 bp, Homo sapien
gtcttaaggagagttcaaaaaactgaacttact

SEQ ID NO: 179898 - DNA, 33 bp, Homo sapien
gtcttaaggagagttccaaaaactgaacttact

SEQ ID NO: 179899 - DNA, 33 bp, Homo sapien
acaaaagatgaggctgaaggactggctgcagag

SEQ ID NO: 179900 - DNA, 33 bp, Homo sapien
acaaaagatgaggctgtaggactggctgcagag

SEQ ID NO: 179901 - DNA, 33 bp, Homo sapien
aggtccccttcttaatcatgcaattcatcaaga

SEQ ID NO: 179902 - DNA, 33 bp, Homo sapien
aggtccccttcttaattatgcaattcatcaaga

SEQ ID NO: 179903 - DNA, 33 bp, Homo sapien
ggctggtaggtgaatacggtgtttcattacaat

SEQ ID NO: 179904 - DNA, 33 bp, Homo sapien
ggctggtaggtgaatatggtgtttcattacaat

SEQ ID NO: 179905 - DNA, 33 bp, Homo sapien
tgtgattgtccctttaaacagcttatcagtgac

SEQ ID NO: 179906 - DNA, 33 bp, Homo sapien
tgtgattgtccctttacacagcttatcagtgac

SEQ ID NO: 179907 - DNA, 33 bp, Homo sapien
tctctttaaatgaacacgtctttaacatactaa

SEQ ID NO: 179908 - DNA, 33 bp, Homo sapien
tctctttaaatgaacatgtctttaacatactaa

SEQ ID NO: 179909 - DNA, 33 bp, Homo sapien
ctgcatgaccttgtgacagttatttagcctctc

SEQ ID NO: 179910 - DNA, 33 bp, Homo sapien
ctgcatgaccttgtgatagttatttagcctctc

SEQ ID NO: 179911 - DNA, 33 bp, Homo sapien
cagataaagaatgagactccaagaagtgaagta

SEQ ID NO: 179912 - DNA, 33 bp, Homo sapien
cagataaagaatgagattccaagaagtgaagta

SEQ ID NO: 179913 - DNA, 33 bp, Homo sapien
gctggcacattggtaaaattaagcaatggcagg

SEQ ID NO: 179914 - DNA, 33 bp, Homo sapien
gctggcacattggtaacattaagcaatggcagg

SEQ ID NO: 179915 - DNA, 33 bp, Homo sapien
aagttggaatttgcaccagaaaactggtcttgt

SEQ ID NO: 179916 - DNA, 33 bp, Homo sapien
aagttggaatttgcactagaaaactggtcttgt

SEQ ID NO: 179917 - DNA, 33 bp, Homo sapien
agtatactgaatgtagccctgaggcagaagtcc

SEQ ID NO: 179918 - DNA, 33 bp, Homo sapien
agtatactgaatgtagtcctgaggcagaagtcc

SEQ ID NO: 179919 - DNA, 33 bp, Homo sapien
tggggcacaagaatgacgttaaaataatatttc

SEQ ID NO: 179920 - DNA, 33 bp, Homo sapien
tggggcacaagaatgatgttaaaataatatttc

SEQ ID NO: 179921 - DNA, 33 bp, Homo sapien
ctctgaataaagtagaaatagtttggatcctac

SEQ ID NO: 179922 - DNA, 33 bp, Homo sapien
ctctgaataaagtagagatagtttggatcctac

SEQ ID NO: 179923 - DNA, 33 bp, Homo sapien
cattctcctctcaaaccactgaatcaagaacct

SEQ ID NO: 179924 - DNA, 33 bp, Homo sapien
cattctcctctcaaactactgaatcaagaacct

SEQ ID NO: 179925 - DNA, 33 bp, Homo sapien
tgtgtcctgcgcaatacaggtgtatactgccca

SEQ ID NO: 179926 - DNA, 33 bp, Homo sapien
tgtgtcctgcgcaatataggtgtatactgccca

SEQ ID NO: 179927 - DNA, 33 bp, Homo sapien
ggctttcagggcaagaaaatggatgtttcaaat

SEQ ID NO: 179928 - DNA, 33 bp, Homo sapien
ggctttcagggcaagagaatggatgtttcaaat

SEQ ID NO: 179929 - DNA, 33 bp, Homo sapien
tgagaagaataagtcaaagtagttgtttctttt

SEQ ID NO: 179930 - DNA, 33 bp, Homo sapien
tgagaagaataagtcatagtagttgtttctttt

SEQ ID NO: 179931 - DNA, 33 bp, Homo sapien
taattggccagagcgcaagatgaataaaactga

SEQ ID NO: 179932 - DNA, 33 bp, Homo sapien
taattggccagagcgcgagatgaataaaactga

SEQ ID NO: 179933 - DNA, 33 bp, Homo sapien
attttgtttccctacacagtttgctgagtgccc

SEQ ID NO: 179934 - DNA, 33 bp, Homo sapien
attttgtttccctacatagtttgctgagtgccc

SEQ ID NO: 179935 - DNA, 33 bp, Homo sapien
gccagactctgcaaaactctgtgggctgtgtta

SEQ ID NO: 179936 - DNA, 33 bp, Homo sapien
gccagactctgcaaaattctgtgggctgtgtta

SEQ ID NO: 179937 - DNA, 33 bp, Homo sapien
tttgatatactaaggaaaaatgttccctcttct

SEQ ID NO: 179938 - DNA, 33 bp, Homo sapien
tttgatatactaaggagaaatgttccctcttct

SEQ ID NO: 179939 - DNA, 33 bp, Homo sapien
aacatttgcaaatacagatgatgaggaaaatat

SEQ ID NO: 179940 - DNA, 33 bp, Homo sapien
aacatttgcaaatacatatgatgaggaaaatat

SEQ ID NO: 179941 - DNA, 33 bp, Homo sapien
ggcctgagccaaaacggagaggtatgaagcaac

SEQ ID NO: 179942 - DNA, 33 bp, Homo sapien
ggcctgagccaaaacgtagaggtatgaagcaac

SEQ ID NO: 179943 - DNA, 33 bp, Homo sapien
ggttgtaggatttgaccggagtaacttcccaag

SEQ ID NO: 179944 - DNA, 33 bp, Homo sapien
ggttgtaggatttgactggagtaacttcccaag

SEQ ID NO: 179945 - DNA, 33 bp, Homo sapien
tgttccttatctgggtcaattgtgtctgcccaa

SEQ ID NO: 179946 - DNA, 33 bp, Homo sapien
tgttccttatctgggttaattgtgtctgcccaa

SEQ ID NO: 179947 - DNA, 33 bp, Homo sapien
aacatctaacatctgcaacaatcctttcctaac

SEQ ID NO: 179948 - DNA, 33 bp, Homo sapien
aacatctaacatctgccacaatcctttcctaac

SEQ ID NO: 179949 - DNA, 33 bp, Homo sapien
aggtctcagataacaaactactcaaactgagtg

SEQ ID NO: 179950 - DNA, 33 bp, Homo sapien
aggtctcagataacaagctactcaaactgagtg

SEQ ID NO: 179951 - DNA, 33 bp, Homo sapien
aactcaaaattcatcacaaaccaaaatgcaaaa

SEQ ID NO: 179952 - DNA, 33 bp, Homo sapien
aactcaaaattcatcataaaccaaaatgcaaaa

SEQ ID NO: 179953 - DNA, 33 bp, Homo sapien
aggtcacctgctaaaaacatcttaactgtttgg

SEQ ID NO: 179954 - DNA, 33 bp, Homo sapien
aggtcacctgctaaaatcatcttaactgtttgg

SEQ ID NO: 179955 - DNA, 33 bp, Homo sapien
aagactggttattgacaataggaccgattaaaa

SEQ ID NO: 179956 - DNA, 33 bp, Homo sapien
aagactggttattgaccataggaccgattaaaa

SEQ ID NO: 179957 - DNA, 33 bp, Homo sapien
tggttagtgaccataactgagctgcctaagaac

SEQ ID NO: 179958 - DNA, 33 bp, Homo sapien
tggttagtgaccataattgagctgcctaagaac

SEQ ID NO: 179959 - DNA, 33 bp, Homo sapien
tacttggtccgaagggaaaaatgtttggtgttc

SEQ ID NO: 179960 - DNA, 33 bp, Homo sapien
tacttggtccgaaggggaaaatgtttggtgttc

SEQ ID NO: 179961 - DNA, 33 bp, Homo sapien
atcatttgaggtcacaaatatataagaggttca

SEQ ID NO: 179962 - DNA, 33 bp, Homo sapien
atcatttgaggtcacagatatataagaggttca

SEQ ID NO: 179963 - DNA, 33 bp, Homo sapien
atttaagatgtgttggccattatagaatttcac

SEQ ID NO: 179964 - DNA, 33 bp, Homo sapien
atttaagatgtgttggtcattatagaatttcac

SEQ ID NO: 179965 - DNA, 33 bp, Homo sapien
gacaacagttaaatgacgaacatggcagcccaa

SEQ ID NO: 179966 - DNA, 33 bp, Homo sapien
gacaacagttaaatgatgaacatggcagcccaa

SEQ ID NO: 179967 - DNA, 33 bp, Homo sapien
aggcatctaattcaaaatgccctggatatcttt

SEQ ID NO: 179968 - DNA, 33 bp, Homo sapien
aggcatctaattcaaattgccctggatatcttt

SEQ ID NO: 179969 - DNA, 33 bp, Homo sapien
cattctgtagagcaaacagaaccctttaccctg

SEQ ID NO: 179970 - DNA, 33 bp, Homo sapien
cattctgtagagcaaatagaaccctttaccctg

SEQ ID NO: 179971 - DNA, 33 bp, Homo sapien
tgcctggtctttactacggagaaatgcattatt

SEQ ID NO: 179972 - DNA, 33 bp, Homo sapien
tgcctggtctttactatggagaaatgcattatt

SEQ ID NO: 179973 - DNA, 33 bp, Homo sapien
aatatttaatgagtggcaaacattgtactaagc

SEQ ID NO: 179974 - DNA, 33 bp, Homo sapien
aatatttaatgagtggtaaacattgtactaagc

SEQ ID NO: 179975 - DNA, 33 bp, Homo sapien
taattgtatgactaaccgaggaatcctgtgatg

SEQ ID NO: 179976 - DNA, 33 bp, Homo sapien
taattgtatgactaactgaggaatcctgtgatg

SEQ ID NO: 179977 - DNA, 33 bp, Homo sapien
ttccttcctgccctggaatttaaggccctccat

SEQ ID NO: 179978 - DNA, 33 bp, Homo sapien
ttccttcctgccctggcatttaaggccctccat

SEQ ID NO: 179979 - DNA, 33 bp, Homo sapien
agttgccataatggagacaagctacttgggaag

SEQ ID NO: 179980 - DNA, 33 bp, Homo sapien
agttgccataatggaggcaagctacttgggaag

SEQ ID NO: 179981 - DNA, 33 bp, Homo sapien
gtcttactgctttcacgccaattgtcattccag

SEQ ID NO: 179982 - DNA, 33 bp, Homo sapien
gtcttactgctttcactccaattgtcattccag

SEQ ID NO: 179983 - DNA, 33 bp, Homo sapien
tgaactcttcctttgaactataagactataaat

SEQ ID NO: 179984 - DNA, 33 bp, Homo sapien
tgaactcttcctttgagctataagactataaat

SEQ ID NO: 179985 - DNA, 33 bp, Homo sapien
gtctttgtaaaataaactgaaggcttctcatct

SEQ ID NO: 179986 - DNA, 33 bp, Homo sapien
gtctttgtaaaataaattgaaggcttctcatct

SEQ ID NO: 179987 - DNA, 33 bp, Homo sapien
ttgtgatagcaacaaaaatcaatatacatgagt

SEQ ID NO: 179988 - DNA, 33 bp, Homo sapien
ttgtgatagcaacaaacatcaatatacatgagt

SEQ ID NO: 179989 - DNA, 33 bp, Homo sapien
tgtgtatcatagaagaccttacttaccaagctg

SEQ ID NO: 179990 - DNA, 33 bp, Homo sapien
tgtgtatcatagaagatcttacttaccaagctg

SEQ ID NO: 179991 - DNA, 33 bp, Homo sapien
aataggaataagttaaacatcgtgttatataaa

SEQ ID NO: 179992 - DNA, 33 bp, Homo sapien
aataggaataagttaagcatcgtgttatataaa

SEQ ID NO: 179993 - DNA, 33 bp, Homo sapien
ctcagtgtcttcatgaaaatgcccagaaaaaca

SEQ ID NO: 179994 - DNA, 33 bp, Homo sapien
ctcagtgtcttcatgataatgcccagaaaaaca

SEQ ID NO: 179995 - DNA, 33 bp, Homo sapien
attttctgccactctgaaaggaaagaaagcttg

SEQ ID NO: 179996 - DNA, 33 bp, Homo sapien
attttctgccactctgcaaggaaagaaagcttg

SEQ ID NO: 179997 - DNA, 33 bp, Homo sapien
gttattctagactcaacgaacctctagacattt

SEQ ID NO: 179998 - DNA, 33 bp, Homo sapien
gttattctagactcaaggaacctctagacattt

SEQ ID NO: 179999 - DNA, 33 bp, Homo sapien
aatatattgccagataccatttgaggaaaaagg

SEQ ID NO: 180000 - DNA, 33 bp, Homo sapien
aatatattgccagatatcatttgaggaaaaagg

SEQ ID NO: 180001 - DNA, 33 bp, Homo sapien
attaatgacataaactgagcaatagttataaat

SEQ ID NO: 180002 - DNA, 33 bp, Homo sapien
attaatgacataaacttagcaatagttataaat

SEQ ID NO: 180003 - DNA, 33 bp, Homo sapien
gtctgtcatcctgtacggggctataagctttat

SEQ ID NO: 180004 - DNA, 33 bp, Homo sapien
gtctgtcatcctgtactgggctataagctttat

SEQ ID NO: 180005 - DNA, 33 bp, Homo sapien
agacgaaactgtttcacggttccacctcagatc

SEQ ID NO: 180006 - DNA, 33 bp, Homo sapien
agacgaaactgtttcatggttccacctcagatc

SEQ ID NO: 180007 - DNA, 33 bp, Homo sapien
ataaaccatgaagaatcattcatagaactatcc

SEQ ID NO: 180008 - DNA, 33 bp, Homo sapien
ataaaccatgaagaatgattcatagaactatcc

SEQ ID NO: 180009 - DNA, 33 bp, Homo sapien
gacaaaactagtgagaaagatagatcattatgt

SEQ ID NO: 180010 - DNA, 33 bp, Homo sapien
gacaaaactagtgagacagatagatcattatgt

SEQ ID NO: 180011 - DNA, 33 bp, Homo sapien
aatgtatgttttgaagaaaagtgtagaaatgaa

SEQ ID NO: 180012 - DNA, 33 bp, Homo sapien
aatgtatgttttgaagcaaagtgtagaaatgaa

SEQ ID NO: 180013 - DNA, 33 bp, Homo sapien
agaaacttctagttcactcagaatggttttaag

SEQ ID NO: 180014 - DNA, 33 bp, Homo sapien
agaaacttctagttcattcagaatggttttaag

SEQ ID NO: 180015 - DNA, 33 bp, Homo sapien
cgagtcttaaaatgaaatcgacacaccagaaag

SEQ ID NO: 180016 - DNA, 33 bp, Homo sapien
cgagtcttaaaatgaagtcgacacaccagaaag

SEQ ID NO: 180017 - DNA, 33 bp, Homo sapien
atattaaatacataacaacaatggagaacattt

SEQ ID NO: 180018 - DNA, 33 bp, Homo sapien
atattaaatacataacgacaatggagaacattt

SEQ ID NO: 180019 - DNA, 33 bp, Homo sapien
acatatcctatcatccgcaaacataggctgtgc

SEQ ID NO: 180020 - DNA, 33 bp, Homo sapien
acatatcctatcatcctcaaacataggctgtgc

SEQ ID NO: 180021 - DNA, 33 bp, Homo sapien
agagattaacttgcaacaaagaggtcacactgc

SEQ ID NO: 180022 - DNA, 33 bp, Homo sapien
agagattaacttgcaataaagaggtcacactgc

SEQ ID NO: 180023 - DNA, 33 bp, Homo sapien
gcacaaaggactgtggaaatacgcttatcagta

SEQ ID NO: 180024 - DNA, 33 bp, Homo sapien
gcacaaaggactgtgggaatacgcttatcagta

SEQ ID NO: 180025 - DNA, 33 bp, Homo sapien
ttgaaaaatgatggcacagtaaattataaagca

SEQ ID NO: 180026 - DNA, 33 bp, Homo sapien
ttgaaaaatgatggcatagtaaattataaagca

SEQ ID NO: 180027 - DNA, 33 bp, Homo sapien
agctattctatgaagaaaaatgtgggctaggac

SEQ ID NO: 180028 - DNA, 33 bp, Homo sapien
agctattctatgaagacaaatgtgggctaggac

SEQ ID NO: 180029 - DNA, 33 bp, Homo sapien
acagctattggggactaaagcataagtaaggta

SEQ ID NO: 180030 - DNA, 33 bp, Homo sapien
acagctattggggactgaagcataagtaaggta

SEQ ID NO: 180031 - DNA, 33 bp, Homo sapien
ggttacactaatgttaaggggtctaggtgggcc

SEQ ID NO: 180032 - DNA, 33 bp, Homo sapien
ggttacactaatgttagggggtctaggtgggcc

SEQ ID NO: 180033 - DNA, 33 bp, Homo sapien
gagatagatatcatacaaaagaaccaaacagaa

SEQ ID NO: 180034 - DNA, 33 bp, Homo sapien
gagatagatatcataccaaagaaccaaacagaa

SEQ ID NO: 180035 - DNA, 33 bp, Homo sapien
aacatcattgattttacattggattgtgaaaga

SEQ ID NO: 180036 - DNA, 33 bp, Homo sapien
aacatcattgattttatattggattgtgaaaga

SEQ ID NO: 180037 - DNA, 33 bp, Homo sapien
acatagagaatactgaacggcatattgtgtatg

SEQ ID NO: 180038 - DNA, 33 bp, Homo sapien
acatagagaatactgagcggcatattgtgtatg

SEQ ID NO: 180039 - DNA, 33 bp, Homo sapien
gaaagaagcaaccttcaatgcaggcaccattac

SEQ ID NO: 180040 - DNA, 33 bp, Homo sapien
gaaagaagcaaccttcgatgcaggcaccattac

SEQ ID NO: 180041 - DNA, 33 bp, Homo sapien
attgtagctaaattaccgctctcctgtctacca

SEQ ID NO: 180042 - DNA, 33 bp, Homo sapien
attgtagctaaattactgctctcctgtctacca

SEQ ID NO: 180043 - DNA, 33 bp, Homo sapien
ttagctcagttggctacatttttgatgcttact

SEQ ID NO: 180044 - DNA, 33 bp, Homo sapien
ttagctcagttggctagatttttgatgcttact

SEQ ID NO: 180045 - DNA, 33 bp, Homo sapien
ctctcctagttatgacaaatcacatcttccact

SEQ ID NO: 180046 - DNA, 33 bp, Homo sapien
ctctcctagttatgacgaatcacatcttccact

SEQ ID NO: 180047 - DNA, 33 bp, Homo sapien
tcatctacaaagtgcaaataagaatagtacttg

SEQ ID NO: 180048 - DNA, 33 bp, Homo sapien
tcatctacaaagtgcacataagaatagtacttg

SEQ ID NO: 180049 - DNA, 33 bp, Homo sapien
gcagactttgtgaccaatactttacatgtgtta

SEQ ID NO: 180050 - DNA, 33 bp, Homo sapien
gcagactttgtgaccagtactttacatgtgtta

SEQ ID NO: 180051 - DNA, 33 bp, Homo sapien
cccttagaggtatgaactgtggagaaaggttca

SEQ ID NO: 180052 - DNA, 33 bp, Homo sapien
cccttagaggtatgaagtgtggagaaaggttca

SEQ ID NO: 180053 - DNA, 33 bp, Homo sapien
tcaattgaacttactgaaagtgggccagagtga

SEQ ID NO: 180054 - DNA, 33 bp, Homo sapien
tcaattgaacttactgtaagtgggccagagtga

SEQ ID NO: 180055 - DNA, 33 bp, Homo sapien
agaggtggacccacgccagtaaaagggaggaat

SEQ ID NO: 180056 - DNA, 33 bp, Homo sapien
agaggtggacccacgctagtaaaagggaggaat

SEQ ID NO: 180057 - DNA, 33 bp, Homo sapien
tcctgatatcattacactggggattagctttca

SEQ ID NO: 180058 - DNA, 33 bp, Homo sapien
tcctgatatcattacattggggattagctttca

SEQ ID NO: 180059 - DNA, 33 bp, Homo sapien
tggcttacattataaacttgagaatagaagtac

SEQ ID NO: 180060 - DNA, 33 bp, Homo sapien
tggcttacattataaatttgagaatagaagtac

SEQ ID NO: 180061 - DNA, 33 bp, Homo sapien
gcttctaactagagcaacaaaattcaccttctc

SEQ ID NO: 180062 - DNA, 33 bp, Homo sapien
gcttctaactagagcagcaaaattcaccttctc

SEQ ID NO: 180063 - DNA, 33 bp, Homo sapien
tggtctcatccacccccactttgccgtggtggt

SEQ ID NO: 180064 - DNA, 33 bp, Homo sapien
tggtctcatccacccctactttgccgtggtggt

SEQ ID NO: 180065 - DNA, 33 bp, Homo sapien
tgaaataccgagacaagggacaaggttttatag

SEQ ID NO: 180066 - DNA, 33 bp, Homo sapien
tgaaataccgagacaatggacaaggttttatag

SEQ ID NO: 180067 - DNA, 33 bp, Homo sapien
tttctgtcatgatagacgcttaacaaatgttta

SEQ ID NO: 180068 - DNA, 33 bp, Homo sapien
tttctgtcatgatagatgcttaacaaatgttta

SEQ ID NO: 180069 - DNA, 33 bp, Homo sapien
atatcttattttgaaagattgaatctgccaaac

SEQ ID NO: 180070 - DNA, 33 bp, Homo sapien
atatcttattttgaaatattgaatctgccaaac

SEQ ID NO: 180071 - DNA, 33 bp, Homo sapien
actgcttttaagaaaacgagttgacaacttaga

SEQ ID NO: 180072 - DNA, 33 bp, Homo sapien
actgcttttaagaaaatgagttgacaacttaga

SEQ ID NO: 180073 - DNA, 33 bp, Homo sapien
ctactgaaccatgacacatttacagactagatg

SEQ ID NO: 180074 - DNA, 33 bp, Homo sapien
ctactgaaccatgacatatttacagactagatg

SEQ ID NO: 180075 - DNA, 33 bp, Homo sapien
gacaggggtcagtaaaccttgacgaagactttt

SEQ ID NO: 180076 - DNA, 33 bp, Homo sapien
gacaggggtcagtaaatcttgacgaagactttt

SEQ ID NO: 180077 - DNA, 33 bp, Homo sapien
acatattgtccttctcaagtctatgaaaccata

SEQ ID NO: 180078 - DNA, 33 bp, Homo sapien
acatattgtccttctcgagtctatgaaaccata

SEQ ID NO: 180079 - DNA, 33 bp, Homo sapien
tttggaatttctaccaaggattctggcctattc

SEQ ID NO: 180080 - DNA, 33 bp, Homo sapien
tttggaatttctaccagggattctggcctattc

SEQ ID NO: 180081 - DNA, 33 bp, Homo sapien
aacctcatgccaaatgcagaactgaagggagga

SEQ ID NO: 180082 - DNA, 33 bp, Homo sapien
aacctcatgccaaatggagaactgaagggagga

SEQ ID NO: 180083 - DNA, 33 bp, Homo sapien
tctattacattgctaacgcttgcaactatacta

SEQ ID NO: 180084 - DNA, 33 bp, Homo sapien
tctattacattgctaatgcttgcaactatacta

SEQ ID NO: 180085 - DNA, 33 bp, Homo sapien
catttcagccattacaatctcattaggaactat

SEQ ID NO: 180086 - DNA, 33 bp, Homo sapien
catttcagccattacagtctcattaggaactat

SEQ ID NO: 180087 - DNA, 33 bp, Homo sapien
ttgtagcttcattaagactaaggatatactaaa

SEQ ID NO: 180088 - DNA, 33 bp, Homo sapien
ttgtagcttcattaaggctaaggatatactaaa

SEQ ID NO: 180089 - DNA, 33 bp, Homo sapien
gcatctagcactacaactggactttgggaggaa

SEQ ID NO: 180090 - DNA, 33 bp, Homo sapien
gcatctagcactacaattggactttgggaggaa

SEQ ID NO: 180091 - DNA, 33 bp, Homo sapien
ccaccatcaaatgccaaagcaaatcaacacaca

SEQ ID NO: 180092 - DNA, 33 bp, Homo sapien
ccaccatcaaatgccacagcaaatcaacacaca

SEQ ID NO: 180093 - DNA, 33 bp, Homo sapien
gactgtcttgtccatcaaatcaaaaatattttt

SEQ ID NO: 180094 - DNA, 33 bp, Homo sapien
gactgtcttgtccatcgaatcaaaaatattttt

SEQ ID NO: 180095 - DNA, 33 bp, Homo sapien
gactttagaaaagttaaatagcctgagttcctc

SEQ ID NO: 180096 - DNA, 33 bp, Homo sapien
gactttagaaaagttacatagcctgagttcctc

SEQ ID NO: 180097 - DNA, 33 bp, Homo sapien
tagatatcccagtaccactgtccaagaccttag

SEQ ID NO: 180098 - DNA, 33 bp, Homo sapien
tagatatcccagtaccgctgtccaagaccttag

SEQ ID NO: 180099 - DNA, 33 bp, Homo sapien
aaactgtaacacaaccaactttggtgcactctc

SEQ ID NO: 180100 - DNA, 33 bp, Homo sapien
aaactgtaacacaaccgactttggtgcactctc

SEQ ID NO: 180101 - DNA, 33 bp, Homo sapien
tgtaatatctacttgacgtttctggtgacgtta

SEQ ID NO: 180102 - DNA, 33 bp, Homo sapien
tgtaatatctacttgatgtttctggtgacgtta

SEQ ID NO: 180103 - DNA, 33 bp, Homo sapien
gagtaacatgacaaataaatgcaatgcggaatc

SEQ ID NO: 180104 - DNA, 33 bp, Homo sapien
gagtaacatgacaaatgaatgcaatgcggaatc

SEQ ID NO: 180105 - DNA, 33 bp, Homo sapien
gttgatacataggtccaaaacacgtcaaagctt

SEQ ID NO: 180106 - DNA, 33 bp, Homo sapien
gttgatacataggtccgaaacacgtcaaagctt

SEQ ID NO: 180107 - DNA, 33 bp, Homo sapien
ccagagccttatattacgaacacagccatgggt

SEQ ID NO: 180108 - DNA, 33 bp, Homo sapien
ccagagccttatattaggaacacagccatgggt

SEQ ID NO: 180109 - DNA, 33 bp, Homo sapien
cccaggctgaaattcaatagtatgatcacagct

SEQ ID NO: 180110 - DNA, 33 bp, Homo sapien
cccaggctgaaattcagtagtatgatcacagct

SEQ ID NO: 180111 - DNA, 33 bp, Homo sapien
tcatatgccttatttacgaatcgtatttgaatt

SEQ ID NO: 180112 - DNA, 33 bp, Homo sapien
tcatatgccttatttatgaatcgtatttgaatt

SEQ ID NO: 180113 - DNA, 33 bp, Homo sapien
gcagtttggcttgagtcaatgctcttaactatt

SEQ ID NO: 180114 - DNA, 33 bp, Homo sapien
gcagtttggcttgagtgaatgctcttaactatt

SEQ ID NO: 180115 - DNA, 33 bp, Homo sapien
ctgtttctaatcttacagatcttattcctgaaa

SEQ ID NO: 180116 - DNA, 33 bp, Homo sapien
ctgtttctaatcttacggatcttattcctgaaa

SEQ ID NO: 180117 - DNA, 33 bp, Homo sapien
cacaagtccaatttgccattacaaaatgatatg

SEQ ID NO: 180118 - DNA, 33 bp, Homo sapien
cacaagtccaatttgcgattacaaaatgatatg

SEQ ID NO: 180119 - DNA, 33 bp, Homo sapien
gattcaccactgctaacgaaagtgcgttggttc

SEQ ID NO: 180120 - DNA, 33 bp, Homo sapien
gattcaccactgctaatgaaagtgcgttggttc

SEQ ID NO: 180121 - DNA, 33 bp, Homo sapien
accagcattaacgttacaatagaagactgacaa

SEQ ID NO: 180122 - DNA, 33 bp, Homo sapien
accagcattaacgttataatagaagactgacaa

SEQ ID NO: 180123 - DNA, 33 bp, Homo sapien
ggttagcaggttagaaaaactagatgctttaac

SEQ ID NO: 180124 - DNA, 33 bp, Homo sapien
ggttagcaggttagaagaactagatgctttaac

SEQ ID NO: 180125 - DNA, 33 bp, Homo sapien
ataaacaatagcgcatcataatcagtatctctt

SEQ ID NO: 180126 - DNA, 33 bp, Homo sapien
ataaacaatagcgcattataatcagtatctctt

SEQ ID NO: 180127 - DNA, 33 bp, Homo sapien
cattgctttaaacggacgaacaatgtccatctc

SEQ ID NO: 180128 - DNA, 33 bp, Homo sapien
cattgctttaaacggatgaacaatgtccatctc

SEQ ID NO: 180129 - DNA, 33 bp, Homo sapien
caggaagcctccatcaatccctccaggtcatat

SEQ ID NO: 180130 - DNA, 33 bp, Homo sapien
caggaagcctccatcagtccctccaggtcatat

SEQ ID NO: 180131 - DNA, 33 bp, Homo sapien
tcccacagttatacctcagaaaccctgcacatt

SEQ ID NO: 180132 - DNA, 33 bp, Homo sapien
tcccacagttataccttagaaaccctgcacatt

SEQ ID NO: 180133 - DNA, 33 bp, Homo sapien
ctcagagtgtgacccacggactaacagcagtga

SEQ ID NO: 180134 - DNA, 33 bp, Homo sapien
ctcagagtgtgacccatggactaacagcagtga

SEQ ID NO: 180135 - DNA, 33 bp, Homo sapien
ttggagaccagctatacgccacaatgtgggtga

SEQ ID NO: 180136 - DNA, 33 bp, Homo sapien
ttggagaccagctataggccacaatgtgggtga

SEQ ID NO: 180137 - DNA, 33 bp, Homo sapien
atgaaggcggaagtcactcccccaaccatgcca

SEQ ID NO: 180138 - DNA, 33 bp, Homo sapien
atgaaggcggaagtcagtcccccaaccatgcca

SEQ ID NO: 180139 - DNA, 33 bp, Homo sapien
ttcctgaccttaaatacgacccaactctcatcc

SEQ ID NO: 180140 - DNA, 33 bp, Homo sapien
ttcctgaccttaaatatgacccaactctcatcc

SEQ ID NO: 180141 - DNA, 33 bp, Homo sapien
cctactctcatttcccaagaacatttaaagaca

SEQ ID NO: 180142 - DNA, 33 bp, Homo sapien
cctactctcatttcccgagaacatttaaagaca

SEQ ID NO: 180143 - DNA, 33 bp, Homo sapien
gatatttactcaagcacgtcaagaggtaagagg

SEQ ID NO: 180144 - DNA, 33 bp, Homo sapien
gatatttactcaagcatgtcaagaggtaagagg

SEQ ID NO: 180145 - DNA, 33 bp, Homo sapien
tactaccctaacaacaaactctagcaaagtgct

SEQ ID NO: 180146 - DNA, 33 bp, Homo sapien
tactaccctaacaacagactctagcaaagtgct

SEQ ID NO: 180147 - DNA, 33 bp, Homo sapien
taatttaggcatactccacccttaccccaagct

SEQ ID NO: 180148 - DNA, 33 bp, Homo sapien
taatttaggcatactctacccttaccccaagct

SEQ ID NO: 180149 - DNA, 33 bp, Homo sapien
ctcattaacatttccaaagatacgtaagtgtaa

SEQ ID NO: 180150 - DNA, 33 bp, Homo sapien
ctcattaacatttccatagatacgtaagtgtaa

SEQ ID NO: 180151 - DNA, 33 bp, Homo sapien
agagaaggttcattaaaagagatgcctggagag

SEQ ID NO: 180152 - DNA, 33 bp, Homo sapien
agagaaggttcattaagagagatgcctggagag

SEQ ID NO: 180153 - DNA, 33 bp, Homo sapien
agcagataaaaagagagaaatttttgagcagaa

SEQ ID NO: 180154 - DNA, 33 bp, Homo sapien
agcagataaaaagagataaatttttgagcagaa

SEQ ID NO: 180155 - DNA, 33 bp, Homo sapien
tttacatacaggcataaccgtggtactctgcaa

SEQ ID NO: 180156 - DNA, 33 bp, Homo sapien
tttacatacaggcatacccgtggtactctgcaa

SEQ ID NO: 180157 - DNA, 33 bp, Homo sapien
tgattgttctatgaagccagtgccaggtcaaag

SEQ ID NO: 180158 - DNA, 33 bp, Homo sapien
tgattgttctatgaagtcagtgccaggtcaaag

SEQ ID NO: 180159 - DNA, 33 bp, Homo sapien
ttttggaagagtttgaaaaagattgccattaat

SEQ ID NO: 180160 - DNA, 33 bp, Homo sapien
ttttggaagagtttgagaaagattgccattaat

SEQ ID NO: 180161 - DNA, 33 bp, Homo sapien
ttcttttgatgccaaacgtcatatctcctccac

SEQ ID NO: 180162 - DNA, 33 bp, Homo sapien
ttcttttgatgccaaatgtcatatctcctccac

SEQ ID NO: 180163 - DNA, 33 bp, Homo sapien
tttctatggctaactcacatttattcctgtatt

SEQ ID NO: 180164 - DNA, 33 bp, Homo sapien
tttctatggctaactcgcatttattcctgtatt

SEQ ID NO: 180165 - DNA, 33 bp, Homo sapien
atttctcaagatttacacttaccacttttttac

SEQ ID NO: 180166 - DNA, 33 bp, Homo sapien
atttctcaagatttacgcttaccacttttttac

SEQ ID NO: 180167 - DNA, 33 bp, Homo sapien
ccaactgttttttaccacttgccttaaggctac

SEQ ID NO: 180168 - DNA, 33 bp, Homo sapien
ccaactgttttttaccgcttgccttaaggctac

SEQ ID NO: 180169 - DNA, 33 bp, Homo sapien
caaattgtcttgctaaacaaatcctaaaactgt

SEQ ID NO: 180170 - DNA, 33 bp, Homo sapien
caaattgtcttgctaaccaaatcctaaaactgt

SEQ ID NO: 180171 - DNA, 33 bp, Homo sapien
aaaccaagctgatttccacccaatagcccttga

SEQ ID NO: 180172 - DNA, 33 bp, Homo sapien
aaaccaagctgatttctacccaatagcccttga

SEQ ID NO: 180173 - DNA, 33 bp, Homo sapien
ggtgtccccatgctccagaagctgaaggaatcc

SEQ ID NO: 180174 - DNA, 33 bp, Homo sapien
ggtgtccccatgctccggaagctgaaggaatcc

SEQ ID NO: 180175 - DNA, 33 bp, Homo sapien
aataagttaggtgtcactcctgtcttacaaaag

SEQ ID NO: 180176 - DNA, 33 bp, Homo sapien
aataagttaggtgtcattcctgtcttacaaaag

SEQ ID NO: 180177 - DNA, 33 bp, Homo sapien
aagcaattgtgatattgaagcgtttggataact

SEQ ID NO: 180178 - DNA, 33 bp, Homo sapien
aagcaattgtgatatttaagcgtttggataact

SEQ ID NO: 180179 - DNA, 33 bp, Homo sapien
actaaagaaatcctcaatgaagctgctttgaca

SEQ ID NO: 180180 - DNA, 33 bp, Homo sapien
actaaagaaatcctcagtgaagctgctttgaca

SEQ ID NO: 180181 - DNA, 33 bp, Homo sapien
ttgtctctaggtttgacgggaaatttaaggctg

SEQ ID NO: 180182 - DNA, 33 bp, Homo sapien
ttgtctctaggtttgatgggaaatttaaggctg

SEQ ID NO: 180183 - DNA, 33 bp, Homo sapien
aattatatagataaaaatgcaatgaaattattg

SEQ ID NO: 180184 - DNA, 33 bp, Homo sapien
aattatatagataaaagtgcaatgaaattattg

SEQ ID NO: 180185 - DNA, 33 bp, Homo sapien
cttgatatggagattaaaattgtgacttttaga

SEQ ID NO: 180186 - DNA, 33 bp, Homo sapien
cttgatatggagattagaattgtgacttttaga

SEQ ID NO: 180187 - DNA, 33 bp, Homo sapien
aacataagatccataaactcttaaaaatttatt

SEQ ID NO: 180188 - DNA, 33 bp, Homo sapien
aacataagatccataagctcttaaaaatttatt

SEQ ID NO: 180189 - DNA, 33 bp, Homo sapien
ctgtaacacctgggaacggacttcctatctccc

SEQ ID NO: 180190 - DNA, 33 bp, Homo sapien
ctgtaacacctgggaatggacttcctatctccc

SEQ ID NO: 180191 - DNA, 33 bp, Homo sapien
agagaatgacatgaaagagttggccaattagct

SEQ ID NO: 180192 - DNA, 33 bp, Homo sapien
agagaatgacatgaaatagttggccaattagct

SEQ ID NO: 180193 - DNA, 33 bp, Homo sapien
tttggtctatattcaacactgaaattacatagc

SEQ ID NO: 180194 - DNA, 33 bp, Homo sapien
tttggtctatattcaatactgaaattacatagc

SEQ ID NO: 180195 - DNA, 33 bp, Homo sapien
ttttctgtttccccaacgtgctctataaatttg

SEQ ID NO: 180196 - DNA, 33 bp, Homo sapien
ttttctgtttccccaatgtgctctataaatttg

SEQ ID NO: 180197 - DNA, 33 bp, Homo sapien
aattcatgcttgaaagaagaaataacataggga

SEQ ID NO: 180198 - DNA, 33 bp, Homo sapien
aattcatgcttgaaaggagaaataacataggga

SEQ ID NO: 180199 - DNA, 33 bp, Homo sapien
gccttacctggtcttacaattattgatcctatc

SEQ ID NO: 180200 - DNA, 33 bp, Homo sapien
gccttacctggtcttataattattgatcctatc

SEQ ID NO: 180201 - DNA, 33 bp, Homo sapien
tgaaaagctgaatctccagaggaagatgataag

SEQ ID NO: 180202 - DNA, 33 bp, Homo sapien
tgaaaagctgaatctcgagaggaagatgataag

SEQ ID NO: 180203 - DNA, 33 bp, Homo sapien
tctcagaggacagtcaatccttccatgagaata

SEQ ID NO: 180204 - DNA, 33 bp, Homo sapien
tctcagaggacagtcattccttccatgagaata

SEQ ID NO: 180205 - DNA, 33 bp, Homo sapien
aattttgcatatttgacgtatgttgctgtatac

SEQ ID NO: 180206 - DNA, 33 bp, Homo sapien
aattttgcatatttgatgtatgttgctgtatac

SEQ ID NO: 180207 - DNA, 33 bp, Homo sapien
tgtctgtcgaatcggtcaatttagttcccaata

SEQ ID NO: 180208 - DNA, 33 bp, Homo sapien
tgtctgtcgaatcggtgaatttagttcccaata

SEQ ID NO: 180209 - DNA, 33 bp, Homo sapien
ttaacacaccagttgaagactccaaataccaca

SEQ ID NO: 180210 - DNA, 33 bp, Homo sapien
ttaacacaccagttgaggactccaaataccaca

SEQ ID NO: 180211 - DNA, 33 bp, Homo sapien
gttgaatctaaatcagcaaagataagaggaaaa

SEQ ID NO: 180212 - DNA, 33 bp, Homo sapien
gttgaatctaaatcaggaaagataagaggaaaa

SEQ ID NO: 180213 - DNA, 33 bp, Homo sapien
cagccatgttaggtaccaaagatctagaaataa

SEQ ID NO: 180214 - DNA, 33 bp, Homo sapien
cagccatgttaggtactaaagatctagaaataa

SEQ ID NO: 180215 - DNA, 33 bp, Homo sapien
aagaaccagttggggcaaaagtgggagtacatt

SEQ ID NO: 180216 - DNA, 33 bp, Homo sapien
aagaaccagttggggcgaaagtgggagtacatt

SEQ ID NO: 180217 - DNA, 33 bp, Homo sapien
gtgacttcactggaaaagaatcctgggaggtgg

SEQ ID NO: 180218 - DNA, 33 bp, Homo sapien
gtgacttcactggaaaggaatcctgggaggtgg

SEQ ID NO: 180219 - DNA, 33 bp, Homo sapien
ttcaatttgtggtccaaagaaaagttgccattt

SEQ ID NO: 180220 - DNA, 33 bp, Homo sapien
ttcaatttgtggtccacagaaaagttgccattt

SEQ ID NO: 180221 - DNA, 33 bp, Homo sapien
tggtctgttgcttatacgtaaaaaggaggagaa

SEQ ID NO: 180222 - DNA, 33 bp, Homo sapien
tggtctgttgcttatatgtaaaaaggaggagaa

SEQ ID NO: 180223 - DNA, 33 bp, Homo sapien
gtataagtgatgattacgtaaggaagaagagga

SEQ ID NO: 180224 - DNA, 33 bp, Homo sapien
gtataagtgatgattaggtaaggaagaagagga

SEQ ID NO: 180225 - DNA, 33 bp, Homo sapien
aactactgtcaccaaccataaagtcggaagagc

SEQ ID NO: 180226 - DNA, 33 bp, Homo sapien
aactactgtcaccaactataaagtcggaagagc

SEQ ID NO: 180227 - DNA, 33 bp, Homo sapien
tacctctgctcttgagacatttgtgggctacta

SEQ ID NO: 180228 - DNA, 33 bp, Homo sapien
tacctctgctcttgaggcatttgtgggctacta

SEQ ID NO: 180229 - DNA, 33 bp, Homo sapien
agccaccagctaatacactttgtcagggatgtc

SEQ ID NO: 180230 - DNA, 33 bp, Homo sapien
agccaccagctaatactctttgtcagggatgtc

SEQ ID NO: 180231 - DNA, 33 bp, Homo sapien
gataaaatggctccagaaaagagctgctgagct

SEQ ID NO: 180232 - DNA, 33 bp, Homo sapien
gataaaatggctccaggaaagagctgctgagct

SEQ ID NO: 180233 - DNA, 33 bp, Homo sapien
agagtcattgtgaggaaggatgatctcaaagac

SEQ ID NO: 180234 - DNA, 33 bp, Homo sapien
agagtcattgtgaggagggatgatctcaaagac

SEQ ID NO: 180235 - DNA, 33 bp, Homo sapien
tgacaaaataattacaagtgatgatgttaaatg

SEQ ID NO: 180236 - DNA, 33 bp, Homo sapien
tgacaaaataattacacgtgatgatgttaaatg

SEQ ID NO: 180237 - DNA, 33 bp, Homo sapien
gggatagtactcttcaaacaactgataggatcc

SEQ ID NO: 180238 - DNA, 33 bp, Homo sapien
gggatagtactcttcatacaactgataggatcc

SEQ ID NO: 180239 - DNA, 33 bp, Homo sapien
gagagggagagaaagtgacagagatagctgtga

SEQ ID NO: 180240 - DNA, 33 bp, Homo sapien
gagagggagagaaagttacagagatagctgtga

SEQ ID NO: 180241 - DNA, 33 bp, Homo sapien
cttactgcctacaaaaactatgctcttataccc

SEQ ID NO: 180242 - DNA, 33 bp, Homo sapien
cttactgcctacaaaacctatgctcttataccc

SEQ ID NO: 180243 - DNA, 33 bp, Homo sapien
acaatctggaccataacggaaacagagagatca

SEQ ID NO: 180244 - DNA, 33 bp, Homo sapien
acaatctggaccataatggaaacagagagatca

SEQ ID NO: 180245 - DNA, 33 bp, Homo sapien
ccttcactctttttccaaatttctcaccctggg

SEQ ID NO: 180246 - DNA, 33 bp, Homo sapien
ccttcactctttttccgaatttctcaccctggg

SEQ ID NO: 180247 - DNA, 33 bp, Homo sapien
catcacatactgttcacaaggctgaaatttagt

SEQ ID NO: 180248 - DNA, 33 bp, Homo sapien
catcacatactgttcataaggctgaaatttagt

SEQ ID NO: 180249 - DNA, 33 bp, Homo sapien
agacctaatgctcacaacttcagggattataaa

SEQ ID NO: 180250 - DNA, 33 bp, Homo sapien
agacctaatgctcacatcttcagggattataaa

SEQ ID NO: 180251 - DNA, 33 bp, Homo sapien
agatgctgatatctgacgattgtggtagattgt

SEQ ID NO: 180252 - DNA, 33 bp, Homo sapien
agatgctgatatctgatgattgtggtagattgt

SEQ ID NO: 180253 - DNA, 33 bp, Homo sapien
tgtaagatattagataggtacggaagaacaata

SEQ ID NO: 180254 - DNA, 33 bp, Homo sapien
tgtaagatattagatatgtacggaagaacaata

SEQ ID NO: 180255 - DNA, 33 bp, Homo sapien
acatctatgggttccactgctttaacaaaactc

SEQ ID NO: 180256 - DNA, 33 bp, Homo sapien
acatctatgggttccattgctttaacaaaactc

SEQ ID NO: 180257 - DNA, 33 bp, Homo sapien
acactcagctaggaagcagaagagcaaaaattt

SEQ ID NO: 180258 - DNA, 33 bp, Homo sapien
acactcagctaggaagtagaagagcaaaaattt

SEQ ID NO: 180259 - DNA, 33 bp, Homo sapien
gacttcaacctaagaactgcaaaaccaagtact

SEQ ID NO: 180260 - DNA, 33 bp, Homo sapien
gacttcaacctaagaattgcaaaaccaagtact

SEQ ID NO: 180261 - DNA, 33 bp, Homo sapien
cctttagaatgtgggagaggccttccttcacag

SEQ ID NO: 180262 - DNA, 33 bp, Homo sapien
cctttagaatgtgggataggccttccttcacag

SEQ ID NO: 180263 - DNA, 33 bp, Homo sapien
gctttgaccattaaaaagaaattcattcataag

SEQ ID NO: 180264 - DNA, 33 bp, Homo sapien
gctttgaccattaaaaggaaattcattcataag

SEQ ID NO: 180265 - DNA, 33 bp, Homo sapien
ttttctgttatcttaaagttgcacaattccagc

SEQ ID NO: 180266 - DNA, 33 bp, Homo sapien
ttttctgttatcttaacgttgcacaattccagc

SEQ ID NO: 180267 - DNA, 33 bp, Homo sapien
gaaggtagaagatggccgagtccagggaaatat

SEQ ID NO: 180268 - DNA, 33 bp, Homo sapien
gaaggtagaagatggctgagtccagggaaatat

SEQ ID NO: 180269 - DNA, 33 bp, Homo sapien
ttttgtagaaaagtaacctttacgagcttttca

SEQ ID NO: 180270 - DNA, 33 bp, Homo sapien
ttttgtagaaaagtaatctttacgagcttttca

SEQ ID NO: 180271 - DNA, 33 bp, Homo sapien
actgtacacagattccaagcattgtattaagtt

SEQ ID NO: 180272 - DNA, 33 bp, Homo sapien
actgtacacagattccgagcattgtattaagtt

SEQ ID NO: 180273 - DNA, 33 bp, Homo sapien
ttgacgcacctaacaacgatagttaacatttac

SEQ ID NO: 180274 - DNA, 33 bp, Homo sapien
ttgacgcacctaacaatgatagttaacatttac

SEQ ID NO: 180275 - DNA, 33 bp, Homo sapien
aacttccccacactccaagatactatccggggt

SEQ ID NO: 180276 - DNA, 33 bp, Homo sapien
aacttccccacactcccagatactatccggggt

SEQ ID NO: 180277 - DNA, 33 bp, Homo sapien
tttcatcctgggtaaaacacttatcctatcacg

SEQ ID NO: 180278 - DNA, 33 bp, Homo sapien
tttcatcctgggtaaagcacttatcctatcacg

SEQ ID NO: 180279 - DNA, 33 bp, Homo sapien
tgaaagagaaaatgcactcaaaggtatgaatgt

SEQ ID NO: 180280 - DNA, 33 bp, Homo sapien
tgaaagagaaaatgcagtcaaaggtatgaatgt

SEQ ID NO: 180281 - DNA, 33 bp, Homo sapien
agaaaaatatgatcaaatgtgaatcagaagaca

SEQ ID NO: 180282 - DNA, 33 bp, Homo sapien
agaaaaatatgatcaactgtgaatcagaagaca

SEQ ID NO: 180283 - DNA, 33 bp, Homo sapien
atcaaaattgaaaacactgcactggaaaaatca

SEQ ID NO: 180284 - DNA, 33 bp, Homo sapien
atcaaaattgaaaacattgcactggaaaaatca

SEQ ID NO: 180285 - DNA, 33 bp, Homo sapien
tgttgagaatatataaagaactgtcaaaactca

SEQ ID NO: 180286 - DNA, 33 bp, Homo sapien
tgttgagaatatataaggaactgtcaaaactca

SEQ ID NO: 180287 - DNA, 33 bp, Homo sapien
ttaagaagagactaaaagtagagaagggggtgt

SEQ ID NO: 180288 - DNA, 33 bp, Homo sapien
ttaagaagagactaaaggtagagaagggggtgt

SEQ ID NO: 180289 - DNA, 33 bp, Homo sapien
aaaaactttatgaaacacagatagaaaacagtt

SEQ ID NO: 180290 - DNA, 33 bp, Homo sapien
aaaaactttatgaaacgcagatagaaaacagtt

SEQ ID NO: 180291 - DNA, 33 bp, Homo sapien
actttcaccagaattacattttcaagggattaa

SEQ ID NO: 180292 - DNA, 33 bp, Homo sapien
actttcaccagaattatattttcaagggattaa

SEQ ID NO: 180293 - DNA, 33 bp, Homo sapien
tatgagaaagggtaacaaaacagcatttacagg

SEQ ID NO: 180294 - DNA, 33 bp, Homo sapien
tatgagaaagggtaacgaaacagcatttacagg

SEQ ID NO: 180295 - DNA, 33 bp, Homo sapien
aagccatttgagaaaaatgaggaagaggtagag

SEQ ID NO: 180296 - DNA, 33 bp, Homo sapien
aagccatttgagaaaagtgaggaagaggtagag

SEQ ID NO: 180297 - DNA, 33 bp, Homo sapien
tgtttcaatagggaagaatgggttatctgatta

SEQ ID NO: 180298 - DNA, 33 bp, Homo sapien
tgtttcaatagggaaggatgggttatctgatta

SEQ ID NO: 180299 - DNA, 33 bp, Homo sapien
ttctcaaagtaagaaacggctttagctcaagaa

SEQ ID NO: 180300 - DNA, 33 bp, Homo sapien
ttctcaaagtaagaaatggctttagctcaagaa

SEQ ID NO: 180301 - DNA, 33 bp, Homo sapien
agaaggcacacccataaatttttgaaataggcc

SEQ ID NO: 180302 - DNA, 33 bp, Homo sapien
agaaggcacacccatacatttttgaaataggcc

SEQ ID NO: 180303 - DNA, 33 bp, Homo sapien
acttctggccccaagtgacccatgtcccttcca

SEQ ID NO: 180304 - DNA, 33 bp, Homo sapien
acttctggccccaagttacccatgtcccttcca

SEQ ID NO: 180305 - DNA, 33 bp, Homo sapien
atacttttaatgaaccaatttgacagctcagct

SEQ ID NO: 180306 - DNA, 33 bp, Homo sapien
atacttttaatgaaccgatttgacagctcagct

SEQ ID NO: 180307 - DNA, 33 bp, Homo sapien
taattccatggagtaaaaacattttcaaaaaga

SEQ ID NO: 180308 - DNA, 33 bp, Homo sapien
taattccatggagtaagaacattttcaaaaaga

SEQ ID NO: 180309 - DNA, 33 bp, Homo sapien
tggtaaacttaatgctgaacagtgagtctagct

SEQ ID NO: 180310 - DNA, 33 bp, Homo sapien
tggtaaacttaatgcttaacagtgagtctagct

SEQ ID NO: 180311 - DNA, 33 bp, Homo sapien
aaagtgcaacttctgacaggagtacctgttgct

SEQ ID NO: 180312 - DNA, 33 bp, Homo sapien
aaagtgcaacttctgataggagtacctgttgct

SEQ ID NO: 180313 - DNA, 33 bp, Homo sapien
ttgagacaagtactcaaacaagtctcaagaatt

SEQ ID NO: 180314 - DNA, 33 bp, Homo sapien
ttgagacaagtactcagacaagtctcaagaatt

SEQ ID NO: 180315 - DNA, 33 bp, Homo sapien
tgggagagaagcaggacggaactaatatctctt

SEQ ID NO: 180316 - DNA, 33 bp, Homo sapien
tgggagagaagcaggatggaactaatatctctt

SEQ ID NO: 180317 - DNA, 33 bp, Homo sapien
agctgtacgtatttaaagtagatccttttatca

SEQ ID NO: 180318 - DNA, 33 bp, Homo sapien
agctgtacgtatttaatgtagatccttttatca

SEQ ID NO: 180319 - DNA, 33 bp, Homo sapien
actgttacctttgaaaaatctgcagttaattat

SEQ ID NO: 180320 - DNA, 33 bp, Homo sapien
actgttacctttgaaagatctgcagttaattat

SEQ ID NO: 180321 - DNA, 33 bp, Homo sapien
tttgcaaaatgtagtaagaagaatcagaggaga

SEQ ID NO: 180322 - DNA, 33 bp, Homo sapien
tttgcaaaatgtagtaggaagaatcagaggaga

SEQ ID NO: 180323 - DNA, 33 bp, Homo sapien
tttccagtgattgtgacagatttgagattggac

SEQ ID NO: 180324 - DNA, 33 bp, Homo sapien
tttccagtgattgtgagagatttgagattggac

SEQ ID NO: 180325 - DNA, 33 bp, Homo sapien
atgtacccatctccctcacattacttcatgtaa

SEQ ID NO: 180326 - DNA, 33 bp, Homo sapien
atgtacccatctcccttacattacttcatgtaa

SEQ ID NO: 180327 - DNA, 33 bp, Homo sapien
ttagatgtcaggatcaaacaatgttaatggcta

SEQ ID NO: 180328 - DNA, 33 bp, Homo sapien
ttagatgtcaggatcagacaatgttaatggcta

SEQ ID NO: 180329 - DNA, 33 bp, Homo sapien
tgcctgtatgataagaagaagtgaggtgagtga

SEQ ID NO: 180330 - DNA, 33 bp, Homo sapien
tgcctgtatgataagatgaagtgaggtgagtga

SEQ ID NO: 180331 - DNA, 33 bp, Homo sapien
gttcaggagatttaaacattagttaagacaggg

SEQ ID NO: 180332 - DNA, 33 bp, Homo sapien
gttcaggagatttaaagattagttaagacaggg

SEQ ID NO: 180333 - DNA, 33 bp, Homo sapien
tgaaaatatatggaaaaggaaaagtgactgtat

SEQ ID NO: 180334 - DNA, 33 bp, Homo sapien
tgaaaatatatggaaagggaaaagtgactgtat

SEQ ID NO: 180335 - DNA, 33 bp, Homo sapien
gggtaattgtggataccagttacagcagatgta

SEQ ID NO: 180336 - DNA, 33 bp, Homo sapien
gggtaattgtggatactagttacagcagatgta

SEQ ID NO: 180337 - DNA, 33 bp, Homo sapien
tcctcataccaattcactacctcaaaaactatt

SEQ ID NO: 180338 - DNA, 33 bp, Homo sapien
tcctcataccaattcattacctcaaaaactatt

SEQ ID NO: 180339 - DNA, 33 bp, Homo sapien
gaagggacaaaagtgaaatgttcagcagggtaa

SEQ ID NO: 180340 - DNA, 33 bp, Homo sapien
gaagggacaaaagtgagatgttcagcagggtaa

SEQ ID NO: 180341 - DNA, 33 bp, Homo sapien
gaagagccagaaaacggatatcacagaaaaagg

SEQ ID NO: 180342 - DNA, 33 bp, Homo sapien
gaagagccagaaaacgtatatcacagaaaaagg

SEQ ID NO: 180343 - DNA, 33 bp, Homo sapien
ggcaggatgcagggtccaactcttgatgaggtg

SEQ ID NO: 180344 - DNA, 33 bp, Homo sapien
ggcaggatgcagggtcgaactcttgatgaggtg

SEQ ID NO: 180345 - DNA, 33 bp, Homo sapien
ttgtcctgtttctagaccctagatatgtgccta

SEQ ID NO: 180346 - DNA, 33 bp, Homo sapien
ttgtcctgtttctagatcctagatatgtgccta

SEQ ID NO: 180347 - DNA, 33 bp, Homo sapien
atgaagttctaaggcaaggaattctttgaagag

SEQ ID NO: 180348 - DNA, 33 bp, Homo sapien
atgaagttctaaggcagggaattctttgaagag

SEQ ID NO: 180349 - DNA, 33 bp, Homo sapien
atccatgtgatatagagtatcattgaacctaac

SEQ ID NO: 180350 - DNA, 33 bp, Homo sapien
atccatgtgatatagattatcattgaacctaac

SEQ ID NO: 180351 - DNA, 33 bp, Homo sapien
tggaaggctgactactcaagttacatgctcaga

SEQ ID NO: 180352 - DNA, 33 bp, Homo sapien
tggaaggctgactacttaagttacatgctcaga

SEQ ID NO: 180353 - DNA, 33 bp, Homo sapien
ggcaaatcatgtaaataagttgagtaaacacaa

SEQ ID NO: 180354 - DNA, 33 bp, Homo sapien
ggcaaatcatgtaaatcagttgagtaaacacaa

SEQ ID NO: 180355 - DNA, 33 bp, Homo sapien
acaatttgaagagtcaatatttcacagttaata

SEQ ID NO: 180356 - DNA, 33 bp, Homo sapien
acaatttgaagagtcagtatttcacagttaata

SEQ ID NO: 180357 - DNA, 33 bp, Homo sapien
ttgaagcctattttaaatcactcactcattcac

SEQ ID NO: 180358 - DNA, 33 bp, Homo sapien
ttgaagcctattttaagtcactcactcattcac

SEQ ID NO: 180359 - DNA, 33 bp, Homo sapien
ggaatagattatggggaagctttatttaaaatt

SEQ ID NO: 180360 - DNA, 33 bp, Homo sapien
ggaatagattatggggtagctttatttaaaatt

SEQ ID NO: 180361 - DNA, 33 bp, Homo sapien
gcctgatgctaagcccacaaaacaagcaccttg

SEQ ID NO: 180362 - DNA, 33 bp, Homo sapien
gcctgatgctaagcccgcaaaacaagcaccttg

SEQ ID NO: 180363 - DNA, 33 bp, Homo sapien
taactcataatttgaaaaacactgtaacatgtt

SEQ ID NO: 180364 - DNA, 33 bp, Homo sapien
taactcataatttgaataacactgtaacatgtt

SEQ ID NO: 180365 - DNA, 33 bp, Homo sapien
accaaaagaaaaggaaatcatgaacgtatacat

SEQ ID NO: 180366 - DNA, 33 bp, Homo sapien
accaaaagaaaaggaagtcatgaacgtatacat

SEQ ID NO: 180367 - DNA, 33 bp, Homo sapien
aaagagtagtaagtcaacgctcaagagactctg

SEQ ID NO: 180368 - DNA, 33 bp, Homo sapien
aaagagtagtaagtcaccgctcaagagactctg

SEQ ID NO: 180369 - DNA, 33 bp, Homo sapien
tagcactgggattttggaggctagacaggtata

SEQ ID NO: 180370 - DNA, 33 bp, Homo sapien
tagcactgggattttgtaggctagacaggtata

SEQ ID NO: 180371 - DNA, 33 bp, Homo sapien
taaggcaaggaattcagcagaacagtatatctg

SEQ ID NO: 180372 - DNA, 33 bp, Homo sapien
taaggcaaggaattcatcagaacagtatatctg

SEQ ID NO: 180373 - DNA, 33 bp, Homo sapien
acaatgacaaacaacaaactgggaaactattta

SEQ ID NO: 180374 - DNA, 33 bp, Homo sapien
acaatgacaaacaacacactgggaaactattta

SEQ ID NO: 180375 - DNA, 33 bp, Homo sapien
gaagatagagaagtgaaagttaaataagtgaca

SEQ ID NO: 180376 - DNA, 33 bp, Homo sapien
gaagatagagaagtgacagttaaataagtgaca

SEQ ID NO: 180377 - DNA, 33 bp, Homo sapien
aaacacccttaccctacggcttctgaccttagg

SEQ ID NO: 180378 - DNA, 33 bp, Homo sapien
aaacacccttaccctatggcttctgaccttagg

SEQ ID NO: 180379 - DNA, 33 bp, Homo sapien
catacagtaatatagactcaagggcttcaatgt

SEQ ID NO: 180380 - DNA, 33 bp, Homo sapien
catacagtaatatagattcaagggcttcaatgt

SEQ ID NO: 180381 - DNA, 33 bp, Homo sapien
tcttataggattgctgcacaatttaaatgagac

SEQ ID NO: 180382 - DNA, 33 bp, Homo sapien
tcttataggattgctgtacaatttaaatgagac

SEQ ID NO: 180383 - DNA, 33 bp, Homo sapien
gtgaataaaacagataacttccttcttgtgtgg

SEQ ID NO: 180384 - DNA, 33 bp, Homo sapien
gtgaataaaacagatatcttccttcttgtgtgg

SEQ ID NO: 180385 - DNA, 33 bp, Homo sapien
tgtacatatatactcacagatatccgcagatag

SEQ ID NO: 180386 - DNA, 33 bp, Homo sapien
tgtacatatatactcatagatatccgcagatag

SEQ ID NO: 180387 - DNA, 33 bp, Homo sapien
taaggcaccaaaccaacgaatatggtatctttt

SEQ ID NO: 180388 - DNA, 33 bp, Homo sapien
taaggcaccaaaccaatgaatatggtatctttt

SEQ ID NO: 180389 - DNA, 33 bp, Homo sapien
aaagaatggactatcaatacaatcaacaaatta

SEQ ID NO: 180390 - DNA, 33 bp, Homo sapien
aaagaatggactatcagtacaatcaacaaatta

SEQ ID NO: 180391 - DNA, 33 bp, Homo sapien
ttaaagctaattgtcaatcaggcttaagaatca

SEQ ID NO: 180392 - DNA, 33 bp, Homo sapien
ttaaagctaattgtcagtcaggcttaagaatca

SEQ ID NO: 180393 - DNA, 33 bp, Homo sapien
ccatgacttctaattcacggagtttcataagaa

SEQ ID NO: 180394 - DNA, 33 bp, Homo sapien
ccatgacttctaattcgcggagtttcataagaa

SEQ ID NO: 180395 - DNA, 33 bp, Homo sapien
tagagctatctttaccagcccactagaacgttt

SEQ ID NO: 180396 - DNA, 33 bp, Homo sapien
tagagctatctttacccgcccactagaacgttt

SEQ ID NO: 180397 - DNA, 33 bp, Homo sapien
agacttggaaacaaaacgctttgctagaggata

SEQ ID NO: 180398 - DNA, 33 bp, Homo sapien
agacttggaaacaaaatgctttgctagaggata

SEQ ID NO: 180399 - DNA, 33 bp, Homo sapien
ggctacttcagagcaaccagaagtcttaatgtt

SEQ ID NO: 180400 - DNA, 33 bp, Homo sapien
ggctacttcagagcaatcagaagtcttaatgtt

SEQ ID NO: 180401 - DNA, 33 bp, Homo sapien
gcatgctattatgctaccaaaagcttaaaatat

SEQ ID NO: 180402 - DNA, 33 bp, Homo sapien
gcatgctattatgctatcaaaagcttaaaatat

SEQ ID NO: 180403 - DNA, 33 bp, Homo sapien
caaatggtcctttctacctgtccagggtacctg

SEQ ID NO: 180404 - DNA, 33 bp, Homo sapien
caaatggtcctttctatctgtccagggtacctg

SEQ ID NO: 180405 - DNA, 33 bp, Homo sapien
aaggtacatttttgtaacttcgccactcatacc

SEQ ID NO: 180406 - DNA, 33 bp, Homo sapien
aaggtacatttttgtagcttcgccactcatacc

SEQ ID NO: 180407 - DNA, 33 bp, Homo sapien
ctaagccatttgtaagcactctgttgtctctgt

SEQ ID NO: 180408 - DNA, 33 bp, Homo sapien
ctaagccatttgtaagtactctgttgtctctgt

SEQ ID NO: 180409 - DNA, 33 bp, Homo sapien
tcagcatagagcctgactaccaaataaaaatag

SEQ ID NO: 180410 - DNA, 33 bp, Homo sapien
tcagcatagagcctgattaccaaataaaaatag

SEQ ID NO: 180411 - DNA, 33 bp, Homo sapien
cacagagtaggcataacatactctttgaataaa

SEQ ID NO: 180412 - DNA, 33 bp, Homo sapien
cacagagtaggcataatatactctttgaataaa

SEQ ID NO: 180413 - DNA, 33 bp, Homo sapien
tcaaacattgtccccaacatcatggttaacatt

SEQ ID NO: 180414 - DNA, 33 bp, Homo sapien
tcaaacattgtccccaccatcatggttaacatt

SEQ ID NO: 180415 - DNA, 33 bp, Homo sapien
agagaaagatcaggggacattcagaaacttgta

SEQ ID NO: 180416 - DNA, 33 bp, Homo sapien
agagaaagatcaggggccattcagaaacttgta

SEQ ID NO: 180417 - DNA, 33 bp, Homo sapien
ccctggttcatataggaaagtttaagcagtgat

SEQ ID NO: 180418 - DNA, 33 bp, Homo sapien
ccctggttcatataggcaagtttaagcagtgat

SEQ ID NO: 180419 - DNA, 33 bp, Homo sapien
ttacctgttatctccacgagaattctactcctg

SEQ ID NO: 180420 - DNA, 33 bp, Homo sapien
ttacctgttatctccatgagaattctactcctg

SEQ ID NO: 180421 - DNA, 33 bp, Homo sapien
cagatattgaatcgctcaactaaataataggat

SEQ ID NO: 180422 - DNA, 33 bp, Homo sapien
cagatattgaatcgcttaactaaataataggat

SEQ ID NO: 180423 - DNA, 33 bp, Homo sapien
gcacagaatgttaggaaatataaaccgggacgt

SEQ ID NO: 180424 - DNA, 33 bp, Homo sapien
gcacagaatgttaggatatataaaccgggacgt

SEQ ID NO: 180425 - DNA, 33 bp, Homo sapien
acaataatgctaatgcagagcaaacagagactg

SEQ ID NO: 180426 - DNA, 33 bp, Homo sapien
acaataatgctaatgctgagcaaacagagactg

SEQ ID NO: 180427 - DNA, 33 bp, Homo sapien
agtttttcacaactccacactataaatgtattc

SEQ ID NO: 180428 - DNA, 33 bp, Homo sapien
agtttttcacaactccgcactataaatgtattc

SEQ ID NO: 180429 - DNA, 33 bp, Homo sapien
attattggcatttttaagtctacaagtgcccag

SEQ ID NO: 180430 - DNA, 33 bp, Homo sapien
attattggcatttttatgtctacaagtgcccag

SEQ ID NO: 180431 - DNA, 33 bp, Homo sapien
tattcaattctaggtacaagaagctagagaggc

SEQ ID NO: 180432 - DNA, 33 bp, Homo sapien
tattcaattctaggtataagaagctagagaggc

SEQ ID NO: 180433 - DNA, 33 bp, Homo sapien
cgtagtaaaattttcaaagtaggactcaaagaa

SEQ ID NO: 180434 - DNA, 33 bp, Homo sapien
cgtagtaaaattttcacagtaggactcaaagaa

SEQ ID NO: 180435 - DNA, 33 bp, Homo sapien
tcaattttcatagccaaatttgtagatggcatt

SEQ ID NO: 180436 - DNA, 33 bp, Homo sapien
tcaattttcatagccagatttgtagatggcatt

SEQ ID NO: 180437 - DNA, 33 bp, Homo sapien
tgcctgaatttacttacgcaatcctgataataa

SEQ ID NO: 180438 - DNA, 33 bp, Homo sapien
tgcctgaatttacttatgcaatcctgataataa

SEQ ID NO: 180439 - DNA, 33 bp, Homo sapien
agcatggtaatctcaagtaggctaaattaggct

SEQ ID NO: 180440 - DNA, 33 bp, Homo sapien
agcatggtaatctcaattaggctaaattaggct

SEQ ID NO: 180441 - DNA, 33 bp, Homo sapien
gaggagtaacacaggacattcaaaataaaacta

SEQ ID NO: 180442 - DNA, 33 bp, Homo sapien
gaggagtaacacaggatattcaaaataaaacta

SEQ ID NO: 180443 - DNA, 33 bp, Homo sapien
ctcatatatgcaccacgattttatgctatacaa

SEQ ID NO: 180444 - DNA, 33 bp, Homo sapien
ctcatatatgcaccactattttatgctatacaa

SEQ ID NO: 180445 - DNA, 33 bp, Homo sapien
acatggcatcactcttaaaatttgagacaggtt

SEQ ID NO: 180446 - DNA, 33 bp, Homo sapien
acatggcatcactcttgaaatttgagacaggtt

SEQ ID NO: 180447 - DNA, 33 bp, Homo sapien
tccttatgattgagacagatggaaaggggccat

SEQ ID NO: 180448 - DNA, 33 bp, Homo sapien
tccttatgattgagacggatggaaaggggccat

SEQ ID NO: 180449 - DNA, 33 bp, Homo sapien
agggatacaattagttgaaattcttcaaatcaa

SEQ ID NO: 180450 - DNA, 33 bp, Homo sapien
agggatacaattagtttaaattcttcaaatcaa

SEQ ID NO: 180451 - DNA, 33 bp, Homo sapien
caacctaaccacttagaatagacatagagcttg

SEQ ID NO: 180452 - DNA, 33 bp, Homo sapien
caacctaaccacttaggatagacatagagcttg

SEQ ID NO: 180453 - DNA, 33 bp, Homo sapien
gcactagaaccacacaatcaaaacttaagtcat

SEQ ID NO: 180454 - DNA, 33 bp, Homo sapien
gcactagaaccacacagtcaaaacttaagtcat

SEQ ID NO: 180455 - DNA, 33 bp, Homo sapien
ggtagtgtttagaggaaattaggatgacttaag

SEQ ID NO: 180456 - DNA, 33 bp, Homo sapien
ggtagtgtttagaggagattaggatgacttaag

SEQ ID NO: 180457 - DNA, 33 bp, Homo sapien
ttacccattagggaaactgcattctaaccaagc

SEQ ID NO: 180458 - DNA, 33 bp, Homo sapien
ttacccattagggaaagtgcattctaaccaagc

SEQ ID NO: 180459 - DNA, 33 bp, Homo sapien
taaaactttcatttaccctctgaaggaactcta

SEQ ID NO: 180460 - DNA, 33 bp, Homo sapien
taaaactttcatttactctctgaaggaactcta

SEQ ID NO: 180461 - DNA, 33 bp, Homo sapien
ggtcaattgctgaccactggatgtggagagatg

SEQ ID NO: 180462 - DNA, 33 bp, Homo sapien
ggtcaattgctgaccattggatgtggagagatg

SEQ ID NO: 180463 - DNA, 33 bp, Homo sapien
ttggtagctacagttaaaagacacaaaggtaat

SEQ ID NO: 180464 - DNA, 33 bp, Homo sapien
ttggtagctacagttagaagacacaaaggtaat

SEQ ID NO: 180465 - DNA, 33 bp, Homo sapien
gtgtctcttggaattacgtgtactgtaaatgag

SEQ ID NO: 180466 - DNA, 33 bp, Homo sapien
gtgtctcttggaattatgtgtactgtaaatgag

SEQ ID NO: 180467 - DNA, 33 bp, Homo sapien
cagcattgcaaatccccgaatcctggtctagtc

SEQ ID NO: 180468 - DNA, 33 bp, Homo sapien
cagcattgcaaatcccggaatcctggtctagtc

SEQ ID NO: 180469 - DNA, 33 bp, Homo sapien
ttaataccatgaggaactgactggacccgggtt

SEQ ID NO: 180470 - DNA, 33 bp, Homo sapien
ttaataccatgaggaattgactggacccgggtt

SEQ ID NO: 180471 - DNA, 33 bp, Homo sapien
ttttataatccttacaataattccttaagctag

SEQ ID NO: 180472 - DNA, 33 bp, Homo sapien
ttttataatccttacagtaattccttaagctag

SEQ ID NO: 180473 - DNA, 33 bp, Homo sapien
tgaaggattataacgacagttgcagagttgtga

SEQ ID NO: 180474 - DNA, 33 bp, Homo sapien
tgaaggattataacgagagttgcagagttgtga

SEQ ID NO: 180475 - DNA, 33 bp, Homo sapien
aatgaaagatagggaacgtaacacagatttaaa

SEQ ID NO: 180476 - DNA, 33 bp, Homo sapien
aatgaaagatagggaaggtaacacagatttaaa

SEQ ID NO: 180477 - DNA, 33 bp, Homo sapien
cgaattcttaaaacaacgctgtgagataggtac

SEQ ID NO: 180478 - DNA, 33 bp, Homo sapien
cgaattcttaaaacaatgctgtgagataggtac

SEQ ID NO: 180479 - DNA, 33 bp, Homo sapien
tacatcagtaggatagcagttcagaagaaatta

SEQ ID NO: 180480 - DNA, 33 bp, Homo sapien
tacatcagtaggatagtagttcagaagaaatta

SEQ ID NO: 180481 - DNA, 33 bp, Homo sapien
aggggcttatagagatcaggtaattcatggagc

SEQ ID NO: 180482 - DNA, 33 bp, Homo sapien
aggggcttatagagatgaggtaattcatggagc

SEQ ID NO: 180483 - DNA, 33 bp, Homo sapien
gatctgacttacagtggatccggactcatcctg

SEQ ID NO: 180484 - DNA, 33 bp, Homo sapien
gatctgacttacagtgtatccggactcatcctg

SEQ ID NO: 180485 - DNA, 33 bp, Homo sapien
atagtgccacccattgaatagggtcttcttcca

SEQ ID NO: 180486 - DNA, 33 bp, Homo sapien
atagtgccacccattgcatagggtcttcttcca

SEQ ID NO: 180487 - DNA, 33 bp, Homo sapien
actgcacttgttagacaggcattaattttccat

SEQ ID NO: 180488 - DNA, 33 bp, Homo sapien
actgcacttgttagacgggcattaattttccat

SEQ ID NO: 180489 - DNA, 33 bp, Homo sapien
ctccatgataggtcagaatgtgacagtaatcct

SEQ ID NO: 180490 - DNA, 33 bp, Homo sapien
ctccatgataggtcaggatgtgacagtaatcct

SEQ ID NO: 180491 - DNA, 33 bp, Homo sapien
tctgtttccaagctaacatcaatgttgattttt

SEQ ID NO: 180492 - DNA, 33 bp, Homo sapien
tctgtttccaagctaatatcaatgttgattttt

SEQ ID NO: 180493 - DNA, 33 bp, Homo sapien
actccagtgcctaacaaactgcatgatggtcaa

SEQ ID NO: 180494 - DNA, 33 bp, Homo sapien
actccagtgcctaacatactgcatgatggtcaa

SEQ ID NO: 180495 - DNA, 33 bp, Homo sapien
gaagtgttctctcttacgcttgcttccatgatt

SEQ ID NO: 180496 - DNA, 33 bp, Homo sapien
gaagtgttctctcttatgcttgcttccatgatt

SEQ ID NO: 180497 - DNA, 33 bp, Homo sapien
gaaatttgcagggtaaaatactagatatgagag

SEQ ID NO: 180498 - DNA, 33 bp, Homo sapien
gaaatttgcagggtaagatactagatatgagag

SEQ ID NO: 180499 - DNA, 33 bp, Homo sapien
caggaaggtacatcaaaaaacagagtctaatat

SEQ ID NO: 180500 - DNA, 33 bp, Homo sapien
caggaaggtacatcaacaaacagagtctaatat

SEQ ID NO: 180501 - DNA, 33 bp, Homo sapien
cattttaaaatactatgaagtcattagctgcaa

SEQ ID NO: 180502 - DNA, 33 bp, Homo sapien
cattttaaaatactattaagtcattagctgcaa

SEQ ID NO: 180503 - DNA, 33 bp, Homo sapien
caactctgggtggaaacctaagtgggaataaaa

SEQ ID NO: 180504 - DNA, 33 bp, Homo sapien
caactctgggtggaaatctaagtgggaataaaa

SEQ ID NO: 180505 - DNA, 33 bp, Homo sapien
ctattttgttatcttacataagcgcacaggtgg

SEQ ID NO: 180506 - DNA, 33 bp, Homo sapien
ctattttgttatcttatataagcgcacaggtgg

SEQ ID NO: 180507 - DNA, 33 bp, Homo sapien
cacttacctagaaaaacattggacagacttgtc

SEQ ID NO: 180508 - DNA, 33 bp, Homo sapien
cacttacctagaaaaatattggacagacttgtc

SEQ ID NO: 180509 - DNA, 33 bp, Homo sapien
ggatatcctttggtagcagttacataattcaaa

SEQ ID NO: 180510 - DNA, 33 bp, Homo sapien
ggatatcctttggtagtagttacataattcaaa

SEQ ID NO: 180511 - DNA, 33 bp, Homo sapien
tctgacagcctgatagcaaaggaaagcaggaac

SEQ ID NO: 180512 - DNA, 33 bp, Homo sapien
tctgacagcctgataggaaaggaaagcaggaac

SEQ ID NO: 180513 - DNA, 33 bp, Homo sapien
cttactatttctattacgacacattctagtact

SEQ ID NO: 180514 - DNA, 33 bp, Homo sapien
cttactatttctattatgacacattctagtact

SEQ ID NO: 180515 - DNA, 33 bp, Homo sapien
aaggtctacctgtctaacaatcacgaattttct

SEQ ID NO: 180516 - DNA, 33 bp, Homo sapien
aaggtctacctgtctatcaatcacgaattttct

SEQ ID NO: 180517 - DNA, 33 bp, Homo sapien
actttccaacggtttccatttcgctcatagtaa

SEQ ID NO: 180518 - DNA, 33 bp, Homo sapien
actttccaacggtttctatttcgctcatagtaa

SEQ ID NO: 180519 - DNA, 33 bp, Homo sapien
ctttcactcactttccacttatactgtatcagc

SEQ ID NO: 180520 - DNA, 33 bp, Homo sapien
ctttcactcactttccgcttatactgtatcagc

SEQ ID NO: 180521 - DNA, 33 bp, Homo sapien
ttctcaaatgagtgaacggcatcaggcacttca

SEQ ID NO: 180522 - DNA, 33 bp, Homo sapien
ttctcaaatgagtgaatggcatcaggcacttca

SEQ ID NO: 180523 - DNA, 33 bp, Homo sapien
ccaagggagacaagaacgcttatgcacagaagt

SEQ ID NO: 180524 - DNA, 33 bp, Homo sapien
ccaagggagacaagaatgcttatgcacagaagt

SEQ ID NO: 180525 - DNA, 33 bp, Homo sapien
taagccaggagacaaacattaaagaggatgcta

SEQ ID NO: 180526 - DNA, 33 bp, Homo sapien
taagccaggagacaaatattaaagaggatgcta

SEQ ID NO: 180527 - DNA, 33 bp, Homo sapien
agaatcacaagataaacgcaaagtgcaaaggca

SEQ ID NO: 180528 - DNA, 33 bp, Homo sapien
agaatcacaagataaatgcaaagtgcaaaggca

SEQ ID NO: 180529 - DNA, 33 bp, Homo sapien
tgtagttccccttaaccatgaacacatctgtct

SEQ ID NO: 180530 - DNA, 33 bp, Homo sapien
tgtagttccccttaactatgaacacatctgtct

SEQ ID NO: 180531 - DNA, 33 bp, Homo sapien
ctggaagaaaatacagcaagcactaaaatagtg

SEQ ID NO: 180532 - DNA, 33 bp, Homo sapien
ctggaagaaaatacaggaagcactaaaatagtg

SEQ ID NO: 180533 - DNA, 33 bp, Homo sapien
tattatttcacacaaaatgactttaatattgat

SEQ ID NO: 180534 - DNA, 33 bp, Homo sapien
tattatttcacacaaagtgactttaatattgat

SEQ ID NO: 180535 - DNA, 33 bp, Homo sapien
agtgaaggtaagacccagctaataacaaaactt

SEQ ID NO: 180536 - DNA, 33 bp, Homo sapien
agtgaaggtaagacccggctaataacaaaactt

SEQ ID NO: 180537 - DNA, 33 bp, Homo sapien
tcttcctacaattagaagaaatcgtcatcctta

SEQ ID NO: 180538 - DNA, 33 bp, Homo sapien
tcttcctacaattagaggaaatcgtcatcctta

SEQ ID NO: 180539 - DNA, 33 bp, Homo sapien
attcactattatgtcaatctcataggtcaagaa

SEQ ID NO: 180540 - DNA, 33 bp, Homo sapien
attcactattatgtcactctcataggtcaagaa

SEQ ID NO: 180541 - DNA, 33 bp, Homo sapien
tcgaaaggaggaaactcaagctttcataacttg

SEQ ID NO: 180542 - DNA, 33 bp, Homo sapien
tcgaaaggaggaaactgaagctttcataacttg

SEQ ID NO: 180543 - DNA, 33 bp, Homo sapien
gccagaagtatcgttgcaatctctataatatca

SEQ ID NO: 180544 - DNA, 33 bp, Homo sapien
gccagaagtatcgttggaatctctataatatca

SEQ ID NO: 180545 - DNA, 33 bp, Homo sapien
gagttctacatcaaaacggctccttactaatat

SEQ ID NO: 180546 - DNA, 33 bp, Homo sapien
gagttctacatcaaaatggctccttactaatat

SEQ ID NO: 180547 - DNA, 33 bp, Homo sapien
ggtcttataatacataagaaagtccaacatgtg

SEQ ID NO: 180548 - DNA, 33 bp, Homo sapien
ggtcttataatacatatgaaagtccaacatgtg

SEQ ID NO: 180549 - DNA, 33 bp, Homo sapien
aaattaacatctatcaaaagacctggaaatagt

SEQ ID NO: 180550 - DNA, 33 bp, Homo sapien
aaattaacatctatcagaagacctggaaatagt

SEQ ID NO: 180551 - DNA, 33 bp, Homo sapien
ccctaccgaagaggaacctgactgttgaaagaa

SEQ ID NO: 180552 - DNA, 33 bp, Homo sapien
ccctaccgaagaggaatctgactgttgaaagaa

SEQ ID NO: 180553 - DNA, 33 bp, Homo sapien
ttatttaataaatgtcaaaatttgagtctgaga

SEQ ID NO: 180554 - DNA, 33 bp, Homo sapien
ttatttaataaatgtcgaaatttgagtctgaga

SEQ ID NO: 180555 - DNA, 33 bp, Homo sapien
tctacaaagatcaagaaactagagcttctcttc

SEQ ID NO: 180556 - DNA, 33 bp, Homo sapien
tctacaaagatcaagatactagagcttctcttc

SEQ ID NO: 180557 - DNA, 33 bp, Homo sapien
tgtattctactactacagaagattacagacatt

SEQ ID NO: 180558 - DNA, 33 bp, Homo sapien
tgtattctactactacggaagattacagacatt

SEQ ID NO: 180559 - DNA, 33 bp, Homo sapien
tttaagttgcatataaatgttatgatgttgcat

SEQ ID NO: 180560 - DNA, 33 bp, Homo sapien
tttaagttgcatataagtgttatgatgttgcat

SEQ ID NO: 180561 - DNA, 33 bp, Homo sapien
acaggatggtgtagcacaaagagactacattta

SEQ ID NO: 180562 - DNA, 33 bp, Homo sapien
acaggatggtgtagcagaaagagactacattta

SEQ ID NO: 180563 - DNA, 33 bp, Homo sapien
tatatttctaagagataaattgctagattttag

SEQ ID NO: 180564 - DNA, 33 bp, Homo sapien
tatatttctaagagatgaattgctagattttag

SEQ ID NO: 180565 - DNA, 33 bp, Homo sapien
ttcctgaatgtaatcaatgacatctacaaagaa

SEQ ID NO: 180566 - DNA, 33 bp, Homo sapien
ttcctgaatgtaatcagtgacatctacaaagaa

SEQ ID NO: 180567 - DNA, 33 bp, Homo sapien
gtaacaatgtgccacaatgagtagctgatgtta

SEQ ID NO: 180568 - DNA, 33 bp, Homo sapien
gtaacaatgtgccacactgagtagctgatgtta

SEQ ID NO: 180569 - DNA, 33 bp, Homo sapien
tgtcttattatgcagacagagttccctagataa

SEQ ID NO: 180570 - DNA, 33 bp, Homo sapien
tgtcttattatgcagatagagttccctagataa

SEQ ID NO: 180571 - DNA, 33 bp, Homo sapien
gatggcaattgagcagacacataaactagtaag

SEQ ID NO: 180572 - DNA, 33 bp, Homo sapien
gatggcaattgagcaggcacataaactagtaag

SEQ ID NO: 180573 - DNA, 33 bp, Homo sapien
gtcctccactatatgacgttttgtattgttttt

SEQ ID NO: 180574 - DNA, 33 bp, Homo sapien
gtcctccactatatgatgttttgtattgttttt

SEQ ID NO: 180575 - DNA, 33 bp, Homo sapien
cataaactcacaattaccattatggtgtccaat

SEQ ID NO: 180576 - DNA, 33 bp, Homo sapien
cataaactcacaattatcattatggtgtccaat

SEQ ID NO: 180577 - DNA, 33 bp, Homo sapien
atgtcataaagcaaacaagcagttaatatgggg

SEQ ID NO: 180578 - DNA, 33 bp, Homo sapien
atgtcataaagcaaacgagcagttaatatgggg

SEQ ID NO: 180579 - DNA, 33 bp, Homo sapien
atgaacttttaacttacgtcctatgcattcttt

SEQ ID NO: 180580 - DNA, 33 bp, Homo sapien
atgaacttttaacttatgtcctatgcattcttt

SEQ ID NO: 180581 - DNA, 33 bp, Homo sapien
gtcagtgggacaagtacggattattcaatgaat

SEQ ID NO: 180582 - DNA, 33 bp, Homo sapien
gtcagtgggacaagtatggattattcaatgaat

SEQ ID NO: 180583 - DNA, 33 bp, Homo sapien
aagttcttgtggagccaactttgtaatgagaga

SEQ ID NO: 180584 - DNA, 33 bp, Homo sapien
aagttcttgtggagccgactttgtaatgagaga

SEQ ID NO: 180585 - DNA, 33 bp, Homo sapien
ctctcatggattttcacgtgtctgtataaatct

SEQ ID NO: 180586 - DNA, 33 bp, Homo sapien
ctctcatggattttcatgtgtctgtataaatct

SEQ ID NO: 180587 - DNA, 33 bp, Homo sapien
agattgacttaaatcacagaagctgctaattta

SEQ ID NO: 180588 - DNA, 33 bp, Homo sapien
agattgacttaaatcatagaagctgctaattta

SEQ ID NO: 180589 - DNA, 33 bp, Homo sapien
taaagataagtggagacgactcattgatcacca

SEQ ID NO: 180590 - DNA, 33 bp, Homo sapien
taaagataagtggagatgactcattgatcacca

SEQ ID NO: 180591 - DNA, 33 bp, Homo sapien
tgatcaaaaaatgaacaggcataccaagacaaa

SEQ ID NO: 180592 - DNA, 33 bp, Homo sapien
tgatcaaaaaatgaacgggcataccaagacaaa

SEQ ID NO: 180593 - DNA, 33 bp, Homo sapien
ttcttcctcagtatcaccaaaatctgttttttg

SEQ ID NO: 180594 - DNA, 33 bp, Homo sapien
ttcttcctcagtatcagcaaaatctgttttttg

SEQ ID NO: 180595 - DNA, 33 bp, Homo sapien
ttttagtttgttgtgacgagtgaccttctggca

SEQ ID NO: 180596 - DNA, 33 bp, Homo sapien
ttttagtttgttgtgatgagtgaccttctggca

SEQ ID NO: 180597 - DNA, 33 bp, Homo sapien
aaagacaggaaggttaactctcacctccatgac

SEQ ID NO: 180598 - DNA, 33 bp, Homo sapien
aaagacaggaaggttatctctcacctccatgac

SEQ ID NO: 180599 - DNA, 33 bp, Homo sapien
atgtgatataggatagacatttaatttctatta

SEQ ID NO: 180600 - DNA, 33 bp, Homo sapien
atgtgatataggataggcatttaatttctatta

SEQ ID NO: 180601 - DNA, 33 bp, Homo sapien
aatggaaatgttgccaatcctaatatgtccagt

SEQ ID NO: 180602 - DNA, 33 bp, Homo sapien
aatggaaatgttgccattcctaatatgtccagt

SEQ ID NO: 180603 - DNA, 33 bp, Homo sapien
gacaatgatatgaagacaattccagggtgattg

SEQ ID NO: 180604 - DNA, 33 bp, Homo sapien
gacaatgatatgaagagaattccagggtgattg

SEQ ID NO: 180605 - DNA, 33 bp, Homo sapien
cttacccttcaagacaaatcaaagttaccacct

SEQ ID NO: 180606 - DNA, 33 bp, Homo sapien
cttacccttcaagacagatcaaagttaccacct

SEQ ID NO: 180607 - DNA, 33 bp, Homo sapien
ctcaccgacccagacccggcagtcagaacgggg

SEQ ID NO: 180608 - DNA, 33 bp, Homo sapien
ctcaccgacccagacctggcagtcagaacgggg

SEQ ID NO: 180609 - DNA, 33 bp, Homo sapien
accctcccttctttacggaggttattgtgaggc

SEQ ID NO: 180610 - DNA, 33 bp, Homo sapien
accctcccttctttactgaggttattgtgaggc

SEQ ID NO: 180611 - DNA, 33 bp, Homo sapien
tatcaagactggcaagaatgaaaaattcaggtt

SEQ ID NO: 180612 - DNA, 33 bp, Homo sapien
tatcaagactggcaagcatgaaaaattcaggtt

SEQ ID NO: 180613 - DNA, 33 bp, Homo sapien
ggttcagcaaggtcaactggcttagccaagatc

SEQ ID NO: 180614 - DNA, 33 bp, Homo sapien
ggttcagcaaggtcaagtggcttagccaagatc

SEQ ID NO: 180615 - DNA, 33 bp, Homo sapien
tgaatctctaatgaacagtctggttggtaacat

SEQ ID NO: 180616 - DNA, 33 bp, Homo sapien
tgaatctctaatgaacggtctggttggtaacat

SEQ ID NO: 180617 - DNA, 33 bp, Homo sapien
atagatgatagttttgcagtctgagcctctctg

SEQ ID NO: 180618 - DNA, 33 bp, Homo sapien
atagatgatagttttgtagtctgagcctctctg

SEQ ID NO: 180619 - DNA, 33 bp, Homo sapien
aacacaggattcagtaagcatgaatataacatc

SEQ ID NO: 180620 - DNA, 33 bp, Homo sapien
aacacaggattcagtaggcatgaatataacatc

SEQ ID NO: 180621 - DNA, 33 bp, Homo sapien
caagacagatggcttcgctgagctggtttccac

SEQ ID NO: 180622 - DNA, 33 bp, Homo sapien
caagacagatggcttctctgagctggtttccac

SEQ ID NO: 180623 - DNA, 33 bp, Homo sapien
caccccttcaatctgacctaatttgtagccctc

SEQ ID NO: 180624 - DNA, 33 bp, Homo sapien
caccccttcaatctgatctaatttgtagccctc

SEQ ID NO: 180625 - DNA, 33 bp, Homo sapien
atttgtttccaggggacgagtgatactgggaac

SEQ ID NO: 180626 - DNA, 33 bp, Homo sapien
atttgtttccaggggaggagtgatactgggaac

SEQ ID NO: 180627 - DNA, 33 bp, Homo sapien
atcttatccttgttcacacaggggttctcaact

SEQ ID NO: 180628 - DNA, 33 bp, Homo sapien
atcttatccttgttcagacaggggttctcaact

SEQ ID NO: 180629 - DNA, 33 bp, Homo sapien
tgacttataccagttacgtatcaaatgtacagc

SEQ ID NO: 180630 - DNA, 33 bp, Homo sapien
tgacttataccagttatgtatcaaatgtacagc

SEQ ID NO: 180631 - DNA, 33 bp, Homo sapien
tagtgtctgcattttacagatgaagataggagg

SEQ ID NO: 180632 - DNA, 33 bp, Homo sapien
tagtgtctgcattttatagatgaagataggagg

SEQ ID NO: 180633 - DNA, 33 bp, Homo sapien
gaagcttaagtatgtgaaacggactcagggaca

SEQ ID NO: 180634 - DNA, 33 bp, Homo sapien
gaagcttaagtatgtggaacggactcagggaca

SEQ ID NO: 180635 - DNA, 33 bp, Homo sapien
taaagatatagtttacacattatgctttatatt

SEQ ID NO: 180636 - DNA, 33 bp, Homo sapien
taaagatatagtttacccattatgctttatatt

SEQ ID NO: 180637 - DNA, 33 bp, Homo sapien
agttttcctttgtaaccggtgccaaagataggt

SEQ ID NO: 180638 - DNA, 33 bp, Homo sapien
agttttcctttgtaactggtgccaaagataggt

SEQ ID NO: 180639 - DNA, 33 bp, Homo sapien
atacctcatagtgccacacgtatatacatgtat

SEQ ID NO: 180640 - DNA, 33 bp, Homo sapien
atacctcatagtgccatacgtatatacatgtat

SEQ ID NO: 180641 - DNA, 33 bp, Homo sapien
gctgaccccaccttataacccacaaagtgccag

SEQ ID NO: 180642 - DNA, 33 bp, Homo sapien
gctgaccccaccttatgacccacaaagtgccag

SEQ ID NO: 180643 - DNA, 33 bp, Homo sapien
tctggaggtgatgtggaaggatgacttgcacct

SEQ ID NO: 180644 - DNA, 33 bp, Homo sapien
tctggaggtgatgtgggaggatgacttgcacct

SEQ ID NO: 180645 - DNA, 33 bp, Homo sapien
ataaatatttcccaaacgcctctcagtgaaaag

SEQ ID NO: 180646 - DNA, 33 bp, Homo sapien
ataaatatttcccaaatgcctctcagtgaaaag

SEQ ID NO: 180647 - DNA, 33 bp, Homo sapien
gagaaacttgttaataggaaaacacgctttttc

SEQ ID NO: 180648 - DNA, 33 bp, Homo sapien
gagaaacttgttaatatgaaaacacgctttttc

SEQ ID NO: 180649 - DNA, 33 bp, Homo sapien
agggtcacagagataacagtgatggatctagga

SEQ ID NO: 180650 - DNA, 33 bp, Homo sapien
agggtcacagagataatagtgatggatctagga

SEQ ID NO: 180651 - DNA, 33 bp, Homo sapien
tatacctgtttagaaaagagacatacgaaagtg

SEQ ID NO: 180652 - DNA, 33 bp, Homo sapien
tatacctgtttagaaaggagacatacgaaagtg

SEQ ID NO: 180653 - DNA, 33 bp, Homo sapien
acttattgtagaaaacggggggcaagacaagta

SEQ ID NO: 180654 - DNA, 33 bp, Homo sapien
acttattgtagaaaactgggggcaagacaagta

SEQ ID NO: 180655 - DNA, 33 bp, Homo sapien
ctacctgggacataaaatgactacctcggaaat

SEQ ID NO: 180656 - DNA, 33 bp, Homo sapien
ctacctgggacataaagtgactacctcggaaat

SEQ ID NO: 180657 - DNA, 33 bp, Homo sapien
tcaatctttaggccgaatatcatgttgctgaat

SEQ ID NO: 180658 - DNA, 33 bp, Homo sapien
tcaatctttaggccgagtatcatgttgctgaat

SEQ ID NO: 180659 - DNA, 33 bp, Homo sapien
catttatttggatttcccttgtatgaaatgata

SEQ ID NO: 180660 - DNA, 33 bp, Homo sapien
catttatttggatttctcttgtatgaaatgata

SEQ ID NO: 180661 - DNA, 33 bp, Homo sapien
ttgtttgattcagtcaactaaagttcatttatt

SEQ ID NO: 180662 - DNA, 33 bp, Homo sapien
ttgtttgattcagtcatctaaagttcatttatt

SEQ ID NO: 180663 - DNA, 33 bp, Homo sapien
agggtcctattttgtacagtgtatcatataata

SEQ ID NO: 180664 - DNA, 33 bp, Homo sapien
agggtcctattttgtatagtgtatcatataata

SEQ ID NO: 180665 - DNA, 33 bp, Homo sapien
taatagacagtgtaaaacagcaaaagcaataca

SEQ ID NO: 180666 - DNA, 33 bp, Homo sapien
taatagacagtgtaaatcagcaaaagcaataca

SEQ ID NO: 180667 - DNA, 33 bp, Homo sapien
ttaaaagtcatttccacttaaaaaaatgagaac

SEQ ID NO: 180668 - DNA, 33 bp, Homo sapien
ttaaaagtcatttccagttaaaaaaatgagaac

SEQ ID NO: 180669 - DNA, 33 bp, Homo sapien
tctagttcctctagcactgaaacatctccatgc

SEQ ID NO: 180670 - DNA, 33 bp, Homo sapien
tctagttcctctagcattgaaacatctccatgc

SEQ ID NO: 180671 - DNA, 33 bp, Homo sapien
attgctcctcacaagaggacattagctgcaggg

SEQ ID NO: 180672 - DNA, 33 bp, Homo sapien
attgctcctcacaagatgacattagctgcaggg

SEQ ID NO: 180673 - DNA, 33 bp, Homo sapien
aacctttttggaaggccgcaagattacatagat

SEQ ID NO: 180674 - DNA, 33 bp, Homo sapien
aacctttttggaaggctgcaagattacatagat

SEQ ID NO: 180675 - DNA, 33 bp, Homo sapien
atatggaagaaaccagaaatagtgaaatttggg

SEQ ID NO: 180676 - DNA, 33 bp, Homo sapien
atatggaagaaaccaggaatagtgaaatttggg

SEQ ID NO: 180677 - DNA, 33 bp, Homo sapien
taagttaacgactgtacaacgttcattcctttc

SEQ ID NO: 180678 - DNA, 33 bp, Homo sapien
taagttaacgactgtataacgttcattcctttc

SEQ ID NO: 180679 - DNA, 33 bp, Homo sapien
gttttgttgattgtcacggataaaggtacaact

SEQ ID NO: 180680 - DNA, 33 bp, Homo sapien
gttttgttgattgtcatggataaaggtacaact

SEQ ID NO: 180681 - DNA, 33 bp, Homo sapien
taagttgcttactttacgccaaaaattagctag

SEQ ID NO: 180682 - DNA, 33 bp, Homo sapien
taagttgcttactttaggccaaaaattagctag

SEQ ID NO: 180683 - DNA, 33 bp, Homo sapien
gatgaatggaaagcacccttctctattgggtga

SEQ ID NO: 180684 - DNA, 33 bp, Homo sapien
gatgaatggaaagcacgcttctctattgggtga

SEQ ID NO: 180685 - DNA, 33 bp, Homo sapien
tggtctcaaggggtgacacatcccattaatctg

SEQ ID NO: 180686 - DNA, 33 bp, Homo sapien
tggtctcaaggggtgatacatcccattaatctg

SEQ ID NO: 180687 - DNA, 33 bp, Homo sapien
aagtttaaagaaatctcacttcctagatagcct

SEQ ID NO: 180688 - DNA, 33 bp, Homo sapien
aagtttaaagaaatctgacttcctagatagcct

SEQ ID NO: 180689 - DNA, 33 bp, Homo sapien
cgtaactcacaaacacacttccaaactctgttt

SEQ ID NO: 180690 - DNA, 33 bp, Homo sapien
cgtaactcacaaacacgcttccaaactctgttt

SEQ ID NO: 180691 - DNA, 33 bp, Homo sapien
taaggcctatttctcagaagtcacattttgttg

SEQ ID NO: 180692 - DNA, 33 bp, Homo sapien
taaggcctatttctcataagtcacattttgttg

SEQ ID NO: 180693 - DNA, 33 bp, Homo sapien
aagagacaaatggaacaatgatggaatcacgca

SEQ ID NO: 180694 - DNA, 33 bp, Homo sapien
aagagacaaatggaacgatgatggaatcacgca

SEQ ID NO: 180695 - DNA, 33 bp, Homo sapien
taagcaactggattcaacgtaccactaatggcc

SEQ ID NO: 180696 - DNA, 33 bp, Homo sapien
taagcaactggattcaccgtaccactaatggcc

SEQ ID NO: 180697 - DNA, 33 bp, Homo sapien
tgaaggacttatggaaaagacaaataacagcag

SEQ ID NO: 180698 - DNA, 33 bp, Homo sapien
tgaaggacttatggaagagacaaataacagcag

SEQ ID NO: 180699 - DNA, 33 bp, Homo sapien
tttcctgtgacaatgaatattacagtacaaaaa

SEQ ID NO: 180700 - DNA, 33 bp, Homo sapien
tttcctgtgacaatgattattacagtacaaaaa

SEQ ID NO: 180701 - DNA, 33 bp, Homo sapien
gtagaatttgtatttaagttgataaggtaacag

SEQ ID NO: 180702 - DNA, 33 bp, Homo sapien
gtagaatttgtatttaggttgataaggtaacag

SEQ ID NO: 180703 - DNA, 33 bp, Homo sapien
tgtgttatagtgggaaaaagactggattcagag

SEQ ID NO: 180704 - DNA, 33 bp, Homo sapien
tgtgttatagtgggaagaagactggattcagag

SEQ ID NO: 180705 - DNA, 33 bp, Homo sapien
attatatgacaaaacccaagcaagtatagtttc

SEQ ID NO: 180706 - DNA, 33 bp, Homo sapien
attatatgacaaaaccgaagcaagtatagtttc

SEQ ID NO: 180707 - DNA, 33 bp, Homo sapien
aattacttatacttctaaactcagtaacaatcc

SEQ ID NO: 180708 - DNA, 33 bp, Homo sapien
aattacttatacttctgaactcagtaacaatcc

SEQ ID NO: 180709 - DNA, 33 bp, Homo sapien
tgttttgtcaagtagagtaggaactggttttcc

SEQ ID NO: 180710 - DNA, 33 bp, Homo sapien
tgttttgtcaagtagattaggaactggttttcc

SEQ ID NO: 180711 - DNA, 33 bp, Homo sapien
cttccctttatctctaacttatcactaatctat

SEQ ID NO: 180712 - DNA, 33 bp, Homo sapien
cttccctttatctctatcttatcactaatctat

SEQ ID NO: 180713 - DNA, 33 bp, Homo sapien
ctatgttgctaattccaaagtaactgctttgac

SEQ ID NO: 180714 - DNA, 33 bp, Homo sapien
ctatgttgctaattcctaagtaactgctttgac

SEQ ID NO: 180715 - DNA, 33 bp, Homo sapien
ttctgaaacaggtatacgttactttcacacagg

SEQ ID NO: 180716 - DNA, 33 bp, Homo sapien
ttctgaaacaggtatatgttactttcacacagg

SEQ ID NO: 180717 - DNA, 33 bp, Homo sapien
gcagtctccaacaacaaagaattacctgattca

SEQ ID NO: 180718 - DNA, 33 bp, Homo sapien
gcagtctccaacaacagagaattacctgattca

SEQ ID NO: 180719 - DNA, 33 bp, Homo sapien
caagaacatggtctcaactataacctaaatgtc

SEQ ID NO: 180720 - DNA, 33 bp, Homo sapien
caagaacatggtctcatctataacctaaatgtc

SEQ ID NO: 180721 - DNA, 33 bp, Homo sapien
ttgtggatttgtaagtcaaacaaaggctcattt

SEQ ID NO: 180722 - DNA, 33 bp, Homo sapien
ttgtggatttgtaagtgaaacaaaggctcattt

SEQ ID NO: 180723 - DNA, 33 bp, Homo sapien
caactgcagtaatggcagatgtagcaccaaata

SEQ ID NO: 180724 - DNA, 33 bp, Homo sapien
caactgcagtaatggcggatgtagcaccaaata

SEQ ID NO: 180725 - DNA, 33 bp, Homo sapien
tctctatcctcatacacctcataaccatacacc

SEQ ID NO: 180726 - DNA, 33 bp, Homo sapien
tctctatcctcatacatctcataaccatacacc

SEQ ID NO: 180727 - DNA, 33 bp, Homo sapien
tcattttaggagacaactcctctatcacctttc

SEQ ID NO: 180728 - DNA, 33 bp, Homo sapien
tcattttaggagacaattcctctatcacctttc

SEQ ID NO: 180729 - DNA, 33 bp, Homo sapien
gacaatacgcaaactaagcacccataagatatt

SEQ ID NO: 180730 - DNA, 33 bp, Homo sapien
gacaatacgcaaactaggcacccataagatatt

SEQ ID NO: 180731 - DNA, 33 bp, Homo sapien
caaaagaattaacacaatgtcaggacaaactgt

SEQ ID NO: 180732 - DNA, 33 bp, Homo sapien
caaaagaattaacacagtgtcaggacaaactgt

SEQ ID NO: 180733 - DNA, 33 bp, Homo sapien
ttcagaaggatctgaactggagagtcagggtat

SEQ ID NO: 180734 - DNA, 33 bp, Homo sapien
ttcagaaggatctgaattggagagtcagggtat

SEQ ID NO: 180735 - DNA, 33 bp, Homo sapien
gattatagagttcacaaggtatttcaaagccat

SEQ ID NO: 180736 - DNA, 33 bp, Homo sapien
gattatagagttcacagggtatttcaaagccat

SEQ ID NO: 180737 - DNA, 33 bp, Homo sapien
ctgcactggctactaacgtgcaccataaattcc

SEQ ID NO: 180738 - DNA, 33 bp, Homo sapien
ctgcactggctactaatgtgcaccataaattcc

SEQ ID NO: 180739 - DNA, 33 bp, Homo sapien
ctcttatcctacgtcactaaatgaaaaggcaat

SEQ ID NO: 180740 - DNA, 33 bp, Homo sapien
ctcttatcctacgtcattaaatgaaaaggcaat

SEQ ID NO: 180741 - DNA, 33 bp, Homo sapien
acattttggctaagtaaattcttataagggaaa

SEQ ID NO: 180742 - DNA, 33 bp, Homo sapien
acattttggctaagtacattcttataagggaaa

SEQ ID NO: 180743 - DNA, 33 bp, Homo sapien
ctgacatatgaaagaccgagtgtagaacatgtt

SEQ ID NO: 180744 - DNA, 33 bp, Homo sapien
ctgacatatgaaagactgagtgtagaacatgtt

SEQ ID NO: 180745 - DNA, 33 bp, Homo sapien
gttatactgtggaatgcatcttgaagatcacct

SEQ ID NO: 180746 - DNA, 33 bp, Homo sapien
gttatactgtggaatgtatcttgaagatcacct

SEQ ID NO: 180747 - DNA, 33 bp, Homo sapien
ttgtccagcacattaactgaggttctcagactg

SEQ ID NO: 180748 - DNA, 33 bp, Homo sapien
ttgtccagcacattaattgaggttctcagactg

SEQ ID NO: 180749 - DNA, 33 bp, Homo sapien
ctctttctgctgttataaagagtgcatgctgtc

SEQ ID NO: 180750 - DNA, 33 bp, Homo sapien
ctctttctgctgttattaagagtgcatgctgtc

SEQ ID NO: 180751 - DNA, 33 bp, Homo sapien
ggttgttagtcattagaaataccactatggact

SEQ ID NO: 180752 - DNA, 33 bp, Homo sapien
ggttgttagtcattaggaataccactatggact

SEQ ID NO: 180753 - DNA, 33 bp, Homo sapien
actttctgctctacatcaataggagaagcttcc

SEQ ID NO: 180754 - DNA, 33 bp, Homo sapien
actttctgctctacatgaataggagaagcttcc

SEQ ID NO: 180755 - DNA, 33 bp, Homo sapien
ggatttaggcaagggggcaacatcaataggttt

SEQ ID NO: 180756 - DNA, 33 bp, Homo sapien
ggatttaggcaaggggtcaacatcaataggttt

SEQ ID NO: 180757 - DNA, 33 bp, Homo sapien
ggggaaggttagcaggcagaataagaggagtag

SEQ ID NO: 180758 - DNA, 33 bp, Homo sapien
ggggaaggttagcagggagaataagaggagtag

SEQ ID NO: 180759 - DNA, 33 bp, Homo sapien
tgcaggttttgattccacagatctgggtgggac

SEQ ID NO: 180760 - DNA, 33 bp, Homo sapien
tgcaggttttgattccgcagatctgggtgggac

SEQ ID NO: 180761 - DNA, 33 bp, Homo sapien
aaggaagtacctcctacgatatgcaagacaaaa

SEQ ID NO: 180762 - DNA, 33 bp, Homo sapien
aaggaagtacctcctatgatatgcaagacaaaa

SEQ ID NO: 180763 - DNA, 33 bp, Homo sapien
aaggcttcctggaagacgtgggacttaagctag

SEQ ID NO: 180764 - DNA, 33 bp, Homo sapien
aaggcttcctggaagaggtgggacttaagctag

SEQ ID NO: 180765 - DNA, 33 bp, Homo sapien
tcacccgtgatccatgaacaaattggtggacaa

SEQ ID NO: 180766 - DNA, 33 bp, Homo sapien
tcacccgtgatccatggacaaattggtggacaa

SEQ ID NO: 180767 - DNA, 33 bp, Homo sapien
agtagtcctggcaagaaatgattgatggagatc

SEQ ID NO: 180768 - DNA, 33 bp, Homo sapien
agtagtcctggcaagagatgattgatggagatc

SEQ ID NO: 180769 - DNA, 33 bp, Homo sapien
acctagtacaatccccacacattacaaatgaga

SEQ ID NO: 180770 - DNA, 33 bp, Homo sapien
acctagtacaatccccgcacattacaaatgaga

SEQ ID NO: 180771 - DNA, 33 bp, Homo sapien
tggttccatttttctgaagaaccctgactaata

SEQ ID NO: 180772 - DNA, 33 bp, Homo sapien
tggttccatttttctggagaaccctgactaata

SEQ ID NO: 180773 - DNA, 33 bp, Homo sapien
tgctacagacacaacaatggtgaacagggagtg

SEQ ID NO: 180774 - DNA, 33 bp, Homo sapien
tgctacagacacaacagtggtgaacagggagtg

SEQ ID NO: 180775 - DNA, 33 bp, Homo sapien
ttactgcctgagactccaagtttgaagcaaatg

SEQ ID NO: 180776 - DNA, 33 bp, Homo sapien
ttactgcctgagactctaagtttgaagcaaatg

SEQ ID NO: 180777 - DNA, 33 bp, Homo sapien
ctattgagtccttaataaactactgagttgtat

SEQ ID NO: 180778 - DNA, 33 bp, Homo sapien
ctattgagtccttaatcaactactgagttgtat

SEQ ID NO: 180779 - DNA, 33 bp, Homo sapien
acaaacagaagtgcaaacaaaccagttttattg

SEQ ID NO: 180780 - DNA, 33 bp, Homo sapien
acaaacagaagtgcaagcaaaccagttttattg

SEQ ID NO: 180781 - DNA, 33 bp, Homo sapien
cttgccaaagaagataaactgatgataaataag

SEQ ID NO: 180782 - DNA, 33 bp, Homo sapien
cttgccaaagaagatagactgatgataaataag

SEQ ID NO: 180783 - DNA, 33 bp, Homo sapien
gcaccttgagaaaaggaactatgtcttaatttt

SEQ ID NO: 180784 - DNA, 33 bp, Homo sapien
gcaccttgagaaaagggactatgtcttaatttt

SEQ ID NO: 180785 - DNA, 33 bp, Homo sapien
atagttttaaaacttcactgtattatattcaag

SEQ ID NO: 180786 - DNA, 33 bp, Homo sapien
atagttttaaaacttcgctgtattatattcaag

SEQ ID NO: 180787 - DNA, 33 bp, Homo sapien
acagtgggttttctaacgctcttcaactcatat

SEQ ID NO: 180788 - DNA, 33 bp, Homo sapien
acagtgggttttctaatgctcttcaactcatat

SEQ ID NO: 180789 - DNA, 33 bp, Homo sapien
acaagtattaactgtgcattgctttgagcttag

SEQ ID NO: 180790 - DNA, 33 bp, Homo sapien
acaagtattaactgtgtattgctttgagcttag

SEQ ID NO: 180791 - DNA, 33 bp, Homo sapien
ttattttacttctgatcacttaatttacccatc

SEQ ID NO: 180792 - DNA, 33 bp, Homo sapien
ttattttacttctgatgacttaatttacccatc

SEQ ID NO: 180793 - DNA, 33 bp, Homo sapien
aaaaggtggagagaaaaagagattaaaatacca

SEQ ID NO: 180794 - DNA, 33 bp, Homo sapien
aaaaggtggagagaaagagagattaaaatacca

SEQ ID NO: 180795 - DNA, 33 bp, Homo sapien
tagtatatttaagataggattgcgattaaaata

SEQ ID NO: 180796 - DNA, 33 bp, Homo sapien
tagtatatttaagatatgattgcgattaaaata

SEQ ID NO: 180797 - DNA, 33 bp, Homo sapien
gatatattctaggcaacgtcaaagaaaaaggag

SEQ ID NO: 180798 - DNA, 33 bp, Homo sapien
gatatattctaggcaaggtcaaagaaaaaggag

SEQ ID NO: 180799 - DNA, 33 bp, Homo sapien
ttctgatcggattagcagaggctccaatatgcg

SEQ ID NO: 180800 - DNA, 33 bp, Homo sapien
ttctgatcggattagcggaggctccaatatgcg

SEQ ID NO: 180801 - DNA, 33 bp, Homo sapien
cttcaagacatagctaagaccttgagggcaagg

SEQ ID NO: 180802 - DNA, 33 bp, Homo sapien
cttcaagacatagctaggaccttgagggcaagg

SEQ ID NO: 180803 - DNA, 33 bp, Homo sapien
tgaaatgaggttgttacaatagatgatctgtta

SEQ ID NO: 180804 - DNA, 33 bp, Homo sapien
tgaaatgaggttgttataatagatgatctgtta

SEQ ID NO: 180805 - DNA, 33 bp, Homo sapien
cttattttttgaatgcccgttgcttaacacact

SEQ ID NO: 180806 - DNA, 33 bp, Homo sapien
cttattttttgaatgctcgttgcttaacacact

SEQ ID NO: 180807 - DNA, 33 bp, Homo sapien
gcggtgattggtttaggatcagccccataacct

SEQ ID NO: 180808 - DNA, 33 bp, Homo sapien
gcggtgattggtttagtatcagccccataacct

SEQ ID NO: 180809 - DNA, 33 bp, Homo sapien
tagaatcatgagttaaataaattgctgtcctaa

SEQ ID NO: 180810 - DNA, 33 bp, Homo sapien
tagaatcatgagttaattaaattgctgtcctaa

SEQ ID NO: 180811 - DNA, 33 bp, Homo sapien
atttctctttatcttacgagtaggttcacaggg

SEQ ID NO: 180812 - DNA, 33 bp, Homo sapien
atttctctttatcttaggagtaggttcacaggg

SEQ ID NO: 180813 - DNA, 33 bp, Homo sapien
tatttagagacttagaacataccaacattaaac

SEQ ID NO: 180814 - DNA, 33 bp, Homo sapien
tatttagagacttagagcataccaacattaaac

SEQ ID NO: 180815 - DNA, 33 bp, Homo sapien
atgccattaaagtatgcactatagagatctgat

SEQ ID NO: 180816 - DNA, 33 bp, Homo sapien
atgccattaaagtatgtactatagagatctgat

SEQ ID NO: 180817 - DNA, 33 bp, Homo sapien
gcttttatcagagagcacaaatcataagaaatt

SEQ ID NO: 180818 - DNA, 33 bp, Homo sapien
gcttttatcagagagcgcaaatcataagaaatt

SEQ ID NO: 180819 - DNA, 33 bp, Homo sapien
ctgttagctaccaggtaaaaaaggatgtataga

SEQ ID NO: 180820 - DNA, 33 bp, Homo sapien
ctgttagctaccaggttaaaaaggatgtataga

SEQ ID NO: 180821 - DNA, 33 bp, Homo sapien
cagcaagagctgaagtcaaagtcaaactactat

SEQ ID NO: 180822 - DNA, 33 bp, Homo sapien
cagcaagagctgaagtgaaagtcaaactactat

SEQ ID NO: 180823 - DNA, 33 bp, Homo sapien
gacaatcaggaaggtcaaaaggaacacagccag

SEQ ID NO: 180824 - DNA, 33 bp, Homo sapien
gacaatcaggaaggtcgaaaggaacacagccag

SEQ ID NO: 180825 - DNA, 33 bp, Homo sapien
caaaggaacattaagaatcaaagtcaattgagg

SEQ ID NO: 180826 - DNA, 33 bp, Homo sapien
caaaggaacattaagagtcaaagtcaattgagg

SEQ ID NO: 180827 - DNA, 33 bp, Homo sapien
agtgagtaaggcaatacggtgcaatggaaagaa

SEQ ID NO: 180828 - DNA, 33 bp, Homo sapien
agtgagtaaggcaatatggtgcaatggaaagaa

SEQ ID NO: 180829 - DNA, 33 bp, Homo sapien
aggagggaaataattacagtgggtcaaagaaca

SEQ ID NO: 180830 - DNA, 33 bp, Homo sapien
aggagggaaataattatagtgggtcaaagaaca

SEQ ID NO: 180831 - DNA, 33 bp, Homo sapien
cctagtactccatacccgaggccaaagaaatcc

SEQ ID NO: 180832 - DNA, 33 bp, Homo sapien
cctagtactccatacctgaggccaaagaaatcc

SEQ ID NO: 180833 - DNA, 33 bp, Homo sapien
ataagtgtactgaaaacacagggaaccattaca

SEQ ID NO: 180834 - DNA, 33 bp, Homo sapien
ataagtgtactgaaaagacagggaaccattaca

SEQ ID NO: 180835 - DNA, 33 bp, Homo sapien
ctgcttctgaaagaggaacaataaaacttccca

SEQ ID NO: 180836 - DNA, 33 bp, Homo sapien
ctgcttctgaaagagggacaataaaacttccca

SEQ ID NO: 180837 - DNA, 33 bp, Homo sapien
cacaatttcctctgtaccgctgctacatatcct

SEQ ID NO: 180838 - DNA, 33 bp, Homo sapien
cacaatttcctctgtatcgctgctacatatcct

SEQ ID NO: 180839 - DNA, 33 bp, Homo sapien
gagaagaaagacaaacagagtactcagacaaga

SEQ ID NO: 180840 - DNA, 33 bp, Homo sapien
gagaagaaagacaaacggagtactcagacaaga

SEQ ID NO: 180841 - DNA, 33 bp, Homo sapien
cttcatctttctgaaactcagtttgctcatcag

SEQ ID NO: 180842 - DNA, 33 bp, Homo sapien
cttcatctttctgaaattcagtttgctcatcag

SEQ ID NO: 180843 - DNA, 33 bp, Homo sapien
acagtgctgagcctgaccatgatatagtccagc

SEQ ID NO: 180844 - DNA, 33 bp, Homo sapien
acagtgctgagcctgatcatgatatagtccagc

SEQ ID NO: 180845 - DNA, 33 bp, Homo sapien
atgatgacctggataacagagaggctgcagggg

SEQ ID NO: 180846 - DNA, 33 bp, Homo sapien
atgatgacctggataagagagaggctgcagggg

SEQ ID NO: 180847 - DNA, 33 bp, Homo sapien
gattttaaataaggcacatcaagcatcttaatg

SEQ ID NO: 180848 - DNA, 33 bp, Homo sapien
gattttaaataaggcatatcaagcatcttaatg

SEQ ID NO: 180849 - DNA, 33 bp, Homo sapien
ttcacagttgaatgggaacacaggaaaataaaa

SEQ ID NO: 180850 - DNA, 33 bp, Homo sapien
ttcacagttgaatggggacacaggaaaataaaa

SEQ ID NO: 180851 - DNA, 33 bp, Homo sapien
ttctcattcatctccacatctggtctattatta

SEQ ID NO: 180852 - DNA, 33 bp, Homo sapien
ttctcattcatctccatatctggtctattatta

SEQ ID NO: 180853 - DNA, 33 bp, Homo sapien
actgggagagtacttacgatggataaatgaggc

SEQ ID NO: 180854 - DNA, 33 bp, Homo sapien
actgggagagtacttatgatggataaatgaggc

SEQ ID NO: 180855 - DNA, 33 bp, Homo sapien
ggaatttgactcttcaaactggaaagggtatac

SEQ ID NO: 180856 - DNA, 33 bp, Homo sapien
ggaatttgactcttcacactggaaagggtatac

SEQ ID NO: 180857 - DNA, 33 bp, Homo sapien
agtctggagctcaagaagagttctggtgcagaa

SEQ ID NO: 180858 - DNA, 33 bp, Homo sapien
agtctggagctcaagaggagttctggtgcagaa
